United States Patent Application Publication US 2008/0034453 A1 - sequence listing, part 5

SEQ ID NO: 35992 - DNA, 292 bp, Zea mays
cccacgcgtccggcttctgctatgtcgccgatatggttgatggtcttattaggctgatgaacggaaacaacactggaccgattaacttggggaacccaggtgaattcaccatgctggaacttgctgagaatgtgaaggagttgattaacccagatataacagtgacgatgaccgagaacactcctgatgatccccgccagaggaagccggacatcaccaaggcaaaggaagttctagggtgggagcccaagatcgtcctgaaggacggcttggtgctcatggaggatgattt

SEQ ID NO: 35993 - DNA, 293 bp, Zea mays
accattttcgctaatctccctccaccgagccggccgaatcaaatcgaaccgcgggcagcgcgcacgcgagcgactgccggcgatggcgagcctcaccctgccgccggcgccccccaacccacgccaggacgccatcgacctccacaaggccttcaaagggtttggatgtgacagtacaacagtgataaacatacttcctcatcgcgattcggtgcagcgtggactcattcaacaggaatacagggctatgtatcatgaggaactctcccaccgtatttcatctgaactcagtg

SEQ ID NO: 35994 - DNA, 292 bp, Zea mays
gcaccaccaccttgcaccgcacccgcaccgagacgaacagatcgaccatggctgccggcggcgacgacaccaccatcgcgcaggtccacagcggcatcgacagcagcaacaagacgctgctcaagagcgaggccctctacaagtacgtgctggacacgtcggtgctgccgcacgagccggagagcatgcgtgagctgcggctggtgaccgacaagcacgagtgggggttcatgcagtcgtccccggacgaggcgtcgctgctgcggatgctgatcaagctgagcggcgcgcg

SEQ ID NO: 35995 - DNA, 287 bp, Zea mays
cgcacacacacgcaaccagatctcccccaaatccagccgtcggcacctccgcttcaagatgcagatctttgtgaaaaccctgactggcaagactatcaccctcgaggtggagtcgtctgacaccattgacaacgttaaggccaagatccaggacaaggagggcatccccccagaccagcagcggctcatcttcgctggcaaacagcttgaggacgggcgcacgcttgctgactacaacatccagaaggagagcacctccaccttgtgctccgcctcaggggaggcat

SEQ ID NO: 35996 - DNA, 286 bp, Zea mays
gattccaacatattcaagtggactgctcttatcaagggcccttctgaaacaccttatgaaggtggtgtgtttcaacttgcgttcgcaattccagagcagtatcctctactgcctcctcaagttcgatttttaaccaaaattttccacccaaatgtgcatttcaagacaggtgaaatttgtcttgatatattgaagaatgcatggagccctgcatggacccttcagtctgtttgtagagcgataattgctctgatggcccatcctgaaccagacagcccacttaact

SEQ ID NO: 35997 - DNA, 286 bp, Zea mays
atcgccatcctccgcaccgccgagcacccggccgtggtgcgctgccacggcatgtacgagcaggccggggagctccagatcctgctggagtacatggaccaggggtcgctcgagagccaccgcatcgccgacgagcgcttcctggcgcacgtggcgcgccaggtgctgtcgggcatcgcctacctccaccgccgccacatcgtgcaccgcgacatcaagccctccaacctgctcatcgactccgggcgccgcgtcaagatcgccgacttcggcgtgggccgcatcc

SEQ ID NO: 35998 - DNA, 285 bp, Zea mays
cagttccaaaagcgaccagggtgaaggctatagccgaaatatttgctgacgctgggttttcagatgttacaaagaatttcttggctgtcctggcggacaatggcaggctgaaatatattgaacgcattgcggagagatttgttgatttgactatggaacataagggggagatgaaggttgtggtcaggacagttatttcactcaccaaggaggaggagaaagaactcaaggaaaccttgcaggatatccttggggaaaacaaaactattttggttgaacagaaga

SEQ ID NO: 35999 - DNA, 286 bp, Zea mays
cgcgccgccaccaagtccatcgagcgcgaggtcaactccgtgaacgacaacccggtcatcgacgtccaccgcggcaaggcgctgcacggcggcaacttccagggcacccccatcggcgtgtccatggacaacgcccgcctcgccatcgccaacatcggcaagctcatgttcgcgcagttctccgagctcgtcaacgagttctacaacaacgggctcacctccaacctggccggcagccgcaaccccagcctggactacggcttcaagggcaccgagatcgccatgg

SEQ ID NO: 36000 - DNA, 284 bp, Zea mays
cacattccttgttgggcattcagtgacacttgcggatattgtgctgacatgcaatctttatatgggctttagccgtatcttgactaagagttttacctcagagttccctcatattgagaggtacttctggaccatggttaaccagccaaacttcaaaaaggtcattggtgacgtgaagcaggcagaagctgtgccacttcttccaaagaagattgctccggccaaagagcagaagcctaaggaagccaaaaaggaggccccgaagcctaaggaagctgagaaac

SEQ ID NO: 36001 - DNA, 280 bp, Zea mays
gccttgtgcagagcttgcagacagcattgttcagtgtggccgtagaacactcgaaacagcaatatcatttgtcaaccagcatcctttgtggaaagctagggttgtttatggtgatactgacagtatgtttgttctcctaaaagggcgttctagggaagaagcattcaggatagggaaggagatcgcctcatcaataactgcaatgaatcctgatccagtcacattaaagtttgagaaagtgtaccagccatgcttccttcttacaaagaagagatatgtt

SEQ ID NO: 36002 - DNA, 282 bp, Zea mays
gtcagtcagtcctcgatctgatatcctctcctccctgcagcgactccagctccgatcgattccattccatccatcgagctgcagcagggccatgacgatggcagctacgacgacgatgatgtcagcagcagcgcaggcggcgacgtcgcagctgccgccggggttccggttccacccgacggacgaggagctcatcctgcactacctccgcaaccgcgccgcgtcggcgccgtgccccgtgcccatcatcgccgacgtcgacatctacaagttcgacccatg

SEQ ID NO: 36003 - DNA, 280 bp, Zea mays
cgcgagcggccgctcgcgatctagaactagtgttctatatgatatgttgcaaaaggaggtcatttctctaaggaaggcgtgccacgaaaaggatcagagcctgaaagacaaggacgacgcagttgagatgttggcaaagaaagtagatactttgacaaaagctatggagtcagatgccaagaaatcgaggcgcgagctagctgctatggagaaggagctggcagctgtgcgcttggagaaagagcaggataacagggccagacgttttggtagttcaagc

SEQ ID NO: 36004 - DNA, 249 bp, Zea mays
aaattcaaaagtgcacttgaggctgtgaaaacactgagagcacagcccaaagccaatgatcagtacttgcccccatttgtgatagttgatgacagtggcaatgctgttgggcctgtattagatggtgatgcagttgtcactatcaacttccgagctgatcgcatggttatgcttgcgaaagcactagagtatgcagattttgacaactttgaccgtgttcgtgtccccaaaatccgatatgctgggatg

SEQ ID NO: 36005 - DNA, 258 bp, Zea mays
cgacctcaagagcgccatcaagtaccaccggaacctgacgtccagaggctaccgcgccctggtgtacagcggcgaccatgacctgctggtgccacacctgggcacccaggcatgggtcaggtccctcaacttccccgtcgtcgacgactggagggcgtggcatctcggtggccaagccgtcgggttcacgataaattactcaaaccacatgacgttcgcgacgatcaaacgtggcgggcacacggcgccggaatacga

SEQ ID NO: 36006 - DNA, 68 bp, Zea mays
gttggcttctcctcaccctcaggttcgggtacaggttcgtgaggatctcagaagttcggtttcatggg

SEQ ID NO: 36007 - DNA, 261 bp, Zea mays
atcaactaatcacaaatgctttaacaaaccagaagagatgggcattgaggaagatgtcatcaggaagcatacaaccccagcctacaggcccccagagatgtgggatctctacagaagagaagttattagcgaaaaagttgacatttgggctttggggtgccttctatatagaatatgctacttcaagtctgcatttgatggagaatccaagttgcagatactcaatggcaattatcgtatccctgagcaacccaagtatag

SEQ ID NO: 36008 - DNA, 259 bp, Zea mays
cccacgcgtccgcaccgagctgcctgctacacccctgccaagatccatctttccggttccgccgcctgatcgaagtgaacaagcaaggaagagccatggcgagcgagcacgcggcggggggcgatgctaagcatcaccagaagcagagcctgatggacaaggcgaaggggttcgtcgcggagaagatcgcgcacatccccaagcccgaggccacgctggacggcgtgacgttcaagggcctgagccgggagtgcatcac

SEQ ID NO: 36009 - DNA, 261 bp, Zea mays
ccacgctgctcatccacgagggtgtcaaggccgaggaggagtacgagaagaccggcaagatccccgacccggagtccaccgacaacgctgagttcaagatcgtgctcaccatcatccgcgacgggctcaaggctgaccccaagaagtaccgcaagatgaaggagaggcttgtcggcgtctctgaggagaccaccacgggtgtcaagaggctctaccagatgcaggagaccggcgccctcctcttccctgccattaacgtca

SEQ ID NO: 36010 - DNA, 258 bp, Zea mays
cttgggcgtacgcggacacagccccgatccgaatcgtcctcctcgcgagcctcgtcgatccccaactcccctccactcgcttcaagatgcagatctttgtgaagaccctcaccggcaagactatcaccctcgaggtggagtcttctgacaccattgacaatgtcaaggctaagatccaggacaaggagggcatccctcctgaccagcagcggcttatcttcgccggcaagcagcttgaggacggccgcacacttgctg

SEQ ID NO: 36011 - DNA, 260 bp, Zea mays
gagatgattgtgcctggtgtcatgcccacgggctgcttcccagtttacttgaacatgcttgatgagcccaaagaaggatacggcccccacagtggttgtgtccgccggtacaacacattctcctgggtgcacaatgcacatcttaaggccatgcttgagaagctccgggctaagcaccccaatgtgagaatcatatatggcgattactacactccagtcgtccagttcatgcttcagcctgagaagtttggttttgccag

SEQ ID NO: 36012 - DNA, 257 bp, Zea mays
agaagcgtcactctactcatgggattccaaatccacttacattcatgagcccccttactttaaggacatgaccatgtccccacctggcccctctacagtgaaagatgcctactgcttgctgaacttcggggacagcatcactacagatcacatttcacctgcaggaagcatacacaaagacagtcctgctgctaagtatttgatggagcgtggtgtggaccggaaggacttcaactcatatggtagccgtcgtggta

SEQ ID NO: 36013 - DNA, 251 bp, Zea mays
catgtatcatgacatgtacatgaaggtcaaaggtaacgccttcaagaacaagagggtgcttatggagagtatccacaagtccaaggctgagaaggccagagagaagacactttctgaccagtttgaggccaagcgcgccaagagcaaggcgagccgtgagaggaagatcgctaggtgggaggagaggttggcccagggtccacgagaaataacaccacctgtctcatccacagctccagctactggggcac

SEQ ID NO: 36014 - DNA, 250 bp, Zea mays
ctcacgcgtccgcggacgcgtgggcaaacttcagcgatcagtatgatatgcagtatgtgtcattcatgggtactaaccaccatgcacagccagtgttactaggttgtggcctgcttgctggtagatctcttggggcttatgtgtggctttttggtacatggttaagatgtatgaatgccaaaccaccacattcaataattacaaactactgtcatgatgtagcgatactatcaaaaaggttttccctaac

SEQ ID NO: 36015 - DNA, 252 bp, Zea mays
tgttctgatatgtggagcaagcacgttcctgcttctagctttacagatctatggggttaggaaaatagagctcataggagttatttttatgctccttatcgccatttccttctttgttgaactgagtactgtcaatcctcctatgggtgaggcataatctcttcctgcattcatcactggtggtatcaagaaaaatatcaccttctccaaaaggatttaaggacacttcaacgttcttcttgattgagaacg

SEQ ID NO: 36016 - DNA, 258 bp, Zea mays
ggagctgctgcaggagcactgactgatccaacttctgaattcccttctggaagaagtccagctgatttagcttcagtaaatggacacaaggggattgctggttttctcgcagaatctgctttgacaagccatctgtcagcacttactattagggaatcaaatgatagcactgtagaagtgtgtgggttaccatttgctgaagatctcactggcattgattctgtccatctcgctggagagggtcctgatgctgaatca

SEQ ID NO: 36017 - DNA, 187 bp, Zea mays
caaggccacgtatggactgttcagtgatgatggagttctgaaactcccttactgcattgcgatatcaggattcgtctgtgctcttttcgccattggaatcccttatttatctgccctcaggatttggttggggttctccacgcttttcagcctcatgtatattgtgatagcagttgtgctgtcgtcg

SEQ ID NO: 36018 - DNA, 277 bp, Zea mays
ctctgcactctcggcaacaactgacggccggaggaagaaggcgcagacgacaagcagaagcttgtgccatcgatcaatggcggcggtgacaaagatctacgtcgtgtactactcgacgtacggccacgtggcgaggctggcggaggagatcaagaagggcgccgactccgtggacggcgtcgaggcaaccatctggcaggtggcggagacgctgccggaggaggcgctggcgaagatgcgcgcgccggcgaggatcgaggagcacccggtgatctcg

SEQ ID NO: 36019 - DNA, 140 bp, Zea mays
cccacgcgtccgcggacgcgtggctacgatatcgccggcacccccggcgtcgcggccgacgtctcccacatcaacaccccagccctgatgacggggttcatgggggacgaccagctcggggaggcgctggagggctccga

SEQ ID NO: 36020 - DNA, 282 bp, Zea mays
cgtcctgccaagccagctacaacgccaccgccaggaactgcacggcgttgggcgccggcgccttcgaagggtgctatggcagctgcaccaacaacagctgccctggcaagtcctgtgtgcacagtgtgtgcgacagagctgttcctgcgacaacccccacgcaagcagctgctgtcagtcttgccgtgccgctgttaacgcagccatggggcgtgtgggtagcgagtaccagctatgcctgagctacaacgacaggtatatggggtactgcatgatgagctg

SEQ ID NO: 36021 - DNA, 206 bp, Zea mays
cggacgcgtgggcggacgcgtggagaagatctacaacgtctcgtgcgagcgctatttcgggttcgggtgcgagatcgatgaggagacatctaacaagctcgaggggctccctggtgttctctttgtgctaccggattcgtatgttgaccctgagtacaaggactacggagctgaactgcttgtcaacggtgagattgttcagaggc

SEQ ID NO: 36022 - DNA, 79 bp, Zea mays
cggacgcgtggcggacgcgtgggcgccggcgtcatctacgagctgctcttcatctcccacacccacgagcatctcccct

SEQ ID NO: 36023 - DNA, 281 bp, Zea mays
gggtctgcttatgcagaatttgggaagacaaaggtcattgtatcggtttttggaccaagggaaagtaagaaagcaatgatgtacagtgacgttggtaggctcaattgcaatgtgagctatacaacctttgccactccagtgcgtggacagggagcagacaacaaagagtattcatcgatgcttcataaagctctggaaggcgcagtaatgctgcacactttcccaaagaccactgttgatgtttttgccttggttcttgagtctggtggcagtgatcttcc

SEQ ID NO: 36024 - DNA, 271 bp, Zea mays
gagttgggcgcagagaatccccaagcaaacaaacagggtagatggagaggagatgtgaggagaggagaggttgggtctgggacaccatggctccgatgaagctgtacggggcggtgatgtcgtggaacgtgacgaggtgcgcaacggcgctggaggaggctggctccgactacgagatcgtgcccatcaacttcgccaccgccgagcacaagagccccgagcacctcgtccgcaacccgtttggtcaggttccagctctgcaggatggtga

SEQ ID NO: 36025 - DNA, 277 bp, Zea mays
gtcatatctagctatagtagctcccttgagaagcatttgagggaggagccatgtctgaggagaagcaccaccaccacctgtttcaccaccgcaagccagaggaggagggcgcctccggcgaggtcgactacgagacgaaggagaagcaccacaagcacatggagaagctcggcgagctcggcgccatcgccgccggcgcgtacgccctgcacgagaagcacaaggccaagaaggacccagagaacgagcacgggcaccgggtcaaggaggaggtggc

SEQ ID NO: 36026 - DNA, 267 bp, Zea mays
aagaagcaaggagaaacagtaccatgtgcaatatgctttttgtgaatggcgcccattcactttctccctatatctactctctcaacagtaaattcgggcatctgccagacaaagaccgtggtgcaatcaaagaaaaacttgatccttcagctagtggaggaatgaatggttacattgcactctgtggtggggacccgtcccctcctgtcttcagatctcctgtagatgggcttgaggacatcatggataatcaagtgatatgctcaa

SEQ ID NO: 36027 - DNA, 160 bp, Zea mays
caaggaccttcggcgcccgttcaggatccacatcttcccgagcgagttcttggttgacctcttcctcttcggaccacctccaaggctcttggtgtagcttgccactctcaccaatcaagttttcatgtctgatctcgacattcagatcccaactgccttc

SEQ ID NO: 36028 - DNA, 280 bp, Zea mays
  unsure (1)..(280): unsure at all n locations
atcgacccacgcaacgcccccctccgcatcgcgcttcgcctgggtaccggcgtccgccgcgccacagtcccgtccaggaacaggaagagcagtaacccatccatcggggatcaccaggggagcaagatgtcgactgccgccgtcccaagattgcccgctcccagatccggggcaagctatcactatcagacgaccgcggctccggtggccaacaccctctccttcgccggccacgcgaggcaggcggcncgcgcgtccgggccacggctgtccagcaggt

SEQ ID NO: 36029 - DNA, 252 bp, Zea mays
agctctcgagcaaacacgaccatacatttattgcgaccgtacaaacattgtaacaaaaggcagcagcgagctagtatagctccacaagaaaacatcctcatcctcttcctttcttagtagggctccactggtgccctgaactttgctccggcgtagaccgcggcatcaccgagctcttcctcgatcctgagcagctggttgtatttggccaggcgctcagaccggcaaggggctcccgtcttgatttggccc

SEQ ID NO: 36030 - DNA, 184 bp, Zea mays
ctagttctagatcgcgagcggccgcccttttttttttttttttttttttttaatccaagcttcacaaaaagatcagcactagtaggatatgcaaagaccaaccaaaaggcaatgaacacacacgaaagcaacagtgtttattacacaggctgttaacacatggcgcacagcaaatgcaagacag

SEQ ID NO: 36031 - DNA, 271 bp, Zea mays
gagagatcagcaacttaacaacaataatggccaccgccatagttcccacggacgccgagctgctgcaggcgcaggccgacctgtggcgccacagcctctactacctgacatccatggcgctcaagtgcgcggtggagctccacatcccgaccgccatccacaacctaggcggtgctgccacgctgccggacctcgtggccgcgctgtccctgccagcggccaagctcccgttcctcgggcgcgtgatgcggctgctggtcacgtcgggcgt

SEQ ID NO: 36032 - DNA, 269 bp, Zea mays
ctgagacactacgaggaaatatcgaattccagcacgttagcttcaggtatcctaccaggccagatgtccagatcttccgggacctttgcctgacaattcatgctggaaagactgttgcgcttgttggggagagtgggagtggcaaatcaacggcaatttcattgctccagaggttctatgacccagatgtaggccacatactactagatggcgtggacatacgcaagttccagcttcggtggttaaggcagcaaatgggcctggtcagt

SEQ ID NO: 36033 - DNA, 256 bp, Zea mays
  unsure (1)..(256): unsure at all n locations
cggacgcgtggngcagcagccaattcgctcgagttcagatcgagcgcgcgccaagcaagtcttccggccggccgacgaagagcgcaatcaagcaagacaagatggtgaagctcgccttcggaagcgtcggcgactccttcagcgccacctccatcaaggcctacgtggccgagttcatcgccaccctcctcttcgtcttcgccggcgtcggttccgccatcgcctacgggcaactgacgaatggcggcgcgctgga

SEQ ID NO: 36034 - DNA, 282 bp, Zea mays
gcagcggtcgccggtggagaagcctccgttcactctgggtcaggggaagaaggccatcccgccacactgcttcgagcgctcggtgctcaagtccttctcgtacgtggtccacgacctggtgatcgccgcggcgctcctctacttcgcgctggccatcataccggcgctcccaagcccgctccgctacgccgcctggccgctgtactggatcgcgcaggggtgcgtgtgcaccggcgtgtgggtcatcgcgcacgagtgcggccaccacgccttctcggacta

SEQ ID NO: 36035 - DNA, 281 bp, Zea mays
cccacacatcaggcccgaggacatccgtggagctgcggtgataggcttcaacgggaacatgaagccatggctggacgtcgccttcaaccagtacaagcatctctggaccaagtatgtcgacacagagatggaatttctgacgctctgcaacttcggcctctgaaagactattacgagtatagctctgcgtctgaacaacgaacgtcttcagcgctgacgtgagtgacctgcgccaagcttgcggtcagcgtgagtgacgcttaacgtagtgatcagtgcag

SEQ ID NO: 36036 - DNA, 281 bp, Zea mays
cacacacacacggagagaacaaattgatacactgcgatctcaatcggacaaatcaaaaaaaatcttgcgagacattactgaccgatgaagttcggcaagcgcctcaagaagcagatcgaggagagcctgccggagtggcggagcagttcctcaactacaaggagctgaagcggcgcgtgaatgccgtgtcctcccgcgggtcggcggcggatccgtcgtcgtccagcgccgcggaggccgacttcctgacgctcctggacgccgagatcgacaagttcaac

SEQ ID NO: 36037 - DNA, 279 bp, Zea mays
cactgcaccacttctgctaatcccttgttcttgtgcctccgatggggagctctcaccattgtcatcgtcaatcgatcaatataaagcgagccaattaccccaaggagctaccgcttgcgacggtatggcgatcccggtgattgacttctccaagctggacggccctgagagggccgagaccatggcggccctcgctgccgggttcgagcacgtggggttcttccagctggtgaacaccggcatctccgacgacctgctggagcgggtgaagaaggtgtg

SEQ ID NO: 36038 - DNA, 279 bp, Zea mays
cccacgcgtccgatctctgtgttgaatcgtctgtgcgaggacccggagaacagagtgttcatcgtaagcggacgggggaaggacgagctgagcaggtggttcgccccctgcgagaagttgggcatcgccgcggagcacggttacctcacaaggtggagcagggacgcgccatgggatacctccgggttggccgccgacttcgactggaagaagaccgcggagccggtgatgcagctgtacacggaggcaacagatggctcctacatcgagcacaaggag

SEQ ID NO: 36039 - DNA, 278 bp, Zea mays
cggacgcgtgggttctagatcgcgagatggacctcatgaagctggtgatgagcgactacaaggtgaggatggtgaacgatgggatgcaggaattcttcgtcgaattcaaggggccggccgaaagtatctaccaaggcggtgtctggaaggttagggtagaactgcctgatgcatatccttacaaatccccgtccatcggcttcatcaacaagatttatcaccctaatgtcgatgagatgtctggctctgtctgtttagatgtcataaaccaaacatgg

SEQ ID NO: 36040 - DNA, 281 bp, Zea mays
ggccacggcaacagaaggcagactcaacctcggcttcggaggaggccccacgtcgccctgcctagggcacagaccgccacgtcaacaggaggtgccatcatcatcccaccccgaatcgactcgggtcacggagaacaagaccggcgtctcatccggccagctccgccagaggggcaatgatggcgctccacaagctctatgacggcggcggcccctagctctcttacgaaagcaggacaacgtcagcagggactcgaccgctccaacagctgtccctccat

SEQ ID NO: 36041 - DNA, 279 bp, Zea mays
tctagatccgttcatcctggtggttttgtgaggtcgaaagcggcgagcgaattagaagatgctggacaagctgtgggacgacgtggtggccgggcctcgcccggagacgggcctcgagaagctccgcaaggccaccaccgcccgcacgctcgtcatcaacaaagacgcggacggcggcagctacaagcgggcgcagtcgacgccgtcgaccccgacgacgccggtgacgccgtcgtcgtcgacgacgccgcgcggcgccggcaacgtgtggcgcacgtc

SEQ ID NO: 36042 - DNA, 277 bp, Zea mays
gagtatagcacagaaaatctgcagccaccaattctgacgatagaagatgcgatccaacgaaacagctacttccaagtccccccatttgtagctcctaagccagttggtgattacaacaaagggatggctgaagctgatcaaaagattctatcagcggaggtaaaacttgaatcccaatactatttctacatggagacacaagtggcgctagctattcctgatgaagataactgcataaccatctattcttcgacacaaattcccgaggtcacacaaa

SEQ ID NO: 36043 - DNA, 277 bp, Zea mays
  unsure (1)..(277): unsure at all n locations
gcgccccgtctggggcactgccggtgagcccgccaaggaagaggaagacgtcgatgatgctgtgcgtgccgcccttcaggaggacattgagagtgatgatggggaccttgatgatgaggttgatgatggacctgaggatgaacctgaacatgatgcggaagatgccccagccgaacctgctatcaggacagctgcggccccggctgcgccacccaaggacacagaaaggcagctgtctanaaaggagttgaaaaagaaggaactagcagaacttgat

SEQ ID NO: 36044 - DNA, 276 bp, Zea mays
cggacgcgtgggcggacgcgtgggcagtattgttcaggatgctcctgcagatattccttcccttctagagttgaagcgcgactactacgaactgatgattcgttattactctcacaacaatgattacttggaaatctgccgttgttacaaggctatttatgatattccagcaataaaagaggatccaacaaagtggataccgattcttaggaagatctgttggtacttggtgctagcacctcatgatcctatgcaatcaagccttctcaatgctac

SEQ ID NO: 36045 - DNA, 273 bp, Zea mays
gtccagcccggcgccacccactcagccgcggatccgaggcgcagatccgatccggcgatggcgtccacggcggcgaggcggctgcgggagctgcaggcgcagacggggaacaagacctgcgtggactgcgcgcacggaacccgcagtgggcgagcgtctcctatggggtgttcatgtgcctcgagtgctcgggcaagcaccggggcctcggcgtgcacatcagcttcgtgcgctcggtcaccatggactcctggaccgaggcgcactccgcaa

SEQ ID NO: 36046 - DNA, 271 bp, Zea mays
ctcagctcccatatccgctcccctacctctccagcatcggcccgtctccgtcgtctcgtctccgctcctcacctcgccagccatgggcaagatcaagatcggaatcaacggtttcggaaggatcggcaggctcgtggccagggtcgccctgcagagcgaggatgtcgagctcgtcgccgtcaacgaccccttcatcaccacggattacatgacgtacatgttcaagtacgacaccgtgcacggccaatggaagcacagcgacatcgccctc

SEQ ID NO: 36047 - DNA, 279 bp, Zea mays
  unsure (1)..(279): unsure at all n locations
ttgggcgcagagaatccccaagcaaacaaacagggtagggggagaggtgaggtgagnagaggagaggttgggtctgggacaccatggctccgatgaagctgtacggggcggtgatgtcgtggaacgtgacgaggtgcgcaacggcgctggaggaggctggctccgactacgagatcgtgcccatcaacttcgccaccgccgagcacaagagccccgagcacctcgtccgcaacccgtttggtcaggttccagctctgcaggatggtgacttgtacctct

SEQ ID NO: 36048 - DNA, 273 bp, Zea mays
cgcaccacggcggcggcggatcccagtacggcgacgagacacgcccgcaacacggcggcgggggcggcgccccgcctgtgaggcagcagacgtacaggatctactgcaaggctggggaggaccagtacagcctcgcctcccgcgacggcaaggtctgcctcgtgcgcacggaccgtgatgacgacgcgcacacatggatcaaggacatgaagtacagcaccagggtgaaggatgaggaaggctaccctgccatcgtcctcgtcaacaaagcca

SEQ ID NO: 36049 - DNA, 272 bp, Zea mays
ggagtagttcaggatgaggattttgtgctggagcgacacaactacgagatggaaccagtgcttgtgccggaaggttatgtgttcgtgttgggagacaaccgcaacaacagctttgattcccacaactggggtccacttccagtgaggaacattgtcgggagatctatcctccggtattggccaccatcgaagatcaatgatacaatttatgagcctgatgtgtcccgcctcacggtgccgtcctcgtagtagtcgctgcagtgatgctggat

SEQ ID NO: 36050 - DNA, 266 bp, Zea mays
gacaactgcaaagggcggttgggttggataacgggttgtacacggcggatgcagacttttcctgtttttcggaccttgctctctcatctcctgctgattactacattgaagggcaaggttccctgatccaagctgtgctgactcctggagatccatacatgccattgccaaacgaggagatcattagtaaggttcaaaagcaggttgtagaactgttcccatcttcccggggcttagaagttacatggtccagtgtggtaaagatc

SEQ ID NO: 36051 - DNA, 271 bp, Zea mays
ccgcaacctatcgacccaatctcgtccgacccggcgcgtcgtcccctccagatctccgtcgccctctccaggtagcagaaactgttctgctgcagtctgacaaagtggagggcttaggagcttctgcttcttttatgtctgaacaatctttgctttatttgggattgttgggagagtactctcgtgcaactaggaaaaggcacaaggttccgtcccactgcatgcgtcaagagactgtctggttttcttgttctgatttgtcatttgctgg

SEQ ID NO: 36052 - DNA, 270 bp, Zea mays
cgtgaagtatgtgttcgtatggggaaccagcgcggggcactatccacagcattgcggcctcggccatggccttaacgacgaggatgtcgtccagatagtaaagaagaaggaaaaggaggagggtgggcgaggccggttcaagtcgcacacgaacgcacctgaccggatatctgatagggtgaagaaagccccactgaagacataataataactggttccctgagcgcgtcgtgatcagcttctccaaaccagatggacaacacaagctcg

SEQ ID NO: 36053 - DNA, 270 bp, Zea mays
cggacgcgtggggacgaccgcctcacccgcgccgccaaggtgctggagcagctcagcggccagacccccgacttctccaaggcgaggtacacggtgcgctcgttcggcatccggcgtaacgagaagatcgcctgctacgtcacggtcaggggcgacaaggccatgcagctgcttgagagcggcctcaaggtcaaggagtacgagctgctcaggaggaacttcagcgacaccggctgcttcgggttcggcatccaagagcacatcgacctt

SEQ ID NO: 36054 - DNA, 267 bp, Zea mays
acctgttcaagcctgacagagtgcttatcggtggccgggagacccctgagggcaggaaggccgtccaggctctcaaggatgtgtacgctcactgggttcccgaggacaggatcctcaccaccaacctgtggtctgctgagctctccaagctcgctgccaacgcgttcctggcacagaggatctcctctgtgaacgccatctccgccctctgcgaggccaccggcgcgaatgtgactgaggtggcttacgccgtgggcaaggacacga

SEQ ID NO: 36055 - DNA, 110 bp, Zea mays
tctacaccgtcttctccgccaccgaccccaaggggaacgcccgcgactcccacgtcccggttctggctcccctccccatcggcttcgccgtgttcatggtgcacctggcc

SEQ ID NO: 36056 - DNA, 156 bp, Zea mays
cccgcccccgcgtcaaggccagcagcgagtggatcctcgactgcatcgcccacggcggcgacatctacggcgtcaccaccggcttcggcggcacctcccaccgccgcaccaaggacgggcccgcgctgcaggtcgagctgctcaggcatctcaacg

SEQ ID NO: 36057 - DNA, 172 bp, Zea mays
acgacattctcatggctacaatgcttaatggagctgctatcatggatggagctcttcttttgatcgcagcaaatgaaagttgtccacagccccagacatcagagcatcttgctgctgttgaaatcatgcgtcttcaacatatcatcattctgcagaacaagatcgatcttat

SEQ ID NO: 36058 - DNA, 293 bp, Zea mays
ctccgatctccaggaatccgcggctgacgcgccggcgatggcggctcccatggtcgacgccgaatacctgcgccaggtcgacagggcgcgccgccacctccgcgccctcatctccaacaagggatgcgccccgatcatgctccgcctcgcatggcatgatgctggaacttatgacctgaagacaaaaactggtggtgcaaatggttcgattagatatgaagaagagtacactcatggttcaaatgctggtttaaagattgctatcgatctccttgagcctatcaaagcaaaga

SEQ ID NO: 36059 - DNA, 184 bp, Zea mays
actagttctagatctcgcgcgcccaggcgctgatcgcgctctgcggcaccatcccgggctactggttcaccgtcggcctcatcgacatcgtgggcaggttctggatccagatcatgggcttcttcatgatgaccgtgttcatgctcgcgctcggggtgccgtacgagcactggaccaaggcgtc

SEQ ID NO: 36060 - DNA, 286 bp, Zea mays
agacaacagccatcttggagggttggtgaggtatccggtctctgcaactcttccacagattggatccagattattccttacgtggggtgtcttctggagttttcctgaggtgattgactgactcgagaatttgccgacgcttgaagaaggacctaatgtgagcttttacatacttgatgaacagcttgagctcttgagcaaggtgctgaatgcaggggatgacatgattggtgttgagtgcttagaagaagattgtgatggcaaggttctatttgtttgaggttgc

SEQ ID NO: 36061 - DNA, 198 bp, Zea mays
gcgctggacccggcgggcctggtggcgatcgcgatcgcgcacgcgctggcgctgttcgtgggcgtgtccgtcgcggcgaacttctcgggcggccacctgaacccggccgtgacgttcgggctggccgtgggcggccacatcaccatcctgacgggcgtctgctactgggtggcccagctgctgggcgccaccgtggcg

SEQ ID NO: 36062 - DNA, 290 bp, Zea mays
gctgttttgggctttgaattgggttactccatggagaacccaaactcattggtcttatgggaagctcagtttggtgatttttcaaatggagctcaagtgatatttgatcagttcctgagtagtggggagtcaaaatggctccgccagactggccttgtcgtttgccttcctcatggatatgatggtcaggggcctgaacattctagtgcaagattggaacgctttcttcagatgagtgatgacaacccttatgttatacccgagatggatccaacactgcggaagcaaat

SEQ ID NO: 36063 - DNA, 200 bp, Zea mays
cggacgcgtggggcacagtccattattgccgtctcccttttgcgtgagaaagaaagagagcgagaagcaagcgccatgtctggcatcatccacaagatcgaggagaagctccacatggggggcgaccacaagaataaggaggaggagcaccacaagaaggccgaggagcaccacaagaaggaggagggggagcaccacaa

SEQ ID NO: 36064 - DNA, 290 bp, Zea mays
atcccttctccatgagatcattggcaagggaacgactacccttcttcactgacaaagagcaagagaagctagtgggttcctatgacatgttggggttaaactattatacctcaaggttctctaaaaacatcgatatctcaccaaactactcgccagtgctcaacactgacgacgcatatgccagtcaagaaacgaatgggcctgacgggaatcccattggtccttggatggggaattcgtggatctacctatatcctgaaggcctaaaggatctgcttatgatcatgaag

SEQ ID NO: 36065 - DNA, 284 bp, Zea mays
cggacgcgtgggcggacgcgtgggcggacgcgtgggcggacgcgtggggcagcagccaattcgctcgagagcagatcgagcacgcgccaagcaagtcttccggccgaccgcgaagagcgcaatcaagcaagacaagatggtgaagctcgccttcggaagcgtcggcgactccttcagcgccacctccatcaaggcctacgtggccgagttcatcgccaccctcctcttcgtcttcgccggcgtcggttccgccatcgcctacgggcaactgacgaatggcggcg

SEQ ID NO: 36066 - DNA, 282 bp, Zea mays
ctcgagtggagctcttccacggccgcggtggagatggcggcgaatctggaggacgtgccgtcactggatctgatgcacgagctgctccgccgcatgaagtgcagctccaagcccgacaagcgcctcatcctcatcggtccacctggctctggaaagggaactcagtctcctattatcaaggatgaatattgcttgtgccatttagccactggtgacatgctgagggctgctgtggcggccaagacacctctaggtatcaaagctaaagaagctatgaataag

SEQ ID NO: 36067 - DNA, 281 bp, Zea mays
cacatttactctagtgctctgaaggcgacactaacttggcagaatatgattacgattcaggagtgtcgcgaggcctgtggaggtcaaggtctgaagactgagaaccgcataggaattttcaaatctgaatttgatgtccagtctacatttgagggtgataacaatgtgctaatgcagcaggtaagcaaagcgctttatgctgaatttttgggtgcacaaaagaagcagcagccattcaagggattgggtttggaacacttaaatggctcgagccctgttat

SEQ ID NO: 36068 - DNA, 282 bp, Zea mays
cggacgcgtgggcggacgcgtgggggattcggcgaccaccggagcgcggaggaggcacaggcgccgatctaaggacgatggccgaccgcgggctcctcgccgtccttctcctcctcgagtaagcggctggaagggaaggtggccctcgtcactggtggcgccaccggcatcggtgaggccatcgttcgcctcttcatggagcacggcgccaaggtctgcatcgcggacatccaggatgaggctgggcagcagctgcgcgacgccctgggaggtgacgcgcag

SEQ ID NO: 36069 - DNA, 280 bp, Zea mays
atctgctctccgtgaaactgttgttgaagtcccaaatgtctcttgggaggatattggtgggctggagaatgtcaagagggagctccaggagactgttcaatatcctgtggaacatccagagaagttcgagaagtttggcatgtctccatccaaaggagttctgttttatggtcctcctggttgtggtaaaaccttgttggcgaaggcaattgccaacgagtgccaggctaacttcatcagtgtcaagggtcctgaattgcttaccatgtggtttggtgag

SEQ ID NO: 36070 - DNA, 276 bp, Zea mays
ctagatctctcctctacagcttcccagcaagccagttgcatacatttcactgctgttatctttctcagcttgatcagtgctttagttttctctagttccaatggcttgcgattccccgtgcatggcgacgccccgcgccgacccgcttaactgggggaaggcggcggaggagctgatgggcagccacctggacgaggtcaagcggatggtggccgagtaccgccaacccttggtgaagatcgagggcgccagctcagcatcgcgcaggtggccgct

SEQ ID NO: 36071 - DNA, 276 bp, Zea mays
gtttgtactaaacatatatctaaatttgcaggtacattgagttttacgatgttatgtctgttccaatggcaattgctttgtctggtcaaccgctgcttggacaagcagtgatggttaagccatctgaggctgaaaagaacttagttcagtcaaatgcgacatcaggtggtgcggcttcaggtggagcaagaaagttgtatgttggcaatcttcactcaaatattactgaagaccaattaagacaggtatttgaaccatttgggcaagtggagcttg

SEQ ID NO: 36072 - DNA, 123 bp, Zea mays
atctccgccgcgcgtatgtgtgatggtcccgggcggcgtcgcgccgctgcactcccacccgggaggcaccgagctcatcttcgtcatcgagggcagcgtcgtctgcggcttcatcagcgccac

SEQ ID NO: 36073 - DNA, 278 bp, Zea mays
gcagcagccaattcgctcgagttcagatcgagcgcgcgccaagcaagtcttccggccggccgcgaagagcgcaatcaagcaagacaagatggtgaagctcgccttcggaagcgtcggcgactccttcagcgccacctccatcaaggcctacgtggccgagttcatcgccaccctcctcttcgtcttcgccggcgtcggttccgccatcgcctacgggcaactgacgaatggcggcgcgctggacccggcgggcctggtggcgatcgcgatcgcgcacg

SEQ ID NO: 36074 - DNA, 277 bp, Zea mays
caaagcccaacacctctcctagcctccttccgtcccgccgccactcccgtcatgggcgattccgcggcgggcgcgccggagccgagcaggttcggcaggatctgcgtcttctgcggcagcaaccccggcaatcgcgccgtctacggggacgcagcgctcgacctcggcaaagagctggtggcgaaggggatcgatttggtctacggcggcgggagcgtcgggctcatgggcctgatcgcagacggtccttggtggcggctgcagtgtcctcggagtg

SEQ ID NO: 36075 - DNA, 284 bp, Zea mays
gaaacaatcaaccagcaacactcttctcgtataacataatacagcgaaggtaactcacatggcaacttccatggtttgtctcgtcttgctctgccttgtttcttctctccttcccagtgccgtccttggccacccatgggtggcttgttcccacagttctatgaccattcgtgccccaaggcgaaggagattgtgcagtccattgtggcacaggctgtggccaaggagaccaggatggcggcatcgttggtcagactgcattgccatgactgctttgtcaaggg

SEQ ID NO: 36076 - DNA, 288 bp, Zea mays
cggacgctggtcgtgacgcgtgggtcggacgcgtgggcgagacgcgtgtgggtccgccaagctagcgcgctataacagagaagcccaccgccacctcccgcgagatccagacctcggtgcgcctcgtcctccccggtgagcttgccaagcacgccgtctccgagggcaccaaggccgtcaccaagttcacttcttcttaggctcatagtactaggctgggtggtgttggtagacgtggctcaatttatctggtatgggtagtgatggatgatatgatctgcgtctatt

SEQ ID NO: 36077 - DNA, 285 bp, Zea mays
tgcattcctcgctcatgaccctttgatcgagaagttcagggagattaaggtccatcgaaggaaggttaaaaaggctgttgctaagaaaaacagggatcttgcagacaggctgttgaatcggccaccaacttacaagcttgataggcttgtccttgaaaggtatccaacattcgttgatgctcttcgtgacttggatgactgccttacaatggtgcatctgtttgcggcattacctgctgttgacggtgaacgtgttgaggtcaaacgaatccataactgccgcag

SEQ ID NO: 36078 - DNA, 280 bp, Zea mays
gttctagatcgcgagctagaactagcaccacgggtgtcaagaggctctaccagatgcaggagaccggcgccctcctcttccctgccattaacgtcaacgattccgtcaccaagagcaagtttgacaacctgtatggttgccgccactcgctccctgatggtctgatgagggccactgacgttatgatcgccggaaaggttgccgtggtctgcggatacggtgatgtcggcaagggttgtgctgctgccctcaagcaggctggtgcacgtgtcattgtgac

SEQ ID NO: 36079 - DNA, 108 bp, Zea mays
ttttttttttggcaagaccagcaagatttcctgttccatcaaaatcagtttaggcaaacgacattacgacgagtgcagaccaccactcgtcagaatctagagagattg

SEQ ID NO: 36080 - DNA, 266 bp, Zea mays
cggacggtggtcggacgcgtgggcgcgaccacagacagagcgcgcttcaaggcctttttttttacagataacaaggacgagaggaggagatggcggtcacgatcacctgggtgaatgcgatgcagatcttcgacagccgcggcaaccccaccgtcgaggtggacgtgggcctcagcgacggcagctacgcgaggggggccgtacccagcggcgcatccactggaatatatgaggccttggagttgagggatggaggatctgattat

SEQ ID NO: 36081 - DNA, 272 bp, Zea mays
atttagaagcgcccctcctcctctcccccatccgtacccaatctaatcgacacccggccgagatgggccgcaagttcttcgttggtggcaactggaaatgcaatggaaccgcagatcaggttgagaagattgtcaaaaccctgaatgaaggaaatgttccctcttcagatgttgttgaggttgttgtcagtcctccttatgtgttcctcccggtggtcaagagccagctgcgccaagagttccaagttgctgctcagaactgctgggtgaag

SEQ ID NO: 36082 - DNA, 272 bp, Zea mays
ccgacatcgtcccttcgtccccacgagcaaccgataatccgccggcgttgagatgttggtttatcaggatctcctatctggcgacgagctcctgtcggattcattcacctacaaggagctcgagaacggcgtcctgtgggaggtcgagggaaagtgggtcacccaaggtcctgttgatgtggacattggtgccaatccatccgccgagggtggtgaggacgaaagcgttgatgacacagctgtgaaggtggttgatattgttgacacattcc

SEQ ID NO: 36083 - DNA, 272 bp, Zea mays
gggtgctcgacaagctcaaggctgagcgtgatagaggtatcaccattgatatcgctctgtggaagtttgagaccaccaagtactactgcacggtcattgatgcccctggacaccgtgacttcatcaagaacatgatcactggtacctcccaggctgactgtgctgtccttatcattgactccaccactggtggttttgaggctggtatctccaaggatggccagacccgtgaacatgctctccttgcgttcaccttggagtgaacagatgat

SEQ ID NO: 36084 - DNA, 283 bp, Zea mays
gccaccagcctcaacatgtgcatgtacttcccgcgcttcgccgccttcaacttcaccaagggcgggatggcgctcttcaaccacggcagggggcagccgctgcagtacgtcgtcgccaactccttcatcgccgcgctctacgccgactacatggaggccgtcaacgtccccggctggtactgcggcccaaacttcatgaccaccaacgacctccgggagttcgccaggtctcaggtcaactacattctcggtgacaaccccaagaagatgagctacgtggttg

SEQ ID NO: 36085 - DNA, 199 bp, Zea mays
gacaactgaacggaccaaggccgccttggagaaggttgtcaacgtccgcctctctgcagctcagcccaagaatgtgccgactcatgattctgagtccaagttcatcaagtataagccgtcacagcaatccgcggccttcaattcaggtgcaaaggagaggatcattaggatgtcagagatggcggtggatcctcttgag

SEQ ID NO: 36086 - DNA, 198 bp, Zea mays
agcatacatagcccccgaggttctttccagaaaagagtatgatggaaaggtagcagacgtttggtcctgtggtgtcacgctgtacgtgatgctcgtgggatcatatccatttgaagatcctgaggatccagggaacttccggaaaacgatcagcagaattcttgacgtgcaatactccatcccggattatgtgagagt

SEQ ID NO: 36087 - DNA, 247 bp, Zea mays
atcgaagtggggagcactcattgagaaccaccagtacaagagagaaaggtgacacaagtaaaagggacatccatcaccatgaccatgctgccgttcacatccacagcagcggcaacaagctagtagcagatgttttcttcttccacgacgtcctacgcccagggtccgtaatcacgccgatcatcccaccgaccaccaccctaccacctctgctgcctctccgcgaaggccgacgcgctcccgttct

SEQ ID NO: 36088 - DNA, 281 bp, Zea mays
aaaggagggagttttgagaagcataaatggctcctaaagccgctcctgtcaagaagggtgatgccaaggcccaggccttgaaggtggccaaggctgtgaagtctggggcaggcaagaagaagaccaagaagattcgcacatctgtaacatttcaccagcccaagaccctgaagaaggccagggacccgaagtacccaagaatcagcactactggaagacacaagcttgatcagtaccaaatcctcaagtaccccctcaccacagaatctgcaatgaagaag

SEQ ID NO: 36089 - DNA, 258 bp, Zea mays
gaagaagctctcgggctggggcctcttcggctccaagtacgaggacgccgccgacctcttcgacaaggctgcgaactccttcaagctcgccaagaactggagcagagctgcatcagtttacatcaagattgctaactgtcatttgaagggagatagcaagcatgaggctgcctcagcgtacgtcgaggcagcaaattgctacaaaaagtttcacctcaggaagctgcgcaacggctaaaccagtctgttaatcttttc

SEQ ID NO: 36090 - DNA, 282 bp, Zea mays
tgcaccgacaagtggcgcaacctgctcaaggagttcaagaaggcgcgcagcactctcggaacagcggcggcggctctggctctggagggaacggcaacgccaagatggcgtactacaaggagatcgacgacctgctcaagcgccgcggaaaggctacgggaagcggcaccgccggctgcgttggcagtagtgccgggaagagccccaaatcaaattgcaagattgattcctacctgcagttcaccacagataacggctttgaggacgctaacattccctttg

SEQ ID NO: 36091 - DNA, 195 bp, Zea mays
cgaacagcagccaattcgctcgagttcagatcgagcgcgcgccaagcaagtcttccggccggccgcgaagagcgcaatcaagcaagacaagatggtgaagctcgccttcggaagcgtcggcgactccttcagcgccacctccatcaaggcctacgtggccgagttcatcgccaccctcctcttcgtcttcgccgg

SEQ ID NO: 36092 - DNA, 133 bp, Zea mays
cgctagtggctgccctactcgtgctgcttgccctcaccgccgtttcctccacgcgcagcacaaaaggagtccgcggctgacaacgccgggatgttggcaggcggcatcaaggacgtgccggcgaacgagaacg

SEQ ID NO: 36093 - DNA, 136 bp, Zea mays
gcagcggtcgccggtggagaagcctccgttcactctgggtcagatcaagaaggccatcccgccacactgcttcgagcgctcggtgctcaagtccttctcgtacgtggtccacgacctggtgatcgccgcggcgctc

SEQ ID NO: 36094 - DNA, 125 bp, Zea mays
agtatattgactgcaccggaatgtcatttcgggattttatgcaaggaaagctccgacaagctcctggggagttgcctactcttaatgattgggagaaccatctaacaacaatttttcctgaggtt

SEQ ID NO: 36095 - DNA, 130 bp, Zea mays
ggaagatttacaaggtccctgccactgatatggaggctctgaagtcccctttgaagggtctattcgagaagcgcagagcaaggaacttcttcatttatgtccaagattacaatgaagctgatccaaggac

SEQ ID NO: 36096 - DNA, 173 bp, Zea mays
  unsure (1)..(173): unsure at all n locations
anacacgcgtccgcggacgcgtgggcgaccgtgggggctgtccactccttcagaattaccaactgcgagatccaggacaccacccagatccaaccccacatgtgctactccaacttcaacgacatcatccactcgatcatcgacatggacgcggacgtgatcaccattgagaa

SEQ ID NO: 36097 - DNA, 185 bp, Zea mays
cgagaaatggtttgtgaagtacaaggtcgacttggtgtttgcagggcacgttcatgcttatgagagatcataccgcatttctaatgtcaactacaacataacgtcgggaaatcggtatccagtgccggacaaatctgctcccgtttacataacggtcggtgatggaggcaaccaggagggacttg

SEQ ID NO: 36098 - DNA, 182 bp, Zea mays
cttggcaagaagatcaatgatgctgtcgtcactgtccctgcgtacttcaatgatgcgcagaggcaggcaaccaaggatgctggtgtcattgctggcctcaatgttgctaggatcatcaatgagccaactgctgctgctattgcctatggtttggacaagaagggtggcgagaagaacatcct

SEQ ID NO: 36099 - DNA, 180 bp, Zea mays
gtggtggtgatggaggtgtacttcgagagatttccagacacagttcagtggagtctattgacatatgtgaaattgatcagctggttattgatatctgcaaggaattcttcccacatttgtctgttggatttgagattctcgtgtcaaatcacggtggggaccctgtggagttcttgagaa

SEQ ID NO: 36100 - DNA, 255 bp, Zea mays
tgttgatgctgtcatgacaatccccaagggaaccttgttccccatgtgtggcatgaaccttgccttcgacagggatctcattggccctgctatgtactttggtctcatgggtgatggccagcccatcggtcgctacgacgacatgtgggcaggatggtgtgtgaaggtgtgtggtttctctgatcttgcttctacagctgtttactttgttcccgaaacataatgtacattggcctgatgatgatcttacgactg

SEQ ID NO: 36101 - DNA, 104 bp, Zea mays
agcgtgccaaggcgatggagaaggcgcagaacgaggtggccaaggcgcggcggaaggcggaggagaagcgcgcgtccgcggaggccaagcggggcaccaaagtg

SEQ ID NO: 36102 - DNA, 127 bp, Zea mays
caactcgccgtctgccttctgcgcctccatttcggcctctgtcccttgcaagttcaatctcacctccaaccatgggtaaagagaagtcccacatcaacattgtggttattggccacgttgactctgg

SEQ ID NO: 36103 - DNA, 260 bp, Zea mays
ctcagtacaggtccgggacctggcgacgtgggaaggaatactgtacttttagatgctttgtcaaggagaaaccccctagttcagtgacagaccgaccataatatttggtgctgatgttacccatccacatcctggagaagattccagtccttccattgcagccgttgttgcttcgcaagactggcccgaggtcacgaaatacgctggactagtgagtgcgcaacccatcgccaggagctgatacaggatcttttcaaagg

SEQ ID NO: 36104 - DNA, 265 bp, Zea mays
acgcatgtgcatgcatataagagcaacaagatactggcgcagaggagcaatgcccggcatggatgccttcgctgctgtgtcactactcgccacactctttctggttcgtgcggcagctgcccatcctccggcggcggctgcggacgccatgacgccgacggactattggcgagcggtgcttcctgagaccccgatgccccgagccatactcgacctattgaccacatctacaggtgaggaaggctcaaggaaggtcaccacgtca

SEQ ID NO: 36105 - DNA, 267 bp, Zea mays
cttggcaagaagatcaatgatgctgtcgtcactgtccctgcgtacttcaatgatgcgcagaggcaggcaaccaaggatgctggtgtcattgctggcctcaatgttgctaggatcatcaatgagccaactgctgctgctattgcctatggtttggacaagaagggtggcgagaagaacatccttgtctttgaccttggtggtggcacttttgatgtcagtatcttgaccattgacaacggtgtgtttgaggtgctggccaccaatggt

SEQ ID NO: 36106 - DNA, 211 bp, Zea mays
ggacgctgggctgtacggggcggtgatgtcgtggaacgtgacgaggtgcgcaacggcgctggaggaggctggctccgactacgagatcgtgcccatcaacttcgccaccgccgagcacaagagccccgagcacctcgtccgcaacccgtttggtcaggttccagctctgcaggatggtgacttgtacctcttcgaatcacgagcaatctgc

SEQ ID NO: 36107 - DNA, 257 bp, Zea mays
gaaggcggtcgcgtcgccgtccacgtcgagggggtcgccgggcggcgggcgcgaccaccaccgcctcgtcgtgccgtcctccgtgtcgtccatccccaagggccgctgctccgaagggagtctgattctgatagtgaagcatcggatgttagcggctctgatggagaagacacctcatggatttcatggtattgcaacttaagagggaatgagttcttctgtgaagtcgacgatgattatattcaagacgacttcaa

SEQ ID NO: 36108 - DNA, 256 bp, Zea mays
ctcgaccacggtccgcggacctgcgacgtgttttttttttttgagtaggtagataccccgtttatttacttttacagtatagtcctctcacagtcacatcacatcgatcatgcagcagcttacgggtagacctcgatgacaccacgagctccgattttcttgacaaccttgtagtcggagaagccagccttggtaaagatgtggcgccagtcgtcttcgccgcgctgcctgcccttggtgttgaccatcatgagca

SEQ ID NO: 36109 - DNA, 143 bp, Zea mays
ggtattcagggtccaatttatgttggtactggatgtgtatttagaaggcaggcattatatggttatgatgcccccaaaacaaagaagccaccatcaaggacttgcaactgctggcccaagtggtgcttttgctgttgctgctt

SEQ ID NO: 36110 - DNA, 197 bp, Zea mays
gttgggttttctggtgtgcctcccaccacattggtccgaaccttacatagggggaagagcttcaagattggttcactgcagatgttcatggagaacaatggaagcactgaagatatgggtcctcgaccttttcctgtcagagaggttcacaaaatagcagtactagatattaggttagctaatgctgatcgtcatgc

SEQ ID NO: 36111 - DNA, 223 bp, Zea mays
tagatcgcgatctagaactacccacgcgtccgcaatgctcttatcttgaaagaatttgctccatctattccagagaagaacgttacttgcctgacccgtctggaccacaacagggctcttggccagatttctgagagacttaatgtccaagttagtgatgtgaagaatgttatcatctggggtaaccactcgtcctctcagtaccctgatgttaaccatgcca

SEQ ID NO: 36112 - DNA, 250 bp, Zea mays
gaagaactcggatctcaaaagctttcttggtgatgactggatccggattcataacaggaaatttcagcagcaagctatgagatatgagagggcatcatggaataatgttctctcttacctcagtgatgatggcttgtgtgcttctggtgatgctgcttctcgcaaaaccatcagggagaagataaaaaatttcaatctgtcctttgaagaggtttaccgagttcagacagcatggtctgtcccagatgac

SEQ ID NO: 36113 - DNA, 280 bp, Zea mays
caatgacttgctgctggacgagcgcaataccgtctacgtcatgtcgggccggcggccggaggagcttgatcgtgtattccgacgcgtgccgaacctaggcttgattgctgaaaacggctgcttcctcaaggactgtggtagcgacaagtgggttgagatggctgatgcttctcaaattataaactggaagcaatcagtcaagcccatcatgcagtactatctcgagagaacgcccggctcacagatcgaagagcggcgctgcagtctcctcttccactac

SEQ ID NO: 36114 - DNA, 276 bp, Zea mays
cccacacgtccgcccacgcgtccggacgcctgccaatttccttgatgttggtggaagtgcatcagaggggcatgttgtggaagcttttaagatactgacttcagatgatagagtgaaggcaattctagtgaacatttttgggggcattatgaaatgtgacgtgatagcaagtggaattgttaatgctgctaaacaggttgacctgaaggttcctgttgttgttcggttggaaggcaccaatgtagaccaaggaaaaaggattcttaaggaaagtgg

SEQ ID NO: 36115 - DNA, 277 bp, Zea mays
cacaccacacctcctcgcttgcactccgctcgtctgacatctcgtcccgtcctttcgtttcgaagcctcgcgagccccgacgatggccaccaccgcggtgtcggtcgacgagaagctcgataagcttcgcgccgaggtcgccaagctcgaccagatcagcgagaacgagaagtccgggttcatcagcctcgtgtcacggtacctcagtggggaggcggacagatcgagtggagcaagatccagacccctacggatgaggtggtggtgccctacgata

SEQ ID NO: 36116 - DNA, 271 bp, Zea mays
gtacgacgaggccatctgcccggtggactcgttccagaagggccccatcctggacgacgagatcaacgagaccatcgtccggccgctggtgcccggcgccaagctccacgcagtcgtcgacgcgtgccacagcgattccgtcctcgacctccccttcctctgcaacatgtccaggaccgggaactggcagtgggaggatcaccgtccaccgtcgggcgtctgcaagggcacgagcggcggccaggcggtgcttatcagcggctacagcgac

SEQ ID NO: 36117 - DNA, 276 bp, Zea mays
gccccaactacccccagtctcggaagacaactatccagaagcgcaagactccaaagccgtcgccttcctatccatcccttcctcgccgcgggggtcgcctgagatcacataaacaatggtgaaggctgttgctgtgcttggtagcagcgatggtgtcaagggcaccatcttcttcacccaagagggagatggccctaccactgtcaccggaagtgtctctggcctcaagcctggcctccatgggttccatgtgcatgcacttggtgacaccaccaa

SEQ ID NO: 36118 - DNA, 277 bp, Zea mays
gaagtacccaattgagcacggcattgtcggcaactgggatgacatggagaagatctggcaccacaccttctacaatgagcttcgtgtggcacctgaggagcaccctatactgctgaccgaggctcctctgaaccccaaggcaaacagggagaagatgacccagattatgttcgagacattcaactgcccagcaatgtatgtggccatccaggccgttctttccctgtacgccagtggtcgaacaacgggtattgtgctcgactctggtgatggtgtg

SEQ ID NO: 36119 - DNA, 278 bp, Zea mays
cactgccaacggatgggtgcaatcctatggatcacgctgtgtgaagccacccattatctatggtgatgtcagccggccgaaccccatgactgttttctggtccaagatggcacagagcatgacccctcgtcccatgaagggaatgttgactggtccggtcacaatcctgaactggtcattcgtcaggaacgaccagcctaggtttgagacatgctaccaaatagctcttgcaatcaaaaaggaggttgaggatcttgaggctgctggtattcaggtga

SEQ ID NO: 36120 - DNA, 268 bp, Zea mays
cccacgcgtccggttctcaagacaattgccatatgcgagtatggggtccatgttgtatctgctagatacataatgaagtgtgatgatgatacttttgttagacttgattcagtaatggctgaagtgaagaaaatccagaatggtgaaagtctctatatagggaacatgaattatcaccacaagccattacgtgatgggaaatgggctgttacttacgaggaatggccagaagaggattatcccatctatgcaaatggtcctggatatg

SEQ ID NO: 36121 - DNA, 269 bp, Zea mays
cggacaaggtaagcagcaatcgcaggaaccctagcgccgccgcacccgcagaatgggtatcgacctcgtcgccggtgggaggaataagaagaccaagcgcactgcgcccaagtctgacgatgtctacctcaagctcctcgtcaagctctaccgtttcttggtcaggaggaccaagagcaatttcaacgctgtcattctcaagaggcttttcatgagtaaaaccaaccgaccaccaatctccatgcgccgccttgtcaagtttatggaag

SEQ ID NO: 36122 - DNA, 269 bp, Zea mays
ctcagacgctaaattcttcattattaaatcttacagtgaagatgatgttcacaagagcgttaagtacaatgtgtgggctagcactcccaatggtaataagaaacttgatgctgcctatcaagaggctaaagaaaaatcaagcgaaactcctgtttttcttcttttctctgtgaatgcaagtggccagtttgtcggccttgctgaaatggtgggtcgtgttgattttgaaaaaacagtagagcattggcaacaggacaaatggactggtt

SEQ ID NO: 36123 - DNA, 271 bp, Zea mays
acgcaaacagattgccaaggagttgaagataaacttatcaacacagtgccaatatgttgttgtgttctatcagtgtttctatttcaatggtgccatttctattgttttggaatacatggatggtggctcccttgcagatttcctgaagactgttaaaaccattccagaggcctacctcgctgctatctgtacgcagatgctaaaaggactgatctatttgcataacgagaagcgcgttatacaccgagatctgaaaccatcaaatatattg

SEQ ID NO: 36124 - DNA, 260 bp, Zea mays
ggtccacaagcggttcaggatcttctccgagagtctccagctcgtccgctccaccaatcggaaaggcctctcctaccgcctcggcatcaaccgcttcgcgacatgagctgggaggagttccgtgcgacccggctcggcgcagccacgaactgctccgccacgcttaccggcaaccaccggatgcgcgccgccgccgttgcgctgccggagacgaaagactggagggaggatgggattgtgagcccagtgaaaaaccaggg

SEQ ID NO: 36125 - DNA, 260 bp, Zea mays
cacaaaagggtcatgtttctacccaagtgaagggaacattgggctatttggatcctgagtattacatgacgcaacagctctctgagaagagtgatgtctacagctttggagttgtcctgctagaactagtaactgctagccagcccatagagaaaggcaggtatattgtccgtgagatcaggacagcaatagatcgatgatcaagaatactatggcttgaagggcctaatcgatccaaaaatcagggattcagctagatt

SEQ ID NO: 36126 - DNA, 264 bp, Zea mays
ccctccctccctctgtttacatctaattcttatcgatttagctatagcaggtctcgatcggcggccatgagcggtagccgcagcaagaagtcgtggccggaggtggaggggctgccgtccgaggtggccaagcagaaaattctggccgaccgcccggacgtccaggtggtcgttctgcccgacggctccttcgtcaccactgatttcaacgacaagcgcgtccgggtcttcgtcgacaacgccgacaacgtcgccaaagtcccc

SEQ ID NO: 36127 - DNA, 266 bp, Zea mays
cgcctcagcgcatagcccgccgcgacctcatcgatcaccttcaactttcaatcatggcggacgtcgatgtcgaaccggaggttgccgccggagctcccaagaagaggacgttccgcaagtacagctaccgcggcgtcgacctagatgcgcttctcgacatgtccacggacgacctcgtccagctcttccccgcgcgcgccaggagaaggttccagaggggtctgaagaggaagcccatggcgctcatcaagaagctgcgcaaggcg

SEQ ID NO: 36128 - DNA, 266 bp, Zea mays
cactgtcggagtcgtcttcaaccccatcatgaacgagcttttcacggcggttcgtggaaaaggggctttcctgaatggctctccaattaaagcatcatctcaagatgagttagtgaaggctcttctggtaacagaggctggaaccaatagagacaagaccactgtggatgatacaaccaacagaatcaacaggctactatacaagattcgatccatacggatgtgtggatcattggctttaaacatgtgtggagttgcctgtggta

SEQ ID NO: 36129 - DNA, 268 bp, Zea mays
agagcctcattcatctccattcgaaacaccctcgcacccacactctcccttcgtccccagcctaaatccccgcaaagatggctcgcacgaagcagacggcgcgcaagtccacgggcggcaaggccccgaggaagcagctggcgaccaaggcggcgcgcaagtcggcccctgcgaccggcggcgtgaagaagccgcaccgcttccgcccgggcaccgtggcgctgcgcgagatccgcaagtaccagaagagcacggagctgctcatccg

SEQ ID NO: 36130 - DNA, 181 bp, Zea mays
cgaagtacggcgagggcgacaagcggtggatcgtggaggagcgcgccgacggcaccaacgtccacaactggcactgggcggacgcgactgcctggagtggtcccgcgcgcggctctcttccctgctcgcgggcctcaccatcctcgacggcgagggcggcctcagtctccgcaccgtcgcg

SEQ ID NO: 36131 - DNA, 275 bp, Zea mays
ctgacacaagagagcacgctactactcatcactcgccaacgtgcagagatcagggaggcggcacactccatccactgaccgctcatggcgaaggtccacctctacgtcgccgcggcctgcgccgtcgtcctcgcgctcgccgccccggccctcgccggcgaccccgacatgctgcaggacgtctgcccggctgactacgcctccccggtgaagctgaacgggttcgcgtgcaaggcgaacttttcggcggacgacttcttcttcgacgggctgag

SEQ ID NO: 36132 - DNA, 223 bp, Zea mays
gaagtctccccgatggcggactggggccccgtgatcgtagcgacggtgctgttcgtggtcctcacgccggggctgctctgcacgctgccgggccggggccgcgtcgcagagttcggcagcatgcacaccagcggcctggccatcctcgtccacgccgtcctctacttcgcgctcatcaccatcttcctcatcgccatcggcatccacgtctacgcgggctagt

SEQ ID NO: 36133 - DNA, 274 bp, Zea mays
catacagccaccccggccgcaccttcgtccacttatgacaaccaggtctgtcctatctgccttgtgaaccccaaagacatggcgtttggctgtggacaccagacctgctgtgactgcggacagagtctcgagtcgtgtccaatctgtcgcactcccatcaccacaagaataaagctatactagcaagtggtggctttggatcattgccaatgggtggtatactggagccaccctgcctcacactggaggatcgcgacggcatgtcccagtaacc

SEQ ID NO: 36134 - DNA, 277 bp, Zea mays
gacccattgagatcaggctggcagcttgtattcgtcgaccgtgaggaggacgtgcttctcgtgggcgacgacccttggcaggaattcgtgagcacggtgtcctgcataaagatcctctccccgcaggaggtgcagcagatggggaagcagggcctggagctcctgagctcggcccccgcgcggaggctcggtagcagctgtgacgactacgtcagcaggcaggagtcgagaagcctgagcaccgggatcgcgtccgtcggttcggtcgagttgggat

SEQ ID NO: 36135 - DNA, 278 bp, Zea mays
  unsure (1)..(278): unsure at all n locations
ctctcgagttcgatctgtttgctcccccagacatgtcgggccgcggcaagggaggcaagggcctgggtaagggcggcgcgaaacgccaccgcaaggagntccgcgacaacatccagggcatcacgaagccggccatccggaggctggctcgcacgggcggcgtgaagcgcatctccgggctcatctacgaggagacccgcggcgtgctcaagatctttctcgagaacgtcatccgcgacgccgtcacctacacggagcacgcccggcgcaagaccgtc

SEQ ID NO: 36136 - DNA, 270 bp, Zea mays
gagtgatgggcgcggcggaggtgaagggcaagcaggcggtggatctcaaggggggatccatcacgcgggatcaaggtgcaggacaagtacacgcagtactggtccttcttccgccgccccaaggagacggccaccacggcggcgtcggcggagaaggtgccggccttcgtcgacaccttctacaacctcgtgaccgacatctacgagtgggggtggggccagtccttccacttctccccgtccctccccggccgctcccaccgcgacgcc

SEQ ID NO: 36137 - DNA, 278 bp, Zea mays
tctaaaccctacccacagccaccgccgccgccgccgctacctgacccctagtgtccggatttaacttcaaacatggcggacgtcgatgtcgagccggaagtcgccgccggtgctcccaagaagaggacgttccgcaagtacagctaccgcggcgtcgacctcgatgcgctgcttgacatgtccaccgacgacctcgttcagctcttcccagcgcgcgccaggagaaggttccagaggggtttgaagaggaagcccatggcgctcatcaagaagctgcg

SEQ ID NO: 36138 - DNA, 195 bp, Zea mays
catgaagtttgcttttgaatcctatatttgccaaagaatgttcagtgggttccaagaggagagcttttctatcaaggattctaacatcagtgtttccaatgaggctttcttccaccaattccttgcagtgcgagccatggatcctctggatgtcctgagccagaaccctgattcagtattcgaaaagttctgtag

SEQ ID NO: 36139 - DNA, 271 bp, Zea mays
cccacgcgtccggaaacttgacagtccagtgctagaaaacggggatagctggagcgtgggacagcgccaacttattgcactgggtagggcgctgctcaagcaggcaaaaattttggtactcgatgaggcgacacatctgtcgacacagcaacagacaatcttatccaaaagatcatccgcagtgaattcaaggactgcacagtctgtaccattgctcaccgtattcccaccgtttttgacagtgaccttgttctggtccttagtgatggta

SEQ ID NO: 36140 - DNA, 272 bp, Zea mays
gtccctcagccgcgtcgcaccgcatcgcattctacgattcgaagctgggtctgctcgcagccatggcgaagaattacccaaccgtgagcgccgagtacagcgaggccgtcgagaaggccaggcgcaactccgcgccctcatcgccgagaagagctgcgcgcccctcatgctccgcctcgcgtggcactccgcggggacgttcgacgtgtcgtcgaggaccggcggtcccttcggtactatgaagtgcccggcggaactggctcacggcgcca

SEQ ID NO: 36141 - DNA, 275 bp, Zea mays
gtccaagatcgccgcgtggcaggtcgccgaggtggccaaggtcaacaaccgcttcaagcgcgaggaggtcgtcatcaacggctgggagggcgaccaggtcgagaaggccagcgcgtggctcaagaagtacgagaggaagcttgaggagaagcgtgccaaggcgatggagaaggcgcagaacgaggtggccaaggcgcggcggaaggcggaggagaagcgcgcgtccgcggaggccaagcggggcaccaaggtggcgcgagtgctggagctcgcca

SEQ ID NO: 36142 - DNA, 267 bp, Zea mays
gttactgctagggccggaaaggaccttgtttccagcttggtgtctggattattgacgattggtccccgtttcggtggagcaattgatgatgcagcccgatacttcaaagatgcatgtgataggagcctcacgccatacgagtttgttgaaggcatgaaaaagaagggaatccgtgtgcctgggattggtcacaggattaagagcagagacaacagggataagcgtgtgcagcttctacagaaatatgctcacacacatttcccttcg

SEQ ID NO: 36143 - DNA, 267 bp, Zea mays
ccgcagcagctgccgcagctactggagcatctggatttgaatttggtgtggacccaaacgtagatccagaattggcacttgccctgcggttgtctatggaagaagagcgggcaaggcaagaggctattgcaaaaaaggctgctgaagatacttctaatacagaacataacaatgtcccaagctcaaacagtgattctgttatggctgaaggagaacctgcctcaaatgctgctgctggtgacaaagaacaaccaaaggatgatgacg

SEQ ID NO: 36144 - DNA, 266 bp, Zea mays
ggaaaggtggtcattggaatggatgttgctgcttctgaattcttcggtgagtaagacaagacttatgatcttaatttcaaggaggagaacaacgatggctcaaacaaaatttcaggcgacagctgaaagacctgtacaagtcctttgtttctgagtaccctatcgagtcgatcgaagacccatttgatcaggatgactggagcacttatgccaaactcactgatgagattggacagaaagtgcagattgtaggagatgatcttctc

SEQ ID NO: 36145 - DNA, 267 bp, Zea mays
ggagtgcttccaaatgggatggtcgtcgccgtgaagaagcttcttgacaagatcgatgtcctagaggcgaatttccaaagcgaggttgcttgtctcatagaggtcaagcacaggaacatagtccgatgtctagggtactcatccgagacgcaacatgtgagggcaccgtaccaaggaagatttgtctgggcagacctgcgccaaaggttgttttgcttcgaatacctaagcaaagggagccttgccgattgtctgaccggtaacatc

SEQ ID NO: 36146 - DNA, 276 bp, Zea mays
cggacgcgtgggttgggcgcagagaatccccaagcaaacaaacagggtagatggagaggagatgagaacagaggagaggttgggtctgggacaccatggctccgatgaagctgtacggggcggtgatgtcgtggaacgtgacgaggtgcgcaacggcgctggaggaggctggctccgactacgagatcgtgcccatcaacttcgccaccgccgagcacaagagccccgagcacctcgtccgcataccgtttggtcaggttccagctctgcaggatg

SEQ ID NO: 36147 - DNA, 275 bp, Zea mays
cccacgcgtccgagattactgaaggaaatagggatggactcctataggttctccatctcttggtccagaatactgccgaatggcacactcgaaggaggtattaatccatatggcatcaagtactacaaaaatctcatcaacttgttggtagagaacggcatagagccatttgtgacaattttccactgggacacgcctcaagcactggtagacaagtatggtggctttttagatgagaggattgtaaaagattacacagacttcgctaaggtgtg

SEQ ID NO: 36148 - DNA, 268 bp, Zea mays
tttagtatatatatagtatcaaatcatatcatcgtggaccaattaatatatggttacagcagatgcaatcggatcaaccaacatgcaggtagacacacgtacgtacatgagcacaaagactgacgccaaacatgcagagagagatagcaaactgaagaactctgtttctctctctctcacacacaccacacaatacctatgtatggcagccagctcggcctcgcttattattgttcaaccaccaccacaagctagatagataataatc

SEQ ID NO: 36149 - DNA, 270 bp, Zea mays
agcaggccattctgctcgccttactccctcacagaacccagtaaaatattgccagtcccgccgtcgagatggccccacgccgcctgctcgtcctcgccgtcctcgccctcgcggccaccgccgccgcggccaactccggcttcgcggactccaacccgatccgccctgtcaccgaccgcgcggcctccgcgctcgagtccacggtcttcgccgcgctcggccgcacccgcgacgcgcttcgcttcgcacgcttcgccgtcaggtacggca

SEQ ID NO: 36150 - DNA, 272 bp, Zea mays
cccacgcgtccggtcagcatggacggcgcgccctacctgcgcaaggtggacctgaagatgtacaacagctacacggagctctccgttgctctgaagaagatgttcagcaccttcaccacatccgggaacaacatgaatgagggataactggttgatccggtcagcggtgctgatgtggtcactacttacgaagacaaggatggcgactggatgctcgttggcgacgtcccgtgggagatgtttgtcgagtcatgcaggcgtctgaggatcat

SEQ ID NO: 36151 - DNA, 272 bp, Zea mays
agaacacgcactgcagcaccacttcctgcgctgctgctcatcacacaccgtagtactaacactccatcgccacaatggctcccaaggttgcgctcttccttgccctcagcctcctcttcgctgccgccgcgcatggctgcgaaccctactgtcccggcccagtcgtcccaacgccgcccgtcgtgccgtcgcacagccacgggcgctgcccgatcgacgcactaaagctcaaggtgcgccaacgtgctggacctcgtcaaggtcggcctacc

SEQ ID NO: 36152 - DNA, 270 bp, Zea mays
ccggcgagaagcgaccgaccgcagccagctcacgtctccctcttcatccaccatgctgagggtcgcgggcaggcgcctctcgtccgctctcgcctggcgccccgccgccgccgcctcaggctcccggggccctctcgccggtacactacccggccgcgacgacgacgacacacgcgactgcagggcgcgtttcgccatcgaatctcccttcttcgccgctgccagagggttttcagcagagactcttgctccaagaaaccaggatgtggg

SEQ ID NO: 36153 - DNA, 269 bp, Zea mays
gaaccacgcgtccgcggacgcgtggcgccacagccagcacgccaggctcctcctccagctcctgttcgagatggtggtaggctccatgtttggagcgaattgggtccaccattgctcaaggtatggcgtttggcacgggtagtgccatggcacacagggctgttgatgctgtattaggtccccggaccattcagcatgagactgttgcctcagaagctgctgctgctgcccctgcccctccagtgatgaatgctgatgcttgcagcatc

SEQ ID NO: 36154 - DNA, 266 bp, Zea mays
tttagtatatatatagtatcaaatcatatcatcgtggaccaattaatatatggttacagcagatgcaatcggatcaaccaacatgcaggtagacacacgtacgtacatgagcacaaagactgacgccaaacatgcagagagagatagcaaactgaagaactctgtttctctctctctcacacacaccacacaatacctatgtatggcagccagctcggcctcgcttattattgttcaaccaccaccacaagctagatagataataa

SEQ ID NO: 36155 - DNA, 264 bp, Zea mays
agcagacacctccgccacctccaccctcgaatcgttccccaccatggcgtcgcagggatcctccgtcttcgccgcactcgagcaggccccggaggaccccatcctcggagtgaccgttgcctacaacaaggatcccagccccgtgaaggtcaacctcggggtcggcgcctaccggaccgaggaagggaagcccctagtgctgaacgtggtcaggcgcgccgagcaaatgttgatcaataatccgtcacgtgtcaaggagtacct

SEQ ID NO: 36156 - DNA, 259 bp, Zea mays
ggacgctgggcggacgcgtgggcggacgcgtggggaaggagttcagctacagcaagatcctcaaagatctcaagaaagagattctgctgcaaaggtacagtggtccaggacccagaacttggacaggtcattcagctccagggtgatcagaggaagaacgtctcgaatttcctcgtccaggccggcattgtgaagaaggagcacatcaagattcatggtttctgagcaaccgccgggtccatagcaaaccaaccctgca

SEQ ID NO: 36157 - DNA, 266 bp, Zea mays
cgcccacaaaacacccgaagaaaagaagagactgaacgccgcgagttcacgtgacgatggagaacgccgcctccgccatcgctaagccgtcgctgtccaagaagccctcgccgtcgttccgcctccggaacggcagcctcaacgcactgcgcctgcgccgcgtgttcgacctcttcgaccgcaacggcgacggcgagatcaccctcgacgagatggcctcggcgctcgacgcgctcggcctcggcgccgaccgctccggcctggag

SEQ ID NO: 36158 - DNA, 264 bp, Zea mays
atgacattggaacgggctttgggcatttcgcaattgctaatgatgatgtgtacaagttagctgagaatatcaaatccaagggtggtaagatcacccgcgaacctggtcctgtcaagggaggatccactgttattgccttcgcacaggatcctgatggctacatgtttgagcttatccagagggctgacacacctgagcctctttgccaggtcatgcttcgtgttggtgaccttgagcgttctatcaagttttatgagaaggccc

SEQ ID NO: 36159 - DNA, 267 bp, Zea mays
ggagagccttttcaattgcaccagatgcccctgaaatgttgttgcttgactatcccagtcaccagcgacgccttctaccacttctagcaaaagtatgtctgatgagcagtgctggcaattttatgaaaaatatgtatgtaaagagaactcctgaaatgagcaaagacatacacatttactctagtgctctgaaggcgacactaacttggcagaatatgattacgattcaggagtgtcgcgaggcctgtggaggtcaaggtctaaaga

SEQ ID NO: 36160 - DNA, 265 bp, Zea mays
cccacgcgtccgattgatggtggtagcaccattgtcaaaggcaaaaacataataattgcaactgggtctgatgtaaaatcacttccaggaataacaattgatgagaagaaagttgtttcatctactggtgcactgtgcttgtcagagatcccgaaaaaactggtggtaatcggagcaggttatattggccttgagatgggttcagtctggaaccgccttggttcagaggtcactgttgttgaatttgccccggatatagtaccat

SEQ ID NO: 36161 - DNA, 261 bp, Zea mays
cccacgcgtccgcccacgcgtccggcggcgcgcgccgacgtgggcgtcgggccggtgtcctgggacgacacagtcgccgcgtacgcgcagagctacgcagcgcacgccagggcgactgccagctgatccactccggcgggccctacggcgagaacctcttctggggctccgccggcgccgactggtcggcgtccgacgccgtgggctcctgggtgtccgagaagcagtactacgaccacgacaccaacagctgcgcggagg

SEQ ID NO: 36162 - DNA, 256 bp, Zea mays
cggacgctggcgcgacttcgctccgcttccgccgatcggcttgccccgtcgatttcgccaacccctcgacacgatcgactccattgatcgtacctcgtcgtccggttgtcgatggccaggacatctttcaaaatggagcacgacctcgagaaaaggcagtccgaatctgccaggatcagggataagtatcccgacagaattcctgtgattgttgagaaagctggcaaaactgatgtccccgagattgataagaaga

SEQ ID NO: 36163 - DNA, 257 bp, Zea mays
gcaagagcttcccggcccgaaaccgaaagcaccaccaccaccaccaccaatctctgcgtttttcgtctgcggcggcggcggcagcagcggaggaggtagacgagatgctgtccgccgacatccccccaaaccagaccatctacctcaacaacctcaacgagaaggtcaagaaagaagagttgaagagatcgctttatgccctgtgctcgcagtatggaaggatactggatgtggtggctctgaaaacacagaaactg

SEQ ID NO: 36164 - DNA, 260 bp, Zea mays
cctgtttccgcgcgcgagatcgccgccccgggtgggctctagatcccgatggcctcgcgccgccgcaccctgctcaaggtcatcatcctcggcgacagcggggttgggaagacgtctttgatgaaccaatatgtgaacaagaagttcagcaaccagtacaaggctacgattggggcggatttcctcaccaaggaggtgcagttcgaggacaggctcttcactctgcaaatatgggacactgctggtcaggaaaggtttca

SEQ ID NO: 36165 - DNA, 259 bp, Zea mays
ggtgactgtgatgacgggcggcgcgccgccggcgccgcaggtgctgttccggatggaggagctcgggttcctggtgatccactcgtacgggctgacggagacgtacgggccagcgacggtgtgcacgtggcggcccgagtgggacgcgctgccggcggcggagcgcgcggccatcaaggcccggcaggggctccaccacctggggctggaggtggacgtgaaggacccggccacgctggccatcgtgcccgcggacggg

SEQ ID NO: 36166 - DNA, 272 bp, Zea mays
cggacgcgtggcggacgcgtgggcctgaatcgaaacaaaaggaaatcctcaaggttgtcgccacggaagttcttggtggtgggaagttttatgttcagacagtgggtgaccagagggtggcttcaattcaacagcagcttgcatctttgaaacttaaagatgcaccagtcattggtgcctttaatcctgtgaagggagagatagtcctctcacaatttagccttgacaactcctggaacagagctatgattgttaatggacctcgctctgta

SEQ ID NO: 36167 - DNA, 270 bp, Zea mays
gtgaaggtcctctaagaacaggaatcaggacagggattataagtggaatcggttttggagtttcctttttcttgctatttggggtatatgcagctagcttttatgctggtgctcggcttgttgaggacaggaagacaacctttcctaaagttttcagggttttcctagctcttgcaatggcggcaattggagtgtcgcaatcaagtacccttacatcagattcttccaaagcaaaatcagctgcatcttctatatttgcaattgtagatc

SEQ ID NO: 36168 - DNA, 270 bp, Zea mays
ggttgacaatgaagctgcgagattttaacaagtatgccaaggtgaagacctttgaagtgtggattgataaattgtctattataaactgtctgacgtaggtttctagttgtttttttcactcttatagattgtcccactatttagttgcaggaagccaaatagctaaatggcttcatgattttttttacataagaagggcctcatgatctgcttatggattatcataatttaagtatctagattatataattcacctaataatttgtgttg

SEQ ID NO: 36169 - DNA, 270 bp, Zea mays
cccacgcgtccgcgttgacttccgcgacgccgagccgtgcctcgacaaggtgtcctactcgctactggtcttcttctcggggatgttcgtgacggtgagtgggttcaacaagacggggctgccaggggccatctggaacttcatggcgccctacgcaaagatcaaccacgtcagcggcgtcaccgtgctctccctcatcatcctgctcctctccaatctcgcgtccaacgtgccaactgtgctgctgattggggacgaggtggcggcctc

SEQ ID NO: 36170 - DNA, 268 bp, Zea mays
cggacgcgtgggttaaaagtcaaatccttgctggtggccgagggctgggaactttcaaaagacggctgcaaggaggtgtccatattgttaaggctgaggaagctgaaagcattgcacgtaaaatgttaggccagattctggtaacgaaacaaactggtccggagggaaagattgtgagcaaggtctacttgtgtgagaaactgtctcttactaatgagatgtattttgccatcacccttgataggaaaactgctggtccgctcattat

SEQ ID NO: 36171 - DNA, 272 bp, Zea mays
gcagttccccgaccacaccgttcctccgagcccaggagcagccccgcgccaggaggaagtttgttcttttaacaatatgtcgagggaggagaatgtttacatggccaagttggctgagcaggctgaaaggtatgaggagatggttgagtatatggagaaggtggctaagactgtagatgtggaagagctcactgttgaggagcgtaaccttctgtctgttgcatacaagaatgtgattggggctcgccgcgcttcatggcgcattgtttctt

SEQ ID NO: 36172 - DNA, 274 bp, Zea mays
cccacgcgtccgggacccttgttcgccgccgccgcctctgatctccgcgaggttgtcaggattcaatatgtcgaccagcacattcgctacttcctgcacgctgttgggcaatgttagaacaacgcaggcctcccagacagcggtgaagagcccttcgtctctaagcttcttcagccaagttacgaaggttccaagcctgaagacctccaagaaactggatgtctccgccatggctgtatacaaggtgaagcttgtcgggcctgaaggtgaagag

SEQ ID NO: 36173 - DNA, 264 bp, Zea mays
gctactttcatcgtgacctcaaacctgagaatctgttagttagcaaagatgtcataaagctagcagactttggtcttgcaagggaagtttcatcattgccgccatatacagaatatgtctcaactcgctggtatcgggcaccagaagtattgctccagtcatctgcttatgattctgcagttgatatgtgggcaatgggtgccataatggctgagttgttgacactccatcctctctttcctggaaccagtgaagctgatgaga

SEQ ID NO: 36174 - DNA, 264 bp, Zea mays
cacttctaagtttggaatttgggacttgcgcaaagttctaggaataataccacaggcaccagttctattctcaggttctgttcggtttaatctggatccctttaatgagcacaatgatgcggacctctgggaggctctggaaagggctcatctaaaagatgttataaggaggaattctttaggattggatgctgaggtttctgaagctggtgaaaatttcagtgttggacaacgacagctgttgagcttagctcgtgcgctgct

SEQ ID NO: 36175 - DNA, 259 bp, Zea mays
gacaaatggtagagtgaggcgggcagacagagaggacagcattaggcgaactgtttatgtctctgaacttgaccatactgtgacagaggagagacttgctgatatctttaccacctgtgggcaagttgttgattgcagaatttgtggtgatccccactcagttcttaggtttgcattcattgagttctctgatgaagagggcgccagaactgcgcttaacctgggaggcacaatttttggtttctaccctgttagagtt

SEQ ID NO: 36176 - DNA, 266 bp, Zea mays
ccgaggtccgcaagaacggaacctgcccctggctcaggcctgatgggaagacccaggtgacagtcgagtaccgcaatgagggtggtgccatggtccccatccgtgtccacaccgtcctcatctccacccagcacgacgagacagtgaccaatgatgagatcgctgctgacctgaaggagcatgtcatcaagcctgtcatccctgagcagtaccttgacgagaagaccatcttccaccttaacccatctggccgctttgtcattggt

SEQ ID NO: 36177 - DNA, 267 bp, Zea mays
gagcacaccttgtctctgaccgaagcactatgtgggttccaatttgttcttacacatctggacaacaggcagcttctcatcaaatcagaccctggtgaagttgttaaacctgaccaattcaaggcgattaatgatgaggggatgccaatttaccagaggcctttcatgaaggggaagctgtacatccatttcacggtggagttccctgactcgttggcaccagagcagtgcaaggctctcgagacagtacttccaccaaggccttca

SEQ ID NO: 36178 - DNA, 261 bp, Zea mays
gatgtgaactcagcattgagggcttgtccaatatgtcggaaactttcatactatgtcattccaagtgttctttggtacttctcaaaggaagagaaagaggagatcactgaaagctacaaatccaagctcaagtctattgattgcaagtacttcgactttgggactggctcatgccctttcggaacaagttgtttctataagcatgcctacagagatggccgcttggaagaggtaatactgcggcatcttgatgctgatgat

SEQ ID NO: 36179 - DNA, 261 bp, Zea mays
aggagattggagctggtgaccaggggcacatgtttgggtatgcgactgacgagacccctgagctgatgcccctcagccatgtccttgccaccaagcttggtgctcgtctcacggaggttcgcaagaatggaacctgcccctggctcaggcccgatgggaagacccaggtgacagtggagtaccgcaacgagggtggcgccatggttcccatccgtgtgcacacagtcctcatctctacccagcacgacgagacagtcacca

SEQ ID NO: 36180 - DNA, 127 bp, Zea mays
gttggcttctcctccccctccggttcgggttcgggttcgtgaggttctccggggttcggtttcgtgggtgagcggatcgagatggcggcgtcggatgttgagtaccgctgcttcgtcagcagcctcg

SEQ ID NO: 36181 - DNA, 248 bp, Zea mays
ggacgataagcttatggtgtacgagttcgtggccatgggcagcctttcctccatgcttcacggcaatcgcggctccggccggtcgccactgatctgggagtcgaggaggcgcatcgctttggcctcggcgcgcggtctcgagtacatccacgccacgggctccatggtgacgcgcggcaacatcaagtcgtccaacatcctcctgatccgcaccgtggacgcgcgcgtggccgaccacgggctcgcgc

SEQ ID NO: 36182 - DNA, 266 bp, Zea mays
gtatctggactctcttgcaggattatggtgcacagctttaggtggtagcgagcctcgattactcaaagcagctactgagcaattaaacaaactacccttctaccattccttctggaaccgtacaacaaaaccttcgttggatcttgcacaggagatccttagcatgttcactgcaagggagatggggaaagttttcttcacaaacagtggttcagaagcaaatgactctcaggtcaaactagtatggtattataacaatgcattgg

SEQ ID NO: 36183 - DNA, 262 bp, Zea mays
aagaacggtggtgggggtgatctggtaaggcttggttttgccgaaatattgtaggggaggagtgataaggtcggtggggtttctatgttaaagtcgtggtctcgggcaatatgcgatttttctttatgccatgttttgggaaattttgtagctgcctaggcctcgtgctgttgtggtggttcattagtatgaagacgaaggctctgctggctatgggagtcctttttctttttgttagtattttgtttaaaactatgtatga

SEQ ID NO: 36184 - DNA, 257 bp, Zea mays
ggacggtgggcttccagaaggctctgactgagcatcggaacccagacactcttaaaaagttaaatgatgctgagaaagcaaagaaagagttagagcaacaagagtattatgatccaaaattggcagatgaggagagagagaaaggcaacgagttcttcaaggagcaaaaatacccagaagcaataaaacactacacggaggctctcaagagaaacccgaaggatcctagggtttatagcaatagggccgcctgctac

SEQ ID NO: 36185 - DNA, 241 bp, Zea mays
cacctcaacccgtctggccgcttcgtcatcggcggacctcacggcgacgctggcctcactggccggaagatcatcatcgacacctacggtggctggggagcccacggcgggggcgccttctccggcaaggacccgaccaaggtggaccgcagcggggcctacgtcgcgaggcaggctgccaagagcatcgtcgccgccggcctcgcccgcagtgccatcgtccaagtcttctaaggcaacg

SEQ ID NO: 36186 - DNA, 265 bp, Zea mays
ctcgacgcctctctctctttccccgagctctcgaaaccctaggtgcgtgccgaccggcggcggcggcgaggtgatggcgatggacccggacgcggtggcgaaagccttcgtggagcactactaccggacgttcgacaccaaccgcgcggcgctggtggggctgtatcaggagacctccatgctcaccttcgagggccagaagttccagggcccatccgccattgccggcaagctcggatctcttcccttccaggcctgcgagcac

SEQ ID NO: 36187 - DNA, 260 bp, Zea mays
gccgtcttcctcgtgcacctggcgaccatccccatcaccggcaccggcatcaaccccgcgcgcacctcggcgccgccatcgtctacaacaggtcccacgcatggaacgaccactggatcttctgggttggccccttcatcggtgctgctcttgccgccatctaccacgtggtcatcatcagggccctccccttcaagagccgtgactgattatacgtacattgtttattaccaacagcaaccatgcagcatacgaatcat

SEQ ID NO: 36188 - DNA, 254 bp, Zea mays
  unsure (1)..(254): unsure at all n locations
taataacagagtccgcgaccgtggcgacctggnncggacgcgtgggcggacgcgtggggcaaactattatgaacatctcatgcaacgctgataaagtttaccaaggagggacacatcacacttgtagcttccattgtgaaggctgactctttgagagagttcagaaccccagaatttcatccaactgcaagtgatgaccatttctatttgaaagttcaggtaaaagatacaggctgtggaattggtccacagga

SEQ ID NO: 36189 - DNA, 245 bp, Zea mays
caatcatcctccagacaaagcttgaaagtgtgccaacatcccaaatgtacgatccggagtctcttcgagctggctatgcgatctttgcatctggtcttatcgttggcttcgctaatcttgtttgcggggtatgtgtggggataatcggaagcagctgtgcactgtctgatgctcagaactcatcactctttgtaaagattttggtgattgagatcttcggcagcgctctgggactgttcggagtc

SEQ ID NO: 36190 - DNA, 255 bp, Zea mays
cacaccccccgagctcagcttagctccactccagctccaatcacagtcgtgaccagagcgcgagagctagctagagggccgtgaaaatgccgatcaataggatcgccctggggagccaccaggaggtgtaccacccgggcgccctcaaggcggcgttcgctgagttcatctccaccctcatcttcgtcttcgccggccagggctccggcatggccttcagcaagctgaccggcggcggcccgacgaccccggcgg

SEQ ID NO: 36191 - DNA, 254 bp, Zea mays
cagaccgtggcggacgcgtgggcgcttatcatccgcgcctctacatttcttctctctctgctcctccgactccgcctccgacatgatccatccaagacagggatcgccatgtcggactcggaggagcaccacttcgaatcgaaggccgacgctggggcgtccaagacctacccgcagcaggctggcaccgtccgtaagaacggcttcatcgtcatcaagaaccgtccctgcaaggttgtggaggtttctacctc

SEQ ID NO: 36192 - DNA, 259 bp, Zea mays
ccgacatccgaccgcctcctcctcctcgttctactcgccgccccttctagaatcatccagaggcgtgccggtgaagcgcgagaccggtgaggcatggcgatgcagacgggggtcgcgacctccaaggtcctcatcctcgtcggtgcagggatgacgggctcgatcctgctgcggaatggccgcttatctgatgtgttgggagaactccaggagattatgaagggtgtaaatcaaggaacttcttcgggtccctatgaca

SEQ ID NO: 36193 - DNA, 252 bp, Zea mays
ggtggctgtggctctggttgcggtggtggatgcggcacggcatgctcatcgaatgctccaaggccaacaaagccatgtccggcggctgtggctctggttgtggtggtggttgcggcacggcatggtcatcgaatgctccaaggccaacaacaccatgtccggcggctgtggctctggttgcggtggtggttgcggcagtggcatggtcatcgaaggctccaaggccaacaacgccatgtccggcggctgtgg

SEQ ID NO: 36194 - DNA, 246 bp, Zea mays
ctacccggaggcgccgttctcgggggcgttcaatgggcgggacgggatggcgtgggtgtccaacgtcatcggcgccggcgcgagctcggcatcctcacgtcactgatggtggccatgctggggcaggcccggtacctgtgcgtcatcggccgctccggcgtcgtgcccgcctggctcgccaggatcgacccccgcacctccacccccatcaacgcctccggcttcctcggcctgctgacggcggcg

SEQ ID NO: 36195 - DNA, 249 bp, Zea mays
ccccagtctcggaagagaactatccagaagcgcaagactccaaagccgtcgccttcctatccatcccttcctcgccacgggggtcgcctgagatcacataaacaatggtgaaggctgttgctgtgcttggtagcagcgatggtgtcaagggcaccatctttttcacccaagtgggagatggccctaccactgtcaccggaagtgtctctggcctcaagcctggcctccatgggtttcatgtgcatgcgc

SEQ ID NO: 36196 - DNA, 247 bp, Zea mays
actgggtcggcccgctcatcggcggcggcctcgctggcctcgtctacggcgacgtcttcatcggcggatcctaccagcaggtcgccgaccaggactacgcctaagtagtgtgctccgttcgtctggattgagctcatccaacgcagccgcgcgtttcgatcggcgtcgttatttgctttgctcttcatttcatcacgttatgtaacgtgccaatgatgtgtgtcgtcctggtctgttccgtcgtcct

SEQ ID NO: 36197 - DNA, 249 bp, Zea mays
aggatatcaatgctcttgagcagcacatcaagaacctcctcagcccatccaccccgttcttcttcaacaccctgtacgacccctaccgtgagggtgctgactttgtgcgtggataccccttcagcctcagggagggtgctcacaccgccgtctcccacggcctgtggctgaacatccctgactatgatgctcccacacagctggtcaagcccaatgagaggaatgagaggtatgttgatgctgtcatga

SEQ ID NO: 36198 - DNA, 254 bp, Zea mays
cccacgcgtccgccttcgtctccgccttccgacttcctctagaattcgattccctttcccaagaaaccaagaacccagccccccaccatgacgagctcctcctctccttccagaaaggcgctgagcaagatcgcttgcaatcggctgcagaaagatctcgccgagtggcagcaaaacccccccgccgggttcaagcacaaggtctccgataacctccaaaggtgggtaattgaggtcacgggagccggcggcac

SEQ ID NO: 36199 - DNA, 276 bp, Zea mays
caaattttatcaaggaaaatcagtactagagtatttgacgcagatccatcagaggaaaaaaagaaaccaaaggagggtgacaacattgttcaggatgctcctgcagatattccttccctcctagaattgaagcgtatctactatgaactgatgattcgatattacttgcacaacaatgattacctggaaatctgtcgttgttacaagtctatttatgatatcccagcaataaaggaagatccaaccaagtggataccgattcttaggaagatctgt

SEQ ID NO: 36200 - DNA, 277 bp, Zea mays
tggaaatccatgacgggccatacaacgtcatcaagaactggaactacactggctttgtggacgccatccacaatggcttgggcaagtgctggacctccaaggtgaagagcgaggaggagctgacggctgccattgagacagcgctaggggagaagaaggactgcctgtgcttcatcgaggtgatcgcgcacaaggacgacaccagcaaagagctgctggaatggggctctagggtttctgccgccaactcccggccaccaaatcctcagtagaagtc

SEQ ID NO: 36201 - DNA, 278 bp, Zea mays
cagcccccaaggccccaactacccccagtctcggaagagaactatccagaagcgcaagactccaaagccgtcgccttcctatccatcccttcctcgccgcgggggtcgcctgagatcacataaacaatggtgaaggctgttgctgtgcttggtagcagcgatggtgtcaagggcaccatcttcttcacccaagagggagatggccctaccactgtcaccggaagtgtctctggcctcaagcctggcctccatgggttccatgtgcatgcacttggtga

SEQ ID NO: 36202 - DNA, 103 bp, Zea mays
gaaagattttaacttgtttgaaattgaaatccatccaatcccacctaatccacatgaattaagagcaaaacgaatatgccctaaattgattaattcggttgct

SEQ ID NO: 36203 - DNA, 276 bp, Zea mays
ctttggcagcacatgacgcttttgttgagagcagtggtgccgtaaatacaatttctgcatctcttatgaagatagcaaacgacatacgtttgctaggaagtggtcctcggtgtggtcttggtgaactaatcctaccagaaaatgagcctgggagcagcattatgcctgggaaagttaatccaacccagtgtgaggctctgacaatggtttgtgcacacgttatgggtaatcatgttggtgttacaattggtggtgccaatgggcattttgaactga

SEQ ID NO: 36204 - DNA, 268 bp, Zea mays
catttttggcgaggagaatggttggagatgtgcagagaattctgctgattttgtatgggttttggatccaatagatggaacgaaaagtttcataactggcaagcctctttttgggacgcttatagcacttttgcacaatgggaagccggttattggtgtcattgaccagccaatcttgcgagaaagatggattggggtggatggaaaacaaacaactttgaacggacaagaaatatctgttcgctcttgtaatttacttgcacaagct

SEQ ID NO: 36205 - DNA, 263 bp, Zea mays
  unsure (1)..(263): unsure at all n locations
ggacgctggctacactcccggcggcggcgcaggagcagcagcacccgaggatggtgaagttcctcaagcccggcaangccgtgatcctcctgcagggccggttcgccggcaggaaggcggtgatcgtgcgcgtgttcgaggagggcacccgcgaccgcccctacggccactgcctcgtcgccggcctcgccaagtaccccaagaaggtggtccgcaggactcggccaagaagacggcgaagaagtcgcgcgtcaagtgcttca

SEQ ID NO: 36206 - DNA, 267 bp, Zea mays
ggcagcagctaacatccctcactctcggtacctgacctgaccacgagagcaacatgggcggaggacacgacatgcacgggcagcactacggccacaacggcggcgtgaagggcttcgtgtccaacctcgtccacggcggcggcggccatggccatggaagcggctacggccatggccatggaaacggctacggccatgggaatggcggctacggcggcggccacgggtaccctcctcccgctgccgccggcgcgtaccctcatccgc

SEQ ID NO: 36207 - DNA, 266 bp, Zea mays
agcaagcaaacaaacacctaaagatctgctagctatttcagtgggtctcgtttctcttcagcttcatcagccatggtggttcccgtgatcgacttctccaagctggacggcgctgagaggaccgagactctggcgcagatcgccaatggctgcgaggaatggggattcttccagcttgtgaaccatggcatcccgctggagcttcttgagcgcgtcaagaaggtgtgctccgactgctaccgcctccgggaggccgggttcaaggc

SEQ ID NO: 36208 - DNA, 269 bp, Zea mays
gcgagagacttgaccaagcagcagcagcagggatggcgcctcggggagctgtacgggatgccgctgtcccccaacgtggtgcacgtggccaccgtgctcaacgagaagggcctcgacttcgagatcgtccccgtcgacctcaccaccggcgcccacaagcagcccgacttcctcgccctcaaccctttcggccagatcccggctctcgtcgacggagacgaagtctcttcgagtcccgtgcgatcaaccggtacatcgccagcaagtac

SEQ ID NO: 36209 - DNA, 268 bp, Zea mays
cggaccgtggaccacctcagctccgccgcttgcccgcttttgctctctccctcccggctctcggcttactctacacgctaccgtctcacagccgtaaacgcccctcccggatcccgctagttcgccaccgccgcccgcccgcccgccgttcgcctcatcatggccgcctcgtcgaccgccacctccgtccacgacttcatcgtcaaggatgcgagcggcaaagacgttgacctcagcacctacaaggggaaggttcttctcattgtta

SEQ ID NO: 36210 - DNA, 269 bp, Zea mays
gatccttgagaagagagaggaagacgagagctagaagcgaaggagaaaagcagttcttcagctaggcaggagggcacaggaaggaggagatggcgtcaaagaggattcagaaggagctcaaggatctgcagaaggaccctcccacctcgtgcagtgcaggtcctgttggtgaagacatgttccactggcaggcaacaataatgggtccatctgatagcccatattctggtggagttttcctagtcacaatccattttcctcctgattat

SEQ ID NO: 36211 - DNA, 267 bp, Zea mays
aacaaactgctccgctttcagcacctgcccagcggaggaagagtgcggattgcggcggcgccggcggacgaaacaatggcgtcggcgagggacgagcatcttgatgggattcgcgcgctgatggcggcccactctccgccgctccacgggctggtcgtcccctccgaggatgcccaccagagcgagtacgtgtcggagcaggataaacggcgggagttcatctccgggttcacagggagcgctggcttggctcttatcacgatgaaa

SEQ ID NO: 36212 - DNA, 264 bp, Zea mays
atctggacagaatcaagttaaggcttctgtacaacgaaagattcggcaaagtatcgctgatgagtaccccagccttgaacctttgctagatgacttgctcccaaaaaagtcacctatgattgttgttaaatgccaaaatcatcttaatcttgtagtggtgaataatgttcctctatttttcaatatacgtgatggtccttacatgccaaccctgcgtcttcttcatcagtatcctgatatcatgaaaaagttccaagtggatag

SEQ ID NO: 36213 - DNA, 263 bp, Zea mays
gcagcagccaaaacctacctagccgccgccgcaggccccccatcgccgccaagatgcagatctttgtgaagactctgacggggaagaccatcactttggaggtggagtcctccgacaccattgacaatgtgaaggccaagatccaggacaaggagggcatccccccggaccagcagcggctcatcttcgccggcaagcagctcgaggacggtcgcaccctcgccgactacaacattcagaaggagtccaccctccacctggtg

SEQ ID NO: 36214 - DNA, 122 bp, Zea mays
cgcagtatgaccaaggactgccgtcttctcggcaagttcgacctcaacggcattgcgccactccaaggggcacaccccagatcgaggtgaccttcgaggtggacgccaacggtatcctaaac

SEQ ID NO: 36215 - DNA, 265 bp, Zea mays
ggaggaggagttcatcatccgccaccgggagctgcagaaccacatcgagcgcgcgctgagccgcgacaggcccaggccagcgccggcgctgcacgaggccgaggtcgccgccatccgcagggagatcgtcaacttccacggcgtcatggtgctgctcctcaactacagcagcatcaactacataggcctggccaagatcctcaagaagtacgacaagcgcaccggcgcgatgctgcggcgtgccgtgatggaatcggtgctgcag

SEQ ID NO: 36216 - DNA, 292 bp, Zea mays
cccacgcgtccggtgtaaagagattgtgttgagcccagagttctgtggcaagctcaccttccctgtgtctctaaaacagcctggtcctcgagatggaaatacaatggtccagtgttttataaagaggaataagtcaaaatccacttaccatctctacctgtgccttagcaatgttgttacttcagaaagtgggaaattcctcttatcagctaaacgacaccgcaaaaccacatgcaccgagtacactatatcaatggattctggcaacatctcaagatgcagaagaacctac

SEQ ID NO: 36217 - DNA, 293 bp, Zea mays
cccgaggccaactcctccgcggcccacgcgggaggcccgcacgccgtgcgcgtcttctgcaaggccggcggcgaggactacagcctcacggtgcgcaacggcacggcgtgcctgtgcgcccaccaacccgcgggacgagtaccagcactgggtcaaggacatgcgccacagcacccgggtgcgggacgaggagggctacccggccttcgcgctcgtcaacaaggtcaccggcgaagcgctcaagcactccacggggcaaggccacccgtcaagctcgtgccctacaacccgga

SEQ ID NO: 36218 - DNA, 290 bp, Zea mays
caagaaccccaacttcgtcggctgcgtcgagggtgcactcggcatccgcggctggctcgagtcgcagggccatcagtacattgtcaccgatgacaaggaaggccccaactgtgaactggagaagcacattgaagacatgcatgtcctgattaccaccccattccacccagcttatgtcactgcagagaggataaagaaggcgaagaatcttgagcttcttctcacggcaggaatcggctccgatcatattgatcttccagcagctgctgctgcgggcttaactgtggctg

SEQ ID NO: 36219 - DNA, 292 bp, Zea mays
ctcaagtactccaactggtgttgaaacacctgatgttatcgaccttcggaagctgcagaggaaggagactgacaagcaggcagaacggccgctgtaccaggttcttgaacaaaaggaagaaaggatcgcccctgggactctatatgggtcaagccatacgtatgtgttgggaacacaagataaatcatcagctccgaaaagggtggatctgcttaagaatcaaaagtcagacaaggtggacgtcaccatccaacccgaggaactggaagccatggatgatgttctggcagcc

SEQ ID NO: 36220 - DNA, 290 bp, Zea mays
cggaccgtggtgccgtactattctatgcctcgtggtgcccattctcacaggaatgcaaaccgaattgtgagacactggcttacttattcccagctatccggcattttgcatttgaggaatctgcaattaggccaagcataatttcgagatacggcatccatggtttcccaacactctttctcttgaactcgaccatgagagtacgatatcatggaccaaggactgttaaatcacttgcagctttctacactgatgtctctggtatcaatgcatcggtgaagtcaactgca

SEQ ID NO: 36221 - DNA, 292 bp, Zea mays
cccacgcgtccggcaagataagtggactggtcaattccctgtgaagtggcacatagtgaaggatgttcccaataatcttttccgacatataattcttgaaaacaacgacaataaacctgtaacaaacagcagagatacacaggaggtgaaactagagcaaggaatggagatgctgaagatctttaagaaccatgatgatgatgcatcaatccttgacgactttgagttttacgaggagcgtgagaaagcgctgcaggaaaataaggcacgcctgcatcagcaacatctaccc

SEQ ID NO: 36222 - DNA, 290 bp, Zea mays
cccacgcgtccgcatttcccgtcctgtccttcccttacccggcggcttaaaccctagttctcactcccatcgccgcttcagctccgccgcagcagatggagttctggggtctcgaggtcaagcctggttccactgttaagtgtgagcctggatatggctttgtgctgcacctttcccaggctgctcttggggaatcgaagaagagtgataatgccttgatgtatgtcaaaattgatgatcagaaacttgccattggaaccctctctgttgacaagaacccacacatacaa

SEQ ID NO: 36223 - DNA, 289 bp, Zea mays
cccacgcgtcagaaaagtgctaatgatgagcatgagagaagtattctgacaaagctcaaacaacagtgtgggggacagtttacttcaaaaatggagggcatggttactgaccttactgtcgctagagatcatcaaactaagtttgaggagtttgtagctggacatccagagttgaatcctgggatagacttagctgttactgttttgacaacgggattctggccaagctacaaaacttttgacataaaccttcctgccgagatggtgaaatgtgtagaggttttcaagg

SEQ ID NO: 36224 - DNA, 287 bp, Zea mays
cgcaggtcgactcggtgtacgccgccatccagaagctgggccacaccgacgtcgacgtcaaggtctccgagaccgggtggccgtccaggggcgaccccgacgaggccggcgccacgccggagtacgccaggacgtacatcggcaacctgctgcagaggatcgagatggggcagggcacgccgatgaggccgtcggcgcccgtcgacgtctacgtcttcgcgctcttcaacgagaacctcaagcccggcccggcctccgaacggaactacggcttgctctaccccgac

SEQ ID NO: 36225 - DNA, 293 bp, Zea mays
cgagactgaacagcagtccgagacgccatgaacgtggaggaggaggtcgggaggctcaaggaggagatccataggctcggccagcagcagcccgatggctcttacaaggtcaagtttggcgttctcttcaacgacgatcggtgtgcaaatatctttgaagcactagttggcaccttgagggccgccaagaagaggaagatcttgacctacgaaggcgagctgcttctgcaaggtgtccatgacaacgtggagataaccctgttgcccccacctgcagttgctgccgcttgaag

SEQ ID NO: 36226 - DNA, 282 bp, Zea mays
cggacgctgggctccgacaagatctggaacaacgggcccatcagcttccagctgcagtggttccagcaagtcacctccgccgtgtgcgggcaggactgcaagagctacctggccaactcgctgttcgtgttcggcgagttcgggggcaacgactacaacgccatgctgttcggcaactacaacgcggaccaggccagcacgtacacgccgcagatcgtgagcgccatcgcggccggcgtggagaagctgctggccatgggcgccacggacgtggtggtgccg

SEQ ID NO: 36227 - DNA, 286 bp, Zea mays
aatcgtcatgggactagcgtactgcgtccagcacatgcacgagctcagccctcccgtggcgcaccctgacatgcagtcgagctccgtactgctatctgaagacggcgctgcgaagatagcggacatgagcgtttggcacgaagtgatttctcaaggcaaaacgacgacaaatggtgacgaacaagcgtcgtccgctggcctgctggcggggaatgtgtacagcttcggtgctctgctgcttgagatcatctccgggaagcttccgactccataccccgcacacgag

SEQ ID NO: 36228 - DNA, 291 bp, Zea mays
cccacgcgtccgcccacgcgtccgcatcgctgtcggcgacgccctccccgacggccagctcgggtggttcgacgagaacgaccagctgcagcaggtctccgtccacgcgctcgccgccggcaagaaggtcatcctcttcggcgtccccggcgccttcaccccgacctgcagcaaccagcatgtgccaggcttcatcacacaggctgagcagctcaaagccaagggtgtagacgagatcctgcttatcagcgttaacgaccccttcgtcatgaaggcgtgggcgaagaccta

SEQ ID NO: 36229 - DNA, 277 bp, Zea mays
gtccctgacgccgacgtgccgaccaagcacacaaaggacctgttccccatggaccggaccgtgagctacgaggggcaccgtcgcccgctcacgtcgttccaggtcaccgcactcggagacggcaccgtctttatcggcatcgtcgccaaccacgccgtcgtggacggcacctccttttggcaattcttcaatacctgggcggccatctgccgcggcgagtcccccaaactgccggacttccgccgaaacttcttcggcgagtccactgccgtcctcc

SEQ ID NO: 36230 - DNA, 272 bp, Zea mays
cggacggtgggcggacgcgtgggttgcagatgtgcttggggtcgaggtgtttaggcagactattgctggatatatccttgtggggagttactgcgccttctctaacaggggtggtttggttcatccccatacatccgttgaagaccttgacgagctctccacgctcctccaagttcctcttgtcgcaggaactgtgaacagaggaagcgaggtcattgctgcaggcatgacagtgaacgactggactgccttttgtggctcggacacgacag

SEQ ID NO: 36231 - DNA, 278 bp, Zea mays
ggagtccgcggcgctcggggccaccgctgacctcaccgacgaccccacctggatactcgatcccctcgacgggaccactaatttcgtccatggtttcccatttgtatgtgtctccgttggcctcaccattgggaaaattcccactgtcggagtcgtcttcaaccccatcatgaacgagcttttcacggcggttcgtggaaaaggggctttcctgaatggctctccaattaaagcatcatctcaagatgagttagtgaaggctcttctggtaacagagg

SEQ ID NO: 36232 - DNA, 278 bp, Zea mays
aacaaggacaaatccaatattcagaaattgccttccagatctgatcgcctatcattttattccaagagtttggagataataggagttgcaccagagaggtttgagaagaataaccagttctggaagaaccaggttcacaagtattggtcatttcttcatgttgaaaagactagcattcgaaacgtcatggacatgaatgctaattatggtggatttgctgcagcactaagcagtgaccctgtctggattatgaatatagtaccctataccatgatgaa

SEQ ID NO: 36233 - DNA, 278 bp, Zea mays
gcaagaacgacagagtggtcaggctgcacaaacttgcactggaaagatgctccagtgtccatgacgccgaccatcaaatggcttctgggacttggcctaccggtgtggctatacagtggagactttgatgccgtctgcccactcaccgccacaaggtactccatcgctgacctcgagctctcggtcatggagccatggcgcccgtggacagcaaccagagaggttggaggctatgttcagcagtacacgggaggtcttgtgcttatttcagtgagggg

SEQ ID NO: 36234 - DNA, 133 bp, Zea mays
cccacgcgtccggctgcccagaaggttgttgaggttgatgctcttgctaaggcattggctggtcaaaaggatgaggcttacttcgcagcaaatgctgctgctcaggcctcgaggaaatcctcaccccgtgtga

SEQ ID NO: 36235 - DNA, 265 bp, Zea mays
ccactagtcacgatgcctgccctcgctaagcccgcctcccgcaccgccaagcccgccgcggctccgaagccgaagcctgccgccgccaagccgaagcggccaccgctggtgcctcccacccgccttacttcgagatgatcaaggaggctatcacggcgctaaaggagaggaccggctccagctcgcaagcgatcgccaagtatgtgggggacaagcacggcgcgtctctgccggccaacttcaagaagatgctttccatccagct

SEQ ID NO: 36236 - DNA, 268 bp, Zea mays
gggacctgggctgcggatgaggcttactaaagggaagtcggtagtcgccaaggaattctattcctattcgatgcagttatgtggtgtgagaggcggaggcgaacagcctcgcaggcgatgttttggcgacccagaaacgacctcagcttggtgatagccttcgagagcactcgagaacgcaacgcagccatcatgctcgctcggcgtttcgctgtagattgcaacatcatccttgctgggccaggcgacaaaactccctggtgaacga

SEQ ID NO: 36237 - DNA, 271 bp, Zea mays
cggacgctgggggacgtgccgcgaatgccggcgttcgaccacgtcccgctgccctacgacgggccgagagccgccgacatcgcccgcaagcgcgccgagtacctcagcccgtccctcttccacttctactccaagcctctgaacatcgtggagggcaagaggcagtacttgtacgacgagcacggccggcgctacctggacgcgttcgccggcatcgccaccgtgtgctgcggccactgccaccccgacgtcgtggacgcgatcaccaggc

SEQ ID NO: 36238 - DNA, 275 bp, Zea mays
cacctacgcaacaccagacgctccagcagtccagcactcggagctcgcgcgcccgacggcccaccatgatcatccccaagaagaaccgcaatgagatctgcaagtacctcttcaaggagggcgtgctgtatgccaagaaggactacaacctggcgaacacccacagattgatgtgcccaacctccaggtgatcaagctcatgcagagcttcaagtccaaggagtatgtcagagagaccttctcctggcagtactactactggtacctcaccaacg

SEQ ID NO: 36239 - DNA, 276 bp, Zea mays
gttcctgaacgacgacttccccgtggacttcgccttcttcgacggcggcgccgcgccgctggtggacccgggcagcggcgtgtcgtacaccaacgtgttcgacgccaacttcgacaccctggtggcggcgctcaagtcggtggggcacggcgacatgcccgtcgtggtgggcgaggtcggctggcccaccgacggcgacaagcacgccaccaacgcgtacgcgcacggttctacaacggcctgctgaggcggctggcggcgaacccggcacgcccg

SEQ ID NO: 36240 - DNA, 127 bp, Zea mays
ttccggatcaggcgtgcgagctcgggaatcaggggtttcacacatagcttcgtcgatttgaatttgatgtactaatggagtctaagggtggcaaaaagtctagcagtagtcgttctatgatgtatga

SEQ ID NO: 36241 - DNA, 127 bp, Zea mays
gggcgacaaccagagctggaagatcctgccctggggcgacgaggcctacgccgggggcggcagcagcgccgccaacgcgccccgcttcggcggcggcgagcccaccgtccgcatctactgcaaggcc

SEQ ID NO: 36242 - DNA, 123 bp, Zea mays
cggacgctgggcggacgcgtgggcggacgcgtgggtcagtgcacaggcactcgggcttggccgttgctggtttggcagcagatggcaggcaaattgtttcaaggaccaaatcagaagctgcca

SEQ ID NO: 36243 - DNA, 269 bp, Zea mays
accatccccattactggcactggcatcaacccagctaggagccttggcgctgccatcatctacaacagggatcacgcctggaacgaccattggatcttctgggtcggccccttcattggcgctgccctggctgccatctaccaccaggtgatcatcagagccatcccgttcaagagcaggtcttaagctgccgtggccgtgccgagacatgccagtccgaagaacgggcgtcttcctgtgatgtcttcttgtctgcccacggcctagtt

SEQ ID NO: 36244 - DNA, 123 bp, Zea mays
cccacgcgtccgggagaacgtcggagacaccttctacaaatccatcccagcacctctgttctggccaaccttcatcatcgcaatccttgctgccatcatcgcaagccaggcgatgctctctgg

SEQ ID NO: 36245 - DNA, 275 bp, Zea mays
aaccaccatgaagggcaaggccaacgcctccaagaaggatgaggccaggctccgggccggcggcggcggcgccggaaagcgcaagaaggccgccgcgagcggtaagcccaagcgccctccctccgccttcttcgtcttcatgtctgaattcaggcaggagtaccaggcgcacaccctggcaacaagagcgttgcggccgtgagcaaggcagcaggggaaaagtggcgctctatgtcagagcaagagaagcaaccctatgtggaccaagctgggca

SEQ ID NO: 36246 - DNA, 271 bp, Zea mays
cattaatcagctttgcgagcgtcttccgagtccgatgggagaatcagctgtggactgtggcagtcttgcgtccattcctgacattgcgttcaccattggaggcaagaagttcaagctgaaaccagagcagtacattctgaaggttggtgaaggacaggctgcccagtgcatcagcggattcacagctatggatatcccaccaccccgtggccctctctggatcttgggtgatgttttcatgggagtctaccacaccgtcttcgactatggc

SEQ ID NO: 36247 - DNA, 269 bp, Zea mays
ggacgcgtgggataaatataacacagagagtgtgtcagaagaggtccttgaggagatgcgaacattactgaccaaggaatcaagcgatgaaactctggggaacacctttctactggatgatgaaattagcttgcccatatcacttgaggagatagcagattctatggatgccaaagaatttcagaatattgccccaccacaagagcttactgcaattcctgcctttcaattcttgaagagctaagccctggaaggcctaggcctacgtt

SEQ ID NO: 36248 - DNA, 267 bp, Zea mays
gtgaaaatggttactacaatggtcttatcttccatcggagcatcaaaaacttcatgatccaaggcggcgatccaactggcacaggaagtggaggagagtccatatggggtaaaccgttcaaggacgagccaaactcaaagctgctacattctggaagaggtgtagtcagcatggcaaattcaggccctcataccaacggatcccaattttttatcttgtacaagtctgcaccacacttaaattacaagcacacggtatttggcatgg

SEQ ID NO: 36249 - DNA, 271 bp, Zea mays
cccacgcgtccgctcgcctccgtgctgggcgccggcgtgcctgtgacggagccggacctcgagcgcctcccctaccttcaggccatcgtcaaggagacgctccgcctgcgcatggccatcccgctgctggtcccccacatgaacctcaacgacggcaagctcgccggctacgacatccccgccgagtccaagatcctcgtcaatgcctggttcctcgccaacgaccccaagaggtgggtgcggcccgacgagttccggcccgagcgcttcc

SEQ ID NO: 36250 - DNA, 266 bp, Zea mays
cgcacaccagcacctgccctcctcgccgtcgccgcctccctccgcgcgaccgatctaccctccgccgccaccatgtcgctgatcgccggggaggacttccagcatatcctgcgtttgctgaacaccaacgtggatgggaagcagaagatcatgttcgccatgacctcaatcaagggtgtcgggcgccgcttctccaacatcgtctgcaagaaggccgacatcgacatgaacaagagggccggcgagctgacgcctgatgagctgga

SEQ ID NO: 36251 - DNA, 264 bp, Zea mays
tcaatgcctcaagctcaaacagcgattctgttatggctgaagcagaacttgcctcaaatgctgctgctggtgacaagcaagaacagccaaaggatgatgacgatctactacagcaggcacttgcaatgtcaatggagggcggtgcttcaggatctgcagctgtgactgactccgctatggcagaagctggtgcagttgaccctgacttagcgttggctcttcaaatgtctgtccaggatgcaaacatgtccagtgacactgata

SEQ ID NO: 36252 - DNA, 264 bp, Zea mays
ggggctctcgctctctccgctggacctcgttctgcccagcagaggccacaccccaacagtctacctgtacagccccagcgatgttgccgccgccgatggtttcttcgacgtggccaggctcaaggaggctatggccaagaccttggtggccttctaccccctcgctggccgcctcggcgtcaacaacgatggcagggtagagatcacctgcaccggcgagggcgcactctttgtggtcgctcatgctgacctcagtgttggtga

SEQ ID NO: 36253 - DNA, 262 bp, Zea mays
  unsure (1)..(262): unsure at all n locations
aaacanacacacgtccgcggacgcgtggcgacgtggncgagacgcgtgggacttcagaaagcgttgctatcaaggtgattgactaagataagatgaagaagtgtggatcttatggatcaaataattcaagagatttcagtgatgaagttggtaaaacatccaaacattgtccaattgtatgaggttatggctaccaaaaccaagatatattttgtgatagagtatgtcaagggaggagagttgttcaaaaaggttcaacgtg

SEQ ID NO: 36254 - DNA, 261 bp, Zea mays
gcagcgcgcgagccacagctagcaccaccaccttgcaccgcacccgcaccgagacgaacagatctatcgatcgatagctagatccatggctgccggcggcgacgacaccaccatcgcgcaggtccacagcggcatcgacagcagcaacaagacgctgctcaagagcgaggccctctacaagtacgtgctggacacgtcggtgctgccgcacgagccggagagcatgcgtgagcagcggctggtgaccgacaagcacgagtg

SEQ ID NO: 36255 - DNA, 259 bp, Zea mays
  unsure (1)..(259): unsure at all n locations
ggcgggcacacgtccgcggacgctgggcgacgtggncaggacgcgtgggcggacgcgtgggtgcccccaagcattggatgctggacaagcttggaggacttttgctcccaagccaacttctggacctcacaagtctagggagtgcctgccactgatcctcatcatcaggaacaggctcaagtatgctcttacataccgtgaggtcatttccatcctgatgcaacgccatgtacttgttgatggcaaggtcaggacagac

SEQ ID NO: 36256 - DNA, 264 bp, Zea mays
cggacgcgtgggtacaccaagaccctgaagaaatttcatggctggcttgccagttctagttttacgtggcaatgaagctctctcctaatagagataaattcatggaggtcattagtggaactggtgatatcaatgcagatattgagaaattttgcacaaccttctctccttttctcaaagaaaatcacgagtttctggcgagcgttggtcttgatgatatgaaggcttcgtagagcgatctccaaggtggtgattacaacaaaa

SEQ ID NO: 36257 - DNA, 261 bp, Zea mays
cgatgttggtgaggcggcccctgttctccccaagggtttggagtgggctggctttgtgttgaactcgagaatgctgtggaaggaggctgaaggcaagcccgactgggtgaaggatcttgatgctgttggcgagaatggagaggagattgagaatccacttactctgttgaatgatccatcctctgttgagccactggggaactgtgggaagaaggtcctactgtggtggcttcgtgttgaagcacgggcggatagcaagtt

SEQ ID NO: 36258 - DNA, 261 bp, Zea mays
cccacgcgtccgcaacccccccctccgccccgcgcttcgcctgggtaccggcgtccgccgcgccccgtcccgtccaggaacaggaagagcagtaacccatccatcggggatcaccaggggagcaagatgtcgactgccgccgccccaagattgcccgctcccagatccggggcaagctatcactatcagacgaccgcggctccggtggccaacaccctctccttcgccggccacgcgaggcaggcggcccgcgcgtccggg

SEQ ID NO: 36259 - DNA, 258 bp, Zea mays
gcagcagccaattcgctcgagttcagatcgagcgcgcgccaagcaagtcttccggccggccgcgaagagcgcaatcaagcaagacaagatggtgaagctcgccttcggaagcgtcggcgactccttcagcgccacctccatcaaggcctacgtggccgagttcatcgccaccctcctcttcgtcttcgccggcgtcggttccgccatcgcctacgggcaactgacgaatggcggcgcgctggacccggcgggcctggt

SEQ ID NO: 36260 - DNA, 257 bp, Zea mays
gcagcccccaactacccccagcctcggaaggaaccttccagaagcgcaagactctaaggccgtcgccttcccattcttcctcgccgcgggggtcgcctgagatcacataaacaatggtgaaggctgttgctgtgcttggtagcagcgatggtgtcaagggcaccatctttttcacccaagagggagatggccctaccgctgtcaccggaagtgtctctggcctcaagcctggcctccatgggttccatgtacatgca

SEQ ID NO: 36261 - DNA, 256 bp, Zea mays
cccacgcgtccgcggacgcgtgggttttttttttattaaaaccatgcatttttattgtttcatcacaattccatcttctcttattcgttctgacagcagcaggagaccccacgagtggcccccacgtgacagagcacacggctggtgtgtggcatggtgctacacgaacacgacacactaacgagacagattaaagctaaccgatcgaagggaattcattcgtccaacagcaacaaagtcccagattaaaagaaga

SEQ ID NO: 36262 - DNA, 262 bp, Zea mays
cccacgcgtccgcccacgcgtccgcccacgcgtccgaaaccctcctccctcactgccccctcgcagacgagacgcgtggtagctagggttttggcctcgccgcgcacgcctcctgaagcttctagacgttcgaggaggaggaggggaggctcccgccgccgccgccgcagccatggcgtccaccaaggtgcagcgtatcatgacccagcccatcaacctcatcttccgtttcctccagagcaaagcgcgcatccagatctgg

SEQ ID NO: 36263 - DNA, 127 bp, Zea mays
accaccgtccgggacctggtgcaataaatgtatggtcgtgtttgctcgagagctactcaggtgattttgtcgagggagcaccaaaagcagaaaagaacccttttttttcaatctctctagattctga

SEQ ID NO: 36264 - DNA, 119 bp, Zea mays
ctcgttctggtaccttgacatatgaagcggtgtttcaaacaacagctgtaggcttggggcagtcaacttgtgtaggcattggtggtgacccattcaatggcacaaattttgttgattgc

SEQ ID NO: 36265 - DNA, 123 bp, Zea mays
gagataacacacacacacacaaaccccaatcccctgcggcggcgatggactcgtcatcggcgggctccggcggcaactcgctcccgtccgtcggccccgacgggcagaagcggcgcgtgtgct

SEQ ID NO: 36266 - DNA, 255 bp, Zea mays
atatctttgaacaattgatctctcaggaatatatgaggccttggagttgagggatggaggatctgattatcttggcaagggtattcttaagcttttggcttaaaatttgataggaggagatggcggtcacgatcacgtgggtgaaggcgaggcagatcttcatcagccgcggcaaccccaccgtcgaggtggacgtgggcctcagcgatggcagctacacgagggggcgtacccatcggcgcatccactttatga

SEQ ID NO: 36267 - DNA, 116 bp, Zea mays
ggacaacctccgctacgtcgacgcccacaacgccgccgccgacgcgggcgtccactccttccgcctcgggctcaaccgcttcgccgacctcaccaacgacgagtaccgcgccacct

SEQ ID NO: 36268 - DNA, 275 bp, Zea mays
cggacggtgggcaggctccgactccaagaaggtgacccctgaggtgattgctgagtacaccgtccgtaccctccagaggaccgtccctgctgctgtgcctgctgttgtcttcctctctggttgacagagcgaggaggaggccacccgcaacctcaatgccatgaacaagctcagcaccaagaagccgtggtccctgtctttctccttcggccgtgccctccaggcgagcacctcaaggcctgggctggcaaggtggagaactggagaagctagag

SEQ ID NO: 36269 - DNA, 277 bp, Zea mays
cccacgcgtccgacttttccaagcgtggctaaacttgtactatttaaccattggaattgcggaaacccatacaggcgacaggttgctgatccagcaaggcctgcacggactctgaccggtgctgtgaggagaggtggagagaacacaagcgttgacgccagcggaaactcttgcgacctctcaacaaagctgctccatcttgcgtggcacccaactgagaactccatcgcgtgcgctgccgcaaacagcttgtacatgtactacgcataggggaacg

SEQ ID NO: 36270 - DNA, 278 bp, Zea mays
agcattttctgctgtcgcacttgcaaatcaaaagcttcttgggattccttcagaaaagattaatgtccatggaggagctgtgtctctagggcatcctcttgggtgcagcggtgctcgcattttggtcacccttctcggtgtccttagggaaaagggcggcaagatcggtgttgctggtgtctgcaacggcggaggtggagcatcagctcttgttctcgaactcgcataagaagtattggcttgaagcactggatatgtagctaattcagtcgcattca

SEQ ID NO: 36271 - DNA, 270 bp, Zea mays
caaagaggagcagggaaagattgacgaggctgctgatttgatgcaagaagttgctgtcgaaacatttggctccatggcaaagacggagaaaattgctttcattcttgagcaggtccggctatgcctaagatcgtcaagattatgttcgagcacaaattttatcaaggaaaatcagtactagagtattggacgcggatccatcaaaggaaaaaaggaaaccaagggagggtgacaacattgttcaggatgctcctgcagatatgccttccc

SEQ ID NO: 36272 - DNA, 279 bp, Zea mays
cggacgcgtgggcggacgcgtgggtacatctccatcctcaccgtcatgggcgtctccaagtccacctccaagtgcgccaccgtcggcatccagggcatcgcctggtccttcggcggcatgatcttcgccctcgtctactgcaccgccggcatctccggcgggcacatcaacccggcggtgaccttcgggctgttcctggcgaggaagttgtccctcaccagggcggtgttttacatcatcatgcagtgcctgggcgccatctgcggcgcgggcgtcgtc

SEQ ID NO: 36273 - DNA, 260 bp, Zea mays
gagaatcctaccaaacctagctaccaactcgatcgtcgtcatcacgctcgatcgcacaactgcaccaaggggggaggagacctaaaaactactacatcttttatagctacatctctagcttaagatcgagagggtaaataaggacgagcgggcgcgatctagaagagcagctgcaggtactaccatcatcgtcgtcgtcgtcgccatgatgaccgtcgtcgacgccttcgtctcctacaccgatgccggctcccctgctg

SEQ ID NO: 36274 - DNA, 277 bp, Zea mays
cccacgcgtccgcccacgcgtccgcccacgcgtccgaggtgacagtcgagtaccgcaatgagggtggtgccatggtccccatccgtgtccacaccgtcctcatctccacccagcacgacgagacagtgaccaatgatgagatcgctgctgacctgaaggagcatgtcatcaagcctgtcatccctgagcagtaccttgacgagaagaccatcttccaccttaacccatctggccgctttgtcattggtggacctcacggcgatgctggcctcactgg

SEQ ID NO: 36275 - DNA, 273 bp, Zea mays
tgattgttccaggtattagcagtcgaccggttcctcggagcacgatgaagtttgttgctgcctacctgcttgctgtcctcgctgggaacgccagcccctccgctgacgatttgactgccattctggagtcagttggctgtgaagttgacaatgaaaagatggaactcctgctgtcccaactgagcggtaaggacatcaccgagctcattgccgcgggcagggagaagtttgcttcagtcccatgtggtggcggcggtgtcgctgttgcggcac

SEQ ID NO: 36276 - DNA, 266 bp, Zea mays
accatagcgcccgatgcccaacgtcgacatgaggagagaaagggccgagaaagagtcctgccgaaggtagtgctaagaaattgtgaaggttcttcggtcggcaccgcgtgttttcaaggaggagctgaggaaaggagtgaggtcacgagaatctgaagatcatcctggtacctggaatctcaagtctcaggcaagttgtgcccttgtccacttctttttacccaataatgttctttataatcatttaccatgcataggtttaattt

SEQ ID NO: 36277 - DNA, 265 bp, Zea mays
cccacgcgtccgaaaaaccattgccattaagtcaggagatgtgtatattcctcgtggtgtttcagttcctgcccttgacaaagatgcattatgggaatttcagccaaagaaactaggtgttggagatgtcatcacaggtggagatctatacgctactgtctttgagaacacattgatgcagcaccatgttgctcttccaccgggttctatggggaaaataagttacattgcaccagctggtcagtacaaccttcaggacacagtg

SEQ ID NO: 36278 - DNA, 266 bp, Zea mays
atcccacaccgggcacaccccccgagctcagcttagctccactccagctccaatcacagtcgtgaccagagcgcgagagctagctagagggccgtgaaaatgccgatcaataggatcgccctggggagccaccaggatgtgtaccacccgggcgccctcaaggcggcgttcgctgagttcatctccaccctcatcttcgtcttcgccggccagtgctccggcatggccttcagcaagctgaccggcggcggtccgactgacccggc

SEQ ID NO: 36279 - DNA, 272 bp, Zea mays
cttcaggtggagcaagaaagttgtatgttgccaatcttcactcaaatattactgaagaccaattgagacaggtatttgaaccatttgggcaagtggagcttgtacagcttcctgtagatccaatgactggattgtgcaaaggttatggttttattcagtttgcacggcttgaagatgcaaaagctgcacagagcttgaatgggcagcttgatatcgctggcagagttataaaggtttcagctgttaccgatcatgtgggaatgcaagctagt

SEQ ID NO: 36280 - DNA, 132 bp, Zea mays
gcgccgtccttcacctccgccgccgaatccgagactctgatctcgggttcaccgcagcgcacagagcacccccgactcccgtcccgatccgcgctctcctctacgacgcttcagtcatggcaggaatggcac

SEQ ID NO: 36281 - DNA, 275 bp, Zea mays
cgctctccgaccgctcccgcgagtcgctcctcccgagcttcctctacgcctcctcggcgcgctctttcgctgccacaggagccgccgcgcgcctccctgtctcctccccagcgcctgccacggctggagcaggaggcggcgtgccgttctcgatccaggcgcccaaggagaagatcgagatgtactcgccggccttctatgccgcctgcactgccggaggaatcgccagctgcgggctcacccacatggccgtcacgcctctcgacctcgtcaag

SEQ ID NO: 36282 - DNA, 274 bp, Zea mays
ggaagtgcttggtctgggtgagctcaacgagttcgagaagaagggtctggaaaacctcaagggcgagctcaagtcttccatcgacaagggtatcaagtttgcccacgggaactaggcaccttgcccggcttctaacaattgatgccccttgcatttttgtttgactgcctatttttcctgccccccgtatggttggggcaatgaggcgtagtggtcgataataaaacccagcggaacaaagaaaacgtgtaccagaaactgtttgcaaacaccg

SEQ ID NO: 36283 - DNA, 268 bp, Zea mays
ggacgcgtggtcaaggagctgcccgcgccgtacccgaccaaagacaacctgatcaagaacgacgacttcgagatcggtccccaggtgctcaggaactcgacggtcggcgttctgctgccccccaagcagaaggacgcgacgtcgccgctgcccggctggatcatcgagtcgctcaaggcggtgcggtttattgacgcggcccacttctctgtccccgcggggcagtacgcggtggagctggtggccgggcgggagagcgccatcgcgc

SEQ ID NO: 36284 - DNA, 281 bp, Zea mays
cgcccactcctcgctgccaccactcctgtcacctcttcccgcgccgacgcagccgccatggaccccgtcgccacatgggggctaaccccgctcgcgggcgccgacccggagatctacgacctcctggagcgcgagaagcggcgccagcgtcgcggcatcgagctcatcgcctccgagaacttcacctccttcgccgtcatggaggcgctcggctccgcgctcactaacaagtactccgagggcatgcccggcgcccgctactacggcggcaacgacgtcat

SEQ ID NO: 36285 - DNA, 267 bp, Zea mays
gcaacctgagcatgtaatgatgtttttacttgccgaaatgggaacaagtgggtcacttgatgggcagcaaaggttggtgatcaagggaagatttgctcctaaaaactttgaagcaatcctgaggagatacatcaatgagtatgtcatctgcaatggatgcaagagccctgatactattttgtccaaagaaaatcgtctgttcttccttcgctgcgaacagtgtggatcttcacggtccgttgcaccattcaaacctggatccgttgc

SEQ ID NO: 36286 - DNA, 254 bp, Zea mays
aggggatgcatccgtgtcctttgagaaaaattgtgtcaggggaattcaagcaaaccacaagagaatttcacaacttttgcatgagtctctgatgttagtgacatctttgaaccctaaaattggctatgacaatgctgcagctgttgctaagaaagcccacaaagaaggaaccacgttgaaggaagctgcattagaccttggagtattaacggagcaagaattccatgagtttgtcgtcccggagaaatggattg

SEQ ID NO: 36287 - DNA, 127 bp, Zea mays
cccacgcgtccggcaacgttgtccatggcatatgctggtgctgtttttgcagatgcatgtttgaagggtctgaatggagttccagacattgtagagtgctcttttgtgcaatcaactgtgacagagt

SEQ ID NO: 36288 - DNA, 125 bp, Zea mays
ggaccgtggtgtctgtgcgaaggcgaccattccttcttcgctccttcgccgccgctatggttaagtactcgcaggagccgggcaaccctaccaaatcggccaaggccatgggaagggacctgagg

SEQ ID NO: 36289 - DNA, 261 bp, Zea mays
ctgttcctccccactcactcctgcgcttcctcgccgcgcggttccttctccctgatcctcctttggcttcgcggttcatggcgatgtggagggccgccgctagcagctggtcgaccgggcgctcggctcaagggccgcgcacacgtctacaggcagcaaaaagatagtcggggtgttctacaaggccggggagtatgccgacaagaaccccaacttcgtcggctgcgtcgagggtgcactcggcatccgcggctggctcga

SEQ ID NO: 36290 - DNA, 269 bp, Zea mays
ccgatccccaattcctccttcggatctcccattcagcgcagcgcaggtgtgaaggaagggggacgcggaggaagatggggctcgcgttcgggaagctcttcagccggctcttcgccaagaaggagatgcggatcctcatggtcggcctcgacgccgccggtaaaaccaccatcctctacaagctcaagctcggcgagatcgtcaccaccatccccaccatcggtttcaatgttgaaactgttgagtacaagaacattagcttcactgtc

SEQ ID NO: 36291 - DNA, 122 bp, Zea mays
ggtgtaatgcccaacatccataaccttttgctcccgaagaaggccggcggcggcagcgccagaggctgcggctggtgacgaggactaagtccttgactacgcctggtggcacctccaggata

SEQ ID NO: 36292 - DNA, 261 bp, Zea mays
gccaaaacagagttgtcgtcttcgataacaggaccaaggaccgaagctccaagcgcagatacttgacaaattgctctatgtagtggactcggtttgtgcaaacaatggaggaaaaccatttacagatcaaatgttcactcgcatcaaggaggtgcatgatagggaaaaagaggtgcataccttgggatattcagatgagcagatatctgagttgaaggaggagattcatagaactagggatgaacagcttgcacagataac

SEQ ID NO: 36293 - DNA, 262 bp, Zea mays
atggcgagctgtttcccagatacttgagctttgtgtaaaggtgtagttgactcaaatgatctccctctcaatgtttctcgtgagatccttcaagaaagtagaattgtcagaattatgcgtaagagacttgttaggaagacatttgacatgattcaagagattgccgagaaggatggcaaagaggactacaacaaattctgggagagctttggcaagttcatgaagcttggttgcatcgaggacacaggaaaccacaagcgtc

SEQ ID NO: 36294 - DNA, 263 bp, Zea mays
cccacgcgtccgcgcgagtggaactgtggaagcgtcgagcttttttcttctttgtcttgctgcgcaagaacaagggaaacgagaggagggcggcgatggcgaagaggctgctcccgtcgctgaaccgggtgctggtggagaagctggtgcagcccaagaagaccgccggcggcatcctcctcccggaaacatccaagcagctgaatgctgctaaagtggtggctgttggccctggtgagcgcgacaaggcaggcaatctgatc

SEQ ID NO: 36295 - DNA, 265 bp, Zea mays
gcaacagcttgttccaggcatgaggcctgggggtcctcatatgccaaactattatgttccggttgtccaacagggccaacagggtccacgcccaggtattaggcgtggagctggagcccagggccagcaacctgtgccaccatttcagcagcagattcttccgcgaggacggatgtaccgttacccaactggtcgcaacatgcctgaagctccagcgatgccaggggttgctggaggtatgattcaggcatatgatatgggaggc

SEQ ID NO: 36296 - DNA, 270 bp, Zea mays
ctgatcccatacgagtacgtaattgctcgacaagggaatgagaggatagatagtattctaggccttggtccggcttcaaggaagaagagcatgcttgtcgtgtcagagttcatcggctgctcgccctccctgagcggcgctatccgtgtgaacccttggaacatcgattcagtagccgacgcaatggactacgcgctggagatgcggaaacgggaaaagtggtgagacatgagaaacacacagatacgtgagcacgcacgacgtcgggta

SEQ ID NO: 36297 - DNA, 275 bp, Zea mays
ctgagcacaatcgcaactggtcttgctattgatgcttatggtcccatcagtgacaatgctggtggtattgctgagatggctggaatgagccacagaatccgtgagagaactgatgctcttgatgctgctggcaacacaactgctgctattggaaaggggtttgccattggttcagctgctcttgtgtccctggcgctttttggtgcctttgtcagcagagctggagtgaaggtcgtcgacgtcctctcccccaaggttttcattggtttgattgt

SEQ ID NO: 36298 - DNA, 274 bp, Zea mays
ggcctgtctccgaacgtgaccacgcttgtggagcaggagtcgcacaccaacacgaccccgttcttgatgcggttcaccgagaccttggactactattcggccatgttcgagtcaatcgacacgaacctgccacgggacaacaaggagcggatcaacgtggagcagcactgtcttgccaaggacatcgtgaacatcatcgcctgcgaggggaaggaccgggtggagcgtcacgagctcctgggcaaatggcggtcgatgctgaccatggccgggt

SEQ ID NO: 36299 - DNA, 270 bp, Zea mays
ggacgcgtggtttcgaagaagttagaagacgcggtctcaaagtttctgttgctggcattccaaagactacttgacaatgacatccctgtaattgacaagtcatttggtttcgacacagcagtcgaggaggctcaacgtgcaataaatgctgctcatgtggaggctgtaagtgctgagaatggtataggtcttgtcaagctaatgggtcggcacagtggttttattgcacattatgctactctggctagcagggacgtggattgttgcttg

SEQ ID NO: 36300 - DNA, 279 bp, Zea mays
gtccaaactcgtgagcactttctcctcgtccccgacaagctactcgaagccgagatacggccatggactccaccggcaccggagcagcggggaagggaaagaagggagcggccgggcgcaaggtcggcgggccaaggaagaagtcggtgtcgaggtccgtgaaggctgggctccagttccccgtcggccgcatcgggcgctacttgaagaagggccgctacgcgcacgtgtcggcaccggcgcccccgtctacctcgccgctgtcctcgaatacctcgc

SEQ ID NO: 36301 - DNA, 280 bp, Zea mays
ggcagatacaaggggaggattggatcttgtgcgacatgcctttgatgggaaattccctgcacaggttaaatttagtgttgacaaggattgtcttcctattcctgagagtagtttcaagcatgccattaaggagaactacagctcaaaaggcaggttcacccaagagctgaactctaaacaagttcaaagactattggcaatgttcaagcctatcgaccttcctcaatcagctccacaacatatcgaggaagtgcgacaatcacatatcattgaagatatt

SEQ ID NO: 36302 - DNA, 278 bp, Zea mays
cgcgtctcgtgctcctgcctcctgcgtatataaacgcggcaatcgggacgcccgggaggcgttcgttctccatcccacgcgcgcgcaggccaaggccggatcggcggcctcacagatctcgccggccgccgtgagacagagaccgaacggggggttgaccggtgctcgggaggaagatgtttagcgggacgcagcagaagtgcaaggtgtgcaccaagacggtgtacccgatggaccagctctccaccgacggcgtcgtcttccaccgctcctgcttc

SEQ ID NO: 36303 - DNA, 274 bp, Zea mays
cgagcgagggacccggggcggaagaagagagagaagacgtctctctcctctcggcgtccccgttccccaacactctcgtctgctgcctgcctgcctgcctgcctgcaaaaaggagtttgtcatggcgtctaagcgcatcctcaaggagctgaaggacctgcagaaggacccccccacatcatgcagtgcaggtcctgctggtgaggacatgtttcattggcaagcaacaattatgggaccacctgacagtccctatgctggtggtgttttttta

SEQ ID NO: 36304 - DNA, 272 bp, Zea mays
cagctattgtggtcgtccctcagccgcgtcgcaccgcatcgcattctacgattcgaagctctctctgctcgcagccatggcgatgaattacccaatcgtgagcgccgattacagcgaggccgtcgagaaggccaggcgcaagctccgcgccctcatcgccgagaagagctgcgcgcccctcatgctccgcctcgcgtggcactccgcggggacgttcgacgtgtcgtcgaggaccggcggtccttcggtactatgaagtgcccggcggaact

SEQ ID NO: 36305 - DNA, 277 bp, Zea mays
agaaggtgttcgtgcgcgccgacctcaacgtcccgctcgacgatgcccagaagatcaccgacgacacccgcatccgcgcctccgtccccaccatcaagttcctcctcgagaagggcgccaaggtcatcctcgccagccacctgggtcgtccaaaaggtgtcaccccaaagtacagcttgaagcctcttgttccacgcttgtctgagctccttggagttgaagtcgtgatggccaatgattgcattggtgaagaagttgagaagttggctgccgcttt

SEQ ID NO: 36306 - DNA, 280 bp, Zea mays
ggcactgaaattggtcaagcaattgcccttgacattagggtacctttggtttcattcactggaagtacaagggctggtctaatggttcagcaacaagttagtgcaagatttggtaaatgccttcttgaacttagcggaaacaatgccatcattgttatggatgatgtagatatccagctagctgtgcgatctgtcttgttcgctgctgttggtacagcaggacaacgctgcaccacatgtcgtaggctgattcttcatgagaacatatatcaaaccttcg

SEQ ID NO: 36307 - DNA, 266 bp, Zea mays
ctacgcgcagggcatgaacatcatcaaggccaagagcgcggagaaaggctgggggctcaacctcggcgagctggccaggatctggaagggcgggtgcatcatccgcgccatcttcctggaccgcatcaagaaggcctacgacaggaacccgggcctcgccagcctgctcgtagaccccgagttcgcgcaggagatcatggacaggcaggcggcgtggcgcagggtggtgtgcctcgccatcaacaacggcgtcagaccccgggaat

SEQ ID NO: 36308 - DNA, 269 bp, Zea mays
gtcacctgccagcttatcagctccaccgtcgtcgaccctaacaacggcaaccgctggaagttgggcgcggaggcgagcctggagcagtggctgctgaacccgccgccgcttctgtccagcgagaaccagttccgcgtcaccttcgactgggaggtggagaagcagggcatcccgggcgccatcatcgtcaagaacaaccacgcctccgagttcttcctcaagaccatcaccctcaacgacgtccccggccacggcaccatcgtcttcgt

SEQ ID NO: 36309 - DNA, 161 bp, Zea mays
ctaggattttgttgacatcaacatctgaagtttatggtgatccacttgagcatcctcaaaccgaggcctactggggcaatgttaacccaattggagtcaggagttgttatgatgagggtaagcgtgtagcatagacgctgatgttcgactatcacaggcag

SEQ ID NO: 36310 - DNA, 250 bp, Zea mays
ctcagctcccatatccgctcccctacctctccagcatcctcccgtctccgtcgtctcgtctccgctcctcacctcgccagccatgggcaagatcaagatcggaatcaacggtttcggaaggatcggcaggctcgtggccagggtcgccctgcagagcgatgatgtcgagctcgtcgccgtcaacgaccccttcatcaccacggattacatgacgtacatgttcaagtacgacaccgtgcacggccaatgg

SEQ ID NO: 36311 - DNA, 256 bp, Zea mays
ggatctttaaacttaagccttaagcaggttcagaaggttactcataatttctcacctttatttgagttaggtgaagggggaacctgggcagtttacagggctgtattatcagataaccaggttgttatcatccggagagctaaaaagggccacgttcaagaggcaaaacatcttatggaagtgaagctccttacaaaaattaatcactggagttttgtgagattcttaggttttattgatgaaaaagatgagtgta

SEQ ID NO: 36312 - DNA, 157 bp, Zea mays
gacgagcgtgttggagctgcggtggagtggcatcgggatcgaggactggtggcgcaacgagcagttctgggtcatcggaggcgtgtccgcgcacctgttcgccgtgttccagggtatcctcaagatgattgccgggctggacaccaacttcacggtc

SEQ ID NO: 36313 - DNA, 236 bp, Zea mays
catctctgaagacctaccagatgttgatatttctgttgtcggtgtcaccagcttcagtggacccgaagcccctttgatgtggatgtttttgactctagtgtagattacataaagttaatgaagacaatttttgacttcgaagcaataaaaaagctgctgacctccccaaagtttacattctgttatgatgcactccatggtgttgcgggacttatgccatacacatctttgtggaa

SEQ ID NO: 36314 - DNA, 163 bp, Zea mays
gcaggctagcagcacagcagcagccagagccatccccactcctcgctacgcttcgcttcctcggcgccgattcctcctcctcctcctccaccctcgtccgtccccttccggcgcacgagctcgcccgagatggcgaacgcgagatcgggtgtcgctgtgaacg

SEQ ID NO: 36315 - DNA, 159 bp, Zea mays
ctacaatcctaaaaccatctgcttcagctagccccaagtttagtcggccgatcattcactgaagtagtaatggcctccgtcaacagctggaccctcgagatcgcgtcgccggtggctccgcagcgcctgttccgcgccgccgtgatggactggcacacc

SEQ ID NO: 36316 - DNA, 157 bp, Zea mays
ggactgcagcgggatggcgtcgccgccgccaccacgcgtgtgcgtaaccggtggcggcgggtacgtcgcctcatggctcgtcaagctcctgctctcccgcggctacgccgtgcacgccactgtccgcgacccaagtgatcccaagaacgcccacctg

SEQ ID NO: 36317 - DNA, 256 bp, Zea mays
cccctccctccggtctgcgctcccacagcctcacccctgcgcccccgccgattcgcgtcgccctttgttggaaggaacgatggagcagaccttcatcatgatcaagcccgacggcgtccagcggggcctgatcggggacatcatcagtcgcttcgagaagaaagggttctacctcaaggggatgaagttcatgaacgtggagaggtccttcgcgcacagcactacgctgacctttccgacaagcctttcttccccg

SEQ ID NO: 36318 - DNA, 153 bp, Zea mays
gtccgtgcctgtgtacctgtcggagatggcgccggcgcgtctccggggcatgctcaacatcggcttccagctgatgatcaccatcggcatcctggctgcggactcatcaactacggcaccaacaagatcaaggccgggtacgggtggcgcgtg

SEQ ID NO: 36319 - DNA, 141 bp, Zea mays
ctctagatccgttcatcctggtggttttgtgaggtcgaaagcggcgagcgaattagaagatgctggacaagctgtgggacgacgtggtggccgggcctcgcccggagacgggcctcgagaagctccgcaaggccaccaccg

SEQ ID NO: 36320 - DNA, 146 bp, Zea mays
cccacgcgtccgaaccgtgagtgatgatgatgttgtacttgaaactacagcaccaaggctgtacagcatcaatgatggccaattgaagctggaagaaacagctcttacaaaagccgtgcttgaaaataccagatgtttcttacttg

SEQ ID NO: 36321 - DNA, 143 bp, Zea mays
gcctccgcccccttcttccctgacaccctcgccgccgcgcacgcacgcacgcagggaaccagcgaagagagatgggcgtctacaccttcgtgtgccgcagcgccggcggcggcgagtggaccgccaagcagcacttccggcga

SEQ ID NO: 36322 - DNA, 149 bp, Zea mays
gagaccctggagggggagctcgccgacaagcccttcttcggcggcggcgccctcggcttcgtggacgtggctctggtgcccttcacgtcctggttcctcgcctacgagaagctgggcgggttcagcatccaggagcactgccccaggat

SEQ ID NO: 36323 - DNA, 151 bp, Zea mays
ggccaagtgcgacccccgccatggcaagtacatggcatgctgcctcatgtaccgtggtgatgtggttcccaaggacgtgaacgctgctgtggccacaatcaagaccaagcgcaccatccagttcgtggactggtgcccgactggcttcaag

SEQ ID NO: 36324 - DNA, 238 bp, Zea mays
gaaagatctttgttggaggtctgccctcaaatgttacagaggctgacttcagggggtattttgagcagttcggtgtcataactgatgtggttgtgatgtatgatcacaacacacagagaccgaggggctttggattcatcacctatgattcagaagatgctgtggacaaagccctgcacaagagctttcatgagctaaatggtacaatggttgaggtcaagaaggctgttccaaagga

SEQ ID NO: 36325 - DNA, 147 bp, Zea mays
cccacgcgtccgcggacggtgggctcctcctcacctatcatcgccgctgcgccgtctcctccgctcccgtcgtccggaaagatggcgtcccacaatgttggataccctcgcatgggccccaagagggagctcaagtttgcacttgag

SEQ ID NO: 36326 - DNA, 246 bp, Zea mays
attctggagaggagaggaacagagccaagaaacaagcccggaagatggcaggcggcggggtggtgaagcacatcctgctggcaagcttcaaggacgaggtgacgcaggagcgcctggacgagctcatccgcggatacgccgcgctcgtcggcgtggtcccctccatgaaggccttccactggggaactgatgtgagcatagaaaacatgcatcaagggttcacgcacgtcttcgagtccacgtttg

SEQ ID NO: 36327 - DNA, 293 bp, Zea mays
atcgcaactagtccaaagtgcccttgatgggtacaaggtatgcatatttgcatatggtcaaactggatctggtaaaacttatacaatgatgggtaaaccaggaaatgatcaaaaagggataatacctcgttctttggagcaaattttcaagaccagtcggtttctagaatctcaaggatggaattattccatgcaagcatcaatgttggaaatatacaatgagaccattcgtgatttgttagcacctggtcggtctaacagttttgagtctagtaaacaatgcactataaagc

SEQ ID NO: 36328 - DNA, 290 bp, Zea mays
gtcatatctagctatagtagctcccttgagaagcatttgagggaggagccatgtctgaggagaagcaccaccaccacctgtttcaccaccgcaagccagaggaggagggcgcctccggcgaggtcgactacgagaagaaggagaagcaccacaagcacatggagaagctcggcgagctcggcgccatcgccgccggcgcgtacgccctggtgagaacaaaaaaaccaacctcgatctctttgatcgcctgagccatgcatgccatggtccagttcttgatctttgtgtgc

SEQ ID NO: 36329 - DNA, 286 bp, Zea mays
gtgaaatcttggtgaaagcaaggaacattcttgtacaatatgattatgatagtcctctggaatctggtgaccaaggtgattctgttgttgatctactttttcagccagagaagtgttttacatctaaatcagcacttctagtaatgaaattggttcatggagccctcaaggatgcatctttgtcatcagcaagagtagctaaggagttctgctttgctgctagggatgttttgctcctttatagggctattgtgccggttcagctagagaagcaatttgatagctt

SEQ ID NO: 36330 - DNA, 287 bp, Zea mays
cccacgcgtccgcccacgcgtccgcccacgcgtccgcggacgcgtggcgccgcctgatcgaagtgaacaagcaaggaagagccatggcgagcgagcacgcggcggggggcgatgctaagcatcaccagaagcagagcctgatggacaaggcgaaggggttcgtcgcggagaagatcgcgcacatccccaagcccgaggccacgctggacggcgtgacgttcaagggcctgagccgggagtgcatcacgctgcacagcagcgtgaacgtgtccaacccctacgaccac

SEQ ID NO: 36331 - DNA, 285 bp, Zea mays
ctttcaagctcaggtttatattcggccaaatcggcatataccggtttctttcttggagcaacaacttttaaaccctgggaaaggatttggaaatcatgggctccaagtaaatgcaagttcttcatgtggctcgtggcccacgatcgctgctggacagcagaccgactagcaaaaagaggactgcctcaccctcaattttgtatactttgtgatcaagaggaagaaacgataaaccacttgctggtttcctgcgttttctctcgggctgtctggtttcagatgatg

SEQ ID NO: 36332 - DNA, 253 bp, Zea mays
ggaccgtggcggacgcgtgggtgctctcagacgactgggccgccgccgcttggtgctgaggctttggctggtctcttcgccggcgacgagcacccaccagcagttctgtagaaatggctgatggtgaggacatccagcctcttgtctgcgacaatggcaccggaatggtcaaggctggttttgctggcgacgatgcaccaagggcggtttttcctagcattgttggccgtcatcgccacactggtgtcatggt

SEQ ID NO: 36333 - DNA, 280 bp, Zea mays
ggaccgtggcggacgcgtgggccgcgtgcgaaccaagcagaccccagcagaagaagcgaagtcgtcgcacggagcaggaggaagagcgagcagcaagatgtcgtggcaggcgtacgtcgatgaccacctgctgtgcgacatcgaaggccagcacctcagcgccgccgccatcgtcggccacgacggcagcgtctgggcacagtccgagaacttccccgagttaaagcctgaggaggttgctgggatgataaaggactttgatgaacctggaactcttgca

SEQ ID NO: 36334 - DNA, 278 bp, Zea mays
ctcgctttggatcgattggtttcgtaactggtgagggactgagggtctcggagtggattgatttgggattctgttcgaagatttgccgaggggggcaatggcgaccgcggggaaggtgatcaagtgcaaagctgcggtggcatgggaggccggcaagccactgtcgatcgaggaggtggaggtagcgcctccgcaagccatggaggtgcgcgtcaagatcctcttcacctcgctctgccacaccgacgtctacttctgggaggccaaggggcagactc

SEQ ID NO: 36335 - DNA, 278 bp, Zea mays
gttggccctgatgccaccaaaacattcaacgaagcattggacaccaccaagactgttatttggaacggccccatgggagtgtttgagttcgagaagttttcagctggcactgaggcgattgccaagaagctagctgagcttacaaccacgaagggtgtcactaccatcatcggcggcggcgactctggtgctgctgtcgagaaggctgggctggccgacaagatgagccacatttcgaccggcggcggtgcgagcttggaactcttggaaagcaagac

SEQ ID NO: 36336 - DNA, 257 bp, Zea mays
cagtaaaatgcactcttttccataaagcagcagagtgcacaagtaccattaccagggaaatgtacattactcagtgaaacagcagctgagttcgagatatgaggagatggcaagcataaaccccaattcaaatccgttcccaacattgtcaccaacccaacgcgaagataaattattcactgcatgcaatacgccaagcacatgcacaagcccacatattacagaaccaaatgaggtgcaaacttaagtgcccaatg

SEQ ID NO: 36337 - DNA, 272 bp, Zea mays
cctggctaaggagttccttggtgcttccggtgacaagcgaaaggaagtcctctccagtatggaggaggaggcagataagctcagtggttctgctgcaaggcatggaaaggtctatgtaaccatcgcaaagaagattctagagaaaggcaacgagtatactgagaaggaaaccaagaggcttgatcgcatgttggagaagtccatcagcccctccaaggccgacgagtttatcatcaagaagaacgttctttcgactttctcatcctaaggca

SEQ ID NO: 36338 - DNA, 158 bp, Zea mays
cccacgcgtccgcccacgcgtccgggcctacgtggccgagttcatcgccaccctcctcttcgtcttcgccggcgtcggttccgccatcgcctacgggcaactgacgaatggcggcgcgctggacccggcgggcctggtggcgatcgcgatcgcgcacg

SEQ ID NO: 36339 - DNA, 274 bp, Zea mays
aagagaagcatgaacttgtgtttggcatcattgattatctgaggcaatatacttgggacaaacaactggagacatgggtgaagacttctctggtagtacccaaaaatgttttaccaactgtaatttcccccaaggaatacaaaaaaaggtttaggaagttcatggcgaagtactttctgtcagttccagacacatggagtcctgataatccgtctaagccatgcaaatcccttggtcagagcaatcgcaagttggcggaagtccagaatggtga

SEQ ID NO: 36340 - DNA, 268 bp, Zea mays
ggcaagcttgacaaaggaggatactcatcaatatctggtccacgcgtgattgaaaaaacgtttagtgacatgagcatcagtggttctggatttggtagtggttctggattaggtggactgagcactgacatggactcatttgccagcaagcccaaaggtcgtccatctacagcagctactgcacctggtaaaggttttggtatgaaattaggcaagacacagaagacaaatcaattccttgagtctttgaaagctgaaggagaagtca

SEQ ID NO: 36341 - DNA, 272 bp, Zea mays
gaagaaaaaaaaaagagctactatacagcaatggccggaggagacgacctgaagctgctgggcctgtgggcgagcccgtacgtgctgcgggtgaagctcgcgctcagcctcaagggcctgagctacgagtacgtggaggaggatctgagggacaagagcgagctcctgctcaagtccaaccccgtccaccagaaggtccccgtgctgatccacgacggcaagcccgtctgcgagtcgcagatcatcctgcagtacatcgacgaggctttcgc

SEQ ID NO: 36342 - DNA, 269 bp, Zea mays
agcaaacgcgccattgacgcgcactcgtagtcttgactcttgcgtgcttccctcgtcttctcggacgttccgttccatcgccatggcggaccagcttagcgaggagcagattgccgagttcaaggaagctttcagcctcttcgacaaggacggcgacggttgcatcacaaccaaggagctcggaaccgtgatgcggtctctcgggcagaaccccaccgaggcggagctgcaggacatgatcgccgaggtggacagcaacggcagcggca

SEQ ID NO: 36343 - DNA, 171 bp, Zea mays
cagtaaaatgcactcttttccataaagcagcagagtgcacaagtaccattaccagggaaatgtacattactcagtgaaacagcagctgagttcgagatatgaggagatggcaagcataaaccccaattcaaatccgttcccaacattgtcaccaacccaacgcgaggataa

SEQ ID NO: 36344 - DNA, 198 bp, Zea mays
caaagatcttgtgattggaaatggacctcagggcccttttgaccaccacttcgagctcaagtctccatcatacaagatgggatcactgcaaaagttcaatccagatgacctcttcctgtacgcagtgacagactctgggatgaacaagaagtggggtcgttcgataaaagatgccgtgaaagctgccattgaaggtgg

SEQ ID NO: 36345 - DNA, 200 bp, Zea mays
tctaagttgaagagacattttcttatccatactggagagaagaattttgtgtgcccacatgaaggttgtgggagggcattttcgttggattttaatttaaaggcacacatgaaaacacattctgcagataactatcatgtgtgccagtacccagaatgtggccgaagatttacacaagaatcaaaactgagagctcatat

SEQ ID NO: 36346 - DNA, 195 bp, Zea mays
cttcgctgaggccaatgctggggactctggtgcggcacagggtcaaaggactacgttcacgtgcgcatccagcagcgtaatggtcgcaagagcctgactaccgtccagggattgaagaaggagttcagctacagcaagatcctcaaagatctcaagaaagagttctgctgcaatggtacagtggtccaggaccca

SEQ ID NO: 36347 - DNA, 193 bp, Zea mays
gttctgttgtatgaacttgatgccattagaaaggcctgtgcgtcattggagtctgactaccagcctccagttacttttgtcgtggtccagaagcgtcatcacaccaggttgtttgctaataatcacaatgataatcgtgctgtcgataaaagcgggaacatactgcctggcaccgtggtggactcgaagatct

SEQ ID NO: 36348 - DNA, 197 bp, Zea mays
cccacgcgtccgccggggtggtaaaacccggcgaccacatcaaaacacgaggcgtccccgactccgcagtccgcagaccggtcactcggcacgcaggctagcagcacagcagcagccagagccatcccctctcctcgctacgcttcgcttcctcggcgccgattcctcgtcttcctcttccaccctggtctgtcccc

SEQ ID NO: 36349 - DNA, 196 bp, Zea mays
gaaaatgccgatcaataggatcgccctggggagccaccaggaggtgtaccacccgggcgccctcaaggcggcgttcgctgagttcatctccaccctcatcttcgtcttcgccggccagggctccggcatggccttcagcaagctgaccggcgtcggcccgacgaccccggcgggcctgatctcggcggcggtggcg

SEQ ID NO: 36350 - DNA, 193 bp, Zea mays
ggacgcgtgggcagccacttcgctccctccctagcagcaaaaacctccacgaatcgccgacactccagcccggaagagccaacgaggtgactccgcgccccggtcatgggtgacagccaatactccttctctcttaccactttcagcccgtcgggaaagcttgtgcagatagagcacgcgctaagggctgtcg

SEQ ID NO: 36351 - DNA, 192 bp, Zea mays
cggacctggcggacgcgtgggtgctctcagacgactgggccgccgccgcttggtgctgaggcttatggttggtctctatcggcggcgacgagcacccaccagcagttctgtagaaatggctgatggtgaggacatccagcctcttgtctgcgacaatggcaccggaatggtcaaggctggttttgctggcga

SEQ ID NO: 36352 - DNA, 191 bp, Zea mays
attggcacgctcagaggttgaagatgttcacgagacagctgcaggggcactatggaatcttgcattttattctggtaatgctctccgcatagtcgaagaaggcggggttcctgttcttgtaaaaatttgctcatcatcacggtccaagatggcacgtttcatgtctgcactagcactagcatatatgtttg

SEQ ID NO: 36353 - DNA, 172 bp, Zea mays
ggacaaaccgtgccacaccaaatggttactggaagactagtggaaaggatagaataattatgcttaactctcgcactgttggaatgaagaaaacattgatatttcatgaaggcaagccccctaagggtgatagaactgattgggtgatgtatgaatacaaaatggaagatga

SEQ ID NO: 36354 - DNA, 174 bp, Zea mays
cttccgtccccaaatcgaccgagcgaattcaccacagcttctcaccaccgctaccttcgatggcacccaaggcggacaagaagccggcggcgaagaagcctgcagaggaggagcccgcgacagagaaggcggagaaggctccggcggggaagaagcccaaggccgagaagcgcc

SEQ ID NO: 36355 - DNA, 165 bp, Zea mays
ccgccaccctccattaaccctagcggcagcagcgctcgtttgatccccgcggcggtccggcgtccgggtaggggagcgaggatgacggagccctggtgcggaacaagccggggatggccagcatcaaggagatgccggtgctgcaggacgggccgccgccgggcg

SEQ ID NO: 36356 - DNA, 146 bp, Zea mays
gcatctatggcgacctccgttcgtggtttcagtagcgccccctgcagggatgtgccgggcagctacggccttccgctggtgggcgccgtccgcgaccgcctcgacttctactacttccagggccaggacaagtacttcgagtcccg

SEQ ID NO: 36357 - DNA, 163 bp, Zea mays
ctgacgcgtggcggacgcgtgggcgccgccgccgccgggagcggaaaatcccttttcccggctggcccgccggcgcagtccgcacatttccccaaggcacggctccctgtccccgccgccgtctccgccgctactgcggctgttcactcggaggatagggttt

SEQ ID NO: 36358 - DNA, 168 bp, Zea mays
agaaggtgttcgtgcgcgccgacctcaacgtcccgctcgacgatgcccagaagatcaccgacgacacccgcatccgcgcctccgtccccaccatcaagttcctcctcgagaagggcgccaaggtcatcctcgccagccacctgggtcgtccaaaaggtgtcaccccaa

SEQ ID NO: 36359 - DNA, 156 bp, Zea mays
gaaagcttctaaggctgaagcagcagtttttcctttgcagcgcatcacttcaggatatgattgccagatttaaagaaaggaaatctgatagagtttcagggaagtggagtgagttccctactaaagttgctgttcaactgaatgacactcacccta

SEQ ID NO: 36360 - DNA, 175 bp, Zea mays
ggtacatgcattacaacggaagaatgcttgctgaatcctaataggaaccccaacatgaccaaactagagatagagaatgagctgaaggattttcttggagtctcgaaggtcatctggatacctcgtggactttatggtgatgaggatacaaacggccacgttgacaacatgtgct

SEQ ID NO: 36361 - DNA, 268 bp, Zea mays
cccacgcgtccgccttttcgtccttgttcctcaacgtcgccggtgcgcccgcctcctgcctctctccccctgcgagcgatcgtgaggggatcgggatggcctcccaccattccgagcccctcgaccccgccgacgctgacgacccctcgtaagcccgcacttgagtctgatcatatcaccaaagttattcatgattgtaaaagggacagtgaggctttgtattttcagtttggcataaaactgcataatgtgatggatacacagattg

SEQ ID NO: 36362 - DNA, 266 bp, Zea mays
gattagggaggtgaccaagggttttggtgatgaagctttgattggtgagggatcctttggcagagtatacttgggtgttctaagaaatggtaggagtgccgcggtcaaaaagttggattctaacaagcagccagaccaagagttcttggcccaggtctgtctttccctgtttatgaaatgcagtgcatctattttatcccgtggtttgaagtcaacatgaaattcgtctacaggtgtctatggtgtcaaggctgaagcatgaaaat

SEQ ID NO: 36363 - DNA, 266 bp, Zea mays
gcaacgtgagctggcccatcgggctgtggcatccccacggcgctcatgttcctggcctgcgtgctcttcttcatgggcacgcgcctctacgtgcggatgacgcccgaggggagccccttcaccagcgtcgtgcaggtgctgtcggccgcgctcaagaagcggtcgctgaagcagcccaaggacccgaagcaggacctcttcgacccgccgcacaccagcgccatcgtcacccagctcgcgcacacggaccagttccgctgcctcga

SEQ ID NO: 36364 - DNA, 265 bp, Zea mays
gaagaaagaaggaagtcggagcgcactgatgttgctatatgtagagttgagcagctctgcccgttcccctatgacctcatccagcgcgagttgaagagatatccaaatgccgagatcgtgtggtgccaagaggagccgatgaacatgggagcatacagctacatcaacccgcggttgctgacggcgatgaaggttctgggccggggtggcatcgaggacatcaagtacgtcggcagggccccgtcggctgctaccgcgacgggct

SEQ ID NO: 36365 - DNA, 258 bp, Zea mays
ggacctggcagcacaccaaggagagtacgtggaggagcagcgagggcttcatcggtagccgccgcggcgagcacattcctgggcacccgcctggcggacccggcgccacagaacgggcgcatcgtggcccggttcgggttcgggttgggcggcaaggcgaagctgctccgaagaaggtggcgaagacatcgacctcctctgaccggccgctgtggttccccggcgccgtggcgccgactacctggacggctcgctggt

SEQ ID NO: 36366 - DNA, 265 bp, Zea mays
ccgcaccccagatctccaggagggactcgttcgttcagctaacggggcggcacgcaatggccaccacggcgaccgaagcggcgccggcgcaggagcagcaggccaacggcaacggcgagcagaagacgcggcactccgaggtcggccacaagagcctgctcaagagcgacgacctctaccagtacatcctggacacgagcgtgtacccgcgggagccggagagcatgaaggagctccgcgagatcaccgccaagcacccatggaa

SEQ ID NO: 36367 - DNA, 264 bp, Zea mays
gttgttctcaaggctgttctggacaacactagaatcaatccagcgggcatcggtgacatcgtcgttgggacggtgctcggccctggttcccagcgtgcaaacgagtgcaggatggctgcgttgtttgctggattccctgaaaccgtccctgttagaactgtcaaccgccagtgttcatctgggctacaggcagtagccgatgtcgcagctgctataaaggctggttactatgacatagggattggtgctggtttggaatccatg

SEQ ID NO: 36368 - DNA, 263 bp, Zea mays
gcaccacaagcgagcgagggacccggggcggaagaagagagagaagacgtctctctcctctcggcgtccccgttccacaacctctcgtctgctgcctgcctgcctgcctgcctgcaaaaaggagtttgtcatggcgtctaagcgcatcctcaaggagctgaaggacctgcagaaagacccccccacatcatgcagtgcaggtcctgctggtgaggacatgtttcattggcaagcaacaattatgggaccacctgacagtccct

SEQ ID NO: 36369 - DNA, 262 bp, Zea mays
gccgtctcccttttgcgtgacaaagaaagagagcgagaagcagtcgccatgtctggcatcatccacaagatcgaggagaagctccacatggggggcgaccacaagaataaggaggaggagcaccacaagaaggccgaggagcaccacaagaaggaggagggggagcaccacaagaaggacggcggggagcacaaggaaggcatcgtggagaagatcaaggacaagatcaccggcgagcacggcgacaagtccggcgaccaca

SEQ ID NO: 36370 - DNA, 128 bp, Zea mays
gtcgaaagcggcgagcgaattagaagatgctggacaagctgtgggacgacgtggtggccgggcctcgccggagactggcctcgagaagctccgcaaggccaccaccgctcgcccgctcgtcatcaaca

SEQ ID NO: 36371 - DNA, 261 bp, Zea mays
ggaaaatggctccgcttctcgctgctgccatgaaccacgctgcagcccatcctggccttaggagccacctagtaggacccaacaatgagagtttctcacggcaccacctgccgtcttcttctccacagagcagcaagcgaaggtgtaaccttagctttactacacgatctgcaagagtaggcagccaaaatggagtccaaatgttgagcccctcggaaatcccacaaagggactggttcccctctgacttcaccttcggtg

SEQ ID NO: 36372 - DNA, 260 bp, Zea mays
cccagttcgctgcccgttccccagccgccgatccctcgatctccgctagcttcgttccttcgtacaggaacggtcgagcagaaactagcagccactcccgagtcccgactcccgatcgcgattacttgccgcggcaccagtactccagcggccaccatgagcagcgggaagcgatccttcttcgcgcccaagaagaaggccaccaacccgttcgattccgactccgacgacgacaaaccgcagcagcggccagcgcgggc

SEQ ID NO: 36373 - DNA, 259 bp, Zea mays
ctttcaagctcaggtttatattcggccaaatcggcatataggggtttctttcttggagcaacaacttttaaaccctgggaaaggatttggaaatcatgggctccaagtaaatgcaagttcttcatgtggctcgtggcccacgatcgctgctggacagcagaccgactagcaaaaagaggactgcctcaccctcaattttgtatactttgtgatcaagaggaagaaacgataaaccacttgctggtttcctgcgttttct

SEQ ID NO: 36374 - DNA, 260 bp, Zea mays
ggatggcgcttcgattcgacgtatgatcacaaggacgagggcggcgatcccatgccgtttgtcttcacccttggatccggcaaggttatacctggcatggaagcagcagtgaagtccatgagagtcggcggtcttcgccgagtgatcattccaccatcgcagggataccaaaacacgtcacaagaaccggttcctcctaatttctttgatcggcagaggctgttcaccactatattcaacccgacgcgcctcgcaaatgg

SEQ ID NO: 36375 - DNA, 255 bp, Zea mays
atgattcagaacgacttggttcatggttggggcttggattttgcgctcaggaaatgtgtggagcctgctcatgaaaagattggagttgtcgattcgcagtggatcgttcaccaagtggttccttctctggggaaccaggggcagtcagaaaacggaagggcgccatgggaaggggtgagggcgcggtgcaggaaggaatggggcatgttccagaccaggatggcggaggcggagaaggcgtattacaagatgatg

SEQ ID NO: 36376 - DNA, 254 bp, Zea mays
cggacgcgtgggacaagcttaaggctgagcgtgagagaggtattacaattgatattgccctgtgacagttcgagaccaccaagtactactgcactgttattgatgccccgggacaccgtgacttcatcaagaatatgatcactggcacttcccaagctgactgtgctgttcttatcattgactcaaccactggtggttttgaggctggtatctccaaggatggccagacccgtgagcatgctctccttgctttc

SEQ ID NO: 36377 - DNA, 254 bp, Zea mays
cggacgcgtggttggtcgaatctgctgctctgcggactcttctccaagttgtacaaggactccaaacgcaagtgcaagtttgtgatgcatctcgttgacgtctacgggcccttcgccttcttcaaaggatgctttgacgacacgaacatggagcgcctgcggtcgacgatggtgatgagcagccctgaagatgacatgttcagctacgatcccaagaccatcgactgggacgattatttttacagaatccacat

SEQ ID NO: 36378 - DNA, 252 bp, Zea mays
ggaccgtggaagcaagcgaacgcagagcctgcctgaccagagctagctgagtgcaacagccaacagcagctggtctgactgacatggcgaaggacatcgaggcatcggggcccgaggcgggcgagttctcggccaaggactacaccgaccctccgccggcgccgctggtcgacgcggaggagctcacccagtggtccctgtaccgcgcggtcatcgccgagttcatcgccacgctgctcttcctctacatca

SEQ ID NO: 36379 - DNA, 254 bp, Zea mays
caaccaacatgcaggtagacacacgtacgtacatcgcgcaaagactgacgccaaacatgcagagagagatagcaaactgaagaactctgtttctctctctctcacacacaccacacaatacctatgtatggcagccagctcggcctcgcttattattgttcaaccaccaccacaagctagatagataataatcatatccatggtcgtcgatcgatgtgatcagcagttgcaggggtcgcacttgcagttgccac

SEQ ID NO: 36380 - DNA, 252 bp, Zea mays
aaaaagggtaaacaacatgatcgatcgatttattatgacacaaacacgtacaaacatgcatatatgatcgactctcgatccatgatcatcacgggaagacctcgatgatggacgggatgcctcgggtgtgcgtgatcttgtagtcacggaacccagccgccaggaagatcctcctccactcgtgctcctcccgctccgccccgttcacgaagctcagtatgtggagatccaacacatacgtctccctgcacg

SEQ ID NO: 36381 - DNA, 261 bp, Zea mays
aatttatttttgcttgcttcaatcagctttataaaatggaccctgagatatttgacacatggtgcaatattctcaaacgtgttcccaacagcgcattatggcttttaagattcccggcatctggtgaaactagagtgagagcatatgctgctgccagaggagtaagatcagatcaaattgtattcacagacgttgccatgaaaaatgagcatatacgacgcagtgccctggcagaccttttcctggacactcccctctgca

SEQ ID NO: 36382 - DNA, 261 bp, Zea mays
atgattcagaacgacttggttcatggttggggcttggattttgcgctcaggaaatgtgtggagcctgctcatgaaaagattggagttgtcgattcgcagtggatcgttcaccaagtggttccttctctggggaaccaggggcagtcagaaaacggaagggcgccatgggaaggggtgagggcgcggtgcatgaaggaatggggcatgttccagaccaggatggcggaggcggagaaggcgtattacaagatgatgggcatc

SEQ ID NO: 36383 - DNA, 263 bp, Zea mays
cccacgcgtccggagttgggcgcagagaatccccaagcaaacaaacagggtagatggagatgagaggagaggagaggagaggttgggtctgggacaccatggctccgatgaagctgtacggggcggtgatgtcgtggaacgtgacgaggtgcgcaacggcgctggaggaggctggctccgactacgagatcgtgcccatcaacttcgccaccgccgagcacaagagccccgagcacctcgtccgcaacccgtttggtcaggtt

SEQ ID NO: 36384 - DNA, 263 bp, Zea mays
cccacgcgtccgggagttcaaggagaagaaccctaagaacaagtctgtcgctgcggtggggaaagctgctggcgacaggtggaaatccctgagcgagtcggacaaggctccctatgtagccaaggctaacaagctcaagctcgagtacaacaaggccatcgctgcctacaacaagggcgagagcactgcagctaagaaggctcctgccaaggaggaagaggaggaagatgaagaggagtctgacaagtccaagtcggaggtca

SEQ ID NO: 36385 - DNA, 260 bp, Zea mays
ggacgctgggtaacgggacgagaaggaagcggacgcgagaggagactaaccgaccagcgatccatcgacgcgtgaagatgtcttcgcccgccgagtactacaaatcacttccacctataagcaaggcatatgggacattgtgtttctttaccaccgtgctagttcagctccagattttgcacccattatttctttacttagattaccccttggtgttcaagaagtttgagatatggaggctattgacaagtttctttttc

SEQ ID NO: 36386 - DNA, 258 bp, Zea mays
cccacgcgtccggctactagctagcagctgctgcaggtctcctgacatggcgaacaggacatcgaagcatcggggcccgaggccggcgagttctcggccaaggactacaccgaccctccgccggcgccgctaatcgacgcggatgagctcaccaagtggtccctctaccgcgcggtcatcgccgagttcatcgccacgctgctcttcctctacatcaccgtggccaccgtcatcgggtacaagcaccagacggacgcg

SEQ ID NO: 36387 - DNA, 256 bp, Zea mays
ggacctgggccagggcgtggagaacgtggtgaagtggcacgtcatcaaggcgatcaacgccaaccgccgcaccggcgccgctctcgtccgccttatcttccatgactgcttcgtcaggggttgcgacggttctgtccttctggacgcttcctacgacaaccctcacccggagaaggaggcgccggtgaacatcgggctcagccttcgacgtactggaggagatcaaggccgctgtcgagaagaggtgccccggcgt

SEQ ID NO: 36388 - DNA, 254 bp, Zea mays
attacatgacgtacatgttcaagtacgacaccgtgcacggccaatggaagcacagcgacatcgccctcaaggactccaagacgcttctcttcggcgagaagccggtcaccgtctttggcatcaggaaccccgaggagatcccgtggggtgaggctggtgctgagtatgtcgtggagtccaccggtgtcttcactgacaaggacaaggctgctgcacatctgaagggtggtgccaagaaggttgttatctctgcc

SEQ ID NO: 36389 - DNA, 260 bp, Zea mays
gtgatttaaagcccaggaacatactggccaattcagacagcaaactaaagatctgcgactttggacttgcacgtgcatcatttaacgactctctttcagctatctattggacagattatgtcgcaacaaggtggtaccgggctcctgaattatgtggctcctttttctccagttacacccctgcaattgatatttggagtatagggtgcatttttgctgaagttctcaccggaacgccattgtttcctgggaggaatgtt

SEQ ID NO: 36390 - DNA, 262 bp, Zea mays
atcgtttccccttcttccccatcgcgtgccctcgccgcagccatcttccatggcggaccagctcacggacgagcagatcgcggagttcaaggaggccttcagcctcttcgataaggatggcgacggctgcatcactaccaaggagcttggaactgtgatgcgctcccttggccagaaccccactgaagcagagctgcaggacatgatcaacgaggttgatgctgatggcaatgggaccattgacttcccagagttcctgaac

SEQ ID NO: 36391 - DNA, 254 bp, Zea mays
cacacgcatccggtagaattacaaccccaagaaaggagactgatacatgcaaaattctatcagggacacatgatgggatgactactggtacaccaattcacgtctttgtcccaaacacagatcaaaggggtggtgattacagtgaaatgtctaaggcgtacagaccatcccatgcagatgcaacctatgacttcaagtatggagttagagctgtgcagggaggtggaaggtcatcagccagagaaaccattggc

SEQ ID NO: 36392 - DNA, 257 bp, Zea mays
cggacgcgtggcgagacgcgtgggatttagtactcttcagtggagataacaccaaataaagagcagtatactttccacgattatttctgttactgtgaggaccattcagaaagatgctgaggaaaagaaagcttcatttaatccccgaccatacttccgattgtttataaattggctctatgaccttactactactgatggccatcatgatggttctaattttcaggttttgactgcatttgccaatgcattccact

SEQ ID NO: 36393 - DNA, 228 bp, Zea mays
ggacctgggtttatggacaaggtgaagcttgatgacatcgagaaggttttggagcctctagtttacctattggaatggcacacgccaggaaggcgaatcttttggaagcttcacaaaccgaacaggattcgacaaattgaaagaggtagtgaataagtgggcagagtcaccgtcagccgcatgaagatttcgctttcgttggataaaatcctaggctcgccacacaat

SEQ ID NO: 36394 - DNA, 289 bp, Zea mays
agccagccgtgtgtcgaacacgacacgcgataatggcactcatgcaggagagcagccatgacttgctcgaagcgcacgacgaactcttccaccactgcctgtgcttcgccaaatcgctcgcgctcgccgtggcgcaggacctccgcatccccgacgcgatccaccaccacggcggcggcgccaccctcccccagatcctcgccgagaccgcgctccagccaagcaagcttcgcgccctacgccgcctcatgcgcgtgctcaccgtctcgggcgtcttcaacgtccagca

SEQ ID NO: 36395 - DNA, 286 bp, Zea mays
caatgccccaaagtacattgctgaagctaggaaagggtctcgttttggacatgacacacttgttgatgccatgcttaaggatggactttgggatgtatacaatgactgtgccatgggaatgtgtgccgaactttgtgctgacaatcatgccctcacaagagaagaccaggatgctattgctatccaaagcaaccagcgtggaattgctgctcgtgacagtggtgcttttgcatgggagattgttccgattgaagttcctgtttgggagaggaagaccacctgtact

SEQ ID NO: 36396 - DNA, 285 bp, Zea mays
cgacggtggtacggatggtgcagccagttattcaagaaaggattgagcgctactcacaaagcgagatcaggttcaatctcatggccatcataaagaacaggaaagaggtgtacagtgctgagcttgaggaactggagaagagaagggagcagattttgcaggagatgaataatgcttcctccacagaatccttgagcagttcgcttacggaggtgatatcggcaatcgaaactgtcacggagaaggtcatcatggaagaagagaagttcaagaagtggaagaagg

SEQ ID NO: 36397 - DNA, 289 bp, Zea mays
gacgtcccctacagagatggccagtccatcggcgtcatcgcggatggcgaggacaagaacggcaagccgcacaagctcaggctctactccatcgccagcagcgccctcggagatttcggcgactccaagacggtgtcgctgtgcgtgaagaggctggtctacaccaacgatcagggggaggtcgtcaaaggagtctgctcgaacttcctctgtgacttgaagccaggcgctgaggtgaagatcacagggccagtgggcaaggagatgctcatgcccaaagaccccaacg

SEQ ID NO: 36398 - DNA, 267 bp, Zea mays
cgggaactctggcctgtcagacggctccgacgccaaggacgtcaagggtggcctcgtcggcggctactacgacgctggcgacaacatcaagttccacttcccgatggccttctccatgacgctgctgagctggtcggtgatcgagtacagcgccaagtacaaggccatgggggagtatgaccatgtcagggagctcatcaagtggggcaccgactatctgctactcaccttcaactcctctgcttccaccatcgacaagttatacgc

SEQ ID NO: 36399 - DNA, 274 bp, Zea mays
gtggtggtttcgctgactgcgtatgctttctgggcgtctaagaagggcaatgaattcgggtacctggggcctatcctgtcttccgcgcttactatcctcgtcctaactagctttcttcaggttttcttcccactgggtacccgtgtcggtgggcttgttctgtgggctaggggctctggtcttctcaggcttcatcctgtacgacaccgagaacctgattaggcgccacacctacgacgagtacatctgggcgtcggtttggctgtacctcgac

SEQ ID NO: 36400 - DNA, 276 bp, Zea mays
gccagtcaaggtcagcaagaagaactcggctgcagtcaccaagttcctcgatgagctggctaagattgacttccctggagccaaggtggtgagcgaggcggtggccaagtccggcacctcgcccctgcttccggcgatcaccttcatcttggacaaggtcgcaccgtttatccccaaggaggagcccaaggcggagctgtcggcggaggccacctcccgggaagtcgccgtggaggagaagaaggaggaggccgagccagctgcagcgacggaggc

SEQ ID NO: 36401 - DNA, 276 bp, Zea mays
ccagctccgcgctcgtcttccagctggcgttcgtccctcacctcactcacctgggcgttcgtcaggaccctgccgtgatcgccgagaacgaggataagctgaagcaggtccttgatgtctacgacgagatactctcgaggaacgagtacctggctggcgacgagttcaccctggccgacctctcccacctcccgaactcgcactacatcgtgaacaccgagagaggaaggaagctcttcactaacaagaagaacgtggccaagtggtacgagaagc

SEQ ID NO: 36402 - DNA, 279 bp, Zea mays
agaacacaagggagacagcctttgcgcttcgcaagttgtctttgaccaaggctaagcgataccttgaggatgttattgctcacaagcaggcaattcccttccggagatactgtgggggtgttggtcgcaccgcgcaagctaagtcgcgccactccaatgggcagggccgctggcccgttaaatcagccaggttcatcctggatttgctgaagaatgctgagagtaacgctgatgtgaaaggcttggatgtggacaacctctatgtttcacacatccagg

SEQ ID NO: 36403 - DNA, 269 bp, Zea mays
atgtgtgcatggagaccctccgcgcgtacgatgagctgtttccatgggccctccttgtcctcgttaccaccattaccatcctctacctgaagcaactgttggtcgcagcgttcaagagacgcgccaccagctctccttctctcccatgcccaagaggcctcccgctcatcggcaacctacaccagctgggcacgaccccgcatgacgccctcgccgcgctcgtcgccaagcacgcagcgccggtcatgctgcttcggctatggtcggtg

SEQ ID NO: 36404 - DNA, 259 bp, Zea mays
ccgatgaggagtgcgtcaagctcctggctcaatgccggaaggcgattcctccacggaaggacggcgggaaagttataatcggtgatattatgattgaccactctgggcttatgctggaaactcacctcctgatggacatcggcatgatgaccatgacaaaaggacggcagagagatgaaaaagaatggagcgagctcttcaccaaagcagggttcagcgaatacaagatcctgaatgaattgtgagctcgtgttgcctt

SEQ ID NO: 36405 - DNA, 262 bp, Zea mays
gtccatgtattctgatagagtttttctgtctcacatcaccagtgatcctgctatgggccaggaaaagcctgttttcttcagtctgtatgccatcataagccacatcaagcctgatcagaatatgtggtaccgtgcttgcacgacctgtaacaagaaggtgactgaagcttttgggtctggatactggtgcgaggggtgccaaaagaattactctgagtgctcgctgagatacatcatggtgatcaagctctccgatcccact

SEQ ID NO: 36406 - DNA, 268 bp, Zea mays
cgccgcactgctgctcctagccgcggcggcgtgccaggccagcccttactaccctctggagctagggtactaccgttacacttgtccccaggccgaggctatcgtcaaggccagcatggagaaggccatcgctcagaaccctggcaatggcgccgccgtcatccgcatgctcttccatgactgcttcgtcgagggctgcgacgcttccgtgcttctcgacccgaccccgttcagcccgacgccggagaagctggccgcacccaacaac

SEQ ID NO: 36407 - DNA, 269 bp, Zea mays
aacacatctcctcgcatttcttcccatccgatccccccttcgcaaccaaaaccccaactcgccccgcatcgatggcgcccaaggccgagaagaaacccgcggcgaagaagccggcggaggaggagcccgcggccgagaaggcgcccgccgggaagaagccgaagcgcagaagcgggtccccgctggcaagtccgctgccaaggaaggcggcgatggcaagaggggcaagaagaagggcaagaagagcgtggagacctacaagatctaca

SEQ ID NO: 36408 - DNA, 262 bp, Zea mays
cgcctccgccgaggccatcaaggacgccttccgcatcgagtttggcgacgagtaccgggtcttcgtcaaggatctgtgcaaggaccacgccggctggccgctcaacaacatggagagctcctacaagttcatggtcaagcacgtgcagctctggaaggtggccttccacagcacctcgcctagatgggtccataacttctacctcgccgctctcgcctcattctacgccaagaaggtggaggctggactgaagaagtacaag

SEQ ID NO: 36409 - DNA, 258 bp, Zea mays
ggagaggttgggtctgggacaccatggctccgatgaagctgtacggggcggtgatgtcgtggaacgtgacgaggtgcgcaacggcgctggaggaggctggctccgactacgagatcgtgcccatcaacttcgccaccgccgagcacaagagccccgagcacctcgtccgcaacccgtttggtcaggttccagctctgcaggatggtgacttgtacctcttcgaatcacgagcaatctgcaagtacgctgctcgcaaaa

SEQ ID NO: 36410 - DNA, 276 bp, Zea mays
ctgagatgttacggatgcctttgactgagctgtgcctgcaaataaaatcacttcatcttgatgacatcaaatccttcctgctaaaggcagtagagccccctaatgaagaagctatttcctctgcagttgacttgttatacaaggttggagcttttgaaggacatgaagagttgtcacctcttgggtatcatctggcgaaactgcctgttgatgttttgattggaaagatgatgctttatggtgctatctttggttgtttatcaccaattctgtccg

SEQ ID NO: 36411 - DNA, 279 bp, Zea mays
cccacgcgtccgcccacgcgtccgcccacgcgtccgcccacgcgtccgatctccgagaccgcgctcgtcgccgaggttcatcgcctcaacgctgaccccgccgtgcacgggatccttgtccagcttccacttcctaagcatatcaacgaagagaagatactgagcgagatttccatcgagaaagatgtggatggcttccatcctctcaacattggcaagcttgcaatgaaaggcagagagccactgttcgtaccatgtacgccaaaggggtgcatggag

SEQ ID NO: 36412 - DNA, 278 bp, Zea mays
cccacgcgtccgcaagcacttacaagaagaacggaaaacctgctgccattcgctatggaactggttccattgctggttttttcagtgaggatagcgttacattaggtgatctggttgtgaaggatcaggaatttattgaagctacaaaggagccagggcttaccttcatggttgcaaaatttgatggcattcttgggctaggctttcaagaaatctctgttgggaatgcaacaccagtgtggtataacatggtgaaacaaggtctcatcagcgaccct

SEQ ID NO: 36413 - DNA, 274 bp, Zea mays
aagatcggggagggcacgtacggggtggtgtacaaggcgctggacaaggccaccaacgagacgatcgcgctcaagaagatccgcctcgagcaggaggacgagggcgtcccgtccaccgccatccgcgagatctctctcctcaaggagatgaaccacggcaacatcgtcaggtccgctttggttttatgcaacagcgggttacatgattgtgcaccacgagaacgggatatacctcgtcttcgagtacctggatctggacctcaagaagttcatg

SEQ ID NO: 36414 - DNA, 272 bp, Zea mays
ggacgggccgccggcgaggaccatgaacgccatcgaggaggtgtaccgcagcgcgcgcgcccaggcgctgatcgcgctctgctgcaccatcccgggctactggttcaccgtcggcctcatcgacatcgtgggcaggttctggatccagatcatgggcttcttcatgatgaccgtgttcatgctcgcgctcggggtgccgtacgagcactggaccaaggcgtccaaccacaccggcttcgtcgtcctctacgggctcaccttcttcttcgcaa

SEQ ID NO: 36415 - DNA, 275 bp, Zea mays
gcgcctctacatttcttctctctctgctcctccgcctccgcctgatccatccaagacagggatcgccatgtcggactcggaggagcaccacttcgaatcgaaggccgacgctggggcgtccaagacctacccgcagcaggctggcaccgtccgtaagaacggcttcatcgtcatcaagaaccgtccctgcatagttgtggaggtttctacctccaagactggtaagcatggccacgccaaatgccactttgtcgccatagacatattcaatggga

SEQ ID NO: 36416 - DNA, 267 bp, Zea mays
ggctatcctgctggaaggactcgaagccgcaggttcatcgtctacccatcgagtgggacatactacatcatggtcgaccacaccccgttcggtttcgacagcgacgtagagttctgcgagtacttgatccgcgaagtcggcgtctgcgctataccgcccagcgtgttctacctcgaccccgaagagggaaagaaattggtgaggttcaccttcagcaaggacgaaggcacgctgcgggccgcggtcgagaggttgaaggcgaactca

SEQ ID NO: 36417 - DNA, 272 bp, Zea mays
gctgcacttaaccgctactttggcggcctgaaatctggtggtaatgcttatgtgattggagatccagcaagacctggacagaagtggcacgtcttctacgccactgagtacccagagcaaccaatggttaaccttgagatgtgcatgactggtctggacaagaagaaagcttgtgtctttttcaagactaatgctgatgggaacacaacatgtgccaaggaaatgacaaagctctctggcatctctgaaatcaccccgagatggagatctgc

SEQ ID NO: 36418 - DNA, 271 bp, Zea mays
aaagaggtcgaggatgtcttgcagctgcggatcaagctgcaactgcggatcaagctgcaactgcggcaagatgtaccctgacctggaggagaagagcggcgggggcgctcaggccagcgccgccgccgtcgtcctcggcgttgcccctgagacgaagaaggcggcgcagttcgaggcggcgggcgagtctggcgaggccgcccacggctgcagctgcggtgacagctcaagtgcagccctgcaactgctgatctgctgcgttgttcgtttg

SEQ ID NO: 36419 - DNA, 270 bp, Zea mays
ggaggttactccaaagacgctggctgacgttaagggtggcactctcatctcttacgaaggaagagttcagcttttggagattgcccaagtacccgatgagcatgtgaatgaatttaaatcaatcgagaagtttaagatattcaacactaacaacttgtgggtgaaccttaaagctatcaagagactcgtagaggctgaggcacttaagatggaaattattccaaaccccaaggaagttgatggtgtgaaagtccttcaactcgaaaccgc

SEQ ID NO: 36420 - DNA, 240 bp, Zea mays
cttctccctcttgccggtcccgaataaagagcagcagcgcaagaggtcggtagagcgagaagaaggcaatggcggccgagagcttccttttcacctcggagtccgtgaacgaggggcacccgacaagctgtgcgaccagttgtcgacgccgtgcttgacgcatgtctcgcgcatgaccccgacagcaaggtggcctgcgagacctgcaccaagaccaacatggtgattgtgttcggcgag

SEQ ID NO: 36421 - DNA, 265 bp, Zea mays
ggagcagctagggttccgtcctcgatccgatccgccgagtgcacaccacctttccccactccgatcgaatcgatggccgccgagggcgagaagaagatgataaccctcaaaagctccgatggcgaggagttcgaggtggaagatgcggtggcgatggagtcgcagaccatccgccacatgatcgaggatgactgcgccgacaacggtatccctcttcctaacgtcaactccaagatcctatccaaggtaatcgtgtattgtatca

SEQ ID NO: 36422 - DNA, 268 bp, Zea mays
agcagcgtttgatcttcgctggcaagcagctggaggatggccgcacccttgcggattacaacatccagaaggagagcaccctccacctggtgctccgtctcaggggtggtatgcagatctttgtgaagacactcactggcaagacaatcacccttgaggtggagtcttcggataccattgacaatgtcaaggccaagatccaggacaaggagggcatcccacccgaccagcagcgcctcatcttcgccggcaagcagctggaggatgg

SEQ ID NO: 36423 - DNA, 247 bp, Zea mays
cggacgctggacctctgggctgccccaccaagaatgtaggtggagcagtcgccggacggccaggtcccggatatcgtgtacaagggcacgcacaaccacccgaagccgcagagtacgcgccggggcgccagctcggcgccggcgtcgtacgtggtgcagagcgccacagcgcggtgatgcccgagcattcctggggcgcgctgtccggaacacccgtggtgacgccggagaactcgtccgggtcctt

SEQ ID NO: 36424 - DNA, 258 bp, Zea mays
cgagaccgtggcgagcaaccgcgtccggccgtccgcttccgtttccttggataaccacgacgcccgcccgccccccggcaagcgaaaggaacgagaccaacccagccatggagaaggcgatcgatcggcagcgggtcctcctggcgcacctcctcccctccccctccgccgcctcctcgcagcctcagcttgcggcgtcggcgtgcgcggccggggacagcgccgctaccagaggtctcctccttcggggacgatgtc

SEQ ID NO: 36425 - DNA, 266 bp, Zea mays
gtcacaagtgtgcataagctgtggagtcaatatgggagagtacttttgtgatatatgcaaattttatgatgatgatacagacaaagggcagtaccattgcatcgattgtggcatatgcagggttggtggcaaggaaaacttcttccactgtgtgaagtgtgggtcctgctattctgttatactccgtgataaccatcagtgtgtggagaactcaatgaggcagaattgcccaatctgttatgagtatctatttgactcattacaag

SEQ ID NO: 36426 - DNA, 270 bp, Zea mays
gttaaaaggaagaggaagaaccagttcaggggtatccgccggcgcccgtggggcaaatgggctgctgagatcagagatcctcgcaagggcgtgcgcgtctggctcggtactttcaactcccccgaagaagctgccagagcttacgacgccgaggcacgcaggatccgcggcaagaaggctaaagtcaacttcccggatgaggttcctacggcggtttctcagaagcgccgtgctgctgggcctgcctctctgaaagcgcctaagatggac

SEQ ID NO: 36427 - DNA, 285 bp, Zea mays
cggacgctgggataaatttgagtctcagttttatagaatatcagattcaaacaagcgtatttactcgtacggagacgtttaccctagttatgtcagactttccaaaggagaatacacgttgcaactgtacataaggcatgagaatgtgcaattcttagagaaactcaaggaactggttctgtttattgagaggaaactagacaaaaaggatttcgttccattgatgttctactcccaacctgatggtcctatagttggaagtggcacttcaaatccactgttcta

SEQ ID NO: 36428 - DNA, 285 bp, Zea mays
aatgcatttgccctaccttgctaaagtatttcaaggacataatgtgaaagtcgtccctatccttgttggtgcacttagctcccaaaacgaagccttgtatgggcagctgctctccaaatatgtggatgacccaaaaaacttcttttccgtgtcgtcagacttctgccattggggatccaggtttagctacacatactacgaaaagaagcacggtgccatccataaatctatcgaggccttggaccgtatgggcatggagatcatagagactggcgatcccgtagc

SEQ ID NO: 36429 - DNA, 282 bp, Zea mays
cccacgcgtccgggaggcttctggatacttcttctgcctagaggaccgtgcactactttgtagagactgtgatgttgctatacacacagtgaattcctttgtttcagtacatcagagattcctgctaactggagttcaggtgggtcttgatcctgctgatccagttccacctattgctgaaaagcacgttaatgctgctggtggatcagtaaatcaaccagtgagacatcagccaaagagaagcccgacagttcaattttcagttgaagggagtgcttctgt

SEQ ID NO: 36430 - DNA, 279 bp, Zea mays
cggaccgtggttgcacaccgcgcttgaaagggcactcatagtagaggatgttcagaatcagaacattgcattgaagaagcatatggagatataccatgtaaatacactcattacctgattttttgtgtgtgcttttgtaaagttgtggaactaattcttttttattataatgtgtatgtaggaagagaataaattgttagagaaggctaacagacagaaggtgctagaggttgagaagctcacacaaacaattaatgagcttgaagagtccattctcgc

SEQ ID NO: 36431 - DNA, 278 bp, Zea mays
cggacgctgggaacaaatcagacacttatacaaaatggattgagagagagggtagtacttagggtggacggtggattcaggagtggtcaagatgttcttattgctgctgctatgggagctgatgaatatggctttggttctgtagccatgatagctactggatgtgtcatggcacggatttgtcacacgaataattgtccagttggagtggctagtcagagagaagagcttcgtgcaaggtttcctggtgttcctggtgatcttgttaactacttcct

SEQ ID NO: 36432 - DNA, 320 bp, Zea mays
catacgccgcagtaccgtccggaatccgggtcgccacgcgtccgaatttcaaatccttcgatcgcgcagccgcccgccctctcgcagctctctccgatggcccgcacgaagcagacggcgaggaagtcaactggcggcaaggcgccgcggaagcagctggccaccaaggcggcgcgcaagtcggctccggccaccggcggcgtgaagaagccgcacaggttccgccccggcaccgtcgctctccgcgagatccgcaagtaccagaagagcacggagctgctcatccggaagctgcccttccagcggctggtgcgtgagat

SEQ ID NO: 36433 - DNA, 277 bp, Zea mays
ccacgcgtccgacacggtccgcggacgcgtggccgttccatttccccatctcccagatccaattcgcgagttctccctcctctgccgccatggcgctctctgtggagaagacctcgtctggacgggagtacaaggtcaaggatctctcgcaggcggacttcggccgcctcgagattgagctggccgaggtcgaaatgcccggcctcatggcgtgccgcgccgagttcggcccgtccaagcccttcgccggcgctaggatctcggggtctctccacat

SEQ ID NO: 36434 - DNA, 284 bp, Zea mays
cgggaagcgtgggaagagcggcctcgtggctctcaacttggatttctcatttcttgagatgaatccgttcaccatggtcaatggggagccatatcctctggacatgagaggagaactagatgacacagcagctttcaagaacttcaagaagtggggaggtatagaatttcctctaccttttggaagagtactcagccctacagaaagtttcatccatgaactagatgagaagacaagtgcctctctgaagttcacggttttgaacccgaaaggtcgcatctgga

SEQ ID NO: 36435 - DNA, 279 bp, Zea mays
gacaaggtaagcagcaatcgcaggaaccctagcgccgccgcacccgcaggaatgggtatcgacctcgtcgccggtgggaggaataagaagaccaagcgcactgcgcccaagtctgacgatgtctacctcaagctcctcgtcaagctctaccgtttcttggtcaggaggaccaagagcaatttcaacgctgtcattctcaagaggcttttcatgagtaaaaccaaccgaccaccaatctccatgcgccgccttgtcaagtttatggaaggaaaggagaag

SEQ ID NO: 36436 - DNA, 280 bp, Zea mays
cccacgcgtccgcccacgcgtccgcccacgcgtccgctctcctgccggtgggggccacagtttgagaaagctacctacaagaatcgtcaacgcctttacctatctgaacagaccgatgggagtgtgcctaatactctggttatcgcaaactgtgaagttgtgaaaccaagggttgcagctgctgaacatatctcgcagtttaacgaggaagcacgatcaccttttgtaaagaagtacaagactatagttcatcctggtgaagttaacagaatcagggagc

SEQ ID NO: 36437 - DNA, 275 bp, Zea mays
atggatttcattcctggtgtcgatggtcctagcgagggtgtaccccgggtgctggcttgcttcagtaacaatctgctccgccgagagcctttgaagcttgtcgatgggggccagtctcagagaacctttgtatacatcaaggatgccatcgaagctgttgtgttgatgattgaaaatcctgctcgagccaatggtcacatcttcaatgttgggaatcctgacaatgaggttacggttagggagttggcccaaatgatgacagaggtctatgcaaa

SEQ ID NO: 36438 - DNA, 274 bp, Zea mays
ggagcaccgcccctccgtctggaccatcggcttcgacatgaacctcctcgccgacgcatacgccggcattgtcacgtcgagcatagcgtactacgtgcaaggcctggtgatccagaagaccgggcccgtgttcgcgtcggcgttcagcccgctgatgatgatcatcgtggccgtcatgggctccttcatcctcgccgagaagatattcctcggcggcgtcctcggcgccgtcctcatcgtcatcgggctctactcggtgctctggggcaagcac

SEQ ID NO: 36439 - DNA, 280 bp, Zea mays
agaaagaaaaggggcaggaagaaatcgagcctcactcgatccatcgcctcgccgcagcacacacgaggccggcggcgccatggccatgaagctggacatgtccgcgctcgagaccaacttcgccaacctgaccgcctccgccggcgacgacacgtacttctccgccgaggcccccgacgtgccgtccatggtgctccccatctgcgacgacttcgacggcttccaggcggccaccaaggatatggtgaagaataagaaggggacgaccacgcttgccttc

SEQ ID NO: 36440 - DNA, 221 bp, Zea mays
ccctagccctcgcgccgccgcctccttcgccacccagcgctcgagctcctcgctccctgcgagcgcgcgccgcaacgccaccatgaagttcaacatcgcgaacccttccaccgggtgccaaaagaagctggaaatcgatgacgaccagaagctgcgtgccttttatgaccgaaggatatcccaggaggtcagtggtgatgctctgggtgaggagttcaagg

SEQ ID NO: 36441 - DNA, 274 bp, Zea mays
acaagaactggtgcaagagcaagaagaaggctttcacaaagtatgctctcaaatatgaaaatgatgctggcaagaaggaaattcagctgcagcttgagaagatgaagaaatatgcttctgttatccgtgtcattgctcatacccagattaggaagatgaagggtttgaaacagaagaaggctcacctgatggagattcaggtcaatggtggtaccattgctgacaaggtggactacggctacaaattttttgagaaagaggccctgttgatgct

SEQ ID NO: 36442 - DNA, 268 bp, Zea mays
cccacgcgtccggcaaggacgacgtgatcgagagcggcgctggcggcggcgagttcgctgccaaggactacacggaccctcccccggcgccgctgatcgacgcggcggagctggggtcctggtcgctgtaccgcgccgtgatcgccgagttcatcgccacgctgctgttcctgtacatcacggtggccaccgtgatcgggtacaagcaccagacggacgcgtcggcgtcgggcgccgaccggcgtgcggcggcatgggcgtgctgggc

SEQ ID NO: 36443 - DNA, 267 bp, Zea mays
cttcaccctgacaaaggaaaagttgccatttttgtcgactgtagtccaaccgctgagcctctgtttgagggtagaggctctgaagaattgtctgctgagctctctgtttccctgcaaagatgcttgttgggtggtaaaagtggtgctggtgctgcaattgatctgtcatccctaattgttgttgatggaaaggtctgcagggatctgtacattgatgggcttgtggtcagttctgatggtaatttgctagatgcgctagctgttgcg

SEQ ID NO: 36444 - DNA, 267 bp, Zea mays
gagcgtgtacatggccaagctggcagagcaggcggagcggtacgaggagatggtcgagttcatggagcgcgtcgcggctccgccggcggcgccggcggaggggaggagctatccgtggaggagcgcaacctgctgtccgtcgcctacaagaacgtcatcggcgcccgcaggcactcgtggcggatcatctcctccatcgagcagaaagaggagggccgcgggaacgaggcgcacgccgcctccatccgcgcctaccgctccaagatc

SEQ ID NO: 36445 - DNA, 270 bp, Zea mays
cggacgctgggcggacgcgtgggcttcccgttcatcgccttcttcggcgccttcgcctttgtgctctacccgctcagggacgtacatccatcccaccgcgctcgcggacaaacttctcgccgcgctcggtccgagcttccttggtccggtggcgatactgaggagttggagcttctgcttgttctatgttatggctgagctctggggcagcgtcgtcatctctgtgctcttctgggggttcgctaatcagattaccacagttgatgaagc

SEQ ID NO: 36446 - DNA, 266 bp, Zea mays
cccacgcgtccgggacgcgtggcaggaactcccgggctcgaggagatcgggacgatgatgggagggcgcgctctgctgctgctcctgatctcggcgctgctcgttcagatccgcgcctctgacccgctgctgtacgagccgtttgatgaggacttcgagggtagatggatcgtctccaagaaggatgaataccaaggtgtatggaagcatgccaagagtgatgggcatgaggactatggcctccttgttagtgacaaggcaaggaa

SEQ ID NO: 36447 - DNA, 265 bp, Zea mays
ggaccgtggcgccggccgacgccgccttttcgtccccgcgtcacgtcgcggctccactgagcgtacgtgtcaccggcgggaggcaagggcaggcggtggtggcgatggcgtccgctgacgcgcgcttggcggggatcgcctcctccatccgcgtcatccccgacttccccaagccagggatcatgttccaggacatcacgacgttgctgctcgatcccaaggcgttccgtgacaccatcgacctctttgtcgagcggtacaagga

SEQ ID NO: 36448 - DNA, 266 bp, Zea mays
cttttgacaagcacataccctggagaagtcctgttctctatagcaatatgtgtccttggactaattctttttgctctcctcattggtaacatgcagagctacctacaatctgttgctatacgccttgaagagatgagagttaagaaacgcgatgctgagcagtggatgcatcaccgttcactgccaccggacatcagacatagggtgaggaagtatgaacgttatcggtggttggaaaccaggggagtagacgaagaaactttggt

SEQ ID NO: 36449 - DNA, 261 bp, Zea mays
cgcaaccgtgtgaccgcccgtgccgccggcgatcccgatccgccgacccgtcccagccccgctcgcagccatgtcgccgtcggagccgacgcgggaggagagcgtgtacatggccaagcttgcggacaggcggagcggtacgaggagatggtcgagttcatggagcgcgtcgccgctacgccgggtgctccggcggcggggacgagctctcggtggaggagcgcaacctgctgtccgtcgcctacaagaacgtcatcggcg

SEQ ID NO: 36450 - DNA, 262 bp, Zea mays
ggccaccaccattccttccccaactctgcaggctgctcgtcgccctccctccacgccggacgcgccccgatccagatccaggggcgtaacatggcatcaaaacgtatcctcaaggaattaaaggacctgcaaaaggaccctccaacgtcatgcagtgctggtcctgctggtgaggatatgttccactggcaggcaaccatcatgggtcctcctgatagtccatatgctggaggtgttttcttagtgaacattcatttccccc

SEQ ID NO: 36451 - DNA, 260 bp, Zea mays
cccacgcgtccggcgaagatctgttctcaggttggcctgtgcacttttgatggcactcacggtgttagcgctggaattcgtagcgtagtggatgacaaagctgggaaatcaaatggtggtctcaagagtgatccaatgtgcaatgcctgtgagatggctgtggtatggatgcagaaccaactggcccagaacaagacacaggagctcatcctgacctacattaatcagctttgtgagcgtcttccttctcccatgggaga

SEQ ID NO: 36452 - DNA, 261 bp, Zea mays
gtacaacctcatcgccgacctgccggtgaagccaccgccaccgctgcacccgcagacacaccagcctctgaatcccagcgacctctcccctctgttccccgacgagctgatcaggcaggaggtcaccgacgagcggttcgtcgacatacccgaggaggtcatcgacgtgtacaagctctggcgcccgacgcccctgatcagggccaggaggctggagaagctgctcggcacgccggcgaagatctactacaagtacgaggg

SEQ ID NO: 36453 - DNA, 260 bp, Zea mays
acgacatccactcccccaggatcccgtcggctgaggagatcgccgaccgcatcgacaagatgctggcggtgctggacaccaacatcctctgggtgaaccccgactgcggcctcaagacccgcaagtacacggaggtcaagcccgccctgaccaacatggtctccgccgctaagctcatccgcacccagctcgccagcgccaagtgagcaccttttttttgcctttttcgtttccgaggagggcgtcgtcgatgccaattt

SEQ ID NO: 36454 - DNA, 259 bp, Zea mays
gtcgtgctttgcgtgctgtggtgatgaagatacccaagtaccagacaccagggctcaatacccaggacaccatccagcgagggccgatgcataccgcccttctgatcaacctcccaagggtcctcagcctgtgaaaatgcaaccaatcgcagtccctgctattcctgtggatgagattagggaggtgaccaagggttttggtgatgaagctttgattggtgagggatcctttggcagagtatacttgggtgttctaaga

SEQ ID NO: 36455 - DNA, 260 bp, Zea mays
cagatctatcaccttgcttgccctgcttcaccaatcttctacaagcacaatcctgttaagaccatcaagacaaatgttattggtaccctgaacatgctgggacttgcaaagagagttggagctaggattttgttgacatcaacatctgaagtttatggtgatccacttgagcatcctcaaaccgaggcctactggggcaatgttaacccaattggagtcaggagttgttatgatgagggtaagcgtgtagcagagacgct

SEQ ID NO: 36456 - DNA, 278 bp, Zea mays
gtcggtccacgcgtccgcccacgcgtccgcacacgcgtccgcggacgctgggcagacggcaggactcgcttcaagctcctcatctcgagcagggggggtcgcctgaggtatcggtcaatcagtaatcaccccaaatcctagggttctagtcgcttctcgtcgtttcgttcgtagatcacagcgacaatggtgaaggcagttgctgtcctcgccggcactgatgtcaagggcaccatcttcttttcacaggagggggatggtccgaccaccgtgactgg

SEQ ID NO: 36457 - DNA, 258 bp, Zea mays
agctgtacggggcggtgatgtcgtggaacgtgacgaggtgcgcaacggcgctggaggaggctggctccgactacgagatcgtgcccatcaacttcgccaccgccgagcacaagagccccgagcacctcgtccgcaacccgtttggtcaggttccagctctgcaggatggtgacttgtacctcttcgaatcacgcgcaatctgcaagtacgctgctcgcaaaaacaagccagagctgttgagggaaggaaacctcgagg

SEQ ID NO: 36458 - DNA, 255 bp, Zea mays
ctaagaaatggtaggagtgccgcggtcaaaaagttggattctaacaagcagccagaccaagagttcttggcccaggtctgtctttccctgtttatgaaatgcagtgcatctattttatcccgtggtttgaagtcaacatgaaattcgtctacaggtgtctatggtgtcaaggctgaagcatgaaaatgttgtcgagttgcttggttactgtgctgatgggacactccgcgtccttgcttatgagttcgctacaat

SEQ ID NO: 36459 - DNA, 257 bp, Zea mays
cccacgcgtccgcccacgcgtccgcggacgcgtgggccagacattgaggtcgtcgtcgttgacatctccaagccccgcattgaggcctggaacagtgacaccctgccaatctacgagcctggtctcgatgatgttgtgaagcagtgcaggggcaggaacctcttcttcagcactgatgttgagaagcacgtcgctgaggctgacattatctttgtctcggtgaacacccccaccaagacccgtgggcttggagctgg

SEQ ID NO: 36460 - DNA, 256 bp, Zea mays
cggacggtggtgctgacgcgtgggcaccacccatcactgcagtactgcaaatgaagtgcaaaatggccagcagtagtagagtagatgcagccgccgccgtccttgtagccttttgcgccgccgccctctcgtcggccacggtgaccgtgaacgagcccatcgtcaacggcctctcctggagcttctacgacgcgtcctgcccgtccgtcgagggcatcgtgcgctggcacgtcgccgacgccctccgccgcgacat

SEQ ID NO: 36461 - DNA, 257 bp, Zea mays
cccacgcgtccgtttctggagcagctagggttccgtcctcgatccgatccgccgagtgcacaccacctttccccactccgatcgaatcgatggccgccgagggcgagaagaagatgataaccctcaaaagctccgatggcgaggagttcgaggtggaagaggcggtggcgatggagtcgcagaccatccgccacatgatcgaggatgactgcgccgacaacggcatccctcttcctaacgtcaactccaagatccta

SEQ ID NO: 36462 - DNA, 258 bp, Zea mays
ctttcctctcctctaggctctagtcctctcgcatccgcagcttccccagccagctagggtttgcagatgacgaccgcggcgcgccccacctgggcgccggccaagggcggcaacgagcaggggggcaccgcatcttcggcccctcccagaagttctcctcccgcgacctcgccgcgcacacctccctcaagccaagaaaagacggtcaacagacccaagaggagttacagaagacgaatctcagggaggaacttgagg

SEQ ID NO: 36463 - DNA, 290 bp, Zea mays
gagaagattgcctgctatgttactgtaaggggcgagaaggcaatgcagcttctggagagtggacttaaggtcaaggaatatgaactgctaaggaggaactttagtgacacagggtgctttggttttggaatccaggagcacattgatcttggcatcaagtatgatccttcaaccggtatctacggaatggatttctacgtcgtccttgagcgcgctgggtaccgtgtagcccgacgccgcagtgcaagtcccgtgttgggatccagcacagggtgaccaaggaggatgct

SEQ ID NO: 36464 - DNA, 290 bp, Zea mays
cccacgcgtccgcgcagtggagcaagctgctgggcggcgtcttcttcagcttctgggtgctggcgcacctgtacccgttcgccaagggcctgatggggcggaggggccgcacgccgaccatcgtcttcgtctgggcgggcctcctctccatcaccatctcgctgctgtgggtggccatcaacccgccgtcccagaaccagcagattggtgggtcgttcacattcccgtgaaagctctctgggccaatggcggattcatgcatgcttcgtcgcagtgggatccttgcgttg

SEQ ID NO: 36465 - DNA, 285 bp, Zea mays
catctccatcctcttaaacaaaaaccaaatttctcccctgaacatggcatgttcttttccgaacggggttggtggaatagtggaactggcaccaggatacttgcccgtggcatacagtatggtaaggaaagccggtgggctctgcatcgccgacgaagttcaggcaggagtcgcgagaactggaagccacttctggggattcgaagggcatggtgtcatcccggacatagtcaccatggccaagggtatcgggaatggcatcccataggagctgtagtaacgacg

SEQ ID NO: 36466 - DNA, 286 bp, Zea mays
gaggcaggcaccatcatccatggcgccctccggtgacaccattgccctcgtccacagcggcatggacagcagcaacaagacgctgctcaagagcgaggccctctacaagtatgtcctcgacacgtcggtgctgccgcacgagccagagtgcatgcgtgaggtgcgcctcgtgaccgacaagcacgagtgggggttcatgcagtcgtcgcccgacgaggcgcactgctgcggatgctcatcaagctcaccggcgcgcgccgcaccctggaggtgggcgtgtacaggg

SEQ ID NO: 36467 - DNA, 279 bp, Zea mays
gacacgcgtccgcggacgcgtgggcgaccgtgggctcgtcggcttccgtccacgcgagaagcgagagcatggacacccaagtgaagcttggtgttgtggtgaaggtgatgggcaggaccggctccaggggtcaggtgacccaggtcagagttaagttcttggatgaccagaaccggctcatcatgaggaatgtcaaggggcccgtccgcgtaggtgacatcctcaccctgctcgagtccgagagggaggccaggaggctgcgctgaagccctagcgttc

SEQ ID NO: 36468 - DNA, 287 bp, Zea mays
atcaccagctcttctccatcaagagtaacaggccatcgccttaccagttctgatcccaaatcatttacggcgtaggtgcctcttgctcaaaacccagccccacagcaatggagtgcgagaacggccgcgttgctgcaaccaacagcgattccctgtgcatggcgacgccccgcgccgacccgcttaattgggggaaggcggcggaggagctgatgggcagccacctggacgaggtcaagcggatggtggccgagtaccgccaacccttggtgaagatcgagggcgca

SEQ ID NO: 36469 - DNA, 285 bp, Zea mays
aaaaagaagagcttgcttggagattcagaagagcctgaagagaaagcaccgcgcaataaggagaataaagaatctgaggataaagatgagggtccgactgaatatatatcttattggaaaccaaatgtaacaataaatcttgttgaagatttcacacggtatcccaacaataatgtacctcccattgttgctccatatctgaatgtggatccagttacgggcgattattatcctacagtattcttcaatgagttttggctattgaaggataaattaatagcgctc

SEQ ID NO: 36470 - DNA, 281 bp, Zea mays
agacccgcggtgtgctcaagatctttctggagaacgtcatccgtgacgccgtcacctacaccgagcacgcccgccgcaagaccgtcaccgccatggatgtcgtctacgcgctcaagcgacagggccgcaccctctacggcttcggcggctaggtcgcttcctcatctggtggcgaactgcatctgtgtcggcggtggtcgtgttgtgtgcctaatctagtgtagtccgttctctatatcgtcgctgtgttctgtggtgtcttgtatcccatttcctgcaat

SEQ ID NO: 36471 - DNA, 281 bp, Zea mays
cccacgcgtccgggtttgatggcaaaacttcatcacagaaatcttgttcgactggagggtttctgcttagaagagggagagaggttgctcgtctatgagtacatgcccaacaaaagccttgacaatattctttttgatcatgagaagaaaagacaactagattggaggaaacgattcaacataattgaaggagttgcacgtggattgcaatatcttcatgaagactctcaaaataagatagttcaccgtgacctaaaagcaagcaatattctgttggattc

SEQ ID NO: 36472 - DNA, 281 bp, Zea mays
  unsure (1)..(281): unsure at all n locations
atctgtcagatactgttactgatgatgagttgaaggagatgtttggaaaatatggaaccataactagtgctgttgttatgcgggatagcgatggaaaatccaggtgttttggatttgtcaattttgaaaatgcagatgctgctgctcaggctgttcaagagttgaatggcaagatattcaatgataaggaactgtatgttggaagagcacagaagaagtctgaaagagagatggagttgaaggagaaatttgaaaagaatngtcaagaggtagctgagaag

SEQ ID NO: 36473 - DNA, 265 bp, Zea mays
gtggccgccgcggaggggctccgccgcgcggtcctcgacatgcatgcggcgctcacggccatcgagcggtgctggaagtccgtcgtcgctgcggtgcacggcgcttgcgtcggcggcggcgtcgacctcgtggccgcctgcgacatcaggtgctgctccagggacgcctccttcgtgctcaaagaggtggacatggccagcgtcgccgatctcggcgcgctgcacgcctcccgcggatcgtcggctacggtaacctgctgacctc

SEQ ID NO: 36474 - DNA, 277 bp, Zea mays
cggacgcgtggcaaattatatgcaatcgcaagcgagcagaatggcgaggtccagtggtagtagaccagtggccctcgtgctgctggcgctgtgcgcgccgccctctcgtcggccacggtgaccgtgaatgagcccatcgccaatggcctctcctggagcttctacgacgtttcctgcccgtcggtagagggcatcgtgcgctggcacgtcgccgaggccctccgccgcgacatcggcatcgccgcggggctcatccgcatcttcttccacgactgct

SEQ ID NO: 36475 - DNA, 279 bp, Zea mays
cccacgcgtccgcccacgcgtccgcggaagggcaccatcaagatctctgacttcggcctcagcgctctacctcaacatctcgggagtgacggacttctgcacacaacatgtggcagccccaactacatagctcctgaggttctgcaaaacagaggctatgacggctccttgtcagatctctggtcgtgtggggtgatcctctacgtgatgcttgttggctgccttcccttcgacgacaggaacctcgtcgttctttatcagaagattttcaagggagac

SEQ ID NO: 36476 - DNA, 269 bp, Zea mays
  unsure (1)..(269): unsure at all n locations
cccacgcgtccgctggcttctcctccccctcttatcaagtcctcctcgggttagggttccttagggttttgtggaggggcgatggcggctgctgatgtggagtaccgttgcttcgtcggcggacttgcctgggccaccagcaacgagtcgctggataatgccttcgcctcctacggcgagatcctcgactccaaggtcatcaccgaccggtagacggggatgtcccgcggcttcggcttcgatancttctcctccgataactccatgct

SEQ ID NO: 36477 - DNA, 272 bp, Zea mays
cccacgcgtccgcggacgcgtgggtccaggacgactccggcaacgtcacccgcttcgtgatgctggcccgggagcccgtcgtgaccgcgcaccgaccgccccttcaagaccagcatcgtgttcgcgcacgacagggagggcacctccgtgctcttcaaggtgctctccgccttcgccttccgcgacatctcgctcaccaagatcgagagcaggccgcaccgccaccgccccatccgcctcgtcgacgacgccaacgtcggcactgcaagcac

SEQ ID NO: 36478 - DNA, 264 bp, Zea mays
gctcaagctgcaagtgcggcaagaagtaccctgacctggaggagacgagcaccgccgcgcaggccaccgtcgtcctcggcgtggccccggagaagaaggccgcgcccgagttcgtcgaggccgcggcggagtccggcgaggcccccacggctgcagctgcggtggcaactgcaagtgcgacccctgcaactgctgatcacatcgatcgacgaccatggatatgattattatctatctagcttgtggtgagtgttgaacaataat

SEQ ID NO: 36479 - DNA, 196 bp, Zea mays
gcgaggaccatatagtggtggtctaggaggaatatcgtttgatggtgacatgcaaattgcactttctctccgcaccatcgtattctcaacagcgccgagccacaacacgatgtactcatacaaagacgcagataggcgtcgggagtgggtcgctcatcttcaggctggtgcaggcattgttgccgacagtagccca

SEQ ID NO: 36480 - DNA, 133 bp, Zea mays
agccgctgtcgtggcgcatgaagtacggctggacggccttctgcgggcccgccggccccaccggccaggccgcgtgcgggcagtgtctcctggtgaccaacacggcgacgggggcgtccatcacggtgaggat

SEQ ID NO: 36481 - DNA, 175 bp, Zea mays
atcttcttctcttctctgaattccagtccaagggccggaataccgtcagagcagagggagtgggaggaagaaaaaaaaaagatggtgaagctcgcatttggaagctttcgcgactctttgagcgccgcgtcgctcaaggcctatgtggccgagttcatcgccacgctgctcttcg

SEQ ID NO: 36482 - DNA, 195 bp, Zea mays
gttctcgatgccgtcagtgggttcacggagaccaattacacgcagttgacggagctttatcagaagtacagggacaaagacttcgagatattggcattcccttgcaatcagttcttgcgacaggagccaggtactgatcagcagatacaagactttgcttgcaccagatttaaagctgaatacccagtttttcag

SEQ ID NO: 36483 - DNA, 216 bp, Zea mays
ggtactagcagacggccgattccgggtcaccaccgccgggacctggcgatcgcccgctcaccaacgatgagattatcctcctatgctccgagttcctcgacgccggtacggacaccacgtccacagggctgcagtggatcatggccgagcttgtgaaaaacccagccatccaggagaagctctacagcgagatcaaggccgccacagacgacaaca

SEQ ID NO: 36484 - DNA, 172 bp, Zea mays
cggacgcgtggcggccgccctttttttttttttttaacaagtatatcaggaagttcctttatttagaacgcgctgctaatgcaggctacgtgttacaaatttattattattcaaaaccacggccatgtggataccacgtcgatgcagttttttggccccatcaaacaagtag

SEQ ID NO: 36485 - DNA, 217 bp, Zea mays
caagaagatggctcttcctccttgccacatgtttgcacaattctatgtggaaaatggggagctatcttgccagatgtatcaacgctctgcagacatggggcttggtgttccattcaacatcgcatcatattctctcctgacatacatgattgctcaagtttgtgatctttctcctggagattttgtccatgttatagggtatcccatgtctatagaa

SEQ ID NO: 36486 - DNA, 179 bp, Zea mays
gccgcaccctcccgcccaccgccgtcgccgcccaaccgcagtaaggaggaaggagcaggaagatgccggcggggcacgggctgcggtcgcggacccgcgacctgttcgcgcggcccttccgcaagaaggggtacatcccactcaccacgtacctgcgcacctacaagatcggcgactac

SEQ ID NO: 36487 - DNA, 228 bp, Zea mays
ggcgtaggtagcggcggtctcaaccccaggcgagctcggctccggtcacccgtcgatccacgcaaccatgtcgaggaggaagaccagggagcccaaggaggagaacgttacccttggacccactgtccgtgaaggagagtttgtctttggtgttgctcacatctttgcatccttcaatgacaccttcattcatgtcactgatttgtctgggagggaaactttggttcg

SEQ ID NO: 36488 - DNA, 268 bp, Zea mays
gtgtgatcgagaggtttgagaaggaggctgctgaaatgaacaagcggtccttcaagtacgcatgggtgctcgacaagctcaaggctgagcgtgagagaggtatcaccattgatatcgctctgtggaagtttgagaccaccaagtactactgcacggtcattgatgcccctggacaccgtgacttcatcaagaacatgatcactggtacctcccaggctgactgtgctgtcctaatcattgactccaccactggtgtttttgaggctgg

SEQ ID NO: 36489 - DNA, 266 bp, Zea mays
catcgacgaggtgtgggcggggacggggccggacgtgctgccggacgacccctactatcgctctgtggctcggttctggggcgcgttcatcgacgataaggtggagtctgcgtggctggggatgctgttcaggtgcacgaacgatgaggagatgtcggcggcggttgcgcgcgcccgctatgcgctcgacgcgctggaggtcgcgttccgggactgctccagggggaggccgttcttcggctgcgacgacatcgggttcgtggacg

SEQ ID NO: 36490 - DNA, 281 bp, Zea mays
ctccaatcacagtcgtgaccagagcgcgagagctagctagagggccgtgaaaatgccgatcaataggatcgccctggggagccaccaggaggtgtaccacccgggcgccctcaaggcggcgttcgctgagttcatctccaccctcatcttcgtcttcgccggccagggctccggcatggccttcagctagctgaccggcggcggcccgacgaccccggcgggcctgatcgcggcggctgtggcgcacgcgttcgcgctgttcgtggcggtgtctgtgggct

SEQ ID NO: 36491 - DNA, 268 bp, Zea mays
ggcaaggagcttgagaaggagccaaagttcctgaagaacggtgatgctggtatggtgaagatgataccgaccaagcccatggtggtggagacgttctcagcgtatcctccccttggtaggtttgctgtccgtgacatgaggcagacggttgctgttggagttatcaagagtgtggagaagaaggacccgaccggcgccaaggtgaccaaggcggctgccaagaagaaatgatgcgatcctgcgcctgctttagcaatacctagttttc

SEQ ID NO: 36492 - DNA, 269 bp, Zea mays
cccacgcgtccgcccgaacaggaactccctcagggggtttgaggtgatcgaccagattaaggctgctcttgaggctgcctgcccaggcacagtctcctgtgccgacattgttgcccttgcggctcgtgattccaccgccctggttggtggaccatactgggacgtgccacttggccggagagactcgctcggtgcaagcatccagggctccaacaatgacatcccagcccccaacaacacactccccactatcatcaccaagttcaagc

SEQ ID NO: 36493 - DNA, 272 bp, Zea mays
ctcttttccccaaggcaaccaaaccatctcgattctcgactcgtggggaagtttcgctctcgccggcgtcgacggcctagggttcgaggaacgtccgtccgtccgtccggggaaggagcggtagggaggcggagatgatcgaggtggtgctcaacgaccgcctggggaagaaggtgcgggtcaagtgcaacgaggacgacaccatcggcgacctcaagaagctggtggcggcgcagacggggacgcgccccgagaagatccgcatccagaag

SEQ ID NO: 36494 - DNA, 273 bp, Zea mays
attttataatagtgcagacatctttccagtatattcctgggtattatgtgagtggactgcacagatatctgagtgttgtggctgtttctgttggtgctatactcttcgtgcttactagcttttctgatcctgggactgttactgctgaaaatgtttctcaatacgtatcttcctacccatatgacaacattatttttgtggagaaagaatgttcaacttgcaagattactaggccagccagggcaaagcactgtagaatatgtgacaagtgtg

SEQ ID NO: 36495 - DNA, 263 bp, Zea mays
cacgtctcggcagccacaagaaaccacccccttccggcacacgggctcgaccacctgactccatcaccgtgcctgtctgtgttctagggacaagaagagcagagatatacaggagcgagcagaggcggggagaagaggatgagcaccacaacggcgtcgtcgctgaaccccaacgcgccgctcttcatcccggcggcgtaccggcaggtggaggacttctcgcccgagtggtgggagctcgtcaacaccaccgcctggttccg

SEQ ID NO: 36496 - DNA, 261 bp, Zea mays
cccacgcgtccgcccacgcgtccggtcctcttccagccatccatgattggtatggaggctgccggaatccatgagacaacatacaattcaatcatgaagtgcgacgtggatatcaggaaggacctctacggcaacattgtgctcagtggaggttcgactatgttcccgggaatcgctgatcgtatgagcaaggagatcacttcccttgcaccaagcagcatgaagatcaaggtcgttgcaccgcctgagaggaagtatagt

SEQ ID NO: 36497 - DNA, 266 bp, Zea mays
ggcgactccgcctccgcagcggcggcagcgggtggagcggcgcagaggagggacccgtacgaggtgctcggggtgggccgcaccgccaccgaccaggagatcaagagtgcgttccgacgcatggcgctcaagtaccatccggacaagaatggcgatgaccctgttgcatcagacaggttccaggaagtcacattctcctataacatcctgtcagatcccgataagaggcggcagtacgatacatcaggatttgatgcaatcgaatc

SEQ ID NO: 36498 - DNA, 269 bp, Zea mays
ccacgcgtccgggacgctgcgctggacgaggtcaccgacacgggcgccttcgaccggtcgccgtccaccttccggagctccgtttcacgggacgggcggttccccgccgtggcgggcggtaccacctctacgtctcgtacgcgtgcccctgggcgtcccggtgcctcgccttcctcaagctcaagggcctcgaccacgccatcggcgtcacggccgtgaagcctatcttcgagcggaccaaggagagcgacgagcatctgggctgggtg

SEQ ID NO: 36499 - DNA, 278 bp, Zea mays
cccacgcgtccggccgaccttcaaggtgaggaaagagaagctcggggacagaatcactgcgctccagcagctagtctcgccttttggaaagacggatactgcatcggttcttcacgaggccatcgaatacatcaggttcctgcatgaccaagtagcttccctgagctctccctacctcgggtgtgggcggcccgtagtgcagcagatacagcaacgacgacaggcgaaggacgacggcggcgccgcggcgaaggaggacctgcgaaccgagggctgtg

SEQ ID NO: 36500 - DNA, 277 bp, Zea mays
caacgacgccggcaggagcgtcatggagaggtatacgaatatgagcaacgctatgaagacgtatgggaagggcatcttcttctcgctgtgcgaatgggggaggcaaaaccctgctacctgggcaggcggcatggggaacagctggagaacgaccgatgatatcgccgacaattggggcagcatgacgtctcgtgcagaccagaacgacaggtgggcttcctacgccggacctggcgggtggaacgatcctgacatgcttgaggtgggcaacggcggc

SEQ ID NO: 36501 - DNA, 283 bp, Zea mays
gcaggctgcgtgagatggtggacgtgctccagcaggctgtcaatgacgccgagacgagggccgtcaacgagagggaggcggcgaaggatgccatagcgcagttggaagcagcctcggcgatcgaagagaccgtggtgatggttgaggacactgagaaggtcaagtcgctgagtgccgaagttgaccgcctcaaggatttgctgggagctgaaatgagtgaaacttttgccgccaagaaggcgctttctgaagccgagctgaggaacgagaagctggccaggct

SEQ ID NO: 36502 - DNA, 271 bp, Zea mays
ggcttggccaaggctgccgacaagctgcttccccatcaccatcacaaccaccaccaccatcatcattacagtgacaataataacactaccattacagagcatgttgaggttgatgttgtccgccacgatgctaattcttcttcgcgccgcccagctcctgccaccgagtcgcagcctaacactgtgtccatcccctgccaccacatccgtctgggtgacttcttgatgctccagggccgaccatgccaggtcatccgcatctcgacctcgt

SEQ ID NO: 36503 - DNA, 268 bp, Zea mays
gccatggcctccctcgccgccgtctccgtgaagcccgtggccatcaagggtctcgccggcagctccatctccggaaggaagctcgccgtcgccaggccgtcggcccgctccatccgcaggccccgcgcaccgccgtggtggccaagtacggcgacaagagcgtctactttgacctcgacgacatcggcaacaccaccggacagtgggacctctacggctctgacgcgccctcgccctacaacccgctacagagcaagttcttcgagac

SEQ ID NO: 36504 - DNA, 227 bp, Zea mays
gttgagtaccgctgcttcgtcggcggcctcgcctgggccacggacgaccactccctccacaacgccttcagcacctactgcgatgtcctcgagtccaagatcatcctcgatcgggagacgcagaggtcccgcggcttcggcttcgtcaccttctccacggatgaggcgatgcggaacccatcgagggcatgaacggcaaggagctggacggccgcaacatcaccgtc

SEQ ID NO: 36505 - DNA, 268 bp, Zea mays
gctattctcgctgaggagaagcacttgcctatgtatgacgagttggctagcaagagcaatgttgaatatattgccggaggagccacccagaactctatcagggttgcccaatggatgcttcaaactcctggtgcaacaagttacatgggatgcattggaaaggacaagtttggtgaggaaatgaagaaaaacgctcaagctgcaggagttactgctcattactacgaggatgagactgctcctactggcacatgtgctgtatgtgttg

SEQ ID NO: 36506 - DNA, 272 bp, Zea mays
gcccagtcccggatgtgctggacccggggttctatggattctctgaggcagacttggaccgtgaattcttccttggggtgtggatgatggctgggttcttgtccgagaaccggccagtgcagacactgcgttccgtgctggagcggctcgagcaggcttactgcggcaccattgggtatgagtacatgcacatacctgacagggagaagtgcaactggctcagggataggatcgaaacagttaacccaagggagtacacttatgatcgtcgt

SEQ ID NO: 36507 - DNA, 263 bp, Zea mays
caagaccccaacaagcctaagagggctcccagcgctttcttcgtgttcatggaggaatttcgcaaggagttcaaggagaagaaccctaagaacaagtctgtcgctgcggtggggaaagctgctggcgacaggtggaaatccctgagcgagtcggacaaggctccctatgtagccaaggctaacaagctcaagctcgagtacaacaaggccatcgctgcctacaacaagggcgagagcactgcagctaagaaggctcctgccaa

SEQ ID NO: 36508 - DNA, 262 bp, Zea mays
gcatgacctgcccgttcgcggagatgatggtgcgcacgtcgtctacgacgccctcatgaaggaccccaccctggccggcagcctcctccggctgcacttccacgactgcttcgtgcagggctgctacgcgtcggtgctgatcgactcggcggacggcaacacggcggagaaggacgcgcaggcgaacctgaccctgcggcgcttcgaggtgatctaccgcatcaaggagctgctggagtcgcagtgccccggcgtcgtctcg

SEQ ID NO: 36509 - DNA, 266 bp, Zea mays
agcagccaacgtgttcggcaagcccaaggcgagcacggagtacatcgcgtacagcggcgacggcttcaagctgctgatcccgtccaagtggaaccccagcaaggagcgggagttccccgggcaggtgctccgctacgaggacaacttcgacgccaacagcaacgtgtccgtcatcatccagcccacgtccaagaagaccatcgccgactacggctctcccgaggagttcctctcccaggtcgactacctgctcggcaggcaggcct

SEQ ID NO: 36510 - DNA, 265 bp, Zea mays
tgctggtattcaggtgatccagatcgatgaggcagctctaagggagggtctgccactacgcaagtcagagcatgcattctacctggactgggctgtccactctttcaggatcaccaactgcggagtccaggacaccacccagatccacacccacatgtgctactccaacttcaacgacatcatccactccatcatcgacatggatgccgatgtgatcacgatcgagaactcccggtctgacgagaagctactgtccgtcttccgt

SEQ ID NO: 36511 - DNA, 265 bp, Zea mays
cccacgcgtccgcccattccacccagcttatgtcactgcagagaggataaagaacgcgaagaatcttgagcttcttctcacggcaggaatcggctccgatcatattgatcttccagcagctgctgctgcgggcttaactgtggctgaggtcactggaagcaacactgtctctgtggcagaagatgagctcttgcgcattctgattctgctcaggaacttcttgcctgggtaccaacaggtagttcaaggcgaatggaacgtagca

SEQ ID NO: 36512 - DNA, 266 bp, Zea mays
atcccaggaaggccaccacatcttatggagttcaaggtgagaaggacccaagggaagctaccatctcatatgggtcccaggatgatgaggattctagaaaagtcaacatgtcatatgggtctaatggtgaggacgacccaagaaaggccaccacatcatatgggtcccatggtgagtatgaatcaaataaggccacaatgtcatatgggttccaaggcatggaagatataaggaaggcaccacatcatatggaatacaagatgaag

SEQ ID NO: 36513 - DNA, 266 bp, Zea mays
cgcctgcgctccctcgccgccccagttccccaccccctgctcacccacccgtcccctcctgctcgcccatggctcccatcgctgtcggcgacgccctccccgacggccagctcgggtggttcgacgagaacgaccagctgcagcaggtctccgtccacgcgctcgccgccggcaagaaggtcatcctcttcggcgtccccggcgccttcaccccgacctgcagcaaccagcatgtgccaggcttcatcacacaggctgagcagctc

SEQ ID NO: 36514 - DNA, 267 bp, Zea mays
ctgttggcagcagaacttaatgctgatcttcttatcatgcttagtgatgtggagggactctatagtggtccaccaagcgatcctcagtcaaagattatccacacatatgtcaatgaaaagcatgggaagctaattagttttggagagaaatctagtgttggaagaggtggcatgcaagctaaagtgactgctgctgctaatgctgcatcaaaaggtgtacctgttgttattgcaagtggatttgcaacggatagcatcattacagtt

SEQ ID NO: 36515 - DNA, 283 bp, Zea mays
  unsure (1)..(283): unsure at all n locations
ttcgtcatacagggattcggtaacgttggttcctgggcagctcagctgataagtgaagccggtggcaaggtgattgctatcagtgacgtcacaggcgccgtcaaaaacgtcgatggcctcgacatcgcgcactnagtgaagcactcggcggagaacaaggggatcaagggcttcaaggggggagacgccatcgctccagactcgttgctcactgaagagtgcgacgtcctcatcccagcagcgcttgggggagtcataaacaaggataatgctaacgacataa

SEQ ID NO: 36516 - DNA, 278 bp, Zea mays
ggacttcggcggcgtgggcgacggcaccacttccaacaccgcggcgttccggtccgcggtggaccacctgtcgcagtactcgggcgagggcggcggcggtggcatgctgtacgtgcccgcgggcaagtggctgacgggccccttcaacctgaccagccacttcaccctctacctccaccaagacgccgtcatcctcggctcccaggacgtaggcgagtggccaatcgtggatcccctgccttcttacggaagagggagggacaaggtcggagggaggt

SEQ ID NO: 36517 - DNA, 273 bp, Zea mays
gagatgtaaagccgattgtagagtttgctctgtcacaggtcaagtcccttcttagagataggttgagtggtaaggcatcagcagggtcaaatggcaagacatctggaggctcaagtgagaaaagtgaaccaagtgcatcagtagaattaaattcacgcaactttgacgagcttgttgtcaaaagcaaggacctttggattgtggaattctttgcgccatggtgtgggcactgcaagaaattggcacctgaatggaaaaaggctgcaaaagact

SEQ ID NO: 36518 - DNA, 255 bp, Zea mays
gctctagatccgttcatcctggtggttttgtgaggtcgaaagcggcgagcgaattagaagatgctggacaagctgtgggacgacgtggtggccgggcctcgcccggagacgggcctcgagaagctccgcaaggccaccaccgcgcgcccgctcgtcatcaacaaagacgcggacggcggcagctacaagcgggcgcagtcgacgccgtcgagcccgacgacgccggtgacgccgtcgtcgtcgacgacgccgcgc

SEQ ID NO: 36519 - DNA, 273 bp, Zea mays
caccccccgagctcagcttagctccactccagctccaatcacagtcgtgaccagagcgcgagagctagctagagggccgtgaaaatgccgatcaataggatcgccctggggagccaccaggaggtgtaccacccgggcgccctcaaggcggcgttcgctgagttcatctccaccctcatcttcgtcttcgccggccagggctccggcatggccttcagcaagctgaccggcggcggcccgacgaccccggcgggcctgatcgcggcggcggtg

SEQ ID NO: 36520 - DNA, 272 bp, Zea mays
ggcacaggcagcagctaccatccctcactcactctcggtacctgacctgaccaggagagcaacatgggcggaggacacgacatgcacgggcagcactacggccacaacggcggcgtgaagggcttcgtgtccaacctcgtccacggcggcggcgggcatggccatggaagcggctacggccatggccatggaaacggctacggccatgggaatggcggctacggcggcggccacgggtaccctcctcccgccgccgccggcgcgtaccctca

SEQ ID NO: 36521 - DNA, 272 bp, Zea mays
cggacgctgggcgccgcgctcgacgtcagctccccctacgtgttcgacaacgactactacaagaacctggtgacggagcggggcctcctgtcctccgacctgggcctcttctccagccccgaaggcgtcgccgccagcaccaaggatctggtggaggcctacagcagcgacggcgaccagttcttctacgatttcgtctggtccatgatcaggatggggaacatcccgctcgccgccggctccgacggggaggtccgcaagaactgcagagt

SEQ ID NO: 36522 - DNA, 273 bp, Zea mays
gtgttaaagtacctttctcttctctgaaacctgtattccgtgctcgtactgtgactgatgctccacccttcgatgcaagcaacattacttcactacaactcatgtttagcaaatttgaatacgatggaatactcaacccaacatttactgaaggtccgtttgagcttcctttttcgagtattagagcatacatcaatgagccgatcactccaaggttcgttcatgtgagttctgcgggagttacaagacctgaaagaccggggttagatttaa

SEQ ID NO: 36523 - DNA, 274 bp, Zea mays
gttgaaagggtggttggaaggcggcttgatcctgtaacagggaaaatatatcatttgaagtattctccgccagagaatgaagaaatcgcttcaaggcttacacaaagatttgacgatacagaagaaaaggttaagttgaggctggagacttattaccaaaatatcgagtccttgctatcaacatatgagaacattattgttaaagtgcaaggagatgccacagtggatgctgtctttgctaagatcgacgagctgctgggttctatcctggaga

SEQ ID NO: 36524 - DNA, 268 bp, Zea mays
ctcaaagcctccggttgcccgaagcagtcgcatctgctcttcgtggcaccgaactcttggagcaatcaacttttgaatcgtcgacaggacagccgcgcgcgtcgtggcgaaggctgcaggatggagcagcagacgaagacgacgacacagcaagagggcaaaggcctcgccaccatggagcggtcgatcgtggacaagccgccattcacgctagcggacctcaggaaggccatcccgccgcactgcttccagcgctcgctcatcaggt

SEQ ID NO: 36525 - DNA, 268 bp, Zea mays
tgctcgttgccggctgcccccgcggccccggccagtccatcccctcgctcgctccccaactccagcaggcagatcagatacatccatccattcgcggaccggaaggaaaggaagggttgaactatgagcgccgtggcggtttcgtcgtcgctgaacccggacgcgccgctcttcatcccggcggcgctgctgcaggtggaggacttctcgccgcagtggtgggacctcatcaccaccactgcctggttccgcgaccactggtccgcga

SEQ ID NO: 36526 - DNA, 264 bp, Zea mays
ggtgggttggcttctcctccccctccggttcgggttcgggttcgtgaggttctccggggttcggtttcgtgggtgggcggatcgagatggcggcgtcggatgttgagtaccgctgcttcgtcggcggcctcgcctgggccacggacgaccactccctccacaacgccttcagcacctacggcgaggtcctcgagtccaagatcatcctcgatcgggagacgcagaggtcccgcggcttcggcttcgtcaccttctccacggagg

SEQ ID NO: 36527 - DNA, 269 bp, Zea mays
cattcctccccaaaacacatcctgcgatcctcgaagcctccgccgagcatcgatcatgtcggcctactgcggcaagtacgcggatgagctcatcaagaatgctgcctacatcggcacccctggcaagggtatccttgctgctgatgagtcaactggcaccattggcaagcgcctttccagcatcaatgtcgagaacgtggaggagaaccggcgggctctccgtgagctcctgttctgctgccctggtgccctccagtacatcagcggtg

SEQ ID NO: 36528 - DNA, 260 bp, Zea mays
gtccctcgaggctcacctcgccggcaaaacctatgtgtctggtgaatccattactaaggatgacattaaggtcttcgccgcggtgccgtcgaagcctggcgctgagtttcctaatgccgcccgctggtacgagaccgtctctgcggctgtagcctcaagattccctggtaaggctgttggtgtaaatctgcctgcgggatcagctcctgcggcagctgctcctgcggatgaggctgaggatgatgatgaccttgatcttt

SEQ ID NO: 36529 - DNA, 259 bp, Zea mays
ggagcggcgatccattccacacaaccaccactgctcttgccccagcccgccgcaggagttgccagatctgctccggtcacaggagctccgactccgagccctctccaatggcggttaaggtctacgtcgtgtactattccatgtatggacatgttggcaaactagctgaagagatccagaaaggtgcctcgtctgttgaaggtgttgaagctaaaacatggcaggtccctgaaaccctccctgaggaagtgcttggaaa

SEQ ID NO: 36530 - DNA, 258 bp, Zea mays
ctgcaccagcgggggaggcggcggggctgatgaaccggtgcccgtcggaatggtacttccagaagttcctggaggaggccgtgctcgacagcccggttcccgtagccggcgccagtaggggcagcgttggagctggagttgaggctgcggagagcaagacaccgggggccgcggcgccggcggctgcctcgagctcggttgttgaccccgtggagtacaacgcgatgctcaagcagaagctggagaaggacctcgctg

SEQ ID NO: 36531 - DNA, 262 bp, Zea mays
gctcagagcctcagagcgccaccaagtcttgcggtcgcgaagagcaacgcaacaagatggtgaagctcgcattcggaagcgtcggcgactccttcagcgtcacctccatcaaggcctacgtggcggagttcatcgccaccctcctcttcgtcttcgccggcgtgggttccgccatcgccttcgggcaactgacgaatggcggcgcgctggaccctgcgggactggtggcgatcgcggtggcgcacgcgctggccctcttcgt

SEQ ID NO: 36532 - DNA, 264 bp, Zea mays
gccgccgccgctttcgagatctccgggtggagcaagcgaggaaaggcagcagccatgtcgctccgcgtgctgaaccctaacgccgaggtgctcaacaagtcggcagcgctgcacatgaacatcaacgccgccaagggcctccaggacgtgctcaagaccaacctcggccccaagggcaccatcaagatgcttgtgggtggagctggtgacctgaagctgacgaaggatgggaacaccctcttgaaggaaatgcaaattcagaac

SEQ ID NO: 36533 - DNA, 263 bp, Zea mays
aacgcaacttgactgctctgtccggctgcgcctacaaatccagcacaggcgcgcatcccgctcctccacctcgtcgcagcccccaaggccccaactacccccagtctcggaagagaactatccagaagcgcaagactccaaagccgtcgccttcctatccatcccttcctcgccgcgggggtcgcctgagatcacataaacaatggtgaaggctgttgctgtgcttggtagcagcgatggtgtcaagggcaccatcttcttca

SEQ ID NO: 36534 - DNA, 281 bp, Zea mays
caccaccacacgttcacggtagcgagagcttatcgtcgtcggcggcgaagatggtgtcgctgaagctgcagaagcggctcgccgcgagcgtcctcaagtgtgggaaaggcaaagtctggcttgaccccaatgaagtcagcgagatctccatggctaactcccgccagaacatccggaagttggttaaggatgggtttatcatcaggaagcctcagaaggttcactctaggtcccgtgcaagaagggcacatgaggccaagcagaagggaaggcactctgga

SEQ ID NO: 36535 - DNA, 280 bp, Zea mays
ggagcaagcaagtcgaagcatcaaatggcgcatcaggagatcgagcacacccacctccccgtccgcgggatcaacctccacgtcgctcaggtcggcaaaggtgacctgggcacggtggtgttcctgcacggcttcccggagatatggtactcgtggcgccaccagatgctggccgtggccgcggcggggtaccgcgccatcgcgccggactgccgcgggtacggcctgtcggaccagccgccggagaacgatgaggcgtcctgggtctgggatgatctcg

SEQ ID NO: 36536 - DNA, 280 bp, Zea mays
cggacgcgtgggcggacgcgtgggcggacgcgtggggtttggtgaatgggatgtcaacgatccggcttcagcagacggattacactgtcatattaaacaaagccagagatgagaagaagggtgggaatggtcaagacacagactcaccttccaaggaccccaggactgagagggtggagtcttatgctgcaaaaccaagcacgaagaaatggttttgttgtgtgacagccagccctacgcaatcctgaggaaggcaattgcatgcgctggaaatactgcc

SEQ ID NO: 36537 - DNA, 184 bp, Zea mays
gcaaaaaggagtttgtcatggcgtctaagcgcatcctcaaggagctgaaggacctgcagaaggacccccccacatcatgcagtgcaggtcctgctggtgaggacatgtttcattggcaagcaacaattatgggaccacctgacagtccctatgctggtggtgtttttttagtgaacattcattt

SEQ ID NO: 36538 - DNA, 282 bp, Zea mays
ccacgataaggccaaacaagcggtaaccttgaacaagggaagagaattgacttcctgggtcagtcatagcaaatgcatcggcagctgcgcatgcaatgaagtccagggctgccaactgagatgagaagttcctacgtgctcacacacccaaaccttagtcgcgatcaggccccaaggactcgagatgaagtcgagggcacggtccaccgccggcgactccaggctctcggtgaggaagaccaaggctgagaaggacccaaacaagcccaagaggcctccgag

SEQ ID NO: 36539 - DNA, 284 bp, Zea mays
ccgcttcccgctccgatcgacctgctccctccccaccaccgagcccatggcggaccagctcaccgacgaccagatcgccgagttcaaggaggccttcagcctcttcgacaaggacggggatggttgcatcacgaccaaggagctgggcactgtcatgcgctcgctggggcaaaatcctacagaggctgagctccaggacatgatcaacgaggtcgatgctgatggcaacggcaccatcgatttcccagagtttctcaaccttatggctcgcaagatgaaggaca

SEQ ID NO: 36540 - DNA, 290 bp, Zea mays
gtgtcatctcatgctggtacgaagacaagaccgagtggggccaccgtgttggttggatctatggctcggtgacggaggatgtggtcactgggtaccggatgcacaaccggggttggaagtcggtgtactgtgtcaccaagcgtgacgccttccacggcaccgcgcccatcaacctgactgaccgtctccaccaggtgctccggtgggctactggatcagtggagatcttcttctcccgcaacaacgcgctgctggcgagccgcagaatgaagttcttgcagaggatcgcg

SEQ ID NO: 36541 - DNA, 238 bp, Zea mays
cctcagccgcgtcgcgtcgcatcctacgatccaaagctctctctgctcgcagccatggcgaagaactacccgaccgtgagcgccgagtacagcgaggctgtggagaaggccaggcgcaagctccgagccctcatcgccgagaagagctgcgccccgctcatgctccgcctcgcgtggcactccgcggggacgttcgacgtgtcgtcgaggaccggcggtccattcggcacgatgaagc

SEQ ID NO: 36542 - DNA, 267 bp, Zea mays
aacaatggttcccttgattaacactctcaccttagtggccggctatctgtggtacgaatatatctacaagctggacaaacatacatataacaagtaccatccctacacgtcgtggattcctataactatttatgtctgcctacgcaattgcacccaacaattgaggagtacccatttgtctctttttgtttggcttggcaaaattacaatggagagttatatttctccagttcacatttggctcaggtctagtattccgaacggaca

SEQ ID NO: 36543 - DNA, 278 bp, Zea mays
ggagcagagagcaaggagcagcagaacgaaggcgtgctcccccggggcccccgaagcagctgccggtgctaggcaacctgctccagataggcagccggccgcgccgctacttccaggcggtcgcgcggcggtacggccccatcgtggaggtgcagctcgggcgcgtgcgcacggtcgtcgtctcctcgccggatgctgccaaggaggtcctccggaccaacgacctgcactgctacagtcgccccaactcaccaggtccccggatgcttagctacgac

SEQ ID NO: 36544 - DNA, 212 bp, Zea mays
ggagcagctgagtgcagcaaccgctgaaatggtgatgctgtccactgaggagactcagaagaagaaacatgcaatccacaaagatggcactgctaatggttcagcaaaagaaatacctgatgaaaagcctgccgtcactaagcctagtccctataaagaactgattggagacatcaaggctagcctgggaagtgctcccacacctacccagc

SEQ ID NO: 36545 - DNA, 274 bp, Zea mays
cacaaaccctctccctcctgtactccggccgacacatccaggggcgatgacgctgggtagctccggcgccggatcgagcgtcgtcgttcctcgaaacttcaggctattagaggagctcgagcgtggagagaagggcattggtgatgggacagtgagctatggaatggatgatgctgatgacatctacatgcggacatggactggtaccatcattggccctcacaatactgtacatgagggtcgcatctaccagctgaagttgttttgtgacaaa

SEQ ID NO: 36546 - DNA, 282 bp, Zea mays
aaatccccaaagcctccgacccccttcctctctccctccgccgccgctgcgcacgcagggaacaagcgacatgggcgtctacacctttgtgtgccgcaacaacggcggcgagtggaccgccaagcagcactccggcgagatcgaggcttccgccgctaccccatacgagctgcagcgccgcctcgtcgctgccgcctccgcggccgactctgcctacggcgtccagtcgtccttctccatggtcacccccagctccgccgtgttccaggtgatcgtcggtgc

SEQ ID NO: 36547 - DNA, 231 bp, Zea mays
gagcaaggccgggatgactgatctgctgatgctgaccgacaagtcgcagctgcaggcgctagcgatgctgctgcggaacaacgaggagctcatgatgagccaagcgatcaagtcggagacggagcgcgttgagtacctcaagacggtgagcgactgctacacgcggacaatgaagctccttgacgactccatggcggccaggatcacgtacgaacgttcgggcgaacgagg

SEQ ID NO: 36548 - DNA, 271 bp, Zea mays
gcgcaaccagttcggttccatggccaacagcaatctcccgcgccgaatcatcaaggagacgcagcggcttctcagcgaaccagcaccggggattagcgcgtcgccgtcggaggagaatatgcggtacttcaatgtcatgatccttggccccgcgcagtcaccctatgaaggtggagttttcaagcttgaactattcttgcctgaggaatatccaatggctgccccaaaagttagatttctcacaaaaatttaccatcctaatattgacaag

SEQ ID NO: 36549 - DNA, 234 bp, Zea mays
gctcgcgatctagaactagtccccactgagcaggttgagattgacaacttcatggtccaacagcttgatggaacctccaatgagtggggctggtgcaaacagaagcttggagcaaatgccatccttgcggtttcacttgctgtgtgcaaagctggagctatggtgaagaagattcctctttaccagcacatcgcaaatcttgctgggaacaaaactctggtgctccctgtacct

SEQ ID NO: 36550 - DNA, 267 bp, Zea mays
cgccgccccgtaccatactcctcttcgcgccgtagaaatggcgctgccgaatcagcagggcgtggattaccccagcttcaagctcgtcatcgttggcgacggtggaactggtaaaaccacatttgtgaaaaggcatcttactggcgagtttgagaagaaatatgagcccaccattggtgttgaagttcaccctctggattttagcactaactgtggcaaaattcgcttttattgctgggacactgctgggcaagaaaagttcggtgg

SEQ ID NO: 36551 - DNA, 269 bp, Zea mays
agcaaaacaaaaagctaagaagctccgtagctaaattcagatattacaaacacaaaaaaaggagtgcagaaccaaaatggctgcctcgaccttccttctcgttgcttttctagcattgatcacttctcaggccattgcctctgatcctagcccgctccaagacttctgtgttgccgataaagactctccggtgaaggtgaatggatttgtttgcaaggaccctatggctgtgaacgctgacgacttcttcaaggctgcaaaacttgatc

SEQ ID NO: 36552 - DNA, 273 bp, Zea mays
cccacgcgtccgctcagacttctgctgcagcgcctccgccgccgccgccgcatctaacgcagttccctccgccgcagcccgaggcaagatggttctccagaacgacattgatctgctcaacccgccggcagaactcgagaagctcaagcacaagaaaaagagactcgtccagtcgcccaactccttcttcatggatgttaagtgccaggggtgcttcagcataaccactgttttcagccactcccagactgttgttgtgtgccctggctgcca

SEQ ID NO: 36553 - DNA, 257 bp, Zea mays
ccgctgatgagcaccccaagatctaccgcatggagcttgcgctaccaacgaggtctgctccaaatccaagctctggtactatctgaggaagctcaagtctcaagaaggtttaagagcaacggtcagattctcgccatagacgagatctttgagtgtaaccctacaacaatcaagagctgtggcatctggctgtgttaccagtgcaggacaggttaccacgacctgcacaaggagtacggaataccacctgaatggtg

SEQ ID NO: 36554 - DNA, 295 bp, Zea mays
tcaatagcttctggtatcttgatcagctgggtcagtcagcaaagtatgacaccaaggtctactgcagacagacgctgattggtggcaattacggccttcttgacaccgagactttcgtaccaaacccggattactacagtgccttgttgtggcatcagctcatggggacaggagttctttctgtagacatcagtggttcttcgtacttgcgcgcctacgtgcattgcgccaagcaaaaggggtgcgtcactcttctcttgctgaacctgcaccgaacgatgggcttcatggtctc

SEQ ID NO: 36555 - DNA, 291 bp, Zea mays
cccacgcgtccggtcaagtgtaaagaaagaacaccgataaaactccgtcgaactactccagacgggaagcacctccaatcccctcgcccccacggaccctcgccgccggggaagcgccgctcgctcaggaggacagccatggcgccggagccggaggatgatattatgaacgagaagaatccccgcccgctcgacgaggacgacatcgcgctcctcaagacctatgggcttgggccgtactctactagcattaagaaggtcgagaaggagatcaaggaaatggccaagaaa

SEQ ID NO: 36556 - DNA, 289 bp, Zea mays
ctttttgttcctcgcgccgccgccgccgccgccgtgacggaaggaagaggaggagcaaggagcacgacgcgatgggccactccaacgtgtggaactcgcaccctaagaactacggccctggctcccgcgtctgccgggtctgcgcgaaccctcacggtctgatcaggaagtacgggctcatgtgctgcaggcagtgcttccgcagcaacgccaaggacattggtttcatcaagtaccgttgaagaggccactgtgctgctgtggagaacttcctacatcaaagaaatgg

SEQ ID NO: 36557 - DNA, 252 bp, Zea mays
atggattcgatctgggaggcgaggagctgaggccaagacggggggaggagctgctgggggggcagggacaggatagcgcggctaagcggcaacagcggcaccatgagctggagacgaggcggaagcggaggcgatggcggggtctcgaagaggtgggccgtcctgctctgcgtcggcagcttctgcctcggcctgctcttcaccaacagaatgtggacgctgcctgaggcaagtgagattgctaggccgaat

SEQ ID NO: 36558 - DNA, 260 bp, Zea mays
ctcactgctcgttgccggctgcccccgcggccccggccagtccatcccctcgctcgctccccaactccagcaggcagatcagatacatccatccattcgcggaccggaaagaaaagaaagggttgaactatgagcgccgtggcggtttcgtcgtcgctgaacccggacgcgccgctcttcatcccggcggcgctgctgcaggtggaggacttctcgccgcagtggtgggacctcatcaccaccactgcctggttccgcga

SEQ ID NO: 36559 - DNA, 243 bp, Zea mays
cgccggcagagtacctgacgaagctcacgtacttgatctggaaccaccatgaggagatccagcacatcgacacggtgcgagcctacaccttcggcacgcactacttcgtcgaggtggacatcgttctctcgggcgacatgccgctgagtcaggcacatgacatcggcgagtcgctgcaggagaagctggagcagctgcccgaggtcgagcgcgccttcgtccatgtggacttcgagttcacgc

SEQ ID NO: 36560 - DNA, 275 bp, Zea mays
cggacgcgtggcgagacgcgtgggtggtcgatatcaggtgcttagcattggaaaaagtagcagagtcacacggagttccctacaagtactgctctttagggtgcccagagatcttcccatactacagcaagataaagcacgaagcacagtgcagcttcaggccatatacctgcccctatgctggttctgaatgtgctgtggctggtgatattccattccttgttgcacatctgatggatgatcacacagtcgatatgcacagcggctgcacgttc

SEQ ID NO: 36561 - DNA, 288 bp, Zea mays
cgtcgctgtcgacacccgcgatggcattcgcctcgtctttgaggtggagccgaaccaagacttccatgggctggtatgcgagggcgccaacatgctaccgtccaagttcatggaagatgcatttcgcgatcgccatggaaaaattattaacattaggcatctggatcaagtgatcaagtctgttaacagatggtatcaggagcgtggcctaactgggttggtttcatatgctgagatactttctggagggattctgaggctgcaggtttcagaagctgaggttaatac

SEQ ID NO: 36562 - DNA, 283 bp, Zea mays
aggttggggctcctgctcgtgttggtctggttgctcctgttgatgttgtcgtgccccctggcaacactgggctggatccctcccagacctctttcttccaggtgcttaacatccccaccaagattaacaagggtactgtggaaattatcacccctgtggagctgatcaagaagggtgagaaggtgggctcgtccgagtctgccctgctcgccaagctgggcatccgccccttctcgtacggtctccaggtcaccagcgtctacgaggatgggtctgtgttcag

SEQ ID NO: 36563 - DNA, 283 bp, Zea mays
  unsure (1)..(283): unsure at all n locations
ggggcgggcgactgcctccttccctcgatctattctccatcttgtcctccctttgctaaaaataacgaggcagaggcatcttcgatttgacgtgcgcttcctcttcctcgctcgctctcggtcgcagtgatggctgatgtcgacgagtaccgttgcttcattgggaacctgtcctggtcaacgactgatgaaagcctcaaggatgcgttcagcaaattcggcaacctcactgnagcaaaggtggttcttgacaaattttcaggacgttctcgtggtttcggct

SEQ ID NO: 36564 - DNA, 285 bp, Zea mays
gcgatagcttgtcgcctggagaagaaggaaggaggagcagtccgagtttatatcatgaccttgggtgtactggcaccgtatcggggtcttggtattgggacaaagctgctgaatcatgtgttcgatctctcagcaaagcaaaacatctccgagatatacttgcatgttcagaccaacaacgatgatgcaattgctttctacaagaagtttgggttcgagataacacagacaatacataactactacatgaacataacgccaccggattgctacgttcttatgaaa

SEQ ID NO: 36565 - DNA, 287 bp, Zea mays
cgtcaccgtcaagctcactgtccagaaccgccaggccaaggtctccgtcgtcccctccgccgccgcgctcgtcatcaaggcgctcaaggagcccgagagggacaggaagaaggtcaagaacatcaagcacagcggcaacatcggcctcgacgacgtcgtcgagatcgccaggaccatgaggaacaggtccatggccaaggagttggccggcaccgtcaaggagatcctcggcacctgcgtcacgtcgggtgcaccgtcgacggcaaggaccccaaggacctgcagca

SEQ ID NO: 36566 - DNA, 280 bp, Zea mays
gacaaatctgctaaaatgtcaggtgatgttcctagagcagccattgccaatattttcttcaccgaaatatttacgccgctcttgctcgctgtcgtaacggtcatcccgtacttgttcatcaacgcgcaaactggtgtcctagcagacaaacaaactgttgccaaaggtgcaaacccgccaaagattcagcctacggcctcccttgtccgtattctgattgtcgcctttggcccggtggccatcaatgctggtgtgttgttggttatgtttgccatggcat

SEQ ID NO: 36567 - DNA, 279 bp, Zea mays
gtccccgtttcggtggagcaattgatgatgcagcccgatacttcaaagatgcatgtgataggagcctcacgccatacgagtttgttgaaggcatgaaaaagaagggaatccgtgtgcctgggattggtcacaggattaagagcagagacaacagggataagcgtgtgcagcttctacagaaatatgctcacacacatttcccttcagtcaagtacatggaatacgctgttcaggttgagacctacaccttgtcaaaagccaacaatttggttatgaatg

SEQ ID NO: 36568 - DNA, 218 bp, Zea mays
ggttctccggggttcggtttcgtgggttggcggatcgagatggcggcgtcggatgttgagtaccgctgcttcgtcggcggcctcgcctgggtccacggacgaccactccctccacaacgccttcagcacctacggcgatgtcctcgagtccaagatcatcctcgatcgggagacgcagaggtcccgctgcttcggcttcgtcaccttctccacggagg

SEQ ID NO: 36569 - DNA, 274 bp, Zea mays
cgcacgcgtccgcccacgcgtccgcggacggtggggatgctctagtaaatgcgtgcgagtacgtacgagtcggagtactcactggcaatgttttcatgcgtgctgacttgaccaggtactactcgacgtacggccacgtggcgaggctggcggaggagatcaagaagggcgccgactccgtggacggcgtcgaggcaacgatctggcaggtggcggagacgctgccggaagaggcgctggcgaagatgcgcgcgccggcgaggagcgaggagca

SEQ ID NO: 36570 - DNA, 279 bp, Zea mays
atcttctccgagagtctccagctcgtccgctccaccaatcggaaaggcctctcctaccgcctcggcatcaaccgcttcgcgacatgagctgggaggagttccgtgcgacccggctcggcgcagccagaactgctccgccacgcttaccggcaaccaccggatgcgcgccgccgccgttgcgctgccggagacgaaagactggagggaggatgggattgtgagcccagtgaaaaaccagggccactgtggatcatgctggaccttcagcactactggtgc

SEQ ID NO: 36571 - DNA, 284 bp, Zea mays
gatgaaatgaaccttgttggttgatccacacttatctggaccaaacataatagtgtatggagtctcattatcaaactccttggcatcccatccagcatcctgagggcagatgtacttaatgtaggcacctccgcattcaaggccattctgaagtctcacttcaaactactccaaaagggatctggctgttgcaaccgcgtacctgactgcctctgctgcatgtgctgcatcaggtctttcggctgaggttgcttggcgactaacgtcattctacacgcaatcac

SEQ ID NO: 36572 - DNA, 131 bp, Zea mays
gccgccctcgcgctcatgaaccaggacaaggtcctcatggagagctggtactatctcaaggacgcggtgctggacggcggcatcccgttcaacaaggcgtacgggatgacggcgttcgagtaccacgggac

SEQ ID NO: 36573 - DNA, 256 bp, Zea mays
caagatgcaggtcatcggcaagtccatgcagtccatcgtcaagtcgctcgactcctcgctcgccaccgggaacctccagaagatgtccgagaccatggacaatttcgagcgccagttcgtcaacatggaggtccaggccgagttcatggagggcgccatggccggctccacctccctctccacgccggagaccgaggtcaacagcctcatgcagcaggtcgcggacgactacgggctcgaggtctccgtcggtctg

SEQ ID NO: 36574 - DNA, 197 bp, Zea mays
gaggtgggttggcttctcctccccctccggttcgggttcgggttcgcgaggttctccggggttcggtttcgtgggtgggcggatcgagatggcggcgtcggatgttgagtaccgctgcttcgtcggcggcctcgcctgggccacggacgaccactccctccacaacgccttcagcacctacggcgaggtcctcgagt

SEQ ID NO: 36575 - DNA, 284 bp, Zea mays
gcatagtaagaaatatcgtgagagattggggtgatgagggtcaaaaggaacgtgatgagtgctataagcccattcttgaggagcttaatcgcctttttcctaaccggagcgatcagaggcctccttcatgtcttgtccctggtgctgggcttgggagattggctcttgatatatcttctctgggttttgtaagccaagggaatgaattctcatattacatgctgatctgttccaatttcatcctgaaccacactcaagaagctaatgagtggtccatatatcct

SEQ ID NO: 36576 - DNA, 276 bp, Zea mays
cggacgcgtgggcggacgcgtgggtttgaatattgtgatgtggttaccacaaccacgcacaagtccctcagacggccaagggctggcatgatcttctacaggaaaggccctaagccccccaagaagggccagcctgagggtgctgtttatgattacgaagacaagatcaactttgcagtgttcccatctctccaaggtggccctcacaaccaccagattgctgcacttgctgttgctctacagcagactatgtcgcctggcttcaaggcctatgca

SEQ ID NO: 36577 - DNA, 162 bp, Zea mays
gcctgctcaccggcaagttcatcattcccacgctgaacaacctcgccagcatctggttcatcgcgctcttcctgtccatcatcgcgacgagcgtcctggagctgcggtggagcggggtgagcatcgaggactggtggcgcaacgagcagttctggggcatcg

SEQ ID NO: 36578 - DNA, 274 bp, Zea mays
gcttgatccttgagaagagagaggaagacgagagctagaagcgaaggagaaaagcagttcttcagctaggcaggagggcacaggaaggaggagatggcgtcaaagaggattcagaaggagctcaaggatctgcagaaggaccctcccacctcgtgcagtgcaggtcctgttggtgaagacatgttccactggcaggcaacaataatgggtccatctgatagcccatattctggtggagttttcctagtcacaatccattttcctcctgattatc

SEQ ID NO: 36579 - DNA, 270 bp, Zea mays
gaagaaagagaagagtcagaggaggaagaatctgaagacgagtctgatgacaaacctaaacataaaggtactgagggtattattcagattgaaaatccgaacttagtaaaagtgaagaatataaaggccaaggaagttgatcttggaaagacaactgaactctcaaggcgtgaaagggaggagcttgagaaacaaaaagctcatgaacgttatatgaaacttcaggagcaaggaaaaacagaacaagcacggaaagatttggaacgtctt

SEQ ID NO: 36580 - DNA, 165 bp, Zea mays
acctcaacttcgacgccctccacggcgacaagtggcacggcggcgtccgtgacggcaccgacgtcgtgctctggaagtggtgcgagggcgacaaccagcgctggaagatccagccctactactgaaccaacggatgatatgaccatcgcgcccatcgatcgtgca

SEQ ID NO: 36581 - DNA, 265 bp, Zea mays
cacttgtggagaaagtgaaggagattgttgagagcaatgaagtcaggagattgcctaaaattcctaagggtacacgtgactttgggaaagagcaaatggcgataagagagcgagcattttcaattataactagtgtattcaagatgcacggtgctactgcacttgatacccctgtatttgagctgagagaaacccttatgggaaaatatggtgaagactcaaaattgatatatgacctggctgatcagggtggtgagctttgctc

SEQ ID NO: 36582 - DNA, 273 bp, Zea mays
agaaggctgccaatggttcagaaccacgcctccggggatgcataggaactctggagtcccgtcagattgtcagcggctttagggactacgccctaactagtgcgctgagggaccgacgctttcccccaatacaatcaaaggaactcccaaccttggagtgcacggtatctatactcactgattatgaaattgcagaggactacctcgactgggaggttggaaagcatggtttaattattgaatttacagctccagactccaacacaaaacaca

SEQ ID NO: 36583 - DNA, 198 bp, Zea mays
atatatatagcatcaaaattatgtaatgaagagtagcactgattattgttacatgacgaaggttgagcatccatggaggctagattatagacagacaccctgattttacatgacgaatcgcaagaagcgcatgcattggatatccttagccggagagggcgctggtgttgtagacgaggagggcgccgccgccgagga

SEQ ID NO: 36584 - DNA, 110 bp, Zea mays
agtcctcctcgggttagggttccttagggttttgtggatgggcgatggcggcggctgatgtggagtaccgttgcttcgtcagcaggcttacctgggccaccagcaacgag

SEQ ID NO: 36585 - DNA, 266 bp, Zea mays
cggacgcgtgggcgacgtcaaggctgccaatgtcttgctcgatgaaggttttgaaccggtggttggtgacttcgcgcctggcgaactggtggacgtacagaagacgtccgtgactacccaggtccgtggaaccatgggtcacatcgcccccgaatacctgtccactgggaagtcctccgagagaaccgatgtttttggctatggcataatgcttcttgagctagtcactggtcagcgtgccatcgacttttcacgtctggaggaag

SEQ ID NO: 36586 - DNA, 109 bp, Zea mays
ggtgggttggcttctcctccccctccggttcgggttcgggttcgtgaggttctccagagttcggtttcgtgggtgagcggatcgagatggcggcgtcggatgttgagta

SEQ ID NO: 36587 - DNA, 247 bp, Zea mays
gtacatcacggtggccaccgtgatcgggtacaagcaccagacggacgcgtcggcgtcgggcgccgccggcgtgcggcggcgtgggcgtgctgggcatcgcctgggccttcggcggcctgatcttcgtcctcgtctactgcaccgccggcatctcggggggccacatcaaccccgccgtcgccttcggcctcttcctggcgcgcaaggtctccctggtgcgcgcgctgctctacatcgtggcgcagtg

SEQ ID NO: 36588 - DNA, 283 bp, Zea mays
agaagatttggttgatttccccccaatccagtgattccatccctgttctccacttccaccggaacctcccagagacttccagaaggctctagcgacccccgccgctttagagctacccgcggcgagattcaggagctgcctgccatggtgaaggacagcgcctactacgatgtcctggggctcagcgtcgacgcgtcccccgccgagatcaagaaggcgtattacattaaggcgaactggtgcatccgtacaagaatcccgggaaccctgacgcggcactcaa

SEQ ID NO: 36589 - DNA, 275 bp, Zea mays
ccacgcgtccgcgaccgtggtgccgcccgcaaaccgctccctccttgctgcgtcaaggccaaggcgcgtgtgccacaaaccgaggccaactgccatgatactgtggtttcagggtggttcacggaacccagatcgcgttttggtaaaacaagcaaagtgcagtacttcaataacccgatgtggcctggagaggctcattcattgaaagtggagaagatcttgtttcaagggaaatcgccttaccaagaaattttagtttttgagtcttcaaccta

SEQ ID NO: 36590 - DNA, 277 bp, Zea mays
ctctgatcatgcagctcctgcgtgacaacttgaccttatggacttccgacaccaacgaggacggcggggatgagatcaaggaagcagctgctgcccccaaagaatccgcccccgagggccagtaagacggatccgatctcccgacctgatgcgtgtctgctgatgtcggggagtttaccaggactgtgccgttcttgatttctgatagcttatcttctagtacacctcgtgttgttctcttcgtcacggcgccggtgcgcgtgcgctgaagctgcct

SEQ ID NO: 36591 - DNA, 276 bp, Zea mays
cgacaacatcaagcctgaccccattctcaagcacattctcaagaacctgcgcatccgcaaactcatattcaccaacggtgacatggtccacgccgtgagagccctcaagaggctgggcctggaggactgcttcgaggggatcatctgcttcgagaccctgaacccgccctgcccgccgcagggagaccaggagcccgagatcttcgacatcgccgaccacttcgcccgctccggcaccgccgacgagctgcccaagacccccgtgctgtgcaagcc

SEQ ID NO: 36592 - DNA, 277 bp, Zea mays
cccttattttggttatgcaagggctgacaggaagtcccagggcagggaatctatagctgcaaaacttgtagctaatatgattaccgaagctggtgccaaccgtgtccttgtttgtgatcttcattctagtcaagcaatgggatactttgacatcccagtagatcacgtttatggccagcctgttattcttgattatctcgccagcaagacaatatgttcagatgacttggtagttgtatctcctgatgttggaggtgttgccagggcacgtgccttt

SEQ ID NO: 36593 - DNA, 278 bp, Zea mays
gcaacggcaacggcgagcagaagacgcgccactccgaggtcggccacaagagcctgctcaagagcgacgacctgtaccagtacatcctggacacgagcgtgtacccgcgggagccggagagcatgaaggagctgcgcgagatcaccgccaagcacccatggaacctgatgaccacctccgccgacgagggccagttcctcaacatgctcatcaagctcatcggcgccaagaagaccatggagatcggcgtctacaccggctactcgctcctcgccacc

SEQ ID NO: 36594 - DNA, 279 bp, Zea mays
attggtctgaagaattatgatccacagaaggacaagcgtttcagtggctctgttaagttgccccatatccctcgtcccaagatgaaggtgtgcatgcttggtgatgcccagcatgttgaggaggccgagaagatgggacttgactacatggatgttgaggctctcaagaaaatgaacaagaacaagaagcttgttaagaggcttgccaagaagtaccatgctttcttggcatcagaggccatcatcaagcagattccccgtctccttggtcctggtctc

SEQ ID NO: 36595 - DNA, 277 bp, Zea mays
gcaagctaagcaagtgccaaccaacgagtagcaggaaacatgtctccgcccgtcaagatcctcggccactacgcgagcccgtactcgcaccgcgtcgaggccgctctgcggctcaagggcgtgccgtacgagctggtccaggaagacctgggcaacaagagcgagctgctgctcgccaagaaccctgtccacaagaaggtgcccgtgctcctccatggcgacagggccgtctgcgagtccctcctcatcgtcgagtacgtcgacgaggcttcgacgg

SEQ ID NO: 36596 - DNA, 273 bp, Zea mays
ccacgcgtccgcgaccgtgggtcgcgtgggtcaccttcagctccgcctatgacttcgcctacctcgtcaagctgcacatgggacgacaagctgccaagggcgctcccggacttcctgcgctacgtccgcgtctacttcggcgccgccgtctacgatgtcaagcacatggccagggtcgcatgcgcctcccacggcgaggtcgcgctgctgggcggcctcgagcgcgtcgccgccgcgctccgggtgcgccgcgcacggcgcaaggacaccagg

SEQ ID NO: 36597 - DNA, 274 bp, Zea mays
tccacgcgtccgcggacgcgtgggctctagatccgttcatcctggtggttttgtgaggtcgaaagcggcgagcgaattagcagatgctggtcaagctgtgggacgacgtggtggccgggcctcgcccggagacgggcctcgagaagctccgcaaggccaccaccgcccgcccgctcgtcatcaacaaagacgcggacggcggcagctacaagcgggcgcagtcgacgccgtcgaccccgacgacgccggtgacgccgtcgtcgtcgacgacgcc

SEQ ID NO: 36598 - DNA, 84 bp, Zea mays
cccacgcagaaaaccctagccgccgccaccgaagcggcctcccaggtaagcaagagcgtccaccccgccgccgccatgaagcgc

SEQ ID NO: 36599 - DNA, 273 bp, Zea mays
cacaagcggtggaacctgcaactcttattcctttgatccatggctgcagacaaatttttcttgttggtgacccagttcagttgcctgcaactgtcatttcacagactgcacagaagttgggatatggaacgagcttgttcaaaagatttcaagctgccggttttccagtgcaaatgcttaaaatccaatatcgcatgcatccagagattagtacattcccttcaaaagaattttatgaaggggtactacaagatggggagggcctgagcagga

SEQ ID NO: 36600 - DNA, 266 bp, Zea mays
ccacgcgtccgggacctgggccggcgggatcgtctgcctgggggtcgtcgccgtcgccgtctacttctgcggcatgagctccgacaccagcaactccaggatggcctacgccttctccagggacggcgccatgcccttctcctccgtctggcacaaggtcaacaagcaggaggtgcccatcaacgccgtctggctctcggctctcgtcgcgctctgcatggcgctgccgtctctgggcagcctggtggcgttccaggccatggttt

SEQ ID NO: 36601 - DNA, 310 bp, Zea mays
cgtacctgcagtacggtcggaattccgggtcaccacgcgtccgggacctggcggacgcgtgggcggcgcgctgccgaaggagcagatgcacgagctggcgctcgggcacggagcgcagtagcagcggttcctgtgggtggtgcgcaccccggcgacgacgaaggcacgctcaacggcaactactacgacgcggagagcaagaaggacccgttcgcctacctcccggagggcttcgtcgagaggaccaaggaggtgggtctgctggtgccatcgtgggcgccgcagacgcaggtgctggcccacggcgcca

SEQ ID NO: 36602 - DNA, 271 bp, Zea mays
cccaccgaattccctgcgattcctctcccctcgcctcctcgtctccccctaggggatcgtcggagaggaatcgcaaagagggccgtctcatccgagttaaggaagccatggagcacaaggaggctgggtgccaggcccccgagggacccatcctctgcatcaataagtgtggcttcttcggcagcgcggcgaccatgaacatgtgctccaagtgccacaaggagatgataacgaagcaggatcaggccaagctggctgcctcctctatcga

SEQ ID NO: 36603 - DNA, 266 bp, Zea mays
ccacgcgtccgcggacgcgtggtagtaccttgccccagagaggtggtgaagtgaatgttactctaggagggattgatttgaacaattctgggagtgtggtagtcagagaagacaagaagttattgactgtacttttcccagatggccgtgatggtcgtgcattcactcttaaggcagaaacttctgaagacttgtttgagtggaaaacagcattggaagaagctcttgcacaagctccaaatgcagctcttgtgatgggacataat

SEQ ID NO: 36604 - DNA, 252 bp, Zea mays
ggtgggctggcttctcctccccctcttatcaagtcctcctcgggttagggttccttagggttttgtggaggggcgatggcggcggctgatgtggagtaccgttgcttcgtcggcggacttgcctgggccaccagcaacgagtcgctggagaatgccttcgcctcctacggcgagatcctcgactccaaggtcatcaccgaccgggagacggggaggtcgcgcggcttcggcttcgttaccttctcctccgat

SEQ ID NO: 36605 - DNA, 266 bp, Zea mays
ccgccagacactccgtagtctgtaccccaagcaccggcgcggcggcggcggctaccatggcagtcgggaagaacaagaggatctccaagggaaagaagggtggtaagaaaaagaccgtcgatcccttctctaagaaggactggtatgacatcaaggccccatcggtcttcagtgtgcgcaacattgggaagactctcgtgtccaggacacagggtaccaggattgcctctgatggtctgaagcacagagtctttgaggtttgtcta

SEQ ID NO: 36606 - DNA, 267 bp, Zea mays
ctcaccagctatccagatcattggctcattgctgcttccattccattcccccttccctcggcatcggccgcgcccgcccgtgtcgggcgaggcggacgcgcgcgggaatgggacgccacgcggcctccggcggcggcgtgcagcagaagctgcgcaagggcctctggtcacccgaggaagacgagaagctctacaaccacatcattcgctacggggtcgggtgctggagctccgtgcccaagctcgcagggctgcagagatgcggca

SEQ ID NO: 36607 - DNA, 265 bp, Zea mays
gccgcctcctccgccacccagcgctcgagctcctcgcgtcctgcgagcgcgcgccgcaacgccaccatgaagttcaacatcgcgaacccttccaccgggtgccaaaagaagctggaaatcgatgacgaccagaagctgcgtgccttttatgaccgaagatatcccaggaggtcagtggtgatgctctgggtgaggagttcaagggttatgtcttcaagatcatgggtggatgtgacaagcaaggcttcccaatgaagcaaggagt

SEQ ID NO: 36608 - DNA, 272 bp, Zea mays
gtcctcagtccctcacacactcactatacactgctctgctgcagcaagaaggaagaagctagcgcctccctagctctcgttgtcagcaatggccaccaccgccgcgtccagcctcctcaagtcctccttcgcgggctcccggctcccttcggccacgcgcaccaccaccccgtcgtccgtcgccgtggccaccccgcgcgccggcgcgggccccatccgcgcgtccatctcctcctcccccaccccgccctacgacctgacgtccttccggt

SEQ ID NO: 36609 - DNA, 271 bp, Zea mays
gtcctcagtccctcacacactcactatacactgctctgctgcagcaagaaggaagaagctagcgcctccctagctctcgttgtcagcaatggccaccaccgccgcgtccagcctcctcaagtcctccttcgcgggctcccggctcccttcggccacgcgcaccaccaccccgtcgtccgtggccgtggccaccccgcgcgccggcggcggccccatccgcgcgtccatctcctcctcccccaccccgccctacgacctgacgtccttccgg

SEQ ID NO: 36610 - DNA, 276 bp, Zea mays
gaatggttgatcctggtccaactaaggtgatggagaagtacgtgcttgttggtgcactctgcacacatccccagctgcatgcaaggccgacaatggagcaggcgctgaagatacttgaggctgattcagtaccaagtcctttgattattcccgagaggccaatccctgttgttgcaaacctggccgagattgagaggtcagccagcagcagtggatcaggtcagctgtttagcccctctggtttccgatctttcattcatgcaaatgaggatgctg

SEQ ID NO: 36611 - DNA, 275 bp, Zea mays
cggacgcgtgggtttagcattactggaggacagtggatggtatcaagctaattacagcatggctgaacaactagattggggtcagaatcagggaacagagtttgttatatctccttgcaactcatggaaaggggcataccattgcaatacaactcaactatcaggatgcacatataatagggaggcagaaggttactgccctatagtaaactatagtggggacttgcccaagtgggctcaatattttccccaagccaataaaggtggtcaatctt

SEQ ID NO: 36612 - DNA, 272 bp, Zea mays
caaattatatgcaatcgcaagcgagcagaatggcgaggtccagtggtagtagaccagtggccctcgtgctgctggcgctgtgcgcgccgccctctcgtcggccacggtgaccgtgaatgagcccatcgccaatggcctctcctggagcttctacgacgtttcctgcccgtcggtggagggcatcgtgcgctggcacgtcgccgaggccctccgccgcgacatcggcatcgccgcggggctcattcgcatcttcttccacgactgcttcccgc

SEQ ID NO: 36613 - DNA, 276 bp, Zea mays
attgcccgaagcctacttggatatctctggaagttctattaaccccagtgagagaacctatccagaggagatgatccaaactgggatatccaccattgatgtcatgaattccattgctcgtggacaaaagattccactgttttctgctgctgggctccctcacaatgaaattgctgctcagatttgtcgtcaggctggtcttgtgaagacattggagaaaggaaagcatgctgagggtggtgaagatgacaactttgctattgtgtttgctgctat

SEQ ID NO: 36614 - DNA, 276 bp, Zea mays
cctgctcctaccgcagctctccctcaggtttagtgttcgcaatggcggccttcaacaagcttggtggccttctaaggcacagtgctctggtgagcggtatcactggtggctcttctcctgcagtgttcaatgctgcacggctcatgtctaccaagctatttattggtggtcttgactggggtgttgatgacgtgaaactaagagaagcatttagcagctttggagaggttactgaagcgagggtgatcacagacagggagactgggaggtcaagag

SEQ ID NO: 36615 - DNA, 278 bp, Zea mays
cggaccgtggcggacgcgtggggatttgttttgagctgctcgaaatgttgaaggctcataagaagggacttaggagagcagctgtgaacacatttggttatatcgcaaaggctatagggccacaggatgtgttggccaccctgttgaataacttgaaggtcaagaacgacagaaccgggtctgtacaactgtagctattgctatagttgctgaaacttgctcacctttcacagttttacctgcccttatgaatgagtaccgggtcccagagctcaatg

SEQ ID NO: 36616 - DNA, 279 bp, Zea mays
aattgattaatagtgacagtgatttctttgcaactttggttgttgaggcagttcaagccgtgaagactacaaatgccaagggagacgtgaaatatccaatcaagagcatcaatattttgaaagctcatggtaaaagcgccaaggatagttatctgttgaatggctatgcactaaacacaggccgtgcagctcaaggaatgcctacgagagtaactcctgctagaattgcttgtcttgattttaaccttcagaagacaaaaatgcaacttggtgtccaag

SEQ ID NO: 36617 - DNA, 276 bp, Zea mays
  unsure (1)..(276): unsure at all n locations
cgcactngaggagctgatcctcaccggcgtcgccatcgtaatcgccttggacagcggcaccagaacctctgcctccgcagggtgcttgctggtatcattacaatctggtagttttagtggttgggcttgacttcctactattcagaaacacagtaccgagaagtctttaggtggggtcaaagatggtgtcgctgaagttgcaaaagcgccttgccgcgagctacctcaagtgtgggaaaggcaaggtgtggcttgacccaaatgaagttagtgaga

SEQ ID NO: 36618 - DNA, 172 bp, Zea mays
gttggcttctcctccccctccggttcgggttcgggttcgtgaggttctccggggttcggtttcgtgggtgagcggatcgagatggcggcgtcggatgttgagtaccgctgcttcgtcggcggcctcgcctgggccacggacgaccactccctcgacaacgccttcagcacct

SEQ ID NO: 36619 - DNA, 271 bp, Zea mays
cccacgcgtccggcgaacaagcaatccgaattctctgcgatttctctagatctcgaccacccctactagttttggttcctcctttcgttcgagagagcgtttctagtggcaatggcgaagagcgagggtccggcgatcgggatcgacctcggcaccacctactcgtgcgtcggcgtgtggcagcacgaccgggtggagatcatcgccaacgaccaggggaaccgcaccacgccgtcctatgtcggcttcaccgacaccgagcggctcatcg

SEQ ID NO: 36620 - DNA, 273 bp, Zea mays
tgttcaacaggtaatcaaaaggattactgatggaggggtggattactcatttgaatgtgtgggtgattctggagtagtctccactgcacttcaatcatgttctgatcgttggggagtaactgtaactcttggcttaccaaaaggaaaactagaagtgtctactcattatgcatttcttctatccggaagaacactgaagggatctatgtttggaggatggaaacctaaatctgatctaccttcattggtggataaatatgcagcaaaggaaat

SEQ ID NO: 36621 - DNA, 270 bp, Zea mays
cggacgcgtgggtgcgcgcaagacattattcaaaggagtgaaaaggcatccacgatgctagaaaagtagcggaagctgccgagaaaagtacagagcccgaaggcgacataggtattaattagtggtttttatcatgctgtaatttttaattccaaactctgttctcggtttgtaatagtaatatagccgtatcttttcttccctcagaacctgctgaggcatctccgggcccccacccgataggggacgatgaaattagaaaaatggccg

SEQ ID NO: 36622 - DNA, 268 bp, Zea mays
cccacgcgtccgcccacgcgtccggtgcggaaggagtcggagggaaccgaaaactcagggtctcgaatttcctaggagcggaggcgatggctgggaagggaggaaaaggattgctcgccgcgaagacgacggcggccaagtcggcggagaaggacaaggggaagaaggcccccatctcacggtcctcccgcgcgggcctccagtttcctgttggacgaatccaccgtcagctgaagcaaaggactcaggcaaatggccgcgttggtgc

SEQ ID NO: 36623 - DNA, 268 bp, Zea mays
gcaggacaagcgcagtgcagttatcagggcacagggtgaggctaagagcgctgagttgattggccaagccattgccaacaaccccgccttcctggctctgagacagattgaagctgccagggagatctcccacaccatggcggcctccagcaacaaggtgttccttgattccagggaccttctgcttggtcttcagcagctgaacgtgggggccaagcaaaagaagtgaagcggtcgtccccaggccatcgtggatgagagtagtttc

SEQ ID NO: 36624 - DNA, 266 bp, Zea mays
cccacgcgtccggaaattccccagcccggttctttgcgtgcggttgatctcgtcggaggcccggccgcggttccccaatccgccatcgaattcgatggcggccaacgccgggaataagatccgcaacgccaagctggttcttcttggagatgtgggcgctggcaaatctagcttggttcttcggtttgttaagggacagtttgttgaattccaggaatcaacaattggagcagccttcttttcccagaccttagcggtcaatgatg

SEQ ID NO: 36625 - DNA, 268 bp, Zea mays
aaaggttactagtgaagaatccaagggccaggctaacagctgctcaagctctctcacatccgtgggtaagagaaggaggagaagcatccgatatccccgtcgacatatctgtgttatcaaacatgcgtcagtttgtcaagtacagccgtttcaagcaattcgcgcttcgggctctggcgagcacccttaacgaggaagagctatcagatctgaaggatcagtttgatgcaattgatatcgataaaagtggatcgattagtatcgagga

SEQ ID NO: 36626 - DNA, 265 bp, Zea mays
cccacgcgtccgcttttgaactcgatgaagcaactgagaaagaactgcttgcgaagctggagaagcatggaaggagtgttgttgagtcaaaggcaaaagaagaagctggaagggttttgattcgcatgaaggacaggttctcaacattgttcagccgagatgctgactctatgcccagggtgtggacaggaaaggaggacataaaagctataactaaaaccgctcgctcagcttctgtgaagttgctttctacaatggctgcaat

SEQ ID NO: 36627 - DNA, 262 bp, Zea mays
ggacgctgggcaacagccattgatgtttggtctgctggctgtgtgctcgctgagctgcttcacggacagcctctgttccctggagaaagcggtgttgatcagcttgttgaaatcatcaaggttctgggcacacccacacgtgaagaaattaagtgcatgaatccaaattataccgagtttaaattcccgcaaatcaaagctcacccatggcataagatattccataaaaggatgcctgctgaagcggtagatctcgtgtcca

SEQ ID NO: 36628 - DNA, 262 bp, Zea mays
cccacgcgtccggaagctgttagggctctgagctgccttcccaagttgcagactttgacgttggatgccactgatattagcgaccaatcattgaaatatctaggacttggaacatgtcctctaacttccttgtctctgagaggttgtcggaagcttacaaacgattgtatcaccttgttatttgctggtcatgtgaaacagagcctacagatgttggatctctccagaattccaagtatcacggatgatggtatcatgttat

SEQ ID NO: 36629 - DNA, 263 bp, Zea mays
ggctgcagcactgatgatgcgtgatcggcctgtttatgaacagaaagtgacagaatattgtgaaaagtatgctaaaccagaggacgctggcatcaccccggaagacaagtccagtgatgaagagcttagcgatgatgacgacgacgacgacaatgactccggggacgaagctatacttggcaatcctgatccttagtctgagtaggaaacagcgcagtcaggtcatcaatacattgtccaattgcagaaactgcaagtaaaca

SEQ ID NO: 36630 - DNA, 265 bp, Zea mays
cattcgaaacaccctcgcacccacactctcccttcgtccccagcctaaatccccgcaacgatggctcgcacgaagcagacggcgcgcaagtccacgggcggcaaggccccgaggaagcagctggcgaccaaggcggcgcgcaagtcggcccctgcgaccggcggcgtgaagaagctgcaccgcttccgcccgggcaccgtggcgctgcgcgagatacgcaagtaccagaagagcacggagctgctcatccgcaagctgcccttcc

SEQ ID NO: 36631 - DNA, 267 bp, Zea mays
gtcatatctagctatagtagctcccttgagaagcatttcccggaggagccatgtctgaggagaagcaccaccaccacctgtttcaccaccgcaagccagaggaggagggcgcctccggcgaggtcgactacgagaagaaggagaagcaccacaagcacatggagaagctcggcgagctcggcgccatcgccgccggcgcgtacgccctgcacgagaagcacaaggccaagaaggacccagagaacgagcacgggcaccgggtcaagg

SEQ ID NO: 36632 - DNA, 255 bp, Zea mays
tcagcgaacatgggaacccgcggcgtcgcctgctgctcctcgcggcggtgctgctcctccaggcgctcctccccgcgtcgtcggagggcctggtgcgggtcgcgctgaagaagctgcccgtcgaccagaacggccgcgtcgccgcgcgcctctccgccgaggagaggcagcgcctcctcctccgcggctccaacgctctgggctcaggcggcgacgacgactccgacgtcatcgcgctcaagaactacatgaacg

SEQ ID NO: 36633 - DNA, 262 bp, Zea mays
aaccacgcgtccgcggacctggattttggagtattctctggatatggttcgcaagctctctgctgctgcaaaggaggtatgagatgaagaaaaaccatgataaattattgagtgaattgtctacgaattctgaagttaacggcgatggcatcaactcatttgtcattgctgttatcaagggccttcgtttcatcctggaagaaataaaggaactgaaagcagaagtgagtaaagcacgtatccagatgatgcaacagatcat

SEQ ID NO: 36634 - DNA, 261 bp, Zea mays
cccacgcgtccggtgccatggacggaggaggagcacaggttgttcctcctaggcctgaagaaatacggcaagggtgactggaggaacatttcgcgcaacttcgtccagaccaggacgcccacccaggtggccagccacgcgcagaagtacttcatcaggctcaactccggcggcaaggacaagaggaggtccagcatccacgacatcaccacggtcaacctgacggacgaccagccgccctcgccgtcccagtcctcccta

SEQ ID NO: 36635 - DNA, 259 bp, Zea mays
gaacgatgcactatcaagtttcttcaaaatcttgactacatcacctgatgaaaacggcaaggtctatgtctcaactgtacaagccaataattatccaatcacttgcacgcaatggcatcctgagaaagccatttttgagtggaggaaaccaatgatcccacacagcgaagatgcagtacaggttactcaacattttgccaatcattttatcagccaagcacgcaagtctccaaacaggcctcctgccgacaaagtgctg

SEQ ID NO: 36636 - DNA, 258 bp, Zea mays
gtttccagctattacctgactaatgcagatgagctgcagataaaaatggctcagggtgccaagcctggtgaaggtggtgaacttccaggccacaaggttattggtgacattgctgtcacaagacactccacagctggtgtaggactgatcagtccacctccgcatcatgatatttattcgattgaggatcttgcgcactgtatacatgaccttaagaattcaaatcctggagcccgcatcagtgtcaaactagtttct

SEQ ID NO: 36637 - DNA, 257 bp, Zea mays
cggagaagcctccccaagcttcgaatcgctatgcagcccgtcaaggtgtacgccgaccggcgtcgcaaccctcccgagctgtcatcatcttctgcagggtgaaccagatcgatttcgaggaggtcacggtggatctgttcaagtctcagcacctcacacccgaaaaaaaaaataaacccaatgggacaggtacctgcaattgttgatggaagattcaaactatttgaaagtcatgcgattttgaggtatcttgcatc

SEQ ID NO: 36638 - DNA, 258 bp, Zea mays
ctctgtctgtgtgtttccaaagcaaacgaaagaggtcgaggatgtcttgcagctgcggatcaagctgcaactgcggatcaagctgcaactgcggcaagatgcaccctgacctggaggagaagagcggcgggggcgctcaggccagcgccgccgccgtcgtcctcggcgttgcccctgagacgaagaaggcggcgcagttcgaggcggcgggcgagtctggcgaggccgcccacggctgcagctgcggtgacagctgca

SEQ ID NO: 36639 - DNA, 259 bp, Zea mays
gcagttaactcagtctacatttcaaaggtcagcctagcaattgctgtgagatacagtttgtcaaggagagccttttcaattgcaccagatgcccctgaaatgttgttgcttgactatcccagtcaccagcgacgccttctaccacttctagcaaaagtatgtctgatgagcagtgctggcaattttatgaaaaatatgtatgtaaagagaactcctgaaatgagcaaagacatacacatttactctagtgctctgaagg

SEQ ID NO: 36640 - DNA, 254 bp, Zea mays
cccacgcgtccgcttaacatgatggaaaatgtgcaaggggaacttatagagagttttttgcctgttctcgataactttgaaagagcaaaaatgcaaataaaggtggaaacagagggagaggagaaaataaacaatagctatcagagcattaataagcaattcatcgagattcttaattcattgggtgttgaagatgttgaaactgttggcaaaccatttgatcctatgctgcacgaggctattatgagagaaga

SEQ ID NO: 36641 - DNA, 252 bp, Zea mays
gccacgcgtccggttggcttctcctccccctccggttcgggttcgggttcgtgaggttctccggggttcggtttcgtgggtgagcggatcgagatggcggcgtcggatgttgagtaccgctgcttcgtcggctgcctcacctggaccacggacgaccactcgctccacaacgcattcagcacctacggcgaggtcctcgagtccaagatcatcctcgatcgggagatgcagaagttccgcagcttcggcttc

SEQ ID NO: 36642 - DNA, 252 bp, Zea mays
gggatttcaaggcatccaacgtccttctggacgctgaattcaagccgaagctgtcggatttcggcctcgcaagagagggtccaacagaagggaagacacatgtctccaccgcggtggtggggacgcacgggtacgcggcgccggactacatcgagacggggcacctgacggtgaagagcgacgtgtggagcttcggcgtggtgctgtacgagatcctgacggggcgacgctcgctggagcgcaccgccccgc

SEQ ID NO: 36643 - DNA, 251 bp, Zea mays
catggctctacatattggtcagctattgacaagtggaaagaggacagacattgcattcgaagttgatggagagatgtttcctgcccacaaggtgattctttcagcccggtctcctgtttttagggcacaactttttggcccaatgaaggataaggacatgaagtgtataaagattgaagacatggaggctccagtattcaaggccttgctccatttcatgtattgggatgagttgccggatattgaagagc

SEQ ID NO: 36644 - DNA, 254 bp, Zea mays
gcatcctcgcgctcctcgactcccacctcgtcccatccgccggcggcgccgagtccaaggtcttctacctcaagatgaagggtgactaccacaggtaccttgctgagttcaagtcaggtgcagagaggaaggatgctgcggagagcaccatgaatgcctacaaagctgctcaggatattgctcttgctgatctggctccaacccaccccatcaggctcgggcttgctctcaacttctcagtgttctactacgag

SEQ ID NO: 36645 - DNA, 258 bp, Zea mays
cccacgcgtccggtgaactggagaagcacattgaagacatgcatgtcctgattaccaccccattccacccagcttatgtcactgcagagaggataaagaacgcgaagaatcttgagcttcttctcacggcaggaatcggctccgatcatattgatcttccagcagctgctgctgcgggcttaactgtggctgaggtcactggaagcaacactgtctctgtggcagaagatgagctcttgcgcattctgattctgctca

SEQ ID NO: 36646 - DNA, 277 bp, Zea mays
ggagtccgcggcgctcggggccaccgctgacctcaccgacgaccccacctggactcgtcgatcccctcgacgggaccactaatttcgtccatggtttcccatttgtatgtgtctccgttggcctcaccattgggaaaattcccactgtcggagtcgtcttcaaccccatcatgaacgagcttttcacggcggttcgtggaaaaggggctttcctgaatggctctccaattaaagcatcatctcaagatgagttagtgaaggctcttctggtaacaga

SEQ ID NO: 36647 - DNA, 242 bp, Zea mays
gttggcttctcctccccctccggttcgggttcgggttcgtgaggttctccggggttcggtttcgtgggtgagcggatcgagatggcggcgtcggatgttgagtaccgctgcttcgtcggcggcctcgcctgggccacggacgaccactccctccacaacgccttcagcacctacggcgaagtcctcgagtccaagatcatcctcgatcgggtaacgcagaagtcccgcggcttcggcttcgt

SEQ ID NO: 36648 - DNA, 265 bp, Zea mays
gagttggattcacaggatctgttagagcagctgccagcattgcagcagttactataccgactcgttggatgtcggcctgaaggagctgcaaataataactacctggtgcaatacgctttagctttggtgctaaaagaaagctttaaaatttattgtgcgataaatgatggaattatcaaccttgttgataagttttttgagatgccaagacatgaagcacataaagctcttgaaatatacagaagggctggccaacaggctggaa

SEQ ID NO: 36649 - DNA, 267 bp, Zea mays
cttaaggaaggaatgggcggtggaggatcccatgttgatccatttgacatcttctcatcattttttggaccctcttttggaggaggtggtggaagcagcaggggaagaaggcaaaggaggggagaagatgtagttcacccacttaaagtttctctggaagatctttacaatggcacctcaaagaagctctctctttcgcgcaatgtcatctgctccaagtgcaagggcaagggctcgaagtctggtgcctcaatgaggtgccctggt

SEQ ID NO: 36650 - DNA, 268 bp, Zea mays
  unsure (1)..(268): unsure at all n locations
gtatccgtatcgccagagtcctcacggatggcctcgccagcgatggtcccgctgcggcagctcttcgtcgacggcgagtagcgcccgcccgcgcanggccgccgcctccccgtcgtcaaccccaccaccgaggctcacatcggcgagatccctgcgggcacagcggaggacgtggacgccgcggtggcggccgcgcgggcggcgctcaagacgaaccgtggccgcgactgggcgcacgccccgggggccgtccgggccaagtacctcc

SEQ ID NO: 36651 - DNA, 267 bp, Zea mays
gttggcttctcctccccctccggttcgggttcgggttcgtgaggttctccggggttcggtttcgtgggtgggcggatcgagatggcggcgtcggatgttgagtaccgctgcttcgtcggcggcctcgcctgggccacggacgaccactccctccacaacgccttcagcacctacggcgaggtcctcgagtccaagatcatcctcgatcgggagacgcagaggtcccgcggcttcggcttcgtcaccttctccacggaggaggcgatg

SEQ ID NO: 36652 - DNA, 263 bp, Zea mays
cccacgcgtccgcaagattggtggtattggaactgtccctgttggacgtgttgagactggtgtcattaagcctggtatggttgttacttttgggcctactggtcttactactgaggttaagtccgttgagatgcaccatgaggctctccaggaggcccttcccggtgacaatgttggcttcaacgtgaagaatgttgctgtgaaggatctgaagcgtgggtatgtggcctccaactccaaggatgaccctgccaaggaggctg

SEQ ID NO: 36653 - DNA, 263 bp, Zea mays
cgatgagacccctgagttgatgcccctcagccatgtccttgcagtggtcggcgtcaagcccaacatcgtttgacacaaaaccaatgttgcggcaggtctccctgacaatcttctcgtagtcaacattggccttggtggtgatctcaccaaagaccatgaccatgttggtcttggtgcaggtctcacaagcaaccttgctgtcagggtcctcagcaaggcaagcgtcaagaacggcatctgactagttctagatcgcgagcggc

SEQ ID NO: 36654 - DNA, 261 bp, Zea mays
cttggggtggacggttctgaatatgaaggcaatgggaataaatgaccttttgtcatttgacttcatggaccctccagcatctcaagcactcatatcggctatggaacaactgtacagtcttggtgccttagatgaagagggtcttcttactaggcttgggagaaaaatggctgaatttccccaagaaccacctctttctaagatgctccttgctagtgtagaccttggatgcagtgatgaaatactgacaatcattgcaat

SEQ ID NO: 36655 - DNA, 259 bp, Zea mays
gttggcttctcctcgccctccggttcgggttcgggttcgtgaggttctccggggttcggtttcgtgggtgagcggatcgagatggcggcgtcggatgttgagtaccgctgcttcgtcggcggcctcgcctgtgccacggacgaccactccctccacaacgccttcagcacctacggcgaggtcctcgagtccaagatcatcctcgatcgggagaggcagaggtcccgctgcttcggcttcgtcaccttctccacggagg

SEQ ID NO: 36656 - DNA, 262 bp, Zea mays
cccacgcgtccgcacaccccccgagctcagcttagctccactccagctccaatcacagtcgtgaccagagcgcgagagctagctagagggccgtgaaaatgccgatcaataggatcgccctggggagccaccaggaggtgtaccacccgggcgccctcaaggcggcgttcgctgagttcatctccaccctcatcttcgtcttcgccggccagggctccggcatggccttcagcaagctgaccggcggcggcccgacgacccc

SEQ ID NO: 36657 - DNA, 265 bp, Zea mays
atcatcaccagctagcacctcctttcccacgactcccgagctagcgctctgcgtgtggcgcgcggcagcgtggcgactgcgaacgggagcagcaaggggtcgttcgaggtgcccaaggtggaggtcaggttcaccaagctcttcatcgacggcaagttcgtcgacgccgtctccggcaagacgttcgagacccgggaccctcgcaccggcgaggtgatcgccagcatcgcggagggagacaaggccgacgtcgacctcgccgtca

SEQ ID NO: 36658 - DNA, 248 bp, Zea mays
ggaggatgcgcgtgctgaggcgcctgctccgcaagtaccgcgaggccaagaagatcgacaagcacatgtaccacgaaatgtacatgaaggtcaaaggtaactcgttcaagaacaagagggtgcttatggagagcatccacaagtccaaggctgagaaggccagggagaagacgctctccgatcagttcgaggccaggcgcgccaagagcaaggcgagtcgcgagaggaagaatgctaggagggaagag

SEQ ID NO: 36659 - DNA, 261 bp, Zea mays
ctagttctagatcgcgagcggccgcccgcgatctagaactagtccgaggagaacatcaaggcgtcggtgaagaacaccgtgacccaggtggccaagaaggtgctgaccatgaacccctcgggcgagctctccagcgcccgcttcagcgagaaggagctgatcagcgccatcgaccgcgaggccgtgttcacgtacgcggaggacgcggccagcggcagcctgccgctgatgcagaagctgcgcgccgtgctggtggaccac

SEQ ID NO: 36660 - DNA, 257 bp, Zea mays
ggaccgtggcggacgcgtggggtccgacgctgagcaaccaggacaacgacctccgacgaccccccgagaccccacgagatagtcgcggaggcggcgccggtctcctcatcggcgatctggtcgtgtcaccgcgacgagatcaccttcgaccgcctccacaagttttggagtgccctgtcacctcatgcacgacatgagctgttaagacttgataaacagacccttattgagcatgctcgcaagaatttgtactgttc

SEQ ID NO: 36661 - DNA, 258 bp, Zea mays
gaaaaagtcaccgaaccgccttgtcgtcgacgaggccaccaacgacgataactccgtcgtcgcactgcaccctgacaccatggagaggctgcagctcttccgcggcgatactgtgctcctcaagggtaagaagaggaaagacactgtttgcattgtccttgcggatgaaacctgtgaggagccaaaggttcggatgaacaaggttgtccgccagaacctgagggtgaggcttggtgatgtggtttctgtccaccagtg

SEQ ID NO: 36662 - DNA, 257 bp, Zea mays
caattcgctcgagttcagatcgagcgcgcgccaagcaagtcttccggccggccgcgaagagcgcaatcaagcaagacaagatggtgaagctcgccttcggaagcgtcggcgactccttcagcgccacctccatcaaggcctacgtggccgagttcatcgccaccctcctcttcgtcttcgccggcgtcggttccgccatcgcctacgggcaactgacgaatggcggcgcgctggacccggcgggcctggtggcgatc

SEQ ID NO: 36663 - DNA, 256 bp, Zea mays
cccacgcgtccgcggacgcgtgggtggtaatttgcctattctgaaccaaccagtgtgctccattccgctgggttcctgggttccgaaaattggacatctgaacagtcgtccattggctatgttgcgacctaatgcatcacttagctctgcccttaacatgttggttcaagctggagtaagctcaataccaattgtggatgacaacgactccctgcttgacacttactctagaagtgacatcacagccctagcaaaa

SEQ ID NO: 36664 - DNA, 128 bp, Zea mays
cccacgcgtccgggcttctcctccccctccggttcgggttcgggttcgtgaggttctccggggttcggtttcgtgggtgaacggatcgagatggcggcgtcggatattgagtaccactgcttcgtcgg

SEQ ID NO: 36665 - DNA, 254 bp, Zea mays
gaaattctgaagaacaatggatttgctgttgaaaagaaaattaggacctctactgttgaaataaacgacgaatcaagaggtcgtccattccaaaaggccaagattgagataatcttgggaaagagcgacaaatttgatgagctgatggccgctgctgcagaagagaggggcgaagtggaagatggtgaagagcagacttgaaaacagtaccgatgacaagctgctgctgttgtgctctgttagtgttgtttaat

SEQ ID NO: 36666 - DNA, 254 bp, Zea mays
gttgtactgagctgagctgccggaggcgaataggagaggcaggcgatgacgatggcgacgaaggcggcgtgcgtgctggcggtgtgggtgctcgtcgcatcgggcctgtccgacctgggctcagcgcgcgcgcccctgggcagcaagccgcagcgggagttcgactacttcgcgctctccctccagtggcccggcaccatctgcgcctccacccgccactgctgcgccaccaacggctgctgccgctcggagcc

SEQ ID NO: 36667 - DNA, 252 bp, Zea mays
gcaagtacgcgtcggagggcacggacctgctccccgcgacggcgtcggcggcgaactggaggtgtggctagaggtggagtcgcaccacttctacccgaacgcgtcgccgctggtgttccagctgctcgtgaggccgctcctgggcggcgcccccgacgcggcggtggtggacaagcacgcggacagctcgccaaggtgctcgacgtgtacgaggcgcacctcgcccgcaacaagtacctcgccggggacgag

SEQ ID NO: 36668 - DNA, 248 bp, Zea mays
ggacggtggtccttgcatgcagcaatacagcaatggaagttacgagcatcttaaggcccgagtcgttttaatcttaatccatatggattgaacgggattgagtgggtttaaatccataacgagtcaaaattctttctaatttcttccaatctcatcttatcaacatggaatgagaataaccgaataaggcctaataaaggcatgaggtgactggtttattcgttgtatatagtttgattcattactgt

SEQ ID NO: 36669 - DNA, 248 bp, Zea mays
cgttcgcctcgtctcgcgatggacaagggcagcgtcgtcgtgcccccggcccctgccgccgccgccgcgaagaaggccaagcgcttcgagatcaagaagtggaacgccgtctctctctgggcctgggacatcgtggtggacaactgcgccatctgccgcaaccacatcatggacctttgcatcgagtgccaggcgaaccaggcgagcgccaccagcgaggagtgcaccgtcgcttggggaatttgcaa

SEQ ID NO: 36670 - DNA, 250 bp, Zea mays
cccacgcgtccggggaccacaatggccggcctcaaggttttggggtacgatttcgactacgacgacttccacgcctgcgtgcacgggacgctgccgtacgagaaggtgaagcctgacccggtgctcaggcagctgctgctttccctgccgcagaggaagatcatcttcaccaactccgacaaggcccacgcggccagagtcctggagaagctcggcctccaggactgcttccaagggatcgtctgcttcg

SEQ ID NO: 36671 - DNA, 250 bp, Zea mays
atctttattgagtgaacggctgaggcaatctatactggaaaaagttcaggcaaagcaatttgaggcactggcctcagttgaggacaagatactcagaaaaataagggacaaagaggcggaagtggagaccataaacaaaaggaactctgaactagaggaccagattaagcatttgggagtggaagttggtgcttggcagcatagggccaagtacaatgaaagcatgatcaatgcactcaagtacaacttg

SEQ ID NO: 36672 - DNA, 244 bp, Zea mays
agtggagtcaccacagaatcagagagaagctttcccccgatcctctcgcggacaccagcgatgggttcccgctacgaggtggaggtcaccgtcggctccgctcgggacctcaagagcgtcaactggcgcaacggcgacctcaagccctacgccgtggtgtggatcgactccggcagcaagtgctcgatccgcgtcgacctcgacaacggcgatagccgttcggggacgagaagctgctcgtccc

SEQ ID NO: 36673 - DNA, 247 bp, Zea mays
atccccaccccgaccgacctaccctaatcggcgatggcgacggtggcgatggacatctcgaagcccactccagtggcgtccggcgacgaggccgcggcggcggccaaggggatgagcggcggagggggcgaggggctgcggcagtactacctgcagcacatccacgacctgcagctccagatccggcagaagacccacaacctcaaccgtctcgaggcccagcgcaatgacctcaactcccgagtta

SEQ ID NO: 36674 - DNA, 247 bp, Zea mays
ccaaggcacgttatgaagagattgtgaaggaagtctcatcctacctcaagaaagttgggtacaaccctgataagattgcctttgttcccatttctggttttgagggcgacaacatgattgagaggtccaccaaccttgactggtacaaaggcccaaccctgcttgaggctcttgaccagatcaccgagcccaagaggccttcggacaagcccctgcgtctgcccctccaggatgtgtacaagattgg

SEQ ID NO: 36675 - DNA, 247 bp, Zea mays
cttaatgattacgatcaagaaatgcttctcaactttgctacagaatgtgcggactctgtacttcctgcgtacataccgatcatagaacggcggaagaacactccgttcaatgaggagcacagggcatggcagcaattgcggagaggtcgttatgtggagttcaaccttgtctacgaccgtggtaccacatttggcctaaagactggaggaaggattgagagcatacttgtgtcccttccgcttacag

SEQ ID NO: 36676 - DNA, 247 bp, Zea mays
atctacgccggcgcacagaagaacgtcgggccctccggcgtcaccatcgccatcgtgcgcaaggacctcatcggcgccgctcagcccatcacgcccgtcatgctcgacttcaagacgcacgccgacaacgcctccctctacaacaccccgccctgcttcgccatctacgtctgcggtctcgtcttcgaggacctgctcgcgcagggcggcctcgctgaggtcgagaagaagaacgcgcgcaaggccg

SEQ ID NO: 36677 - DNA, 243 bp, Zea mays
gccagcggggtaccgccggccggctaccccccgccggcgcagggctaccctccgcaggctacccgccgcagtacgcgcaccgacgcctccacagcagcagcagagcagcgggccttccttcatggagggatgcttggctgccctctgctgctgctgcctcctggacgcctgcttctgagagtgagaggggccgaccgacggattcgacacggcgacaagtgaaactactagctttctatgcga

SEQ ID NO: 36678 - DNA, 244 bp, Zea mays
caaggccatgacttaaggacggtcagcacatcatatgcatctcaagatggggacaactcatggaaggccaccatgtcatatgggttccaaagtggtgagggctcgaggaaggtcaccacatcatatccgtaccgaggccaggacttaaggatggtcagcacatcatatgtatctcaagatgaggacaactcatggaaggtctcgatgccatctaggttccaagttggtgagggctcaaggaagc

SEQ ID NO: 36679 - DNA, 269 bp, Zea mays
cctactggtcccagtgcgacgccgctcttggccagaagctggcttctaggctgaacctgaagccgagcatgtaagatcgacgaggaagaaagcaggcaccggtggccaaggatgcaacgcaacatggagcgtgtgatgtttacaccaatataattgaataaacaggggatgtgcgcgttgtcgtacttatgctgatgctgatggtcggtggtcgattatatatactggaacttctggtgtatgctcttctcttctggggagacgtaatg

SEQ ID NO: 36680 - DNA, 269 bp, Zea mays
gagcgccaccaagtcttgcggtcgcgaagagcaacgcaacaagatggtgaagctcgcattcggaagcgtcggcgactccttcagcgtcacctccatcaaggcctacgtggcggagttcatcgccaccctcctcttcgtcttcgccggcgtgggttccgccatcgccttcgggcaactgacgaatggcggcgcgctggaccctgcgggactggtggcgatcgcggtggcgcacgcgctggccctcttcgtgggcgtctccgtggccgcga

SEQ ID NO: 36681 - DNA, 268 bp, Zea mays
ggacgtgggcgacggcggagctctagggccacccccggccggatcgccggcaaagccgcctgcgccgtcgcgtcactgtacacgctgcagggcaagaagggcgtcaaccaggatgctatgatcttctgggagaacttctgttcaagagatgataccatcttttgtggtgtgtttgacggccatggaccttatggccatttggttgccaagagagtaagagatctgctgcctctaaagttaggagaaggtttgacgacggaagatggta

SEQ ID NO: 36682 - DNA, 174 bp, Zea mays
acgccagctccgcgacggcgcggaacggtttcggaaggatcggcaggctcgtgagcaggagcccctgcagacgaggatgtcgagctcgtcgcgtcaacgaccctcacaccacgatactgactactgttcatacgacacgtgcacgccatggaaccacgcatcacctcaagatcc

SEQ ID NO: 36683 - DNA, 271 bp, Zea mays
gcatctcgcgcgcccaggcgctgatcgcgctctgcggcaccatcccgggctactggttcaccgtcggcctcatcgacatcgtgggcaggttctggatccagatcatgggcttcttcatgatgaccgtgttcatgctcgcgctcggggtgccgtacgagcactggaccaaggcgtccaaccacaccggcttcgtcgtcctctacgggctcaccttcttcttcgcaaacttcgggcccaacagcaccaccttcatcgtgccggccgagatctt

SEQ ID NO: 36684 - DNA, 265 bp, Zea mays
aatcccattcccctccttcaagccctgcggcgatttcgattcttcccttctatctccaggtatacccatcggagcagcactgacaaaaattctccagatatggcaagcaaaaggattcagaaggaactcatggatctccaaaaggacccaccgacatcatgcagtgcagggcctgctggagaggatctattccactggcaggccacaatcatgggtcctagtgacagcccctatgcaggcggggttttctttattaatatccatt

SEQ ID NO: 36685 - DNA, 263 bp, Zea mays
ggttttgctgctctccgaccccgagctccgaaggccgcagcatcaggcgcgccccccctcgcgtgtgaccgagatggcgctgccgaatcaggggaccgttgattaccccagcttcaagctcgtcatcgtcggcgatggtggaactggtaaaactacatttgtgaagaggcatctcactggagagtttgagaagaaatatgaaccaaccattggtgtggaagttcatccgttggatttcaccactaactgtggtaagatcaggt

SEQ ID NO: 36686 - DNA, 260 bp, Zea mays
ggacgtgggacaacccagcatatctcctgcttatcctcggttgtttgtccccgagcacaggaaagtgttcgtcctcatggcgccgccgcagccgaagtcgggcctcttcgtgggcatcaacaagggccatgtcgtcaccaagcgcgactgcctctgcgcccgtcccaccgcaaggggaaagcaacgaagagggtgtccatggtcaggggcctgatcagagaggttgctggctttgctccttatgagaagcgtatcaccga

SEQ ID NO: 36687 - DNA, 261 bp, Zea mays
caaaatccaggtgctgaacaggaagctttcctctgggaactttttgggtcattaagatacttcaccctaccaatttggatggtcttaattgtcactgcccttacttggatggcatggtttccttttaccctctttgatactgattggatgggccgagaaatctatcgaggaagcccagacaacccaggagagacccaaaggtaccatgatggtgtgagaatgggttcttttggtctaatgctcaactctgtcgtccttgga

SEQ ID NO: 36688 - DNA, 265 bp, Zea mays
ccaagatccaggacaaggagggcatccctccagaccagcagcggctcatctttgctgggaagcagcttgaggacgggcgcacgcttgccgactacaacatccagaaggagagcaccctccacttggtgctgcgcctcagaggaggcatgcagatcttcgtgaagaccctgaccggcaagactatcaccctcgaggtagagtcttcagacaccatcgacaacgtcaaggccaagatccaggacaaggagggcattcccccagacca

SEQ ID NO: 36689 - DNA, 265 bp, Zea mays
ctaatttcaacacacaactggacgacggtgcgttgcgttggtggccgccggcgacgatgtcgtcgtccgcgggcgacaagaggaagaagacggcgtgcgtgaccggagggaacgggtacatcggctccgcgctcatcaagatgctgctggaggacggatacgccgtcaagacgacggtcaggaaccccgacgacatggacaagaactcccacctcaagggcctgcagcagctcgggccgctgacggttctccgcgccgacatgga

SEQ ID NO: 36690 - DNA, 261 bp, Zea mays
gcttctcctccccctcttatcaagtcctcctcgggttagggttccttagggttttgtggaggggcgatggcggcggctgatgtggagtaccgttgcttcgtcggcggacttgcctgggccaccagcaacgagtcgctggagaatgccttcgcctcctacggcgagatcctcgactccaaggtcatcaccgaccgggagacggggaggtcctgcggcttcggcttcgttaccttctcctccgagaactccatgctcgatgct

SEQ ID NO: 36691 - DNA, 265 bp, Zea mays
gggcaggcgactcctcggcgtaggaggcggcgatccagcgcccgcggtcgctgctgctgtggcggcgagcaggagcagaggataccacgagcgggtggtggaccactacaacaacccgcgcaacgtggggtccttggacaaggacgacacggacgtcggaacggggatcgtcggcgcgccggcgtgcggggacgtcatgaagctgcagatccgcgtcgacgaggggtccggcaggatcgtcgacgcgcgcttcaagaccttcggc

SEQ ID NO: 36692 - DNA, 259 bp, Zea mays
gctagccttcccgttcctgcatcgcggcggagatgggcgcctccaccacgccgctcgcgtcggcggcggcgctgcttctgctgctgctcgcgccgctcgccgcggcggcggacagcatgtcgatcgtctcctacggcgagcggacgaggaggaggcgcggcggatgtacgccgagtggatggcggcgcacggccggacctacaacgccgtcggcgaggaggagcgcaggttcgaggtgttcagggacaacctccgctac

SEQ ID NO: 36693 - DNA, 260 bp, Zea mays
gtcttcttccccaccccacctgtgacccacgcgttcctcagatcagatcggcaaggccaatccgaaatctcgagctttcgtgccggcgaccacagcaaagaggaggccacagcacgacagcgccccagggttcctactctcgtcgcagcggcagcagtgaggggaagatgtcgtcggtgttcagcggcgatgagaccgcccccttcttcggcttccttggcgccgccgccgctctcgttttctcatgcatgggggcggcg

SEQ ID NO: 36694 - DNA, 256 bp, Zea mays
gttggcttctcctccccctccggttcgggttcgggttcgtgaggttctccggggttcggtttcgtgggtgggcggatcgagatggcggcgtcggatgttgagtaccgctgcttcgtcggcggcctcgcctgggccacggacgaccactccctccacaacgccttcagcacctacggcgaggtcctcgagtccaagatcatcctcgatcgggagaggcagaggtcccgcggcttcggcttcgtcaccttctccacgg

SEQ ID NO: 36695 - DNA, 259 bp, Zea mays
gccgtgcgtgcgtggctgcgcgacgactcgactgcaccccccgctcctcccagtccccacacactgcgcgccgccgccgggtcctcctagggtttcgccgcgatgtcgctccggccgagcgagcgggagcagatgcggaagggcaactacaagcagacggtggacgcggaggagagccgccgccgccgcgagggccagatggtggacatccgcaaggccaagcgcgaggaaagcctccagaagaagcgccgcgatgggt

SEQ ID NO: 36696 - DNA, 260 bp, Zea mays
cccacgcgtccgcactgagaggggttattccttcacaacctccgccgagcgagaaattgtaagggacatcaaggagaagcttgcgtatatagctcttgactacgagcaagagttggagactgccaagaacagctcctcagttgaaaagagctatgagctacctgatggccaagtaatcaccatcggtgcagagagattcaggtgccccgaggtcctcttccagccatccatgattggtatggaggctgctggaatccatg

SEQ ID NO: 36697 - DNA, 260 bp, Zea mays
gtttccccaaaaaattatccttgagggtggaagcattcatgtagatggagaaggtacatgcattacaacggaagaatgcttgctgaatcctaataggaaccccaacatgaccaaactagagatagagaatgagctgaaggattttcttggagtctcgaaggtcatctggatacctcgtggactttatggtgatgaggatacaaacggccacgttgacaacatgtgctgcttcatcaaacccggtgtgatcctgctgtcgt

SEQ ID NO: 36698 - DNA, 277 bp, Zea mays
cccacgcgtccgcccacgcgtccgcccacgcgtccggactagttctagatcgcgatctagaactagtccgcttctggttctttgtttatcctctcaaaaaatttggctcgctacatcaacataaatagtgcgtcactgcagagttagtcacacgatgatatatcagtaggttcatggatgatgggactgaatgcaacttacgtggatgatgaccggttgtgctgcagcagttccagacaagagaaaatctgttccaatgcttgagcggaaggcgtgg

SEQ ID NO: 36699 - DNA, 275 bp, Zea mays
aaatgcttttagcattttcgaggacatgataaaatcaggtttgcagcctgatcgtgccatatacaatttgctggtagaagcattttgtaagatgggaaatatggatcgagctattcgcatattcgaaagaatgcagaaggaacgaatgcaaccatcaaatagaacattcagacctatcatagaaggatttgcagttgctggagatatgaaaagggctttcgatacccttgacctaatgcggcgaagcggttgtgctcctactgtaatgacttaca

SEQ ID NO: 36700 - DNA, 275 bp, Zea mays
gctgcaggttggctggatgtggcttcggcagcgacaggcagcctggacgagcaacgcattctggctgattttttcgaacacagctccggcgccgatgcccggcacgcaaggagggcaggcggtggcgttccgcatctccggcgacaaggccttcttcttcggctgcgggttctacggcgcgcaggacacgctgtgcgacgacgccggccgccactacttccgcgactgctacatcgagggctccatcgacttcgtcttcggcaacgccgctccct

SEQ ID NO: 36701 - DNA, 274 bp, Zea mays
ggacgcgtggggcgcggacaagcccgtggagcacgagggccggacggcggggatcaaagcaggcgctcgtgttctaccacggcaagccgccgcgcggggtcaagacggagtggatcatgcacgagtaccgcctcgccgaagccggcggcgcccgcgccaagaagtccggcgccggcacgctcaggctggatgactgggtgctgtgccgcctgtacaacaagaagaacgagtgggagaagatgcagcagcagaaggagaaggagaagaaggcgat

SEQ ID NO: 36702 - DNA, 271 bp, Zea mays
cagtctttctggggagactgctctaagggatgcaagacctcctagtgaaagaagacgagtggagagcagttgctggttctgcttgtcgagtccagatgtcgagtcacatcttgtcattagcatcggtgaaggttactactgcacacttgcaaaggggccacttgttccaaatcacgttctaatgattcccgtggaacactgccccagtacattgatgatgcctccggaagcagaggcagaacttgggagatataagattgctctgagtaag

SEQ ID NO: 36703 - DNA, 275 bp, Zea mays
ggagctcaacatggacctgttcaggaagtgcatggagcctgttgagaagtgcctgagggatgccaagatggacaagagcagcgtccatgatgttgtccttgttggtggctccactaggatccccagggtgcagcagctgctccaggacttcttcaacggcaaggagctgtgcaagaacatcaatcctgatgaggccgttgcctatggtgctgccgtccaggccgctatcctcagtggtgagggcaacgagaaggtgcaggacctgcttctgcttg

SEQ ID NO: 36704 - DNA, 274 bp, Zea mays
cccacgcgtccgcccacgcgtccggatcgctggggttgcagttggtgtttcagtttttgcattgatcgcactggccggaatcttcttgtggtgtcagaaaaggagaaagctattgttagagctagaagaattgtataccatagttggaaggccaaatgtcttcagttacagtgagcttaggtcagctacagagaacttttgttctagtaacctacttggtgaaggaggatatggatcagtttacaagggtaagttgagtgatggaaaagtggtg

SEQ ID NO: 36705 - DNA, 276 bp, Zea mays
ctcccagtcaaggactccaccgcgcagtcgtagttggatagacaaggagcagttaaacgcttggagacgtctcgtccatcatgcagatcttcgttaaaaccctaacgggtaaaaccatcacccttgaggtcgagtcctctgatactattgataatgtcaaggccaagatccaagacaaggagggcatccccccagaccagcagcgtttgatcttcgccggaaagcagctcgaagacggccgcaccctcagcgactataacattcagaaggagtccc

SEQ ID NO: 36706 - DNA, 256 bp, Zea mays
tgaagagatacccaaatgcggagattgtgtggtgccaggaggagcccatgaacatgggtgcatacagctatatctctcctcgtctgtttactgcgatgaaggctcttgggcggggttcgtttgaagacatcaagtatgttggcagagcaccttcagctgctacagcaacaggcttcctgtcggttcatgcgcaggagcagtcagagctagtgaagaaggcactgcaggcagagccgatcaaattcctctgatgtat

SEQ ID NO: 36707 - DNA, 270 bp, Zea mays
ggacgctgggcgtgttccgacgcttcgccttcgacaccatctgcaagatactccttcggcatcgacccgggctgcctcgagcgggagatgcccatgtccaagctcgccgacgccttcgacaccgccacgcgcctctgcgccatgcgcggcgccgccgcgtcgccgttgctctggagggccaagcgcctgctcaacgtcggctcggagagggagctcagggaggccatccgtctggtcgacgagctcgcggctgccgtgatccgggagcgc

SEQ ID NO: 36708 - DNA, 270 bp, Zea mays
ctcatctacagcgacgtcgagaactccgagcacaagttcgtgctgaaggacaagaagaagccgatcatcttctcgatggcgcgtctcgaccgcgtgaagaacatgacaggcctggtcgagatgtacggcaagaacgcgcgcctgagggagctggcgaacctcgtgatcgttgccggtgaccacggcaaggagtccaaggacagggaggagcaggcggagttcaagaagatgtacagcctcatcgacgagtacaagttgaagggccatatc

SEQ ID NO: 36709 - DNA, 270 bp, Zea mays
  unsure (1)..(270): unsure at all n locations
ggacgctgggctccaaggcacgttatgaagagattgtgaaggaagtctcatcctacctcagcgaaagttgggtacaaccctgataagattgcctttgttcccatttctggttttgagggtgacaacatgattgagaggtccaccaaccttgactggtacaaaggcccaaccctgcttgaggctcttgaccagatcaccgagcccaagaggccttcagacaagcccctgcgtctgcccctccnagatgtgtacaagattggtggtattgga

SEQ ID NO: 36710 - DNA, 204 bp, Zea mays
cggacggtgggcgcgacgcgtgggtgaagacgaggagcagctacactgcggacggacttcagcgcatggagggccatttccaggttggcaaggaggaggtcatccaagcatggtacatggacgacagtgaagaggaccagaggcttcctcatcatcgcgagcccaaagaattcatccctctcgacaaactttccgaactaggaa

SEQ ID NO: 36711 - DNA, 267 bp, Zea mays
gaagcagcagccaattcgctcgagttcagatcgagcgcgcgccaacaagtcttccggccggccgcgaagagcgcaatcaagcaagacaagatggtgaagctcgccttcggaagcgtcggcgactccttcagcgccacctccatcaaggcctacgtggccgagttcatcgccaccctctcctcgtcttcgccggggtcggttccgccatcgcctacgggcaactgacgaatggcggcgcgctggacccggcggcctggttgcgatcgc

SEQ ID NO: 36712 - DNA, 259 bp, Zea mays
tgccactctgagcttcccattaacctcgagcctggtcatctcaattaattaaaacaaaccgttcccgcagctcgtgccgacaatggcggcctctgttgagcggcacctggccccccacccgtggccggccaatgcgcctcccaagagcttcgacatgttccgctccggctgcccaggaggcaagcgccgcaccggccccgactccgactccgaggacgaggatagcattcccccggactggcggtcgctgtacagcccg

SEQ ID NO: 36713 - DNA, 268 bp, Zea mays
cttgccgactacaacatccagaaggagagcaccctccacttggtgctgcgcctcaggggaggcatgcagatcttcgtgaagaccctgaccggcaagactatcaccctcgaggtggagtcttcagacaccatcgacaatgtcaaggccaagatccaggacaaggagggcatcccaccggaccagcagcgtttgatcttcgctggcaagcagctggaggatggccgcacccttgcggattacaacatccagaaggagagcaccctccacc

SEQ ID NO: 36714 - DNA, 266 bp, Zea mays
cgttcgtggggttccgcgtgcagcatgataacgcccgcgggccgatgaaaggcggcatccgctatcacaatgaggttgatccagatgaagtaaatgcccttgctcaactcatgacatggaagacagctgttgctgcagtcccatatggtggagcaaagggagggatcgggtgctctcctggtgaactaagtagaagtgagttggagcggttgacacgagtatttacccagaaaattcatgatcttatcggaacgcatacagatgtc

SEQ ID NO: 36715 - DNA, 266 bp, Zea mays
aagagagatcagcgacttaacaacaataatggccaccgcatagttcccacggacgccgagctgctgcaggcgcaggccgacctgtggcgccacagcctctactacctgacatccatggcgctcaagtgcgcggtggagctccacatcccgaccgccatccacaacctaggcgggtctgccacgctgccggacctcgtggccgcgctgtccctgccagcggccaagctcccgttcctcgggcgcgtgatgcggctgctggtcacgtc

SEQ ID NO: 36716 - DNA, 264 bp, Zea mays
cggacgcgtggtgccaaatgctaccatctcttctgcagtcagtgcatacagaagccacttggagcgccgtcagaagaggtgtccatcttgtggactaagcttcggtgttaatgatgtgaaacctatctacatatgaaacagaaggttggcgcctgtgtcgcagcaccaaaacaaaactgcttggcgcttactaatttccggtatatggtaggcggccatggtaattcagtcggtgatgtagcataagattatgtagcatttaag

SEQ ID NO: 36717 - DNA, 292 bp, Zea mays
gttccaacaccagccgccgtcatgtcgaagcgaggtaggggaggttcggctgggaacaagttccgcatgtcactgggtctaccggtggcggccacggtgaactgcgcggacaacacgggcgccaagaacctctacatcatctccgtcaagggcatcaagggccgcctcaaccgcctcccgtccgcctgtgtcggcgacatggtcatggccaccgtaacgaagggaaagcccgacctcaggaagaaagtgatgcccgccgtcatcgtccgccagcgcaagccgtggcgtcgca

SEQ ID NO: 36718 - DNA, 140 bp, Zea mays
cagaggtgggctggcttctcctccccctcttatcaagtcctcctcgggttagggttccttagggttttgatgatgggcgatggcggcggctgatgtggagtaccgttgcttcgtcggcggacttgcctgggccaccagca

SEQ ID NO: 36719 - DNA, 272 bp, Zea mays
cggacgctgggtggcatcgagatagctatgcgggagttcagggacttgttcgaggggatccagtccatgccctactgctgcggtaacttcggtgatgacaagggtgccagggccattgtcaaagccttcccacacataaaatgcactgtgctggcccctcccaagatcattgccaccaaaccggccgatggagcgatgataaactatgtcgaaggtgacatgttcagtttcattccacctgctcaaactgtcgtgctaaagcttgtgctgca

SEQ ID NO: 36720 - DNA, 281 bp, Zea mays
gtgaagggccaaccctagtcgagtgtgaaacatacaggttccggggtcactcccttgcagacccagatgagctcaggaagcctgatgagaaaacacactacgccgcaagggattctatcacggccttgaagaagtacatcatagagcagaacctcgcaaccgaatccgagctgaagagcatcgagaagaagatcgacgatgtcgttgaggaggctgtcgagtttgctgacgcgagcccgcatccgccgcgcagcagctgttggagaacgtgtttgccgacc

SEQ ID NO: 36721 - DNA, 275 bp, Zea mays
cccacgcgtccggagcttttgatgtacatagttatcatagcagtcaccagattggcaaggccagggatcaccaaactgtgctataaccgacggcctgagaagcaaagtgccctggtgcagtggctgatcaagctggctgcaattgcggctatggtggctgcatattccattccattctttgtgatcccacgcacagtccacccaatcatgggctggtccgtctacctatttggcgcgcttgccttgtcagtgctcgttatcaatgtttttctgct

SEQ ID NO: 36722 - DNA, 275 bp, Zea mays
cggacgcgtggcggacgcgtgggcgcccagtacaccgtccgtaccctccagaggaccgtccctgctgctgtgcctgctgttgagttcctctccggtggacagagcgaggaggaggccaccctgaatctcaatgccatgaacaagctcagcaccaagaagccatgggccctgtccttctccttcggccgtgccctccaggcgagcaccctcaaggcctgggctggcaaggtggagaacgtggagaaggctagagcggccttcctcgccaggtgcaa

SEQ ID NO: 36723 - DNA, 275 bp, Zea mays
acgcggggctcatcgagccggcctcccaccgcctcgaggatatcgacgcgtgctccgccgagtgcgaggtccacatcgcgcaggagtggcttgacaagctgccaccaccgtcctacgaggcgcgatacgtgctcacgcgcgcgtccaggaaccgcgagctcaacaagcacgcgcgcctgggctgccaggtcgtcctcgcgccggagctgcaggggatggtcgtcgccatccccgagcctaagccgtgggacatcccataatggcctgccgacgaa

SEQ ID NO: 36724 - DNA, 273 bp, Zea mays
aacatcaccgtcaacgaggcccagtcccgcggcggccgtggaggcggcggcggcggcgggtacggtggtggccgtggaggcggcggctacggcggtggcgggcgccgtgatggcggcggcggctacggcggtggcggcggctacggtggtggcggcggcggctacggtggtggtggcggcggctacggcggtggcaaccgtggcggcggctacggcaactccgacgggaactggaggaactgagcggtggggcccgcgcggccaagttatcct

SEQ ID NO: 36725 - DNA, 274 bp, Zea mays
caaggatggacagacccgtgagcatgctctccttgctttcacgcttggagtgaagcagatgatttgctgttgcaacaagatggatgccaccacacccaagtactccaaggcccgttatgatgagattgtgaaggaagtctcttcctacctgaagaaggttggatacaaccctgacaagatccacttcgttcccatctctggtttcgaaggtgacaacatgattgagaggtccaccaaccttgactggtacaagggcccaaccctacttgaggct

SEQ ID NO: 36726 - DNA, 274 bp, Zea mays
cccacaccccccgagctcagcttagctccactccagctccaatcacagtcgtgaccagagcgcgagagctagctagagggccgtgaaaatgccgatcaataggatcgccctggggagccaccaggaggtgtaccacccgggcgccctcaaggcggcgttcgctgagttcatctccaccctcatcttcgtcttcgccggccagggctccggcatggccttcagcaagctgaccggcggcggcccgacgaccccggcgggcctgatcgcggcggcg

SEQ ID NO: 36727 - DNA, 274 bp, Zea mays
atccccttcagcaccctactgaggatcgcccatgaggcagcagagggcctcagttttctgcactcgtacgcgtctcctccgatcatccatggcgacgtgaagagcgccaacatccttcttgatggcaactacatggccaaagtgtcagattttggggcctccatactagcgccgtccgacaaagagcagtatgtcacgatggttcaaggtacctgtggatacctcgaccctgaatacatgcagacatgccaactgactgagaagagtgacgtct

SEQ ID NO: 36728 - DNA, 274 bp, Zea mays
gagataccaaggggcagcaaggttaaatatgaacttgacaagaaaactggactgatcaaggtggaccgtgtgctgtattcatcagttgtttaccctcacaactatggattcattcctcgcacgctttgtgaagacagtgatcctttggatgtactggttataatgcaggagcctgttatcccaggctgtttcctacgtgcgaaggccatcggccttatgccgatgattgatcagggagaggcagatgacaagatcattgcagtgtgcgctgatg

SEQ ID NO: 36729 - DNA, 276 bp, Zea mays
gcgccgtccttcacctccgccgccgaatccgagactctgatctcgggttcaccgcagcgcacagagcacccccgactcccgtcccgatccgcgctctcctctacgacgcttcagtcatggcaggaatggcacccgagggttctcagtttgatgctaagcactatgattctaaaatgcaggagctgctgagcactggtgagactgaggagttcttcacttcatatgatgaagtttttgaaagttttgatgacatgggccttcaagagaatcttttga

SEQ ID NO: 36730 - DNA, 271 bp, Zea mays
cacaactcgtaggcagcgagcgtctctcctcttcctctcccacgcaccgcgccaaggaaggcagagagagatcgccgctcctcttctctccgtcggtggtgcggttgaccgccctcctcgagcgagatctcgctgcagtccctcgagatctggtcacagatctatccgacaagatggtgaagatctgctgcatcggtgctggctatgtcggtggcccaaccatggcggtcattgccctcaagtgcccagacattgaggttgtcgttgttga

SEQ ID NO: 36731 - DNA, 267 bp, Zea mays
gtccgctggctctgcatatcccgcgcccgactcccgttgctgcgtgcggcggcccgactagtcgcgccgcgctgcgcttggcttgattgaaccggccgggatgggggtgttggaagacctcgtggcgagagcgggcgggtgcgcggtcatcgacggcggcttcgccacgcagctagaggcgctcggcgccgacatcaacgacccgctctggagcgccgcttgcctcatcaccaggccgcacctcgtcaaggaggttcatatgcagta

SEQ ID NO: 36732 - DNA, 268 bp, Zea mays
  unsure (1)..(268): unsure at all n locations
cggacgcgtggngcggacgcgtgggcggacgcgtgggcaaaagcagaggggaaagtgccgtcagctctgactctagggcacttggcagacgacccgttcactctttgcaactgcaactgcaacgcaccaagaaactgccggcgatcgatcggggcaaggagataaacatggtgcacgggaagctggaggtcctcctcgtctccgccaagggactcgaggacaccgatttcctcaataacatggaccccttcgtgatccttacctgccg

SEQ ID NO: 36733 - DNA, 269 bp, Zea mays
cccacgcgtccgcccacgcgtccgtgtggtcgtccctcagccgcgtcgcaccgcatcgcattctacgattcgaagctctctctgctcgcagccatggcgaagaattacccaaccgtgagcgccgagtacagcgaggccgtcgagaaggccaggcgcaagctccgcgccctcatcgccgagaagagctgcgcgcccctcatgctccgcctcgcgtggcactccgcggggacgttcgacgtgtcgtcgaggaccggcggtcccttcggtac

SEQ ID NO: 36734 - DNA, 280 bp, Zea mays
catagatgtatcatctcttaagagagaatacaagaaaaaggctatgttagtccatcctgataagaatatgggcaatgataaagctgctgatgcatttaaaaagcttcaaaatgcatatgagattcttcttgattcactgaaacgcaagacatatgatgatgagttgaggagggaagacctcttgaactacttcaggcagagtgtttctcaaaagaatggaagaaacagtactttccaacatgggttcagcccttcagaaggtgttgatgaaggtccttat

SEQ ID NO: 36735 - DNA, 269 bp, Zea mays
ctggatcttaatgatactgtgcttggctgttactataggcttcagaaacacgaaacagatggcaaatgcacaaggtaatagtacaaagattcgctttttctcaaaataagtaagtcaagagatatgaacatttgcagttggttatgtaacttcaacttcacatgggttggaggttaactccactaaatttttttttttggtttcagggttggcggttataacagttatgattgtcacaacttgctttatgtcactcgtcattgtccttt

SEQ ID NO: 36736 - DNA, 263 bp, Zea mays
cgacactgccacaatgaaactaagaattccattaaaattgataaaatgaagaggcatgaacttccacgccatgaagtgcagcaggttgtatgctcattgtgtggcactgaacaggaggtgcgacaagtatgtatcaattgcggtgtttgcatggggaagtacttctgtggtttgtgcaaactcttcgacgatgatgtctctaaacagcagtatcactgcaacggatgtggaatatgtagaatcggagggacggacaatttctt

SEQ ID NO: 36737 - DNA, 268 bp, Zea mays
ggacgcgtggcagcgcacactgaagcaccacttcctgcactcactgtgctagctgctcaaaccgtagatgtaacagtccatcaccaccaatggctcccaaggttgcgctcttccttgccctgagcctcctgtatgctgtcaccgcgcatggctgcgaacccaactgttctggcccagtcgtctcaacgccgccagtcgtgccgactccgtcgtcgcacagccacgggcgctgcccgatcgacgcgctcaagctcaaggtgtgcgccaa

SEQ ID NO: 36738 - DNA, 271 bp, Zea mays
ctcaattttctgaagcattggcccaagcatggtctgagtttaatattgacagtgctgtaattatgatgattgttcagccagaagagagaaatatgtatgatcaatactggctttccaaacatttgcaagactcacatggcataacaactataaggaaaaccttatcgcaggtggaagcggaaggccaggttctcccagatggaactcttcttgtaggtggccagaaagttgctgtagtgtattttagagctggctatgcaccaaatgatta

SEQ ID NO: 36739 - DNA, 266 bp, Zea mays
catttcccccctcctcccgctccccttggctccccaagcctcgacgcccggctagggttttgcctccttcccgccgccgctgtttcagcgagcgagaccgaggggtagagaaagagcggtgcttagccacccatgtcgctgcgtccgagcgagcgggtcgaggtacggcggaaccgctacaaggtggcggttgacgcggaggaggggcggcggcggcgcgaggacaatatggtggagataccgcagagccgccgtgaggagagcct

SEQ ID NO: 36740 - DNA, 268 bp, Zea mays
gcagaaggaggaaggccgcgggaacgaggcgcacgccgcatccatccgcgcctaccgctccaagatcgaggccgagcttgcccgcatctgcgacggcatcctcgcgctcctcgactcccacctcgtcccatccgccggcggcgccgagtccaaggtcttctacctcaagatgaagggtgactaccacaggtaccttgctgagttcaagtcaggtgcagagaggaaggatgctgcggagagcaccatgaatgcctacaaagctgctcag

SEQ ID NO: 36741 - DNA, 266 bp, Zea mays
gtgtggccgtcgtctcccgttcggaacgccaagcccccctccggcgaaatggcccccaagcgaggtggcagggcgccggtgccggccaagaagaagacggataaagtgacgaaccctctgtttgagaagaggccgaagcagttcggcatcggcggcgcgttgccgcccaagaaggacctgcaccggttcgtcaagtggcccaaggtcgtgcgtatccagcgccacgtccgcatcctcaagcagcgcctcaaggtaccaccggcgct

SEQ ID NO: 36742 - DNA, 263 bp, Zea mays
aaaacttccagatgggcagttagtggcaatcaagagatccaaggaagggtccatgcagggtggccttgagttcaagacagaaatagaactcctttccagggttcatcacaataacttggttggactggttggtttctgctttgagaagggcgaaaagatgttagtttacgagttcatacctaatggaacactaagcgaggctttatatggtatgaaaggaatacaattagactggagcaggaggctcaagatagctttggatt

SEQ ID NO: 36743 - DNA, 263 bp, Zea mays
cttggttgctcggcagcagctagcaatggccgccaagggaggtgatgagctgaagctgctgggcgtgtgggacagcccgtacgtcaacagggtccagatcgtgctcaacctcaagggcctcagctacgagtacgtggaggaggacctcctcagcaagagcgagctcctcctcaagtccaacccggtgcacaagaaagtgcccgtgctcatccacgccggcaagccggtcgccgagtcgcaggccatcattcagtacctcgacg

SEQ ID NO: 36744 - DNA, 265 bp, Zea mays
cccacaccgggcacaccccccgagctcagcttagctccactccagctccaatcacagtcgtgaccagagcgcgagagctagctagagggccgtgaaaatgccgatcaataggatcgccctggggagccaccaggaggtgtaccacccgggcgccctcaaggcggcgttcgctgagttcatctccaccctcatcttcgtcttcgccggccagggctccggcatggccttcagcaagctgaccggcggcggcccgacgaccccgacg

SEQ ID NO: 36745 - DNA, 266 bp, Zea mays
cgtgacgcgcaagatcacgcgcgccgtcggccgcatcaagctcggcctgcagaccaaggtcttccagggcaacctctcggcggccagggactgggggttcgcgggggactacgtggaggcaatgtggctcatgctgcagcaggatcagccggccgactacgtcgtcgccaccgaggagtcccacacagtcgaggagttcttgcaggctgccttcggctacgccggcctcaactggaaggatcatgtggtcattgacaagaagtact

SEQ ID NO: 36746 - DNA, 260 bp, Zea mays
gttgaccttgccatgttggctggattacctcctgttgctgtcctttgtgaaattgtggatgatgcagatggttctatggctcgcctaccaaagttgcgtgtctttgctgaaaaggagaacttaaagattatatctattgctgacttgattaggtataggaggaaaagagacaggctaattgaacgcgcttctgttgcacgcttgcctttgaaatggggcaatgtccatgcatattgctacaaatctgttattgatggcat

SEQ ID NO: 36747 - DNA, 261 bp, Zea mays
gcagaaggaggaaggccgcgggaacgaggcgcacgccgcatccatccgcgcctaccgctccaagatcgaggccgagcttgcccgcatctgcgacggcatcctcgcgctcctcgactcccacctcgtcccatccgccggcggcgccgagtccaaggtcttctacctcaagatgaagggtgactaccacaggtaccttgctgagttcaagtcaggtgcagagaggaaggatgctgcggagagcaccatgaatgcctacaaagc

SEQ ID NO: 36748 - DNA, 262 bp, Zea mays
gtcgcgggaggataatgtttacatggccaagctggctgagcaagcagaacgatacgaggaaatggttgagtacatggagaaggtggctaagactgtagatgtggaagagctcaccgttgaggagcggaacctcttatctgttgcctacaagaacgtaattggggcccgccgtgcctcatggcgcattatctcctccatcgagcataaggaggagtcccgtaagaatgaggaacatgttattcagatcaaggagtaccgtggc

SEQ ID NO: 36749 - DNA, 263 bp, Zea mays
ccaacctcccctccctctccacgcccaccgccccgcatccaccccgaaaccctagtggatcgtcgccatggccgcagccgccctccttcgccgcctccccgctgcccgggcccaggcccaggccccggcattcatggcggcgcgaccgatctccgactccacggcagcgctcaccatcgagacatctgtccctttcacctcccacctcgtcgacccaccctcgcgtgatgtcaccaccacccccgctgagctcgtcaccttct

SEQ ID NO: 36750 - DNA, 268 bp, Zea mays
gtctgcgcttcacaagtgcaacatggctggaaagcctgctgttgttactcgtgtcgtggacagcatgactgacaacctcagacctactcgtgcagaggcaactgatgtggcaaatgcagttcttgatgggagtgacgccattctccttggtgctgagactctccgtggtttatatccggtggagactatttcaacagtgggcagaatttgtgccgaggctgagaaggtattcaaccaagatttatactacaagcggactgtgaagtat

SEQ ID NO: 36751 - DNA, 277 bp, Zea mays
gaacgcagcctgcaccaggcgctgaaagccgacaacgccgaggccgaggacggcagcagcggcagcggcaccggcgccggcgccggcgggctgtcgtggcccgcgcggctccgcgtggcggtgggagtagcggcgggtctggagtacctccacgtctcccaccagccgcagatcatgcaccgcgacctcaagcccgccaacatcctgctggacgacgacctggaggcccgcatcgcggacttcgggctcgccaaggcgatgccggactcgcacacgc

SEQ ID NO: 36752 - DNA, 277 bp, Zea mays
tgagtaccttctcactcgcagctacatcactggctaccaagcttccaaggatgacttggctgtctacacttcgttttcggctgctccctcgtccaagtatatcaacgtagcaaggtggtttaaccacattgatgcgctcgtgaggctgagcggaattactgcagagggccaaggtgtgaaggttgaatcctcagcagttccttcagccccaactccagatgttgctgaagcacaggccccagttgctgaggaggacgacgacgatgatgttgacctt

SEQ ID NO: 36753 - DNA, 279 bp, Zea mays
gacaaagagggcatccccccagaccagcagcgtctgatcttcgctggcaagcagctggaggatggccgcaccctagcagactacaacatccagaaggagagcactctccacctggtgctccgcctccgtggtggtcagtaagccatggttcatttaagctgctgctgtacctgggtatctgcgtcgtctggtgccctctggtgtacctctatatggatgtagtcgtctaataaacatctgtggtttgtgtgtcatgaatcgtggttgtggcttcgttgg

SEQ ID NO: 36754 - DNA, 274 bp, Zea mays
cccacgcgtccgcccacgcgtccgcgaatcccgagcacaggccgccgctcgctcgctcgctgcagctacgcacgcacgcgcctgctcctccccttagcttccacaaggctcgactcggccggcggcgatggcgcggaagaagatccgggagtacgactccaagcgcctcctccgggagcacctcaagcgcctcgccggcatcgacctccagatcctctccgcgcaggtcacacagtcaacggatttcactgagcttgcaaaccaggagccgtgg

SEQ ID NO: 36755 - DNA, 268 bp, Zea mays
cacacgcgtccgcacacgcgtccgcacacgcgtccgcggacggtgggcggcggtggatggctcgtggaggccgacgacgcggcgccggcgccggagcccgacttcctcagccggtgcagcctctgtgacaagaggcttgatgggctcgatatctacatgtacagaggggacaaagccttctgcagctcagagtgccgatgccagcagatgctactggacgaccgtgctgccaagtgtggatcatccgaagccctcatcaggtccggcg

SEQ ID NO: 36756 - DNA, 268 bp, Zea mays
ggcaacgtgatcttcacggcgacgcgctggccaacgccggcacggtgacggccggggtggcagagggcgcgtccgtgatccaggccgcgctggaccggatggacgacgggtactgccggtcagcgctggactacctggagctgcagccggacctgtcggcgctggtccgcggggcgcacacgttccggtgccccaacctggggctcaccagctgggtgcgcctgcccatccacgacgcggacttcgggtgggggcggcccgtgttcat

SEQ ID NO: 36757 - DNA, 272 bp, Zea mays
gcctgtggcacttactcttgctggccttccgaggagagaggatgctgaggcctgtgccttctacatgaggtctggcacgtgcgggttcggtgcgcgctgcaagttcgaccaccctcctcgccaggacgatgtctaatacggtgtactccctccgtttcgttttagttgtcgctggatagtacaaaattgaactatccagcgacaacttaaaaaaacggaggaagtatcctgtatcaggatgtggtaccatgcgaatcgcactgttaatgctt

SEQ ID NO: 36758 - DNA, 272 bp, Zea mays
aacaaggacggcgacgtggtgcaggcggacatcatgcagagcaactccggccactgggagcccatgcacgagtcctggggctccatctggaggatcgaccccaaccgcccgctccgtggccccttctccatgcgcatcaccaacgagtccggcaggcagctggtggccaagaacgtcatcccggccaactacatccccgacgtcgactaccgctccttcgtccagtactaatgatcgacctcggtcattgcttgccgcttattaagcgttta

SEQ ID NO: 36759 - DNA, 267 bp, Zea mays
catcaacccagctgtgaccttcgggctgttcttggccaggaagctgtccctgactagggccatcttctacattatcatgcaatgcctgggtgccatctgtggagctggagtggtgaagggcttccagcaggggctttacatgggcaacggcggtggcgccaatgttgtcgcccccgggtacaccaagggggatggccttggcgctgagattgttggcaccttcatcctggtgtacaccgtcttctcggccaccgatgccaagaggaa

SEQ ID NO: 36760 - DNA, 266 bp, Zea mays
ggctgattaaccaagacaaaaacaagtacaacacacccaaatacagatttgttgtgcgatttaccaacaaggacatcactgcacaaatcatatctgctagtatagcgggtgatatggttcttgcttctgcctactctcatgagttgccacgatatggtcttgaagttggtctgaccaactatgcagctgcctactgcactggacttctgttggctcgccgtgtgctaaagatccgtggtttggataaggagtatgagggcaatgtt

SEQ ID NO: 36761 - DNA, 265 bp, Zea mays
ggagagtcgttgcggtgaaacgcctgtacaagaacaactacaaacgggtggagcagttcataaacgaggtagacattttgtcccgcctcctccaccagaacctggtcatcctctatggctgcacatcccgtagcagccgcgacctcatgctcgtgtacgagttcatccccaacggaacagtcgcggaccatgtccacggatcccgtgcgtcggagcgcggcctcacgtggcctcgaaggatgagcatcgccatagaaacagctga

SEQ ID NO: 36762 - DNA, 264 bp, Zea mays
ggcacacctttgtgcattgggcacggaggtggaaggcggtgtgtggtccctggatgcccaaatgcagcatgtggccaaggccgtagcgaccgctgcgtgaggcacggtagcggcaagagatgtaaattcgaagggtgcgcgaagggcgcgcaagggaacaccgatcactgcataaggcacggtgggggaaggcggtgcaggttccaaggatgtacaaagagtgcgcagggacgcacagatttctgcatcaagcatggtgggggc

SEQ ID NO: 36763 - DNA, 264 bp, Zea mays
ctggagaagtgggttactggcgcttatgctggccatactgcggtttgcctgagggactccgatggaaagctttgggttggggaatctggtaatgaaaatgaacagggagaagatgttattgctatcctgccctgggaggaatggtgggagtttgaagtgacaaaggatgactcaaatcctcagattgcactgcttcctttgcatccagatctgcgggcaaaatttaatgagacagcagcttggatttatgcaaaaagcatggag

SEQ ID NO: 36764 - DNA, 265 bp, Zea mays
cccacgcgtccgcccacgcgtccgcccacgcgtccgtgacaatctgtggagaacaactagtgaggaaaagagggacctggaacgactgcaaaagccaatatacaactctgttcgccaagcagcagaagttcatagacaggtgcggaaatatatgaggagcatcataaaacctggaatgttaatggttgatctatgtgagacattggaaaacatggtccggaaacttatcaaggagaatggactgcaagctggcattgcttttccg

SEQ ID NO: 36765 - DNA, 264 bp, Zea mays
gcaacccaacgattttccaaaaggccatttcatcgtccagcgcatatgatgatcagttcaagcagctcatttcggcaggaaaggatgcggagagcgcttactgggaactcgttataaaggatatccaagatgcgtgcaaactttttgagcccatctacgacgagactgatggggctgatgggtatgtctccgtagaggtgtctcctaggttggcaaatgacactcaaggaactgttgaagcggcaaagtggttacacaaagtgg

SEQ ID NO: 36766 - DNA, 267 bp, Zea mays
aggaggagagggagggggagaccatgacaagaggaagcatggatccacaagaaaagagggcaagttggtagatgccaagacggaacggcggctggcgcagaacagagaggctgcgaggaagagcaggctgaggaagaaggcttacgtgcagcagctcgagactagcaggatcaggcttcagcaggtcgagcatgagctccagagagcacggtcacagggcctgttcgttggagggtgcagcgccgccggggacatgagctctggcgc

SEQ ID NO: 36767 - DNA, 266 bp, Zea mays
tgtgaccctccctcagccgcgtcgcgtcgcatcctacgatccaaagctctctctgctcgcagccatggcgaagaactacccgaccgtgagcgccgagtacagcgaggctgtggagaaggccaggcgcaagctccgagccctcatcgccgagaagagctgcgccccgctcatgctccgcctcgcgtggcactccgcggggacgttcgacgtgtcgtcgaggaccggcggtccattcggcacgatgaagcatcagtcggaattggctc

SEQ ID NO: 36768 - DNA, 266 bp, Zea mays
ggagcttgcctcttcgctgatcgactcagagtcgctcctcgtgttcggaaggggttacaactacgccaccgcgctggagggcgccctgaaggtcaaggaggtggcgctgatgcacagcgagggcatgctcgctggcgagatgaagcacgggccgctggccctcgtggacgagaacctccccatcattgtcattgcgacccgcgacgcgtgcttcaggtaatgataaagaagcatgggctcagctttggttaccctttttggtagca

SEQ ID NO: 36769 - DNA, 297 bp, Zea mays
agaagttctgttctacttaaacgggaggtgtatttacttagtgggaatgatgggttctggaaaaagtactgtggggaagatcatgtctgaagtcttgggttattcgttctttgatagtgacaaattagtggagcaagctgttggaatgccttcagttgctcaaatattcaaagttcacagtgaagccttctttcgggataatgagagtagcgtcttgagggatctgtcctccatgcgacgattagttgttgccaccggaggtggtgctgtcatccgaccagttaaactggaatatat

SEQ ID NO: 36770 - DNA, 176 bp, Zea mays
cggacgcgtggggacggcgccacgccgtcccccggcggcgcgggccccgcggcggggaacggccgcctctatcaccgtcgggctggtcaccgcctggtactcctccaacatcggcgtgctcctgctcaacaagtacctccttagcaactacggcttcaagtaccccatcttcctca

SEQ ID NO: 36771 - DNA, 279 bp, Zea mays
cccacgcgtccgcgcgctagctagctagctgttggcttgagatcgatccgtcgactaagctatagctagcagccatgcggagggcgccgtgctgcgacaaggcgagcgtgaagaaggggccgtggtcgccggacgaggacgccaagctcaaggcctacatcgaggagcacggcaccggcggcaactggatcgcgctaccgcacaaaattgggttaaaaaatgcgggaaaactgcagctgagatggccaattactgaggccaatattaacatggtgcttc

SEQ ID NO: 36772 - DNA, 207 bp, Zea mays
actttccccgtgcttctccgccgtcgaggccgcgtcccagtgcgaagagactccgactcagatggccagccgctgggtccggcccgaggtgtacccgctgttcgcggcgacgggcgtggccgtcggcatctgcgggtttcagctcttccggaacatcactggcaacccggaagtcagggtaaacaaggcagggagggcagctggtgt

SEQ ID NO: 36773 - DNA, 285 bp, Zea mays
catggacctcgtccaccgctacgccgccgaccagggcctcttcttcgaccacttcgccaagtccatggtcaagatgggcaacatctcgccgctcaccgggagcgccggcgagatcaggcacaactgcaggagggtcaaccacttctagcttccatggagtggccatccgtgcagtggtgttcttgctttggtttcatttctggatgcatgcgtcatctttcatacttggatttaagtgtgcagtagtcgtaaatgattggaatttctgttttagtttggtgccca

SEQ ID NO: 36774 - DNA, 285 bp, Zea mays
gggacgcgtacgaggccaccaagggcgcccacggggtgtgcatcctgaccgagtgggacgagttcaagaccctggactaccagaagatcttcgacaacatgcagaagcccgccttcgtcttcgacggccgcaacatcgtcgacccggagaagctgagggagatcggcttcatcgtctactccatcggcaagccgctcgacgcctggcttaaggacatgcccgcggtcgcttaattcgtctgaggtgctccattggattggatccggggaaggaagaggaactggt

SEQ ID NO: 36775 - DNA, 283 bp, Zea mays
cccacgcgtccgaagagagcacgctactactcatcactcgccaacgtgcagagatcagggaggcggcacactccatccactgaccgctcatggcgaaggtccacctctacgtcgccgcggcctgcgccgtcgtcctcgcgctcgccgccccggccctcgccggcgaccccgacatgctgcaggacgtctgcccggctgactacgcctccccggtgaagctgaacgggttcgcgtgcaaggcgaacttttcggcggacgacttcttcttcgacgggctgaggaa

SEQ ID NO: 36776 - DNA, 278 bp, Zea mays
cggacgcgtgggtgcggtctattcgagaagcgcagagcaaggaacttcttcatttatgtccaagattacaatgaagctgatccaaggacacatcaaggattagaccttactagggtgacaactagagaacttatagcaaaatatggtttaagtgatgatacagtggatttcattggacatgcacttgctcttcatagagatgatcgctatcttgatgaaccggcacttgatacagtgaaaaggatgaaactatattcagagtctcttgcgcgctttca

SEQ ID NO: 36777 - DNA, 202 bp, Zea mays
gccgaagaacgccttgctgcctgtgacgctgagatcgcgcgagtatgaggtgttcaccgtcgtccctctcaagcacctgccaaacggtgcctcctttgcggcgatcggccttctcggcatgttcaactccggtggcgcggtgagggagctgagattcggtggtgaggatgccgacgtcgagctcagagtgcggggctcgggc

SEQ ID NO: 36778 - DNA, 271 bp, Zea mays
ctctgctcctcacctcgccgccagccatgggcaagatcaagatcggaatcaacggtttcggaaggatcggcaggctcgtggccagggtcgccctgcagagcgaggatgtcgagctcgtcgccgtcaacgaccccttcatcaccacggattacatgacctacatgttcaagtacgacaccgtgcacggccaatggaagcacagcgacatcaccctcaaggactccaagacgcttctcttcggcgagaagccggtcaccgtctttggcatcag

SEQ ID NO: 36779 - DNA, 278 bp, Zea mays
gaataaatcaagtctgtcatggcattcagtaatggatacacagaaacaaagtgttgtcacgaaatttaaggctcaactgttcaagctgatgcagcagttggagagtacaaccccacattttattcgatgcattcaaccaaatagcaaacaacttcccaggttattcgagcatgatcttatcttgcaccagcttaaatgctgtggggtgcttgaagttgtccggatatcaagaacatgctatccaactaggatcactcaccaacagtttgctgaaagat

SEQ ID NO: 36780 - DNA, 278 bp, Zea mays
gccgctcgctctcgccaaggctcaggagctctccaacgggcagccgcagcaggcgcctcctgctccgacggaggatgccgcagcgacgccgccccctccttctgctccggccactgctcccacgccggtggccgtgggtacgaagggcattgccagcccgcacgctaagaagctggctaagcagcacagggtggaccttgccaaggtgactggcaccgggccgtatggtcgaattacgtcggcagatgtcgaggcggctgccggaatccagccgaagt

SEQ ID NO: 36781 - DNA, 275 bp, Zea mays
cttcggatgaaaccctggatacgcaatcttgtcacgaggtccttggctatcctgccaagtttgatcgtgtcaattattggtggttcttcagcagctggccagttgattatcattgcatcgatgatactgtcatttgaactcccttttgctttagttccactccttaaattcaccagcagcaaaacaaagatggggcagcatacaaattcaatattcactgctgtgctgacatggatgatcggctcgtttattgttgtcatcaacacctactttct

SEQ ID NO: 36782 - DNA, 273 bp, Zea mays
cggacgcgtggggcggacgcgtgggcgacaaccctcatccggagaaggaggcgccggtgaacatcggcctcgccgacttcgacctcatggaggagatcaaggccgctgtcgagaagaggtgccccggcgtcgtctcctgctcggacatcctcatctacgcggcccgcgacgcggccagcgtcctcagcaacggccacgtccacttcgccgtccccgccggccgcctggacggcttcgtctccaaggccgaggaggctcaggcggactcccgga

SEQ ID NO: 36783 - DNA, 173 bp, Zea mays
gacgcgtgggctgggaagcggcggctgccgactgctggatcctggagcgcgtgtggaagctgctcgccgacgtcgaggacctccacctgctgatggacccggacgacttcctgcggctcaagggccagctcgctgtacgagcggctccatggtctgacgcgtccttctgtttc

SEQ ID NO: 36784 - DNA, 274 bp, Zea mays
cggacgcgtgggcggacgcgtgggcggacgcgtgggccggggttgataatccaaacatgactccattggggcactgcgtgctcaacctgatcacacacctacagtgcaagatcaatgagaaatcgaggctgtatgaggatgaagcgttgcagaacatatttttgatgaataatctgctgtatattgtgcagaaggtgaaagattcagagctcaagacattgcttggtgataactggattcgcaagcgtcgtggtcagattaggcaatactctac

SEQ ID NO: 36785 - DNA, 282 bp, Zea mays
gcagaaggacccccccacatcatgcagtgcaggtcctgctggtgaggacatgtttcattggcaagcaacaattatgggaccacctgacagtccctatgctggtggtgtttttttagtgaacattcatttcccgccagattaccccttcaaacctccaaaggtttctttcaagacaaaggtcttccatcctaatatcaacagcaatggaagtatatgccttgccattctcaaagagcagtggcaccctgctttgacaatctctaaggtcctgctctccatctg

SEQ ID NO: 36786 - DNA, 268 bp, Zea mays
ttcgttgccaaggatatcaatgctcttgagcagcacatcaagaacctcctcagcccgtccacaccgttcttcttcaacaccctgtacgacccctaccgtgagggtgctgactttgtgcgtggataccccttcagcctcagggagggtgcccacactgctgtctcccacggcctgtggctgaacatccctgactatgatgcacccacccagctggtcaagcctaaggagaggaacgaaaggtacgttgatgctgtcatgacaatcccca

SEQ ID NO: 36787 - DNA, 277 bp, Zea mays
ggacgctgggttcggcatgatgttggtagcatgcactccctccgcattgctcgcgaacattctcatcacgtttgctctacctctgtggaacctctttgctggattcctcatcgttagaccggcaataccaatttggtggaggtggtactactgggcgaaccctgtgtcgtggaccatctatggcgttgttgcgtctcagtttggtgagaacgaaggtgagctttcagttcccggtgggacgcccgtggtggtgaagcagttcttgaaggataatctc

SEQ ID NO: 36788 - DNA, 283 bp, Zea mays
cgccatccatcgcaatggccgccgccgccgccgccgccgccaccgcgctcctcctcctcctgtgcgccgcgtctttcgcgtccgcagccgccgacgacgggttgacgaccttcaaggtgtacttccacgacgtcgtggcggggacgaacccgacggcggtgcgcatcgccaggcggcgtcctccaacacgtcgtccaccaacttcggcgcggtggtggccatcgacgacccgctgacgacgggtcccacgcgcgccgcgggcacggaggtgggccgcgcccag

SEQ ID NO: 36789 - DNA, 279 bp, Zea mays
gtccaagctcccacgactccaccgcgaccgggagagagtcagagagagacgcccgcctccagatcgtccggcggggatggcggcgtcggtctttccagcgctgctgctggccgtagcggcggtgcttctcctaccggtggcagaggccgtgtggctcgagctcccgccgtcggggaccaagtgcgtctccgaggagatccagcccaacgtcgtagtgctcgccgactacgctatcatgtacgagtcccaccccagctcgcatcccaccgtcgccgtcaa

SEQ ID NO: 36790 - DNA, 274 bp, Zea mays
cccacgcgtccgggtcaagctggtgccctacaaccccggctaccaggacgagtcggtgctgtggacggagagccgcgacgtcggccacggcttccgctgcgtccgcatggtcaacaacatctacctcaacttcgacgccttccacggcgacaaggaccacggcggcgtgcgcgacggcaccaacatcgtgctctggaagtggtgcgagggcgacaaccagcgctggaagatcgtcccctggtaaatgtgctgttctgtggctgcactggtcatc

SEQ ID NO: 36791 - DNA, 265 bp, Zea mays
ccacgcgtccggcgcttctggccgacgcgccctgagtccttcagggattccgtggacgcgtactccttggaagcttcgaagctagcgtaccgcctgctggagttcatggcaaggggcgtgggtgccgacccggcgtcgctgcagggcatgttccaagggcaggtgcagggcatgcgggtgaactactacccgccgtgccggcaggcggcggaccaagtgctgggcctgtcgccgcacagcgaccccaacgggctcaccctgctcc

SEQ ID NO: 36792 - DNA, 269 bp, Zea mays
gttccacaacgagaccgggtccaagtacggcggcggcacctccatatcaagacatccaaagcacacagctggacttgcatagatctgtatgtatttgcaacaccatacagagttacatgggattactactttttggggcgagagcacactcttgatatcaaagaatgggaaagcgaggctgagtatgagtatgtgaaacgtaatggtgtgtccatcttcctcatgccatctggaacaattggcacacttcgagcactctgggatgtctt

SEQ ID NO: 36793 - DNA, 275 bp, Zea mays
gcacaatcaaggattccagtccagtcctgccaatggagtgcgttttgggcttggttggccgcgacttcgcggtggtggcggccgacacctccgccgtgcagagtatcctcgtccacaagactgacgaggacaaagtaatggtcctcgactcgcacaagctgttgggcgcttcaggggagcctggtgaccgggtgcagtttacggagttcatacagaagaacctccacctgtaccagttccgcaacaccatcccgctgtcaaccgccgctgccgcc

SEQ ID NO: 36794 - DNA, 269 bp, Zea mays
gagaagtgggtccccgttacgaagctcggccgcctcgtcaaggagaacaggatcaccaagatcgaggagatctacctccactcgctccccgtcaaggagcaccagatcatcgagaccctcgtgccggggctcaaggacgaggtgatgaagatcacgcccgttcagaagcagacccgcgccggacagcgcacgcgcttcaaggcctttgtcgtcgtgggcgactgcgacggccacgtcggcctgggagtcaagtgcgccaaggaggtggc

SEQ ID NO: 36795 - DNA, 129 bp, Zea mays
ccggccgtttaatttactagtgtgttcgtcctatatgtttagcagcagcaggtgtattgtgcgggtatgtaatggtattgcaactatattgggtgtaaaaccataataaatgtgggcaaatatgcaagg

SEQ ID NO: 36796 - DNA, 266 bp, Zea mays
gataaattggcagctgcaaataagttctttagacaaaaaagaaatgcagctggtgtgttgggattctccagtagacaaaagtgtactgtggctttgcggatgttggcttatggaggtccagcagattttctagatgaaggtctgcgtatgggagaaagcacagtccttcaaactatcaaggagtttgctaaaacagtccttcaaacatttttctgcttagcttgtttcttccctcctctggatggcagtagtgattcctcagacgt

SEQ ID NO: 36797 - DNA, 260 bp, Zea mays
cccacgcgtccgcggacggtgggctgcaggctactgatgcaagtgaaatcagccttgatgagatcaaggatcgggctcgctaggcatcatcatgatcatgcatcatggacttggcctactactgtggatttgtatgccattatagacttggtgctgtgaaagactgcttgatgatttgcgggtttgttgctgtgtaaaaaaaggtcccatggctcccagaagaccatgaaggttcggatctatcatgtaattccttgtta

SEQ ID NO: 36798 - DNA, 266 bp, Zea mays
cgttgtcttatggtctgtccctgaacaattcctttgttttctctatccaaaaccagtgccagctatcaaaccagataatctctgtggaaagggtgaaccagtacatggacataccaagtgaagcagcagaggtcattgaagaaaatcgaccatcaccaaactggccccaagttggtagggtggagcttagagatctgaagatcagatacagggaagatgctccccttgtactgcatggaatcacatgcactttcgaaggcggagat

SEQ ID NO: 36799 - DNA, 260 bp, Zea mays
gtgacaataaattcaagcacataatgagggaactacagggggctatacttgttggttcagtattccagataatattaggatacactggtcttatgtcactgtttctgaggttaataaatccagtagttgtggcaccaactattgctgcagtgggtttggcattttttagttatggtttccctcaggctggcagctgtgtagaaatcagcatgcccctcattctgttggttcttctgtgcactctgtacatgggaaaaata

SEQ ID NO: 36800 - DNA, 280 bp, Zea mays
ggcttgcttgattgttccaggtattcgcagtcgaccgtgtcctcggagcacgatgaaggttgttgctgcctacctgaggtgctgtcctcgctgggaatgccagcccctccgctgaggatttgactggcattctggagtcagttggctgtgaagttgacaatgaaaggatggaactgctgctgtcccaactgagcggtaaggacatcaccgagctcattgccgcgggcagagagaagtttgcttcagtcccatgtggcggcggcggtgtggctgttgcggc

SEQ ID NO: 36801 - DNA, 282 bp, Zea mays
gtctgcgcttcacaagtgcaacatggctggaaagcctgctgttgttactcgtgtcgtggacagcatgactgacaacctcagacctactcgtgcagaggcaactgatgtggcaaatgcagttcttgatgggagtgacgccattctccttggtgctgagactctccgtggtttatatccggtggagactatttcaacagtgggcagaatttgtgccgaggctgagaaggtattcaaccaagatttatactacaagcggactgtgaagtatgtgggagaacctat

SEQ ID NO: 36802 - DNA, 285 bp, Zea mays
gttgctatcaagaaggttttgcaggacaagcgctacaagaacagggagctgcaaatcatgcgatccatggatcactgcaatgctgtttccttgaagcattgcctcttctccaccacaagcagagatgaactttttcttaacttagtgatggagtttgttcctgagtcactatatcgtgtgctgaagcactacagcaatatgaaccagaggatgccgcttatttatgttaaattatatacctaccagatatttcgaggtttagcctatattcagacagtacctggt

SEQ ID NO: 36803 - DNA, 262 bp, Zea mays
gaaaatgaacatgtccctggttctgtgcgtacctgtctcggcgtgcctggcttccctcgccgccgcgggctggtctcccggcaccgccacattctacggcggagccgacggctcaggcaccatgggcggcgcgtgcgggtacgacaacctgtacaacgccgggtacggcgtgaacaacgcggcgctgagcgcgacgctgttcaacgacggcgcgtcgtgcgggcagtgctacctcatcacctgcgacacgtcgcgtctgggc

SEQ ID NO: 36804 - DNA, 269 bp, Zea mays
cggacgcgtggccacgcaggaccacgccgccgccgccatcgcgcgcgactcggccgccgtgttcgcctggaacggggagacccttgaggagtactggtggtgcaccgagcgctgccttgactggggcgaggcgggcggccccgacctcatcgtcgacgacggcggcgacgccacgctgctcatccacgagggtgtcaaggccgaggaggagtacgagaagaccggcaagatccccgacccggagtccaccgacaacgctgagttcaaga

SEQ ID NO: 36805 - DNA, 275 bp, Zea mays
cgccacgcgtccgcggacgcgtgggtgattattatctatctagcttgtggtggtggttgaacaataataagcgacgccgagctggctgccatacataggtattgtgtggtgtgtgtgagagagagagaaacagagttcttcagtttgctatctctctctgcatgtttggcgtcagtctttgtgctcatgtacgtacgtgtgtctacctgcatgttggttgatccgattgcatctgctgtaaccatatattaattggtccacgatgatatgatttg

SEQ ID NO: 36806 - DNA, 131 bp, Zea mays
gttgaagaagggcgtgcacattgtggtggcacgcctggtcggctcaaggatttgcttgccaagaagaagatgaaccttgacaactgcaggtacttaaccttagatgaagcggataggctggttgacctagg

SEQ ID NO: 36807 - DNA, 266 bp, Zea mays
ccacctgctgcgcacctgcaagcctcgagtggagctcttccacggccgcggtggagatggcggcgaatctggaggacgtgccgtcactggatctgatgcacgagctgctccgccgcatgaagtgcagctccaagcccgacaagcgcctcatcctcatcggtccacctggctctggaaagggaactcagtctcctattatcaaggatgaatattgcttgtgccatttagccactggtgacatgctgagggctgctgtggcggccaag

SEQ ID NO: 36808 - DNA, 265 bp, Zea mays
ggaaaagcctgtctctcttaaacccgagcacattagagatgacaaagtcaaggttctgcaatcggtggagcctataaagcatgaagaggtagtcatcggacaatatgatggctacaaggatgaccctactgtgccagatgactccaacacccctacttttgcatctgttgtactgagggtacacaacgaaagatgggagggggttccattcatcctcaaagctggcaaagcacttaattcgaggagagcagagatacgtgtacag

SEQ ID NO: 36809 - DNA, 268 bp, Zea mays
ggacgagctcaagctcatcgctaaaatgattgaatgggatccatggggtgttcccgatgactacgaatgtgaggtgattgaagacgacaccccaattcctaagcatgttcctcagcaccggcctgttgctcttcctgaggagttcttcaaggcactagatgctgtcaaatctgatcctgctcttcaaggcgatgctcctcctcaagtgaaggcgtaaggatggctgttcctggctaacgtcatttcacattttgccgcggtgggtagg

SEQ ID NO: 36810 - DNA, 275 bp, Zea mays
gcagaatgttctatggacctggtggaccatacgccctattcgccggcaaagacgccagcagagccctagcgaagatgtccttcgagccacaggatctgaccggcgacatcactggcctaggcccgtttgagctcgatgccctgcaggactgggaatacaagttcatgagcaagtacgtgaaggtgggtactgtcacgaagaacgtcaccgttgaagaccgcagcagcgccgcaagcacagcccctggaaccagtgaggccgccaccgaggccgag

SEQ ID NO: 36811 - DNA, 266 bp, Zea mays
ggaccgtggtaactcgaaaccttttcttgtgctctgtctgtgtgtttccaaagcaaacgaaagaggtcgaggatgtcttgcagctgcggatcaagctgcaactgcggatcaagctgcaactgcggcaagatgtaccctgacctggaggagaagagcggcgggggcgctcaggccagcgccgccgccgtcgtcctcggcgttgcccctgagacgaagaaggcggcgcagttcgaggcggcgggcgagtctggcgaggccgcccacgg

SEQ ID NO: 36812 - DNA, 263 bp, Zea mays
ggaccggcggacgcgtgggcggacgcgtggcgcggacaagcccgtggagcacagcggccggacggagtggatcaagaaagcgctcgtgttctaccacggcaagccgccgcgcggggtcaagacggagtggatcatgcacgagtaccgcctcgccggcgacgcgaagaagtccggcgccggcacgctcaggctggatgactgggtgctgtgccgcctgtacaacaagaagaacgagtgggagaagatgcagcagcagaaggaga

SEQ ID NO: 36813 - DNA, 273 bp, Zea mays
cacgacctggacgagacgcgtccggttccatttccccatctcccagatccaattcgcgaagtctccctcctctagcggccatggcgctctctgtggagaagacctcgtctggacgggagtacaaggtcaaggatctctcgcaggcggacttcggccgcctcgagattgagctggccgaggtcgaaatgcccggcctcatggcgtgccgcgccgagttcggcccgtccaagcccttcgccggcgctaggatctcggggtctctccacatgacca

SEQ ID NO: 36814 - DNA, 270 bp, Zea mays
cggacgcgtggcgagacgcgtgggctcgccggcgacgcgcggagtaggtgcaacagaaagtgctcgaggcggacgcggacctgcggctgcacagacatgggtgatcacgaggcgcgcggtgatgacttcgagaagaaggcggagaagaagctctcgggctggggcctcttcggctccaagtacgaggacgccgccgacctcttcgacaaggctgcgaactccttcaagctcgccaagaactggagcagagctgcatcagtttacatcaag

SEQ ID NO: 36815 - DNA, 272 bp, Zea mays
aaattactgaacaccgaatacagccaaacgatcagtttgttatatttgcttccgatggtctatgggagcacctcagcaatcaggaagctgttgaccttgtccaaagtagtccccgtaatggaatcgctcggagactagtgaaagccgcgatgcaagaagctgccaagaagagggagatgagatactcagacctcaagaagatcgaccgtggcgtgaggaggcatttccacgacgatataaccgtcgtcgtggtgttcctcgactcggatgcc

SEQ ID NO: 36816 - DNA, 224 bp, Zea mays
cccacgcgtccgcgctgggcaaacagcgtacctcatcaacaacgtcaacgacttcagtgacggattctacaagtttgttcctcgccctgtttactggcccatgttcatcatcgcgacgctggcggcgatcgtcgcaagctaatccttgatatccgcgacgttctcagtcatcaagcaatccgttgtcctggactacttcccgcgcgttaaggtggtgcacacgt

SEQ ID NO: 36817 - DNA, 192 bp, Zea mays
tggtcgtccctcagccgcgtcgcaccgcatcgcattctacgattcgaagctctctctgctcgcagccatggcgaagaattacccaaccgtgagcgccgagtacagcgaggccgtcgagaaggccaggcgcaactccgcgccctcatcgccgagaagagctgcgcgcccctcatgctccgcctcgcgtggcat

SEQ ID NO: 36818 - DNA, 178 bp, Zea mays
cggacgcgtgggtttaagactatgttccatgagtattttatatagtgatgtctttttttgatcaaaaaactgccttctaggcttgtgcctttcgactatggtttggagattgttcccatcttaatgaagtccaatcatctgaaaaaaaaaaaaaaaaaaaaaaaaaaaaaaaataaaa

SEQ ID NO: 36819 - DNA, 266 bp, Zea mays
cggacgcgtggcgagacgcgtggggtgaggatagagggttacctgaggaggcagtgatggcagccacgattcagtacaaccggagcaacccggcggtgaagcggatcctgcaggaggtcaaggagatgcagtccaacccctcacccgacttcatgtccctccccctcgaggaggacatcttcgagtggcaatttgctatccttggtccgagagacagcgagtttgagggtggaatttatcatggcaggatccagctaccttcggat

SEQ ID NO: 36820 - DNA, 267 bp, Zea mays
ttcttctctgaattccagtccaagggccggaataccgtcagacggagtgggagacggggggaaaaaagatggtgaagctcgcatttggaagctttcgcgactctttgagcgccgcgtcgctcaaggcctatgtggccgagttcattgccacgctgctcttcgtgttcgccggcgtcgggtccgccattgcctactcgcaattgacgaagggcggcgctctggaccccgccggcctggtggccatcgccatcgcccatgcgttcgcgc

SEQ ID NO: 36821 - DNA, 249 bp, Zea mays
acgcaccgcacaggtccgggacctggcgagtggctgagtatcagctgattgatatttctgaggctggacactgacagccttactacttcagatggcaacactaaggatgatcttagactcccaactgatgagactcttgtggcccagattaaggaagggttcgaaagcgggaaggatcttgttgtgactgtccagtctgcgatgggggaggagcagatctgcgcgttgaaggatgttggccccaagtaa

SEQ ID NO: 36822 - DNA, 185 bp, Zea mays
gcgcctgatgcgggacttcaagcggttgcagcaggacccgcccgccggcatcagcggcgcgccgcacgacaacaacatcatgctctggaacgccgtcatattcgggccggatgacacgccgtgggacggaggcacgttcaagctgactctgcaatttacagaagattaccccaacaaacctccga

SEQ ID NO: 36823 - DNA, 257 bp, Zea mays
ggaccaggtaagcagcagcaggaaccctagcaccgccgcatccgcagccatgggtatcgacctcgttgccggtgggaggaacaagaagaccaagcgcacagcgccgaagtccggcgatgtttatctcaagctccttgtcaagctctaccgtttcttggtcaggaggaccaagagcaacttcaatgctgtcattctcaagaggctcttcatgagcaaaaccaatcgcccaccaatctccatgcgccgccttgtcaagt

SEQ ID NO: 36824 - DNA, 261 bp, Zea mays
caccgctcctgagtcctgtccaccctgccaccgccgacgccgcgccgccgcagcaattgtcaccgtcgctatggcccgtatcaaggtgcacgagctccgggggaagagcaagacggacctgcaggcgcactcaaggagctgaagtctgagctctccctcctccgcgtaccaaggtcaccggcggcgcacccaacaagctctccaagatcaaggtggtgcgcacctcgatcgcgcgcgtgctcacagtgatctcgcagaagc

SEQ ID NO: 36825 - DNA, 260 bp, Zea mays
cggacgcgtggcggacgcgtgggcgatcccagcatccgagagagctccacaggccaggtccccaacgccgcggcgctagccccacctctcccccgcccggtagtagcctcgccgccgttgccgagatggggttcgtgtccttcgtcgggagggtgctcttcgtcgccgctttcctcctctccgcctaccaggagtttaatgaattcggtgctgatggtggaccagcagctaaggcccttcggcccaaattcaacgtgttt

SEQ ID NO: 36826 - DNA, 262 bp, Zea mays
tcaacacagcacaggcagctcgagagagagagagagagaaagatgtcgtggttcgggcaccaccaccacaaccagccggctcccccggcgtcgggccccaaccaggtgttcaagatcttctgccgcgccaacgagaactactgcctggccgtccgcgacgcgccgtcgtgctggccccggtcaaccccaaggacgaccaccagcactggtacaaggacatgcgcttcagcacccgggtcaaggacgaggaaggcatgccggc

SEQ ID NO: 36827 - DNA, 296 bp, Zea mays
cccacgcgtccgaaagcttttgcaatgcaactgtcgctagaggagacattaatgaccacccagactgtatacttccaagtggcgttgctatatacatcatcctctggtgaaaggcgtatcagggtccacacagcagctgcacctgtggtcacagatcttagtgaaatgtatcgtcaagcagatactggtgccattgtgtcattgttgggtagaattgcgattgaaaattcactgtctgataagctggacagtgtccggcagcagttacagttgaagctcgttaaaagtttgaagga

SEQ ID NO: 36828 - DNA, 292 bp, Zea mays
tgactttaccaggttagaagaaaagatttttggctgctctcaacagtaaaaaaggttcttaaggtgttcattccatccctttgccatgatgctgatggccttatatttcagggctgggacgatccatatgtaactcgtactcatgaaggtctcctgaagtggaaataccctgagatgaattctgtggactttctgttcgagcttacgaatgataatcgtcaactggttttcctttatgagagaggaaaaaagaaactcatggatggtgcccggatagcatttactgacgatg

SEQ ID NO: 36829 - DNA, 297 bp, Zea mays
  unsure (1)..(297): unsure at all n locations
ggagtcattgtctttgtccgcgtggacgcggctgacttgcgaacccaccggaccaaccaggacttggagcgtgcggcgtcggagttcgccggcggtgaggagcagaagaggaagggaaccaaagatgggctgctccatctcggggctcaacgcgctctacgatgcggccacgggcggcggcgacgtctggatcaacgagcgccgcttccgcgtccttcgccagatcggcgnaggcgggttcgccttcgtctacctcgtcagagagcaccatgccgcctccgatgccgcgttcgctaa

SEQ ID NO: 36830 - DNA, 296 bp, Zea mays
tggttgcgtacgcgcttaagagcgaaggaggctatgtgtgggcttgcaagaactacgatggagatgtgcagagtgatttcttagctcaaggttttggatctttgggtttgatgacatcagtgttggtgtgccctgatggaaaaaccatcgaagctgaagctgcccatggcacggttacccgtcatttccgtgtccaccagaaaggaggcgaaaccagcacgaacagcattgcttcgatctttgcatggacaagaggacttgcccacagggcaaagctcgacgacaacgctagacta

SEQ ID NO: 36831 - DNA, 297 bp, Zea mays
aagacagggatcgccatgtcggactcggaggagcaccacttcgaatcgaaggccgacgctggggcgtccaagacctacccgcagcaggctggcaccgtccgtaagaacggcttcatcgtcatcaagaaccgtccctgcaaggttgtggaggtttctacctccaagactggtaagcatggccacgccaaatgccactttgtcgccatagacatattcaatgggaaaaagcttgaagatattgttccttcatcacacaactgtgacattccgcatgtgaaccgtactgagtatcagctg

SEQ ID NO: 36832 - DNA, 288 bp, Zea mays
cacagatgaccaggcttttggatatcttggaagattatcttatgtatagaggttatcagtattgtcgaattgacggaaatacaggtggagaagatcgtgatgcatccattgaagccttcaataagccaggaagtgaaaagtttgttttcttactttcaactagggcaggtggccttggtatcaacttggccactgctgatgttgtggttctttatgacagcgattggaatccacaagctgatctgcaagctcaggaccgtgcacataggataggtctaaagaaagaag

SEQ ID NO: 36833 - DNA, 288 bp, Zea mays
cccacgcgtccgggcgagaatgatggctgctaacttgtacttctctcagattgaagatttaatgtttgagctgtctatgtggcgctgcagtgatgaacttcggatccgtgcagatgaactacatcgctcttcaagaaaagctgcaaagcactatatagaattctggaagcaagttccgccaaatgaaccatatcgtgtcatacttggtaatgtcagggataaattgtactacacacgtgaacgttctcgtcacctattgacatctggaatttctgagattctagagga

SEQ ID NO: 36834 - DNA, 289 bp, Zea mays
gttttagatatgaatgctcactttggtggatttaatgctgctttactgaaggcaggaaagtctgtatgggtgatgaatgttgttcctacagatgccccaaactatctaccgctgatatttgaccggggttttatcggggttcaacatgactggtgtgatgcatttccaacttacccaagaacatatgatatggtgcacgctgatggttttctatcacttcagaagaaccacaagcatagatgttctactcttgacatattcttggaagttgaccgcatcctacgaccag

SEQ ID NO: 36835 - DNA, 289 bp, Zea mays
tccacgacctgcagctccagatccggcagaagacccacaacctcaaccgtctcgaggcccagcgcaatgacctcaactcccgagttagaatgctcagggaagagttgcagttgcttcaagagcctggctcatatgttggtgaggtggtgaaggtcatggggaaatcaaaggttctggtgaaggtacaccccgaaggcaaatatgttgttgatatagataagagcattgatatcacaaagatcacaccttcaacaagagtcgctcttcgtaatgatagctatatgctcca

SEQ ID NO: 36836 - DNA, 282 bp, Zea mays
aactacgcgtccgcggacgcgtgggcgaggtgttccgatggcggtcctggccatggacgacgcgacgcgcgtgggcaagcggcccttcttcacgacacacgaggagctcctggaggaggagtactacgacgagcaggcgccggagaagaagcgccgtctgacggcggagcaggtgcagctgctggagcggacttcgaggaagagaacaagctggagcctgagcgcaagaccgagctggctcgccgcctggggatggcgccccgcaggtggccgtgtggttcc

SEQ ID NO: 36837 - DNA, 287 bp, Zea mays
  unsure (1)..(287): unsure at all n locations
ggggtacgagctcctgggcatggagaacctgtgcgactacttcccggggctcgccgccctcgacccgcanggcgtgggcgcacgatgcgccgagctcatgccgcgggtgaaccggttcgtgcacggcgtcatccaggagcaccgtgccaaggcggtcgccggtggagacgcgcgtgacttcgtcgacatcttgctctcactgcaggagagtgaggggctcgccgacgccgacatagcctctgtgctctgggagatgatcttcagaggaacggacgctatggcggtgc

SEQ ID NO: 36838 - DNA, 285 bp, Zea mays
ctgttggcttgctctctaccatgaaccacaacattgcttacaatttgacatggagaaaatttactgatccaacacgcatgacatccaattccgtacaagaggaattaggacatagccttttgtcctctattaagtacgcgtacaaggttgaccaaagggactcaagtataagacctacacgagggtacgcttttatgtcgacttctcaagttggaggccttgcaccagagagcaaatattcacgatttcttaggcaggaatttgatcttcgagtggctttgccct

SEQ ID NO: 36839 - DNA, 281 bp, Zea mays
cggacgcgtggggccaggtacgcgcaggactacgcggcgaacgcgccggggactgccggctggtgcactcgggcgggccgttcggcgagaacatcttctggggctcggcggggcgggcgtggagcgccgccgacgcgctgcggtcgtgggtggacgagaagaggaactaccacctgagcagcaacacctgcgaccccggcaaggtgtgcggccactacacgcaggtggtgtggcgcaggtccacccgcatcggctgcgcgcgcgtcgtctgcgccgacaac

SEQ ID NO: 36840 - DNA, 278 bp, Zea mays
cccaagcacgtccggttcctccccgcgtcaagctcggcatccagggattcgaggtgtccaagctggggttcgggtgcatggggctgacgggcgcgtacaactccccgctggacgacgaggccggcatcgccgtcatcgcgcacgctttcagccgcggagtcaccttgttcgacacctccgacgtatacgggcccctcaccaacgaaatcctcctcggcaaggcgctgaagcagctgccgcgggagcaggtgcaggtggccaccaagttcgggatacgg

SEQ ID NO: 36841 - DNA, 286 bp, Zea mays
  unsure (1)..(286): unsure at all n locations
cacacgcgtccgcggacngcgtgggcctcgggcgagccgtgcaagcgcatccgggaggcggagtgcaagcccagggtgtcgaagctgcacgtgcacgccgacccggccgacactcagcctggtggtcaaggacgggtaccagtggcgcaagtacgggcagaaggtcaccaaggacaacccctgcccgcgggcctacttccgctgctccttcgccncggcctgcccagtcaagaagaaggtgcagcgcacgtccgacgaccccaccatcctggtcgccacgtacgag

SEQ ID NO: 36842 - DNA, 273 bp, Zea mays
cccacgcgtccgcccacgcgtccggcttccctttcgttcctcctcgccccagcgacgcggcctcccgtagaccgagcaaggcaacccaccactgagaggcacgcagaggagcaggaagccggagaccaagatgtcgtcggtgttcagcggcgatgagacggccccctttttcggtttcctcggcgccgccgccgccctcgtcttctcatgcatgggcgcacgtacgggaccgcgaagagcggcgtcggcgtggcgtcgatgggtgtgatgcgg

SEQ ID NO: 36843 - DNA, 284 bp, Zea mays
cccacgcgtccgcaagctgccccgcagcaacgaacacgaaccttggcagaacgaagctgaagtagttcgttgtgaacccagtatggcaaacgcgccgaggatcctggccctcggcctgctgctagcgctcctgtgcgctgccgccggcccggccgccgcgcagaactgcggctgccagcctaacttctgctgcagcaagttcggctactgcggcacgaccgacgactactgcggcgacgggtgccagtcgggcccgtgacgctcgggcggcagccgcggcggcg

SEQ ID NO: 36844 - DNA, 227 bp, Zea mays
cggacggtggggatgaacctgcggcggcagaccccgctggccgcgatccacgcggcgctggcgtcggcggacacatggtggcggtgcacggcgcggccgtcacccacttcctcttcatgcgcccgggctccgtgctcctgcagatcgtgcccgtgggcctggactgggcggccgacgccttctacggcaagcccgcgcagagctcggcctcgactacctcgagtaca

SEQ ID NO: 36845 - DNA, 282 bp, Zea mays
cctaggttgactgtgatgagcacaagagtgtatgcagcaagtatggagtttctgggtaccccacaattcaatggtttcccaaaggttccctggagccaaagaagtatgagggtcaacgttctgtggaagcccttgcagaatttgttaacagcgaacaggtaccaatgtcaagatagctgccattccttcaagcgtcgtggttctgacttcagagacctttgactcaattgtccttgatgaaaccaaagatgtccttgttgagttttatgcgccatggtgtgg

SEQ ID NO: 36846 - DNA, 286 bp, Zea mays
gtcacctgcacacctacaggttctgtgacaatgtgtggaccttcatcttgacagacgcaagcttcaagaacgaggaggccacggagcaggtgggcaaggtgaagattgtggcatgtgattccaaattgctcggacaataggcctgtgtaccctcgaggtcaaggaaggaagcttttaagtgcggcgaggcggggtctgtctgcgcgtcagctgtacacgcctaggctaccgcgaggcggggtctgtctgcgtcactgtacacgcctaggctaccgcccgaacggca

SEQ ID NO: 36847 - DNA, 204 bp, Zea mays
ccatcctctcctgtgggcgctccctctccccggcccccaaatcaccgcgcctccctcgccacgcctcacagggccggttgcgtaggagaaaggagaaaggaaggaggggaggcggtcgtcgggcgagatgagcgactccttctgccccgactgcaagaagcatacggaggtggcgttcgaccactcggcgggggacatggtgtg

SEQ ID NO: 36848 - DNA, 237 bp, Zea mays
cagacgcgtggccgctgcccatcgccgtccccgaccgcagcgcaggtgaggatccaaccccaacaaaattccaggcgacggactgaggatgagtgaagaggataaggctgctgcttctgctgagcagcctaagagggcccctaagctcaatgaaaggatcctctcctctctgtccaggaggtccgtagctgctcatccatggcatgatctcgagatcggtcctggtgctcctgctgt

SEQ ID NO: 36849 - DNA, 280 bp, Zea mays
ctggaaaccctagccgccatatctcacgatccactcgagcaccaagccgagggaaggtgaggagcgatggcgcgcggcgtggtgtcggcgaagggcggcgcggtcgcgggcaagaagaaggggtcggtttccttcacgatcgactgcaccaagccagtggaggacaagatcatggaggtcgcctcgctcgagaagttcctgcaggagcgcatcaaggtcgccggcggcaaggctggcaacctcggcgactccgtcaccatctctcgcgagaagaccaagg

SEQ ID NO: 36850 - DNA, 279 bp, Zea mays
cccacgcgtccgggttgcttggctgatggagagtttgcggttaagaaactgaaagatggtggtgggcagggggaacgcgagttccatgctgaggtggatattatcagtcgtgtgcatcatcgccatctagtatctcttgtagggtattgcatttcagatgagcagagattgcttgtctatgattttgtgcccaacaacacgcttcactaccatcttcatggacttggagtaccagtcttggaatggccatctagggttaaaattgcggctggttcagca

SEQ ID NO: 36851 - DNA, 279 bp, Zea mays
gcacgatctggcacaaaagagttcatggaggcactggctgctggtgccgacgtgtccatgattggtcagtttggtgtcggtttctactcggcataccttgttgctgagagggttgtcgtgaccaccaagcacaacgatgatgagcagtatgtatgggagtctcaggccggtggctccttcactgtcacacgtgatacctctggggagcaacttggcaggggtacaaagatgaccctttacctcaaggatgatcagttagagtatcttgaggagcgccgg

SEQ ID NO: 36852 - DNA, 281 bp, Zea mays
gttgattttgaaaaaacagtagagcattggcaacaggacaaatggactggttgtttccctgtcaagtggcacattgtgaaggatgttccaaacagcttgctgaagcacatcattcttgagaacaatgaaaacaagccagtgacgaacagcagagatacacatgaggtgaagcttgagcaaggccttcaagtgcttaagattttcaaggatcatgtctgcaagacatccatactggatgacttcggcttttatgataatcgtgagaagatgatgcaagagag

SEQ ID NO: 36853 - DNA, 278 bp, Zea mays
gctcccgcaactgccgccgccactcccacgcccgcagccatgccgcccaagctcgacccgtcgcaggtggtggaggtgttcgtccgtgtgaccggcggcgaggtcggcgcacgtcttcgctggcccccaagatcggcccgctcggtctttcccccaagaagatcggagaggacatcgccaaggagacggccaaggactggataggcctccgcgtcaccgtcaagctcaccgtccagaaccggctagccaaggtctccgtcgtcccctccgccgcggcg

SEQ ID NO: 36854 - DNA, 273 bp, Zea mays
ccggagtccgagatcctcgagcgcgtgtccaagttcttcagcgacattggggaggtgaacccgtcagaaggtccgatgaggcaaggcgagcccgatgactacgacgactacgagagggagcttcctgcgcggaagggaggcgcctgcatccctcccccgccgaatctgcttctgaaccctgagacagggatgcacgccgatggcagcgtcgacagtaagccagggtccagcggccggttgggtctcggagcatccgccgatccgaacgaggtg

SEQ ID NO: 36855 - DNA, 274 bp, Zea mays
gctatgatgagaaacaatatagtgtgcctcggtagctcactggcatgtccttccgggttcccaccgtggatgtgtcagttgttgacctcactgtcagaatcgagaagggggcctcttacgaggaaatcaagaaagctattaaggctgcttctgagggcctactcaagggtattatgggctacgtggaggaggatctggtttccaccgacttcaccggtgacagcaggtcgagcatcttcgacgccaaggccgggattgccctgaacgaccactt

SEQ ID NO: 36856 - DNA, 194 bp, Zea mays
ccgagatcttcccggcgcggctgcggtccacatgccacggcatctccgccgcctcggggaaggccggcgccatcatcggggcctttgggttcctgtacgcggcgcagaaccaggacaagagcaaggcggacgccgggtaccccgcgggcatcggcgtgcgcaattcgctcttcgtcctcgctgcctcaaacttg

SEQ ID NO: 36857 - DNA, 221 bp, Zea mays
gaggagatcccgtggggtgaggctggtgctgagtatgtcgtggagtccaccggtgtcttcactgacaaggacaaggctgctgcacatctgaagggtggtgccaagaaggttgttatctctgccccaagcaaagatgcgcccatgtttgttgttggtgtcaatgaggacaagtacacctccgatgttaacattgtttccaatgctagctgcaccacaaactg

SEQ ID NO: 36858 - DNA, 273 bp, Zea mays
ctagttctagatcgcgagcggccgtcgcgccgccgtttgccgtcgaaccgccgcgggccgtcgagttgaagaggtgaggcaaagggaaggagagcggcaaggagaggaaaggacgccatggcgaccgcttcagtgactttcaagtcacgggaggatcaccggaagcagctcgagcttgaggaggcgcgcaaggcggggcttgcgcctgcggaggtcgatgaggatgggaacgagatcaatccccatatcccccagtacatgtcctcggcccca

SEQ ID NO: 36859 - DNA, 263 bp, Zea mays
gcggacacggaggcgaaggaggaggagcagcagcagcaggcggcgccgaggagcggcatcccactcagtgcttgcaaccatggctaggggattgaagaagcacttgaagaggctcaatgcgcccaagcattggatgctcgacaagcttggcggagcttttgctcccaagccatcttctggacctcacaagtccagggagtgccttcctctgatcctcatcatcaggaacaggctcaagtatgctctgaactaccgtgtagtca

SEQ ID NO: 36860 - DNA, 267 bp, Zea mays
ggttggcttctcctccccctccggttcgggttcgggttcgtgaggttctccggggttcggtttcgtgggtgagcggatcgagatggcggcgtcggatgttgagtaccgctgcttcgtcggcggcctcgcctgggccacggacgaccactccctccacaacgccttcagcacctacggcgaggtcctcgagtccaagatcatcctcgatcgggagacgcagaggtcccgcggcttcggcttcgtcaccttctccacggaggaggcgat

SEQ ID NO: 36861 - DNA, 204 bp, Zea mays
cgcagactcaaagatgatgtatgaggaggcaagccaggtggctaatgatgcagtaagcagcataagaacagtggcctcattctcagctgaagagaaggtcatggatttgtacaagaagaaatgtgaaggtcccctaagaacaggaatcaggacagggattataagtggcatcggttttggagtttcctttttcttgctgtttgg

SEQ ID NO: 36862 - DNA, 269 bp, Zea mays
cacaccccccgagctcagcttagctccactccagctccaatcacagtcgtgaccagagcgcgagagctagctagagggccgtgaaaatgccgatcaataggatcgccctggggagccaccaggaggtgtaccacccgggcgccctcaaggcggcgttcgctgagttcatctccaccctcatcttcgtcttcgccggccagggctccggcatggccttcagcaagctgaccggcggcggcccgacgaccccggcgggcctgatcgcggcg

SEQ ID NO: 36863 - DNA, 214 bp, Zea mays
cttaggatttaacttagaataaagcctgatgggggtaacatcacccatcgatccgcagtccatgccggttgatgcatgggtctgctggatccgaggatgaacacagcactaacaactgacacagagcgaccttcaatcaaaaacacagatgggcaacaacaaacacgagacgaacgaagataaacactctggactagggtaaacaacacggtag

SEQ ID NO: 36864 - DNA, 263 bp, Zea mays
ggctccgaatatctcgacattcaactccctcgtcttcggatactgcaggcacggacaccttgctggggctagtcgagtgctcaaggccatgctggggcggggcatttcaccaactgcaaggacatacaactattttttcacggtctttgccaggaatcttagcatcgatctgggaatgaacctctacgtgaagatggtcagcaatggctacgcgccagaccggctcacttaccaccttctgatcaagatgttgtgtgaagcga

SEQ ID NO: 36865 - DNA, 270 bp, Zea mays
cacaccccccgagctcagcttagctccactccagctccaatcacagtcgtgaccagagcgcgagagctagctagagggccgtgaaaatgccgatcaataggatcgccctggggagccaccaggaggtgtaccacccgggcgccctcaaggcggcgttcgctgagttcatctccaccctcatcttcgtcttcgccggccagggctccggcatggccttcagcaagctgaccggcggcggcccgacgaccccggcgggcctgatcgcggcgg

SEQ ID NO: 36866 - DNA, 267 bp, Zea mays
cgctgcttcgccaggtacccgctcaagctcatcgccccgtccagggtgggcccctcctcctgtgacgccgtctggctctacgccctcacctacggcggcggcatcgtctccggggacaccgtgtcgtgcacggtcagcgtcggcgacggctgtacggcggcgatcaccacgcaggcctcgaccaaggtgtacaaggctgtgggttcaaaatgttctgaacagttgctagaggccagagttggggaagacgccctgctggctgttatt

SEQ ID NO: 36867 - DNA, 269 bp, Zea mays
cgacaaacgtcgagaggggccgatcgtgatcgagcagcgatgtcgacgtcgcggaggcggacactgctcaaggtcatcgtccttggcgacagcggggtcgggaagacgtcgctgatgaaccaatatgtccacaaaaagttcagtcagcagtacaaagctacaatcggtgcagatttcgtcacaaaggaggttctgatcgaagacaggctagtcacgttgcagatatgggacaccgcggggcaggagagattccagagtcttggggttgc

SEQ ID NO: 36868 - DNA, 282 bp, Zea mays
gacacgcgtccgcggacgcgtgggcggaccgtggcggacgcgtgggcgagcagccgccggataacttcgacgcgaagaacccagatgccgaccgggtggcgatgagcgagtaccgggaacacctggtgcgagagaagtggatccagatcgagaccgccaagatcatccgggagcgcctccgctggtgctaccgcatcgagggcatcaaccaccaccagaagtgccgccacctcgtcgaccaatacctagaggctacccgcggcgtgggttggggcaaggatg

SEQ ID NO: 36869 - DNA, 290 bp, Zea mays
cgcgctgggcagcccctaccacttcgcgtcgtggacgcccgacaccttttgctgcgactggtacgacgtggactgcgacaacgtcacgggccgcgtcgtcggcctcaccgtgttcggcgacggcaacctgacgggcgccatcccggacgccatcgccaacctgaccaacctccgcacgttggtcctgcgccacctcccgggcatctccggcggcatcccggtctatctcgcgcactcgccaacctcacccagctcaccatctcctccaccggcgtctccggcccggtgcc

SEQ ID NO: 36870 - DNA, 290 bp, Zea mays
gtacatcattgcgccacttaaggacaaaagaatgcttctcaccattcctcttatagcatattcaggtttacaacaggcatttgtatgggcggtattcacaaagagtattgtaacacccgttcttggcatcagcggcgtcggtggagccatggcaatttatggtgcagcagatgtagtttgttctttggttgctggacgattgacctccggacttcgctcagcagcatttatagtgtcggttggagctattcttcaggccatagtcctgttctggctgcttcttttttaca

SEQ ID NO: 36871 - DNA, 142 bp, Zea mays
cggacgcgtggctccgccaacagctggaccctcgagatcgcgtcgccggtggccccgcagcgcctgttccgcgccgccgtgatggactggcacaccctggcgcccaaggtcgcctcccacgtcgtcgccagcgcgcacccgt

SEQ ID NO: 36872 - DNA, 293 bp, Zea mays
acgacaccgagggcaacgagctgccccgcctcgtgtacgtctcccgtgagaagcgcccgggcttccagcaccacaagaaggccggcgccatgaacgctctgatccgcgtctccgccatgctgaccaacgcgcccttcatgctcaacttggactgtgatcactacatcaacaacagcaaggccatccgggaggccatgtgcttcctcatggaccctcaggtcggccggaaggtctgctacgtgcagttccctcagaggttcgacggcatcgacgtgcacgaccgatacgcgaac

SEQ ID NO: 36873 - DNA, 294 bp, Zea mays
cgtcatatggttcccaggatgagaagggatcaaggaaggtcataatgtcatatgggtctaatggtgaggatgatccaagaaaggccaccacatcatatggaatacaagataaagagtatcccaggaaggccaccacatcttatggagttcaaggtgagaaggacccaagggaagctaccatctcatatgggtcccaggatgatgaggattctagaaaagtcaacatgtcatatgggtctaatggtgaggacgacccaagaaaggccaccacatcatatgggtcccatggtgagt

SEQ ID NO: 36874 - DNA, 284 bp, Zea mays
ccgacatcctactttcgtcctcacgagtgaccgataatccgccggcgctaagatgttggtttatcaagatctcctatctggcgacgagctcctgtcggattcattcacctacaaggagctcgagaacggcgtcctgtgggaggtcgagggaaagtgggtcacccaaggtcctgttgatgtagacattggtgccaatccatccgccgagggtggtgaggacgaatacgttgatgacacagccgtgaaggtggttgatattgttgacacattccgtctacaggagc

SEQ ID NO: 36875 - DNA, 282 bp, Zea mays
tccgcctctcttcccagtgccagccgccgtgcgctcgctctctctgtccctcaaggccttcgccggcgaagagcgcctagtcacccaccaggatgaagtttgttgctgcttacctgcttgctgtccttgctgggaactccagcccctctgctgaggacttgacggccattctggagtcagttgacaatgaaaagatggagctcctgctgtctcaactgatcggtaaggacattaccgagctcattgctgcgggcagggagaagtttgcttcagtcccatgcg

SEQ ID NO: 36876 - DNA, 280 bp, Zea mays
gaaggatcggcgcgttccggccggagatgaggggcggatccagaccggccccggtcgtcctgtttctcctcgctgcgtccgggatctgcgcccaattcaccgcagtgctagctggtgatccacaaacatccaacgatgacaaggaggctgaagctcagccaaaggggggccataccggcaaaacagttttgttcgtcctcctaggagtggcggctgtcattctgttgtcatttgttattttcaagtattggcagaagaagaaaaggcaggaacagcatgc

SEQ ID NO: 36877 - DNA, 282 bp, Zea mays
gacgtatatagctttggagttgtactactagagatgatgactggtagaaggtcaatggacaagaacaggccaaacggagaacacaacctggttgaatgggcacgcccttatctgggagaaagacgcagattctataagcttgtagaccctcgtttggatgggaacttctccataaaaggcgcccagaagacggctcagctggcccatgcctgcctcagccgtgaccccaaggctaggcctctgatgagccaggtggtggaggtgctgaagcctctccagaac

SEQ ID NO: 36878 - DNA, 275 bp, Zea mays
cggacggtgggccttaattatgctaaatttgtgtcgtggtgggtttcattaggtgtggcttcatcaattggagtaggttctggtttgcatacatttgtgctgtatctgggtcctcatattgctctgttcactattaaggctgttcaatgtggtcgaattgatctaaaaattgctccatatgataccatacagctaaaggttgggccatcatggcttgacaagaaatgttcagaatttggaccacctgtgtatccagcatcagctcattcagttag

SEQ ID NO: 36879 - DNA, 135 bp, Zea mays
cggacgcgtgggttttttttttttttcttttttaacgatcaatgcgtattttgtttcataaataaactgtcattcacacgtatgagtagagtacttcggaaccccaactgacaatctacctacacagtcggggag

SEQ ID NO: 36880 - DNA, 276 bp, Zea mays
cggacgcgtgggcgaggtacaccaagggcgacgggctcggggcggagatcgtcggcaccttcgtgctcgtctacaacgtcttctccgccaccgacgccaagcgcacgcccgcgactcccacgtgcccatcctcgcgccgctccccataggcttcgccgtcttcctcgtgcacctggcgaccatccccatcaccggcaccggcatcaaccccgcgcgcacctcggcgccgccatcgtctacaacaggtcccacgcatggaacgaccactggatcttc

SEQ ID NO: 36881 - DNA, 272 bp, Zea mays
aaaatcaaggtggatatgacatgcttggtcggacaaaggatcagattaggacgacagagcaggtcaatggtgcaatggctagttgccaggctttgaagttggatgctctggttataattggaggtgtcacttccaacactgacgctgctcaacttgctgagacttttgctgaggcaaagtgtgcaacgaaggttgtaggtgttcctgtaactttgaatggggacctcaagaaccagtttgttgagactactgttggctttgacaccatatgc

SEQ ID NO: 36882 - DNA, 275 bp, Zea mays
gataaactgatcggcatgggcgcgaccgacatcgtcgtccccggggtgcttcccatcgggtgcttccccatctatctgaccatctaccagagctccaacggcagcgactacgacagtctcggctgcctcaacagcttcaacgacctgtccacgtaccacaacgccctgctccagaagagggtggacgtcatccagagccggcacaggaagacggcgcgcatcatgtacgccgacttctactccgccgtctacgacatggtccgcaacccacagag

SEQ ID NO: 36883 - DNA, 277 bp, Zea mays
gataaactgatcggcatgggcgcgaccgacatcgtcgtccccggggtgcttcccatcgggtgcttccccatctatctgaccatctaccagagctccaacggcagcgactacgacagtctcggctgcctcaacagcttcaacgacctgtccacgtaccacaacgccctgctccagaagagggtggacgtcatccagagccggcacaggaagacggcgcgcatcatgtacgccgacttctactccgccgtctacgacatggtccgcaacccacagagct

SEQ ID NO: 36884 - DNA, 274 bp, Zea mays
cggacggtgggcaaatcgcccccccaaaccctcttcttcccccttcccgtgctcgacccagatcgagggctcgatccgtcggccatggcgctggagtgggtggtgctgggctacgcggcgggcgcggaggcgatcatgctgctgctgctgacgctgccggggctcgacggcctgcgccggggcatgatctccgtggtgcggacgcgctgaagcccatgatgtcggtggtgcccttctgcctcttcctgctcatggacatctactggaagtacga

SEQ ID NO: 36885 - DNA, 282 bp, Zea mays
cggacgcgtgggactagtgcagcgtgcttgacctcccgcacgtcgtcgccggggctccatccgatggcaacgtgcagttcgtcgcaggcgacatgtttcagagtattccgccggcaaccgctgttttcctcaagacggctttacacgactggggtgacgatgagtgtgtcaaaatattgaagaattgcaggcaagccatatctccatgcgatgaaggacggaaggtaataatcatggacatggtagttggatatgatgagtcaaatacaaaacgtctagagg

SEQ ID NO: 36886 - DNA, 280 bp, Zea mays
cggtgaaggagtaactgatgtgcagcctggggatcatgtcattccttgctaccaagcagaatgcaaagaatgcaagttttgcaagagcggaaagaccaacctctgtggtaaggtccgtagtgccacaggcgtaggtgtcatgatgaatgatatgaagagcaggttctctgtaaatggaaagcccatttaccatttcatggggacatcgacattcagccagtacactgtggtgcatgatgtcagtgttgcaaagatcaacccacaggcacccttagataaa

SEQ ID NO: 36887 - DNA, 279 bp, Zea mays
cccacgcgtccgcccggcggcttaaaccctagttcccattccatcttcgtttccgctccgccgccgtcgatggagttctggggtctcgaggtcaaacctggatccactgtcaagtgtgagcctggacatggctttatcctgcacgtttcccaggctgcccttggggaatcaaagaaaagtgacagtgccttaatgtatgtcaaagttgatgacaagaagcttgccattggaacgctctctatcgacaaatacccacagatacaattcgatttggttttc

SEQ ID NO: 36888 - DNA, 279 bp, Zea mays
caagcttaagcttacaatcaacctctcaatcacagtcacaaaacagccattatgtctatcaaggtcggaatcaacggcttcggccgcattggtcgtatcctgctccgcaacgctctcgagaagcccgagctctccgtcgttgccgtcaacgatcctttcattgagcccacctacgctgcctacatgctcaagtatgattcttcccacggtctcttcaagggcgaggtcgaggttgatggccagaacctcgttgtcaacggcaagcccatccgcttctac

SEQ ID NO: 36889 - DNA, 281 bp, Zea mays
cccacgcgtccggccgctctcgcacgacatcacgccgcgcgtgaatcgcctctactacaacgtcatcggggaacatgtctccgtcacttggctcggtcccacgccaagggtgatcgtgaacgaccccaagctggtgcgggagatcctggccaacaagcttggtcacttccagaaacgcaagcacgacggcatcgtcaggcggctggccagcgggctggtcaaccacgagggcgagaaatgggctgcgcaccgcaagctcatcagcccggcctttcacctcg

SEQ ID NO: 36890 - DNA, 244 bp, Zea mays
gggatctgaatatttaggaaagatgctttcaaagcatttggaacaagttatcaaatcaaggatcccggggatccaatctcttataacaaagacaattgcagagctggaaactgaacttaatcgacttggaaaacccattgctaatgatgctggggggaagctgtacacgatcatggaaatttgtcgtatgtttgacagtatctacaaagagcatctggacggattgcgccctggcggagaaaaa

SEQ ID NO: 36891 - DNA, 272 bp, Zea mays
ctttgaacctaatggcagactcagttaattgtcttgtgcgatggtcacaagaggttagagaagctggtggagaggcagatagaatattggaaggaattgcagagatgtggctgcggctagtgcaggctctacgcaaggtgtgcatggatcaaagagaagaagtgaggaaccatgcattgttatcgttgcatagatgcttggtagttgatggaatatcagttaagtcttcaacatggttgatggcatttgacattattttccagttgcttgac

SEQ ID NO: 36892 - DNA, 272 bp, Zea mays
agaacccttaccccgactctagcctcgccggcgagctcgggaagcaagaacaccgggaactggcgcgcgaaccgttaggaaatccctggttctcctgaagaacggcaagtcctcctacgctccgttgctgcctctcccgaagaaggccggcaagatcctggtcgccggcagccacgccaacgacctgggcaaccagtgcggggggtggacgatcacgtggcaaggaagcagcggcaacaccactgccggcacgacgatcctctccgggatcg

SEQ ID NO: 36893 - DNA, 269 bp, Zea mays
cggacgcgtgggtgttggtggcgatgggatcgtcaatgaggttttgaatggattacttagtagagacgatattgacgtggcaattcgatttcccattgggataatacctgctggttctgataattcattggtgtggactgttcttggcatcagggatcctgtttctgcggcaatcgctttagctaagggggatttcacaccaatagatgtgtttgccgtaaaatggatccaagctggagtgactcattttggtttgacagcttcctact

SEQ ID NO: 36894 - DNA, 274 bp, Zea mays
ctcgaaaccttttcttgtgctctgtctgtgtgtttccaaagcaaacgaaagagctcgaggatgtcttgcagctgcggatcaagctgcaactgcggatcaagctgcaagtgcggcaagatgtaccctgacctggaggagaagagcggcgggggcgctcaggccagcgccgccgccgccgtcctcggcgttgcccctgagacgaagaaggcggcgcagttcgaggcggcgggcgagtccggcgaggccgcccacggctgcagctgcggtgacagct

SEQ ID NO: 36895 - DNA, 274 bp, Zea mays
cccacgcgtccgcggacgctgggtgtttctgcaacgccagggcgcaaccatgggtcagcagcagcaagggccggcggccaggcagatggccacgatcgcctcccacctgcgccatccctccgtctctcaccctcagatggaagatgttcccctcttgaggggatccaattgccgtgcaaaaggtgcggcgccaggcttcaaagtcgcgatcttgggtgcagcaggtgggattgggcagccacttgcgctattgatgaagatgaaccctcttgtt

SEQ ID NO: 36896 - DNA, 275 bp, Zea mays
acaccgtctgctgcgaccgcaccgcgctccgcaccgacgtctgcgtcatgcgcgggcacgtccgcacccaggccgcctccaactcgctcttcctgctcctgcctcccaactcgtctcgaccggccaccgacgagcacatccgcccatacacgcgcaagtgggagtccagcatcatgagcaccatcgacgagctccgcctccgctccgcgcggatgccagccaaccagacgatccaggatttccgtctgatgctcgatgacgctcaccgtggtcgc

SEQ ID NO: 36897 - DNA, 275 bp, Zea mays
cttctcctctgtaccgtgctgaagcgtgaggtacagctcccatggtggggcctcatcttcgcatgtggcatggcattcgtcttcacacttcccatcagcatcatcactgcgacgaccaaccagacgccaggtctgaatgtgatcactgagtatgctatgggtctaattatgccgggctctcctatcgccgtcgtctgcttcaaagtctatggctacatgagcatggcacaggctgttgccttcctctcggacttcaaacttggccactacatgaa

SEQ ID NO: 36898 - DNA, 279 bp, Zea mays
cccacgcgtccgaaaggtgaataaatatgccttctcaggtggccaggactcaatagagctccatagaaaacttggcgctaaccttgatgtggatgtcccaatcaaatacctgaacttcttccttgaagatgatgacgagcttgcgcacataaaaaaggagtacaaggagggaaggatgttgactggtgaagtgaagcaacggcttattgcagttctatctgagattgttgctagacaccagagagctagagctcaagtgaccgaagagatggtcgatgc

SEQ ID NO: 36899 - DNA, 279 bp, Zea mays
attgagcaacatttgtgatggtatcctaaagctgcttgacacgcaccttgtgccttcctccactgccacagagtcgaaggtgttttacctcaagatgaagggtgattatcacaggtaccttgctgagtttaagactggtgctgagaggaaggaatctgcagagagcacaatggtagcttataaggcagctcaggatattgcattggctgaactgccacctattcatcccataaggcttggacttgcacttaacttctcagttttctattacgagattca

SEQ ID NO: 36900 - DNA, 285 bp, Zea mays
ggttctgcaaaactaagataccttctgagatcactgctgcactagatcctatcaaacacaatgaggaggctgttagacaatatggaatccaccttggaactgagatgtgcaagaaaattcttgctactggcattaagactttgcacctttacacactaaacatggacaagtctgctataggaattttgatgaatcttggattaattgaggagtccaaggtttcaaggccattaccttggaggccagcgactaatgttttccgtgttaaagaggatgttcgaccta

SEQ ID NO: 36901 - DNA, 267 bp, Zea mays
ggaggcccacatgaacctcaacgacggcaagctcgccggctacgacatccccgccgagtccaagatcctcgtcaatgcctggttcctcgccaacgaccccaagaggtgggtgcggcccgacgagttccggcccgagcgcttcctggaggaggagaagtccgtggaggcccacggcaacgacttccgcttcgtgccctttggggtcggccgccggagctgccctgggatcatcctcgcgctgcctatcatcggcatcaccctgggccg

SEQ ID NO: 36902 - DNA, 264 bp, Zea mays
ggccccagcagtggcaactacgccaacgctgagggcaaggacgccggtgggggcatcggcggaggtgccgacggcgcctacggatcaggagccggaggaggcgtaggcaagggccagggcgagagaggcgtggcattggcaccgtcgtccggaggctactacaatggcggcgccgctgatgctaccggtggaggatccggcgcaggaggaggacgtggcggtggcgcacaggagctccaagctacgggacaggaggtggccttg

SEQ ID NO: 36903 - DNA, 268 bp, Zea mays
cacacgcgtccgcggacgcgtggggaacgatgctcaaatttgcttgtgggacattaaagcaaatagtagaaacaaaagtcttgatgacttgcagattattaagcatcatgatggtgtcgttgaagatgttgcttggcacttgaggcatgagtacttatttgggtcagttggtgacgattatcatcttttgatttgggacctgcggtctcccgcccctactaaacctgttcagtcagtggtggcgcaccagggtgaggtgaactgcctg

SEQ ID NO: 36904 - DNA, 272 bp, Zea mays
atttcattgtaggagtgaagaacaggaagaggaagatgtccggttttgggcaccgtgtgtataaaaactatgaccctcgtgctaaagtcataaggaaattggcagatgaggtgttctcaattgttggacgggatccacttattgaggtggccattgccctagaaaaggcagcgctgtcagacgaatattttatcaagaggaagctgtatccaaatgtggatttctactctgggctaatttatagggcaatgggattccctacagaatttttt

SEQ ID NO: 36905 - DNA, 278 bp, Zea mays
cccacgcgtccgcccacgcgtccgcccacgcgtccgcccacgcgtccgctgacaagcctagtctttgtgaagcagctaccaaggttcccggcatcagtatccgcgctacatgtgaacagcctcactggtgagattctgactggtgctggtgttctttttgctgtttggagcatcaatggggactgccttgctgtggtgaacacctcccagcttccttctgacctcatcttgtctgtgacaagcgcgacacactcagactggcaggacacaaactggta

SEQ ID NO: 36906 - DNA, 269 bp, Zea mays
ggacgctggtccggcatcacctcctcgccaagcctaacctcttcaccgaggcctcagcctcagccaccgttgcctccttccagcgccccgtgctctgcctcttcgacaggaatttggacctctctgtgggaatacagcacgattggagctaccgccccttggtccatgacgtcctcggcctcaagctcaacaagctcaagatgcccgcggacaagtctggcccggccaaggcctacgatctcgatgattccgatgccttctgggtagca

SEQ ID NO: 36907 - DNA, 273 bp, Zea mays
gacctaatgacatcatgttctccatctaactatttgccttcgtttatgcatacagtgaaggtaaatggatttgtttgcaaagaccccatggctatgaacgcagatgacttcttcaaggcagcaaaacttgaccaaccaagggacaccaagaacaaggtgggatccaacgttactttgatcaatgccatgcagttaccaggactcaacacattgggcatctcgttggctcgcattgactacgcacccttaggtcaaaatcctccacacacccac

SEQ ID NO: 36908 - DNA, 268 bp, Zea mays
gtcaaaaacaggcgaaaaaatcctcgttctcgccgcgacgaataggcctttcgaccttgatgaagccatcatcaggagattcgagcgcaggatcatggttgggcttccaactctggagagcagagagctgatcttgaggacgctgctttcaaaggagaaagttgatgaagatattgatttcaaggaacttgcggccatgacggaaggatacagcggcagtgatctcaagaatctctgtgtgactgctgcttaccgccctgttagggag

SEQ ID NO: 36909 - DNA, 269 bp, Zea mays
gaaagctagtaaaatgatgaaagcagctgtgaagtggcggcttgcattcaaacctgaaaacatctgttgggatgatattgcagaggaagcagagactggaaagatatatagagcggattataaggacaaacatggcagaactgttcttgtattgaggcctggcttagagaacactacctcagcaataggacagatcaaatatctagtctactctctggagaaagcaattatgaacctgacggaagatcaagagaagatggtatggctga

SEQ ID NO: 36910 - DNA, 270 bp, Zea mays
gtgctcgcccttttcattgcacgtgcagttgttgatgacattctgccacctgctttcctcagcaatgcaaaagtgagtctgtcaggatcttcaaagggtatgcaggttgtacaaattgcagagaaaagctatctttcagcaccccaccatgcagagttaattgagcgacgatggggtggttcaacccacatcacagtagaagaggtgaagaggaggattgctgatcttctgaaggaatacatcagaaatggtgatacagctgaggcttgt

SEQ ID NO: 36911 - DNA, 275 bp, Zea mays
agaacaggttcaagctcgaggaggccatggccgggaaggaagctgtctgggcagagattgtcagggaaaacgaccttatagccacggagcttgacgagatcacgaattggtggttcgtcgatgccatgtttgctgtggagacccagcttctggacagcatgaacaaaagcaaggagcatggcttcctcggcttcaggaacactgtcagctctttcaacacatggatcgagaagctgaaggtcttcaagattgttccctaataataattcatcctt

SEQ ID NO: 36912 - DNA, 272 bp, Zea mays
gccaaaaggcactgaagaagccagtcaatagcgagttctactactagtagctagcctgctgatctgttctgttgtttagttcgcaaagccttctgtttcggcgaccatggaggatgagaggaacacccagcagcaccagggcggtgaggcccagcaggacgccgccgatcaggtggacgtgaaggatagggggctcctggacagccttctcggcaggaagaagcacgacgacgaccaggagaagaagaagcagacggatgagctggcgaccg

SEQ ID NO: 36913 - DNA, 271 bp, Zea mays
gactgcatctctggtctcccacgcctataatcccattcccctccttcaaagccctgcggcgatttcgattcttcccttctatctccaggtatacccatcggagcagcactgacaaaaattctccagatatggcaagcaaaaggattcagaaggaactcatggatctccaaaaggacccaccgacatcatgcagtgcagggcctgctggagaggatctattccactggcaggccacaatcatgggtcctagtgacagcccctatgcaggcgg

SEQ ID NO: 36914 - DNA, 263 bp, Zea mays
cggacctggcgagaggcagcgaaggaaacagtagttcttcagttaggcaggagggcacaggaggagacagatggcgtcgaagaggatccagaaggagctcaaggatcttcagaaggaccctcccacctcgtgcagtgcaggtcctgttggtgaagatatattccactggcaggcaacaataatgggtccatctgatagcccatattctggtggagttttcctagttacaatccattttcctcccgattatcctttcaaaccac

SEQ ID NO: 36915 - DNA, 264 bp, Zea mays
cggacctggcggacgcgtgggcggacgcgtgggcggacgcgtgggatttcccatctctctctgcgcacgtcccgtgctcattccgctagttctcccaattccgaccccacctcctcggtcgtcgcttcccccagagagcaggagccgcctcgtccctgccggtcccgaccccgacccccatcccgtccgcgtccaacgccatgaatcccgagtacgactacctcttcaagctgctcctcatcggggactccggtgttgggaagt

SEQ ID NO: 36916 - DNA, 242 bp, Zea mays
cccacgcgtccgaacgcaacaagatggtgaagctcgcattcggaagcgtcggcgactccttcagcgtcacctccatcaaggcctacgtggcggagttcatcgccagcctcctcttcgtcttcgccggcgtgggttccgccagcgccttcgggcaactgacgaatggcggcgcgctggaccctgcgggactggtggcgatcgcggtggcgcacgcgctggccctcttcgtgggcgtctccgtg

SEQ ID NO: 36917 - DNA, 263 bp, Zea mays
cgagagcgcgggcgcgtgctgcgtcacagccgtcctccaaaagggtggactggtcgtctccaacgctggagactgccatgcggtgctcagccgagcagggaaggcagaggcgctcacctctgaccaccgggcgtccagggaggatgagaaggaaaggattgagaatttggtatgtccagggtgtcacagccctctacgtctcttctgatgcaattgaacacccataatacatgagttatacattgttgtgtgcagtttttctt

SEQ ID NO: 36918 - DNA, 264 bp, Zea mays
cggacgcgtggcgagacgcgtgggcggacgcgtgggctcggcgccttcgacttcgccttcgtcgacgccaccaagcccaacaacgtcaattaccacgagcagctgctccgcctggtgcgcgtcggcggcaccatcgtgtacgacaacacgctctggtgcgggaccgtggccatgccgccggagacgcccatgtcgggcatcgacatgacgatcgctgcggacatgaaatagcgcatgggacgccgcctgtagcagcgcattaag

SEQ ID NO: 36919 - DNA, 263 bp, Zea mays
attacagggaacctgtttgatgccttcttgaaaccatacttcctagaagcatacaggcccgtgaggaaaggagaccttttccttgtcaggggtggaatgagaagcgtggaattcaaagtgatagagactgacccttctgaatattgtatcgttgccccagatactgaaatattttgtgatggggagcctattaagagagaggatgaggagcgtcttgatgaagttggttatgatgatgttggtggagttagaaagcaaatggc

SEQ ID NO: 36920 - DNA, 258 bp, Zea mays
gtgaacccgccgccgacgcagcagcaggagacgcgccaaggagagcccgcaaggaggcgactatgagggccaagtggaagaagatgcgcatgaggaggctgaagaggaagcgccgaaagatgaggcagagatccaagtaggctgatggggattgtggatggtggtgtcggcatagttgtgttacgtttcttcgatgcgtgagttcatggagagatgtcacatcctagttcgtcgtcaccgtttgccatgggtccaatg

SEQ ID NO: 36921 - DNA, 259 bp, Zea mays
gtccgcctggcgcctgcccccataactactctgccaccaatccggggaggaatcaacctagcggtaagcggacatggcggcggcgaagatagcgccgtcgatgctctcgtcggactttgccaacctcgcttcggaggctgagcgcatggtccgcctaggcgccgactggctacatatggacatcatggatgggcacttcgttcctaacctgactattggggctccggtgatccagagcttgaggaaacataccaaagca

SEQ ID NO: 36922 - DNA, 259 bp, Zea mays
acgagcccggctggcggagagaagggagagagcgcgccagatcggctccgaacaaccctcgtccaccgcactctcctggactgtggccatggccatggccgccgcgtcccggtcccgggcgctgtgggcgtcccgcgccgccgcctacctcaggatctccaccttccccagggccttctccaccgtgctgaaggatctgaaatatgctgacactcatgaatgggtgaaggttgagggcgattcagcaaccgtggggatt

SEQ ID NO: 36923 - DNA, 266 bp, Zea mays
cccacgcgtccgctagttctagatcgcgggcggccgctcgcgatctagaactagcacgttcttggcatacacatgcttccacatgactcggaagatcccaagcatagtcaagagcgctctggacccgcagacgacggtggggttctcgcactggggacggttgcacgccagcagaaacgctctcaccaccggctggctgccgttcaacaccgccgacggctccgcgctgctcggcgagatagacgtcgcgttcctcgccgcgtact

SEQ ID NO: 36924 - DNA, 172 bp, Zea mays
cagcagcccgatcttgcatcagctagctaactaagcaagtaagctaagctagccctaggcaacgagccgaccgtcaagctcatcgcagaccacgagccatggcctccaccaacagctggactgttgagatcgcctcgcctgtagccgcgccgcgcctcttcggcgccgcggt

SEQ ID NO: 36925 - DNA, 277 bp, Zea mays
ggaggttggatttcagaggcagaagctttcagccaggcgggctcagggcgcggacacatcaatggctggcaaggaaatcctccacaaggtgaaggacaaggtgaaagatgcatttagttcatcaggaccagaaacagggaaaggcaagacaaagttatcaggcaagcgtgtcaagcatggttaccatctggtgaagggcaaatctaatcatccaatggaggattatctagtggcagagtaccggcaagttggtgaacatgatttgggattgtttgct

SEQ ID NO: 36926 - DNA, 284 bp, Zea mays
gcccacagcggtcgccgtgcaggattgggtggagagggggtactcggtggtgacagtgagctgccgcgaccggcccaagctgctcttcgacgtcgtctgcaccttgacagacttggattacgtggtgtaccacggcacgttccacacagacgacgatcacgcccgccaggagttctacatcaggcggttggacgagcggccaattagctcggcgaccgagaggcggcgcgtgatccaatgcttggaagcggccatcgagaggcgcgcatccgagggagtgaggc

SEQ ID NO: 36927 - DNA, 219 bp, Zea mays
cggacgcgtggattccgatatgttatcttcaaaatcgaagataagcaaaagcatgtagttgtagtgaatgaaggggccactactgaaagctatgatgatttactggactctctcccagagaatgactgacgatatgcgctgtatagattttgattttgtcaccggggagtatgtgcagaaaagctagattatcttcattgaccaggccccgtcgacatc

SEQ ID NO: 36928 - DNA, 264 bp, Zea mays
  unsure (1)..(264): unsure at all n locations
atacatcgttatggaagtgcacatacagattgcattatcaccacagatgataaagtagcagaaacttttctgcgtcaagttgatagtgctgctgtatttcataatgcgagtacacgattctctgatggggctcgttttggattgggtgccgaggttggcataagcacagggcgtatacatgctcgcggggctgtgtgtgttgaaggtctcttaacaacacgctggatcatgcgnagaagtgggcaagtggtgaatggtgacaag

SEQ ID NO: 36929 - DNA, 280 bp, Zea mays
cgctgcttcgccaggtacccgctcaagctcatcgccccgtccagggtgggcccctcctcctgtgacgccgtctggctctacgccctcacctacggcggcggcatcgtctccggggacaccgtgtcgtgcacggtcagcgtcggcgacggctgtacggcggcgatcaccacgcaggcctcgaccaaggtgtacaaggctgtgggttcaaaatgttctgaacagttgctagaggccagagttggggaagacgccctgctggctgttattccagaccctgtaa

SEQ ID NO: 36930 - DNA, 276 bp, Zea mays
gcaccagacggggaatgatggtggtggtgatgatggtgacgatgctgatctaccactaatggatgaagcaagacaacaactgtccaggaaaattccacttccatcaagccagattaatccatataggatgattatcattattcggcttgtggttttggggttcttcttccactaccgagtgatgcatccggtgaatgatgcatttgctttgtggctcatatctgttatctgtgaaatctggtttgccatgtcttggattcttgatcaattcccaaa

SEQ ID NO: 36931 - DNA, 278 bp, Zea mays
cggacgcgtgggcaagtactccgagggcatgcccggcgcccgctactacggcggcaacgacgtcatcgacgaagtcgagaacctctgccggtcacgcgcgctcgctgccttccaccttgacgccgcgtcctggggcgtcaacgtgcagccctactcgggctcccccgccaacttcgccgcctacaccgcgctgctcaacccgcacgaccggatcatggggctcgaccttccctccggcggacacctcactcacgggtactacacggccggcggtaaga

SEQ ID NO: 36932 - DNA, 276 bp, Zea mays
cgtcacccgacggagggggtggcgccacgccaacgcgaacggggagcacgccaccgtacggtgctggacgcgcaaccgccgagctcggtgctgtacgtggcgctggggagcgaggtgccgctgcgcgcggagcaggtgcacgagctggcgctggggctggagctcgccgggacgggcttcctctgggctttgcggaaccctagcggcgtccccgacgcggacgtccttccggccgggtgccaagaacgcacccgcggccgtgggctggtgaccacg

SEQ ID NO: 36933 - DNA, 276 bp, Zea mays
cggatgagtgtgatccatacttcgacccggtcggttgcaagcatcctggatgcgaacctgcttatcctacaccaaagtgtgaaaagaaatgcaaggagcagaaccaagtttggcaggaaaagaagcatttcagcattgatgcgtacagaataaattcagatccacatgacataatggcagaggtctacaaaaatggtcctgtagaagttgctttcacagtttaacgagaattcgcacactacaaatctggagtgtacaagcacatcaccggtggca

SEQ ID NO: 36934 - DNA, 273 bp, Zea mays
cccacgcgtccggatgatgcaaaagtcgcagacatggaggaaataactgagatgatgaatatgttgttgtaatcattgtcccagatgggtggtgtgctgatgtcgtgctgtttatgtgttgcttatttctatccagctgtggtggatatgtatctgaatctgaagaagctgcaagtttttcaagttggatggagtccaaagaatgaaactatacttgcatcctgttgtctgggcagaaggctcatggtctgggatctaagcaggatcggccaa

SEQ ID NO: 36935 - DNA, 275 bp, Zea mays
actagttctagatcgcgatctagacctccctttccccttccctccctccctctccccgcgggccgccagaggcaatttcgccctcgattcgaccccgattcgtacgcccgcgaccgggattccctccgccaagcgcggatctgaacgctgcgctccgtgtcgccgctcgaatccgccatgaagggggccaaatccaagggcgccgccaaggccgatgccaagctggcggtgaagagcaagggggctcagaagcccgccaagggcaggaaagggaa

SEQ ID NO: 36936 - DNA, 272 bp, Zea mays
cacacgcgtccgcggacgcgtggggtcattcgtccgcagccagaatggcgcgatacagaggcgatccgcacgtggaagagcaatatcgacaaggagtttgagggcgtggaggagtgcccaatctgttacagcattctccacaccagcaaccacaacctgccgcggctggcgtgcaagacgtgcaagcacaagttccacggcgcctgcctctacaagtggttctccacgtccaacaaatcgacttgcccgctgtgccagactccgttctagtc

SEQ ID NO: 36937 - DNA, 318 bp, Zea mays
accagaagggtttccttacaattaacagccaacctgctgtaaatggagagaaatccgactcgcctactgttggttggggtggtcctggaggctacgtttatcagaaggcctacctcgaattcttctgcgcaaaggagaagttggaccaactaattgagaagatcaaagcattcccttctctcacttacattgctgtgaacaaggatggagaaacattctccaatatttcaccgaacgccgtgaatgctgtcacgtggggtgttttccctggcaaggagattatccagcctacggttgtggatcatgcaagttttatgg

SEQ ID NO: 36938 - DNA, 299 bp, Zea mays
gaaatcgattccccccgcatctgatctcttcggtgctagagaaatataggccgccgccgcctcctccttgttcggtgaaaggtgggcagttagggttgggagatctcttgactcacgacacgagcagcagaattcgtcgagggccgctggttgctgcgagaggtccgggccttcgtgggatcttgaaaattgaatgttctaatggagtccaagggtggcaagaagaagtctagcagtagtcgttcctccctgatgtacgaagctccccttggctacagcatcgaggatatcgccctgca

SEQ ID NO: 36939 - DNA, 295 bp, Zea mays
tcaagatcctgcaaaaggttaaccacagcaacctggtgaagctggaatggttctgcatcgactcggcgacgggcgactgctacctggtgtacgaatacgtggagaacggatcgcttgacctgtggctgctggaccgcgaccacgcgcggcgcctgaactggcgcgcgcgcctccacatcgcgctggacctcgcccacggcctgcagtacatccacgagcacacctggccgcgcgtggtgcacaaggacatgaagagcagcaacgtcctcctggacgcccgcatgcgggccaagat

SEQ ID NO: 36940 - DNA, 294 bp, Zea mays
cgcgaagaagcgaccatgagggccaagtggaagaagaagcgcatgaggaggctcaagaggaagcgcagaaagatgaggcagagatccaagtaggcagatcgagatggattgtggacctgatgacatgcgtgggtacatacatttcttcggatgcgttggtgtgcctgtggagagatgtcaacctgccatggtgtcacggtccgccatcagttgaacgtcttgcctgcacttcagtaggccatttttcatggttctagttgtatttgaatccagcgtttgccactaagataaatc

SEQ ID NO: 36941 - DNA, 289 bp, Zea mays
aaatcctgctgtatcagctatagaggaaagcaatgctcttgccttggctattgttccaacagatggcgcttcaacaactggtaacactgcatttcaagaaaaggggtttgatcctacaggatgggaacttgcccttgttactgcaccaagcaatacaacttcatctacttctgttagtcaattgggtggtggactcgacaagctcattttggagagcctttatgatgatggggcctacaggcagaggcaacaacaacagctgtatggttcagcagctcctaatccattc

SEQ ID NO: 36942 - DNA, 290 bp, Zea mays
ctcgccgccccttctagaatcatccagaggcgtgccggtgaagcgcgagagcggtgaggcatggcgatgcagacgggggtcgcgacctccaaggtcctcatcctcgtcggtgcagggatgacgggctcgatcctgctgcggaatggccgcttatctgatgtgttgggagaactccaggagattatgaagggtgtaaatcaaggaacttcttcgggtccctatgacattgcacttattcaagctcagattcggaatttagcccaagaagtcagagatttgacattgtcaaa

SEQ ID NO: 36943 - DNA, 287 bp, Zea mays
cccacgcgtccgacctcttcttcttcttcctcctcctcctagcacagctagcgcgtgctccccttcgcctgtgatcatgtcttgcagcagcggcaagtgcgactgtggctccagctgctcctgcggcagctcatgcaactgcatgtccccgaacgtggagaccgccgccgccagcagcagcaagaccacggtcctcgccgcgccgagcaccaatgccagcgccggcggcttcgaggcggccaccgagggcggcggctgcgactgcaacacctgcatctgctgcacca

SEQ ID NO: 36944 - DNA, 285 bp, Zea mays
cccacgcgtccgcccacgcgtccgcccacgcgtccgcccacgcgtccgagcgaggggaaggggagcgtcgaccgattcgtcccggcctcccgtcccgccgctggcctcgcctgccccgatggcggcggtggcgatccaccagttcgccgagtgcatcacctgccacgcctggagcccggaccagtcgatgattgccttttgtccaaacaaccatgaagtacatatctataaattcttcacagacaagtgggagaaacttcatgttctgtcaaagcatgatcagat

SEQ ID NO: 36945 - DNA, 283 bp, Zea mays
cccggtcccggcgccgccactatgtcgtcgatgatgaacgcgctgtcaaactggctggtgaacccgcgccgcaacccgctcgcgcgcctccacatgcacaccgtctcctcgcgcctcaggaaatacgggctgaggtacgatgacctgtacgacccctacttcgacctggacatcaaggaggcgctcgggaggctgcctagggaggtggtcgacgcccgcatccagcgcctcaagcgcgccatggacctctccatgaagcatcagtacctccccgatgacctcc

SEQ ID NO: 36946 - DNA, 284 bp, Zea mays
atcgtgaacccgccgccgacgcagcagcaggagacgcgccaaggagagcccgcaaggaggcgactatgagggccaagtggaagaagaagcgcatgaggaggctgaagaggaagcgccgaaagatgaggcagagatccaagtaggctgatggggattgtggatggtggtgtcggcatagttgtgttacgtttcttcgatgcgtgagttcatggagagatgtcacatcctagttcgtcgtcaccgtttgccatgggtccaatggctcgtcttggaaacctgcactt

SEQ ID NO: 36947 - DNA, 270 bp, Zea mays
tggggccgccgccgtttcgcgcaccgtaccctagccctcgtcagcggcggcttcgagctcaagcagccatgacgttcaagcggaggaatggcggacgcaacaagcacgggcgcggccacgtcaagtacatccgctgctccaaccccgccccctgctgcaccaaggataaggctatcaagcggttcttggtgaggcacattgttgagcagctgccgtgagagatgtcaggaggctgtgtaatgatgatatgttctaccaaattgtatgaaa

SEQ ID NO: 36948 - DNA, 286 bp, Zea mays
accgcctcctaaagatggaagagacgctgcatacacgtatcattggacaggatgaggctgtcaaagctattagccgtgctatccgccgtgctcgtgttggcctcaagaatccaaataggccaattgccagcttcatattctctggaccgactggagttggcaaatcagagcttgcaaaggccctggcggcctactactttggctcggaggaggctatgatcaggcttgacatgagtgagttcatggagcggcatactgtctccaaactcattggatcacctccagg

SEQ ID NO: 36949 - DNA, 288 bp, Zea mays
cccacgcgtccggctgggatctagcacgctagcgagcgagagagacgcacatctatctgtcaagcgacgccgcggcctcgatcagagtcggaggcgaacacccccatggcggcggctggcggcggcgcaggagggaaggtatccttcaagatcatcctcacctccgaccccaagctccctttcaaagtgttcagcgtgcccgaagcggcgccctttaccgcggtgctcaagtacgccgcggaggagttcaaggtcccgccccagaccagcgccatcatcaccaacgat

SEQ ID NO: 36950 - DNA, 243 bp, Zea mays
cccacgcgtccgcccacgcgtccgcccacgcgtccggtgcgttcaaaagctggctgctcaatctagcgaaagaccgagtaacactgtgccgatccactggtacataatgacaagcccctttacagatgctgccaccgccaaattctttgaaacccgtagatattttggcttagaccctgaccaagtgacatttttccaacaaggcacacttccatgcgtttctgccgatggtagatttattat

SEQ ID NO: 36951 - DNA, 279 bp, Zea mays
cggacgcgtgggcggtgttcctggtccaccttgccaccatccccattactggcactggcatcaacccagctaggagccttggcgctgccatcatctacaacagggatcacgcctggaacgaccattggatcttctgggtcggccccttcattggcgctgccctggctgccatctaccaccaggtgatcatcagagccatcccgttcaagagcaggtcttaagctgccgtggccgtgccgagacatgccagtccgaagaacgggcgtcttcctgtgatgt

SEQ ID NO: 36952 - DNA, 285 bp, Zea mays
gaagtttcggattttgcagcagaggtcaacgatgaagcagataccttaaggaaatcaaagagcgctgggtgggcatcaacatatatgtcaaggtggagaagtatcttgaattcaatagcggaccaggtttcacaggtgccgctatcattggcgattaaaatttcttcagttcgtggaacgatgcggatacatctaaagcctcctccgggtgatcgagtttggtatgggtttacgtccatgccggagatagagtgggagttggaatcatcggttggggataagaag

SEQ ID NO: 36953 - DNA, 271 bp, Zea mays
gtcagaagcacacatgccgtagttctgcttcacagggtgccgatagcgaacctgcatctgagcggcaatcaagaggtgtggagcatataagacagggtctcgtgaactttatagcctcgctgctgatgccattatatagaggaaaaaagatcgaccgagaggggtacaaaacaatcatgcgcaaatctgttaacaagatcattgatacatgctcagaaggagagagatcaatgactactcttgagtttcttgatgataaaaggaaaattaa

SEQ ID NO: 36954 - DNA, 269 bp, Zea mays
cgaacagcagccaattcgctcgagttcagatcgagcgcgcgccaagcaagtcttccggccggccgcgaagagcgcaatcaagcaagacaagatggtgaagctcgccttcggaagcgtcggcgactccttcagcgccacctccatcaaggcctacgttgccgagttcatcgccaccctcctcttcgtcttcgccggcgtcggttccgccatcgcctacgggcaactgacgaatggcggcgcgctggacccggcgggcctggtggcgatcg

SEQ ID NO: 36955 - DNA, 272 bp, Zea mays
ggatagatgaggaggaagaaacagagataccatcttgtccttcgcttccagatcctagtttttcaagagcgacacactttgatgttgttgctgttaagcttccctgtagtcgtgtggcgggttggtcaagagatgttgcaaggctgcatctgcagttgtcagcagcaaaattagcagcagccacagcaagaggcaatagaggaatccatgtgctgtttgtgactgattgcttcccaattccaaacctcttctcttgcaaggacctagtgaaa

SEQ ID NO: 36956 - DNA, 199 bp, Zea mays
gcctaagataaagacaagccgtgtcaagtatcctgaaggatgggagcttattgaaccaacaatccgtgagttggatgccaaaatgagagaagctgaaaatgatccacatgatgggaagagaaagtgtgaagctctctggcctattttccgcatttctcatcaaaggagccgctacatatacgatctttactacagaagg

SEQ ID NO: 36957 - DNA, 266 bp, Zea mays
  unsure (1)..(266): unsure at all n locations
cgccgcgtgcgagccaagcagaccacagcgagaggcgtagtcgtcgccggaggggaangcgcggacaagatgtcgtggcaatcgtacgtcgatgagcacctgagntgcgagagcgagggacaacatctcagcgccnccgccatcgtcggtcacgacggcagcgcttggagccantccgagagcttccccgagttaaagcctgaggaggttgctggtatcataaaggactttgatnaacctggtactcttgcaccaactggtctttt

SEQ ID NO: 36958 - DNA, 283 bp, Zea mays
ggcagctgctcctgcggatgaggctgaggatgatgatgaccttgatctttatggtgatgaaactgaggaggacaagaaggcagctgatgagcgtgccgccgctgccaaggcctcttctaaaaagaaagaaagtggtaaatcctccgtccttatggatgtcaaaccatgggacgatgagactgatatgaagaagctggaggaggctgtccgcagtgtccagatggagggtctgacttggggagcatcaaagcttgtgcctgttggatacggcatcaagaagatg

SEQ ID NO: 36959 - DNA, 280 bp, Zea mays
tgcaaactggatgactgcagttgagatgcttgatgatgaagtctacgttggggcggagaatagctataacctattcacggtgcgcaagaacagcgatgcggcgacagatgacgaaagggccaggcttgaggtggtgggagagtaccaccttggggagtttgtgaacagattccgccacggttcactggtgatgcgccttccagactcggatatagggcagatccctacggtcatctttggcacaataaacggggtgattggcattattgcctccctcccg

SEQ ID NO: 36960 - DNA, 283 bp, Zea mays
atttgacatgttctcatcattctttggaccctcttttggaggaggtggtggaagcagcaggggaagaaggcaaaagaggggagaagatgtagtccactcacttaaagtttctctggaagatctttacaatggaatctcaaagaagctctctctttcgcgcaatgtcatctgctccaagtgcaagggcaagggctcgaagtctggtgcttcaatgaggtgccctgggtgccagggctcaggtatgaaagtcaccattcgtcagctggggccttccatgatacat

SEQ ID NO: 36961 - DNA, 275 bp, Zea mays
acggaagaacgagcgggagctggcgactggcggacgcgtggtagcagtctagccagtcacaagacaagatttatcgaactgaaccgaagacggatagtcctcctggaaggtctagctgcatcattgcagtttgttgatgctctcggacccagcaaatctggtcattcatctgggtcagccctgaaggacgatgttatttttctgcgcattgtttctctgcccaaaggacgtaagtttttagcacgttaccttcggcttcttgtccctggcagcga

SEQ ID NO: 36962 - DNA, 282 bp, Zea mays
ctgaagtctgggttctatgacctccaattggctagagatgagtacaggctctcttgtggtgcagcaggcatgaaccgtgatctgttgtggcgatttatggatgtccagaccaggcttatcacccccatttgcccacactatgctgagcacgtgtggcagaagatcatgaagaaagaaggctttgcaataaaagctggctggccagccgcggacaccccggatcccacactgagaattgcaaatagatacctgcaggattccatagttttgatgaggaactgc

SEQ ID NO: 36963 - DNA, 283 bp, Zea mays
cccacgcgtccgcccacgcgtccgcccacgcgtccggactagttctagatcgcgatctagaactagtccgcttctggttctttgtttatcctctcaaaaaatttggctcgctacatcaacataaatagtgcgtcactgcagagttatgcacacgatgatatatcagtaggttcatggatgatgggactgaatgcaacttacgtggatgatgaccggttgtgctgcagcagttccagacaagagaaaatctgttccaatgcttgagcggaaggcgtggctgctg

SEQ ID NO: 36964 - DNA, 284 bp, Zea mays
gtttgacttgtgcttgaatgcacttgcagtccatgggcatctcattgtaattggtatgatctcccagtatcaaggagaggatggctggaagcaaagaactacactggactatgtgagaagattctagctaaaagtcaaactgtggctggatttttccttgttcaatatgctcacttgtggcaagatcatcttaacaaactttttgacctgtatgcctctggaaagctaaaggtttccctagaccccaagcaattcttgggtgttgcttcagtcgtagatgcggt

SEQ ID NO: 36965 - DNA, 269 bp, Zea mays
cccacgcgtccgcccacgcgtccgcccacgcgtccgcggacgcgtgggtaaaaacaccgcacgcgccgccgacgccgtcctattcctcggagaggagaagccgccgtcgcagcaatcacagcagcccggagaacggccaggtccgacaagatgcagatcttcgtgaagacgctgacagggaagaccatcaccctcgaggtcgagagcagcgacaccatcgacaatgtcaaggccaagatccaggacaaggaagggatcccgccggacca

SEQ ID NO: 36966 - DNA, 269 bp, Zea mays
aagatatggaacctgaacgaacactccggcgtcgttggcgccttcaactgccaaggcgccggctggtgccgggtagccaagaagaacctcatccacgaccagcagcccggaacggtgagcggcgtcatccgggcgcaggacgtggagcaccttggaagggtggctgatcacggctggaacggcgacgtggtcgtgtatttgcacgtgggaggggaggtggtgtacctgccgaagaacgccttgctgcctgtgacgctgagatcgcgcga

SEQ ID NO: 36967 - DNA, 265 bp, Zea mays
cggacgctgggcgtcgaggttaccagcgctcacgatctcctcccgaaagagcagggcacggcgaaccctatcgtggaggtcgagttcgacggccagaagtcccgcacggccatcagggacagggacctcaaccctgtctggaacgagcagctctacttcaacgtgtctgacccgtcccgcctcccggagctgcacctcgaggcctacgtgtaccacgcgaaccgtgccgacaactccaagtcctgcctgggcaatgttcgcatat

SEQ ID NO: 36968 - DNA, 266 bp, Zea mays
cgatccccaattcctccttcggatctcgcattcagcgcagcgcaggtgtgaaggaagggggacgcggaggaagatggggctcgcgttcgggaagctcttcagccggctcttcgccaagaaggagatgcggatcctcatggtcggcctcgacgccgccggtaaaaccaccatcctctacaagctcaagctcggcgagatcgtcaccaccatccccaccatcggtttcaatgttgaaactgttgagtacaagaacattagcttcactg

SEQ ID NO: 36969 - DNA, 266 bp, Zea mays
gtccttttggctggtggtcagggtactcgtctgggaagctcagatcctaagggatgtttcaatattggacttccatctggaaagtcacttttccaactccaagctgaacggatcttgtgcgttcagaagctggctgctcaatccagtgaaagcccgagtaacactgtgctgatccactggtatataatgacaagccccttcacagatgcttccactcgcaaattcttcgaaacccgtagatactttggcctagaccctgaccaagt

SEQ ID NO: 36970 - DNA, 265 bp, Zea mays
cccacgcgtccggatgcttctgaggattaagcagcaaggccttgatatcactccgaagatcctcattgttaccaggctgttgcctgatgctgctgggactacgtgcggtcagcggctggagaaggtcattggtactgagcacacagacatcattcgcgttcccttcagaaatgagaatggcatcctccgcaagtggatctctcgttttgatgtctggccatacctggagacatacactgaggatgtttccagtgaaataatgaaa

SEQ ID NO: 36971 - DNA, 261 bp, Zea mays
ggggaatgaacgaaggcgctgtttacttgtggactttgccaatgttccattgcaacggttggtgctatacatggacacttgctgctctctgcgggacaagcatatgtcttcgtcaggtttcagcgaaggccatcttctcagctatagccaacgagggcgtgactcacttctgtggggcaccggtcgtcctgaacaccatcatcaacgcccctccagccgacacgattctccccctacctcgtgtcgtcaacgtcatgaccg

SEQ ID NO: 36972 - DNA, 284 bp, Zea mays
ggacgctggcgccgtcgtcgtcgacgacgccgcgcggcgccggcaacgtgtggcgcacgtcttccaaacggggagcaacctggccaccaagggcatgggcgccaacctcttcgaccggccgcagcccaactcccccaccgtctacgactggctctacagcgacgagaccaggagcaaccaccgctagatcgggcgagatggatggacagtgaagaggccatgtttgctggtccttgtggtatctaaaacgcacgcatgctctattatagctagtcatcactata

SEQ ID NO: 36973 - DNA, 283 bp, Zea mays
cggacgctggggtccgtttttgcagcaattattggttctggaactcagcttctcgcccttgcgattttcatcttcctcctcgctcttgtcggcgtcttctacccatacaaccggggagctctcttcactgccctcgttgtcatctacgctctcacgtccggtatcgctggatacacagccacttctttctatctgcaactggagggcacaaactgggtcaggaatctggtattgactggctgcctattctgcggacctctcttcctgacgttctgcttcctga

SEQ ID NO: 36974 - DNA, 280 bp, Zea mays
cgcatcccgtccccgtccgcgccggccgacgccgccttttcgtccccgcgtcagctcgcggctccactgagcgtgcgcgtcaccggcggcaggcgagggcaggcggtggtggcgatggcgtccgctgatgcgcgcttggcggggatcgcctcctccatccgcgtcatccccgacttccccaagccagggatcatgtttcaggacatcacgacgttgctgctcgatcccaaggcgttccgggacaccatcgacctctttgtcgagcggtacaaggaccaag

SEQ ID NO: 36975 - DNA, 278 bp, Zea mays
cccacgcgtccggaccaggcccgggagggggagaaggagccccaggcgccccccgtcgccaagtgggagccctccgtctccgggtacctccgattcctcgtcgacagcaagctcgtcttccagacgctcgaagccatcgtcgagcgcgccgccgtcccgtggtatgcagagtttcggaatactgggctggagagatcagaggcgctgaaaaatgatctggaatggttcaggcaacagggccacacagttccagaaccatcggcccctggcaccacata

SEQ ID NO: 36976 - DNA, 278 bp, Zea mays
cccacgcgtccgcagaagcggcggcggcggacaaacgcaggcgaaggcgagggtgtgagggaaggagcaccagccatggtgcacgtcaacttctaccgcaactatggtaagacgttcaagaaaccaaggcgtccttatgagaaggagcgtcttgatgctgaactgaagctggtcggtgagtatgggctgaggtgcaagcgtgagctttggagggtccagtatgcactgagcaggatccgtaatgctgcaaggcacttgctcacccttgacgagaagaa

SEQ ID NO: 36977 - DNA, 275 bp, Zea mays
aggtctcctacgccatcggcgtgcccgagcccctgtcggtgttcgtggacacgtacggcaccggcgcgatccccgacaaggagatcctgaagatcgtgaaggagaacttcgacttcaggcccggcatgatcatcatcaacctcgacctcaagaaaggcggcaacgggcgctacctcaagacggcggcctacgggcactttgggagggacgaccccgacttcacctgggaggtggtgaacccctcaaggcggagaagccgtcttctgcatgaggcg

SEQ ID NO: 36978 - DNA, 274 bp, Zea mays
gaaaattcggacagtagagcaagatgggaagaccataaaacttcaaattgtaagattactatgctgtattttcttttatttgtcatatgtatggttcgatgccttgtgatgtcatatttgacatgtgttccctaggtaaactggaaagtaaaaaaataagagttagccttttcatgatagtcaatagagaatctggaacattgatatctgctgactaattgtgtaggcaataagtttgaacctaaagtaacatatgttcccactatttagcaga

SEQ ID NO: 36979 - DNA, 270 bp, Zea mays
cggacgcgtgggcccgtccccgtccgcgccggccggcgccgccttttcgtgcccgcgtcagcgtcgcggctacactgagcgtgcgtgtcaccggcgacaggcaagggcaggcggtggtggcgatggcgtccgctgacgcgcgcttggcggggatcgcctcctccatccgcgtcatgcccgacttccccaagccagggatcatgttccaggacatcacggcgttgctgctcgatcccaaggcgttccatgacaccatcgacctctttgtcg

SEQ ID NO: 36980 - DNA, 270 bp, Zea mays
agcccatcagacccagagaatttcccatttgttgtgcttggtaacaagatcgatgttgatggtggtaacagccggactgtttctgagaagaaggctaaagcatggtgtgcttcaaagggaaacatcccctactttgagacgtcggctaaagagggcttcaatgtagaggctgcatttgagtgtatagcgaggaatgctgtaaaaaatgagccagaagaagatatgtatcttcctgatacgattgatgttgggggcgctggaaggcaacag

SEQ ID NO: 36981 - DNA, 274 bp, Zea mays
agcaaaactagttgactcactgtcagagcaggacttccgcaagcatatgcctagacttcaaccagagaatattgtcaagaatgctaagatattcgagcatgtgaatgcaatggcagctaaaaaaggatgcacaccatcacagctagcattggcatgggttcaccatcagggaaacgatgtttgccccatacctggaacaacaaaaatcgagaacttcaaccagaacgtgggggcgctttctgtgaagttgacaccagatgagatggccgaactc

SEQ ID NO: 36982 - DNA, 270 bp, Zea mays
  unsure (1)..(270): unsure at all n locations
cggacgcgtgggcggacgcgtgggcggacgcgtgggggaacaagggcctcctgtctgctctcacttcctcagtcctcgtccgtctctgctccgatcactcctctctctacctagctagctagccagccttcctgtagcgcggcagatatggctgcctccaccacggcggcggcggcggcgtcgctgctgctgctgctgctcgtgtcgctcgccgcggcggcggacatgtcgatcgtgtcctacggggagcgcaagcngcaggaggcgcgg

SEQ ID NO: 36983 - DNA, 262 bp, Zea mays
cacacgcgtccgcggaccgtgggcgaccgtggcagtcgaccgctccgagccctccgagctcaacgtaagcgaggaccccgtctggtactcgcttcaggaggtcaagagcctcctccagcggatcgacgagggcaaccgatccaccgggggcctcgccttcgtcaccaaggcatacggcatcgcaggttgcatcaagttcctggagtcatactacctgattttaatcagcaaacgccgtcaaatcggttgcatttgcgggcat

SEQ ID NO: 36984 - DNA, 264 bp, Zea mays
cggacgcgtggggagattatggcaacagtgttctccagaaatgcatggcgctgtgtatggcatatgattcagaatgacttggtccatggatggggtcttgactttgctcttagaaaatgtgtggagccggctcatgagaaaattggagttgttgatgctcaatggattgttcatcaatcagttccttcacttggcaaccagggcaagtcagataatggaagaccaccatgggaaggggtaagagcacgctgcagaaaagaatgg

SEQ ID NO: 36985 - DNA, 265 bp, Zea mays
cggacgcgtggtcgtcttcgccggcgtcggttccgccatcgcctgcgggcaactgacgagtggcggcgcgctcgacccggcgggcctggtggcggtcgcgatcgctcacgcgctggcgctgttcgtgggcgtgtccgtcgcggcgaacatctcgggcggccacctgaacccggccgtgacgttcgggctggccgtgggcggccacgtcaccatcctggcgggcgtcttctactgggtggcccagctgctgggcgccaccgtggcg

SEQ ID NO: 36986 - DNA, 267 bp, Zea mays
ccggttgcgatccgccgccatcgcttcaagcagcgaaccctagccgccctcagcgacggattgcagatctcccagccatgacgttcaagcggaggaacggcggacgcaacaagcacgggcgcggccacgtcaagtacatacgctgctccaactgcgccaagtgctgtccaaaggataacgctatcaagcggttcttggtgaggaacattgttgagcaggctgctgtgagggacgtgcaggaggcttgtgtgcatgatggatatgttc

SEQ ID NO: 36987 - DNA, 283 bp, Zea mays
ggcggcggcaccggcatgcggcggccctcgggcattgtcccagcgtgaccatgacatccagatgatgctcgccgccgatgtccacctcggcaccaagaactgcgacttccaggtggagcgctacgggtacaatgcgccgcactgatggtatctacattattaaccttggaaagaccttggacaagcttcagttggccgccatggtcatcgttgccattgagaatccgcagacattatcgtgcagtctgctatgccctatggccagacggctgtcctcaagttt

SEQ ID NO: 36988 - DNA, 281 bp, Zea mays
ctgttcgggagcacgttcctgcacccgctgcagcgcgtggcgtacatcaacatcacgacgtacccgttcacggccatcttccgcatcttctacacgacggtgccggcgctgtcgttcgtgacggggcacttcatcgtgcagcggcccaccaccatgttctacgtgtacctggccatcgtgctgggcacgctgctgatcctggccgtcctggaggtgaagtgggctggcgtgacggtgttcgagtggttcaggaacgggcagttctggatgacggccagctg

SEQ ID NO: 36989 - DNA, 277 bp, Zea mays
cggtctctggtgtgtggtcggccgtcgcggatggcgggcactaggactacgatctcttcgtagctcggggcgggcagcggcggtgttcgcggctctcgcaccgccgcctccttcggagctaaggttgcgattagtgagctcccattccaccccatcagctcagagtggctaggaggacatggtgggacttgcgtgatacgtggttgcgtacctaaaaagatactcgtgtatggtgcatcattccgtggagaatttgaggattcgaagaattttgggt

SEQ ID NO: 36990 - DNA, 276 bp, Zea mays
gaaagcatcaagtcaactttattatcattgtcatcactacaagttgcaacaagtaactttgatgaaaacaataaacttggcgaagggggattcggtgtagtttataagggagatctttctggacaacaagtggctgtgaagatgttgtcaaaaggttcgggtcaggggctagaagaactaaaaaatgagttagttctggtcgccaaacttcaccataagaaccttgtccgcctagaaggtttttgcttagaagatggagaaagattgcttggctat

SEQ ID NO: 36991 - DNA, 276 bp, Zea mays
ggccaacgccctcagcaagatccagaaagacatcgccaagaaccaccaggtccgcaagcagtacaccatccaggtcggcgagaacgagctcgtcctcaaggagctggagctgctcagcgatggggccaacgtgtacaagctcatcggaccggtgctggtcaagcaggacctcgcggaggccaaggccaacgtcaagaagcgcatcgagtacatctccgcagagctgtagcggatggatcgggcgctcaaagacttggaggaaaagcaaaacagcaa

SEQ ID NO: 36992 - DNA, 277 bp, Zea mays
cggtacgctggtctaaggatgggctgccggagggcaccgcggatatcggagtggacagcgaacaggagatgctcatgtcccagatgaacttcgagaagcggttcgggcagtccgcggcgttcgtcacgtccacgctcatggaggaatgcggcgtccctccgtcgtcgagcccagctgcgctcctcaaggaggccatccacgtcatcagctgcggctacgaggacaagaccgactggggcctggagctggggtggatctacgggtccatcacggagga

SEQ ID NO: 36993 - DNA, 275 bp, Zea mays
caccatcctcaccgtcatgggcgtctccaagtccacctccaagtgcgccaccgtcggcatccagggcatcgcctggtccttcggatgaatgatcttcgcgctcgtctactgcaccgccggcatctccggaggacacatcaacccagctgtgactttcgggctgttcttagccaggaagctgtccctgactagggccctcttctacatcatcatgcaatgcctgggtgccatctgtggagctggagtggtgaagggcttccagcatggactttaca

SEQ ID NO: 36994 - DNA, 267 bp, Zea mays
ctcctcagactcctctccgcacataccctccctacctcgccgtcgccgtcgcatctgccatgggggcgtacaagtacgtctcggagttatggagaaggaagcaatccgacgtgatgcggttcgttcaacgcgtgcgctgttgggagtacaggcagcagccggccatcgttccgctcacaaggcccacccgccccgacaaggcccgccgcctcggcttcaaggccaagcaggggtatgttgtttacagcgtccgtgtgaagcgtggtg

SEQ ID NO: 36995 - DNA, 274 bp, Zea mays
ttcttctcttctctgaattccagtccaagggccggaataccgtcagagcagagggagtgggaggaagaaaaaaaaaagatggtgaagctcgcatttggaagctttcgcgactctttgagcgccgcgtgcgctcaaggcctatgtggccgagttcatcgccacgctgctcttcgtgttcgccggcgtcgggtccgccattgcctactcgcaattgacgaagggcggcgctctggaccccgccggcctggtggccatcgccatcgcccatgcgttc

SEQ ID NO: 36996 - DNA, 67 bp, Zea mays
cagaggtgggctggcttctcctccccctcttatcaagtcctcctcgggttagggttccttagggttt

SEQ ID NO: 36997 - DNA, 288 bp, Zea mays
cggacgcgtggcgagcactcgccgccactcaccagcaaattcccaagccgccccttcccccatctctttcacgccccatttgatcgattcctgatggcgcccaaggccgagaagaagcccgcggagaagaagccggcggaggagaaggccgagaagaagccaagggcggagaagcgcgtgccgagcaaggagggcggcgagaagaagggaaagaagaaggcgaagaagagcgtcgagacgtacaagatctacatcttcaaggtgctcaagcaggtgcacccggacatt

SEQ ID NO: 36998 - DNA, 288 bp, Zea mays
atcctctccacaccccataccagacaccacccgagagagtcaacatgtcggccaagcccacgaccaagcagttcgggaaggcgacccgggaggttcccgcctccgccgaccaggccaagaagtggtatcccgccgacgacgacagcgcgcccaagaaggttcgcaaggctgtccgatcttgggctccccgaaagactctccagcccggcaccgtgctgatcctcctcgccggccgcttccgtggcaagcgcgttgtcctcctcaagaacctcgaccagggtgttctgc

SEQ ID NO: 36999 - DNA, 289 bp, Zea mays
tggaggaccctgctaattttgacacgctttccgtcgtcttcaacaggtcgagcaggttcgcgaggctgcagggggtgcagtgcgcgatggcggggaggaacctgtacatgagattcagctgcagcacaggggacgccatggggatgaacatggtctcaaagggcgtgcagaacgtgctggattttcttcaggatgacttccatgacatggatgtcattagcatatctggttcatcttgctctctcggtttttggcaacttctgctccgacaagaagccgtccgccgtga

SEQ ID NO: 37000 - DNA, 280 bp, Zea mays
cccacgcgtccgctgctgctgttcttgtttccccgctctccaagatgtcgtccccgagcaagcgccgcgagaaggacctcatgaagctgtgaggatgctggacctctctttggatgatgagcgactacaaggtggagatggtgaacgatgggatgcaggaattcttcgtcgaattcaaggggccggccgaaagtatctaccaaggcggtgtctggaaggttagggtagaactgcctgatgcatatccttacaaatccccgtccatcggcttcatcaacaa

SEQ ID NO: 37001 - DNA, 203 bp, Zea mays
caagaagggtgatgccaaggcccaggccttgaaggtggccaaggctgtgaagtctggggcaggcaagaagaagaccaagaagattcgcacatctgtaacatttcaccagcccaagaccctgaagaaggccagggacccgaagtacccaagaatcagcactactggaagaaacaagcttgatcagtaccaaatctcaagtaccc

SEQ ID NO: 37002 - DNA, 227 bp, Zea mays
cccacgcgtccggtcctctaagaacaggaatcaggacagggattataagtggaatcggttttggagtttcctttttcttgctatttggggtatatgcagctagcttttatgctggtgctcggcttgttgaggacaggaagacaacctttcctaaagttttcagggttttcctagctcttgcaatggcggcaattggagtgtcgcaatcaagtacccttacatcagat

SEQ ID NO: 37003 - DNA, 280 bp, Zea mays
gcactgcgctcatttctgcatccccctcccgccgcgccgcctcaccgccgccggagaagatgggtcgcgtgatccgcgcgcacgtaagggtgcggggtccgtgttcaagtcccacacccaccaccgcaagggccccgcccgcttccgctccctcgacttcggcgagcgcaacgggtacctcaagggcgtcgtcaccgacgtcatccacgaccccggccgtggcgcgccgctcgccaaggtcactttccgccacccattcaggtacaagcaccagaaggag

SEQ ID NO: 37004 - DNA, 173 bp, Zea mays
cctggacccccgacgacgtggagaaggacgtcggcgtcggcctgcgctacgactacggcaagttctacgcgtccaagaccttctacgaccccgtgctccgccgccgggtgctctggggctgagtcggcgagaccgacagcgagcgcgccgacgtcctcaagggctgggcatcc

SEQ ID NO: 37005 - DNA, 176 bp, Zea mays
agaaaactagaaaaggctcctcccgaccgcaacgcccctcatctccctcgaccccgacatccccgacccgatggcgcccaaggcggagaagaagccagcggagaagaagccggcggccgaggagaaggcggagaagacgaccgcagggaagaagcccaaggccgagaagcggctgc

SEQ ID NO: 37006 - DNA, 216 bp, Zea mays
atttgttgaaaccattgagctacaaattggactgaagaactatgaccctcaaaaggacaagcgcttcagcggttctgttaagctgcctcacatccctcgccctaagatgaaggtttgcatgcttggtgatgctcagcatgttgaggagagagaatgggtatagacaatatggatgtggaagccctcaagaagatgaacaaaaacaagaagctagtg

SEQ ID NO: 37007 - DNA, 288 bp, Zea mays
catcgcctcctaattcctaaagcagcatcggctactaccactgtctcttgctcacacagctcgtctgtgcagcacatagctagtgaacgagaacgaccatggcgtcccaggccatcgagagccaccgtgccggcgctgaggtcgtcaccggaggagacgccatctgcaggaagaagtcaatcgaactgctggaggagctcggcctccccaagggcttcctgcccctcgtggacatccaggagttcgggtacaaccgcgagacagggttcatgtggctggtgcagggga

SEQ ID NO: 37008 - DNA, 283 bp, Zea mays
cccacgcgtccgcccacgcgtccgcccacgcgtccggggtgttcctgatcgggtgaacgatgaggtttttattgcaatgtccaaggcactcaatttcataaatcctgatgagctatctatgcagtgcattttgattgctttgaaccgatttcttcaggagaagcatggttctaaaatggcattcttggatggtaatccgcctgaaagctatgcatgcctattgttgatcacattcggtctaggggtggagaggtccgcctgaattctcgtattaaaaagatag

SEQ ID NO: 37009 - DNA, 289 bp, Zea mays
cccattcctcgcgcggcgaccacccgattcgaagcgtgcggagagaccgaagaagcgggagagatggctcgtaccaagcagactgctcgcaagtccacgggagggaaggctcccaggaagcagcttgccaccaaggctgcccgtaagtctgcccccaccactggtggagtgaagaagcctcaccgctaccgccctggaactgttgccctccgtgagatccgcaagtatcagaagagcactgagctgctgatcaggaagctgcccttccagaggctcgtcagggaaattg

SEQ ID NO: 37010 - DNA, 292 bp, Zea mays
aaaggagccaggccttaccttcatggttgcaaaatttgatggcattcttgggctaggctttcaggaaatatctgttgggaatgcaacacctgtgtggtataacatggtaaaacaaggtctcatcagtgaccctgttttctctttctggtttaaccgacatgctggtgaaggagaaggtggtgaaattgtgtttggtggaatggattctagtcactacaagggtgatcacacctatgtcccagtcactcagaagggatactggcagtttaatatgggtgatgtcctggttgat

SEQ ID NO: 37011 - DNA, 283 bp, Zea mays
cccacgcgtccggaacttgaccctgtccttgagacggtatctagtatggtgcacaacaaagtgcggaaccgtgctattactgcactgatgaaagcaacttttgatggtttcttgctggtgcttcttgctggtgggcctttgcgtactttcacccgtcaagactctcagataatagaagatgacttcagggccctcagagatctgtacttagcagatggggatggtttgccagaggaattagttgacaaggcatcctcccaggtcaagaatgtcctgcccctct

SEQ ID NO: 37012 - DNA, 283 bp, Zea mays
atgaaggtttccttagacgatctgtacaatgggacaaccaagaaagtatctttatcgcggagtgctttgtgctccaagtgcaaggggaaaggatccaagagtggggcatcaggaacatgccatggttgtcgtggtgctggaatgagaacaatcacaagacagataggccttggcatgatccaacagatgaacactgtttgccctgaatgcaaaggatcaggtgagatcataagtgacaaggacaaatgcccaagctgtaaaggaaacaaggtagtccaggaga

SEQ ID NO: 37013 - DNA, 282 bp, Zea mays
agaggttgggtctgggacaccatggctccgatgaagctgtacggggcggtgatgtcgtggaacgtgacgaggtgcgcaacggcgctggaggaggctggctccgactacgagatcgtgcccatcaacttcgccaccgccgagcacaagagccccgagcacctcgtccgcaacccgtttggtcaggttccagctctgcaggatggtgacttgtacctcttcgaatcacgcgcaatctgcaagtacgctgctcgcaaaaacaagccagagctgttgagggaagga

SEQ ID NO: 37014 - DNA, 282 bp, Zea mays
cccacgcgtccgcaagctagtagaaggtttgaagcgtctggcgaagtccgatcctatggttctgtgtacaatggaagaatctggtgagcatatcattgctggagctggtgagcttcatcttgagatttgcctgaaggatctgcaagaggacttcatgggaggtgctgaaattattgtttctcctcctgttgtgtccttccgtgaaaccgttcttgagaagtcctgccgcactgtcatgagcaagtcacctaacaagcacaaccgtctgtacatggaagcgcg

SEQ ID NO: 37015 - DNA, 285 bp, Zea mays
cgcagggccatcaagctctgtgaaggagacgctcccgccggccctcggctccacctcccagccacctcccgtcttcgatggcaccaccaggctgtacatctgctacttctgcccgttcgctcagcgcgcctgggtcaccaggaacttgaagggtttgcaggacaagatggagctggtggccatcgatctgcaggacaaaccggcttggtacaaggacaaggtttacgcacagggcacggtgccttccctggagcacgacagcgaggtcaggggcgagagcttgga

SEQ ID NO: 37016 - DNA, 281 bp, Zea mays
tacaatcctaaaaccatctgcttcagccttcagctagccccaagtttagtcggccgatcgatcactgaagtagtaatggcctccgccaacagctggaccctcgagatcgcgtcgccggtggccccgcagcgcctgttccgcgccgccgtgatggactggcacaccctggcgcccaaggtcgcctcccacgtcgtcgccagcgcgcagcccgtggagggcgacggcggcgttggcagcgtcaggcagttcaacttcacctcagtcatgccgttcagcttcat

SEQ ID NO: 37017 - DNA, 285 bp, Zea mays
atcttgctcaaaccacgagttgagttcttgttccgcagaggaagctggacgagcaacgcgccaaggcgctggagaagacgcagaacgacatcgccaaggcgcggcgcaaggcggaggagaagcgggcgtcggcggaggccaagcggggcctcaagctggccaaggtgctggagctcgccaacttcatgaaggccgtcggcagggtgcccaccaagcgctccttcttctagccagccgactaccgctaccacctccgtctctccctgcctgcgtgtgatcgatgta

SEQ ID NO: 37018 - DNA, 286 bp, Zea mays
cacgcttctagctaggatttttaaggactgtggacaaaagactgtacaactccctgttttgggggaggtcttgatcttatctgttggaattgtaccattttgtgcggtgtttgcaattctctgggctgtgtatcgccatgcttcatttgcttggataggccaagacgttctgggtatctgtttgatgataactgtgcttcagatggcacgtttaccaaatatcaaggttgcatcggcacttcttagtgctgcatttgtgtatgacatcttttgggtgttcatttca

SEQ ID NO: 37019 - DNA, 274 bp, Zea mays
cgtcggactctgttgccattatcgcagccaatgctgtggggatcaattccttactttgcttctggcctgaagggagttgccaggagcatgccaacatctgctgctcttgatgttgttgcaaagaatttgaaccttaagttctttgaggtgcctactggatggaagttttttgggaatttgatggatgctggaatgtgctcaatctgtggtgaagaaagctttggcactgggtctgaccacattcgtgagaaggatggcatctgggctgtgcttg

SEQ ID NO: 37020 - DNA, 275 bp, Zea mays
cagccaattcgctcgagttcagatcgagcgcgcgccaagcaagtcttccggccggccgcgaagagcgcaatcaagcaagacaagatggtgaagctcgccttcggaagcgtcagcgactccttcagcgccacctccatcaaggcctacgtggccgagttcatcgccaccctcctcttcgtcttcgccggcgtcggttccgccatcgcctacgggcaactgacgaatggcggcgcgctggacccggcgggcctggtggcgatcgcgatcgcgcacgg

SEQ ID NO: 37021 - DNA, 275 bp, Zea mays
gacgccctttgccttgttcttgaggttgatgacactgaccgtctgttgcagtctagccagtcacaggacaacattttcgaactgaaacgaagacggcaagtcctcctggaaggtctagctgcatcattgcagtttgttgatcctctcggacccagcaaatctggtcattcatctgggtcagccctgaaggacgatgttatttttctgcgcattgtttctctgcccaaaggacgtaagtttttagcacgttaccttcggcttcttgtccctggcag

SEQ ID NO: 37022 - DNA, 276 bp, Zea mays
cggacgcgtgggtttttttattgccaggatggccgcattgactatggagagtttgttgccatgatgaccaagggcaatatgggagtcggtcgacggacaatgagaaacagcttgaatatcagcatgagggacgcacctggtgcattctgaaacttaacacgatgtacagcttgtggcctagtcacttcggccctgtttgtttcggcttctggcagcttctggccaccaaaagctgctgcggactgccaaacgctcagcttttcagccagcttctat

SEQ ID NO: 37023 - DNA, 280 bp, Zea mays
cccacgcgtccgagaaagctcaaaccaagaccggcgtgcgcggacgaagcacagatccatcggagtgacagcgagcgagcgagagcgagagcgagagagacagagagattatccgcgcgtcaccgactcccggcgaagacgatggggaaggggttcgcatcctacctggcgatgaagacggggccggagggcggcgacgcggcggcggcgcagcaagctctgatcgacgcggacctgcgggagctcggcgtcgccgcgcggaagctcgccaaccacgcat

SEQ ID NO: 37024 - DNA, 278 bp, Zea mays
atctcctcgcatttcttcccatccgatccccccttcgcaaccaaaaccccaactcgccccgcatcgatggcgcccaaggccgagaagaaacccgcggcgaagaagccggcggaggaggagcccgcggccgagaaggcgcccgccgggaagaagccgaagcggagaagcgggtccccgctggcaagtccgctgccaaggaaggcggcgagggcaagaggggcaagaagaagggcaagaagagcgtggagacctacaagatctacatcttcaaggtgctg

SEQ ID NO: 37025 - DNA, 281 bp, Zea mays
cccacgcgtccgcccacaccgggcacaccccccgagctcagcttagctccactccagctccaatcacagtcgtgaccagagcgcgagagctagctagagggccgtgaaaatgccgatcaataggatcgccctggggagccaccaggaggtgtaccacccgggcgccctcaaggcggcgttcgctgagttcatctccaccctcatcttcgtcttcgccggccagggctccggcatggccttcagcaagctgaccggcggcggcccgacgaccccggcgggcc

SEQ ID NO: 37026 - DNA, 275 bp, Zea mays
gcaggcgctcatcgacgcggacctgcggaacctcggcgtcgccgcgcgaaagctcgccaaccacgccttcgtcctcggcggcgggttggggttcggcacttctttcctcaagtggctggccttcctcgccgcagtgtatctcttgatattggactgcacgaactggaagaccaacatgctgacagctctcttggttccttacattttcttcactctgcctaatgtgctgttttctctgatcagaggagaggtggggaaatggattgcgattattg

SEQ ID NO: 37027 - DNA, 265 bp, Zea mays
cagtactatacacagtagaaaaaaattaagatccaagtgaacaacaaggaaatacttagttacggccttacggatccgatattcaattacacaaataaaaatctaagtacaggttgaaaagaatgaccagtgagatcaactattggccaaaacggttgacatcatagaactcaatattcttatatttctgggaaattatttctgcttgaacttttcgagctgtgtctgttgcacatccaacaaggataagcactgaagtcccagc

SEQ ID NO: 37028 - DNA, 264 bp, Zea mays
ccgaagcgcagcatcaggcgcgccccccctcgcgtgtgaccgagatggcgctgccgaatcaggggaccgttgattaccccagcttcaagctcgtcatcgtcggcgatggtggaactggtaaaactacatttgtgaagaggcatctcactggagagtttgagaagaaatatgaaccaaccattggtgtggaagttcatccgttggatttcaccactaactgtggtaagatcaggttctactgctgggataccgcagagcaagaga

SEQ ID NO: 37029 - DNA, 274 bp, Zea mays
attatatctgaagcagggtcagctggtgtttctctccatgctgatagaagggcaaaaaaccagagaagaagagtacacataacacttgaactcccttggagtgcagatcgtgcaatacagcagtttgggaggacccatcgttctaatcaaacttctgcccctcaatataggcttcttttttacaaatcttggtggtgaaaagcgatttgcatcaattgtggcaaaaaggctagagtctcttggtgctttaacacaaggagatcgcagggctggg

SEQ ID NO: 37030 - DNA, 273 bp, Zea mays
gcacgctggtcatagggataagattgtagacttccactggaattcgtcagatccttggacaattgtcagtgtctctgatgatggcgagagcactggtggaggtggaacactgcagatttggcgcatgagtgatttgatctaccgcccagaggatgaagttcttgcagagctggagaatttcaaggctcatttggccagctgtgcaccgaagaattgagtcatgtgggttacctgcggaatgcaatcctgtggaaactgagtaggtgatgtagt

SEQ ID NO: 37031 - DNA, 271 bp, Zea mays
gacaagcgcaccggcgcgatgctgcggcttgccgtgatggagtcggtgctgcagcagcccttcttcaagacggagacggtgtcgcatctggtgcgggagtgcgagtccttgatggaggccgtgttcccggaggcgcgcgatcggggccaggccgccgccgcggcgctcgccgtcgcggaggcggagcagggcatcttccgcaacaccgtggccgcgctcctcaccatgcaggacgtccgcgcggggagctccagcagatgaagccactcgc

SEQ ID NO: 37032 - DNA, 269 bp, Zea mays
cagtatcttggtcgaaggtgcattattacagagatgaaatcctcccccttctgaagaaacacaaagtcatttactttacacatacagattctcgccttgctaacaatggccttcctagttacattcagaaattaagatgccgagttaattacagatctttgaagtattctcatacaattgaagatcttggtaataccctagtttcaagaatgcgtcaggaccgaagcccatatcttgctctccatctaaggtacgagaaggacatgcta

SEQ ID NO: 37033 - DNA, 268 bp, Zea mays
cgaccacctcggccgctttccctacttcagcaactatatcgacctgagcaagctggagttcgacctcctggtccgctacatcccagggctcgcgccttcccgtgtcgccttcgtcgggtccggtcccttgccgttcagctcgctcgtgctcgccgcacgccacctgcccaacacactgttcgacaactacgatcggtgcggcgccgccaaccaccgtgcgcggaagctggtccgtgcggacaaggacctgaacgcacgcatgtccttc

SEQ ID NO: 37034 - DNA, 261 bp, Zea mays
ccgacatcctactttcgtcctcacgagtgaccgataatccgccggcgctaagatgttggtttatcaagatctcctatctggcgacgagctcctgtcggattcattcacctacaaggagctcgagaacggcgtcctgtgggaggtcgagggaaagtgggtcacccaaggtcctgttgatgtagacattggtgccaatccatccgccgagggtggtgaggacgaaagcgttgatgacacagccgtgaaggtggttgatattgt

SEQ ID NO: 37035 - DNA, 262 bp, Zea mays
acgaggtgcccaagaccgcggagaacttccgcgcgctgtgcacgggcgagaagggcgtgggcaagtccgggaagccgctccactacaagggctccaccttccaccgcgtcatccccgagttcatgtgccagggcggcgacttcacccgcggcaacggcaccggcggcgagtccatctacggcgagaagttccccgacgagaagttcgtgcgcaagacaccgcccccggtgtgctctccatggccaacgccgggcccaacacc

SEQ ID NO: 37036 - DNA, 260 bp, Zea mays
cccacgcgtccgaaagaatctatacaggggtatccgccagacgccttggggcaagtgggctgctgagatcagagatcctcagaagggtgtccgtgtttggcttggtactttcaatagtcctgaggaagctgcaagagcttatgatgctgaagcgcgcaggattcgtggcaagaaggccaaggttaactttcctgatgcaccagaagttggtcagaagcgccgttctggctcagcttccgctaaagcatccaagtcaagtt

SEQ ID NO: 37037 - DNA, 261 bp, Zea mays
agaagctacaatcctaaaaccatctgcttcagccttcagctagccccaagtttagtcggccgatcgatcactgaagtagtaatggcctccgccaacagctggaccctcgagatcgcgtcgccggtggccccgcagcgcctgttccgcgccgccgtgatggactggcacaccctggcgcccaaggtcgcctcccacgtcgtcgccagcgcgcaccctgtggagggcgacggcggcgttggcagcgtcaggcagttcaacttc

SEQ ID NO: 37038 - DNA, 260 bp, Zea mays
  unsure (1)..(260): unsure at all n locations
agcaaagcgaaccngcgcacagagatctagctgaggctgagagctactagctagcagctgctgcaggtctcctgacatggcgaacaggacatcgaagcatcggggcccgaggccggcgagttctcggccaaggactacaccgaccctccgccggcgccgctaatcgacgcggatgagctcaccaagtggtccctctaccgcgcggtcatcgccgagttcatcgccacgctgctcttcctctacatcaccgtggccaccgt

SEQ ID NO: 37039 - DNA, 261 bp, Zea mays
gctgcactgactcctgagctcgggaaatggttgggagcgtgcacgtcaatggatcggtccacggcggcaatggcacggccacggaggagcggctggacgagctgcgccggctgctcggcaagtcggagggggaccttctcaagatcgtcagcgtcggcgccggcgcgtggggcagcgtcttcgccgcgctactacaggacgcgtacggccatttccgggacaaggtgcagataaggatctggcgtcgcccgggccggacgg

SEQ ID NO: 37040 - DNA, 295 bp, Zea mays
cccacgcgtccgaagatttctcctgaaattgttggtggaccaatagaagctaatagattttatgatgctgtcagttgtctgatgtcttatatgaatgataatggtggttttgcgacttatgaactcacaagatcctatgcctggctggagctgatcaatcctgctgagacctttggggatattgtgattgattacccgtatgttgaatgtacatcagcagcaattcaggccctgacatcattcagaaaactataccctgggcaccgcaggaaagaggtggacagctgtatcagca

SEQ ID NO: 37041 - DNA, 259 bp, Zea mays
ggcagaactatgtcaagacatggttcaaccagcccgcccgcaagcagaggcgccgcatcgcacgtcaaaagaaggctgtgaagatattcccacgaccaactgctggccctcttcgtcccattgttcaatgccagactctcaagtacaacatgaagtcaagggctgggagaggctttacccttgaggagttgaaggctgcgggcattccaaaaaggcttgctccaaccattggcatttctgtggatcaccgcggaaagaa

SEQ ID NO: 37042 - DNA, 291 bp, Zea mays
accacgcgtccgcggacgcgtgggcgccacagccagcacgccaggctcctcctccagctcctgttcgagatggtggtggcatccatgtttggaggaattgggtccaccattgctcaaggtatggcgtttggcacgggtagtgccatggcacacagggctgttgatgctgtattaggtccccggaccattcagcatgagactgttgcctcagaagctgctgctgctgcccctgcccctccagtgatgaatgctgatgcttgcagcatccattctaaggctttccaagattgt

SEQ ID NO: 37043 - DNA, 290 bp, Zea mays
cccatcccgaagtctccggtcacctgtcactctacgcaaccatgtcaaggaggaagaccagggagcctaaggaggagaatgtgacccttggccccactgtccgtgaaggagagtatgtctttggtgttgctcacatctttgcatccttcaacgacactttcattgtgcgatgaaggtcaaggctgatcgtgatgagtcgttaccttatgctgctatgcttgctgctcaagatgctgcacagtgttgcaaggagcttggtattactgcactgaacattaacttcgtgccat

SEQ ID NO: 37044 - DNA, 282 bp, Zea mays
gttccttgggaggatagaaaaaatatatccttggttttcttgaacagataacatttcaggtgtgcttctgaagagagatttcgttgaacaggatgaatgcattggcagcaaccagcaggaacttcaagcaggcagctaagctgctgggcctcgactccaagctggagaagagcttgctcattccattcagggagatcaaggttgaatgcacaatcccaaaagatgatggaactttggcatcctatgttggatttagggttcaacatgataatgctaggggac

SEQ ID NO: 37045 - DNA, 267 bp, Zea mays
gagctgctcatccggaagctgcccttccagcggctggtgcgtgagatcgcgcaagacttcaagaccgaccttcggttccagtcctccgctgtcgccgcgctgcaggaggccgccgaggcgtatctggtgggtctctttgaggacaccaacctctgcgccatccacgccaagagggtcaccatcatgcccaaggacatccagctcgcgcgccgcatcaggggcgagagggcatgattgctgctctgtcttcatgtttctgtaatgtct

SEQ ID NO: 37046 - DNA, 290 bp, Zea mays
ctacaggctacagctcccgtctctccgccgcttgcttggaaaacgaagaaaccctcctccaccaacccaatccagctacatccgtctgggtgaactccagggccaggagcagttcgccgccttcgttcgcatcacctacgcggttcgatccaactggcaggaaggaacgtgatggccaagacgagctcgttcaagctggagcacccccttgagaagaggcagtctgaggctaatcggatcagagagaagtaccctgacagaattccagtgattgttgagaaggctgagag

SEQ ID NO: 37047 - DNA, 292 bp, Zea mays
ggacgctgggttggcaaccccgcatgacaaaagaaaggcgaaacgaggccaccagctcaccgccgagacgaagcggcgccgagcaaccaacccctctcctcgtccgccgccgtctccccggaccatggccatggccgccgcctcctcccggctgctctgggcgtcccgcgccgccgcctacctcaggatctccaccttccccagggccttctccaccgtgctgaaggatctgaagtatgctgacactcatgaatgggtgaaagttgagggtgattcagcaaccgtggggatt

SEQ ID NO: 37048 - DNA, 288 bp, Zea mays
cccacgcgtccgcggacgcgtgggcaaggctccggaggagaaagccagaggaatcaccattgcgacagctcacgtcgagtatgagacggctaataggcattatgctcacgttgattgtccaggtcacgcagattatgtcaagaacatgatcactggagctgctcaaatggatggtggtattcttgtcgtgtcagctcctgatggcccgatgccacaaactaaggagcatattcttcttgcccgtcaggttggtgtaccttcccttgtgtgtttcttaaacaaagttga

SEQ ID NO: 37049 - DNA, 280 bp, Zea mays
cggacgcgtgggctggttgattatatcaagtcttcgggcagccaaaaggcttcatgatgccatgctccgatcaatattgagagctcccatggtattttttcatacaaacccacttggacggatcatcaacagattttcgaaggatatgggtgacattgaccgaaatgtcgctgtatttgtcaatatgtttatggcacaaatatctcagttgctctcaactttcgttctcatcggctttgtcagcaccatgtctctttgggctatcatgccactcctgatt

SEQ ID NO: 37050 - DNA, 285 bp, Zea mays
cagactccaccaccccgcttcgatcttctgttgcagctgaaatctgtcagattctgcagttcattccaaatggctgctgcagcagagcacggcaactgcgatgcttgggcggccagagacccttctggggttctctcaccatacaagtttaaccgcagggcagtgcaaagcagcgacgtttcgctgaagatcatatactgcggggtgtgttacggtgacgttatgtggatacagaacaagcacaacgactcagtttatcctctggttcctgggcatgagatagct

SEQ ID NO: 37051 - DNA, 284 bp, Zea mays
cccacgcgtccggaggaacgtccgtccgtccgtccggggaaggagcggtagggaggcggagatgatcgaagtggtgctcaacgaccgcctggggaagaaggtgcgggtcaagtgcaacgaggacgacaccatcggcgacctcaagaagctggtggcggcgcagacggggacgcgccccgagaaaattcgcatccagaagtggtacaacatctacaaggaccacatcaccctcaaggactacgaggtccacgacggcatgggcctcgagctctactacaactgag

SEQ ID NO: 37052 - DNA, 278 bp, Zea mays
  unsure (1)..(278): unsure at all n locations
cccacgcgtccgcggacggtggngagagaattagctatagccagccgtgtgtcgaacacgacacgcgataatggcactcatgcaggagagcagacaggacttgctcgaagcgcacgacgagctcttccaccactgcctgtgcttcgccaaatcgctcgcgctcgccgtggcgcaggacctccgcatccccgacgcgatccaccaccacggaggcggcgccaccctccaccagatcctcgccgaggccgcgctccacccaagcaagcttcgcgccctac

SEQ ID NO: 37053 - DNA, 243 bp, Zea mays
ctcactcgtccgcccacgcgtccgctctctacctagctagctagccagccttcctgtagcgcggcagatatgtctgcctccaccacggcggcggcggcggcgtcgctgctgctgctgctgctcgtgtcgctcgccgcggcggctgacatgtcgatcgtgtcctacggggagcgcacgctgatgtatgcgcggcggatgtacgcggagtggatggcggcgcacggccggacctacaactctgtc

SEQ ID NO: 37054 - DNA, 286 bp, Zea mays
cagcagccaattcgctcgagttcagatcgagcgcgcgccaagcaagtcttccggccggccgcgaagagcgcaatcaagcaagacaagatggtgaagcgcgccttcggaagcgtcggcgactccttcagcgccacctccatcaaggcctacgtggccgagttcatcgccaccctcctcttcgtcttcgccggcgtcggttccgccatcgcctacgtcaataataatcccttgtccatgttccacacacatgcatggcaactgacgaatggcggcgcgctggacccgg

SEQ ID NO: 37055 - DNA, 116 bp, Zea mays
agaagaagtacggtcaggatgcgacaaacgttggggatgaaggtggttttgcacctaacattcaggaaaacaaagaaggccttgaactattgaaggcagccatagaaaaggctggc

SEQ ID NO: 37056 - DNA, 165 bp, Zea mays
ggcgtcggatgttgagtaccgctgcttcgtcggctgcctcgcctggggcacggacgaccactccctccacaacgccttcagcacctacggcgatgtcctcgagtccaagatcatcctcgatcgggagacgcagaggtcccgcggcttcggcttcgtcaccttctc

SEQ ID NO: 37057 - DNA, 283 bp, Zea mays
ggcatctccaatctcctcgccccccacggacctgaaccgagaacctttaccgccgccgcctctcgcctagccgccggagaagcgccgctcgctcaggaggacagccatggcgccggagccggaggatgatattatgaacgagaagaatccccgcccgctcgacgaggatgacatcgcgctcctcaaaacctatggactggggccgtattcgaccagcattaagaaggtcgagaaggagatcaaggaaatggccaagaaaatcaacgacctctgtgggataaag

SEQ ID NO: 37058 - DNA, 285 bp, Zea mays
cagagacttccagaaggctctagcgacccccgccgctttagagctacccgcggcgagattcaggagctgcctgccatggtgaaggacagcgcctactacgatgtcctggggctcagcgtcgacgcgtcccccgccgagatcaagaaggcgtattacattaaggcgaactggtgcatccggacaagaatcccgggaaccctgacgcggcactcaagttccaggaacttggagaggcttatcaagtcctaagtgatcctgggaaaaaggaggcgtatgataattatg

SEQ ID NO: 37059 - DNA, 285 bp, Zea mays
aacgagaagagcggcggcgcgggcggacaaggagcaggcggaggaggagctgtgccaagccacaatgggtatctcacgcgactcgatgcacaagcgccgtgccaccggtggaaagcagaaggcctggaggaagaagcgaaagtatgagcttggtcgccagccggccaacaccaagttgtcaagcaataagacagtgaggagggtccgtgttcgtggaggtaacgtgaagtggagggctcttcgccttgatactggtaactactcatggggaagtgaagctgttac

SEQ ID NO: 37060 - DNA, 276 bp, Zea mays
cccacgcgtccgcaatttcccaacggtgtgtccatgagcaaggatggctcattctttgttttctgtgaaggatcgcgcggcaggttgagcagatactggttgaaaggcgagaaggcaggcactgtggatcttttcgctatcttgcctggcttcccagacaatgtgagaacgaatgagaagggcgagttctgggtggcaatccactgccgccgaggtctgtacgcccggcttatgagccgccatgtcaagctgaggaagtttttgctcagcctcccg

SEQ ID NO: 37061 - DNA, 276 bp, Zea mays
cgacccccgcccaacactcccagccgtcacgccgtcgccgccgcgagtccttcattcaccatgatcatctccaagaagaaccgccgcgagatctgcaagtacatcttccatgagggggttctatatgccaagaaggactacaacctggccaagcaccccaagcttgacgtgcccaacctggaggtgattaagctcatgcagagcttcaagtccaaggagtatgtcagggagaccttctcctggcagtactactactggtacctcaccaacgatggc

SEQ ID NO: 37062 - DNA, 271 bp, Zea mays
ggtgggttggcttctcctccccctccggttcgggttcgggttcgtgaggttctccggggttcggttacgtgggttggcggatcgagatggcggcgtcggatgttgagtaccgctgcttcgtcggctgcctcgcctgggccacggacgaccactccctccacaacgccttcagcacctacggcgaggtcctcgagtccaagatcatcctcgatcgggagacgcagaggtcccgcggcttcggcttcgtcaccttctccacggaggaggcgat

SEQ ID NO: 37063 - DNA, 276 bp, Zea mays
agactcatggacatcatcatcaactcactctacagcaacaaggatatcttcctgagggagctcatatctaatgcctctgatgctggataagattaggttcctttcccttactgataaggaagttctgggtgaaggggacactgcaaagcttgagattcagattaagttggacaaagagaagaaaatcctctccattcgggataggggtattggtatgaccaaggaagatcttattaagaaccttggaacgattgctaaatctggcacttcaggaac

SEQ ID NO: 37064 - DNA, 277 bp, Zea mays
cgattatcaacagtggaccacgtgaggatgccacccgtattggttccgctggtgttgtgagaaggcaggctgtggatatctcacccctgagaagggtgaaccaggccatctacctcctgaccactggtgccagggagagcgccttcaggaacatcaaaaccattgctgagtgccttgcagatgagttgatcaacgctgccaagggctcttccaacagctacgccatcaagaagaaggacgagattgagcgtgttgccaaggccaaccgttgagtgga

SEQ ID NO: 37065 - DNA, 278 bp, Zea mays
acctcctctgctctcccccacctcccggtccggcagcagagagcgggggtgcagagagatcgagatccggaggccgcgagtgggagcgccaccaccagcgactgcggcaatggcgggcacggtgacggtcccggggtcgtcgaccccctccacgccgctgctcaaggacgagctcgacatcgtgatcccgacgatccgcaacctcgacttcctggagatgtggcggcccttcttccagccctaccacctcatcatcgtgcaggacggcgacccgacca

SEQ ID NO: 37066 - DNA, 279 bp, Zea mays
gtacgagactacgtcgctggtgcagatcgagggggtgaacaccaaggaggacgtcgcgtggtactgcgggaagcggatggcctacatctacaaggccaagaccaagagcagcggcacccactaccgctgcatctggggcaaggtcgcccgcccgcatggcaactccggcgtcgtccgcgccaagttcaggtccaacctgccgccggaatccatgggccgtaaggtcagggtgttcatgtaccccagcagcatctaaagataatctgaatgtgtggagga

SEQ ID NO: 37067 - DNA, 269 bp, Zea mays
tggatttggtgcagcagggcaaaggtgcatggcattgagcactgctgtttttgttggcggttcagaatcatgggaggatgaattagtcaaacgtgcaagtggccttgttgttagttcaggaatggttaatgatgcagaccttggtccagtgatcagccgacaggcaaaggatcgtatctgtaaattagttcaaagtggtgttgacagtggtgctcgtatattgcttgatggaagaaagatagtggttcctcgctatgaagatggaaatt

SEQ ID NO: 37068 - DNA, 271 bp, Zea mays
ctcacgcgctcgccgcctaggagcattcacgttggtggcgggcggtggctcggttcctctcctccaccgcacctccaagaatccacctccacgactgagctgacggctcggcggcgccatggcggttcaccggctccaaccttccctctctggcctacagtgctccaccgcccggtcgccagtgctcctccatgggccacggctgacgggtgcacgcaccgatggttggtgcaggcaggagaggtggatttggtggacctagattcgatgt

SEQ ID NO: 37069 - DNA, 272 bp, Zea mays
ggcgaccaacctcctccgccacggcttccgcgtcaccgtctggaacaggaccctcgccaagtgccaagagctcgccgcgctcggcgccaccgtcggggagacgcctgcctccgtcgtctccaagtgcagatacaccatcgccatgctctccgaccccagcgccgccctatcagtcgtcttcgacaaggatggcgtgctcgagcagatcggtagcgggaagggctatgtggacatgtccactgttgacgctgcaacttcgaccaagattagcg

SEQ ID NO: 37070 - DNA, 270 bp, Zea mays
attcgatggcggccaacttcgggaacaagatccgcaacgccaagctggttcttcttggagatgtaggcgctggcaaatctagcttggttcttcggtttgtcaagggacagtttgttgaattccaggaatcaacaatcggagcagctttcttttcccagaccttagcggtaaatgatgagactgttaagtttgaaatctgggatactgctgggcaggagaggtatcatagcttggcccccatgtattataggggtgcagcgccgccattgt

SEQ ID NO: 37071 - DNA, 262 bp, Zea mays
cagccaattcgctcgagttcagatcgagcgcgcgccaagcaagtcttccggccggccgcgaagagcgcaatcaagcaagacaagatggtgaagctcgccttcggaagcgtcggcgactccttcagcgccacctccatcaaggcctacgtggccgagttcatcgccaccctcctcttcgtcttcgccggcgtcggttccgccatcgcctacgggcaactgacgaatggcggcgcgctggacccggcgggcctggtggcgatcg

SEQ ID NO: 37072 - DNA, 287 bp, Zea mays
cccacgcgtccgctgagattgtgaatatgcttgccaagagcctgcctggaagcgcaacgttcttcctcacgtttgttgcactgaagttcttggttggctatggccttgagctctctcgcctggttcctctcatcattttccacctgaaaaggaagtacctatgcaagacggaggaagaagtgagagcggcatgggctccagtgatctgggatataacaccagggtaccaaatgacatgctcatcgcaacagttgttctgtgctactcagtcattgcgcctttgatta

SEQ ID NO: 37073 - DNA, 285 bp, Zea mays
ctcctccgttacaaacctctccgatgttgaggggctatgtgtttcctttgctgggagagaaggttcatctgatcctgcagtagctgtgaagaaacttctgcatgaggacccatatacagctggagaaatagagaaaattacaggagaaggcctgacatctgtcttccagggctctcagacgtcattggatgttataaaagcggcacagcactacaagctatttcagcgtggcgacccatgtctactctgaagcaaggaggggttatgctttcagggatactgtct

SEQ ID NO: 37074 - DNA, 293 bp, Zea mays
agcagctggaggatggccgcaccctggcggattacaacatccagaaggagagcactctccacctggtgctccgcctcaggggtggcatgcagatttttgtgaagacattgactggcaagactatcaccttggaggtggagagctctgacaccattgacaatgtgaaggccaagatccaggacaaggagggcattcccccagaccagcagcgtctgatctttgcgggcaagcagctggaggatggccgcactctcgcggactacaacatccagaaggagagcacccttcacctt

SEQ ID NO: 37075 - DNA, 284 bp, Zea mays
cggacggtgggcggacgcgtgggcggacgcgtgggcggacgcgtgggctcaagttctcgcgcccagagcacaatttttctcacctcaatcactgcagccatggacgacagcggagccggtagcaaggcgaagaagggggcggctgggcgcaaggctggcggccccaggaagaagtcggtgtcgcggtccgtcaaggccgggctgcagttccccgtcggccggatcgggcgctacctcaagaagggccagtacgcgcacgcgtgggcaccggcgcccccgtctat

SEQ ID NO: 37076 - DNA, 289 bp, Zea mays
cccacgcgtccgcccacgcgtccggagcagagtctgttgacatggtcgaggccgttcctgcatgacaagaggaagttctacaggctcgctgacccggctctgctgggctgctacccgtcctcggcactgaaccagctggtcgtgatcagcatcatgtgcctccaagaccagccccacgtccgcccgatcatctccgatgtcgtcataggcctgaaccacgtcgcgagccagccatacaccgctgagcgcccgccgcccgcgtccgtgagctccccggtgggcagcgggt

SEQ ID NO: 37077 - DNA, 288 bp, Zea mays
gacgtggagtaccaagggtacctgatccccaagggctggaaggtgatgcccctgttccggaacatccaccacagccccgaccacttcccctgcccggagaagttcgacccctcccgattcgaggttgctcccaagcccaacacgttcctgccgttcggcaacgggacccactcgtgcccgggcaacgagctcgccaagctggagatgctcgtgctcttccaccacctcgccaccaagtacaggtggtccacctccaagtccgagagcggcgtgcagttcggccccttc

SEQ ID NO: 37078 - DNA, 287 bp, Zea mays
cggacgcgtgggcatggtgctgccactaatgtcatttttggtcttgctcttggatacaagtctgttatcatccacgattttcgctattgctgttagcatctatgtcagtttctccattgctgcgatgtacggcattgcagttgccgctcttggtatgctgagcacaatcgcaactggtcttgctattgatgcttatggtcccatcagtgacaatgctggtggtattgctgagatggctggaatgagccacagaatccgtgagagaactgatgctcttgatgctgctg

SEQ ID NO: 37079 - DNA, 285 bp, Zea mays
ggcagctggtgcttcatggattcagtttgatgagcctacccttgttaaagaccttgatgttcacgaattggcagcattctcttcagcatatgctgaactagagtcggcattctctggattgaatgtgcttatcgagacatactttgctgacattcctgctgagtcctacaagaccctcacgtcattgagtggtgtgactgcttacggttttgatcttatccgtggagccaagacccttgatcttatcaggagcagcttcccctctgggaagtacctcttcgctgg

SEQ ID NO: 37080 - DNA, 280 bp, Zea mays
cccacgcgtccgaacgtcttgtaattcagcttgggaagaagatggttgagatgactggtgacttcactccagatttgatggccctattgtcagctgacatcatcatttctacccctgaaaaatgggatgggattagtcgaaattggcatagcagaagttacgttatgaaggtcgggctcatgatattggatgagatacatcttctgggagctgaccgtggacccatccttgaggtcattgtatcaagaatgcgatacatatcatcacaaacagaacgttc

SEQ ID NO: 37081 - DNA, 288 bp, Zea mays
gctggagctgatgcggctctatgtaacaattcacactgatcatgaaggcgggaatgtcagtgctcatactggtcatctggttgggagtgctctgtcagatccttatctttctttcgcagcggctctaaatgggctagctgggccactgcatggccttgcaaatcaggaagtgcttttatggatcaaatctgtaattgaggaaactgggagtggtgttaccacagatcaactcaaagactatgtctggaagacactaaagagtggagaggttgttcgtgggtttggtca

SEQ ID NO: 37082 - DNA, 286 bp, Zea mays
ctctcccagtgtcccagctcagcttagcaatccgtctctctatctacaggcgggggaattaatagatggagggcaaggaggaggacgttcgcctgggcgccaaccgctactcggagcgccaccaatcggcacggcggcgcagggcacggaggagaaggactacaaggagcctccgccggcgccgctgttcgaggcggaggagctgacgtcgtggtccttctaccgggccgggatcgccgagttcgtggccaccttcctgttcctgtacatcagcatcctgactgtg

SEQ ID NO: 37083 - DNA, 278 bp, Zea mays
gttagaaaggatacggctaaccatcatcaacaacctgctccagtatcatcctgaatcaagtgagaagttggcaatgggtgaattttttgggataaaacctcctgtgaagaaggttgatatcgatattgcaacacatatagttgttgaagacgacgggccaaaaagaagcatgctttacatagagacagccgatcggcctggcctacttcttgagataatcaagattatcgcggacacaaatattgatgtggagtcagctgagattgatactgagggtt

SEQ ID NO: 37084 - DNA, 278 bp, Zea mays
cccacgcgtccgatgacctgctggtgccacacctgggcacccaggcatgggtcaggtccctcaacttccccgtcgtcgacgactggagggcgtggcatctcggtggccaagccgccgggttcacgataaattactcaaacaacatgacgttcgcgacgatcaaaggtggcgggcacacggcgccggagtacgagccggagaggtgtttcgccatgttcagccgctggatactcgaccgtccactctaatctccactcgtacattgccggattcttgca

SEQ ID NO: 37085 - DNA, 278 bp, Zea mays
gagccgccgccgctgccgtttcgcgcaccgtaccctagccctcgtcaacggcggcttcgagctcctccagccatgacgttcaagcggaggaatggcggacgcaacaagcacgggcgcggccacgtcaagtacatccgctgctccaactgcgccaagtgctgccccaaggataaggctatcaagcggttcttggtgaggaacattgttgagcaggctgccgtgagagatgtgcaggaggcctgtgtacatgatggatatgttctacccaaattgtatgc

SEQ ID NO: 37086 - DNA, 281 bp, Zea mays
cggaccgtggtccgccgcgcttcgccctctcgctccagccgcttcacagcgccgccgctcgcctctccgaccgccgcgagaatgccgttcaagaggttcgtggagatcgggcgcgtggccctggtgaactacggcaaagactatggccgcctcgtcgtcatcgtcgatgtggtcgaccagaacagggcacttgtggacgcccctgatatggtcaggtgccagattaacttcaaacggctctcacttactgacatcaagattgacatcaaacgcgttcccaa

SEQ ID NO: 37087 - DNA, 79 bp, Zea mays
cccacgcgtccggttcgtgaggttctccggggttcggtttcgtgggtgaacggatcgagatggctgcgtcggatgttga

SEQ ID NO: 37088 - DNA, 276 bp, Zea mays
acggtccgggacgctggtgaaagctcggcgttgccctgcctcgagctcgaaggactttgtccctttacgtcgtagtccagctcctcgcatattgtggcctggtgcagattggagatccgcccggacttggatcgagtcctcctgtctttggacattcattggagtgctccattcattgaggcagcatgcctaagataaagacaagccgtgtcaagtatcctgaaggatgggagcttattgaaccaacaatccgtgagttggatgccaaaatgagag

SEQ ID NO: 37089 - DNA, 268 bp, Zea mays
gctgactgactctggtggtttccaaatggtttcgttgctgcatttggctgatattactgaggaaggagttacgtttcagtcacctgttgatgggaagcccatgctcttgacacctgaggaatctattcatattcagaacaatattggagctgatatcatcatggcacttgatgatgttgtaaagaccacaattactggcccgaggataaaagaagctatgtatcgcaccattcgttggattgacaggtgcatagctgctcacaagaaa

SEQ ID NO: 37090 - DNA, 278 bp, Zea mays
gttcggagcgcacacacacacaaccagatctcccccaaatccacccgtcggcacctccgcttcaagatgcagatctttgtgaaaaccctgactggcaagactatcaccctcgaggtggagtcgtctgacaccattgacaacgttaaggccaagatccaggacaaggagggcatccccccagaccagcagcggctcatctttgctggcaaacagcttgaggacgggcgcacgcttgctgactacaacatccagaaggagagcaccctccaccttgtgct

SEQ ID NO: 37091 - DNA, 275 bp, Zea mays
cggccatcggactccaggggctgctcgcctcgctcgcgtccaccgggttccaggcatccaacctcggcgacgccatcgacgtcgtcaaccagatgttagactggaggttgtcgcatgagaagcccagcgaggattgtgatgaagctgaacttgaccctaaatatagagcatctgtgaagtgcaagatatttctgggcttcacctcgaacctcgtgtcttctggcatccgggatataatccgttttctagctcagcatcacatggtggatgttatt

SEQ ID NO: 37092 - DNA, 266 bp, Zea mays
gtccaatctgcagcaatcttctcagcaggctgaggatgcattgtcacaaggaatggaagcattgcagcagtccttggcagaaacgctggctgggtcccttggtccatcaggatcttctggaaacgtggcaaactatatgggtcaaatggctatggccatgggaaaacttggcacactcgagaatttccttcgccaggctgacaatctacgacagcagaccttacatcagatgcaacgtatcctgacaatccgacaagctgctcgtg

SEQ ID NO: 37093 - DNA, 261 bp, Zea mays
ctcaaggattgtctcactgtacgctgagcagaatgaactccaatttgctgtcccaggagggcttattggtgtgggaacaaccatggacccaactctaacgcgtgctgacaggctggttggccaggttcttggtgaagtaggttcactacctgatgtttacgtagagcttgagatcaatttcttcctactccggaggctgttgggtgtgaggacgaaaggtacagagaaggcagggaaggtgtcgaagctcaccaagggtga

SEQ ID NO: 37094 - DNA, 91 bp, Zea mays
gttcacaaattatatgcaatcgcaagcgagcagaatggcgaggtccagtggtagtagaccagtggccctcgtgctgctggcgctgtgcgcg

SEQ ID NO: 37095 - DNA, 268 bp, Zea mays
cccacgcgtccgggccgtcaacgtcgagtccgtcatagccagcatcaaccacgccggcgccgtgatgcgcagcaacaagatcggcggcgggtgcatcctgtgcacgggcagtcccgtgggctcgctcggcgacgtggtgccctcggcgtacagcatctccaaggccgcggtcgtgggcgtcgtgcgcgccgccgcggccgagctggggggacacggcgtcagggtcaatgccatctcgccgtacgcgtcgccgccaggtttgataagg

SEQ ID NO: 37096 - DNA, 271 bp, Zea mays
aggatatatagataatatacaaacaaaggttcctccagagcccagagcaggagggaagtcaccggccgtcggcggggaggagatgtcggacggcgcgggctcccggacgggcgtcgctggcgcgctgggcctctcggtcacctcgtcggtggccatcgtcatctgcaacaagtacctcatcagcactctaggcttcttcttcgcgacgacgctgacgagctggcacctcatggtgaccttcttcacgctgtacgttgcgcacggctgcgct

SEQ ID NO: 37097 - DNA, 270 bp, Zea mays
ctcgtcctctcagtaccctgatgttaaccatgccacagtgaagacttccactggggagaagcctgttcgtgagcttgtctctgatgacgagtggcttaatggtgaattcatcacaactgtccaacagcgtggtgctgcaatcattaaagcgagaaagttctccagtgctctctcggctgctagctctgcttgtgaccacattcgtgattgggttcttggaacacctgagggtacatttgtttccatgggtgtgtactctgatggttcata

SEQ ID NO: 37098 - DNA, 249 bp, Zea mays
ggaccgtgggcaaaagcttaatgttaccatgaaggctgatgagaaggagttgattggcaaagctttgaagaagcgtgttatgcaaacgtggcttccagccagcactgcacttcttgagatgatgatattccaccttccttccccggcaaaggctcaaaagtatcgtgtggagaacttgtatgagggacccttgatgatgtttatgcactgctatcagaactgtgatcggaggtcctctatctgtatgtt

SEQ ID NO: 37099 - DNA, 252 bp, Zea mays
ctccctcgactccctctccatatgcatgaacgtgaacgcatgggtgttcatgatctccgtcgggttcaacgccgcggcgagcgtgcgggtcgggaacgagctcggcgcaggcaacccgagggcggcggcgttctcggtgttcatggtgacgtcgctgtcgttcatcgcggcgacggtgtgtgccgtcgtcgtgctgtgcctccgcgaccagctgagctacttcttcactggcggcgaggcgtagcgcgcgcg

SEQ ID NO: 37100 - DNA, 225 bp, Zea mays
cagcccccaaggccccaactacccccagtctcggaagagaactatccagaagcgcaagactccaaagccgtcgccttcctatccatcccttcctcgccgcgggggtcgcctgagatcacataaacaatggtggaggctgttgctgtgcttggtagcagcgattgtgtcaaaggcaccatcttcttctaccaagaaggagatggccctaccactgtctacggaagt

SEQ ID NO: 37101 - DNA, 204 bp, Zea mays
gtggagctggagtggtgaagggcttccagcaggggctttacatgggcaacggcggtggcgccaatgttgtcgcccccgggtacaccaagggggatggccttggcgctgagattgttggcaccttcatcctggtgtacaccgtcttctcggccaccgatgccaagaggaacgccagggactcccatgtctccatccttgccccac

SEQ ID NO: 37102 - DNA, 274 bp, Zea mays
cacagagctgcaacagcatcagctgccacctccttccttccttcctgcataggttgctacacgtatatattctgaagaagagatcgagatgaccagcgtgtggaagaccaaggttctgcctggcctcaacaagatctttgacaaggatggcaagaaggctgcagctgcaggcttcttgaagtccttcaacaaggaggagattgacaaggagattgaggacaagaagacagagctggagcccaaggtcgtggaggcctacgaagcatctcctcct

SEQ ID NO: 37103 - DNA, 194 bp, Zea mays
gtggttgtacccacggatggggttttatccccatgctggtgtggtagaagaatcaactattgctgccttgaagagagcattgggttctctgagcacccatcttgcatcaaacacattccttgttgggcattcagtgactctcgcggatatcgtgatgacatgcaatctctgtatgggatttagccgtatcttga

SEQ ID NO: 37104 - DNA, 164 bp, Zea mays
gttgactatggcaagaagtccaagctcggtttcaccgtgtacccatccccccaggtgtccacatccgtggttgagccatacaacagtgtcctgtccacgcactctctcctcgagcacactgatgttgctgtcctggtcgacaatgagggcatctatgtgcatct

SEQ ID NO: 37105 - DNA, 176 bp, Zea mays
gtggaagccctcaagaagatgaacaaaaacaagaagctagtgaagaagctggcaaagaagtaccatgctttccttgcatctgaggctatcattaagcaaattcctcgtcttcttggtcctggtcttaacaaggcaggaaaattccctaccttgggtgacgcaccatgaatcccttg

SEQ ID NO: 37106 - DNA, 167 bp, Zea mays
ggcgatggggcactccaacgtgtggaactcgcaccccaagaactacgggcccggatcccgcgtctgccgggtctgtgcgaaccctcatggactgatcaggaagtacgggctgatgtgctgcaggcagtgcttccgcagcaacgccaaggacattggcttcatcaagt

SEQ ID NO: 37107 - DNA, 265 bp, Zea mays
cccacgcgtccgcccacgcgtccgcaaaataaaattgtcgaattctgcaagaatgtaggacttgttcttctcgcagatgaggtttaccaggaaaatatatatgttgaagataagccattccactcattcaaaaaaattgcacggtcactgggatacactgatgatgatcttcctttggtatcattccagtcagtttctaaaggctactacggagaatgtggaaaacgaggcggttatatggagataactggattcagtcctgatg

SEQ ID NO: 37108 - DNA, 281 bp, Zea mays
acaagtaagagcagtgtccatccggtgggtcggacggaactagctcctctgtcgccaaataccctaggccctgacttgctttggccatggtcgaagcagcgctagccaggcgagcctcctgctccagaagcagatcaaggatcttgcgaagaaccccgtggatgggttctccgccgggcttgtaggcgacagcaacatcttcgagtggcaggtcaccatcatctgaccgcctgacaccctatatgatggaggctacttcaatgcaataatgaccttccccc

SEQ ID NO: 37109 - DNA, 261 bp, Zea mays
cccacgcgtccgcccacgcgtccgctctgcctgtagtcttcttgctgcggcggcggggtggagataggggtggcgggggagaagttccagctggggacggtgggggcgctcagcctctcggtggtgtcctccgtctccatcgtcatctgcaacaaggctctcatgagctcccttggcttcaacttcgccactactttgacaagctggcatctcctggttacattctgttctctccatgtggcattatgtatgaagctgttt

SEQ ID NO: 37110 - DNA, 262 bp, Zea mays
cactcatgcagtggtgtatgctcggctgataactgaaggaaaggactatggtatacatggtttcattgtgcaactgcgaacttcagaggatcactcccctcttcctggtattactctgggtgatattggtggaaaatttggcagtggtgcatataacagtatggacaatggtgttctgcgatttgaccatgtgcgcataccaagggatcaaatgttgatgaggctttcacaagttacaagggaggggaaatatgttcattca

SEQ ID NO: 37111 - DNA, 260 bp, Zea mays
cgctctctcggtctcagccatggcggaggtggatcagccccaggacgcggtgaagctcttcaaccgctggaccttcgacgatgtccaggtgaacgatatctcgctgaacgactacctggctgtgactgcggcgaacacgcgacattcctgccgcactccgcggggcgctactccaagaagcggttccgcaatgcgcagtgcgccatcgtcgagcgcctcaccaactcgctcatgatgcacgggcgcaacaacggcaagaa

SEQ ID NO: 37112 - DNA, 262 bp, Zea mays
gtttccaacatgccagtcccctcccactcccagtcccatctcgacgacatggccgcagccgcagggccatcaagctctgtgaaggagacgctcccgccggccctcggctccacctcccagccacctcccgtcttcgatggcaccaccaggctgtacatctgctacttctgcccgttcgctcagcgcgcctgggtcaccaggaacttgaagggtttgcaggacaagatggagctggtggccatcgatctgcaggacaaaccgg

SEQ ID NO: 37113 - DNA, 254 bp, Zea mays
cagacctggtaacgtcgccgccaatgaccttggcatgctcatcctcggccgcgtcctcctcggagctcggcgtcggcttcgccaaccagtccgtgcccgtctacctctcggagatggcgccggcgcgcctccgcgggatgctcaacatcggcttccagctcatggtcaccatcggcatcctctgcgccaacctcatcaactacggcaccgccaagatcacgggcggctggggctggcgcgttcagatcgcgctc

SEQ ID NO: 37114 - DNA, 260 bp, Zea mays
cagcactcaattacttcagagaaatgatgtcatcaagattgtgcctgtcaccaaagttcctgttgacggcgttgtcataaaaggtcaaagccatgtcaatgaaagtatgataactggggaagcaaggcctattgcaaagaaaccaggcgacagggttattgggggtactgtaaatgataacggttgcataattgttaaggcgactcatgttgggtcagaaacagctttgtcgcaaatagtccagttggttgaagctgctc

SEQ ID NO: 37115 - DNA, 257 bp, Zea mays
ggaccgtggcggcgcttgtggggctcagctacggggacgcgcacctcgtctccgtgggctcgacgctcaccgcgctggagatgctggcggcgcagacgtggtggcacgtccgggaaggggagggcatctacgaggacgacttcagcgggaacaaccgcgtggtcggggtgctgtgggccaacaagcgcgacagcaggctgtggttcgcgccgcccgagtggaatgagtgccggctggggatccagctgctgcccgtg

SEQ ID NO: 37116 - DNA, 260 bp, Zea mays
ggatgctgcggagagcaccatgaatgcctacaaagctgctcaggatattgcacttgctgatctggctccaacccaccccatcaggctcgggcttgctctcaacttctcagtgttctactacgagatcctcaactcccctgaccgtgcttgcaaccttgcaaagcaggcctttgatgaggcaatctccgagctagacagcctgggagaggagtcctacaaggacagcactctgatcatgcagctcctgcgtgacaacttgt

SEQ ID NO: 37117 - DNA, 253 bp, Zea mays
cccacgcgtccgcgaccgtggggtcactcggcagtcggcacgcaggctatcagcacagcagcatccagagccatccccacctcctcgctacgcttcgcttcctcggcgccgattcctcctcctccacctccaccctcgtccgtcccgttccggcgcgcgagctcgcccgagatggcgaacgcgagatcgggtgtcgctgtgaacgatgagtgcatgctgaagtttggcgagctgcagtcgaagaggctgcacc

SEQ ID NO: 37118 - DNA, 252 bp, Zea mays
ggaattaaaggacctgcaaaaggaccctccaacgtcatgcagtgctggtcctgatggtgaggatatgttccactggcaggcaaccatcatgggtcctcctgatagtccatatgctggaggtgttttcttagtgaacattcatttccccccggactaccctttcaagcctccaaaggtatcttttaagacgaaggtcttccatccaaacatcaatagtaatggaagcatatgtctcgacattcttaaggagca

SEQ ID NO: 37119 - DNA, 253 bp, Zea mays
atggaataagccacaatgatgaagttgatactgtagctattgccccttttgtaaaggatgtattggacagtctagaatttgcaagggggagtgcagattcaacatggggctctgttagggctgcaatggggcaccctgaacctttcctggtcaaacatgtcgcaattggaaatgaagattgcgggaaaaagttctaccgtggtaattacctcaaattctacaatgctataagagaggcctatccagacattca

SEQ ID NO: 37120 - DNA, 253 bp, Zea mays
gttgaagcgcaaccaaatagacgtgctgtcctaggagcaagcgagtctcgccctgatctgatattaacaggacataaggaaaatgcggaatttgcgcttgccatgtgtccagcagaaccatatgtcctatcaggaggaaaggacaaatctgttgtcttgtggagcatccaagaccatatatctgcccttggggattcctcgtcttctcctggagcatctggcagcaagcagtctattaaaactgcaaatgaaa

SEQ ID NO: 37121 - DNA, 301 bp, Zea mays
cgtttccaacaggccagtcccctcccactcccagtcccatctcgacgacatggccgcagccgcagggccatcaagctctgtgaaggagacgctcccgccggccctcggctccacctcccagccacctcccgtcttcgatggcaccaccaggctgtacatctgctacttctgcccgttcgctcagcgcgcctgggtcaccaggaacttgaagggtttgcaggacaagatggagctggtggccatcgatctgcaggacaaaccggcttggtacaaggacaatgtttacgcacagggcacggtg

SEQ ID NO: 37122 - DNA, 293 bp, Zea mays
ctgctcgttgccggctgcccccgcggccccggccagtccatcccctcgctcgctccccaactccagcaggcagatcagatacatccatccattcgcggaccggaaggaaaggaaagggttgaactatgagcgccgtggcggtttcgtcgtcgctgaacccggacgcgccgctcttcatcccggcggcgctgctgcaggtggaggacttctcgccgcagtggtgggacctcatcaccaccactgcctggttccgcgaccactggtcccgcgagcgacgccacctggacgagatg

SEQ ID NO: 37123 - DNA, 288 bp, Zea mays
ttaaccttggaaagacctgggacaagcttcagttggccgccagggtcatcgttgccattgagaatccgcaggacattatcgtgcagtctgctaggccctatggccagagggctgtcctcaagtttgcgcagtacactggtgcccatgccattgctggcaggcacactcctggtacattcaccaaccagttgcaaacctccttcagtgagccacgccttcttatcctgactgacccgaggactgatcatcagcccattaaggagtctgcgcttggaaacattcccacca

SEQ ID NO: 37124 - DNA, 288 bp, Zea mays
gaggaggcacgaaggacagtggaggccgctaaagttactctgaaagtcaaagaggatgatattaacaaaagactaaatgaattacatttacaggaaaaggatgctgactcaaagcgcagtgcattggaagagcaggggaaaaaattggatgagagagaggcaaaggtcactaatagagaaaaggaggggctccagaagcttcttgaggatcatcaggtggagcttgaatccaaaagacgggattttgaattagaattagcagaggaaaggaaatcttttatcaaatat

SEQ ID NO: 37125 - DNA, 286 bp, Zea mays
gcgcaacgagatatccggccagatcccaggcgacatgagagggatgcttagcttgatcgaggtcaatctgtcgaacaaccggctcgcgggcgccataccggtgttcggaccgttccagaagagcgcggcctccagcttctccggcaatgccgagctgtgcggcgacccgctgaccgtagactgtggatcatcaatctatggctccagctatggaacggagacggaccacaggggaatatcttacagggtggccttggcagtcgttggttcctgcgtgctcatcttc

SEQ ID NO: 37126 - DNA, 290 bp, Zea mays
  unsure (1)..(290): unsure at all n locations
ccatctgccacccttcacccgctcttcttctgccggcggttccctccacccgctcttctgccggtggttgcgagagtgtgttaagacaagatggtggcgaatggcgacgcacctgctagagggagtgcggcggcagctgcaagcctgcgcaggcgtaggaccacaagcggtgctgctgctggcggaggtggtgccagctcgatgctccagttttacaccgatgaggctgcgggccgcaaaatgtcaccaaacaccgttctgatcatgagcattgngttcatcgctgttgt

SEQ ID NO: 37127 - DNA, 257 bp, Zea mays
gagattattgaagctgatctcgtcctcctagctatgggattcttgggtcctgaagcgtctatcgctgagaaactgggtttggagaaggacaacagatcaaacttcaaagcgcagtttggagacttcgctaccagtgttgatggtgtgttcgcagccggggactgcaggcgtggacaatcactggtggtatgggccatcacggaggggcggcaggctgctgcagcggtagacaagtacatatcaaggcatgatcagaa

SEQ ID NO: 37128 - DNA, 279 bp, Zea mays
ttttgagcctatctacgatgagaccgatggggctgatgggtatgtctccgtggaggtgtctcctaggttggcaaatgacactcaaggaactgttgaggccgcaaagtggttacacaaagtggtcaaccgccccaatgtctacataaagatccctgctaccgccgaatgtgttccttccatccgggaagttatcgctaatggcattagcgtcaacgtcacgcttattttctctattgcgagatacgaggctgtgattgatgcttaccttgatgggctaga

SEQ ID NO: 37129 - DNA, 246 bp, Zea mays
cggaccgtgggtgtcacaggcagcagctaacatccctcactctcggtacctgacctgaccacgagagcaacatgggcggaggacacgacatgcacgggcagcactacggccacaacggcggcgtgaagggcttcgtgtccaacctcgtccacggcggcggcggccatggccatggaagcggctacggccatggccatggaaacggctacggccatgggaatggcggctacggcggcggccacgggt

SEQ ID NO: 37130 - DNA, 269 bp, Zea mays
  unsure (1)..(269): unsure at all n locations
ctcgctgaaagggttcgatctggttgacaagatcaaggagaagctggaagccgagtgccctggaaccgtctcctgcgcagacctgctggcgattgcagctagggatgcggttgtgctggttggtgggccttactgggatgtcccagtaggaagactggactccaagaaggcgagcctggacctagcaaacagcgacatccctacggcccagcaaggcctcctcacgctcattgccaagttctgggangagggccttgatgccactgaca

SEQ ID NO: 37131 - DNA, 295 bp, Zea mays
gcaggctttggggccaaaagaaacggagaggagaaaagcgggggcggcaagcaaccacgggcggactcggagcgtcctcctcctcccgtctataaattcccctccttttcttcctccatatataggggccatcagatccaagaagagggaagagcaccaaggaccttcggcgcccgttcaggatccacatcttcccgagcgagttcttggttgacctcttcctcttcggaccacctccaaggctcttggtgtagcttgccactctcaccaatcaagttttcatgtctgatctcga

SEQ ID NO: 37132 - DNA, 215 bp, Zea mays
gtgctagccatggatctaggcgctcccgcccgacggcgcctaccgatccgcctcttgctggtgttgctcaccgtcctcgtggtcctcacagcgcgctccagtgccgaagtcatcaccctcaccgaagagaccttctccgacaagataaaggagaaggacacggtgtggtttgtgcagttctgcgtcccctggtgtaaacactgcaagaaccttgg

SEQ ID NO: 37133 - DNA, 278 bp, Zea mays
ctctatctctttcgccgagctcctcgaaaccctaggagcgtgcttgaccggcggcggcgaggtgatggcgatggaccctgacgcggtacgaaggccttcgtggagcattactaccgaacgttcgacaccaaccgcgcggcgctggttgggctgtaccaggagacctccatgctcaccttcgagggccagaagttccagggcccctccgccattgccggcaagctcggatctctccctttccaggcctgcgagcatcagatcgtcaccgtagactgcca

SEQ ID NO: 37134 - DNA, 278 bp, Zea mays
gcgagcgagggacccggggcggaagaagagagagaagacgtctctctcctctcggcgtccccgttccccaacctctcgtctgctgcctgcctgcctgcctgcctgcaaaaaggagtttgtcatggcgtctaagcgcatcctcaaggagctgaaggacctgcagaaagacccccccacatcatgcagtgcaggtcctgctggtgaggacatgtttcattggcaagcaacaattatgggaccacctgacagtccctatgctggtggtgttttcttagtga

SEQ ID NO: 37135 - DNA, 261 bp, Zea mays
ggcaaacgcgagatcgggtgtcgctgtgaatgacgagtgcatgctcaagttcggcgagctgcagtcgaagaggctgcaccgcttcctaactttcaagatggacgacaagttcaaggagatcgttgtggaccaggtcggggatcgcgctaccagctacgaggacttcacaaacagcctccccgagaatgactgccgatacgcgatctatgatttcgactttgtcactgcagaagatgtccagaagagcaggatcttctatat

SEQ ID NO: 37136 - DNA, 250 bp, Zea mays
gtctgggagggcaagagcgtcgtcacaactggccgcaagatcattggcgccaccaaccccctggcttctgagcccggcaccatccgtggcgactttgctgtcgacattggcaggaatgtcattcatggaagtgacagcattgagagtgctaataaggagattgccctgtggtttcccgagggccttgctgattggcagagcagccagcacccctggatctacgagaagtaaacagtgaaagtttcacatg

SEQ ID NO: 37137 - DNA, 274 bp, Zea mays
ctactcctatccactgcggcctggacgcgtgcgagagacttgaccaagcagcagcagcagggatggcgcctctgaagctgtacgggatgccgctgtcccccaacgtggtgcgcgtggccaccgtgctcaacgagaagggcctcgacttcgagatcgtccccgtcgacctcaccaccggcgcccacaagcagcccgacttcctcgccctcaaccctttcggccagatcccggctctcgtcgacggagacgaagtcctcttcgagtcccgtgcgat

SEQ ID NO: 37138 - DNA, 275 bp, Zea mays
gtgaaatgcttgatgaacgaacgaagaaggccgaaacatggcaccataatgctgccaaccgtgtggcatattccaaaccagcggatcctatcacttgtgcaacatttgctcaagatgtcattgaaggtagagcaagcgtttcacaagctcacgagcacaaacaccagcccctgatatttggacctgcaagtattgttggtggtggtctaacaagtgaaagggaaagaatgacagcgcaagtttttcagcctagttacaggatgccaacaatgagc

SEQ ID NO: 37139 - DNA, 272 bp, Zea mays
actacgagcactgcgaggccttgttcgattgaagtcattggttgagggtaattcagtaaagcgtcaatctgcaagcactctgcgctgcatgcaaactctatcacgggtgcagtcacagatatcttccaggagagcaaagatgtccgaggagaaccaggctctccaacgccagctcctacttaaacaggaactggagaatttcagaatgggtgagaactgggatgacagcacccaatccaaggagcaaatcgaggcaagcctgataagcaggc

SEQ ID NO: 37140 - DNA, 274 bp, Zea mays
gggcgacaaggcccagatcagcatctacgacccccaggtgacggaagaccagatccagcgggacctggccatgaacaagttcgactgggaccacccgatgcacctgcaaccgacgagccccacggccattaagcaggtgagctgcgtgtgggacgcgtacgaggccaccaagggcgcccacggggtgtgcatcctgaccgagtgggacgagttcaagaccctggactaccagaagatcttcgacaacatgcagaagcccgccttcgtcttcgac

SEQ ID NO: 37141 - DNA, 268 bp, Zea mays
ggacgcggtctgtgttcttgggcgtacgcggacacagccccgatccgaatcagcctcctcgcgagcctcgtcgatcccccactcccctcccctcgcttcagcatgcagatctttgtgaagaccctcaccggcaagactatcaccctcgaggtggagtcttctgacaccattgacaatgtcaaggctaagatccaggacaaggagggcatccctcctgaccagcagcggcttatcttcgccggcaagcagcttgaggacggccgcacac

SEQ ID NO: 37142 - DNA, 265 bp, Zea mays
ggacgcggcgtaactccggtggctccaccactagcaacccgtgcagcgagcccagcccgaccactgccatgtcgaggcgcggcgactgggtctacgagaacaacggcgggacctgcgtggccatcgccggcgccgattactgtgtcgtcgcggcggacacccgcctctctgtcggatacagcatcctcacgcgcgaccactctaagatctgcgacctggctgacaaatgtgtactagcatcttctggctttcagggtgatattaa

SEQ ID NO: 37143 - DNA, 267 bp, Zea mays
cagctgttaatcctatcttgccatttaatgacgaacagggagcgcttgccaggttctgcttagctgtactgccatcaacggaacctattggaattattggccagaatttcctggttggataccacgttgtcttcgacagagagagcatgaagttgggctggtaccgctctgaatgccgcgacgttgacaacagcacgaccgtgccgctgggcccatcgcagcacggcagtccagaggacccgttgccgtcgaacgagcagcagactt

SEQ ID NO: 37144 - DNA, 271 bp, Zea mays
gtcccgcctcggcactcgacggccgccggcacacaccgcgcagtctcgagacaggaaccggacgaacgaggatggaggatgactcgccgctgacgaagacgatgaagggtgcggtgacaggactcgccgcggggaccatctggggcaccgtcgtcgccacctggtacgacgtgccccgtgtggagcgccacgtcgcgctccctggccttatccggacgctcaagatgtgcggcacctacggggccaccttcgccaccatcgggggcctcta

SEQ ID NO: 37145 - DNA, 271 bp, Zea mays
atccgtgttccgtgtccgcgtccagtgtgtccgctactccgctccccctcagtcctcagttcctcacctagcggtagcgtgcgcgcgggagacgtagatggcggcttcggaggcggcacggcggcggcaacaccggtgacgccgacagaggggacggtgatcgcgatccacagcctggaggagtggagcatccagatcgaggaggccaacagcgccaagaagctggtggtgattgacttcactgcaacatggtgtcctccgtgccgcgcca

SEQ ID NO: 37146 - DNA, 273 bp, Zea mays
acgagaaggtgcaggacctgcttctgcttgacgtcactcctctctctctgggtctggagactgccggaggagtgatgaccgtccttatcccgaggaacaccaccatccccaccaagaaggagcaggtgttctccacctactcggacaaccagcctggtgtgttgatccaggtgtacgagggtgagaggacccggacccgcgacaacaacctgcttgggaagttcgagctctccggcatcccaccggctcctcgtggtgtcccccagatcacgg

SEQ ID NO: 37147 - DNA, 268 bp, Zea mays
caacaggatggtcaaccacttcgtccaggagttcaagaggaagaacaagaaggatatcactggcaaccccagggctctccggaggctgaggaccgcttgtgagagggcgaagaggactctgtcttccactgcccagaccacgattgagattgactcgctgtatgagggcatcgacttctactccaccatcacccgtgccaggtttgaggagctcaacatggacctgttcaggaagtgcatggagcctgttgagaagtgcctgagggat

SEQ ID NO: 37148 - DNA, 157 bp, Zea mays
cccacgcgtccgcaatgtttgcctggtcatgaagtattattactttcgttgaaaccgtgatgctattaagacttaatttttttatggaacatcgaatgtcaggcataaaacaagaaagaaaaaaagaaaaaaaaaaaaacaaaaaaaaaacgaaaag

SEQ ID NO: 37149 - DNA, 261 bp, Zea mays
gccggagctcgacaaggacgaccgacgacgcacgcggagatccggcgtactgcaaattttgaaaactgaactgtaagatggcatcagcagagctttcccgtgaggaaaatgtgtacatggcgaactcgctgagcaggcggagaggtacgaggagatggttgagttcatggagaaggtagccaagactgttgactcggaggagctcactgtggaggagcgaaacctcttgtctgttgcatacaagaacgtcattggagcccg

SEQ ID NO: 37150 - DNA, 265 bp, Zea mays
ggacgtggcgctaccaagttggatgtgagacggcgtgtccacatggctttagaagttgtaaggggcatgaattatcttcaccattccagcccgcctatcattcatcgagatttaaaatcatctaaccttttggtcgacaagaactggattgtgaaggtggcagactttggtctttcacgtctcaagcgtgaaactttcttgacaacaaaaacaggaaaaggaacaccccaatggatggcgcccgaggtgttgcgcaatgaacctt

SEQ ID NO: 37151 - DNA, 268 bp, Zea mays
cccacgcgtccggagcccactgtcatcgatgaggtgaggactggcacctaccgccagctcttccatcctgagcagctcatcagtggcaaggaggatgcagccaacaacttcgctcgtggtcactacaccattggcaaggagattgttgacctgtgccttgaccgcatcaggaagcttgcagataattgcactggtctccagggcttcctcgtcttcaacgctgttggtggaggaacgggctctgggcttggttctctcctcctggagc

SEQ ID NO: 37152 - DNA, 271 bp, Zea mays
cagacttcaaagtcttgtaccccacattgacggattatgacatccgctactacatatatgagctactcaaggctctagattactgccattctcaaggcatcatgcatcgagatgtcaagccccataatgtcatgatagatcacgagcttcgcaaacttcggttgatagactggggcttagctgagttttaccatccaggcaaggaatataatgtccgcgttgcatcgaggtatttcaagggacctgaactccttgttgatttacaagacta

SEQ ID NO: 37153 - DNA, 234 bp, Zea mays
agtgatttcacatttgaagtaatttttggaattttgtctgatatgaggaaaatctttccattcgggctgtttcacttgggtggtgatgaagtatacacagggtgctggaacacaacgcctcacgtgcggcagtggatggacgagcgcaaaatgaccacgaaggacgcttacaaatacttcgttctgaaggcccaggagctggcgatcaagctgaactggactcccgtgaactgg

SEQ ID NO: 37154 - DNA, 286 bp, Zea mays
cggacgcgtgggtacgctatatatacaatagggtgatacttgaaaatgctacagttcgagctagtgcagtcacgcacattggcaaagtttggtgccttggttgactcactcaaggtacttgcatgtttttttacttcaataatgtccttgctctgcaatgtttctgatctgtcaaatgtccattgcacttgcgatctttttatccagcctcgcatatttgtgctcctgagacgctgcctgtttgatggtgatgacgaggtgcgcgacagagcaaccgtttacctca

SEQ ID NO: 37155 - DNA, 296 bp, Zea mays
gcggctccgggtcgactgggggtggctttggcggtgggtcgggcggtggcggtggttacggcatagggaagcgtggcggggactggtggaacaatttcgtctctagtatagcaggtggtggaggaggaggacaaggcggaggcggtggcaccaatggtgggtccgggtccggcggtgggtccggttatgggtctggcagcagctcgactgcagcctctggccccagcagtggcaactacgccgacgctgagggcaatggcgccggtggaggcatgggcggtggtgcaatggtgcat

SEQ ID NO: 37156 - DNA, 302 bp, Zea mays
cccacgcgtccgcccacgcgtccgcccacgcgtccgggataaatatatatacacagagaatccgaatgcagttttaggatgggataagctctataccatagcaattgggattgctagagggttggaatacttgcaccacagttgtaatacacgcatagtccatttcgacatcaagcctcataatatccttctggatcagaactttcacccgaagattgccgattttggtttggccaagttgtgtcatatgaaggagagcaagctttctatgactggtgctagaagtacgcctggggtcatag

SEQ ID NO: 37157 - DNA, 296 bp, Zea mays
gttttcctctctggtggacagagcgaggaggaggccacccgcaacctcaatgccatgaacaagctcagcaccaagaagccgtggtccctgtctttctccttcggccgtgccctccaggcgagcaccctcaaggcctgggttggcaaggtggagaacttggagaaggctagagctgccttcctcgccaggtgcaaggccaactctgaggctaccctcggcacctacaagggtgatgctgccgccgacaccgagagcctccacgtcaaggactacaagtactgagtggcttctctttg

SEQ ID NO: 37158 - DNA, 293 bp, Zea mays
ggcaaacggtggctgtcggagtcatcaagagtgtggagaagaaggatccaactggagccaaggtgaccaaggctgccgcaaagaagaaatgatgtgtctggctggttctgtgtttgcttgagggatacctagtggaaacgtaaaatatctcgtcttgttcacgtcattgtctgaactatgctcgcaacgtttgcctggtcgatttagaactgttattttcgttaaaaccagagtgttatttaagacttatccgaacatctggtgagccatatatggttactagttttgttact

SEQ ID NO: 37159 - DNA, 261 bp, Zea mays
gagaagccgaagaaaattcgaagacgaggagcagctacactgcggacggacttcgggcatggagggccagtaccaggttggcaaggaggaggtcatccaagcatggtacatggacgacagtcaagaggaccagaggcttcctcatcatcgcgagctcaaagaattcatccctctcgacaaactttccgaactaggaatattaagctggcgcctaaatgctgatgattgggagaatgaggagaacctcaggaaaattcgtga

SEQ ID NO: 37160 - DNA, 299 bp, Zea mays
cgcttcacgtccgctacagaccggcgaggagacgaaaggagggagttttgagaagctcaaatggctcctaaagccgctcctgccaagaagggtgatgccaaggcccaggccttgaaggtggccaaggctgtgaagtctggggcaggcaagaagaagaccaagaagattcgcacatctgtaacatttcaccagcccaagaccctgaagaaggccagggacccgaagtacccaagaatcagcactactggaagaaacaagcttgatcagtaccaaattctcaagtaccccctcaccacaga

SEQ ID NO: 37161 - DNA, 295 bp, Zea mays
atttgaggagcatgctgagaaggcaaagaccttgcctgagaacacgagcaatgagaacaagctgatcctatacgggctctacaagcaagccacggttggagatgtgaataccgatcgtccgggcatattctaccaaaaggacagggccaagtgggatgcctggaaggctgttgaaggcaaatcgaaggatgaggcgatgaatgactacatcaccaaggtgaagcagctccaggaggaggctgccgcctcttaaaagtctcttaatagtgttgccaaacagctatttgtcagatga

SEQ ID NO: 37162 - DNA, 283 bp, Zea mays
cttaaggagcagtggagccctgctttgacaatctctaagaatgtcaagacatatgcttccattactattgatgtttggatggaagaccttcgtcttaaaagatacctttggaggcttgaaggggtagtctggcgggaaatacatgttcaccaagaaaacatcaatagtaatggaagcatatgtcttgacattcttaaggagcagtggagccctgctttgacaatctctaaggttttgctttctatctgctcactgcttactgatcccaacccagacgaccctc

SEQ ID NO: 37163 - DNA, 280 bp, Zea mays
gttgcagagggaggacgatctgaatgaaattgtgcagcttgttggtaaagatgcgctggcagaatctgacaagattacgctggagacagcaaagcttttgagagaagattatttggcacaaaatgcattcaccccatatgataagttctgcccattctacaaatccgtttggatgatgcgcaacattattcacttcaacacattggcaaatcaggctgtggagcgggcagctggtactgacggccataagataacatacagtgtcataaagcatcggttg

SEQ ID NO: 37164 - DNA, 286 bp, Zea mays
cccacgcgtccgcccacgcgtccggtgattgatgcttaccttgatgggctagaggcttctggcttgagcgacttatctcgagttaccagtgtcgcatccttctttgtcagccgagtcgacacccttatcgacaaaatgcttgagaagattggaacacctgaggcacttgccttgagagggaaggctgccgtcgcacaggccaaactagcaaatcggctctaccagaagaaattctctggcccgaggtgggaggcgttggccaagaaaggtgccaagaaacagaggt

SEQ ID NO: 37165 - DNA, 283 bp, Zea mays
cagacgcgtggggtccgcgtctccgtcgccgggcgagccaggagccccatcattgcgatggcttcggccaaggacggaaatggtgcaccgaccaagaggactgcgcttcatgatctctacgagctccagggcctgtccccgtggtacgacaacctatgccgccctgtcacagacttgctgcccattatcgccagcggcgtccgtggagtcaccagcaacccaacgattttccaaaaggccatttcatcgtccagcgcatatgatgatcagttcaagcagctca

SEQ ID NO: 37166 - DNA, 208 bp, Zea mays
gtgaagatctcttttatgagcacaccctgtctctgaccgaagctctatgtgggttccaatttgttcttacacatctggacaacaggcagcttctgatcaaatcaaaccccggcgaagttgttaaacctgaccaattcaaggcgataaacgacgaggggatgcctatttaccagaggcccttcatgaaggggaagctctacattcattt

SEQ ID NO: 37167 - DNA, 285 bp, Zea mays
ggccaagcttcaaccgacgccgtgacagagcagcctgtgaatgtgtacatatgggacatggatgagacactcattttgctcaagtcacttctggatggctcatatgctggggcttttgatggcctcaaggatcatgagaaaagtactgaaataggaaagcgatgggagaacctcattcttgaactctgtgatgagcacttcttttatgaggagattgagaactacaatgaaccctatctcaatgccttgaatgaatatgacgatgggagagacttgacctcatat

SEQ ID NO: 37168 - DNA, 287 bp, Zea mays
gcacccttcaccttgttctccttctggatgttgtagtccgcgagagtgcggccatcctccagctgcttgcccgcaaagatcagacgctgctggtctgggggaatgccgcactctcgcggactacaacatccagaaggagagcacccttcaccttgttctccgcctcaggggtggtatgcagatctttgtgaagaccctgactggaaaaaccataaccctggaggttgagagctccgacaccatcgacaatgtgaaggcgaagatccaggacaaggagggcatccccc

SEQ ID NO: 37169 - DNA, 286 bp, Zea mays
ccgtcagcccctctcgtttttcatccgccttcgcctccaaccgcgtgcgctccacgcctcctccaggaaagcgagagcttctgcataagaacaacaaatcaaaagcgtgatcagctcggtgccaacaaaacctcaacaaccaagtttcatgtctgatctcgacgtccagcttccatctgcctttgatccgtttgctgaggcaaatgctgaggactctggtgctggtcctggaacgaaggattatgtgcatgtgcgcatccagcagcgcaacggcagaaagagtctg

SEQ ID NO: 37170 - DNA, 284 bp, Zea mays
ctccgacatcctactttcgtcctcacgagtgaccgataatccgccggcgctaagatgttggtttatcaagatctcctatctggcgacgagctcctgtcggattcattcacctacaaggagctcgagaacggcgtcctgtgggaggtcgagggaaagtgggtcacccaaggtcctgttgatgtagacattggtgccaatccatccgccgagggtggtgaggacgaaagcgttgatgacacagccgtgaaggtggttgatattgttgacacattccgtctacagga

SEQ ID NO: 37171 - DNA, 286 bp, Zea mays
aggagatacatgccgtgttatcagagcagtcactttatcctgcagggtggattcatactcatccttcacaaacatgctttctatcatcgatcgacttgcatactcaatactcttaccaggttatgttaccagaggctgttgcaattgtggtcgcacccacagatccaaccaggagttacggaatattcaggctgactgaacctggagggatggatgttcttagggagtgtgacgaaagtgggttccacactcaccgagagacaaccaacggcagcccaatctatga

SEQ ID NO: 37172 - DNA, 281 bp, Zea mays
ctgcctcgagcacggcatccagcctgatggccaagtgcctggagataagaccgcgggacatcacgatgatgccttcagcaccttcttcagccagactggtgctgggaagcacgttccccgtgcaatcttcgttgatctagaacccactgtgatcgatgaggtgcgcactggcacgtaccgccagctcttccaccctgagcagctcatcagtggcaaggaggatgcagctaacaatttcgcgcgtggccattacacaattggcaaggagattgttgatctgt

SEQ ID NO: 37173 - DNA, 280 bp, Zea mays
ccagcctgttattctgcacatgcttgatattccgccagcagctgaagcccttaatggtgttaagatggagttggttgatgctgcatttcctcttctgaagggagtcgttgcgacaactgatgttgtggaagcgtgcactggcgtgaatgtggccgtcatggttggtggattccccaggaaggagggaatggtaaggaaagatgttatgtctaaaaatgtttcaatctacaaaacccaagcatctgctcttgaagcccatgcggcccccaactgcaaggtt

SEQ ID NO: 37174 - DNA, 269 bp, Zea mays
gtcgccgcgcccgagtactgccacgccaacttctcccgctacttcaccgaggccttctgggacgaccccgtcctcggcgccagggtctttgccggccgccgccgcgcgccctgctacttcaacaccggcgtcatggtcatcgacctccggaggtggcgcgttggcaactaccgccagcgcatcgagcgctggatggagatgcagaaggagaaaagaatctacgagcttggctccttgccccccttcctgctcgtcttcgccggcgagat

SEQ ID NO: 37175 - DNA, 278 bp, Zea mays
gcctgaaggatctgcaagaggacttcatgggaggtgctgaaattattgtttctcctcctgttgtgtccttccgtgaaaccgttcttgagaagtcctgccgcactgtcatgagcaagtcacctaacaagcacaaccgtctgtacatggaagcgcgccccctggaggagggtcttgctgaggcaattgatgatggccgcattggcccacgtgatgatcctaaggtgcgctcccagatcctctctcaagagtttgggtgggacaaggatcttgccaagaag

SEQ ID NO: 37176 - DNA, 279 bp, Zea mays
cttcatgcttcatctaagattgctgcatttgattttgatgggtgccttgccaataccagtatgaagagggttggtgcagaccagtggtctttacagcataaatcaattccagaaaaattgcaaagactgtacgatgatggttacaagctggtcatattcaccaatgagtcaaacattgagcgctggaagaacaagcgacaacaagctgttgactccaaagttggccgccttgataactttattgaatgtgttaaagcccctattcaggttttcattgct

SEQ ID NO: 37177 - DNA, 277 bp, Zea mays
caaatggccaagttggttttcttcagatgttcgaaagcttttgcggcgcatccttcatccaaaccctaatagacgaatatctattgaagaaataaggactcatccttggtttagaattggtcttgatgcaagattgtttgattctacaacgagagattatgtgcctagtgacatggatttggctttgaattctttaaatagcaatatggtcgagtgtaattcagcggcagagaaactgactattttgaatgcttttgatatcatctccctgtctaac

SEQ ID NO: 37178 - DNA, 277 bp, Zea mays
gcaggcggcggggtggtgaagcacatcctgctggcaaacttcaaggaggaggtgacgcaggagcgcctggacgagctcatccgcggatacgccgcgctcgtcggcgtggtcccctccatgaaggccttccactggggaactgatgtgagcatagaaaacatgcatcaagggttcacgcacgtcttcgagtccacgtttgaaagcacggaaggaatcaaggagtacattgagcaccctgcacacgtcgaattcgcaagtgtgttcttgcctgtgctgg

SEQ ID NO: 37179 - DNA, 278 bp, Zea mays
gatggtggaggcatcgccggagtccggcgccgcggcgaccggaggtgcctctagtacggcggcggtgcggaaggggaagtcatgcaagggctgcctctactactcgtcagtgctcaagtcccgcggttacaacccaatctgcgttgggatcccccgctccatcccccaagttcctaactacgtggtggatgaacctaaggaggaggcgacggcgcaggggcatgacctcaggcggttcaggtacgggtgcgcgggttactccatgttcgtggacaaca

SEQ ID NO: 37180 - DNA, 171 bp, Zea mays
atcatctttgagatactacggtattggactcgagaatggaaactacacagtcacacttcaatttgcagagtttgactttgaagattcacaaacttggaagagtgttgggagaagggttttcgatatctatctccagggcgagcgtaaggagaagaactttgacataaggag

SEQ ID NO: 37181 - DNA, 271 bp, Zea mays
cggacgcgtggcgtgacgcgtgggctcgcgcaccttgacctggccttcaagttcggcgagctcaccgcccaactgcacggcgtggtcggccagacgtaccgctccgactacgtcaaccggttcgatgtcaaggcctcaatgcccaccatgggaggggacagcaactacaccacgtccagcctcttcgccgctgactgcgccgtggcgcgttacgcgccgaatggcggtagccgtgacgacggcgttgctatggtgtcagagatcgctggca

SEQ ID NO: 37182 - DNA, 236 bp, Zea mays
ctcccatatccgctcccctacctctccagcatctcccgtctccgtcgtctcgtctctgctcctcacctcgccgccagccatgggcaagatcaagatcggaatcaacggtttcggaaggatcggcaggctcgtggccagggtcgccctgcagagcgaggatgtcgagctcgtcgccgtcaacgaccccttcatcaccacggattacatgacctacatgttcaggtacgacaccgtgc

SEQ ID NO: 37183 - DNA, 271 bp, Zea mays
ggccaccgacgttatgatcgccggtaaggttgccgtggtctgcggatacggtgatgttggcaagggttgtgccgctgcactcaagcaggctggtgcccgtgtcattgtgaccgagatcgaccccatctgcgccctccaggctctgatggagggtcttcaggtccttcccttggaggacgttgtctcggaagctgacatcttcgtgaccaccactggcaacaaggatatcatcatggttgaccacatgaggaagatgaagaacaatgccatt

SEQ ID NO: 37184 - DNA, 266 bp, Zea mays
gtctgtctccaactcactagtactcagccgccgcaatcagggacaggtagctcgagcgcgcgctccacctgctccgacgcgatgcgggccaagtggaagaagaagaggatgcggaggctcaagaggaagcgccggaaaatgaggcagagatctaagtaggcgcatcttgtgaccgaggatggcgagcttctcctgcaccatggctgagacgcgttgggatgattgtctccctttgtagacgtgctttgctgtagacgtaggcaatg

SEQ ID NO: 37185 - DNA, 212 bp, Zea mays
cccacgcgtccgcttgctttgctaaaactgtgtttggtggccagcaagttaagcctgatcacagagatgttccttgtgctgttttctccattccaccactatctgtagtgggcctcagctaagaacaggccttggaggaagccaatggtgatattcttgttttcatctcatcattcaacccaatgaagaacagcatatccaagcgccaggag

SEQ ID NO: 37186 - DNA, 270 bp, Zea mays
gtccaagatgagtgttccaagtttggtgcagtgaagcatatttttgttgacaaaaatactgcaggctttgtgtatctgcagttcgatagcgtgactgcagcagcaaaggcccaaaatgcccttcacggaagatggttcgctgggaagatgattacagcgacatttatgtccgcactggagtacagtacgaagttcccaaacttgtgagcatatgccgggaagagttggccagtcctgcatagttcgtttggagtattcgcaagtgctgtt

SEQ ID NO: 37187 - DNA, 271 bp, Zea mays
cctttccccttccctccctccctctccccgcgggccgccagaggcaatttcgccctcgattcgaccccgattcgtccgcccgcgaccgggattccctccgccaagcgcggatctgaacgctgcgctccgtgtcgccgctcgaatccgccatgaagggggccaaatccaagggcgccgccaaggccgatgccaagctggcggtgaagagcaagggggcggagaagcccgccaagggcaggaaagggaaggccggcaaggaccccaacaagct

SEQ ID NO: 37188 - DNA, 263 bp, Zea mays
cccacgcgtccgcccacgcgtccgggaccgtggtcgaagaggctgaagcccatgtcgtcaagagtattgtttttgagtcgcggaccagagggaagaaaaatcgtagtcatgtttggactttaactttgttttatgttggaaagtacttgaaagacttttcctgtggtaattctaggcgtaggttgctgtgctggttggggtttactggtgaaccagagtttttctatctcccactatgaatttgttacctcaagttacctgga

SEQ ID NO: 37189 - DNA, 271 bp, Zea mays
gtccaagatgagtgttccaagtttggtgcagtgaagcatatttttgttgacaaaaatactgcaggctttgtgtatctgcagttcgatagcgtgactgcagcagcaaaggcccaaaatgcccttcacggaagatggttcgctgggaagatgattacagcgacatttatgtccgcactggagtacagtacgaagttcccaaacttgtgagcatatgccgggaagagttggccagtcctgcatagttcgtttggagtattcgcaagtgctgttt

SEQ ID NO: 37190 - DNA, 217 bp, Zea mays
gcgggaagaatcatcccagccatcgccacctcaactgcaatggccactggccttgtctgcctggagctttacaaagtcctcgctggtgggcacaaggtcgaagactaccggaacacatttgcaaacctggcaatccccctcttctccatggcggaacctgtgccacccaagaccattaagcaccaagacatgtcgtggactgtctgggaccgctgga

SEQ ID NO: 37191 - DNA, 251 bp, Zea mays
gtgatagttacagggacaaagaatctgttaaaacttccacaagcaatagcggcagtcggaaatttggcagcaagctgaggaaggatgcgaacctgataggaggaatgaggattatagttcacccagctctttgagacccccatctaatacaaataacactgaggacgactttgatgacttcgatcctcgtggatcaaatggcaaaacaactgctaagtcaaatgaggtggatctgtttggcccaacttgat

SEQ ID NO: 37192 - DNA, 214 bp, Zea mays
agttcacccacttaaagtttctctggaagatctttacaatggcacctcaaagaagctctctctttcgcgcaatgtcatctgctccaagtgcaagggcaagggctcgaagtctggtgcctcaatgaggtgccctggttgccagggctcaggcatgaaagtcactattcgtcagctgggcccttccatgatacagcagatgcagcagctttgcaat

SEQ ID NO: 37193 - DNA, 267 bp, Zea mays
attccaaagcccttaactccttatgttggactaacggttttggagctaggtttattttacaagctattcatgctcttgttagcagtcttttgtacaaactcgataaatatacatgctggtctaaatggacttgaagttgggcagactattgttatatctgctgcggttttgatacataatgtaatgcgcatagcatcttctacagatatcgaaactcagcaagctcatgaattctctatttatcttgtcttgccattcctaaccatt

SEQ ID NO: 37194 - DNA, 262 bp, Zea mays
caagtttgtaatggacgaggtctatgacatggagctctacgagtggaccaaggtggacatctctgatgaggcccagaaggagcgtgtcaatgcgatgattgaggaccaggagccctttgagggcgaggccttgcttgacgcgaaatgcttcaagtgagtgtgcttgcctggagacagaactgtttagcccttgaatttgcctatggaagagtttgcccttttactagtgtcgatgttgatctggtataccttgctatgaact

SEQ ID NO: 37195 - DNA, 204 bp, Zea mays
atcgcaactagtccaaagtgcccttgatgggtacaaggtatgcatatttgcatatggtcaaactggatctggtaaaacttatacaatgatgggtaaaccaggaaatgatcaaaaagggataatacctcgttctttggagcaaattttcaagaccagtcggtttctagaatctcaaggatggaattattccatgcaagcatcaat

SEQ ID NO: 37196 - DNA, 280 bp, Zea mays
gcgcgtcaaagcttgcagttgcaaagctgatcgatggatatcttgccgagatcgccaaagatcccaaccttcctcttccaaagttgatcgcactcgccgaaattgtgtcttctctaccccggccaacgcatgacgggctctatcgtgccattgacatgtatctgaaggagcaccccagcctatcaaagagcgagaagaagaaactgtgcgggctgatggactgcaagcagctgtcgcaggacgcgtgcatgcacgccgtgcagaacgagcgtctccccct

SEQ ID NO: 37197 - DNA, 282 bp, Zea mays
agaagacaacccgtcagcccctctcgtttttcatccgccttcgcctccaaccgcgtgcgctccacgcctcctccaggaaagcgagagcttctgcataagaacaacaaatcaaaagcgtgatcagctcggtgccaacaaaacctcaacaaccaagtttcatgtctgatctcgacgtccagcttccatctgcctttgatccgtttgctgaggcaaatgctgaggactctggtgctggtcctggaacgaaggattatgtgcatgtgcgcatccagcagcgcaacg

SEQ ID NO: 37198 - DNA, 201 bp, Zea mays
ggccccttgtggcctgaagactcgtccatttgactccattctggctgaagtgcgtgccttcttcgatgtgcatgaccaagaaggaagccaccctgggggcgtccaccttgaaatgactgggcagaacgtgaccgagtgcatcggtggatcacggaccgtgaccttcgacgatctgagcgaccgctaccacacccactgcga

SEQ ID NO: 37199 - DNA, 226 bp, Zea mays
cggacggtgggcggacgcgtgggcgagtgacagtggactcccctggctccccgtcacagcggcgtcgttaactagcggccacccattgtcgcatgtcgcatcccatctgctatccttggttgccgcttcctccaaagccactccaaacccccgcttccagaaccttctcgaaactctccgcctcctcctctactcgctccgatggcgaaggaaccgatgcgcgtgc

SEQ ID NO: 37200 - DNA, 272 bp, Zea mays
  unsure (1)..(272): unsure at all n locations
cggacgcgtggngggtgaattcatcacaactgtccaacagcgtggtgctgcaatcattaaagcgagaaagttctccagtgctctctcggctgctagctctgcttgtgaccacattcgtgattgggttcttggaacacctgagggtacatttgtttccatgggtgtgtactctgatggttcatacggtgttccttctggactcatttattcattcccagtaacatgcagtggtggtgaatggaaaatcgttcaaggcctcccgattgatgagt

SEQ ID NO: 37201 - DNA, 273 bp, Zea mays
cttatcattgactcaaccactggtggttttgaggctggtatctccaaggatggccagacccgtgagcatgctctccttgctttcacacttggtgtgaagcagatgatttgctgctgcaacaagatggatgctactacacccaagtattcaaaggcccgttatgatgagattgtgaaggaagtctcttcctacctgaagaaggttggatacaaccctgataagatccacttcgttccaatctctggttttgaaggtgacaacatgattgagagg

SEQ ID NO: 37202 - DNA, 273 bp, Zea mays
cttcaccagaaatttgtaaatgctgtcaaccaaattggatttgacaaagtcgggccgaagaaaatactggatcttatgaatgttcctggcctgacaagagagaatgtggccagtcatcttcagaaataccgcctctacttgagtaggttgcaaaagcagaacgaggaaaggataatgggtgctgctaggcaagatttcaatcaaaagggaccatcggatcatcttaacctccgaagttccttccaagagcaaccaggcaacctttccaatgga

SEQ ID NO: 37203 - DNA, 273 bp, Zea mays
cccacgcgtccgagaattgtgaggccagcatcagtgaaccgcagtcaaggggcagctagtacagatgcggataggcttgtctgggcaatccagcgcactcataactctttagaagcaacaaggcggcaaaaactagatgacaacaacttgtgtggaaacggttctgctaagaaggatgagtcctgtgactgcaactccagctttgagtgcaatatctgtcttgacccagctaaacagcctgtggttacaccctgcggtcacctcttctgttgg

SEQ ID NO: 37204 - DNA, 232 bp, Zea mays
cgcaaaccgcagccaagcaagcgttcgcctccctgtgatcgcgatggggtccaccgagaggcaggagccggaggctgcgccggagatcatcttccggtcgaagctcccggacgtcgccatcaccagcaccgtcccagtgcaccgctactgcttcgagcggctccccgagggtggcgaggggccctgcctcatcgacggcggcacgggcgccgtgctcacgtacgccgaggtg

SEQ ID NO: 37205 - DNA, 209 bp, Zea mays
cggacggtggggcttctaaggctttgtcccgtgctgtttgcattgctgtacgatacagcgccatccgaaagcagtttggctctcaagatggtggacctgagactaaggtccttgattacaagactcaacaaagcagactctttccgttgctggcttcagcatatgcatttagatttgtgggtgactggctgaagtggctatacatggat

SEQ ID NO: 37206 - DNA, 190 bp, Zea mays
gttggcttctcctccccctccggttcgggttcgggttcgtgaggttctccggggttcggtttcgtgggtgggcggatcgagatggcggcgtcggatgttgagtaccgctgcttcggcggctgcctcgcctgggacacggacgaccactccctccacaacgccttcagcacctacggcgaggtccgcgagt

SEQ ID NO: 37207 - DNA, 209 bp, Zea mays
atttgccgtcttccagggtctcctgaaggtgcttgctggtatcgacacgagcttcactgtcacctctaaggccactgacgaagaaggtgattttgccgagctctacatgttcaagtggacaacgcttctgatcccaccaaccactattttgatcatcaacctggtcggcgtggtcgctggcatttcctacgcaatcaatagcggttacc

SEQ ID NO: 37208 - DNA, 270 bp, Zea mays
gatctcgccggcggcgtcccgcggcttcctcacgtccttcccggaagtgttcatcaacgtcggcatcctgctcggctacctgtcgaactttgcgtttgcgcgcctaccgctccgcttcggctggcgcgtcatgctcggcatcggcgcggcgccggccggcctgctcgcgctcatggtgctctggatgcccgagtcgcctcggtggcttgtcatgaagggccgcctcgccgacgccagggccgtgctggagaagacctcggcctcgccgga

SEQ ID NO: 37209 - DNA, 206 bp, Zea mays
gttaccactggctgactggaagagtagatgatgtcatcaatgtcagtggacaccgaatcggcacagcagaggttgagtcagctttagtgtcacatccacagtgtgcagaggctgctgttgttggtgttgagcatgaggtcaaaggtcaaggaatttatgcttttgtaactttggtggatagtgttccgtatagtgaggaactacga

SEQ ID NO: 37210 - DNA, 275 bp, Zea mays
ccgctccactacaagggctccaccttccaccgcgtcatccccgagttcatgtgccagggcggcgacttcacccgcggcaacggcaccggcggcgagtccatctacggcgagaagttccccgacgagaagttcgtgcgcaacacaccgcccccggtgtgctctccatggccaacgccgggcccaacaccaacggctcccagttcttcatctgcaccgtcgcgaccccttggctcgacggcaagcacgtcgtcttcggccaggtcgtcgagggcatg

SEQ ID NO: 37211 - DNA, 276 bp, Zea mays
acggccgggacctggcaaggatcgtgcccaaggcaaaatctggatctcagatatcgccacaggcatcttacacggtggcgctgctcggtgctgctggtggcataggtcaacccttgggcctattgattaagatgtctcccctggtgtccgagctgcatctgtatgatattgctaatgtcaagggagtcgctgcagatctcagccactgcaacacgcccgctcaggtacttgacttcactgggccctcagagttagccagctgcttgaaaggcgtgg

SEQ ID NO: 37212 - DNA, 273 bp, Zea mays
caggagtaaacaggttgtctgtcttttgaataaaatgcaactgcaagctgaaagtcactccttgaaaggggaggctcgcatttcagtgtctgttcctccaacaagaagtgatattctgcatgcccgtgatttgtcagaggacgttgctattgcttatggattcaacaatgtgccaaaatcaaagccgaagtgtatgacaataggaggaaggcaaccattaaacagattctcagataaaattcgtgctgaggttgcaagagctggttatatgga

SEQ ID NO: 37213 - DNA, 242 bp, Zea mays
gggatgctcaggcattcgcgtaaacgatgcggagaagctcgtgacgatcggaggccatgtgctgcgcgaaggtgagtggctgtcgctgaatgggtcgactggtgaggtgatccttggaaagcagccgctttccccaccagcccttagtggcgatctgggaactttcatggcctgggtggatgatgttagaaagctcaaggtcctggctaacgccgatacccctgatgatgcattgactgcgc

SEQ ID NO: 37214 - DNA, 278 bp, Zea mays
cagcatccgagagagctccacaggccaggtccccatcgccgcggcgcttgccccacctctcccccgcccggtagtagcctcgccgccgttgccgagatggggttcgtgtccttcgtcgggagggtgctcttcgtcgccgctttcctcctctccgcctaccaggagtttaatgaattcggtgctgatggtggaccagcagctaaggcccttcggcccaaattcaacgtgtttgtcaaaaatgtatctgctcatctgggagtagctgtgccacacattga

SEQ ID NO: 37215 - DNA, 217 bp, Zea mays
ggaccgtggctactacagctcctcatctcaagtgtgtagacgagacagagagacactgagagagcgcacatggccagcctccaagtcactcctacttcggcgttcactgagtggaacgagctgaagttcgaaggcctgtacctgttccacacgcccctgggctcaggcgccaaccaagctcgggtcatagacaacaaggcgccgattggcatcggtg

SEQ ID NO: 37216 - DNA, 267 bp, Zea mays
gactagttctagatcgcgagcggccgctcggatctagaacctaaaaccatctgcttcagctagccccaagtttagtcggccgatcattcactgaagtagtaatggcctccgacaacagctggaccctcgagatcgcgtcgccggtggctccgcagcgcctgttccgcgccgccgtgatggactggcacaccctggcgcccaaggtcgcctcccacgtcgtcgccagcgcgcacaccgtggagggcgacggcggcgttggcagcgtca

SEQ ID NO: 37217 - DNA, 268 bp, Zea mays
ggagaaactccccggctcgaggagatcgtgacattgagaggacgatgggagggcgcgcgctcctcctcctcctcctggtctcggcgttggtctttcagatccacgcctccgacccgctgctgtacgagccgttcgatgaggactttgaggggagatgggtcgtctccaagaaggatgaataccaaggtgtgtggaggcatgccaagagtgatggtcatgaggactatggcctccttgttagtgagaaggcaaggaaatacgccataat

SEQ ID NO: 37218 - DNA, 270 bp, Zea mays
gacagccttcgctttcaacctcttgttccacatccccgtgtgggtgggggtcctcatcaccggctccagcactcttctgcgcctgggcctacagagatacggggtgcggaagctggagttcctgatctcgatgctggtgttcgtcatggcggcgtgcttcttcggggagctgagcttcgtgaagccgccggcggtggacgtggtcaaggggctcttcatccccaggctcaagggcgacggcgccaccgcggacgccattgcgctcctcgg

SEQ ID NO: 37219 - DNA, 272 bp, Zea mays
cgctgctcatgtggatatggtaatagcaggtcatgtccatgcttatgaacgtgcggacgagtctacaattccagacctgatccttgtggcgctgtccacataactatcggcgacggtgggaaccgtgaaggcttggcccgcaggtaccgtaacccgaagccagcctggtcggtcttcagggaagcgagctttgggcacggcgagctaaagatcgtgaattccacccatgcccactggacctggcacagaaacgacgacgaagagccggtgag

SEQ ID NO: 37220 - DNA, 264 bp, Zea mays
agctaagctaagccgagctaagaagcacagcaagtctcaccagactagcggctagcgcgagaatggccaaggacatcgaggccgcggcgcacgagggcaaggactactcggacccgcctccggcgccgctggtggacgcggaggatctgaccaagtggtcgctgtaccgcgcggtgatcgccgatttcgtggccacgctgctcttcctctacatcacggtggccaggtgatcgggtaaagccccagaaggacgcggggggttgg

SEQ ID NO: 37221 - DNA, 203 bp, Zea mays
cccacgcgtccgcttttgaccataatatgtatggccagaaccttactgttcagaatttcttcaacgcatcagttcctgtttctgtgcaagcaaccttcccttataaattcgttgtgagcaagttcttgcagcctggagcttatgatctggttggttacatagtgtatgagatcgaccagcacccttaccagaatgtattctac

SEQ ID NO: 37222 - DNA, 263 bp, Zea mays
tgatcctctatgtgttgttggcgggctatcttcctttccaagacaagaacatgatggacatgtataagaaaattttcaaagcagaactcaaatggccaagttggttttcttcagatgttcgaaagcttttgcggcgcatccttcatccaaaccctaatagacgaatatctattgaagaaataaggactcatccttggtttagaattggtcttgatgcaagattgtttgattctacaacgagagattatgtgcctagtgacatg

SEQ ID NO: 37223 - DNA, 260 bp, Zea mays
atcgttttgcctgcaggaatgtatcaccgctttacgttggatagtgacaactacatcaaggcaatgcgtctatttgtgggcgagcctgtctggacaccatacaatcgtccgcatgaccatctcccggctaggaaggagtacgtcgagaaaatcatcaaccgaggtggaaaccaagccgtcgaagctcgttgagcgtgtccactctacatgtcctcctgccgtctcagcctcttgtgttttacactctacaactcctagta

SEQ ID NO: 37224 - DNA, 268 bp, Zea mays
attccgcagtcatgagatgcgagtcaggctaagtgacggtgagcctgaaaaaccactggtaattcatgtcggacgttttgggcgtgagaaaagtttggattttttgaagatggtaatggaaaggttgcctggagtaagaattgcatttattggagatggaccatataggggtgaactagagaagatgtttgaaggaatgccagcagtgttcacaggaatgatgcagggtgaagagctctcgcaggcggtacgcagcggcgatgttttc

SEQ ID NO: 37225 - DNA, 265 bp, Zea mays
cgcgtggttcgttaggaaaggaaatcgattccccccgcatctgatctcttcggtgctagagaaatataggccgccgccgcctcctccttgttcggtgaaaggtgggcagttagggttgggagatctcttgactcacgacacgagcagcagaattcgtcgagggccgctggttgctgcgagaggtccgggccttcgtgggatcttgaaaattgaatgttctaatggagtccaagggtggcaagaagaagtctagcagtagtcgttc

SEQ ID NO: 37226 - DNA, 268 bp, Zea mays
cttcacccgcctgcggatgttcgacctctggaagctgcactcgtgggccgggggcctgacggagttcgccgacgggcgcaaccaggagagcaccagcgaggccgtgaacgcctactactcggcggcgcttgtggggctcagctacggggacgcgcacctcgtctccgtgggcgcgacgctcaccgcgctggagatgctggcggcccagacgtggtggcacgtccgggaaggggagggcatctacgaggacgacttcagcgggaacaac

SEQ ID NO: 37227 - DNA, 260 bp, Zea mays
ggccatggcgacctccttccaggggacgaccaccaagtgcaccgcctgcgacaagactgtgtaccttgtggacaagctcaccgccgacaaccgcatctaccacaaggcctgcttccgctgccaccactgcaagggcaccctcaagctcgccaactacaactccttcgagggagtgctctactgcaggcctcacttcgaccagctgttcaagaggacagggagcttggacaagagcttcgaaggaactcccaaggttgtca

SEQ ID NO: 37228 - DNA, 269 bp, Zea mays
cccacgcgtccgcgagcattcgtgctgctccgaccccaccgccacaggctcggcggtccggcgatctcgctcaccggcgggaacatgactacttcaaggcgccttgctgacaggaagaccgcaaagttccagaagaacatcaccaggaggggttctgtgcctgaaaccactgtcaagaagggaaatgactaccctgttggccctctagtgcttgggttcttcatctttgtcgtcattggatcatcgttgtttcagatcatcaggacggc

SEQ ID NO: 37229 - DNA, 269 bp, Zea mays
cggacgcgtgggcagacgcgtgggcggacgcgtgggcgccgacaaggacaactacctcaactaccacgagaggctgctgaagctggtgaagctggacggcctcatcggctacgacaacacgctgtggaacggctccgtcgtgctccccgacgacgcgcccatgcgcaagtacatccgcttctaccgcgacttcgtgctcgtcctcaacaaggcgctcgccgccgacgaccgcgtcgagatctgccagctccccgtcggcgacggcgtca

SEQ ID NO: 37230 - DNA, 262 bp, Zea mays
ctccgaggtgccgccctccccgccccgcctgcgccgcttgctcatcgcttctctccccgcggcggcctcccagatccggttggatcgaggggcaaggtcaagagatggggcaggccttccgaaagctgtttgatgccttcttcggcaacaaggagatgcgggtggtgatgcttgggttggatgcagctgggaaaaccaccatactctataagcttcacattggtgaagttctctccactgtccctaccataggtttcaatgt

SEQ ID NO: 37231 - DNA, 263 bp, Zea mays
ggacattccacaaccaaaccgacaatgttatgtgctcatatctgcctctattcaattcattcaacttcactaaaggaggactaatacaactcaaccatggaaggcctcagccacttcagtatgctgtcaacgcagctttccttgcttctctatacagcgactatcttgaagctgcagacacgcctgggtggtactgcggacctaacttctacaccacagaagtcctccgcaagtttgccaggtcacagctcgactacattctt

SEQ ID NO: 37232 - DNA, 263 bp, Zea mays
ttaaccattcctcccaacaccacctcgcctgcgatcttcgtagcctccgtcgcgtcgagcatcgatcatgtcggcctactgcggaaagtacaaggatgagctcatcaagaatgctgcctacattggcacccccggcaagggtatccttgctgctgatgagtccactggcaccattggcaagcgcctttccagcatcaatgtcgagaacgttgaggagaaccgccgtgccctccgtgagctcctattctgctgccctggtgctc

SEQ ID NO: 37233 - DNA, 264 bp, Zea mays
cgaaaagcttaagaaagctgaagagcttggtgaacaaggcatggttgatgaagctcaaaaagctttggaagaggcagaagctctgaaaaagctggcgccacgttcagagccaccttcagacccttcgaaatatactgctgctgatgttcgaattactgatcaaaaattacgcctctgtgacatatgtggagcatttctgagtgtatatgataatgatcgacgtcttgctgaccattttggtgggaaattacacctaggctacat

SEQ ID NO: 37234 - DNA, 266 bp, Zea mays
cgcagtcactcccgggccgccgccgccgccgcctccgcgaaaaaccctagcaggcttcgccgctatcactccaaggggcgcgaccatggtggccacaaagaagacgaagaaatccacggacaacatcaataacaagctgcagcttgttatgaagagtggcaagtacactctcggctacaagaccgtcctcaggactctcaggaactctaagtcgaagctagtgatcatcgctaacaactgcccgccccttcgtaagtctgaaattg

SEQ ID NO: 37235 - DNA, 264 bp, Zea mays
aaaaaggagagataacacacacacacacaaaccccaatcccctgcggcggcgatggacccgtcatcggcgggctccggcggcaactccctcccgtccgtcggccccgacgggcagaagcggcgcgtgtgctacttctacgacccggatgtgggcaactactactacgggcagggccatccgatgaagccgcaccgcatccggatgacgcactcgctgctggcgcgctacggcctcctcaaccagatgcaggtgtaccgccccaa

SEQ ID NO: 37236 - DNA, 263 bp, Zea mays
cagaggaggatcgtcagcttcgttggcggaattgacctttgtgatggaaggtatgatacccagtatcactccttgtttaggacacttgacactgtccatcatgatgacttccaccagctaaactttgagggtgggtcaatcaagaaaggtggtccgagagagccatggcatgatatccactcacggctggaagggccaattgcttgggatgttctttacaactttgagcagaggtggaggaagcagggtggtaaggacctcct

SEQ ID NO: 37237 - DNA, 226 bp, Zea mays
ggaaatccaccaccgcggccggggcctcccagatctcgctggaggcagcggcagcgtcggcggtggggggcgatggcgctcaacatgaagaccctgacgcaggcgctggcgaaggcgtcggctgtcatcgagaagacggtgtcgacgacggtgcaggaggtgacgggcccgcgcccgctgcaggactacgagctgctggaccaggccgggtccggcgggccgggac

SEQ ID NO: 37238 - DNA, 256 bp, Zea mays
ctacgcccctgccgaccgggcccgtgccctcggggtagagctggtttctttcgacgaggccatcgcaagagccgacttcatctccctccacatgccgctgataccgacgacgtccaagatcttcaacgacgagttccttcgcaaagatgaagaatggtgtccggatcatcaacgtggccaggggtggagtgatcgacgaagacgctctggtcagggcgcttgactccggcaaagttgctcaggcggctcttgatgt

SEQ ID NO: 37239 - DNA, 255 bp, Zea mays
aaaagcccttgcccacgccatgacgctcagcaagaagcaaggcgcaggcactgatcagcaggccttgctggatgctcagctgcagctctggcaccacaccatcgcttttgtcaagtccatggcgctcaaggccgccgtagacctccgcatagcggacgccatccacctgcacggcggctcagccaccctctcgcagatagtcaccaaggtcacactccacccgtccaagataccatgcctgcgacgcctcatgcg

SEQ ID NO: 37240 - DNA, 257 bp, Zea mays
cgggtccttctgcgtgcatcggtttcttcgtcgactccggctccatctacgagtccggggagaccagcggcgtatcgcacctgctggagaggatggccttcaaggacaccaagcaccggagccacctcaacatagtgagcgagctcgagcttgccgggggcaacgtcggcgcttcagcctccagggagcagatggtctacagctatgacacgctcaagggatacatgccagaggctctcgagatcctcatcgactgc

SEQ ID NO: 37241 - DNA, 256 bp, Zea mays
gggttcttgacacgcctatcacagaggctggttttactggcattggtgttggtgcagcttatcatggtcttcggcctattatagagtttatgacatttaatttctcgatgcaggctattgatcatatcatcaattcagctgccaagtcaaactatatgtcagctggtcagatatctgttcctattgtttttagaggaccaaacggagctgctgctggagttggtgctcaacactcacagtgttatgcagcttggtt

SEQ ID NO: 37242 - DNA, 258 bp, Zea mays
gccgcgccaagacggacgtgcagctctcggacgggtgcatgatcccccgcgacggagctgctcatcccgatcatggccatccaccacagacgccaggttctggggccccgacgccgcgcagttcaaccccgcacggttcgccggcggcacggccagggcggcgaacacccgctggcgttcatcccgttcgggctgggctcccggatgtgcatcggccagaacctggcacggctggaggccaagctcaccatggcgatc

SEQ ID NO: 37243 - DNA, 256 bp, Zea mays
aaaacagacgtcggctccaattgaagagtgccgcaagaagatttggttggtggactcaaagggtttgattgttgactctcgtaaaaactccgttcagtcattcaaaaaaccttgggcacatgagcatgagcccttgacaaccttgtacgatgctgttcagtccatcaaacctacagttctgattgggacgtctggagttggaagaacattcacaaaagaagttgttgaggccatggcttccttcaatgagaggcct

SEQ ID NO: 37244 - DNA, 257 bp, Zea mays
atcgatcatgtcggcctactgcggaaagtacaaggatgagctcatcaagaatgctgcctacattggcacccctggcaagggtatccttgctgctgatgagtccactggcaccattggcaagcgcctttccagcatcaatgtcgagaacgttgaggagaaccgccgtgccctccgtgagctcctattctgctgccctggtgctctccagtacatcagcggtgtgatcctcttcgaggagaccctgtaccagaagacca

SEQ ID NO: 37245 - DNA, 259 bp, Zea mays
agcgaatggaacagaggatggcctatggccacaatgagcaagacatggtactgctccaccacgaagtcgaggtggaatacccggacgggcaacccgccgaaaagcaccaagcgacgctactggagttcgggaaggttgaaaatggcaggtccaccactgccatggcgctgaccgtcggcattccagcagcaataggggccctgctattgctaaagaataaggtccagacgaaaggagtgatcaggcctctgcaaccgga

SEQ ID NO: 37246 - DNA, 266 bp, Zea mays
ggactcctccgatctggctcaagacagctaccaccgaggtggaggagaagattaccaaggctgcgaagaagggccagatgccgtcgcagattggtgttctgctccgtgaccagcacggcatcccgcttgtcaagagcgtgactggtagcaagatcctccgcatcctcaaggcccatgggttggcgccggagatcccggaggatctctacttcctcattaagaaggcggtggcgattaggaagcatttggagaggaacaggaacgac

SEQ ID NO: 37247 - DNA, 263 bp, Zea mays
ggatttgtgagccttcttacttcagatggcaacactaaggatgatcttagactcccaactgatgagactcttgtggcccaggtctgtatggaaatgctttccatcctaagcgctgctagttttcttgttggcttccgagtattctcgatgatgggtttatttgttagcttagtcatatgcgctttctcagtatgttctcttccttaaattttgttaatggattaatggatttggttcttacgattacaagtattgtggaaagt

SEQ ID NO: 37248 - DNA, 256 bp, Zea mays
ggaccgtggctgcttctgattcactttgcattgaagagcatcctcaagacgttgcgcatcattggccgtgcgtccggagagaatgcaacacaagagagagcaatgttcaggaccgacagcatctggctatgaacagcaattgaagttcctgagaccctggtgtcaaggatctgctccctttcatcaggcctgcctgaaagactgagagcccacttggctaactcagtgccattactgaccgatttttttcctgtca

SEQ ID NO: 37249 - DNA, 258 bp, Zea mays
cggacgctggactaagaggcagctttttggattgccagcaagatatcgtgattcagtccgggcaattactcctggcgtgccgcttttcctctataactacaccactcaccagcttcatggggtatttgaggctgccagtttcggtgggtctaatatcgatcccactgcatgggaggataagaagtgtaaaggtgaatctagattcccagcgcaggtgaggatccgcgttaggaagctctgcaagccgttggaagagga

SEQ ID NO: 37250 - DNA, 254 bp, Zea mays
gctcgcgatctagaactagtcagcttcttctgttcctgaggtcaagttatctcagtacatttcagcattggagaagctgacaacattgagagtgctacaacaggcctcttgtatttttaaatccataaagattgatatgctctcaagaatgattccattctttgacttctctgtcgtggagaagatttctgttgatgctgccaaacaaaattttgttgctatagaagttgaccatttatcgggagttgttcagt

SEQ ID NO: 37251 - DNA, 256 bp, Zea mays
aaaaccgtgctgatggtacgtttgaaaaggcaaggctccgatttgcacatgcagaaactgttgttcctttcagctgccttcttggtctttttcttgaaggtccagaaattgagaagatacagagagaggaagcattggacctaccccctttgccgccacagggaagaaactggaagggcagtgttgttgcgccttttgctggtaacaatatgctggttttatatcaatgtccaagcaaaatttcggatggcagcac

SEQ ID NO: 37252 - DNA, 256 bp, Zea mays
gccgcaacgggcattaaccagctcctgaagagaactctctacaaccagtctgctggttcgtcgccgcttttctcatttcggggaaagcatgaagaatcctctgctggactgagagcattggctcttcttggagttggtgcctctggtcttttgagtttttctacaatagcatctgctgatgaagctgagcatggcttggaagccccagattatccctggccacatgctggcatcatgagctcgtatgatcacgcat

SEQ ID NO: 37253 - DNA, 256 bp, Zea mays
attcccagcagcaccggtgctgccaaggctgtcggtaaggttcttcctgaattgaatggcaagctcactggcatgtccttccgggttcccaccgtggatgtgtcagttgttgacctcactgtcagaatcgagaagggggcctcttacgaggaaatcaagaaagctattaaggctgcttctgagggcccactcaagggtattatgggctacgtggaggaggatctggtttccaccgacttcaccggtgacagcaggt

SEQ ID NO: 37254 - DNA, 255 bp, Zea mays
cgagacctggtagaccactcgtccactcagtaccctgatgttaaccatgccacagtgaagacttcagcactggggagaagcctgttcgtgagcttgttgctgatgatgagtggctcaatggcgaattcatcacaactgtccaacagcgtggtgctgcaatcatcaaagcgagaaagttctccagcgctctctcagctgctagctctgcttgtgaccatattcgtgattgggttcttggaaccctgaggggacatt

SEQ ID NO: 37255 - DNA, 259 bp, Zea mays
gtaaattgtgacaactgctgtgggtacagcatccattacacccctcatatcagcattgccattctatttcacttatttggttgctactgggcgactcaattcattcccgcatgctcttcaactgtggttgcgggatcagttgcttcatactactgggcgcgtggtgaaatatcacatgatataccatttctcactgtagtctcttcactgaagcgactgatgcgctacagccttggatctgttgctctgggttcacttg

SEQ ID NO: 37256 - DNA, 271 bp, Zea mays
cttgttccggctggtgggcacattgtgaccaccacggattgctaccggaaaacaaggatttacatggaaactgagctccccaagaggggaatttcgatgactgtcattaggcctgctgacatggatgctctacaaaatgcgttggacaacaataatgtatctcttttcttcacggagactcccacaaatccatttctcagatgcattgatattgaacatgtatcaaatatgtgccatagcaagggagcgttgctttgtatcgacagtactt

SEQ ID NO: 37257 - DNA, 271 bp, Zea mays
gctttctgggactttaggttacgtggctccagagtacctattagatgggaagctgactgaaaagagcgatgtatacgcatttggagtggtgcttcttgagctactaatgggaaggaagcctgtcgagaagatgagtcaaactcagtgccaatcaattgtgacatgggccatgccgcagctgactgacagaacgaaactccccaacatagttgacccagtgatcagggacacgatggacccaaagcatctgtaccaagtggcagcagtggcg

SEQ ID NO: 37258 - DNA, 271 bp, Zea mays
tgaagactctgactggcaagactatcacccttgaggtcgagtcttctgataccatcgacaatgtcaaggccaagatccaggacaaggagggcatccctccggaccagcagcggctcatttttgccggcaagcagctcgaggacgggcgcacgctggccgactacaacattcagaaggagagcaccctccacttggtgctgcgtctcaggggtggcatgcagatcttcgtgaagacacttactggcaagacgatcacccttgaggtggagtc

SEQ ID NO: 37259 - DNA, 273 bp, Zea mays
cccacgcgtccgcggaactgtggtgaaatcttttgtgacaaatgcagccagggaaggattgctctgacggctgaggataatgctccacttgtccgagtttgtgatagatgcatggctgaggtcactcaaaggcttagcattgctaaggatgttgccaacagatcttcaactgttcaaagtcatgaagatcttgcaagaaaactgaaggaggaaatggagaaaaaccgcaagtcatcagcatctggtggtggtgccctggtaccagaatgaggg

SEQ ID NO: 37260 - DNA, 268 bp, Zea mays
ctctcggtggtgtcctccgtctccatcgtcatctgcaacaaggctctcatgagctcccttggcttcaacttcgccactactttgacaagctggcatctcctggttacattctgttctctccatgtggcattatgtatgaagctgtttgagcacaaacctttcgatgcaaggactgtcatgggattcggagtgctcaatggcatatctattggacttcttaacttgagtctgggtttcaattctgttggtttctatcagatgacaaagc

SEQ ID NO: 37261 - DNA, 266 bp, Zea mays
tctatgtcaacctcgccaagaggtacatgcagctgcacaacgaagtagagctgtcggccctcggcatggccattgcgacggtggtgacagtagcagaaattctgaaaaataacgggcttgctgtcgcgaagagtatcatgacatctactgttgatatcaaggacgagactaggacccggcctatccagaaggccaagattgaaatattgcttggcaagacggagaagtttgatgagctgatggcagcggctgccgaggagagggag

SEQ ID NO: 37262 - DNA, 266 bp, Zea mays
cccatttcttgtgtcagtctccctctccctctctccgatcctctctactagcagagaggcaagttcaatcttctagctagcagcatcggagaaggcagagctcgactgacacaatggcgggaggccagctcaacgtgctgaccacactcgaccaggccaagacacaatggtaccatttcatggcgatcgtcatcgccggcatggggttcttcaccgacgcatacgatttgttctgtatcgcactcgtgaccaagctcctcggccgc

SEQ ID NO: 37263 - DNA, 275 bp, Zea mays
cagacgcgtgggctaagctaagccgagctaagaagcacagcaagtctcaccagactagcggctagcgcgagaatggccaaggacatcgaggccgcggcggcgcacgagggcaaggactactcggacccgcccccggcgccgctggtggacgcggaggagctgaccaagtggtcgctgtaccgcgcggtgatcgccgagttcgtggccacgctgctcttcctctacatcacggtggccacggtgatcgggtacaagcaccagacggacgcggcggc

SEQ ID NO: 37264 - DNA, 279 bp, Zea mays
actcgatcaagaagctcaccgcgtcgctcaagaagtacgcgcccgacagcgccccggccctcgccatcaacgccaccatcgagaagaccaagcggcggttcgagaactacggcaagttcggcctgctctgcggcgccgacggcctgccgcacctcatcgtcagcggcgaccagcggcactggggcgagttcgtcaccccgggcctgctcttcctctacatcgccgggtggatcgggtgggtcggcaggagctacctcatcgccatcagcggcgagaaga

SEQ ID NO: 37265 - DNA, 260 bp, Zea mays
cccacgcgtccgggtttcccagccaaagaaccagcatcctggttgtgaaaatggggggtgtgcgtactacttcttcatcatcgccgccgcggtcgttgccgtcgtcctcgcgcttctcccggccggcgccacaggtgccggcctcaaggtcggcttctacagcaagacatgcccgtcggcggagtccctggtgcaggcggtggctgccgccttcaagaacaacagcggcatcgcgccggcctcatccgcctgcacttcca

SEQ ID NO: 37266 - DNA, 260 bp, Zea mays
cgaaaggcgctgagcaagatcgcttgcaatcggctgcagaaggaactcgccgagtggcaactcagcccccctgctggattcaagcacaaggtctccgataacctacaaaggtgggtaattgaggtcactggagcggcgggcaccctttacgccggcgagacctaccagttgcaggttgacttccctgagcattatcctatggaggcacctcaggtcatttttctcaatccagcgccaatgcatccacacatctacagcaa

SEQ ID NO: 37267 - DNA, 260 bp, Zea mays
agctaagctaagccgagctaagaagcacagcaagtctcaccagactagcggctagcgcgagaatggccaaggacatcgaggccgcggcgcacgagggcaaggactactcggacccgcctccggcgccgctggtggacgcggaggagctgaccaagtggtcgctgtaccgcgcggtgatcgccgagttcgtggccacgctgctcttcctctacatcacggtggccacggtgatcgggtacaagcaccagacggacgcggcg

SEQ ID NO: 37268 - DNA, 257 bp, Zea mays
cggacgcgtgggcggcgccggcgtgctcgtgatctcaacccaaggcgtgcctccgctccggtcacccgtcgatccacgcaaccatgtcgaggaggaagaccagggagcccaaggaggagaacgtcacccttggacccactgtccgtgaaggagagtatgtctttggtgtcgctcacatctttgcatccttcaatgacaccttcattcatatcactgatttgtctgggagggaaactctggttcggatcaccggtggc

SEQ ID NO: 37269 - DNA, 259 bp, Zea mays
cgccgtctgccttctgcgcctccatttcggcctctgtcccttgcaagttcaatctcacctccaaccatgggtaaagagaagtcccacatcaacattgtggttattggccatgtcgactctggcaagtcgaccaccacaggacaccttatctacaagcttggaggcattgacaagcgtgtgatcgagaggttcgagaaggaggctgctgaaatgaacaagcggtccttcaagtacgcgtgggtgctcgacaagctcaagg

SEQ ID NO: 37270 - DNA, 259 bp, Zea mays
cggacgcgtgggcggacgcgtgggcgagctgccatggctaactcagcggcaccgggaggaatgaggtcgttactgcaggccgtgtctacggtcaccgaggaggcgccgacgccattccgcgtcgtccagatggagggcctggctgtactgaagatcatcaagcactgtgaggagtttgcgccagctttagttacaggtcaattgcttggtttggatgttggtagtgttctggaagtgaccaactgttttccgttcccta

SEQ ID NO: 37271 - DNA, 260 bp, Zea mays
aggcagacaaaataaagaacacgactgtttaaagaaggaaagttcgaacttgcaaaggcgaaatatgataaggtgcttagggaatataaccacgtgcatcctcatgatgatgaagagggaaaaatctttgctaattcaagaaattccctacatctaaatgtagctttttgctaccagaagatgggtgaatacagaaaatccattgaaacatgcaataaggtgctggacacaaatcctgtgcacgcgaaagctctttaccg

SEQ ID NO: 37272 - DNA, 261 bp, Zea mays
cccacgcgtccgcccacgcgtccgctgatggataccgatcttcaccaagttattaaggctaacgatgacttgacgaaggaacaccaccagttctttctctatcagatgctgcgtgcattgaaatatattcatactgctaacgtttatcatcgtgatttaaagccaaaaaatatattagcaaatgctaactgcaaactcaagatatgtgattttgggctagcaagggttgcatttaatgactctcataccacagttttctgg

SEQ ID NO: 37273 - DNA, 266 bp, Zea mays
gctatgccatcatctgccaggagaatggtctggtgccaattgttgagcctgagatccttgttgatggccctcatgacattgatcgctgcgcttacgtcactgagaccgtccttgctgcctgctacaaggcgctcaacgagcaccatgtcctcctggagggtaccctcctgaagcccaacatggtgactccaggctccgactccaagaaggtgacccctgaggtgattgctgagtacaccgtccgtaccctccagaggaccgtccct

SEQ ID NO: 37274 - DNA, 269 bp, Zea mays
acttgatcaaggtcactgtggctcttgttgggcttttggtgctgtggagtgcctccaggaccgtttttgcattcacctcaacatgagcattttactttcagtcaatgacctactggcatgctgcggttttatgtgcggcgatgggtgtgatggaggctatcctatagaggcatggcgctactttgttcaaaatggtgttgttacggatgagtgtgatccatacttcgacccggtcggttgcaagcatcctggatgcgaacctgcttatc

SEQ ID NO: 37275 - DNA, 207 bp, Zea mays
ggacgcgtgggggacaagagggatatacatccgcgtctttccatccagatggtcttatccttggaacaggacactactgatgctgttgttaaaatttgggatgtgaagactcagtcgaatgtcgcgaactttgaggggcatgtaggaccagtcactgctatgtccctctctgaaaatgggtacttcctagggattgccgctcatgat

SEQ ID NO: 37276 - DNA, 282 bp, Zea mays
gctgctctgatgtcttcaatctatgaagagaacaaggacgaggatgggttcctctacatgacttacagtggtgagaacaccttcggactgctctagatggcccgcaatggggtcgccttgcccttgcccatgcctcctgtaaataagacctgccaagcaactgtgtatattctggtttcgtcgtcgcaagtggttgcgctctactgctaaagcctacctatcagttgtggagttgtcgtcgatgttatggacacacttaatcaagtttattaattgactggg

SEQ ID NO: 37277 - DNA, 174 bp, Zea mays
gttcttacacatctggacaacaggcagcttctcatcaaatcagaccctggtgaagttgttaaacctgaccaattcaaggcgattaacgatgaggggatgccaatttaccagaggcctttcatgaaggggaagctgtacatccatttcacggtggagttccccgactcgctggca

SEQ ID NO: 37278 - DNA, 132 bp, Zea mays
cggacggtgggcaggtccttgcaacgcttagtggccactatggtcctgtgtggcgtgttgcttgggcccatccaaagtatggcgctatccttgcttcgtgcagttatgatggccggggcattattttgaaag

SEQ ID NO: 37279 - DNA, 258 bp, Zea mays
acctcctattcgtcgtcaccgccgtcgccaccgacacccgcgcagtgggtgaactcgccgggatcgcggtgggagcggccgtaacgctgaacatcctcgtcgccgggccgacgacgggcgggtccatgaacccggtgaggacgctggggccggccgtagcggcggggaactaccggcagctctggatctacctgctggccccgacgctgggcgcgttggcgggggccagcgtgtacacggcggtgaagctcagggacg

SEQ ID NO: 37280 - DNA, 264 bp, Zea mays
acgacgcacgcagagccgcagagatccgtcacactgcaagttttgaaaactgaactgtaagatggcatcagcagagctttcccgtgaggaaaatgtgtacatggcgaactcgccgagcaggcagagaggtacgaggaaatggttgagttcatggagaaggtagcgaaaactgttgactcggaggagctcactgtggaggagcgcaacctcctgtctgttgcatacaagaacgtcattggagcccgccgtgcctcatggcgcatc

SEQ ID NO: 37281 - DNA, 251 bp, Zea mays
catccccatccgcacctctctccatctccctgctcctccgcctccttcttgatccagccaagccagggatcgccatgtcggactcggaggagcaccacttcgaatcgaaggccgacgccggagcgtccaagacctacccgcagcaggctggcaccgtccgtaagaacggcttcatcgtcatcaagaaccgcccctgcaaggttgtggaggtttctacctcaaagactggtaagcatggccatgccaaatgc

SEQ ID NO: 37282 - DNA, 270 bp, Zea mays
gagagagagatcagcaacttaacaacaataatggccaccgccatagttcccacggacgccgagctgctgcaggcgcaggccgacctgtggcgccacagcctctactacctgacatccatggcgctcaagtgcgcggtggagctccacatcccgaccgccatccacaacctaggcggtgctgccacgctgccggacctcgtggccgcgctgtccctgccagcggccaagctccggtcctcgggcgcgtgatgcggctgctggtcacgtcgg

SEQ ID NO: 37283 - DNA, 209 bp, Zea mays
cacctcgacgcctctctctctttccccgagctctcgaaaccctaggtgcgtgccgaccggcggcggcggcgaggtgatggcgatggacccggacgcggtggcgaaaccttcgtggagcactactaccggacgttcgacaccaaccgcgcggcgctggtggggctgtatcaggagacctccatgctcaccttcgagggccagaggttcca

SEQ ID NO: 37284 - DNA, 271 bp, Zea mays
cggacgcgtgggaaaatatttggcttctatgtgcagcttgatctaaatttggagcgattgcggatggccattgaggatttgcttgttaagttggccaagatgttttccaaaccgaagctacaaactgtctttctgataaacaactatgatttaacaatttccattttgaaggaagctggaactgagggtgggaaagcacaacaacacttcgaggaggttcttaagagcaacatcgcaatatatgtggaagagttgctcctggagcagttca

SEQ ID NO: 37285 - DNA, 198 bp, Zea mays
ccgccgtgccctccgtgagctcctattctgctgccctggtgctctccagtacatcagcggtgtgatcctcttcgaggagaccctgtaccagaagaccaaggatggcaagccttttgttgatgtcctcaaggagggaggcgtcttccctggcatcaaggttgacaagggcaccatgaaggtggttgcactgataaggag

SEQ ID NO: 37286 - DNA, 268 bp, Zea mays
gaatgacatcttctgcttgttccaagggcacattgagaacattgccaacctgaagcagcattatggcctgagcaagactgcaaatgaggtgactatcctcatagaggcctacaggaccctgagggacaggggccctgtcccagccagccaggttgtgagagaccttagtgggaagttcgcattcatcctgtatgacaccctgtcgaagtccacctttgttgctgctgacgctgatggtagcatccctttcttctggggcgttgactac

SEQ ID NO: 37287 - DNA, 268 bp, Zea mays
aaagccggcaagtgaggagctgtaccaaggtaattatgcaaggaatggcagtaggaagggctgtagacctgacaaagcttagtggctacagcgatctttgccagaagctggaggagatgtttgacatccagggggagctgggttccacactaaagaaatggcgggtcattttcactgatgatgaggatgacatgatgcttgttggagatgatccttgggatgagttttgcaggatggtgaaaaggatttacatttacacatacgagga

SEQ ID NO: 37288 - DNA, 269 bp, Zea mays
ctgtgctggtgggtgtgccacataaggacgctgagttcaagacccacccgatgaacttcctgaacgaaaggaccctgaaggggaccttctttggcaactacaagccacgcactgatctgccaaatgtggtggagctgtacatgaaaaaggagctggaggtggagaagttcatcacgcacagcgtcccgttcgccgagatcaacaaggcgttcgacctgatggccaagggggagggcatccgctgcatcatccgcatggagaactagatt

SEQ ID NO: 37289 - DNA, 274 bp, Zea mays
acgaccccgacttcacctgggaggtggtgaagcccctcaaggcggagaagccgtcttctgcatgaggcgcctcctctgttttggaagaagcttttggtctggtctggtctgagtctggtgtgcctgcgctctatcatgcttttttatggctcctacttgtgattcttgatctgccccttgcttatcatttgtactgtactgtcactgtcctaataagtggtacgtgtgcggggtcgtattgtgtctgcttattcacctagaggattatttctgg

SEQ ID NO: 37290 - DNA, 277 bp, Zea mays
cccacgcgtccgcaagcacaagcgcactctagcaatggcttctgaggttgtccgccctagcgacgccgagctactaaaggcacaagccgacatatggcggctcagcctctcctacctcacgcccctgtcactgaggtgcgccgtggagcttggcatccctacggcgatctaccgccatggcggggctgcctcagccgctgagctggtcacggcgctgtctctcccctccactaagctgccgttcctccgccgcctgctgcggctcctcgccgcgtcg

SEQ ID NO: 37291 - DNA, 274 bp, Zea mays
cccacgcgtccggacacgcgtccaaacatacagctagctagcctctgcatgcctacgtacagcatggccaaggccgagctgctgctcctcgccctcgtggcttcgctctccgtgctgccattctcctccctcgccgtgtaccaggacttctgcatcgccgacctatccgccgccgccacgccgggcggctacccgtgcaagcccccgagagacgtgaccgccgacgacttccactacggcgagctcccacccccggcacgcgctgaaaccttca

SEQ ID NO: 37292 - DNA, 269 bp, Zea mays
cccacgcgtccgcggacgcgtgggcgccgccgcccgccgctccgcctcagcgcatagcccgccgcgacctcatcgatcaccttcacactttcaatcatggcggacgtcgatgtcgaaccggaggttgccgccggagctcccaagaagaggacgttccgcaagtacagctaccgcggcgtcgacctagatgcgcttctcgacatgtccacggacgacctcgtccagctcttccccgcgcgcgccaggagaaggttccagaggggtctgaa

SEQ ID NO: 37293 - DNA, 263 bp, Zea mays
gggtgacctagattcttatgagattgaaggcggtgagacaaaagcagagatattgcaaaacctagctgagttccagttttcttgtgtcatgtacaatggtgccctagagaatgcatgcagtgagcttggagcccgtatgtctgccatggacagctctagcagaaatgctggcgatatgcttgatcgtctcacgcttacttacaacaggacacgccaagcatccatcaccacagagcttactgagattatatctggtgcatcag

SEQ ID NO: 37294 - DNA, 262 bp, Zea mays
gtgagggcgggagaggttgaggttgaggaagagcagaggaatccattccaggagtgtttaatggcgggaggcaaggaagcgcacgggtgggcagccagggatgtctctggtcacctctccccttaccacttctcacggagggttcagagagacgacgacgtcaccatcaaggtgctcttctgcgggctttgccacactgacctccacgtcatcaagaacgagtttggcaacgccaagtaccccgtcgttcccgggcacgaga

SEQ ID NO: 37295 - DNA, 263 bp, Zea mays
aacagattaagaaactgtatgaacttttctgcaagtctgattgcacattgctggagataaatcctctggcggagacagctgacaacaagcttgttgctgctgatgcaaagttgaactttgatgataatgctgcatttagacagaaagaaatatttgcacttcgtgatacaactcaggaagaccccagggaggtcgctgctgccaaagcagatttgaactatattggtcttgatggagagattggttgcatggtgaatggagca

SEQ ID NO: 37296 - DNA, 269 bp, Zea mays
gacctcctggagttgggaaaaccactctgatcagggaaatagctagaattttggcagatgaaggtaagaaacgtgtgatcatagtggacacatctaatgaaataggaggtgatggggatgtacctcactctggcattggacgtgctaggagaatgcaagttcccaaagttactatgcagcacaacgtaatgattgaagcagttgaaaatcacatgccggaagtaattgttatcgatgagattggtacagaacttgaggcaatggcagct

SEQ ID NO: 37297 - DNA, 272 bp, Zea mays
cccacgcgtccgcggacgcgtgggccgtcatcgatctcgtttcaaatccatccatcctcgtttcctccgtcccgcagcatctcagccccatggcgcagatcaagatcgggatcaatgggttcggcaggatcggaaggctggtggccagggtggccctgcagagtgacgatgtcgagctcgtcgccgtgaacgaccccttcatcagcaccgactacatgacctacatgttcaagtacgacactgtgcacggacagtggaagcaccatgaagtc

SEQ ID NO: 37298 - DNA, 273 bp, Zea mays
cttcattcgttcccggcctcaccccgagccagtcgtctcgctagggtttcgccgccgccgccatgcctcgccgcagctcaggaaggtctgccccacgcccagctccccgtgctgcttcactgaggaacccgccacagccagcacgccaggctcctcctccagctcctgttcgagatggtggtggctccatgtttggaggaattgggtccaccattgctcaaggtatggcgtttggcacgggtagtgccatggcacacagggctgttgactctg

SEQ ID NO: 37299 - DNA, 266 bp, Zea mays
gtgaacacgctgggcgtctccatggcgcgcatcgactacgcgccgggcggccagaacccgccgcacacgcacccgcgcgccaccgagatcatcttcgtcctcgagggcacgctcgaggtcggcttcatcaccaccgccaacgcgctcttcaccaagaccgtcaccaagggcgacgtcttcgtcttcccgcgcggcctcgtccacttccagcagaacaggggccacggccccgccgccgtcgtcgccgccttcaacagccagctcca

SEQ ID NO: 37300 - DNA, 255 bp, Zea mays
gtggatcctccacgactggagcgacgcgcactgcgccacgctgctcaagaactgctacgacgcgctgccggaaaatggcaaggtcatcgtcgtcgagtgcgtgctgccggtcaacacggaggccacccccaaggcgcagggcgtcttccacgtcgacatgatcatgctcgcgcacaaccccggcggcaaggagcggtacgagcgcgagttccgcgagctcgcaaagggcgtcggcttctccgggttcaaggccac

SEQ ID NO: 37301 - DNA, 254 bp, Zea mays
aaccattcctcccaacaccacctcgcctgcgatcttcgtagcctccgtcgcgtcgagcatcgatcatgtcggcctactgcggaaagtacaaggatgagctcatcaagaatgctgcctacattggcacccccggcaagggtatccttgctgctgatgagtccactggcaccattggcaagcgcctttccagcatcaatgtcgagaacgttgaggagaaccgccgtgccctccgtgagctcctattctgctgccct

SEQ ID NO: 37302 - DNA, 255 bp, Zea mays
gggcgacaaggcccagatcagcatctacgaccctcaggtgacggaggaccagatccagcgggacctggccatgaacaagttcgactgggaccacccgatgcacctgcagccgacgagccccacggcctttaagcaggtgagctgcgtgtgggacgcgtacgaggccaccaagggcgcccacggggtgtgcatcctgaccgagtgggacgagttcaagaccctggactaccagaagatcttcgacaacatgcagaa

SEQ ID NO: 37303 - DNA, 257 bp, Zea mays
agaacactgagaagatggctgagaaagagaatattctaatgcagagatatgagatggggaagttacttggaaaagggagttttgccaaagtttaccatgctcgcaatgttaagacttcagaaagcgttgctatcaaggtgattgacaaagataagatcaagaagtgtggtcttatggatcataattcaagagatttcagtgatgaagttggtaaaacatccaaacattgtccaattgtatgaggttatggctaccaa

SEQ ID NO: 37304 - DNA, 261 bp, Zea mays
agaggggatagattgagagagccagagaggtgggcagatggcgacaccgtcgtcgtcgctttgctccagcttcgcctccctgcggaccgcctccatcggccacccccgcggcatcgcgtcatctacacccaggaaggcgttccaagtgagggcatcagctcgggttgacaagttctcaaagagtgatatcattgtgtccccttcgattctgtctgcaaacttcgccaagcttggtgatcaggtaaaagccgtggaggtggc

SEQ ID NO: 37305 - DNA, 267 bp, Zea mays
aatctatcatggcaggatccagcttccctcggattatccattcaagccgccgtccttcatgctactcacaccaagtggacgctttgagattcagaagaagatttgtttgagcatatccaattatcaccctgagcactggcagccatcatggagtgtgcgcacagcgttggtggccttgattgcattcatgccaaccaaccctggtggggcattgggctcattggattacaaaaaggaagatagacgggcacttggtataaaatcacg

SEQ ID NO: 37306 - DNA, 224 bp, Zea mays
ctcctcctcgcctcctctccctagtctccacgacgcaagggagagtgacggaaagcgacgcggcgcgagcgcaggagggccaaggcgaagaggggaagcaccgcaccaggacccttgttcgccgccgccgcctctgatctccgcgaggttgtcaggattcaatatgtcgaccagcacattcgctacttcctgcacgctgtggggcaatgttgaaacaacggggg

SEQ ID NO: 37307 - DNA, 281 bp, Zea mays
gagttcgctgcggagaacatgcccaagtttttggccgaggagttcaagaaggtgaacggcggaggagagatcgaaggagctgtcaagaggggttacctcaagacggacgaggagttcctcaagagggacgagagcgggggcgcgtgctgcgtcacagcagttctccaaaagggtggtctggtcgtctccaacgctggagactgccgtgcggtgcatcaccgagcagggaaggcagaggtgctcacctcggacaaccgggcctcccgggaagatttaaaagg

SEQ ID NO: 37308 - DNA, 263 bp, Zea mays
cggacgcgtggcgagacgcgtgggcggacgcgtgggctcaaactccaaaagtgcaaatattcaagcgagctcgtggaactagttgtgtggacgtgatgaatgtattggctccggctctcaggttgcaagtcaggacacttttggaactttgggcgccattgtaaaacggagaactggcaacaagctggtaggtttcgtcaccaaccgacatgttgctgttgacttggactacccagaccagaagatgtatcacccatttgcca

SEQ ID NO: 37309 - DNA, 239 bp, Zea mays
gccgtgttctactgccacacgaccaacccggcggccacgtacctggtgaagctggcagcccaggatggcggggcgccggacatggaggcgttggtcgtgtgccacctcgacacgtcgttgtggagtcccagacacccatttgtggtggcgcacagtctcaagccaggggacgacgcatctgtggtcattttctctctaagctcagcatggtctgtgtccccgtgggcgagcaggggtgg

SEQ ID NO: 37310 - DNA, 178 bp, Zea mays
cccacgcgtccgcccacgcgtccgcccacgcgtccgcccacgcgtacgcccacgcgtccgactggatctgttagagaagatgttgactttagatccatcacagaggatatcagcaaaagatgcacttgatgcggaatatttcgggactgatcccttacaaggcgatcaaaaaggcttg

SEQ ID NO: 37311 - DNA, 245 bp, Zea mays
cccacgcgtccggtttgatccagatttcattgatattaggacaaaagcacgtgaggtgttgcagagggaggacgatctaaatgaaattgtgcagcttgttggtaaagatgcgctggcagaatctgacaagattacactggagacagcaaagctactgagagaagattatttggcacaaaatgcattaaccccataggataagttctgcccattctacaaatccgtttggatgaggcgcaatatta

SEQ ID NO: 37312 - DNA, 184 bp, Zea mays
ggacctggttctagctagcagcatcggagaaggcagagctcgactgacacaatggcgggagagccagctcaacgtgctgaccacactcgaccaggccaagacacaatggtaccatttcatggcgatcgtcatcgccggcatggggttcttcaccgacgcatacgatttgttctgtatcgcactc

SEQ ID NO: 37313 - DNA, 188 bp, Zea mays
cggacgcgtggcggacgcgtgggacgccatcgggtgccggagcccctgtccgtgttcgccgacacctacggcaccgagaccatccccgacaaggagatcctaaagatcgtcaaggagaacttcgacttcaggccagggatgatcaccatcaacctcgacctcaagaagggcggcaacaggttcaccaa

SEQ ID NO: 37314 - DNA, 229 bp, Zea mays
ccgccgtgccctccgtgagctcctattctgctgccctggtgctctccagtacatcagcggtgtgatcctcttcgaggagaccctgtaccagaagaccaaggatggcaagccttttgttgatgtcctcaaggagggaggcgtcctccctggcatcatagttgacaagggcaccattgagtgtgttggcactgattaagagaccaccatccaaggccatgacgaccttggc

SEQ ID NO: 37315 - DNA, 197 bp, Zea mays
ataaactatgtcgaaggtgacatgttcagtttcattccacctgctcaaactgtcgtgctaaagcttgtgctgcaccacctgaccgatgaggagtgcgtcaagctcctggctcaatgccggaaggcgattcctccacggaaggacggcgggaaagttataatcggtgatattatgattgaccactctgggctttatct

SEQ ID NO: 37316 - DNA, 283 bp, Zea mays
cccacgcgtccgcacctcgccgcgatctccgtagcctccgtcgcgtcgagcatcgatcatgtcggcctactgcggaaagtacaaggatgagctcatcaagaatgctgcctacattggcacccctggcaagggtatccttgctgctgatgagtccactggcaccattggcaagcgcctttccagcatcaatgtcgagaacgttgaggagaaccgccgtgccctccgtgagctcctattctgctgccctggtgctctccagtacatcagcggtgtgatcctcttc

SEQ ID NO: 37317 - DNA, 284 bp, Zea mays
gataaatctgaggcttgtttctctacattcgcagttgccgcctaagagctttcgccttgccaggcttgagagctagtgctgctaaatccttccttggatgtctgatgcgattcaaatccaattcttttgtgctttggttgtagagggttccgtaggtttcggtctaaaatcgtgtgctttgcaagattagcgtcttgtttggacttcgaaactgaaacctggtccaggcaatcggcaaatcatcctgccatcttgcgatactgtatccaagccagcttaaactc

SEQ ID NO: 37318 - DNA, 283 bp, Zea mays
cccacgcgtccgcccacgcgtccggcgactgcgccatgtaccggcatgccgacggcgacctcgtcgtcctcccgcacgacgcggcgttgcccgtctccctcaaggtcctggaacatgacatcctcaccgtgtcacccatcaaggagttggcgcctggtttcaggttcgccccgatcgggctggtggacatgttcaatagcggcggtgcggtggaaggcctgacctatcacctcctcggcggcgacggttccaccttgggctccgaggctgtcgcattggcgtg

SEQ ID NO: 37319 - DNA, 248 bp, Zea mays
cgcttacctctttggctctagtctatccccctctcgtttcttcctgtgagcgacagctggtggagctgcgccgctctcaccttcaccggcgacgggcattcacaagtagtgatctcttgactaacggcgtagtggtgactaaagagccttgacaatgagcagcataggcacaggttatgatctgtctgtcaccaccttctctcctgatggccgcgtctttcaggtcgagtatgccacaaaagctgtcg

SEQ ID NO: 37320 - DNA, 271 bp, Zea mays
gctccccatgcccaaaatcatcaaaggttaataaattgaatctcacgctagctggtcaatcattaatttctggcgtcattaaaatgtctcttactcctctgttgggctcccgcaccgcaagcagaggacaagaaagcttggatgagtgacgaggagttcgcaagggagaccctcgccggcgtgaaccccttgatcatcaggcgtctcacggagttccctccgaaaagcacccttgatccgagcaagtacggcgaccagacgagcaccatca

SEQ ID NO: 37321 - DNA, 264 bp, Zea mays
attccactacaggtatctcttgatattggatcgcacaaattggaagaccaacatgctgacagctctcttggttccttacattttcttcaccctgcctaatgtgctgttttctctgatcagaggagaggtggggaaatggattgcgattattgctgttattctgcggctattctttccacgccacttcccagattggttaaagcttcctggttccatcatccggctcacagtggtcgcccctagcctgatcgcggaaaccttcag

SEQ ID NO: 37322 - DNA, 285 bp, Zea mays
tgcaggagaccggcgccctcctcttccctgccattaacgtcaacgattccgtcaccaagagcaagtttgacaacctgtatggttgccgccactcgctccctgatggtctgatgagggccactgacgttatgatcgccggaaaggttgccgtggtctgcggatacggtgatgtcggcaagggttgtgctgctgccctcaagcaggctggtgcccgtgtcattgtgaccgagatcgaccccatctgtgccctccaggctctgatggagggtcttcaggtccttccct

SEQ ID NO: 37323 - DNA, 285 bp, Zea mays
cattgtcaagtgatgcattgttccggagaggcctgcactttcccagtgttaagatcattactctagagaagaatgacagttttagttttgatgcatattatgtggatggtaatgaattgcctcctggtacctcaacagacatcggtagttttcagattggcccattccaagcacataccgaagcttctaaagtcaaagtaaaaattcgcttgaatctacatggtttggtttcagtcgaatctgccgttttgataaatgattatcaaaggaatggaagttctactg

SEQ ID NO: 37324 - DNA, 282 bp, Zea mays
caactacctcatgtccatgtcgacgcagatcttctcgggccacctcggcaacctggagctcgccgccgcctcgctcggcaacaccggcgtgcagatgttcgcctacggactcatgctgggcatgggcagcgcggtggagacgctgtgcgggcaggcgtacggcgcccacaagtacgagatgctgggcatctacctgcagcggtcggccgtgctgctgtgcgcgacgggcgtgccgctggccgtgatctacggcttctcggagccgatcctggtgttcctggg

SEQ ID NO: 37325 - DNA, 283 bp, Zea mays
gttatacatcacaccaatgcccaaatgcaaacatgaaagacgtcactgtcctcatctgcccactctgtgctaaaggtgttcgcctcaatccaagtgaagacccaaatatcacctgggatactcatgttaacactgattgtgatccatcaaattaccaaaaagtgatgaagaaaaagaaatgccctgttcctgggtgcagagagacactgacattttccaacaccatcagatgcaaagattgcaccagagaacactgcctaaagcacagatttgggcctgatca

SEQ ID NO: 37326 - DNA, 284 bp, Zea mays
cccacgcgtccgcagctcgatcgagcacacacacacttgatcactactaatataaacacattgcgcaaaggccgccatggcttaccgcgcctttgctacgctgcttgcagtgctagcatttgtgggcttcgcttcagttccccgtggtctggcaactgacccgacccagctccaggacttctgcgttgctgataacaagaaccctgtgctggtgaacggggtggtgtgcaagaacccgaacgtggtgaaggcaaccgacttcttcttcatgatagtgccgatgg

SEQ ID NO: 37327 - DNA, 282 bp, Zea mays
gcttttcaaggtgaactatggtgcggaggtcgcgcactgcaagcactcgcttcggacgttggaattggcgagccaggagctgaggacaaagggcctgttctttaagctgcttgaggcagtgctcaaggcgggaaacaggatgaatgccggaacgcacgtcgcaacgctcacgacttcaaccttaccgcgctccgcaagctctctgacgtgaagagcactgatgggagcaccacgttgctgcacttcgtcgtcgaggaagtcgtccgctccgagggtaagcgg

SEQ ID NO: 37328 - DNA, 282 bp, Zea mays
agcaactgctacattgggagccaaacgtctctctcagagaaggccttccgctaatggtcaaagacttccgtcaaaggatctcggatgagtaatcgaggcaatcctacgatactggtgaccggtttgattctgaactatgctgcaaatacagtcagaagctctttatcgattggagccatgcagtacagtgtactgtgtacacagagactgtagaatcacccaaaacccattaaaaatgttgggatccatacgatttccactggatagtactgtttctgtgaa

SEQ ID NO: 37329 - DNA, 285 bp, Zea mays
gcacaagcgcactctagcaatggcttctgaggttgtccgccctagcgacgccgagctactaaaggcacaagccgacatatggcggctcagcctctcctacctcacgcccctgtcactgaggtgcgccgtggagcttggcatccccacggcgatctaccgccatggcggggctgcctcagccgctgagctggtcacggcgctgtctctcccctccactaagctgccgttcctccgccgcctgctagggctcctcgccgcgtcgggcatgttcaccgtcgacaagca

SEQ ID NO: 37330 - DNA, 279 bp, Zea mays
gtctgacaagaacagtgaaaacaagcattacctttacacacacaagaacatccttgttaaatacaatgataacaggataattcatgtaaatctcacccaagagtctcctaagcttcttgaagatggcaagaaattggaaatgacatattcagtgaagtgggtagcaacagatgtgtcatttgcacgccgttttgaagtgtacctggactatcctttctttgaacaccagattcactggttctccattttcaactctttcatgatggttattttcctaac

SEQ ID NO: 37331 - DNA, 274 bp, Zea mays
ctcctttggttcatcagtggctcaacaaatgcaaaggttttgcaagagaagggtattcatatctgggatggcaatgcttcaagagagtatctcaacagtgttggcttggcacacagagaggaaggtgatttaggtccaatttatggatttcagtggcgtcactttggtgctgaatacactgacatgcatgctgactatacgggaaaaggttttgatcagctaatggatgtgattgacaagatcaagaatgatcctgacgaccgtcgaataattt

SEQ ID NO: 37332 - DNA, 275 bp, Zea mays
cactcatcttttctcgtttagaacctctaaaatttcccccactcgccagtcgcagcagcacctgtagcagccatggacgccagcggaccggtagcaaggggaagaagggggcggccgggcgcaaggcaggcggccccaggaagaagtcggtgacgcggtccgtcaaggccgggctgcagttccccgtcggccggatcgggcgctacctcaagaagggccggtacgcgcacgcgtgtggcactggcgcccccgtctacctcgccgccgtcctggag

SEQ ID NO: 37333 - DNA, 276 bp, Zea mays
cctccctcagccgcgtcgcgtcgcatcctacgatccaaagctctctctgctcgcagccatggcgaagaactacccgaccgtgagcgccgagtacagcgaggctgtggagaaggccaggcgcaagctccgagccctcatcgccgagaagagctgcgccccgctcatgctccgcctcgcgtggcactccgcggggacgttcgacgtgtcgtcgaggaccggcggtccattcggcacgatgaagcatcagtcggaattggctcacggcgctaacgcggg

SEQ ID NO: 37334 - DNA, 273 bp, Zea mays
gaagcagaatcctgcttacaagggcaagtggcatgcacctatgattgacaaccccaactacaagggaatctggaagcctcaggagatccccaaccctgagtactttgagcttgacaagcctgactttgatccaattgctgctattgggattgagatctggacaatgcaggatggcatcctgtttgacaatatcttgattgctgacgatgagaaggttgccacctccattctggagaagacctggaagcccaagtatgatgttgagaaggaaaa

SEQ ID NO: 37335 - DNA, 273 bp, Zea mays
cccacgcgtccgcaagactgccgccgtccgcgtctccgtcgacttcatccaggtcttccccgcccctacatcggtgaaggacgactggagcccctcctccacgatcgcggctatgcgcgagggctttgccaaggcgctcgtgccgtactaccccgtcgccggccgcatcgccgagcccgttccgggggagcctgagattgagtgcacaggggaaggggtgtggttcgtggaggccgaggccagctgctccctcgaggaggcgcggaacctcga

SEQ ID NO: 37336 - DNA, 270 bp, Zea mays
ctcagccccactttcaaagtgcgagaattccaggttaatgatgggtttcctttctcaattgcattgtcatggaatggagactcccagaacaccccccaacaaacccttgtattcccaaaggggaatgcaattcctagcactaaagttcttaccttctttaaatccagtacatttgaagttgatgttttgtatgtcgacccaaacggcttacaaattccacaaaaaataagcacatacacaattggccctttccaaacctccaaaggagag

SEQ ID NO: 37337 - DNA, 270 bp, Zea mays
gcagctgttatcgtgatggacaaatctacggatgtcgttgacgcgattgctaggctgtcctacttctacaagcatgagagttgtgggcagtgcacgccttgccgagagggcacaccctggctctggatgatcatggagaggctcaaggttggtgacgcgaactcggaggaaattgacatgcttcatgaggtcacgaagcaaatcgaagggcatactatctgtgcgcttggggatgctgcggcatggcctgtgcaggggcttatcaggcac

SEQ ID NO: 37338 - DNA, 236 bp, Zea mays
acccaaactgacattatgacaatgttagccgatgatgacgacaatggaaacagtaatctaggtacaagcaggcgcctctgctggctggcaagtgccaccacccacaaccacagccgatcagaggcagaaccacccgcccccggtgcccacgagccgcgctatccgttatagcacgacaaaagtaaaaataaaacatcacgatgtggagtgaaactgaataattctagtacatggat

SEQ ID NO: 37339 - DNA, 268 bp, Zea mays
cccacgcgtccgaagaaatatgcttctgttatccgtgtcattgctcatacccagattaggaagatgaagggtttgaagcagaagaaggctcacctgatggagattcaggtcaatggtggtaccattgctgacaaggtggactatggctacaaattctttgagaaagaggtccctgttgatgctgtcttccagaaggatgagatgattgacatcattggtgtgaccaaggggaaaggttacgagggtgtggtcactcgttggggtgtca

SEQ ID NO: 37340 - DNA, 283 bp, Zea mays
aatccacaatgctcgaatccagcatgtgttcacagacagaaagaatatatggaatccaaacctgctagagatgcagcagcgaagactaagatggaagctgaagcatccacagaaaatgaatgtcctgtccacctagacaatgagtggaatattagtgttgttgatgatgaagaaactgagacatcaagcattcgaaacactccagatatcctaccagaaggtcttgtccgtgagcttccagacgctgattcatacgcaggaccagctgctccagtgagttcca

SEQ ID NO: 37341 - DNA, 280 bp, Zea mays
atagctggcaactgtaagatgcttgaatgtttgcggttggaatcctgctctttgataaatgagaagggactaaaacgaattgcaacttgttgccccaatcttaaggagatagacctcactgactgcggagtggatgatgcagcattggagcacttggctaaatgctctgaattgagagtattgaaattaggcctatgctcaagtatttctgacaaaggcattgcgtttattagttcaaattgtggaaagcttgtggagcttgatctctaccggtgcagct

SEQ ID NO: 37342 - DNA, 278 bp, Zea mays
acctctgatgcctggtatgaggcctggtggtccaatgccgaactttatgatgcctatggttcagcaaggacagcaaccacagcgtcctgctggtagacgtgctggtggaatgcagcagcccatgccaatgggtggtcagcaacaggtgttccctagaggtggtcgtggctatcgctatcctactggacgtggaatgcctgatcctggcatgcacagtgttggtgctgtgatgccaccttcatatgagatgggagggatgccaatgagagaagctgccc

SEQ ID NO: 37343 - DNA, 279 bp, Zea mays
cggacgcgtggctgaacacttgattgattcagtaggtagctagctagctgaatcacaatggatactaccaagttccgtccgtccagtagccacgacacgacggtgacgacgacgaacgctggcgctcctgtgtggaacgacaacgaggcgctgactgtggggcctcgcggtcccatcctgctggaggactaccacctgatcgagaaggtggcgcacttcgcgcgcgacgcatcccggagcgcgtggtgcacgcgcgcggcgcctcggccaagggcttct

SEQ ID NO: 37344 - DNA, 281 bp, Zea mays
atggtgcccatcttcctcctggacctcaagatctacggccagtggatgtccggcggcgaccgccggctgtccaaggtggccaccccgaccaaccaccttgccgtggtcggcaacttcgtgggagcgctgctgggcgccaagatggggctccgcgaggtgcccatcttcttcttcgccgtcggggtggtgcactacctggtgctgttcgtgacgctgtaccagaggctccccaccaacgcgcactccccagggagctccacccggtcttcttcctcttcatc

SEQ ID NO: 37345 - DNA, 279 bp, Zea mays
agcaaggtccgcggacctggcccacaccgggcacaccccccgagctcagcttagctccactccatgctccactcacagtcgtgaacagagcgcgagagctagctagagggccgtgaaaatgccgatcaataggatcgccctggggagccaccaggaggtgtaccacccgggcgccctcaaggcggcgttcgctgagttcatctccaccctcatcttcgtcttcgccggccagggctccggcatggccttcagcaagctgaccggcggcggcccgacgac

SEQ ID NO: 37346 - DNA, 283 bp, Zea mays
cccacgcgtccggagaggtcatggttgggcacgtggacaggatcctcaagcatggcgtgttcctcaaatccggacccgtggagagcatcttcctggctgagaagtcgatgagtaattacaagtacataggtggggagaatgcgatgttcatgaacgaccactcgaagctggagaaggacaccgccgtgcgcttcaaggtcctagggttccgctggatggaggctgaccgccaattccagctccttgctacgatcgctggtgacttccttgggccgctgtgaac

SEQ ID NO: 37347 - DNA, 274 bp, Zea mays
cttcctccaaagccactccaaacccccgcttccagaaccttctcgaaactctccgcctcctcctctactcgctccgatggcgaaggaaccgatgcgcgtgctcgtcactggcgccgcagggcaaattggatatgctcttgttcccatgattgctaggggagttatgcttggtgcagaccagcctgttattctgcacatgcttgatattccgccagcagctgaagcccttaatggtgttaagatggagttggttgatgctgcatttcctcttctg

SEQ ID NO: 37348 - DNA, 278 bp, Zea mays
cttgtcccggttcctttccccatccccaactccattatttgcttgatccttgagaagagagaggaagacgagagctagaagcgaaggagaaaagcagttcttcagctaggcaggagggcacaggaaggaggagatggcgtcaaagaggattcagaaggagctcaaggatctgcagaaggaccctcccacctcgtgcagtgcaggtcctgttggtgaagacatgttccactggcaggcaacaataatgggtccatctgatagcccatattctggtggag

SEQ ID NO: 37349 - DNA, 276 bp, Zea mays
gttccccccgcaagctcgcgacctcgcctagcggccaaaccacgctagagttcgcagttggaagaggggaggaggaagaggacgagatggcgagggatgacgggttcccggtgtgggaagcggcgctgctcgctggcgtggctgccgtcttcgctgcggggctggctggcgtctacatctccatgcctcgctccgactacagcttcctcaagctcccccgcaacctccaggagctccaagtcctcactgtccatctggagggctacagcagtgact

SEQ ID NO: 37350 - DNA, 278 bp, Zea mays
ctttctgcattgggtgatgtcatttcagctcttgctacaaaaaacagccatataccctacagaaattctaaattgacacacttgctgcaagattctctaggaggagactcaaaagcattgatgtttgtgcaaattagcccatccgataatgatgtttcggaaacattgagttcactaaacttcgctagccgtgttcggcgtattgaattgggaccagcaaagaaacatgttgatactgctgaacttcaaaagaccaaacagacgcttgaaagagctaa

SEQ ID NO: 37351 - DNA, 280 bp, Zea mays
ggcctggaaaaggactgcagtgtcgaggacgtgcgcaaggcctaccggaagctctcgctcaaggtgcaccccgacaagaacaaggcccctggcgcagaggacgccttcaaggccgtctccaaggccttccagtgcctgagtgatgcggagagccgcaagcgctacgaccttgttggctcggatgagccagtagcacaccacaggagggcctccactgcccgcgcatacaatgggttctatgaggatgactttgacccagatgagatattcagaaacttct

SEQ ID NO: 37352 - DNA, 272 bp, Zea mays
ggaggaggcaggggagtcgaggggaggggaagcatcgcaattccgaacccccacctcgccgctcccaccaccgcggccgggttgcgtccgtttcgattgcccaggatgagcaccgagtccggggagctgctcgggatcgaccccgtcgagctccggttcccattcgaattaaataagcagatctcctgcacgctgcagctgacgaacaagacagacaagcaggtcgcgttcaaggtgaagacgacaagcccgaaaaagtactgcgttcgccc

SEQ ID NO: 37353 - DNA, 267 bp, Zea mays
cacacacatccgcatccctctctcctcggtttcctctcccaccaccaacccccagatcgcagcgatctccgccgccgccctctctgggattccgcgcgacaaagtcaggcgtagaggctccaggaggaggagggaggcgcacagggcgggtgggggagatgttcctctgggactggttctacggggtgctggcctccctcggcctgtggcagaaggaggccaagatcctcttccttggcctcgacaacgccggctagaccacgctgc

SEQ ID NO: 37354 - DNA, 270 bp, Zea mays
cgaaccccaactgcccaagggcgagcgatccgaacccctcggcggcttcgtcaacgacgccgagaacactttgaggaatggctgaagaggatgtccagccccttgtgtgtgacaatggcactggaatggtcaaggcgggtttcgctggtgacgacgcaccgagagctgtctttcctagcattgtaggcaggccacgccacactggtgtgatggtgggcatgggccaaaaggatgcatatgtgggcgatgaagctcagtccaaaagaggta

SEQ ID NO: 37355 - DNA, 274 bp, Zea mays
cgcaccacaagcgagcgagggacccggggcggaagaagagagagaagacgtctctctcctctcggcgtccccgttccccaacctctcgtctgctgcctgcctgcctgcctgcctgccaaaaggagtttgtcatggcgtctaagcgcatcctcaaggacgctgaaggacctgcagaaagacccccccacatcatgcagtgcaggtcctgctggtgaggacatgtttcattggcaagcaacaattatgggaccacctgacagtccctatgctggtg

SEQ ID NO: 37356 - DNA, 269 bp, Zea mays
ggaccgtgtgcggacgcgtggggctaagcgcaccggagacgtcgcaaaggagggctacgtcgggatacacagttccggtactcagagacttcctgctcaagccagaactgctccgtgctatccaggattgtggttttgagcatccttccgaagtgcaacacgagtgtatccctcaagccattcttggactggatgtcatctgtcaagctaaatctgggatggggtgaactgctgtttgtgtcctttcatccctccaacacattgaccct

SEQ ID NO: 37357 - DNA, 269 bp, Zea mays
tgctccagtatttttgatgctttaccagaacattgtatcagtgaccatagtttctacactatccctgtccggtgctgttccaactgaaccattgacatggaatttaatcaaagtttggttgcctgtaaatatcatctttgttggaatgctgatcacaagcatgtttagtttgaagtacattaatgttgccatgctgactatattgaagaatgtcgccaatgtcctgactgcttctggggaaacttattttttcaagaagcagcatggta

SEQ ID NO: 37358 - DNA, 271 bp, Zea mays
gttggtctcttcggcggcgacgagcacccaccagcagttctgtagaaatggctgatggtgaggacatccagcctcttgtctgcgacaatggcaccggaatggtcaaggctggttttgctggcgacgatgcaccaagggcggtttttcctagcattgttggccgtcctcgccacactggtgtcatggtagggatgggacagaaggatgcatatgttggcgatgaggcacagtccaagagaggtattctcacgctcaagtacccgattgagca

SEQ ID NO: 37359 - DNA, 299 bp, Zea mays
ggacgcgtggtgcaaagtttgttgttggactgggggataaggtgtctccaactgatatcgaggacgggatgagggtcggtgttgatcgcaataagtaccagattcaaatccctcttccaccaaaaattgacccaagtgttaccatgatgactgtggaggaaaagccagatgtgacgtacaatgatgttggtggctgcaaggaacagattgagaaaatgcgtgaagttgttgaacttcctatgcttcacccagaaaagtttgttaagcttggtattgatcctccaaaaggcgtcctttgc

SEQ ID NO: 37360 - DNA, 291 bp, Zea mays
aaaagtacttctacttccattggagttcgagctcaactaactaccttgtctaccataatgaaatctgttgacccaaagctgcatgaacatttagaaaatcttgatggaggggaatacttatttgccttccgaatgctgatggttcttttccgtagggaattctcatttgttgatacgatgtacctttgggaactcatgtggtctatggagtacaatcctaatctcttttcaatgttggagagtgacactggcacatccagcgcaacacaaaggatgaaagtgttctaggac

SEQ ID NO: 37361 - DNA, 290 bp, Zea mays
ggccttcctcgccgcagtgtatctcttgatattggactgcacgaactggaagaccaacatgctgacagctctcttggttccttacattttcttcactctgcctaatgtgctgttttctctgatcagaggagaggtggggaaatggattgcgattattgctgttattctgcgcctattttttccgcgccacttcccagattggttagagcttcccggttccatcatcctgctcacagcggtcgcccccagtctgttcgcacacaccttcagggacgacctcgttggtgtct

SEQ ID NO: 37362 - DNA, 291 bp, Zea mays
cctgcctcaaatgctgctgctggtgacaaagaacaaccaaaggatgatgacgatctactacagcaggcacttgcaatgtcaatggagggtggtgcttcaggatctgcagctgtgactgactctgctatggcagaagctggtgcagttgaccctgacttggcattggctcttcaaatgtctgtccaggatgcaaacatgtccagtgacactgatatgagtaaggtgtttgaagacagaacgtttgtgtcatctatccttaattcgcttcctggtgttgatcccaatgatcca

SEQ ID NO: 37363 - DNA, 266 bp, Zea mays
cggacgcgtgggcggacgcgtgggtgcttatgtgattggagatccagcaagacctggacagaagtggcacgacttctacgccaatgagtacccagagcaaccaatggttaaccttgagatgtgcatgactggtctggacaagaagaaagcttgtgtctttttcaagactaatgctgatgggaacacaacatgtgccaaggaaatgacaaagctctctggcatctctgaaatcatccccgagatggagatctgcgattttgacttcg

SEQ ID NO: 37364 - DNA, 270 bp, Zea mays
gaacctccaggccccccagcccccaggtggtcaagagacagagagagcatggccgctgctcccacggtggtgccgcgcgtgaagctgggctcccaggggctggaggtctcggcgcagggcctcggctgcatgggcatgtccgcctactacggccctcccaagccggagccagacatgatcgcgctcatccaccacgccgtcgccgccggcgtcaccctcctcgacacctccaacgtgtacggcccccacaccaacgagctcctcctcggg

SEQ ID NO: 37365 - DNA, 265 bp, Zea mays
caaacgcgtcgcatccgctccacaggatcctctgcgccaccgcaaccgtgtgaccgcccgtaccgccggcgatcccgatccgccgacccgtcccagccccgctcgcagccatgtcgccgtcggagccgacgcgggaggagagcgtgtacatggccaagcttgcggacaggcggagcggtacgaggagatggtcgagttcatggagcgcgtcgcgcgctacgccgggggcgccggcggcggggaggagctctcggtggaggagcgc

SEQ ID NO: 37366 - DNA, 270 bp, Zea mays
gggactactacgcgcgcgtcggcaaggcgtggaagcgcgggtacctcctgtacgggccccccgggacggggaagtcggccatgatcgccgccatggccaactacctcgactacgacatctacgacatcgagctcacgtccgtgcactccaacaccgacctccgcaagctcttcatcgagaccaccagcaagtccatcatcgtcatcgaggacatcgactgctccctcgacctcaccagcgcgcgcgagaagaagaaggcggcggaggagg

SEQ ID NO: 37367 - DNA, 268 bp, Zea mays
cccacgcgtccgcggacgcgtggggaaaattcacgtggcttgtggcaaccgttcaccgcccttcttggggatgctcctagtgttgacgtcaagaagaatgtgattgtggccattacctctgataagggactctgtggtggtattaattcaacatcagtgaaagttagcagggcccttcacaaattgacatctggtccagaaaaagaaaccaagtatgttatattaggagaaaagggcaaagttcagctgttgcgtgactcaaaggaca

SEQ ID NO: 37368 - DNA, 265 bp, Zea mays
cccacgcgtccgcgtaactggtgagggactgagggtctcggagtggattgatttgggattctgttcgaagatttgccgaggggggcaatggcgaccgcggggaaggtgatcaagtgcaaagctgcggtggcatgggaggccggcaagccactgtcgatcgaggaggtggaggtagcgcctccgcaggccatggaggtgcgcgtcaagatcctcttcacctcgctctgccacaccgacgtctacttctgggaggccaaggggcaga

SEQ ID NO: 37369 - DNA, 266 bp, Zea mays
ctctgcactctcggcaacaactgacggccggaggaagaaggcgcagacgacaagcagaagcttgtgccatcgatcaatggcggcggtgacaaagatctacgtcgtgtactactcgacgtacggccacgtggcgaggctggcggaggagatcgagaagggcgccgactccgtggacggcgtcgaggcaaccatctggcaggtggcggagacgctgccggaggaagcgctggcgaagatgcgcgcgccggcgaggagcgaggagcacc

SEQ ID NO: 37370 - DNA, 265 bp, Zea mays
gacaagcccctgcgtctccccctacaggatgtgtacaagattggtggtattggaactgttcctgttgggcgtgttgagactggtatcatcaagcctggtatggttgttacctttggtcctagtggccttactactgaggtgaagtctgttgaaatgcaccatgaggctctccaggaggcccttcctggtgacaatgttggcttcaatgttaagaatgttgctgtgaaggatctgaagcgtgggtatgtggcctccaactctaagg

SEQ ID NO: 37371 - DNA, 266 bp, Zea mays
gatgaaacagcagatcaaggccaggtcaaggtggagatgatcatcaatccaccgaagtcactgaggcccgcagcacagccaaggaagagggttagagcggaggaccgtgggcgagtcaagcgggttgttcattgcagccgctgcaaccagactggacacttcagaaccacatgtgctgctccaatatgaacaacggccaaccgaactgggcacttcagtccagaacttgttggttattaattagagctgcagcattcctgtgacaa

SEQ ID NO: 37372 - DNA, 264 bp, Zea mays
cgacactcgatctgggaggttcattgggaagcaatcccgatcttatcagacatggactattgctggttttctgacctcaaaaatgttgctggagaacccagagctggcttctattctgacctgtgatgaggaccttgagctgctcgaaggctgtgcttgctgcctgtccaagaagaggacaaggtgctcacggcgagcggccaagtcacatgctgcgtgaaactgtgaagcttatgttgttttttatactgttgatgcacaatg

SEQ ID NO: 37373 - DNA, 266 bp, Zea mays
  unsure (1)..(266): unsure at all n locations
nacacgcgtccgcggacgcgtgggcggacgcgtgggggtcgagtgtgaaacatacaggttccggggtcactccattgcagacccagatgagctcaagaagcctgatgagaaaacacactacgccgcaagggattctatcacggccttgaagaagtacatcatagagcagaacctcgcaaccgaatccgagctgaagagcatcgagaagaagatcgacgatgtcgttgaggaggctgtcgagtttgctgacgcgagcccgcatccgc

SEQ ID NO: 37374 - DNA, 230 bp, Zea mays
acccaaactgacattatgacaatgttagccgatgatgacgacaatggaaacagtaatctaggtacaagcaggcgcctctgctggctggcaagtgtgaccacacacaaacacaccagaccagaggcagaaccacccgccagtggcgccaacgaggagcgctatccgttatagcacgacaaaagtaaaaataaaacatcacgatgtggagtgaaactgaataattctagtac

SEQ ID NO: 37375 - DNA, 266 bp, Zea mays
cgacgatccgggccagcacgcccatgttcctgatggctcgcaagatcaagtcgctgggcgtgaagatggtgctgtccggggagggctccgacgagctcctgggcggctacctctacttccacttcgcccccaacaaggaggagttccacagggagacctgccgcaaggtgaaagccctgcaccagtacgactgcctgcgcgccaacaaggccacgtcggcgtggggcctggaggtccgcgtgccgttcctcgacaaggagttcatc

SEQ ID NO: 37376 - DNA, 268 bp, Zea mays
tccccatctcccagatccaattcgcgagttctccctcctctgccgccatggcgctctctgtggagaagacctcgtctggacgggagtacaaggtcaaggatctctcgcaggcggacttcggccgcctcgagattgagctggccgaggtcgaaatgcccggcctcatggcgtgccgcgccgagttcggcccgtccaagcccttcgccggcgctaggatctcggggtctctccacatgaccatccagaccgccgtcctcatcgagacctc

SEQ ID NO: 37377 - DNA, 269 bp, Zea mays
gcctcttctcctccctcctgccgggtccttaataaagagcagcagcgcaagaggttggtagagcgagcgagaagaaggcaatggcggcggagagcttcctgttcacctcggagtccgtgaacgaggggcacccagacaagctgtgcgaccaggtgtcggacgcggtgctggacgcctgcctggcgcaggaccccgacagcaaggtggcctgctatacctgcaccaagacgaacatggtgatggtgttcggcgagatcaccattaatgcg

SEQ ID NO: 37378 - DNA, 279 bp, Zea mays
cccacgcgtccgcccacgcgtccgctacatccagactattgatcttgaccatgaggataagtttgactttgacccgctcgatgtcaccaagacctggcctgaggatatcatcccgctgcagcccgttggacggatggtcctgaacaagaacgtcgacaacttctttgcagagaatgaacagattgctttctgcccagcgattattgttcctggaattcactattctgatgataagctgctccagacgagaatcttctcctatgctgatacccagaggca

SEQ ID NO: 37379 - DNA, 280 bp, Zea mays
gttcaagggaacattgaaccaagtgaagcaaaatctatcgtagtaaatatagtgttttcgatttcttctacgatagatcgaaaacactatatttactacgcccaattctttgttcaaatccatgtctccatcagaatatctgattaaaagggtcatcatgcttgaaaatgacttgaaatgctactaccaaactgagggattaaaccagaagaatgagaattcatcagttatccaatatattcaggtgcatcaagatgacgccattttgaatatcaaactg

SEQ ID NO: 37380 - DNA, 294 bp, Zea mays
cgatacaaaccagcgccgcgccgcgccgcgcgagcacgtcgggcgacgttgcggcaggcgagatccgagagcgaagggatccgttacaagaagaatgaagtcttcttggatgtagtagagagtgttaacattctagttaacagcaatgggcagattgtgagatcagatgtggttggggcactgaagatgcgaacatatttgagtggaatgcctgagtgcaaactcggcttgaatgatagggttcttttggaggctcaaggcagagcaactaaaggaaaagcgatagaccttgat

SEQ ID NO: 37381 - DNA, 263 bp, Zea mays
cggacgcgtggtgaatttgaagacttgagcgctctatgcaagaatgatgattctactgttagcaacacagtagttggagcatctggtgaccttgccaagaagaagatatttcctgccctttttgctctctactatgaagattgccttcccaagcatttcaccatctttggctatgcacggcgcaagatgacatatcttaaattggggacatggttagcaaaacactggacttgcagaatagataaaagggaaaattgtagcga

SEQ ID NO: 37382 - DNA, 271 bp, Zea mays
gtaacccaatgtttttgatgtcacgcaaaatcaaatctttgggtgtgaagatggttatttctggcgaaggttcagatgaaatttttggtggttacctttattttcacaaggcaccaaacaagaaagaattccatgaggaaacatgtcggaagataaaagcactacatctgtatgactgcttgagagctaacaaagcaacttctgcctggggtgttgaggctcgtgttccattccttgacaaaagtttcatcagtgtagcaatggacattga

SEQ ID NO: 37383 - DNA, 265 bp, Zea mays
cttttcagcatgctaggaataacacctttagctgagcgtttaggatatgcaactgagcagcttgcaatatacactggtccaacagttggtggccttctgaatgctacatttggaaatgcaaccgaaatgatcattgcagtatatgctttgaaaaatggaatgatccgagtagtgcagcagtcactattgggttccatattgtcaaatatgctgttggtaatgggttgcgctttctttgctggtggtgttgtcaccgcaacaaaga

SEQ ID NO: 37384 - DNA, 275 bp, Zea mays
cagcgctgcgccgtccttcacctccgccgccgaatccgagactctgatctcgggttcaccgcagcgcacagagcacccccgactcccgtcccgatccgcgctctcctctacgacgcttcagtcatggcaggaatggcacccgagggttctcagtttgatgctaagcactatgattctaaaatgcaggagctgctgagcactggtgagactgaggagttcttcacttcatatgatgaagtttttgaaagttttgatgacatgggccttcaagagaa

SEQ ID NO: 37385 - DNA, 271 bp, Zea mays
gccgcctcgtcgttgacttcatcgcgcaggagctgggcgtgccgctgctgccgccgtccaaggcgaagaacgcgacgttccaccgcggcgccaacttcgcgatcacgggcgccacgtcgctggacacgcccttcttcgtggagctcgggctggggaagacggtctggaactcggggtccctgcacacgcagatccagtggtgccaggtgatgaagcccaagctgtgcgggcaggagcatgagtgccgggacctgttccggcggtcgctgtt

SEQ ID NO: 37386 - DNA, 234 bp, Zea mays
ggcgaacctcgtgatcgttgccggtgaccacggcaaggagtccaaggacagggaggagcaggcggagttcaagaagatgtacagcctcatcgacgagtacaagttgaagggccatatccggtggatctcggcgcagatgaaccgcgtccgcaacggggagctgtaccgctacatttgcgatacgaagggcgcattcgtgcagcctgcgttctacgaagcgttcggcctgactgt

SEQ ID NO: 37387 - DNA, 267 bp, Zea mays
gcattcccccagaccagcagcggctcatctttgctgggaagcagcttgaggacgggcgcacgcttgccgactacaacatccagaaggagagcaccctccacttggtgctgcgcctcaggggaggcatgcagatcttcgtgaagaccctgaccggcaagactatcacccttgaggtggagtcttcagacaccatcgacaacgtcaaggccaagatccaggacaaggagggcatcccaccggaccagcagcgtttgatcttcgctggca

SEQ ID NO: 37388 - DNA, 268 bp, Zea mays
cgcgttctccgtctccgtctccgtccgcccggcgtaaagaaaagcctccctcaccacagccgccacgccatggccgaggagaccgacaccaggcctgcctccgcgagctcccgaggccgccccgcgcccgaggacgacgacagggaggagggcgagatcaccgacatcgcctgcgctccttccccgcccgccacgcacccgctcgagcactcctggaccttctggttcgacaacccgcagagcaagtccaagcaggccgcctggggga

SEQ ID NO: 37389 - DNA, 268 bp, Zea mays
gcgactgcatcatcgatggggggaacgagtggtacgagaacacggagaggagggagaaggccatggaggagcgcggcctcttgtatcttggcatgggtgtctctggaggagaggagggtgcccgcaacggcccgtccttgatgcccggaggctcgttcgacgcttacaagtacgtcgaagacattgttctcaaggtggctgctcaggtccctgacagtggcccgtgtgtcacgtacattggcaaaggtggatcgggcaactttgtcaa

SEQ ID NO: 37390 - DNA, 258 bp, Zea mays
cctagatctcgtccccgttcctccgatcctcatggattcctcctcctcctcgtccagcctgagccagcagcccgagttcgattacctcttcaagctgctgcttatcggcgactccggcgtcggcaagagcagcctcctcctccgtttcaccgccgactcctttgaggagctttcccccaccataggtgttgacttcaaggtgaagatggttaccattggtggcaaaaaactcaagcttgccatctgggacacagccgg

SEQ ID NO: 37391 - DNA, 267 bp, Zea mays
gggagtcagagagagagggaggagaccttgcagaggagcgaacaagcaaggtgggaaagaggcagcagcaagggcggcgggctgccggaaggggaacatgctccctcctcatctcacagtacgaactgaaaaacaagagtaaagaatttccgtgagatgagacagaatggcgcggtgatgattcagtttggccatcagatgcctgattacgactccccggctacccagtcaaccagtgagacgagccatcaagaagcgtctggaatg

SEQ ID NO: 37392 - DNA, 270 bp, Zea mays
gcgtccatgctgccgacgccccgcagcgaggacgagatcctggagtcggccaacgtcagggccttcagcttcaacgagctgaggaccgccaccaggaacttcaggccggacagcgtgctgggcgagggcgggttcggatccgtcttcaagggctgggtcgacgagaagacgctcgccccggctaggcccggcacggtgatggtcattgccgtcaagaagctcaaccaggatggataccagggccacaaggagtggctgactgaagtgaac

SEQ ID NO: 37393 - DNA, 271 bp, Zea mays
ctgacacaagagagcacgctactactcatcactcgccaacgtgcagagatcagggaggcggcacactccatccactgaccgctcatggcgaaggtccacctctacgtcgccgcggcctgcgccgtcgtcctcgcgctcgccgccccggccctcgccggcgaccccgacatgctgcaggacgtctgcccggctgactacgcctccccggtgaagctgaacgggttcgcgtgcaaggcgaacttttcggcggacgacttcttcttcgacgggc

SEQ ID NO: 37394 - DNA, 269 bp, Zea mays
gcacaacggcacgattctcctcctccgtccgcgtactctcggtttcggcgatgtcggggcgcggcaagggcggcaaggggctgggcaagggcggcgccaagcgccaccgcaaggtgctgcgcgacaacatccagggcatcacgaagccggcgatccgtaggctggccaggaggggcggcgtcaagcgcatttctgggctcatctacgaggagacccgcggcgtgctcaagatcttcctcgagaacgtcatccgcgacgccgtcacctac

SEQ ID NO: 37395 - DNA, 270 bp, Zea mays
  unsure (1)..(270): unsure at all n locations
agttcgcgaggcagacgatcgcggggctcaacccgctgtgcatccagctcctgacggagttccccatcaggagcaagctggacccggaggtgtacggcccggcggagtccgccatcaccaaggagatcctggagaagcacatgagcggcggcgccgccatngaccgtggagcaggcgctcgcggcgaacgtctgttcatcctggactaccacgacgtgttcctgccctacgtgcacagggtgcgcgagctgccggacacgacgctctacg

SEQ ID NO: 37396 - DNA, 270 bp, Zea mays
ggttgatattgttgacacattccgtctacaggagcaacctccttttgacaagaaatcatttgtgtcttacatcaaaaaatacatcaagaatctcactgctgtgttggagccagagaaagcggatgagttcaaaaagggtgtcgagggtgcaaccaagtttctccttagcaagctgaaggacctccaattttttgttggtgagtccatgaaggatgatgcgtctgtggtattcgcctattacaaggatggtgccactaatccgacattcct

SEQ ID NO: 37397 - DNA, 269 bp, Zea mays
gtgccaaagcatctgctagccgtgagatgatgagctacacttacggagccctgaagacttacatgcctgaaatggttgaggtgcttattgattgtgtacgcaaccctgcttttcttgattgggaggtaaaggaacagattttgaggctacaggcagagcttgcaaaatcatcaagttatcctgaaaattttcttttggaggctcttcattctactggctattctggtgctttagcaaacccactaattgttccagaatattcagttagc

SEQ ID NO: 37398 - DNA, 264 bp, Zea mays
acacaggccgttccaggggctatggatttgtcaggtttggagacgacaacgacaaatctcatgccatgtctgaaatgaatggtgtatattgctctacgaggccaattcgtataggacctgcgactcccagaagatcttcaggtgattctggctcctcgactcctggtcattcagatggtgattcttctaacagaacggtatatgttggtgggcttgaccccaatgtcagtgaagatgaactgagaaaagcctttgccaaatatg

SEQ ID NO: 37399 - DNA, 266 bp, Zea mays
cccacgcgtccgcggacgcgtggctttcgccgagctcctcgaaaccctaggagcgtgcttgaccggcggcggcgaagtgatagcgatggaccctgacgcggtagcaaggccttcgtggagcattactaccgaacgttcgacaccaaccgcgcggcgctggttgggctgtaccaggagacctccatgctcaccttcgagggccagaagttccagggcccctccgccattgccggcaagctcggatctctccctttccaggcctgcga

SEQ ID NO: 37400 - DNA, 268 bp, Zea mays
ctcgaggatcggggtggatcccgatggggcggaactggggccagaactggcagtgcgacgccgacctccgcgcccagccgctgtcgttcgaggtcaccggcgggaggggcaggacggtcaccgcctacagcgtggcgccggcggactggatgttcgcgcagacgttcgagggcaagcagttcgccgagtagagatcgacgccgaaaaccaagtctccggcggtggtgatgtaagtagaattatacgggtggcttcttgctcgcgagtc

SEQ ID NO: 37401 - DNA, 267 bp, Zea mays
cccacgcgtccgcccacgcgtccgtgaagatgagctacgttgtgggtttcggaaacaagtacccgaagcgccctcatcacagaggcgcgtcgatacctcacaacggcgtcaagtatgggtgcaaaggaggttacaagtggagggacacaaagaaggcaaaccctaacatccttgtcggagcaatggtggctggccccgacaggcgcgatggctacaaagatgtccgcacgaactacaactacacggagcctactctcgcagcgaatg

SEQ ID NO: 37402 - DNA, 263 bp, Zea mays
cccacgcgtccgacctgatgcaggttttatcgcgatgtacgcgactctagctagccgtgatgtggactgttgtttaatcccggagtcacccttctacctcgaagggaagggaggactcctcgagttcgtcgagaggcggctcaaggacaacggccacatggtcatcgtggtggccgagggtgctgggcaggacctcattgcgagaagtatgaattttgtggacacccaagacgcttctggaaacaagctgcttctggatgtcg

SEQ ID NO: 37403 - DNA, 255 bp, Zea mays
gccgaagcgtcgccaaccgtcaaagcggtctctcctccggtaacatgggaagacacgcggtatgggaactgggcgcaactcaagaccaccgcagaaaccagagtggctgacaaggcttacaagacaagcacttgggcaacgagtggaagaacccttttgctggatcatctcacgccaagggcatcgttctggagaagattggtattgacgccaagctaccgaactctgccatccgtaagtgtgaccgtgttcagc

SEQ ID NO: 37404 - DNA, 265 bp, Zea mays
cccacgcgtccgctcccatatccgctcccctacctctccagcatcctcccgtctccgtcgtctcgtctccgctcctcacctcgccagccatgggcaagatcaagatcggaatcaacggtttcggaaggatcggcaggctcgtggccagggtcgccctgcagagcgaggatgtcgagctcgtcgccgtcaacgaccccttcatcaccacggattacatgacgtacatgttcaagtacgacaccgtgcacggccaatggaagcacag

SEQ ID NO: 37405 - DNA, 258 bp, Zea mays
gccgcagcggaccatgttcgcgcccaccaagatctggcgcaagtcgcaccgccgcgtcaacgtcaacctccgccgcgtcaccgtcgcctcggcgctcgccgccaccgccgtcccagccctcgtccaggcgcgcggccaccgcatcgagaccgtcccagagatgcccctggtcatctccgactcggcggagtccatcgagaagacctcccaggcgctaaagatcctcaagcaggtcgacgcctacgacgacgccgagaa

SEQ ID NO: 37406 - DNA, 257 bp, Zea mays
  unsure (1)..(257): unsure at all n locations
cggacgctggncgctacgcgtgggcggacgcgtgggtggacgaccgcgaggcgctcaccgacgcacagatcgccgacaacatcatcggcgacatcttcgccgcccgcgacaccaccgccagcgtgctcacctggatggtcaagttcctcggcgaccaccccgccgtcctcaaggccgtcatcgaggagcagcaggagatcgcgcggtccaaaggctcctccggcgagcccctgacgtgggcggacaccaggcggatg

SEQ ID NO: 37407 - DNA, 258 bp, Zea mays
cctcgacgcctctctctctttccccgagctctcgaaaccctaggtgcgtgccgaccggcggcggcggcgaggtgatggcgatggacccggacgcggtggcgaaagcattcgtggagcactactaccggacgttcgacaccaaccgcgcggcgctggtggggctgtatcaggagacctccatgctcaccttcgagggccagaagttccagggcccatccgccattgccggcaagctcggatctcttcccttccaggcct

SEQ ID NO: 37408 - DNA, 257 bp, Zea mays
gcagtcggctgccgcagactggtagtagccggcgcgccgtcaccgtatcctcagatcagaggcgagcagaaaccacaccactctactgacgcccgacgagcagtgtaacattttccttcagccatgggtaaggagaagactcacatcaacattgtggtcattggccatgtcgactctggcaagtcgaccaccactggccacctgatctacaagcttggaggtattgacaagcgagtgattgagaggttcgagaaaga

SEQ ID NO: 37409 - DNA, 271 bp, Zea mays
  unsure (1)..(271): unsure at all n locations
ccctttgcaagtatagtctctctgctaagcgaaggagcttcaagctagtctcggcggctctagaatacgatgggcaatgacgacgtgatcgagagcggcgctggcggcggcgagttcgctgccaaggactacacggaccctcccccggcgccgctgatcgacgcggcgggactgngggtcctggtcgctgtaccgcgccgtgatcgcggagttcatcgccacgctgctgttcctgtacatcacggtggccaccgtgatcggggtacaagca

SEQ ID NO: 37410 - DNA, 277 bp, Zea mays
cttaacattactttggttgatttgcctggaattactaaggtgccagttggtgaccagccaactgatattgaagctagaatacggactatgataatgtcatacatcaagcacaagacatgtatcatcttagctgtatcgccagcaaatgcagatttagcaaactctgacgctcttcaaatggctcgggttgctgatcctgatggttctcgaacaattggtgttatcacaaagttggatataatggacaggggcactgatgcccggaactttctgctgg

SEQ ID NO: 37411 - DNA, 269 bp, Zea mays
atcaatgctagctttgctgttcaccaggatgttgatggaagggcaacagatgtagctctagggtggtcagtagctttaggttctcctttcacatttgctactactctagagcaggagtaccggagtgacatttttggcgagcgaggtattttgcttggtgctgtccatggcatggtggaggctcttttcaggagatacacagaacaaggaatggacgaggactcagcatataagaatactgtagagagcatcactggaattatatcgaa

SEQ ID NO: 37412 - DNA, 270 bp, Zea mays
ccgacatcctactttcgtcctcacgagtgaccgataatccgccggcgctaagatgttggtttatcaagatctcctatctggcgacgagctcctgtcggattcattcacctacaaggagctcgagaacggcgtcctgtgggaggtcgagggaaagtgggtcacccaaggtcctgttgatgtagacattggtgccaatccatccgccgagggtggtgaggacgaaagcgttgatgacacagccgtgaaggtggttgatattgttgacacatt

SEQ ID NO: 37413 - DNA, 264 bp, Zea mays
cggacgctggtcgagacgcgtgggcggacgcgtgggcggacgcgtgggtgctgatgctggtagcaccagttcatcaacttcggcttcgcatgcacgccgctcaacttcgtgtgggagaaggcggtggggatgcacgtcacccggagcgtcttcctccgcgcgctggtccgcctccccatcgtcgtccccgtctggttcctcgccatcatcttccccttcttcgggcccatcaactccgccgtcggcgcgctcctcgtcagcttc

SEQ ID NO: 37414 - DNA, 269 bp, Zea mays
gaaattccccagcccggttccttttcgtgcggtttgatctcgtcggaggccaggccgcagttccgccatcagccatcgaattcgatggcggccaacttcgggaacaagatccgcaacgccaagctggttcttcttggagatgtaggcgctggcaaatctagcttggttcttcggtttgtcaagggacagtttgttgaattccaggaatcaacaatcggagcagctttcttttcccagaccttagcggtaaatgatgagactgttaagtt

SEQ ID NO: 37415 - DNA, 269 bp, Zea mays
gtagaacctccaggccccccagcccccaggtggtcaagagacagagagagcatggccgctgctcccacggtggtgccgcgcgtgaagctgggctcccaggggctggaggtctcggcgcagggcctcggctgcatgggcatgtccgcctactacggccctcccaagccggagccagacatgatcgcgctcatccaccacgccgtcgccgccggcgtcaccctcctcgacacctccaacgtgtacggcccccacaccaacgagctcctcct

SEQ ID NO: 37416 - DNA, 266 bp, Zea mays
  unsure (1)..(266): unsure at all n locations
cggacgctggncgagacgcgtgggtgcggccccttcattttcaatgatgtcggaggttgcagccagcttacaagagcctcttgttggtgggtccatagctgaacgttcgggaaacaacttatacaatacatgctgcatctttggttcagatggcaaacttaagggtaaacatagaaagatccatctttttgacattgacattccaggaaagatcactttcaaggaatcgaagactcttactgctgggcagaatcctactgttgtag

SEQ ID NO: 37417 - DNA, 264 bp, Zea mays
cggacgctgggcgagacgcgtgggcttcggcgcccgttcaggatccacatcttcccgagcgacttcttggttgaactcttcccccttcggaccacctccaaggctcttggtgtagcttgccactctcaccaatcaagttttcatgtctgatctcgacattcagatcccaactgccttcgatcccttcgctgaggccaatgctggggactctggtgcggcacagggtcaaaggactacgttcacgtgcgcatccagcagcgtaat

SEQ ID NO: 37418 - DNA, 259 bp, Zea mays
ccgaaacgcgtgtgcaggcgagcacagctacgtggaggtggcggtgcatacgaggagcggcaagtccgtgcgcgtggtggtggagctcagcttccgcgccgagttcgaggtggcgcgcgccacgccggctagcgcgcgctggtgaccgcgctgcccgaggtgttcgtcggccgggccgaccggctgcgcggcgtcgtcaaggtcatgtgcgccgcggccaagcagtgcatgatggataacaacatgcacatgggaccct

SEQ ID NO: 37419 - DNA, 263 bp, Zea mays
  unsure (1)..(263): unsure at all n locations
gaccnagcgtccgggacctggcttgacttcctactattcagaaacacagtaccgagaagtctttaggtggggacaaagatggtgtcgctgaagttgcaaaagcgccttgccgcgagctacctcaagtgtgggaaaggcaaggtgtggcttgacccaaatgaagttagtgagatctccatggcaaactcccgccagaatatccggaagttggttaaggatgggtttatcatcaagaagcctcataagatccactctagatcccg

SEQ ID NO: 37420 - DNA, 267 bp, Zea mays
atcgggatgtaaaaactgaaaatatgctgctcgatacacagcgaaaccttaagattgctgattttggtgttgctcgtgttgaggctcagaatccaaaggacatgacaggcgcgactgggacacttggctacatggccccagaggtgcttgaaggcaagccatacaacagaaagtgtgatgtctacagttttggcatatgcttatgggaaatatactgctgtgacatgccatatccagacctcagttttgcagacgtctcgtccgccg

SEQ ID NO: 37421 - DNA, 271 bp, Zea mays
gcagaaaagagtagagattaagacccctgaactaatagaaaggatgagagaaacatgtcgaattgcaagagaggttttagatgcagctgctcgtgtaattaaaccaggaattacaacagatgaaattgatagagttgtccatgaagagacaattgctagaggtggatacccatctccattgaattaccatttcttccccaagtcatgttgcacgtctgtcaatgaagtcatttgccatggaattccagatgccaggaaacttgaggatggt

SEQ ID NO: 37422 - DNA, 265 bp, Zea mays
ccagcaaggcctgcacggactctgaccggtgctgtgaggagaggtggagagaacacaagcgttgacgccagcggaaactcttgcgacctctcaacaaagctgctccatcttgcgtggcacccaactgagaactccatcgcgtgcgctgccgcaaacagcttgtacatgtactacgcataggggaacgtgctagagagaactggtacagtagtgctttttttttgcttgtttgcttgcttgaagtgaaaggcgtggtctttcacac

SEQ ID NO: 37423 - DNA, 264 bp, Zea mays
gagccgtcggcttccgccagcgcccagctggaggtctcgctgttcccttcacgatacgcccccccaaagcggatcaaaccctagatctcgtcttgtcgccccgttcctccgatcccatcctatccgatcctcatggattcctcctcgtccagcctcagccagcagcccgagttcgactacctcttcaagctactccttatcggcgactccggcgtcggcaagagcagcctcctcctccgcttcaccgccgactccttcgatgac

SEQ ID NO: 37424 - DNA, 261 bp, Zea mays
ggcagctcggtgtacccggcggctgtcgtctacccgcatcactcccgccagatctcctgcaaacccagggtgttcctgtatcagcacttcctcagcgacgacgaggctaaccacctgatctccctcgcgagagcggagctcaagaggtcagcggtcgccgataatatgtccggcaagagcacgctcagtgaggtccgcaccagctccggcaccttcctcaggaagggccaggatcctattgttgagggtatagaggacaaa

SEQ ID NO: 37425 - DNA, 261 bp, Zea mays
cccacgcgtccgcccacgcgtccgactagttctagatcgcgggcggccgctcgcgatctagaactagttgacaattctggtgatggggaaaggcggagtggggaagtcatctactgttaactccatcgtcggggagaggatcgacactgtcagcgctttccagtctgagggtctgagaccgatgatgtggtcgcgcacaagggcagggttcaccttgaacattatcgacactcctgggcttattgaaggtggatacattaa

SEQ ID NO: 37426 - DNA, 261 bp, Zea mays
cccacgcgtccggaactgctgggtgaagaagggaggtgctttcactggtgaagtcagtgctgagatgctcgtcaaccttggtgttccctgggtcattcttggacactctgaaaggagagctctgctgggagaatcaaatgaatttgttggagacaaggttgcgtatgccctgtctcagggactaaaggtcattgcatgtgttggtgagacccttgagcagagggaggctgggtctaccatggatgttgttgctgcacaaac

SEQ ID NO: 37427 - DNA, 259 bp, Zea mays
attaaggatggtgttggacggcctcgtccagattttttctggcgctgtttccctaatggaaatgatgtttatgataacattactactggtgttatatgcaatggagtgaagagcgtaatcaaggaaggccacaagagctttcccagtggacacagttcatggtcttttgctggtctaggcttccttgcatggtacttagctgggaaactcacagcctttgaccgcaaagggcatattgcgaactatgcattgtgttcct

SEQ ID NO: 37428 - DNA, 259 bp, Zea mays
cggacggtggggccgatcctaagggacgggggaaacccggcagatagcgcgatcacggcgtcacccgaaagggaatcgggttaagatttcccgagccgggacgtggcggcagacggcgacgttaggaagtccggagacgccggcgggggcctcgggaagagttatcttttctgcttaacggcccgccaaccctggaatcggttcagccggaggtagggtccagcggccggaagagcaccgcacatcgcgcggtgtccgg

SEQ ID NO: 37429 - DNA, 296 bp, Zea mays
  unsure (1)..(296): unsure at all n locations
gcggcgtcggatgttgagtaccgctgcttcgtcggcagcctcgcctgggccacggacgaccactccctccacaacgccttcagcacctacggcgaggtcctcgagtccaagatcatcctcgatcgggagacgcagaggtcccgcggcttcggcttcgtcaccttctccacggaggaggcgatgcggaacccatcgagggcatgatcggcaatgaactngaccgtccgaacatcaccgtcaacgagtgccagtcccgcggctgccgtggaggcggcggctgctgctacggtggtggc

SEQ ID NO: 37430 - DNA, 299 bp, Zea mays
  unsure (1)..(299): unsure at all n locations
gggacacctccaccgaacaggcgggaccgagagggcgcgacctctcggcgaaaccctaacctaccttagaccacgccgagtcccgccgccgacgcccaagggagagagagacttgcacatcaaagggcgtccgatggggaagaagaagaagcgcgtcgataaggtcttctgctactactgcgaccgcgagttcgacgacgagaagatcctcgtccagcaccagaaggccaagcacttcaagtgccacgtatgccacaagaagctctccgacggctctggcatggncatacacgtcctca

SEQ ID NO: 37431 - DNA, 299 bp, Zea mays
ggacctggcgccggcgtgggttccgccatcgccttcgggcaactgacgaatggcggactgctggaccctgcgggactggtggcgatcgcggtggcgcacgcgctggccctcttcgtgggcgtctccgtggccgcgaacacctccggcggccacctgaaccccgccgtgacgttcggcctggccgtgggcggcacatcaccgtcctcaccggcctcttctactgggtggcccagctgctgggcgcgtccgtggcgtgcatgctcctcaggttcgtgacccagggcaaggccatcccgacg

SEQ ID NO: 37432 - DNA, 284 bp, Zea mays
gttggcttctcctccccctccggttcgggttcgggttcgtgaggttctccggggttcggtttcgtgggtgagcggatcgagatggcggcgtcggatgttgagtaccgctgcttcgtcggcggcctcgcctgggccacggacgaccactccctccacaacgccttcagcacctacggcgatgtcctcgagtccaagatcatcctcgatcgggagacgcagaggtcccgctgcttcggcttcgtcaccttctccacggaggaggcgatgcggacgccatcgagggc

SEQ ID NO: 37433 - DNA, 287 bp, Zea mays
cacgccgtagcctcgccgcgcgccgccgcgtcggcgcgccggaggtgcccatcgtcgtgcagttccacggcggcggcttcgtcaccgggagcaacaccgccgaggccaacgacgccttctgcaggagggtcgccaagctctgtgatgccattgtcgtcgccgtgggatacaggcttgcgccagagagcagatacccggccgcgtttgaggacggggtcaaggtgctcaagtggattaccagacaggcaaatctcgccatgatgaccagggccaggggtggtgtggac

SEQ ID NO: 37434 - DNA, 282 bp, Zea mays
ggaaaccatgatgcacctgacatgtacaaacatgccagtagagaagatacaccatgccttggaaaccatcaaatccaatgggattcaaaatgttttggccctcagaggggatcctccacatgggcaagacaaatttgtgcaagttgaaggcggatttgcttgtgctcttgatttggtgcagcatattagagccaagtacggtgattattttggcataactgtagctggttatccagaggcacaccctgatgcgatacaaggtgagggaggtgctacattgga

SEQ ID NO: 37435 - DNA, 304 bp, Zea mays
cttttatcggatgggcttatcggacaaagatattgtagctctatcagggggacatactctgggaagggctcaccctgagaggtctggattcgatggtgcctggacaaaggagcctcttaagtttgataactcatactttcttgagctgttgaatgaggaatctgagggacttttaaagctcccaactgacaaggcactgttatcagatcctgaatttaggcgctacgtggagctctatgcaaaggatgaagatgcgttcttcaaagattatgctgaatcacacaagaaactctctgagcttggc

SEQ ID NO: 37436 - DNA, 294 bp, Zea mays
gagaaggcgaaggcaaagggggtttctcttttgcttcccactgatattgtagtagcggacaagtttgcagccgatgctgagagcaagattgtccctgccactgctatccctgatgactggatgggtcttgatgttggccctgatgccacgaaaaccttcaacgaagcattggacaccaccaagactgttatttggaacggccccatgggagtgtttgagttcgagaagtttgcagctggaactgaggcgattgctaagaagctagctgagcttacaactacgaagggtgtcact

SEQ ID NO: 37437 - DNA, 291 bp, Zea mays
caaacaatgagcttgtgaggactcagactcttgtgaagagcgccattgtacaagttgatgctgctccattcaagcagtggtacctcactcactatggagtggacatcggtaggaagaagaaggtgcctgttgctaagaaggatgcgactgagggacaagagggtgaggctatagctgaggaaacaaagaagagtaaccatgtgcagaggaagattgagaagcgacacaggaccgtgcactcgacactcatattgaagagcaatttggcagtgggagattgttggcctgcat

SEQ ID NO: 37438 - DNA, 291 bp, Zea mays
ggcctctagcgtaatggttaaggcttccgagtagcacctttagtttctgggttcgattccccctcgggtacgaatttgggcttggttaacagaatcccctcgctgtgccccgcccgctcctgggttacgtcctgcgtgccaccctctgtctgggctgttgcagagtgggcggtgatggcatgctagtgatggggggctatggttcggggattttatcgtccgggactatgtttcggtctgttcttaatataataccgggagggcagtctttccctctccggccgagttttt

SEQ ID NO: 37439 - DNA, 289 bp, Zea mays
cggacgcgtgggtcggcgactccttcagcgccacctccatcaaggcctacgtggccgagttcaccgccaccctcctcttcgtcttcgccggcgtcggttccgccatcgcctacgggcaactgacgaatggcggcgcgctggacccggcgggcctggtggcgatcgcgatcgcgcacgcgctggcgctgttcgtgggcgtgtccgtcgcggcgaacatctcgggcggccacctgaacccggccgtgacgttcgggctggccgtgggcggccacatcaccatcctgacggg

SEQ ID NO: 37440 - DNA, 296 bp, Zea mays
acggccgcctcctcgccatgtccgaggacgacctcccctaccacgtccgcgttgcggacgacggcgacctcgagaccgtcggccgctacgacttcgacgggcagctcggctgcgccatgatcgcgcaccccaagctggacccggccaccggggagctccacgcgctcagctacgacgtcatcaagaggccgtacctcaagtacttctacttcaggcccgacggcaccaagtccgacgacgtggagatcccgctggagcagcccacgatgatccacgacttcgccatcaccgagaat

SEQ ID NO: 37441 - DNA, 296 bp, Zea mays
acgccgcacttctcctccggcatcgacgaggcaacccagcgcccgagtccctctccctgcacccacgacccatggcggcggatatggcgtacgcgccgccgatgaaggcgggcaaggccgggttcgaggctggcatgatggatccgcagcacaggatccgcatcacgctctcctccaagagcgtcaagaacctcgagaaagtctgcggggatctggtgaagggcgccaagggtaaggagctcaaggtcaagggccccgtgcggatgcctaccaaggtgctccacatcaccaccagg

SEQ ID NO: 37442 - DNA, 289 bp, Zea mays
actgggtggcgcactagctggggtccaccgtggcgtgcttcctgctccgcttctcgacgggcgggcaggccacgggcaccttcgggctgacgggcgtgtcggtgtgggaggcgctggtgctggagatcgtgatgaccttcgggctggtgtacacggtgtacgcgacggcggtggacccgaagaagggcagcctgggcaccatcgcccccattgccatcggcttcatcgtgggggccaacatcctggtgggcggcgcttcgacggcggtccatgaacccgccgtgtcttc

SEQ ID NO: 37443 - DNA, 186 bp, Zea mays
gctggcttctcctccccctccggttcgggttcgggttcgtgacgttctccggggttcggtttcgtgggtgggcggatcgtgatggcagcgtcggatgttgagtaccgctgcttcgtcggctgcctcgcctgggtcacggacgaccactccctccacaacgccttcagcaactacggcgatgtcctc

SEQ ID NO: 37444 - DNA, 292 bp, Zea mays
cgacgcaattgacatcccctcgcctaccccagctctacccgcgacgaagcatcaccaggaaggatgacgtgctcaatggatctcccggccaagggcgggttcagcttcgacctgtgccgccgcaacagtatgctggagaagaacgggctcaaactcccgggattcaggaagaccggaacaaccatcgtcggcctcgtctttcaggatggggttgttcttggggcagacacaagagcaactgaggggcctatagttgctgataagaattgtgagaagatccactttatggcgc

SEQ ID NO: 37445 - DNA, 293 bp, Zea mays
gtcttaatgtgtggtaccagttcattccccagctgatcttcttgaacagcttatttggttacctgtccttgcttattattattaagtggtgcacggggtcaaaagcagatctataccatgttatgatctacatgttccttagcccaacagatgagattggtgaaaaccagttgtttagtgggcagaagacagtgcagcttgttctgcttctgcttgctctggtgtctgtgccttggatgttgattccaaaacctcttctactgaagaagcaacatcagcaaaggcatcaaggt

SEQ ID NO: 37446 - DNA, 290 bp, Zea mays
cccacgcgtccggaactgctgggtgaagaagggaggtgctttcactggtgaagtcagtgctgagatgctcgtcaaccttggtgttccctgggtcattcttggacactctgaaaggagagctctgctgggagaatcaaatgaatttgttggagacaaggttgcgtatgccctgtctcagggactaaaggtcattgcatgtgttggtgagacccttgagcagagggaggctgggtctaccatggatgttgttgctgcacaaacaaaagcaattgctgagaagatcaaggact

SEQ ID NO: 37447 - DNA, 290 bp, Zea mays
aaaaccatctgcttcagctagccccaagttcattcggccgatcattcactgaagtagtaattgcctccgtcaacagctggaccctcgagatcgcgtcgccggttgctccgcagcgcctgttccgcgccgccgtgatggactggcacaccctggcgcccaaggtcgcctcccacgtcgtcgccagctcgcagtccgtggagggcgacggcggcgttggcagcgtcatgcagttcaacttcacctcagtcatgccgttcagcttcatgaaggagcgtctcgagttcctggac

SEQ ID NO: 37448 - DNA, 158 bp, Zea mays
gtgggcacatcaacccggccgtcaccttctgcttcttcctggcgcgcaaggtctcgctggtgcgctcgctgctctacatcgtggcgcagtgcctcggcgccatctgcggcgtcgggctcgtcaagggcttccagagcgccttctacgtgcgctacggc

SEQ ID NO: 37449 - DNA, 175 bp, Zea mays
gatgacttcacaaacagcctccctgagaatgactgccgatacgcgatctatgatttcgactttgttactgcagaggatgtccagaagagcaggatcttctatatcctatggtccccatcctccgccaaggtgaagagcaagatgctttatgcaagctcaaaccagaatttcaaga

SEQ ID NO: 37450 - DNA, 205 bp, Zea mays
ctcatggaccatatttatgtccaaaacatacaaggtgccacagctgtggatctggtgtgcctggtagtggacacagcacaaggtggtttttggggtacacatgctgtgatgcgtgtggacgattgtttgtgaaaggaaactactgtccaatctgcttgaaggtttatagagactctgaagtgatacctatggtttgctgcgatgt

SEQ ID NO: 37451 - DNA, 228 bp, Zea mays
  unsure (1)..(228): unsure at all n locations
cccacgcgtccgcatcgatgagcggactngcacggcggcgcgcgctggtcctgcggctgctggtctgcgtcgtcgcggcgcgggctgtctcggccgtcgccgatggtcctctgctgaacggcaacttcgaggacccgccgaaccagtcccagatgagcgggtcggtggtgaccggggagcacgcggtctcctactggaagacgtccggccacatcgagttcatatgct

SEQ ID NO: 37452 - DNA, 251 bp, Zea mays
tttctctcgtgatgattggtgtgaaagaccagaatgaccggcgagatgcctggcaccatggtggctggattgcaaagattgctgtatgggctgttctcattgttcttatgttctgtgtgccgaacattgtcattactatttacgaggtactttcgaagtttggatctggcttctttcttctagtacaggttgtgatgcttttagacttcacaaataattggaatgactcatgggttgagaaagaagagcgg

SEQ ID NO: 37453 - DNA, 259 bp, Zea mays
cgccaaggccgatgccaagctggcggtgaagagcaagggggcggagaagcccgccaagggcaggaaagggaaggccggcaaggaccccaacaagcctaagagggctcccagcgctttcttcgtgttcatggaggaatttcgcaaggagttcaaggagaagaaccctaagaacaagtctgtcgctgcggtggggaaagctgctggcgacaggtggaaatccctgagcgagtcggacaaggctccctatgtagccaaggct

SEQ ID NO: 37454 - DNA, 171 bp, Zea mays
cccacgcgtccgcgcatgtggaacctctcctctggttgggggcaattcatggcggtcacgacgagagcttacagatccgaatgggcccgtgtactacaacggcatgtaccacctgttctaccagtacaacccgcacggggcgctctgggacgtgggcaacctctcatgggg

SEQ ID NO: 37455 - DNA, 222 bp, Zea mays
caacaagatggtgaagctcgcattcggaagcgtcggcgactccttcagcgtcacctccatcaaggcctacgttgcggagttcatcgccaccctcctcttcgtcttcgccggcgtgggttccgccatcgccttcgggcaactgacgaatggcggcgcgctggaccctgcgggactggtggcgatcgctgtggcgcacgctctggccctcttcgtggtcgtctc

SEQ ID NO: 37456 - DNA, 263 bp, Zea mays
gtcggcgcggcgtcgtcgctggcccccaagatcggcccgctcggtctctccccgaagaagatcggcgaggacatcgccaaggagaccgccaaggactggaagggcctccgcgtcaccgtcaagctcaccgtgcagaaccggcaggccaaggtctccgtcgtcccctccgccgcggcgctcgtcatcaaggcgctcaaggaacccgagagggacaggaagaaggtcaagaacatcaagcacagcggcaacatcagcctcgacga

SEQ ID NO: 37457 - DNA, 157 bp, Zea mays
ctgcttcgtcagcggcctcgcctgggccacggacgatcactccctccacaacgccttcagcacctacggcgatgtcctcgaatccattatcatcctcgatcgggagacgcagaggtcccgctgcttcggcttcgtcaccttctccactgaggaagcg

SEQ ID NO: 37458 - DNA, 175 bp, Zea mays
aagatatccaagggtttgcttgacaagtatggcccggatagggttctcgatactccgatcactgaggcgggcttcactggcattggtgttggtgccgcttaccatggtcttcgacctattgtagagttcatgacatttaacttttcgatgcaggcaattgatcacataattaatt

SEQ ID NO: 37459 - DNA, 260 bp, Zea mays
aagaagaagaagaagcccaggccggagaaccatcgcctgcatttcgatctgtttcaccgcaattcgcattgttagtcgtgtattggagttatgtgtacttggtttccaagaactttggttccttgtttttttttctttcttgtttgagcgtttttgggcagcgctggcctggttcctagtatggtgagaattggctgcaccttttgcttcgaataaaaatgcctgctcgttcaaaaaaaaaaaagaaaaaagaaagaaaa

SEQ ID NO: 37460 - DNA, 268 bp, Zea mays
cggacgcgtgggcaagctcagagcctcagagcgccaccaagtcttgcggtcgcgaagagcaacgcaacaagaaggtgaagctcgcattcggaagcgtcggcgactccttcagcgtcacctccatcaaggcctacgtggcggagttcatcgccaccctcctcttcgtcttcgccggcgtgggttccgccatcgccttcgggcaactgacgaatggcggcgcgctggaccctgcgggactggtggcgatcgcggtggcgcacgcgctggc

SEQ ID NO: 37461 - DNA, 277 bp, Zea mays
gaaggaaagaaggcgggcaagcgacaggaaggaggaggaggaggaggaggagaagccatggcgagcgacggcgacgggaagggccgggtcgcgacggcgccgggggcaggagggtacggctacggctacggctacgccggcttcgagggggaggaggaccggaagtggtggccgtggctggtgcccaccgtgatcgtcgcatgcatcgccgtcttcgtcgtcgagatgtacgagaacaactgccccaagaaccggagccagctcggcggcgactgcg

SEQ ID NO: 37462 - DNA, 281 bp, Zea mays
gctagcatccgcagttcccccgcgcccgagacgcaaccccgcgccaggagtaagtttgttcttttatcgatattatcgatatggcgagggaggagaatgtctacatggccaagctggctgagcaggccgaaaggtatgaagagatggttgagtatatggagaaggtggctaagactgtagatgtggaagagctcactgttgaggagcgtaacctcttgtcggtcgcatacaagaatgtgattggggctcgccgtgcttcatggcgcattgtctcttctatt

SEQ ID NO: 37463 - DNA, 282 bp, Zea mays
gaactgcgatttccagatggagcggtatgtctttaagcgtcgcaccgacggcatctacatcatcaacctgggcaagacatgggataagctccagctcgcggcgagggttattgttgccattgagaacccacaagacatcatcgtccagtcggcccgcccctacggccagcgtgctgtcctcaagttcgcgcagtacactggcgcccatgccatcgctgggaggcacacccctggtaccttcaccaatcagctccagacctctttcagcgagcctcgcctgct

SEQ ID NO: 37464 - DNA, 278 bp, Zea mays
cccacgcgtccgcccacgcgtccgcggacgcgtggggcgagcatgtggggccattcaacctgggtaaccctggcgagttcaccatgcatgagcttgccaaggttgtccaggacaccatcgaccccaacgcacggatcgagttccgcaagaacacccaggacgacccgcacaagcgcaagcacgacatcagccgcgccaaggagttcctcgggtgggagccgaagatccccctgcgtgagggccttcccctcatggtctccgacttccgcaagggcatc

SEQ ID NO: 37465 - DNA, 278 bp, Zea mays
  unsure (1)..(278): unsure at all n locations
cggacggtggncgagacgcgtgggatcgggcgccgcctgaccgtggtcttcgccgccgtcatattcttcgcggggacgctgctcatgggcttcgccgtgaactacggcatgctcatggcgggccggttcgtggccggagtcggcgtgggctacgggggcatgatcgcgcccgtgtacacggccgagatctcgccggcggcgtcccggggcttcctgacgaccttcccggaggtgttcatcaacatcggcatcctgctcgggtacgtgtccaacttcgg

SEQ ID NO: 37466 - DNA, 274 bp, Zea mays
ggagaatatgtgtctcttggcaaggttgaatcggctctagcaacaagcaactatgtggagaacatcatggtttatgccgatccatttcataactactgtgttgccctggttgttccagcgcaccaggccttggagaagtgggctcagaattccgggataaactatgaaggctttgcagagctttgccaaaacgaccgagcaattaaggaggttcagcaatcgctatcaaaggccgcaaaagcagcgaggctcgagaaattcgaggtgccagcga

SEQ ID NO: 37467 - DNA, 275 bp, Zea mays
tgcaaactcagaagcagcaagactgttcagcgagaacaagcgggagtacaaccgcaaagtccgtgagatcgtggagcagagctggacagccgactagtgcataaggatgctcgtcgtgcccgataggggcacaataagaaagcgtgaaaaaaaaaacacacccactccttgtgtttctggttcgccaggcttgtcgaaacattgaagaaccccagtgattggtttgtagtctgtcgtcgtcgttctgcccccatcaagagccccggttgctcatg

SEQ ID NO: 37468 - DNA, 275 bp, Zea mays
cccacgcgtccggtcgacatcctcgacacaaccggcagcctatacaccatggcgcggttcgccggattcgtggacgatgcgacgggagagttcgagggccagtacttcgccttcatgtccgacgcgacggccattgtgtttggctcgctcctgggcacgtccccagttacggcgttcatcgagtcgtcgacggggatccgagagggcggccggacggggctgacggcgctcacggcggcgatctacttcgcggcggcgctgttcatcacgccggt

SEQ ID NO: 37469 - DNA, 276 bp, Zea mays
ccgcaaacgccaaacggccggcacacaactacacaagccgctggcaaagatggcctcctccttggtcctcatcgcagcggccctgcttgcgctggcctcgtcgtggcagcaggccatcgcctacgatcctagccccctccaggacttctgtgtcgcagacaagaactcgcctgttcgcgtcaacgggttcccttgcaaggacccgatggcggtcaccccggacgacttcttcaacgcggcgatgatcatcgacaagcggagggacacgaacaacaa

SEQ ID NO: 37470 - DNA, 273 bp, Zea mays
ctcgtggggagacgccgcctaccaccaggagacgctcgagaacctcaagctcgccatcaagtccaccaagaagctgtgcgctgttatgcttgacacggttggaccggagctgcaggtggtcaacaagagtgaaacccccatctccctcgaggagaacgggactgtcgtgctcacgccgcatcagggccaagaagcctcctccaccttgctgcccatcaacttcgatggactcgccaaggctttgacaccaggtgcaacgatatttgtgggcca

SEQ ID NO: 37471 - DNA, 272 bp, Zea mays
caactattcacaaactgcacagatgctgatatttcacttcttgtatggtatatttttctggacatgttttcactatttcaggctggtgcccttgataaactagaagcatttacaagctatcaatggccctgatttttatggcctcccaaggaacacttcaaagattatcgtgagaaagaatgcctggatagttcctgctacttataaacacagttcaggggagcatgagcctatgcttaatggcagcacccttgaatggcttccatctgatc

SEQ ID NO: 37472 - DNA, 272 bp, Zea mays
caatcaaagatgtcaaggcctctctagttacctgcaactgggatattgaggctgcacagaaggacctaaggaagagaggtgttgctcttgctgccaaaaagtcttcacgcactgctgctgaaggtttgctagctatcgcacaagatgacaaaagggctgctgtagttgagcttaactgtgaaactgatttcgtagcaagaaatgatgttttccagtacctggcttcatcattggcaaagatggctttatctgctcagggtcctggtgaattg

SEQ ID NO: 37473 - DNA, 269 bp, Zea mays
ggtgttggcaagagttgcctcctgttgcggttctctgatggttccttcactacaagctttattaccacaattggtattgactttaagatacggacaatagaattggatggcaagcgtataaagctacagatttgggatacagcgggccaagaacgcttccgtactattaccactgcgtactaccgtggagctatgggtatcttgctggtttatgatgtcaccgatgaatcttctttcaacaacatccgaaactggattcggaacattga

SEQ ID NO: 37474 - DNA, 271 bp, Zea mays
gactacgtgaaggcgcacatcccccacgcgcccgacgtcgcctccaccctgctccgcacccacttccacgactgcttcgtcaggggctgcgacgcgtcagtgctgctcaacgcgacgggcggcagcgaggcggagaaggacgcggcgcccaacctgacgctgcgcggcttcggcttcatcgaccgcatcaaggcgctgctcgagaaggagtgccccggcgtggtgtcctgcgccgacatcgtcgcgctcgccagccgcgactccgtcggcg

SEQ ID NO: 37475 - DNA, 269 bp, Zea mays
ggacctggtcactatgcctcgcccatggcgccgggctggtcacctattactccccagcgctggaccaccgcgccaccattcggacccacctccaccgcgtcacctccctcctgcagctgccctccagtctcgccgtccttgggtctgactccgctcctgggcttcacgtgtacgactttctcgatggcaaacatgtcgcctccgttcagtggtcggatcccactgacactcgcaccagcaaggcgaaggtcgtcgccattgcggcccgt

SEQ ID NO: 37476 - DNA, 279 bp, Zea mays
ggaaaccctagccgccatatctcacgatccactcgagcaccaagccgagggaaggtgaggagcgatggcgcgcggcgtggtgtcggcgaagggcggcgcggtcgcgggcaagaagaaggggtcggtttccttcacgatcgactgcaccaagccagtggaggacaagatcatggaggtcgcctcgctcgagaagttcctgcaggagcgcatcaaggtcgccggcggcaaggctggcaacctcggcgactccgtcaccatctctcgcgagaagaccaaggt

SEQ ID NO: 37477 - DNA, 275 bp, Zea mays
cggacgcgtggcttttcagcaagcgttactggaaagttgtgagtgtgggggcagcactgtttttgttcacagcagcttgctggtataaacgctgttgtatattactctacatcggtgttccgtagtgcaggcattgcatctgatgttgctgctagtgctcttgttggagcagccaatgtttttggtactatggttgcatcttctctaatggacaaacaaggaaggaaaagccttctgataacaagcttttctggaatgggtgcttcaatgctact

SEQ ID NO: 37478 - DNA, 271 bp, Zea mays
ctcagagcctcagagcgccaccaagtcttgcggtcgcgaagagcaatgcaacaagatggtgaagctcgcattcggaagcgtcggcgactccttcagcgtcacctccatcaaggcctacgtggcggagttcatcgccaccctcctcttcgtcttcgccggcgtgggttccgccatcgccttcgggcaactgacgaatggcggcgcgctggaccctgcgggactggtggcgatcgcggtggcgcacgcgctggccctcttcgtgggcgtctcc

SEQ ID NO: 37479 - DNA, 262 bp, Zea mays
ggaccgtggcagccatggatttcctgcaggagcaaagcgtcgagaccacagtggccgtcgcgacacgtcgcgccgtcgcgcaggcgccttcctcctccttcgatccaggaagcccaagggctgcttggatcctgagaacttcaggaagttcaaacttgttgaaaagaagcaaataagtcataatgttgccaggttcaagttcgctcttccaactccaacttctgtattgggccttccaatcggtcaacatatcagctgcaga

SEQ ID NO: 37480 - DNA, 268 bp, Zea mays
gcaatgttcctccagtggcatctgtccttccatcttttgtttccaaactgaagatggccaaaaataagtttttatcagcccatgttgctgcatcagcttctacttctgttaagggaaagaagtggaatctgtcattctctttggtctggaataccctggtgtggctcatggttgcaaacttcattatccagatagttacttctacagcacagggttatctcaggacacaacaggagcgagagatcagtaaaaagttggaaaccgagct

SEQ ID NO: 37481 - DNA, 272 bp, Zea mays
ggaccgtggcggacgcgtgggccgccgtcgaggccgcgtcccagtgcgaagagactccgactcagatgagccagccgctggctccggcccgaggtgtacccgctgttcgcggcgacgggcgtggccgtcggcatctgcgggtttcagctcttccggaacatcactggcaacccggaagtcagggtaaacaaggcagggagggcagctggtgtgcttgagaaccatgaggaggggagacgttacgccatgcatggcctaagaagctttgtgca

SEQ ID NO: 37482 - DNA, 269 bp, Zea mays
cttgagtatgcaaaggaccgaatcatgatgggtagtgagcggaagtcggcagttatctctgacgaatgcaggaagctgacagcataccatgagggagggcatgcccttgttgcaatccacacagaaggagctcaccctgtccacaaggctaccatcgtacctagggggatggccctaggaatggtggcccaactccccgacaaagaccagacaagtgtgtcaaggaaacagatgctagcaaaactggatgtctgcatgggaggccgtgt

SEQ ID NO: 37483 - DNA, 268 bp, Zea mays
cggacgcgtgggcggacgcgtgggcgcctccaaagcaccagacatccgtccatgacgacgtcgtccagcgaggtcacggtgtgatcgcacctgttcacggtgagaggctacacccacacaaggggcatcggcgtcggcaggtccatcgagtcgcaggcgttcgacgcggccggccaccgctggtccgtcgtgttctacccggacggcgacgaccaggacgcgaggggccacatctctatcttcgtcaggctcatcggcagcggcggcg

SEQ ID NO: 37484 - DNA, 261 bp, Zea mays
cccacgcgtccgctgctgggcatttccacgagcacctggtctgcgggtgtcgctgggctggggttcctggagactggttacctcacttacctcaagctcacgggctccgaggcgttctgccccatcactggcgcaggctgtggcgacgtcctcgacagcgactactccgtcgtctttgggatacctcttcccatagttggtctggtggcatatggtttagttaccgcactttctctgcaaaaaaatggaaaggacttactc

SEQ ID NO: 37485 - DNA, 262 bp, Zea mays
gtcgcagatggtgtcccctactggctcatcaagaactcatggggcgctgactggggcgatgagggttacttcaagatggaaatgggcaagaacatgtgcggtgttgctacgtgtgcatcctaccctattgtcgcatgaggcccttacgaagtgttacatggtctgtttggcatcaataatgcatgtttaacctgagcttggcgatgggttatacagaacggaaactctgtttgtgaatagaaaatcatgaagggaaggagtt

SEQ ID NO: 37486 - DNA, 266 bp, Zea mays
gaaggaggcggacgcggtgttcatccgcaccatcaccagccagttccagaccatcctgggcatctcgctcatcgagatccactccaagcactcctccgacgaggtgtacctcggccagcgcgacgagcctgagcgctggacgtcggacgccagggcgctggacgcgttcagaaggttcggaagccggctggtggagatcgagaagcggatcaggacgatgaacgacagcccgacgttgaagaaccggaaggggccggtggagatgc

SEQ ID NO: 37487 - DNA, 262 bp, Zea mays
cccacgcgtccgctttcagaggtgtgcatgaggaaagagttggctcactggcatggaacaacaacatcctcaccactggcagtatggatggcaagatcgtgaacaacgacgtgagaattaggaaccatgttgtacagacatacgaggggcacagccaggaggtgtgtgggctcaagtggtctggatcagggcagcagctggctagtgggggtaatgacaaccttctgcacatctgggatgtgtcgatggcatcccccatgtc

SEQ ID NO: 37488 - DNA, 261 bp, Zea mays
tgatgagcttccaatggacagctgtcaagttcttctggttcttcttcatttcctacttctccttcctctacttcacctactatggcatgatggctgtctcaatctccccaaaccatgaggttgcatccatcttcgcagcagctttcttttctctcttcaatctcttctcgggcttcttcattccgagaccgacaattcccggatggtggatctggtactactggatttgcccactggcatggacagtgtatgggctcatcg

SEQ ID NO: 37489 - DNA, 254 bp, Zea mays
cccacgcgtccgcccacgcgtccggccgttcgtggcggcgcccgagtggtacccggcgttcaccgagtccgcgctgagccagttcgacgggctggagcacgccgacgacgtgctcgtcaactcgttccgtgacctggagccaatggaagcggattacctggagtcgacgtggcgcgcgaagaccgtcggcccgacactgccgtcgttctacctcgacgacggccgcttgccatgcgacaagacatacggcgtgg

SEQ ID NO: 37490 - DNA, 256 bp, Zea mays
cggacgctgggcggtgaggagggtccgtgttcggggaggtaatgtgaaatggagggctcttcgccttgatactggtaactactcatggggaagtgaagctgttacccgcaagacccgtatcctcgacgtggtctacaatgcatcaaacaatgagcttgtgaggacacaaacccttgtgaagagtgccattgtgcaagttgatgctgccccattcaagcagtggtacctcactcactatggagttgacattggtagg

SEQ ID NO: 37491 - DNA, 260 bp, Zea mays
cccaactctgcaggctgctcgtcgccctccctccacgccggacgcgccccgatccagatccaggggcgtaacatggcatcaaaacgtatcctcaaggaattaaaggacctgcaaaaggaccctccaacgtcatgcagtgctggtcctgctggtgaggatatgttccactggcaggcaaccatcatgggtcctcctgatagtccatatgctggaggtgttttcttagtgaacattcatttccccccggactaccctttcaa

SEQ ID NO: 37492 - DNA, 256 bp, Zea mays
gcgagatatcggcaggggaggaaaaaaatctaaccctagcatccgcagtgctagggttcgggggttgcgatggcggcggctgcgaggcagcgttggacggtgaagtggttcaacgacaccaagggcttcgggttcatcttccccgaggacggcagcgatgatctctgcgtgcaccagtcgtcgatcaagtctgatggcttccgctcgctcgctgagggcgaggaggttgagttttccgtctcggatggtgacgacg

SEQ ID NO: 37493 - DNA, 290 bp, Zea mays
cccacgcgtccgcaccgtctgccttctgcgcctccatttcggcctctgtcccttgcaagttcaatctcacctccaaccatgggtaaagagaagtcccacatcaacattgtggttattggccacgttgactctggcaagtcgaccaccacaggacacctgatctacaagcttggaggcattgacaagcgtgtgatcgagaggtttgagaaggaggctgctgaaatgaacaagcggtccttcaagtacgcatgggtgctcgacaagctcaaggctgagcgtgagagaggtat

SEQ ID NO: 37494 - DNA, 291 bp, Zea mays
ctttccccgtgcttctccgccgtcgaggccgcgtcccagtgcgaagagactccgactcagatggccagccgctgggtccggcccgaggtgtacccgctgttcgcggcgacgggcgtggccgtcggcatctgcgggtttcagctcttccggaacatcactggcaacccggaagtcagggtaaacaaggcagggagggcagctggtgtgcttgagaaccatgaggaggggagacgttacgccatgcatggcctaagatactttgtgcacgacaagactcctgagatcatgcct

SEQ ID NO: 37495 - DNA, 293 bp, Zea mays
  unsure (1)..(293): unsure at all n locations
gcgcgaacactatgtcggtgatggtggaacgcataacggaatcaacgagaacaacacgatcatcgacacacacgggctgctgagcatccatatgcctccttactacaactctatcatccgaggtgtctccacggtcatggtctcctactccagctggaacggagtanagatgcacgcgaaccatttcctggtcacggattttctcaagaacaagctcaagtttaggggttttgtgatttccgactgggagggcattgatcggatcactactcctcctcacgccaactactctt

SEQ ID NO: 37496 - DNA, 288 bp, Zea mays
atccccccggagctggtgcgcgagtcggagctggtgcagggtcacccttcccctcggcctcaagagctctgcggttgccgcggccaagggcgtccgtggagaagcgggagcaggtggcggtgatggaagagcaaggcggccaggcggcgctcggatgggcggccagggacgactccggcgtcctctccccctacagcttctccagaagggttcctaaagacgacgatgtcacgatcaaggtgctctactgcgggatctgccacaccgacctgcacgtcatcaagaacg

SEQ ID NO: 37497 - DNA, 289 bp, Zea mays
cccacgcgtccgcccacgcgtccgcccacgcgtccggaagtgcctgagggatgccaagatggacaagagcaccgtccatgacgttgtacttgttggtggctccactaggatccccagggtgcagcaactgctccaggacttcttcaacggcaaggagctgtgcaagaacatcaaccccgatgaggctgtcgcctatggtgctgctgtccaggctgccatcctgagcggtgagggcaatgagaaggtgcaggacctgcttctgctggacgtcacccctctgtccctgggt

SEQ ID NO: 37498 - DNA, 285 bp, Zea mays
ggacctggtatttttttttttgcagcaccaagaagcaccattttttccttaggattaccttagaacaaatcctgacaggagtaacagcatccatcgatccacagtccatgctggttgatgcatgggtctgctggagccgaggatgaacacagcactaacaactgacacagagcgaccttgcaatcaaaaacacagatgggcaacaacaaacgagacgaacgaagataaaccctctggactagggtaaacatccgatcgacaagctggggaagaggcacaaggagc

SEQ ID NO: 37499 - DNA, 286 bp, Zea mays
gcaaggaagagccatggcgagcgagcacgcggcggggggcgatgctaagcatcaccagaagcagagcctgatggacaaggcgaaggggttcgtcgcggagaagatcgcgcacatccccaagcccgaggccacgctggacggcgtgacgttcaagggcctgagccgggagtgcatcacgctgcacagcagcgtgaacgtgtccaacccctacgaccaccgcctccccatctgcgaggtgacctacacgctccggtgcgccggcaaggaggtggcgtccggcaccatg

SEQ ID NO: 37500 - DNA, 281 bp, Zea mays
  unsure (1)..(281): unsure at all n locations
cagagnactgttgacacaggttgcggggttgctagttggggagcttacttgctgaagaggaacatcatcgccatgtcatttgcgccgagagacacgcacgaagctcaggtgcaattcgcgctggaaagaggtgtccctgccatcattggtgtgatggcgaacagcggttgccttacccatctagggcgtttgatatggcacattgctcacgctgtctgattccttgggatgaacacgatggactgtaccttgctgaagtcgataggattctaaggccagga

SEQ ID NO: 37501 - DNA, 283 bp, Zea mays
ggaccgtggcggtgaggagggtccgtgttcggggaggtaatgtgaaatggagggctcttagcccttgatactggtaactactcatggggaagtgaagctgttacccgcaagacccgtatcctcgacgtggtctacaatgcatcaaacaatgagcttgtgaggacacaaacccttgtgaagagtgccattgtgcaagttgatgctgccccattcaagcagtggtacctcactcactatggagttgacattggtaggaagaagaaacccctgctgcaaagaagga

SEQ ID NO: 37502 - DNA, 269 bp, Zea mays
accgcctatctcgccaagcaccgccgcatcaccgaagttcgcaaagatggcggtgccgctgctgacgcagaagatcgtgaagaagagggtcaagcagttcaagaggccccatcttgaccgctacaagtgccttaagccaagctggcgcaggcccaagggtatcgactcccgcgtcaggcgtaagttcaagggatgcaccttgatgcccaacattggatatggctccgacaagaagaccaggcactaccttcccaacaagttcaaaaagt

SEQ ID NO: 37503 - DNA, 263 bp, Zea mays
cccacgcgtccgatcgcggcgtgttcaaatcccacaatcttcttgtagcacaccactgtcttcgtccaactcggcggcgatgtctgggcgcggcaagggcggcaaggggctgggcaagggtggtgcgaaacgccaccgtaaggttctccgcgacaacatccagggtatcacgaagccggcaatccggaggctggcgaggaggggcggcgtgaagcgtatctccgggcttatctacgaggagacccgcggcgtgctcaagatct

SEQ ID NO: 37504 - DNA, 263 bp, Zea mays
cccacgcgtccgcttgcatcgcaacaatgctcatccctggtgcaaaggagttcagagtgacccacatggaaatgatcaaaggaatcaaaggtcatggctaccatgatgaattggtcattcctattattgagaataccccttatgagtatgagctcactgactccctaagtgaggcgattgcagcatacccaaaggcaactgctgtgcttgtaaggaaccacggaatatatgtatggggggagtcttggatcaatgccaagaca

SEQ ID NO: 37505 - DNA, 264 bp, Zea mays
catcggattcgcggtgttcatggtgcacctggccaccatccccgtcaccggcacgggcatcaacccggcaaggagcctggggccggccgttgtgtacaaccagcgaaaggcgtgggaggatcactggatattctgggtcggcccactcatcggcgccgccgccgccatgctctaccaccagttggtcctccgcgccggcgcagctaaggccttcgcgtcctttcgcaacaaccagcacttctgaatctctgatcctcccgtcgg

SEQ ID NO: 37506 - DNA, 264 bp, Zea mays
caccaacacacgcgcccgtcgcctccctttccccttccctccctccctctccccgcgggccgccagaggcaatttcgccctcgattcgaccccgattcgtccgcccgcgaccgggattccctccgccaagcgcggatctgaacgctgcgctccgtgtcgccgctcgaatccgccatgaagggggccaaatccaagggcgccgccaaggccgatgccaagctggcggtgaagagcaagggggcggagaagcccgccaagggcagg

SEQ ID NO: 37507 - DNA, 266 bp, Zea mays
tgattttttctctgaaatgccatggcttgctgtaccctgggaagatgaaaggaaagcatcgctgaagaaaaccttcaagatccgtggaatcccttcacttgtcgccatcggacctactgggcagacagtcagcagggacgcaaagtcccagctgatgatccacggtgctgatgctttcccattcaccgaggagagacttgaggagctacagaagaagctggatgagatggcgaaggggtggcctcagaagctgaagcatgagctgc

SEQ ID NO: 37508 - DNA, 255 bp, Zea mays
atcttgttcaggctttaagcattgtttgcctacttggagatgatgagatcctgctggttacagaggtctataataactgcatcatccgatacttggaggagccttcagattcagtttcattgctgagggatggagataaactagcagcataccgtctacccaaaagacatgagaaatccccccttgtggtttttacacaccaacattttgtccagcattctagtgatggtaatttaactccacaaatgagggagt

SEQ ID NO: 37509 - DNA, 257 bp, Zea mays
cccacgcgtccgcccacgcgtccgggacgtccgcgcccctgccacctggcttgagactatctcgacgctgtcagagacgctgcggttcacgtattcagagacccttgggaagtggccgatcggcgaccttgccttcgggatcagtttcctcctcaagagacagggaaacttatctgtagcaagcatatacgctgggaatgatagtgtggagctcaaaggagctgaagtaattgctgatttaaagtatcttctcaatt

SEQ ID NO: 37510 - DNA, 257 bp, Zea mays
cgctgcagcagattctgatgacgacgatgaagaggaagaagcggaagtgactctcggtgtccttagcaaaccgaaacacccaggcctccttctccgccacttgttccccagcaaggccggcggcatcccggcgtggctagaccccgtgaacttgccgtcggagaagtccagctgctgcggtttttgtggcgagcctttgcagttcgttcttcagatttatgcagcagttgaagacaatgtagcagccttccatcgaa

SEQ ID NO: 37511 - DNA, 256 bp, Zea mays
accgcttcgacccctgggacctgccggagcgcgccctcttcggccgccgcgagtggtacttcttcacgccgcgggaccgcaagtaccccaacggctcccgccccaaccgcgccgccgggtcgggctactggaaggccacgggcgcggacaagcccgtggagcacgggggccggacggcggggatcaagaaggcgctcgtgttctaccacggcaagccgccgcgcggggtcaagacggagtggatcatgcacgagta

SEQ ID NO: 37512 - DNA, 253 bp, Zea mays
cttctgttcactatcactctggtggtctccgcctgaatccaaatctgtatgagtcgggaaaagtgtgcctcagcctcctgaagacatggacaggcactggtaacgaagtgtggaatgctgaaagctcaactgttcttcagctgctgttatcgcttcaggcccttgttctcaacgaaaaaccttacttcaacgaggcgggatacgacaaatttgtgggcaaggctgatggagagaagaactccatcacgtacaa

SEQ ID NO: 37513 - DNA, 254 bp, Zea mays
cccacgcgtccgcccacgcgtccgcggacgcgtggcactgatgaggagggtgcaagggctgctctgaatctgtcaggaactgtgcacggatattatcctgtcagggttctgccatcgaaaactgccattgcaccagtcaatccaacattcctacccaggtctgatgatgaacgggaaatgtgtgcgaggactatttactgcacaaacattgacaagaaggtcactcaggcagatctgaaattgttctttgagtc

SEQ ID NO: 37514 - DNA, 253 bp, Zea mays
ggcgcgctcatgttcacgtgccaggtggcgatggcgagcataatcggatcacacctcggcaacgggagcaagatgcccaaggggtacgcggtgacggtgctggtggtggcgctgatcttctcggcgagcttcagctggtcgtggggcgcgctgtactggaccatccccggcgagatataccccgtggaggtgcggtcggcggggcagggcgcggccgtggcgctcaacctggggctcaacttcttgcaggcgc

SEQ ID NO: 37515 - DNA, 258 bp, Zea mays
gttcgatttgtctctaggatgtttcatccaaatatatatgctgatggaagcatctgtttggatatcctacagaaccagtggagtcctatatatgatgttgctgcaattttaacttctatccagtccctgctgtgtgatccaaacccaaactcccctgcaaactcagaagcagcaagactgttcagcgagaacaagcgggagtacaaccgcaaagtccgtgagatcgtggagcagagctggacagccgactagtgcata

SEQ ID NO: 37516 - DNA, 262 bp, Zea mays
cccacgcgtccgacgccgcggactcaagatcggcgaagagttcctcaaggccaagtgcctgatgaactgcgaggtggcgatcatcctggagcacaagtacgagcagatccagcagcacgcgtcgtcggagtcggacccgtcgtcgcaggtgtcgcaggtgttcgagaagtcgctgcagtacgtgaagcgcttcagccgctacaagaaccccgacgccgtgcgccaggtccgcgagacgctgagccgctacggcctcgccgag

SEQ ID NO: 37517 - DNA, 252 bp, Zea mays
aaaagcctctgccctgatctccatattaccagaggtgaacatgatgaggatgctcgatacccagagactaagacacttacaattggtcagtttaagcttgggctgtgccatggccatcaggttgttccatggggcgacctggactccctggcgatgctccagcggcagctggacgtggacatcctggtgaccgggcacacgcaccagttcaaggcatataagtacgagggaggcgtggtgatcaaccctggc

SEQ ID NO: 37518 - DNA, 260 bp, Zea mays
aaaaaaaaaaaaagcagcaaaaaacagagagtagtagactacgacagcgtccgtcgaaccggagggtcggaggcgaagatgaggaagaagctcggcacccggttccccgcggctcgaatcaaaaagataatgcaagcagatgaggatgttggaaagattgcattagcggtgcctgttttagtctcgagggctcttgaattgtttttacaagatttaattgaccggacttatgaaattactcttcaaagcggacacaagac

SEQ ID NO: 37519 - DNA, 297 bp, Zea mays
cccacgcgtccgcccacgcgtccgcaagattctccgacatctcaatgagcagcagccgctgattggagacacggcatcgggagacaatgatgagtgcaaggagaggccattgattctccggaacaaggccccaaggtggcacgagcagctgcagtgctggtgcctcaatttcaggggcagggtgacagtcgcatctgtgaagaacttccagctcgttgctgccacgcagcccgctgctggagcaccaaccccatcacaggctaccccagtgccgccgcccgagcacgagaaggtgat

SEQ ID NO: 37520 - DNA, 301 bp, Zea mays
cagcagccaattcgctcgagttcagatcgagcgcgcgccaagcaagtcttccggccggccgcgaagagcgcaatcaagcaagacaagatggtgaagctcgccttcggaagcgtcggcgactccttcagcgccacctccatcaaggcctacgtggccgagttcatcgccaccctcctcttcgtcttcgccggcgtcggttccgccatcgcctacgtcaataataatcccttgtccatgttccacacacatgcagggcaactgacgaatggcggcgcgctggacccggcgggcctggtggcga

SEQ ID NO: 37521 - DNA, 297 bp, Zea mays
gacctttggtctggaccgtcaacgccgagctgtaccccatccgataccgcagtgtctgcatgggtattgccaccgcttctaactggttctggaactttatgatctcgttcttcacccgattcatcaccgacgatatcgactacttctacggtctcatcttcgctggttgctgtgctgctctcgtcctggttgtcttcttcttcgtcatcgagtccaaggaccgaactctcgaggagattgacaccatgtacgttcagcacgtcaaccccatcacgtcgagccgatggacccccaaca

SEQ ID NO: 37522 - DNA, 287 bp, Zea mays
cctcgttcctctagccgtctcgcgcaccacagcctccatttctcctccgacggcggtgcggctagctcaaccatggcggactccaaggccacctcggcggtcaccctccgcactcgcaagttcatgaccaaccgcctgctggcccgcaaacaatttgtgcttgaggttatccaccccggcctcgccaacgtctccaaggcggagttgaaggagaggcttgccaagatgtacgaggtgaaggaccccaacaccatcttcgtcttcaagttccgcaccgacttcggtgg

SEQ ID NO: 37523 - DNA, 296 bp, Zea mays
gtcctgctgggcccacccatttccgaaatctcgacatcccaggcatggacagatatcttgatttctggaatctgatggcttacgactacgctggctcttgggacccgacgagcggccaccaggccaatctccacgggtcgcttgacaaccctacatctacaccgttttcaactgacgcggctattgaccactacacaaggaacggtgtggcccccagcaaaattgtgctcggaatgcccatctatggtcgtgcttttgagaatacggacggtccgggcaggccatacaacggcatt

SEQ ID NO: 37524 - DNA, 243 bp, Zea mays
  unsure (1)..(243): unsure at all n locations
cagcccgacttcctcgccctcaaccctttcggccagatcccggctctcgtcgacggagacgatcctcttcgagtcccgtgcgatcaaccggtacatcgccagcaagtacgcgtcggagggcacggacctgctccccgcgacggcgtcggcggcgaactgngaggtgtggctagaggtggagtcgcaccacttctacccgaacgcgtcgccgctggtgttccagctgctcgtgaggccgctcct

SEQ ID NO: 37525 - DNA, 287 bp, Zea mays
gttggcttctcctccccctccggttcgggttcgggttcgtgaggttctccggggttcggtttcgtgggtgggcggatcgagatggcggcgtcggatgttgagtaccgctgcttcgtcggcggcctcgcctgggccacggacgaccactccctccacaacgccttcagcacctacggcgaggtcctcgagtccaagatcatcctcgatcgggagacgcagaggtcccgcggcttcggcttcgtcaccttctccacggagaaggcgatgcggaagccatcgagggcatg

SEQ ID NO: 37526 - DNA, 291 bp, Zea mays
cccacgcgtccgggaggcgttcgttctccttctccatcccacgcgcgcgcaggccaaggccggatcggcggcccctcagatctcgccggccgccgtgagacagagaccgaagggagggttgaccggtgctcgggaggaagatgtttagcgggacgcagcagaagtgcaaggtgtgcaccaagacggtgtacccgatggaccagctctccaccgacggcgtcgtcttccaccgctcctgcttcaagtgccagcactgcaagtctaccctctcactgagcaactattcctcgt

SEQ ID NO: 37527 - DNA, 292 bp, Zea mays
gttcaggaaaggtgttgaacagggcccgcagattgacgacgagcaattcaacaagatcttgcgctacattaggtatggtgttgacggtggagctacccttgtgacgggtggtgataggttgggtgacaagggtttctacatccagccaacgattttctcagatgtccaggacggcatgaagattgctcaggaggagatatttgggcctgtgcagtcgatcctcaagttcaaagacctcaatgaggttatcaagagggcaaacgcgagccagtatggattggccgccggcgtg

SEQ ID NO: 37528 - DNA, 296 bp, Zea mays
aagaggtacaaccccaagaagctgacatatgagcagaggaaggccagcctcattgaaaggctcaaccaactcaactcctccggtggtgctgatgacgacgatgaggacgacgagtaaagttaattgccatcgaagtagtgctatctcaatccagcgatcagcaattgtgtactgtcttatgcggggacctgtagtactgcaataggcatttttgtttaagttttgcgaggtgaacaaaactgtttctgttagtttcgagcttgagctctcaatgtttactctttacattgaaatgc

SEQ ID NO: 37529 - DNA, 285 bp, Zea mays
cacaaattatatgcaatcgcaagcgagcagaatggcgaggtccagtggtagtagaccagtggccctcgtgctgctggcgctgtgcgcgccgccctctcgtcggccacggtgaccgtgaatgagcccatcgccaatggcctctcctggagcttctacgacgtttcctgcccgtcggtggagggcatcgtgcgctggcacgtcgccgaggccctccgccgcgacatcggcatcgcgcggggctcatccgcatcttcttccacgactgcttcccgcatgctgcgacgc

SEQ ID NO: 37530 - DNA, 277 bp, Zea mays
cttcatctttctcttcctggagaattatggcgtgaggaaactcgaggcatttttcgctgtactgattgcaactatggctgtttcatttgcggttatgtttggtgaaacaaagcctagtggcaaggaacttctgatcggtttggtggttccaaaattgagttcaaagacaattaagcaagcggttggaattgtgggctgcatcatcatgcctcacaatgttttcttgcattcagcactagtgcagtccaggaagattgacacaaacaagaaatctcgt

SEQ ID NO: 37531 - DNA, 288 bp, Zea mays
cccacgcgtccgcggacgcgtggggctcaagtatgctctgaactaccgtgaggtcatttctatcctgatgcaactgccatgtacttgttgatggcaaggtcaggactgacaagacctaccctgctgggttcatggatgtcatttccatccctaagacaatggagaactacaggctgctttatgacaccaagggccgcttccgtcttcacccaatcagggatgaggatgccaagttcaagctctgcaaggtgaggtccgttcagtttggccagaagggcatcccctacc

SEQ ID NO: 37532 - DNA, 286 bp, Zea mays
catctgcattactttctcgtgcagcagttcaggttgatattttattttgttccatcattcagagtggatgcacattgcattattttcgcttaaggaaactgtcaggcaacaatggaaattggagctgtggcggccatgagatatgtgaaggatggaatcaaggcagcaaagttagtcatggagcacagcgagcatactctgctcgttggagagaaagcaacagcatttgcaatttcaatgggtcttccaggaccaactaacctcagttcaccagagtcaattgaga

SEQ ID NO: 37533 - DNA, 285 bp, Zea mays
  unsure (1)..(285): unsure at all n locations
accacgcgtccgcggacctgngacctattctcgatcattacagtcatgtcattcttcctgttggccccagtatccttacttacagaaggtgttaaagttagtccagcagtgttgcagtctgctggtttgaacttgaaacaggtatacacaaggtcattgattgctgcattctgcttccatgcataccaacaggtatcatacatgatcctcgccagggtatccccagtcacacattcagtgggcaattgcgtcaagcgtgtggtggtcattgtgacctctgttctg

SEQ ID NO: 37534 - DNA, 288 bp, Zea mays
ctcacgcgctcgccgcctaggagcattcacgttggtggcgggcggtggctcggttcctctcctccaccgcacctccaagaatccacctccacgactgagctgacggctcggcggcgccatggcggttcaccggctccaaccttccctctctggcctacagtgctccaccgcccggtcgccagtgctcctccatgggccacggctgacgggtgcacgcaccgatggttggtgcaggcaggagaggtggatttggtggacctagattcgatgtgcagagagcgacttgga

SEQ ID NO: 37535 - DNA, 289 bp, Zea mays
  unsure (1)..(289): unsure at all n locations
cattgatattgttttagcaacttccttcctgcaggaatttgtggaggcaagacgaacagctgcacttaataatgttccttcttgtatgtggtctccggtaccacctcttgagttaaaaggagtatctgctgatgcactaaatgcaaatgctggctttgttactttcgttgtttaccctcggcatgttgagggtanaaagctagatagaacagtttggaatttgttgacatttcatgcttatgtaagctatcatgtaaagtgttcctgaagattcatgcataccaggatg

SEQ ID NO: 37536 - DNA, 290 bp, Zea mays
tgcatcctaaaaatcctcaagagctccagttcccgctgtccaatatgcaggcgcaccttatctaaagaggacctcttccttgctccagaggtaaagcatcctgatgaagatggttcaggcaaccttgagtctgacagacccctctcatccaaggtgcaagcactgctgaagctgctgacggcttcacagaacgaagacccctcatcgaagtctgttgttttttcccagttcaggaagatgctgatcttgctggaagcgcccctcagaagggcaggctttaagacactacg

SEQ ID NO: 37537 - DNA, 290 bp, Zea mays
gagcctcaagatgcctatggcctggaaaaactcgcgactgaggagctgtgcaagcactatacaaaggattttggcatcgagtgccggattggtcgctttcacaacatatatggtcccttcggcacatggaaaggtggaagggagaaggcgcctgctgctttctgcaggaaggctctgacctccacagggcgctttgagatgtggggtgatggcctgcaaaccagatccttcacatttattgatgaatgtgttgaaggtgtccttaggttaacaaagtccgatttccgtga

SEQ ID NO: 37538 - DNA, 290 bp, Zea mays
ctcatcctccccgacatactggccaactctggtggcgtcacagtgagctacttcgagtgggtacaaaacatccaggggttcatgtgggacgaagagaaggtaaacgcggactgcggacgtacatgacgcgcgccttcggggacgtgaagcagatgtgccggagccacagctgcgacctccgcatgggcgccttcacgcttggcgtcaaccgcgtcgcgcgcgccaccgtcctcaggggatgggaagcatgacctccctccgtgtcgtccgtgtgcccctccctgttgtat

SEQ ID NO: 37539 - DNA, 287 bp, Zea mays
ggacgtggatagattatagagtaatgagagaacttaaaggacaagctgaagatgcagatatagcaaaatctcagtttctagcaactgtttcccatgagattcggactccaatgaatggtgttttaggtatgctgcagatgctaatggacactgaacttgatacaactcagcaggattttgtagtcaccgctcaagaaagtggaaaggtattaataaacttaataaatgaagtccttgatctggctaagatagagtcaggaaggattgagctggaagcagtgcctttt

SEQ ID NO: 37540 - DNA, 297 bp, Zea mays
cggagcgtggtcgagcacgcgtgggggcggcaggaacttgttggaggattagattgagcagtccaccgaaagttttttgggagtcagcttcaaagctttgagacagagctttcggtgccaaagctttcggagaaggaaggagggaatgatacatgccgcggtgtatttatacgggcacctgctatattggaagtaggtccagatgttgaaatattggcggattgccctgttcctgttgacagacccagcattacaatatcatttggggacggtactgaggaagaagagtattcaaaa

SEQ ID NO: 37541 - DNA, 284 bp, Zea mays
ggacgcggatcaaatcgaaacaaatattcagagatttcagcctcataacaacgtcgatctcttccatcgggcaagaaggaacattaatgatcttgtacaaatcacgacccaactgcctgggctgaggaccaagatgcctccacttactgtggcaatagatgaaaatcttgctagcttcgtgcttcctggcattacaatggatcaagttcttggaagcaacgatttgaaggaggagccaagacgatggtagatccactgccagcatgtttcagtttattggtaga

SEQ ID NO: 37542 - DNA, 287 bp, Zea mays
agatgatttgctgctgcaacaagatggatgcgaccactcccaagtattccaaggcccgttacgatgagattgtgaaggaagtttcatcctacctcaagaaggttggatacaaccctgacaagattgcctttgtccctatctctggttttgagggtgacaacatgattgagaggtccaccaaccttgactggtacaagggtccaaccctgcttgaggctcttgaccagatcaccgagcccaagaggccttcagacaagcccctgcgtctgcacctccaggatgtgtaa

SEQ ID NO: 37543 - DNA, 272 bp, Zea mays
ggtgggttggcttctcctccccctccggttcgggttcgggttcgtgaggttctccgtggttcggtttcgtgggtgagcggatcgagatggcggcgtcggatgttgagtaccgctgcttcgtcggctgcctcgcctgggccacggacgaccactccctccacaacgccttcagcacctacggcgaggtcctcgagtccaacatcatcctcgatcgggagacgcagacgtcccgctgcttcggcttcgtcaccttctccacggaggatgcgatg

SEQ ID NO: 37544 - DNA, 267 bp, Zea mays
gcgagcggatcgagatggcggcgtcggatgttgagtaccgctgcttcgtcggcggcctcgcctgggccacggacgaccactccctccacaacgccttcagcacctacggcgaggtcctcgagtccaagatcatcctcgatcgggagacgcagaggtcccgcggcttcggcttcgtcaccttctccacggaggatgcgatgcggaacccatcgagggcatcaaaggcaacgagctggacggccgcaacatcaccgtcaacgaggccca

SEQ ID NO: 37545 - DNA, 286 bp, Zea mays
tgtcactggactacgcgctgtcgaacccgtcccacgtgggcgccgtggaccccttcaccaagctgcagtacacgagcatgctgtacgcgcaggtggacgccgtgacgttcgcggcggcgcggctgggttacggcggcgtgcccgtgcacgtgtcggagacggggtggccgtccaagggcgacgccaacgaggccggcgccacggtagagaacgcgcggcaatacaaccggaacctgctcatgcggcaggtgagcggcgagggcacgccgctgcagcccaggctccg

SEQ ID NO: 37546 - DNA, 288 bp, Zea mays
gttggcttctcctcccccaccggttcgtgttcaggttctggttcgtgggcgagagggaagagatggcggcgtcggacgttgagtaccgttgcttcgttggcggcctcgcctgggccaccgacgaccactccctcaacaacgccttcagcacctacggcgaggtcctcgagtcgaagatcatcctggatcgggagacgcagaggtcccgcggcttcggcttcgtcaccttctccacggaggacgcgatgcgcacgctcatcgagggcatgaacggcaaggagctcgacg

SEQ ID NO: 37547 - DNA, 277 bp, Zea mays
cggatcgtggacgagtacgcgtgggtgcatcagaacaactaaccgagaatgtggaacgcttcttctgctgacattgtaacgatgttgcaccagataaaatgcctatagttctggagaatgttagaagtgtcttaaaacatggtggccgtgttctttttcgggactatgcctttggtgatcttgcacaggaaagactgatgtcaaagggccaacaaataagtgagaacttctatgtcagaggtgatggtacgatttattttcaaaatgtggacttact

SEQ ID NO: 37548 - DNA, 288 bp, Zea mays
ccacgctccccctcctttccaggtcccctcgcccgcgctctcagatctcgcgcgcctcccacaagggaaaccttgagccatgggcacagttgtggatgccgctccagcagttgtggctgaggtcactgagaacatgttgggtggcaagaaagttacagttgtatttgttctaggtggtcctggaagtggaaaaggcacacagtgtgccaacatcgtggagcactttggattcacccatcttagtgctggagatcttctgcgtgcagagattaaatctggctctgagaa

SEQ ID NO: 37549 - DNA, 289 bp, Zea mays
ccttcagcaagctgaccggcggcggcccgacgaccccggcgggcctgagtcgcggcggcggtggcgcacgcgttcgcgctgttcgtggcggtgtctgtgggcgcgaacatctccggcgggcacgtgaaccctgccgtgaccttcggcgccttcgtgggcggcaacatcaccctgttccgggggctcctgtactgggtggcgcactgctggggtccaccgtggcgtgcttcctgctccgcttctcgacgggcgggcaggccacgggcaccttcgggctgacgggcgtgtc

SEQ ID NO: 37550 - DNA, 289 bp, Zea mays
ggacgagaagaccatcttccacctcaacccgtcggggcgcttcgtcatcggcgggccccacggggacgccggcctcaccggccgcaagatcatcatcgacacctacggcggctggggagcccacggcgggggcgccttctccggcaaggaccccaccaaggtggaccgcagcggggcctacgtcgccaggcaggccgccaagagcatcgtggccagcggctcgcccgccgctgcctcgtgcaggtgtcctacgccatcgggtgccggagcccctgtccgtgttcgtcga

SEQ ID NO: 37551 - DNA, 298 bp, Zea mays
tgccaaaatattggagctggaaactgtaacacagtctgaggctataaggaagcgctatcggtttttgagtcacttctcattaacaactacatttcagttctgtgaaattgacttgagtgatgtagtgtctcctaactcactggctccattcttggatgaaatcaagaagcgtgagaaacaaagaaaacgagccgccaagaaggaagaaagtgagagagtgaaggcggaagttgctgctgctgttcaggcatcagctatgcgatttgagtatacaaattcctctcaaagtcacaacgat

SEQ ID NO: 37552 - DNA, 277 bp, Zea mays
cccacgcgtccggacataatgcgcaaggctggtcagttgcatcttgtgaaaccatatatggttgcagttcagagtaacaatgtatctgccgtgaatgaagccttgaatgagctttatgtcgaagaggaggactacgagagactccgtgaatcagttgacatgcatgacaactttgaccagattggtcttgcccagaagcttgagaagcatgaaatgctggagatgaggaggatcgccgcctacatttacaagaaggctggcaggtggaagcagtcga

SEQ ID NO: 37553 - DNA, 276 bp, Zea mays
tccacgcgtccgcgaccggcgctccagccgcttcaccgcgccgccaccgccaccgcgaggatgacagtcaaaagcgttcgtggagatcgggcgcgtggccctggtgaactacgggaaggactatggccgtctcgtcgtcatcgtagatgtggtcgaccagaacagggcacttgtggatgcccctgatatggtcaggtgccaggtgaacttcaagcggctctcacttactgacatcaagattgacatcaaacgtgtccccaagaagacaaccctgat

SEQ ID NO: 37554 - DNA, 279 bp, Zea mays
cagtgatgcataaactacgaccgcagcctgcctgggatcgtacctgcactgcagcagctgcagctggcctcctctgggagttgagctcgcggcctgagctcatctcatttgggttggaaaagcaagccgaggcggtggagtgctcgttagacaacttgctggatgctctcactgccaggcggcttcgtctgggccgatcgataactcggaaacagagacatagtaggaactgcatatagggaaagaagaaactcacagtaacagaggagcatggtgtgc

SEQ ID NO: 37555 - DNA, 285 bp, Zea mays
tagcgagacggtcgaatccgggcacccccacgccacggcggaccgggcgcgcgctcatcgacgtcgtcggccgattcgccatcacgctagcgcgcttcttcatgatgaccgtcttcatgctcggcctcgccatcccctaccaccactggaccacgccgggcaaccacatcggcttcgtcgtcatgtacgccttcaccttcttcttcgccaacttcgggcccaacagcaccaccttcatcgtgcccgccgagatcttcccggcgcgcctgcgctccacctgccacg

SEQ ID NO: 37556 - DNA, 247 bp, Zea mays
gaggagcactggatgaaccaaaccctggatcacttcaacccgacggaccatcggcaattcaaacagcggtactacgaatttctcgactactaccgagctccaaatggcccgatcttcctatacatctgtggagaatctacgtgcaatgggattggcaataactacttagctgtggtggcaaagaaatttggtgctgcattggtttctcctgagcatcgatactatggaaagagttccccctttaaca

SEQ ID NO: 37557 - DNA, 281 bp, Zea mays
gcccacgcgtccgcgacgctggagaaaggttttctgcatacatagtggtacctatgtggactgagggtaaaccaactggggctgcaacacaacgaattctttactggcagaataaaaccatgcaaatgatgtacgagacaatatacaggaccttgaaagaagaaggcctggatgatatgtatgagcctcaggattatttaaacttcttctgtcttggcaaccgtgaagttgctgacagcactagcacttcaaacgcttcgaatacagcaaataatcctcag

SEQ ID NO: 37558 - DNA, 282 bp, Zea mays
cccgcgacgccaccaccacacgttcacggtagcgagacttatcgtcgtcggcggcgaagatggtgtcgctgaagctgcagaagcggctcgccgcgagcgtcctcaagtgtgggaaaggcaaagtctggcttgaccccaatgaagtcagcgagatctccatggctaactcccgccagaacatccggaagttggttaaggatgggtttatcatcaggaagcctcagaaggttcactctaggtcccgtgcaagaagggcacatgaggccaagcagaagggaaggc

SEQ ID NO: 37559 - DNA, 282 bp, Zea mays
atggcaggtacaaggactccataacgaagagcacgcgcgggtggaaggagaggtggttcgcgcagagcagcgccatgtcgaatcttggctcggagatgaggagggaggtcggtgctgggatcgccgccgtttcccgcatgatcgagaagcagctggagacacggccggatgggagtgggacagcgccgtcgcctgctaccgcttcgtatccagctcacgcccaccctggttcggatgcaagtagtcagggtcagggagctgctgttcccgctacacctgcag

SEQ ID NO: 37560 - DNA, 270 bp, Zea mays
ccacgcgtccgcgacctggcagcggccggcggcgacctccacgtggtgccattcgccggcaacgaacacccgaccaccaggatccaggtttgtgctgcgagagcgcctatccattcaccatgattaatttcgtgctcctgatcagccgccagggcaaggtgaggctcaccaagtggtattctccttacacccagaaagagaggaccaaggtccatcgcgaactccatggactccatcctacacgaagggcccaaatctgcaattttgttg

SEQ ID NO: 37561 - DNA, 288 bp, Zea mays
ctaggttttttgattttagccgccgccgctgctcatctcacatccctcgagaagacgcctgctcctcgccgatcgatacgatggccgtcttctccgacctccacaccgccgacggcctcaagtccctcgaggctcacctcgccggcaaaacctatgtgtctgactccattactaaggatgacattaaggtcttcgccgcggtgccgtcgaagcctggcgctgagtttcctaatgccgcccgctggtacgagaccgtctctgcggctgtagcctcaagattccctggta

SEQ ID NO: 37562 - DNA, 293 bp, Zea mays
gaatcacaaaggaaggactcaaggaaggccaccgcatcatatggaatccaagatgatgaggacacaaggaaggccactacatcatatggaatccatggggaggacccaagaaaggccaccacgtcatatggttcccaggatgagaagggatcaaggaaggtcataatgtcatatgggtctaatggtgaggatgatccaagaaaggccaccacatcatatggaatacaagataaagagtatcccaggaaggccaccacatcttatggagttcaaggtgagaaggacccaaggga

SEQ ID NO: 37563 - DNA, 291 bp, Zea mays
gcagagtcttgttacttgggcaacaccaaggcttggtgaggacaaggtgaaacaatgtgttgatccaagattgaatggagagtaccctccaaagggagtagcaaagctagcggcagtggcggctctctgtgtccaatacgaatctgagttcagaccaagcatgagcattgtagtcaaggcgttgtctcctcttcttgtgaatgcaccgtatcagccggctgctgctcctgatgtatcttcagatgcatgacagcatgagcaactgaaaacccatgtaaagaaacaccattt

SEQ ID NO: 37564 - DNA, 291 bp, Zea mays
cgccaccgacgacgagttccagaaagaactggacggtattctcaaggactacgttggacgtgagagccccctatacttcgcggagcctaacggagcactacaagcgcgccgatggcacaggcccgctcatctacctcaagagggaggaccttaaccacacgggtgcccacaagatcaacaatgccgtggcgcaggccttgcttgccaagcgacttgggaagcagcgcatcattgccgagacaggggctggtcagcacggcgtcgccaccgccaccgtgtgcgcccgtttcg

SEQ ID NO: 37565 - DNA, 283 bp, Zea mays
ggacgcgcggacgctggcggacgcgtggatcaatacagccaaagctatagccaaagagtgtaggatactaactagtggtgacctagcaatagaagggccagaattccgcagcaagagcccagaagagatgagggacataatacctaagattcgggtcatggctcgttctttaccgttggacaagcatacccttgtgacgaacttgcgaggtatgtttcgcgaggtggttgctgtgacaggtgacggcacgaatgatgctccagcgttgcatgaagcagatatc

SEQ ID NO: 37566 - DNA, 286 bp, Zea mays
  unsure (1)..(286): unsure at all n locations
agcgaagtagctcaagctagtctcggcggctctagaagacgatgggcaaggacgacgtgatcgagagcggcgctggcggcggcgagttcgctgccaaggactacacggaccctcccccggcgccgctgatcgacgcggcggagctggggtcctggtcgctgtaccgcgccgtgatcgccgagttcatcgccacgctgctgttcctgtacatcacggtggccaccgtgatcgggtacaagcaccagacggacgcgtcggcgtcgggccgcgagcngcgtgcggcggc

SEQ ID NO: 37567 - DNA, 286 bp, Zea mays
gcactacgccgacatgctcgccaccttcgacaacccgctcaaccacctcgaccgctttccctacttcagcaactacatcgacctgagcaagctggagttcgacctcctggtccgctacatcccagggctcgcgccttcccgtgtcgccttcgtcgggtctggccccttgccgttcagctcgctcgtgctcgccgcacaccacctgcccaacacactgttcgacaactacgatcggtgcggcgccgccaacgaccgtgcgcggaagctggtccgtgcggacaaggac

SEQ ID NO: 37568 - DNA, 285 bp, Zea mays
gaccaaactgccctgcacgctcgaagactcgtacgcaggctcagcacgcaagatgaagatctccaggaacgttgtgaagccgaatgggcaactagggaccgaatcggagattctaacgatcgatataaagcccggctggaagaaggggaccaagatcacgttcccggacaagggcaacgagcagccgaaccaactccccgccgacctcgtcttcgtcatcgacgagaaaccccatgacctgtacacgagagagggcaacgacctcctggtccaccggaagatcga

SEQ ID NO: 37569 - DNA, 284 bp, Zea mays
caaccctgataagatagcatttgttcccatctctggttttgagggtgacaacatgattgagaggtccaccaaccttgactggtacaaaggcccaaccctgcttgaggctcttgaccagatcaccgagcccaagagaccctcggacaaagccctgggtcttcccctccaggatgtgtacaagattggtggtaatggaactgtgccagttggtcgtgtggagactggtgtcatcaagcctggaatggttgtcacctttggtccaactggcctgactactgaggtga

SEQ ID NO: 37570 - DNA, 285 bp, Zea mays
aaaccttggtgcaggtgatgtcaatgtctatgcacagatgattgatgatgctgagggcctggacaagattgagaacctgcagagccatgacaacaccgagatatatgagaaggctgtgaagatgctggaatcctactggctggaggaggaagatgatgccatgccctcaggcgacaatccccagaatggcttcaactttgggaaccagccctctgttccatcaggtggattcaactttggctgaagatgcccatttggaatggccgctgtgccattatgccttgg

SEQ ID NO: 37571 - DNA, 285 bp, Zea mays
cggacgcgtggcgagacgcgtgggttcgcgtctgcctcagcccgccgcaaggagaggtaaactcaggagacatactcgagaagctgaaatggctcctaaagctgctcctgccaagaagggtgatgccaagacccaggccttgaaggttgccaaggctgtgaagtctggggcagccaagaagaagaccaagaagatccgcacgtctgtgacatttcaccgccccacgaccctgaagaaggctagggaccccaagtacccacgaatcagcactaccggaaggaacaa

SEQ ID NO: 37572 - DNA, 282 bp, Zea mays
  unsure (1)..(282): unsure at all n locations
cggacgctgngcttttctcttttttttttttttttttttttttggtggcggcggctacgagcggtggcggcggctacggtggtggcggcggcggctacggtggtggtggcggcggctacggcggtggcaaccgtggcggcggctacggcaactccgacgggaactggaggaactgagcggtggggcccgcgcggccaagttatcctgttcgctaccgtgttgtttaccctagtccagagtgtttatcttcgttcgtctcgtgtttgttgttgcccatctgtg

SEQ ID NO: 37573 - DNA, 286 bp, Zea mays
aacagatcctagatcttctgctagctgagacgcaaccagcgaagatctgttctcaggttggcctgtgcacttttgatggcactcacggtgttagcactggaattcgtagcgtagtggatgacaaagctgggaaatcaaatggtggtctcaagagtgatccaatgtgcaatgcctgtgagatggctgtggtatggatgcagaaccaactggcccagaacaagacacaggagctcatcctgacctacattaatcagctttgtgagcgtcttccttctcccatgggaga

SEQ ID NO: 37574 - DNA, 281 bp, Zea mays
gtggagtccaagatcgccgcgtggcaggtcgccgaggtggccaaggtcaacaaccgcttcaagcgcgaggaggtcgtcatcaacggctgggagggcgaccaggtcgagaaggccagcgcgtggctcaagaagtacgagaggaagcttgaggagaagcgtgccaaggcgatggagaaggcgcagaacgaggtggccaaggcgcggcggaaggcggaggagaagcgcgcgtccgcggaggccaagcggggcaccaaggtggcgcgagtgctggagctcgccaa

SEQ ID NO: 37575 - DNA, 278 bp, Zea mays
cggacgcgtggcgctccggcagccggacatcgagtactactacaactccaccagctactgggactagtacatgtggagcgcggggtggatgtactacgccactggcaacagcagctacatcaccttcgccaccgacccgcggctgcccaagaacgccaaggccttcttcagcatcctcgacttctccgtgttcagctgggacaacaagctcccgggcgcccagctgctgctgtcgcgcctgcgcatgttcctcaaccccggctacccgtacgaggagt

SEQ ID NO: 37576 - DNA, 281 bp, Zea mays
ataatagcacaacctttgatgacatacaagtaatagaacccaatgttgggttgatagataaaccagctgcagatgtaaatgacatgatttctgaaaagttgatggtccaaataaatcttaacgaagacattgaagaagatatcccaccgagccaatatgccaggtgtgaagagaaaataactatgactccagctgccatctcaagggaagctggtcttccaggatatggtcctggtcctggagaaaactttcttcaggtcagttcaaggaatactagctgt

SEQ ID NO: 37577 - DNA, 121 bp, Zea mays
ctccacaacgccttcagcacctacggcgaggtcctcgagtccaagatcatcctcgatcgggagacgcagatgtcccgcggcttcggcttcgtcaccttctccacggaggaagcgatgcgga

SEQ ID NO: 37578 - DNA, 281 bp, Zea mays
gagaagctggcctttgtggccctagactacgagcaggagctggagaccgctaagagcagctcctccgtcgagaagagctacgagctgcccgatgggcaggtcatcacgatcggcgcggagaggttcagatgcccagaggtgcttttgcagccgtcgctgatcgggatggaagctcccggcatccacgagaccacctacaactcgatcatgaaatgtgacgttgatatcaggaaggacctgtacgggaacatcgtcctcagtggagggacgaccatgttccc

SEQ ID NO: 37579 - DNA, 283 bp, Zea mays
gtactgtctgtgcgaaggcgaccattccttcttcgctccttcgccgccgctatggttaagtactcgcaggagccgggcaaccctaccaaatcggccaaggccatgggaagggacctgagggtccacttcaagaacacaagggagacagcttttgcgcttcgcaagctgcctttgaccaaggctaagcgataccttgaggatgttattgctcacaagcaggcaattcccttccggagatactgtggaggtgttggtcgcaccgcacaagcaaagtctcgccact

SEQ ID NO: 37580 - DNA, 226 bp, Zea mays
ggcattgctcagaaagagatccaaagtgttgcagaggagtctgcctaggccaccggctgtttcagtagagattatccggcaatctcttattagaagtggagaaagcagaagcagaagcacctttatgcctcctacatcacttgaacaagctgatgaactaataaatgaggaactccttaggcttcttgagcatgataatgcaaaatatcctcttgatgaaaaactc

SEQ ID NO: 37581 - DNA, 279 bp, Zea mays
aaaagatgtgacatcctagaggaggaggcctttgccatgatgggtgcgctcgcatggcaggccaggcaataataaaaagatgattattgcgtgccgggggaggagatcgcacgggggttgatgtttttggccccgggttctcctccctcatcttgttccgtgttcctgtatgcgttgcttccgctcctgttggtccgctacgcacgccggatttttgcatcgagcacggagatctacaacaaaaacatggagctacgacgcgattcccaagtatgatgg

SEQ ID NO: 37582 - DNA, 279 bp, Zea mays
gctcatgccatcgctgggaggcacacccctggtaccttcactaaccagctccagacctccttcagcgagcctcggctgctcatccttaccgacccaaggactgaccatcagccaattaaggagtctgctctggggaacatccccaccattgccttctgtgatactgactctcccatgcggtatgtcgatatcggcatcccagcgaacaacaaggggaggaacagcattggatgcctgttctggcttttggccaggatggttctgcagatgaggggcact

SEQ ID NO: 37583 - DNA, 275 bp, Zea mays
gtttggccggatcatacatgatgggctcatgttcaggcagaacttctccattaggtcctatgagattggggcagataggacggcatctatagagacgctgatgaaccatttgcaggaaacggcactcaatcatgtgaagaccgctgggctgctaggtgatggatttggctccacaccagagatgagtaaacgaaacttgttctgggtggttagccaaatgcaggccatcatcgagcgttatccatgctggggtgatactgttgaagtagatacat

SEQ ID NO: 37584 - DNA, 141 bp, Zea mays
tttctctggaagatctttacaatggcacctcaaagaagctctctctttcgcgcaatgtcatctgctccaagtgcaagggcaagggctcgaagtctggtgcctcaatgaggtgccctggttgccagggctcagggatgaaag

SEQ ID NO: 37585 - DNA, 274 bp, Zea mays
cccacgcgtccgcccacgcgtccgcccacgcgtccgggtgtttgtgctgcctctttgccaactacaatgggtgttgttgcgggtctcctggtccagaatgctctgaaatatttgttgaactttggacaagtttccccttacttgggatataactcacttaaggattatttccctgctatggaaatgaggccaaatccacaatgctcgaatccagcatgtgttcacagacagaaagaatatatggaatccaaacctgctagagatgcagcagcga

SEQ ID NO: 37586 - DNA, 272 bp, Zea mays
ctctgggctcgccactgacgcccagacgctgtaccagcggttggtgttcaggcacaagctgtatcagctgcgggaggagagggacatgaagcacgagacctttgccagccttgtctctgcgctcctctacgagaagagattcgggccatatttctgccagccagtcattgctggacttggagatgacaacgtaccatttatttgtactatggactgcttaggtgcaaaggagctggccaaggattttgttgtatctgggacagcatcagaat

SEQ ID NO: 37587 - DNA, 271 bp, Zea mays
gtctgatcctacagaaaatgatagtgtggagggtttgagacctaatgcacgaaggcccggcttagtgacatttgggcctgatcgagtaacagaattctgtaaacgaaacaaattgcagttgatcataagagcccatgagtgtgttatggatgggtttgagcgtttcgctcatggacaattgatcactttattttcagcaacaaattactgtggtactgcgaacaacgcaggggccatacttgttgtcggcaagggcttagttatcgtgcca

SEQ ID NO: 37588 - DNA, 74 bp, Zea mays
gtgggttggcttctcctccccctccggatcgggttcgggttcgtgaggttctccggggttcggaatcgtgggtt

SEQ ID NO: 37589 - DNA, 266 bp, Zea mays
cccacgcgtccggtgaagctgaggagactgaagagtatgatgattttgacccctactcctttatcaaagatttacctgatttatctatggtggtccccaaatttcgtcctgttctccttccaaagcagacccggagttgtcctacgatgactcttgtacttgatcttgatgagacacttgtgcattcaactcttgaacactgtgaggatgctgatttcacatttccagttcattttaacttcagagagcacacaatatatgttcga

SEQ ID NO: 37590 - DNA, 267 bp, Zea mays
gttcacgacgcaccaaccgaggccacaggccaccaccattccttccttgttccttccccagctccgcaggctgcgcatcgccctccctccgcgcccccgatccagatccagatccaggggcttgtcatggcatccaaacgtatcctcaaggaattaaaggacttgcaaaaggaccctccaacatcatgcagtgcaggtcctgctggtgaggatatgttccactggcaggcaaccatcatgggtcctcctgatagtccatatgctgga

SEQ ID NO: 37591 - DNA, 261 bp, Zea mays
cccacaccccccgagctcagcttagctccactccagctccaatcacagtcgtgaccagagcgcgagagctagctagagggccgtgaaaatgccgatcaataggatcgccctggggagccaccaggaggtgtaccacccgggcgccctcaaggcggcgttcgctgagttcatctccaccctcatcttcgtcttcgccggccagggctccggcatggccttcagcaagctgaccggcggcggcccgacgaccccggcgggcct

SEQ ID NO: 37592 - DNA, 268 bp, Zea mays
cggacgcgtggttttttttttttttttttttttttttttatatatagtatcaaatcatatcatcgtgacatcaattaatatatggttacagcagatgcaatcggatcaaccaacatgcaggtagacacacgtacgtacatgagcacaaagactgacgccaaacatgcagagagagatagcaaactgaagaactctgtttctctctctctcacacacaccacacaatacctatgtatggcagccagctcggcctcgcttattattgttc

SEQ ID NO: 37593 - DNA, 266 bp, Zea mays
cgctgtcggagcaggagcttatcgactgcgataagttccaggaccagggctgcgatggcggcttaatggacaatgctttcgtgttcatgatcaagaacggcgggatcgacaccgaggccgactacccgttcactggccacgacgggacgtgcgatctcaaactgaaaaatacaagggttgtatccatagattcgttcgagcgtgtgcccatcaactacgagagagcgttgcaaaaggccgtggcgcaccagcctgttagtgccagc

SEQ ID NO: 37594 - DNA, 267 bp, Zea mays
gcagatctgccaggcgcaggccggggccagcgacggcaacctggcgccgctggacgccatgagctccgtcaggttcgacaacggctacttccgcaacctcgtggcccagttcggcctgctccactccgaccaggagctcttcggcagcggcgccgtcgactccatcacggcgcagtacgcgcgcaacggcgccgccttctcgcgggacttcgtcacggccgtcctcaagatgggcagcatcggcccgctcaccggctccagcggcga

SEQ ID NO: 37595 - DNA, 270 bp, Zea mays
cggacgcgtggggagaattcacaacaatggctggcaggaggctacgtgatgccgtcaaagctgtactaccaagtgacaacagtggtgaatttaataacattcatgttgttcttgcggggctaacaaatacatattcgcagtatattacaacttttgaagaatatgagatccaaagatacgagggagcatcgacgttgtatggcccccacacgttgagcgcctacattcaggagttccagaaacttgctacagccatggtggctaacaaag

SEQ ID NO: 37596 - DNA, 228 bp, Zea mays
atcccatggtttggccaagtaacacttgcctacttccatgttgtggcgtcccaatggacgagggttgcactcaacccctttcaagtgatctgatgatcaactttaataccacagtcttttcctttagagtatgtttcccgtttgcgaggaatctccacaatttggagtctctcgcccttacaattgagatcacagagaaagcacagagtaaggttggggagagcaaca

SEQ ID NO: 37597 - DNA, 290 bp, Zea mays
ggacgctgggatgatcttcgcgtccgtccacttcgtcctctcgcagctccccaacttcaactccaactccggcgtctccctcgccgccgccgtcatgtcgctcagctactccaccatcgcgtggggcgcgtcggtgcacaaggggaggatgtcgggcgtcgactaccacctgcgcgcgaccaccacgccggggaaggtgttcggcttcttcggcgcgctgggggacgtggcgttcgcctacgccggccacaacgtggtgctggagatccaggccaccatcccgtccaccc

SEQ ID NO: 37598 - DNA, 137 bp, Zea mays
ggaatgacggagacatcctgtatcatatctgcaatggatattggtgacagatcaattggtcatgttggatccccaactgcatcttgtgaggtgaaacttgtggatgtcccagaaatgaattatacatctgatgatca

SEQ ID NO: 37599 - DNA, 285 bp, Zea mays
cccacgcgtccggcaatatgatgagaaggtttaccttgacttgtatactgattcatcgcccaaagtaccagctgtcgaaaatgtgatggtatacttcgccaccagtaacaaggagaacaatcaaaactatcttggtcctgcacctctggaagaaatgaccaggcaaatttaccttgctcaaggcccatctggacctaacaaagagtatgtgttcaaactcgaggacgcgttacacaaattaggagttgtagaccaacatgtccaagaactggcaaatgctctgcg

SEQ ID NO: 37600 - DNA, 139 bp, Zea mays
cttcacgtccgctacagaccggcgaggagacgaaaggagggagttttgagaagctcaaatggctcctaaagccgctcctgccaagaagggtgatgccaaggcccaggccttgaaggtggccaaggctgtgaagtctggg

SEQ ID NO: 37601 - DNA, 285 bp, Zea mays
gcgaaatccaccgtacaccgctgcctccctctccctgtctcgtctcgtcgaaccagccgaggaagccaacgcagacccagcgatcctcgtcgcgcgtcctcctcccccacggagggaaggatggcggagccaaagcggcggcggcggcgaggaagacgcgggtgggcccgtacgaggtcggcaagaccatcggcgagggcagcttcgccaaggtcaagcacgcgcgcgactcccgcaccggcgccgtccgcgccatcaaggtgctcgaccgcaaccacgtcctcc

SEQ ID NO: 37602 - DNA, 279 bp, Zea mays
ctacaggctacagctcccgtctctccgccgcttgcttggaaaacgaagaaaccctcctccaccaacccaatccagctacatccgtctgggtgaactccagggccaggagcagttcgccgccttcgttcgcatcacctacgcggttcgatccaactggcaggaaggaacgtgatggccaagacgagctcgttcaagctggagcacccccttgagaagaggcagtctgaggctaatcggatcagagagaagtaccctgacagaattccagtgattgttgag

SEQ ID NO: 37603 - DNA, 315 bp, Zea mays
aacctgcagtacggtcggattccgggtcgacccgcgacgtacaggtccgcggaccgtggcgagctgggcgctgccgtggtacaccccgtacgtgtacaacaacccggtcggtcgggtggtgcacatcgtggtgcagctcaccctcgggtggccgctgtacctggcgaccaacgcgtcggggcggccgtacccgcgcttcgcctgccacttcgacccctacggccccatctacaacgaccgggagcgcgcccagatcttcgtctcggacgccggcgtcgtggccgtggcgttcgggctgtacaagctggcggcggc

SEQ ID NO: 37604 - DNA, 132 bp, Zea mays
cccacgcgtccgcacacgcgtccgctcccatatccgctcccctacctctccagcatcctcccgtctccgtagtctcgtctccgctcctcacctcgccagccatgggcaagatcaagatcggaatcaacggtt

SEQ ID NO: 37605 - DNA, 133 bp, Zea mays
gacctgcattcaagggatcagccccaatcaatctttccgatcgtcttcaccaagttctccggtgggctcttggttctgtcgagatcttcttcagtcggcactgcccgctgtggtacggttacggtggcggccg

SEQ ID NO: 37606 - DNA, 278 bp, Zea mays
cggacgcgtgggcggacgcgtgggccgaggaggtcatggacgaggtgcgccgcctcatggacaagtacacgggcgaggagctcagcatcacggtcgtcggccacagcctcggcgccgccctggcgctcctcgtggccgacgaggtcgccacctccatccccgacgcgccccccgtcgccgtcgtctccttcgggggccccaaggtgggcaacgacgcgttcgtcgataggctcgccagcagcggcaaggtcaacgtcctccgcatcgtcaacgccggc

SEQ ID NO: 37607 - DNA, 277 bp, Zea mays
cgaagtgttcgtgcgaaggcgaccctccctccttcgctccttccgcgccgcctcccggccgtcgccgccatggtgaagtactcgcaggagccgggcaaccctaccaagtcggctaaggccatgggcagggatctgagggtccacttcaagaacacaagggagacagcctttgcgcttcgcaagttgtctttgaccaaggctaagcgataccttgaggatgttattgctcacaagcaggcaattcccttccggagatactgtgggggtgttggtcgca

SEQ ID NO: 37608 - DNA, 279 bp, Zea mays
cggacgcgtgggcggtttcggaaggatcggcaggctcgtggccagggtcgccctgcagagcgaggatgacgagctcgtcgccgtcaacgaccccttcatcaccacggattacatgacctacatgttcaagtacgacaccgtgcacggccaatggaagcacagcgacatcaccctcaaggactccaagacgcttctcttcggcgagaagccggtcaccgtctttggcatcaggaaccccgaggagatcccgtggggtgaggctggtgctgagtatgtcgt

SEQ ID NO: 37609 - DNA, 279 bp, Zea mays
acccccagtctcggaagagaactatccagaagcgcaagactccaaagccgtcgccttcctatccatcccttcctcgccgcgggggtcgcctgagatcacataaacaatggtgaaggctgttgctgtgcttggtagcagcgatggtgtcaagggcaccatcttcttcacccaagagggagatggccctaccactgtcaccggaagtgtctctggcctcaagcctggcctccatgggttccatgtgcatgcacttggtgacaccaccaatggctgcatgtc

SEQ ID NO: 37610 - DNA, 275 bp, Zea mays
gctggaccctcgagatcgcgtcgccggtggccccgcagcgcctgttccgcgccgccgtgatggactggcacaccctggcgcccaaggtcgcctcccacgtcgtcgccagcgcgcacccgtggagggcgacggcggcgttggcagcgtcaggcagttcaacttcacctcagtcatgccgttcagcttcatgaaggagcgtctcgagttcctcgacgcggacaagtgcgagtgctagatcacgctcatcgagggaggcggcatcggtcgtcgcatcg

SEQ ID NO: 37611 - DNA, 285 bp, Zea mays; identical to SEQ ID NO: 37058

SEQ ID NO: 37612 - DNA, 236 bp, Zea mays
cggacggtgggcaaggctctcgagtcggtacttccgccaaagccttcgtccaagctgacagacatggagatcgatgaatgcgaggagacaaccatgcatgatgtgaacaacatcgaggaagagatgcgcaggaagcaggctcatgctgctcaggaggcgtacgaggaggacgatgagatgcctggtggagcccaaagagtgcagtgcgctcaacagtaagcagactaccataatgg

SEQ ID NO: 37613 - DNA, 127 bp, Zea mays
ggtgccacggccatctggctcctattcgaggtcatggagtaccatctcctcacattggtgtgccactgtctcatcctctcgctggccatcctcttcctgtggtccaatgcctccactttcatcaaca

SEQ ID NO: 37614 - DNA, 272 bp, Zea mays
gagagagagagagagatcagcaacttaacaacaataatggccaccgccatagttcccacggacgccgagctgctgcaggcgcaggccgacctgtggcgccacagcctctactacctgacatccatggcgctcaagtgcgcggtggagctccacatcccgaccgccatccacaacctaggcggtgctgccacgctgccggacctcgtggccgcgctgtccctgccagcggccaagctcccgttcctcgggcgcgtgatgcggctgctggtcac

SEQ ID NO: 37615 - DNA, 272 bp, Zea mays
cccacgcgtccgattgtgcttatcatgcgacctaatgttcattcagctaatgcactgtctcgacgtcatacaaggacccttctttgtgatcgttgtggttcacagcctgcatcagtccgatgtcttgaggacaacgcatcactttgccaaaactgtgactggaatgggcatgatgcagaatcaggggcttctggacataaaaggcaagccataaactgctactcagggtgcccatcatctgcagagctttcgagaatctggtcatttattac

SEQ ID NO: 37616 - DNA, 272 bp, Zea mays
ctagaactagtccagactcctctccgcacataccctccctacctcgccgtcgccgtcgcatctgccatgggggcgtacaagtacgtctcggagttatggagaaggaagcaatccgacgtgatgcggttcgttcaacgcgtgcgctgttgggagtacaggcagcagccggccatcgtccgcctcacaaggcccacccgccccgacaaggcccgccgcctcggcttcaaggccaagcaggggtatgttgtttaccgcgtccgtgtgaggcgtgg

SEQ ID NO: 37617 - DNA, 269 bp, Zea mays
gtctggataggagggtcgatcctagcctcgctcagcactttccaacagatgtggatatcgaaggaggagtacgacgagtctggcccggcaattgttcaccggaagtgcttctagggtttcacaagttcctcgtcgttacctagtctcaaattatgtcccctccatttctcgagatatgtgtggcagatttgcatgatacgtttgtttgtttccatcggacctgaagtcttcttggggataggctcccccctttgtatgttgtggctcca

SEQ ID NO: 37618 - DNA, 269 bp, Zea mays
gaaaaacgaggctgtacgcggccaggattttgagaaggctggtgaattaagggaccgagaaatggaactgaaggctcaaattacggccattattgacaagagcaaggaaatgattaaagcagagactgaatctggtgatgtcggtcctcttgttactgaggcagatattcaacatattgtctcctcttggactggaattcctgtggagaaagtgtcgtctgatgagtctgaccgtctcctaaagatggaggggacctgcatacacgtat

SEQ ID NO: 37619 - DNA, 259 bp, Zea mays
gaccattccttcttcgctccttcgccgccgctatggttaagtactcgcaggagccgggcaaccctaccaaatcggccaaggccatgggaagggacctgagggtccacttcaagaacacaagggagacagcttttgcgcttcgcaagctgcctttgaccaaggctaagcgataccttgaggatgttattgctcacaagcaggcaattcccttccggagatactgtggaggtgttggtcgcaccgcacaagcaaagtctcg

SEQ ID NO: 37620 - DNA, 270 bp, Zea mays
gagcccgagtggaacgagaccttcgtcttcaccgtctccgacgacaccccgcagctccacctcaagatcatggacagcgacctcaccaacgacgatttcgtcggcgaagcaaccatccccctggaggccgtgtttcaggaaggcagccttcccccggcggttcacccggtcgtcaaggaggagaagtactgcggagaggtcaagctcgcgctcaccttcactccagcagcggaaactcgccaccgccctgatgacaacgaggaggggcgg

SEQ ID NO: 37621 - DNA, 253 bp, Zea mays
ctcccggaaggtttcctcgacaggaccaaggaggtgggtctgctggtcccctcgtgggcgccgcagacgcaggtgctggcccacagcgccaccggcgggttcctcacgcactgcgggtggaactccacgctggagaacctggtgcacggcgtgcccatggtggcgtggcccttgttcgccgagcagcggctcaacgcggtgatgctgtcggagggggcagggctgcgatacggctaccgagaccaaggttaag

SEQ ID NO: 37622 - DNA, 263 bp, Zea mays
gtccggaatgaccagccgaggtttgagacttgctaccagatcgctcttgcgatcaagaaggaagtcgaggatctcgaggctggtggtattcaggttatccaaatcgacgaggctgcactgagagaagggctgccgctccgcaaggctgagcatgcattctacttggactgggctgtccactccttcagaatcaccaactgcgagatccaggacaccacccatatccacacccacatgtgctactcacacttcaacgacatcat

SEQ ID NO: 37623 - DNA, 247 bp, Zea mays
ccagttttcacccacatcagaacacatactattggcatatggtcggcaacatagttcactgttgaggaccattttgatcaatggggagaccagagttcctgtgtacacagtcttggaggtgtatcgagtttcagacatggagcttgtaagagttcttcctagtgtaggagaggaagtcaatgttgcatgttttcatccttcccctggatcaggtcttgtttatgggactaagcaagggaaggtaagg

SEQ ID NO: 37624 - DNA, 269 bp, Zea mays
gtttaccattcctccccaaaacacatcctgcgatcctcgaagcctccgccgagcatcgatcatgtcggcctactgcggcaagtacgcggatgagctcatcaagaatgctgcctacatcggcacccctggcaagggtatccttgctgctgatgagtcaactggcaccattggcaagcgcctttccagcatcaatgtcgagaacgtggaagagaaccggcgggctctccgtgagctcctgttctgctgccctggtgccctccagtacatca

SEQ ID NO: 37625 - DNA, 225 bp, Zea mays
cgattccgaacctcttctcttgcaaggacctagtgaagcgtgaaggcaatgcttggatgtacaaacctgacgtgaaggcgttgaaggagaagctcaggctgcctgttggttcctgtgagcttgctgttccactcaacgcaaaagcacgactctacacagtagacagacgcagagaagcatatgctacaatactgcattcagcaagtgaatatgtttggggcgata

SEQ ID NO: 37626 - DNA, 215 bp, Zea mays
cgcgcgggctccaccatcgtgatcatgcgcaagttcgacctgggcgcgctggtggaccaggtgcgcaggtacgtgatcaccatcgcgcccttcgtgccgcccatcgtggtggagatcgccaagagcccccgcgtgaccgccggcgacctcgcgtccatccgcatggtcatgtccggcgccgcgcccatgggcaaggagctccaggacgccttcat

SEQ ID NO: 37627 - DNA, 270 bp, Zea mays
cccacgcgtccgatctcccagatccaattcgcgagttctccctcctctgcggccatggcgctctctgtggagaagacctcgtctggacgggagtacaaggtcaaggatctctcgcaggcggacttcggccgcctcgagattgagctggccgaggtcgaaatgcccggcctcatggcgtgccgcgccgagttcggcccgtccaagcccttcgccggcgctaggatctcggggtctctccacatgaccatccagaccgccgtcctcatcgag

SEQ ID NO: 37628 - DNA, 245 bp, Zea mays
catatctacatatacatgggttgaaagaaaacgagctgaatgcaacgcagctgtcagttctttctagtctatatcgatggagagatggcattgcccgtgctgaggatgagagcactggctatatattacccaataagactctacttgagatagcaaaggagatgcctgtgcacagtgggaagttgaaaagaatgattaactcaagaaattcgattttggaacgaaatctcaaccatgttattaac

SEQ ID NO: 37629 - DNA, 261 bp, Zea mays
  unsure (1)..(261): unsure at all n locations
cccacgcgtccgcccacgcgtccgattccatcatcccctttgcaagtatagtctctctgctaagcgaagtancttcaagctagtctcggcggctctagaagacgatgggcaaggacgacgtgatcgagagcggcgctggcggcggcgagttcgctgccaaggactacacggaccctcccccggcgccgctgatcgacgcggcggagctggggtcctggtcgctgtaccgcgccgtgatcgccgagttcatcgccacgctgc

SEQ ID NO: 37630 - DNA, 262 bp, Zea mays
aaagatcattgttatcttccttggaggattacagtacactacatcttcaaactggcagaccgatgtggtcacctgggtttgcttttactatattgaaaaggttcatgccagaagataaacttgcagatgtaaagggtgccaccctcaccgctgatggaacaggagttgtatttgatgttcctgcagcagatgttgaagattacattcaaggtataatggtccttcccttgttcgtgaaatagttatcaactagcataggcat

SEQ ID NO: 37631 - DNA, 251 bp, Zea mays
cgaacaaaccacacaccccacctaccccggccggaccggcaggcagcacaacatggacctcgccctcctggagaaggccctgctgggcctgttcgccgcggctgtggtggccatcgccgtggccaagctgagcggcaagcggtaccgcctcccaccggggcccccgggcgcccccgtggttggaaactggctgcaggtgggcgacgacctgaaccaccgcaacctgatggccatggcgaacggttccgcga

SEQ ID NO: 37632 - DNA, 186 bp, Zea mays
cagaagcttggagcaaatgccatccttgcggtttcacttgctgtgtgcaaagctggagctatggtgaagaagattcctctttaccagcacatcgcaaatcttgctgggaacaaaactctggtgctccctgtacctgcctttaatgtgattaatggagggtcacatgctggaaacaagcttgccatg

SEQ ID NO: 37633 - DNA, 215 bp, Zea mays
aaaaagccgacgatgttattggccctgaagttgagaagctggtggcggccttgcccaacggtggggttctgctgcttgagaacgtaagattctacaaggaagaggagaagaatgacccagagtttgcacagaagcttgcctccctagcagatctttatgttaacgatgcatttggaacagcccacagggcgcatgcatcgaccgagggattacca

SEQ ID NO: 37634 - DNA, 248 bp, Zea mays
agaagaaggtttctatgagcggtcccctgatttgctagaggctgcagtagctcacatccagttggtcattgtaaccaagttcatttcgaaggtgcagcaggacattcctggacctggagtgaaggaacagctccagaacctttgcaatgtctatgccctctacattctccacaagcacctgggcgacttcctggcaaccgggtgcatcacacccaagcatggagcgctggcaaacgagcagctgggca

SEQ ID NO: 37635 - DNA, 231 bp, Zea mays
atcgcgagcggccacccttttttttttcttcgtcctcgtctactgcaccgccggcatctcggggggccacatcaaccccgccgtcaccttcggcctcttcctggcgcgcaaggtctccctggtgcgcgcgctgctctacatcgtggcgcagtgcctcggcgccatctgcggcgtcggcctcgtcaaggcgttccagagcgcctacttcgacaggtacggcggcggcgccaa

SEQ ID NO: 37636 - DNA, 254 bp, Zea mays
gttgcagagtccagacgccagacgccctctacttctctctagttagtgtacatttcaaactcttggccgccgcctcgctctctgttcgccgcgccccgccgcagaaatggcgctgccgaatcagcaggttgtggattaccccagcttcaagctcgtcatcgttggcgacggtggaactggcaaaaccacatttgtgaagaggcatcttactggcgagtttgagaagaaatatgagccgaccattggtgttgaag

SEQ ID NO: 37637 - DNA, 250 bp, Zea mays
gacacgcgtccgcggacgcgtggctcatatgaacacttttatgtgatctactgcaaattctgggagctggatgcagaccacgatgttttgattgataaggaaaatctcatcaaatatgggaaccattcgttgacctatagaatagttgatagaattttcgcacagatcccaaggaaattcacaagcatgacagaaggaaagatgggttatgaagactttgtttactttatattatcagaggaagacaaat

SEQ ID NO: 37638 - DNA, 286 bp, Zea mays
cccacgcgtccgcggacgcgtgggtggcgctcatgtgcgtctgcatcgtcgtcgggcacctcctcgaggagaaccgatggatgaacgagtccatcaccgcgctcttcatcgggctgggaactggagcggtcatcctgttcgcgtcgagcgggaagcattcgcgcgtgctggtgttcagcgaggacctcttctttatttacctgctgccgccgatcatattcaatgcagggttccaagtgaagaagaaacagttctttcgaaacttcattactattacactgtttgg

SEQ ID NO: 37639 - DNA, 287 bp, Zea mays
gtggggtactcgccggaggacctgacgcagcacgaccggctcgtcaggctgttcgaggagtgggtggccaagtaccgcaaggcgtacggcagcttcgaggagaagctgcgccggttcgaggtgttcaaggacaacctgcaccacatcgacgaggccaacaggaaggaggtcaccagctactggctgggcctcaacgccttcgccgacctcacgcacgacgagttcaaggccacctacctgggcctcctgccgaagaggaccagcggtggccggttcaggtacggcgg

SEQ ID NO: 37640 - DNA, 283 bp, Zea mays
gcgcagagaatccccaagcaaacaaacagggtagagggagaggagaggagaggagaggagaggttgggtctgggacaccatggctccgatgaagctgtacggggcggtgatgtcgtggaacgtgacgaggtgcgcaacggcgctggaggaggctggctccgactacgagatcgtgcccatcaacttcgccaccgccgagcacaagagccccgagcacctcgtccgcaacccgtttggtcaggttccagctctgcaggatggtgacttgtacctcttcgaatca

SEQ ID NO: 37641 - DNA, 281 bp, Zea mays
cacccgtcccctcctgctcgcccatggctcccatcgctgtcggcgacgccctccccgacggccagctcgggtggttcgacgagaacgaccagctgcagcaggtctccgtccacgcgctcgccgccggcaagaaggtcatcctcttcggcgtccccggcgccttcaccccgacctgcagcaaccagcatgtgccaggcttcatcacacaggctgagcagctcaaagccaagggtgtagacgagatcctgcttatcagcgttaacgaccccttcgtcatgaag

SEQ ID NO: 37642 - DNA, 278 bp, Zea mays
attaagccaacggaagaaaaaaaaaagagctactatacagcaatggccggaggagacgacctgaagctgctgggcctgtgggcgagcccgtacgtgctgcgggtgaagctcgcgctcagcctcaagggcctgagctacgagtacgtggaggaggatctgagggacaagagcgagctcctgctcaagtccaaccccgtccaccagaaggtccccgtgctgatccacgacggcaagcccgtctgcgagtcgcagatcatcctgcagtacatcgacgaggc

SEQ ID NO: 37643 - DNA, 283 bp, Zea mays
atcggcttcaccaagaggcgcccaaaccaggtcaagagaacctgctatgctcaggcatcccagatccgtcagatccgccgtaagatggttgagattatgatcaaccaggcttctacatgtgacctgaaagaacttgtttcgaagttcattccagaagttattggtaaggagattgagaagtctacctccagcatcttcccacttcaaaacgtcttcatccgcaaggtgaagatactcaaggcccccaagttcgatcttgggaagctcatggaggttcacggcg

SEQ ID NO: 37644 - DNA, 281 bp, Zea mays
atctctgttccgtcagagaatgcagtggatcttgcagatgccatcctagagagatcggaaggcaaggtgcggctgaccggcttggacgcccgtgacagtctccgactggaggcaggcctgtgcctgtacggcaacgacatggagcagcacatcacgccggtggaagccggcctctcatgggcgatcggcaagatgaggagggcagagggcggtttcctgggcgcagacgtgatcctgaagcagctccaggaagggccaaagatcaggcgcgtgggcatggt

SEQ ID NO: 37645 - DNA, 280 bp, Zea mays
  unsure (1)..(280): unsure at all n locations
caatccttcaagcgcaactgcctcctcctcgtcgtccggtcgtgagaagggatggcgggccgtggcaaggctatcggcgctggcgcgcgaagaaggcaacgtcgaggagctccaaggccggactccagttccccgtcggcaggattgctaggttcctcaaggcgggcaagtacgctgagcgcgtcggcgccggcgcccccgtgtacctcgccgccgtcctcgagtacctcgcggctgaggttctcgaacttgccgggaacgccgcngaggacaacaagaa

SEQ ID NO: 37646 - DNA, 280 bp, Zea mays
cgctctttggtgtattcgatggtcacgggggcaaaaatgcggcagagttcgctgcggagaacatgcccaagtttttggccgaggagttcaagaaggtgaacggcggaggagagatcgaaggagctgtcaagaggggttacctcaagacggacgaggagttcctcaagagggacgagagcgggggcgcgtgctgcgtcacagcagttctccaaaagggtggtctggtcgtctccaacgctggagactgccgtgcggtgctcagccgagcagggaaggcaga

SEQ ID NO: 37647 - DNA, 279 bp, Zea mays
cccacgcgtccgatttttatgtgcagttactggacgagtgaccacaaaagctgatgtcttcagctttggtgtcatcttgatggaactgattacagggcgcaaggcacttgatgagactcggccagaggatagcatgcatctagttacatggttccggagaatgcagctgaacaaggaaacattccgcaaagcaatcgaccctgttattgaccttgatgaggagacatatgctagcgttagtactgtctcagagcttgctggtcactgctgcgctaggga

SEQ ID NO: 37648 - DNA, 278 bp, Zea mays
cgcaaacccagacggcccgccagacccagcggtcgcttactcgcatcgcagcgcactcgcgccacagtcggcatcacagaccagatccctgcgggtgcggcggccatggccgagaacttccaactccagggccggcacggcaagtcccgcgtccgcgtctcccgcgtctggcgccgcccggccgcggcggggggcgacgtcatcgttgagtggaacgtcgccgtcagtatcgtctccgactgcctcccctcctacacctccagcgacaactccgccat

SEQ ID NO: 37649 - DNA, 278 bp, Zea mays
cggacgcgtggcgagacgcgtgggcgtttaggttgccaaggacccatctggcaaggatatcaatgcatcttgagcagcaactcaagaacctcctcagcccatccaccccgttcttcttcaacaccctgtacgacccctaccgtgagggtgctgactttgtgcgtggataccccttcagcctcagggagggtgctcacaccgccgtctcccacggcctgtggctgaacatccctgactatgatgctcccacacagctggtcaagcccaaggagaggaat

SEQ ID NO: 37650 - DNA, 277 bp, Zea mays
aacgaagactgtttctatcagaagattcatcgtgaagggcactgtcgaagaacgaatggaggctgtgcaggctcgaaagcagcgaatgatttctggagctttgactgaccaagaagtccgcactgcacgtatagaagaactgaagatgcttttctcctgagactacaaaagggctgttgtgcatcggatggtcggcaattcggcatggctaaaacaagatggctggtagccagaatgttggaaggtaagacgagggtaggaaattgcacgcccaaat

SEQ ID NO: 37651 - DNA, 278 bp, Zea mays
cccacgcgtccgcttctcactcttgccggtcccgagtaaagagcagcagcgcaagaagtcggtagagcgatgaagaaggcaatggcggccgagagcttccttttcacctctgagtccgtgaacgaagggcagcccgacaagctgtgcgaccaagtgtcggacgccgtgcttgacgcatgcctcgcgcagggatcccgacagcaaggtggactgcgagacctgcagcaagaccagcatggtgatggtgttcggcgagatcacgaccaaggcggccgtgg

SEQ ID NO: 37652 - DNA, 275 bp, Zea mays
cacacgcgtctcgccacgcgtccggctctcagaccacagttgccgccgccgccgccctaagccagggtgctgaggctttcgttggcctcttcgccggcagcgagcacccaccagcagttctgtagaaatggctgatggtgaggacatccagcctcttgtctgcgacaatggcaccggaatggtcaaggctggttttgccggcgatgatgcaccaagggctgtattccctagcatcgttgggcgtcctcgtcacaccggtgtcatggtagggatgg

SEQ ID NO: 37653 - DNA, 262 bp, Zea mays
acgcaccaaacgagcgggacctgcgagcggcggacgcgtggcgctcccctacctctccagcatcctcccgtcaccgtcgtcacgtctccgctcatcacctcgccagccatgggcaagatcaagatcggaatcaacggtttcggaaggatcggcaggctcgtggccagggtcgccctgcagagcgaggatgtcgagctcgtcgccgtcaacgaccccttcatcaccacggattacatgacgtacatgttcaagtacgacaccg

SEQ ID NO: 37654 - DNA, 267 bp, Zea mays
ggtcaccaccgaccaacaggcgcgacctgcgagcgacgcatgcactccctcgcagccccagtaccccacaccctgctcaaccacccgtagcgctcctgctcgcccatggctcccatcgctgtcggcgacgccctccccgacggccagctcgggtggttcgacgagaacgaccagctgcagcaggtctccgtccacgcgctcgccgccggcaagaaggtcatcctcttcggcgtccccggcgccttcaccccgacctgcagcaaccag

SEQ ID NO: 37655 - DNA, 275 bp, Zea mays
ctcctctccgccgcccgccgcagcagcacccaccgggcaagatgaagacgatcctggcgtcggagacgatggacatcccggagggcgtcatggtcacggtggccgccaagctggtcacggtggagggcccccgcggcaagctcacccgcaacttcaagcacctcaacctcgacttccagctgcaggaggccggccgcaagctcaaggtggacgcctggttcggcacccgccgcaccatggccgccatccgcaccgccatctcccacgtccagaac

SEQ ID NO: 37656 - DNA, 280 bp, Zea mays
ccgcgctccggctctccccaattctaagcgagacggggcacaggaagaggagagcctaaaaccctaaccccccgaatcggatccggccgccggagcgcggaaccccaccccggccgccatggagatgggagggatgagcgacgctgagcggctgttcttcttcgagatggcctgcaagaactccgaggtcgcgtacgagcagaaccccaacgacgccgacaacctgacgcggtggggcggcgcgctgctggagctgtcgcaggtccgaaccggccccgac

SEQ ID NO: 37657 - DNA, 268 bp, Zea mays
cccacgcgtccgggccgcccgcgatctagaactaggaggccgccgacgcccgacggcagggtgcccaggccttcttcggtcccatcgcgaggccatagttgcatcattcgcctgagacgactgcccagcaccaggactgatctcctcactaggggcgtagaggtgaagagaagaacttgacaatgagcagcataggcacaggttacgatctgtctgtcaccaccttctccccagatggtcgcgtcttccaggtcgaatatgctaccaa

SEQ ID NO: 37658 - DNA, 267 bp, Zea mays
ggacctgtgccgtcatcttcaaggtggacgacctcttcgtgcggtgcttcaagcggtacacggacctggcgtacccgggcgggaagcccatgtcggtgcacgccacgctgtgggacggcagctactgggccacgcagcaggggaaggtgaaggtggactggtccgccgcgcccttcgccgtctcctaccgcggctactccgccgacgcctgcgtgcccgacggcgacggccgcccgctctcctgccccgccggcaccgaccgctgga

SEQ ID NO: 37659 - DNA, 269 bp, Zea mays
actccctctcgtcgccgtcctctcccgttcgcaacgccacgctccccaccgccgaaatggccccgaagcgaggtggcagggcaccggtgccggccaagaagaagacggataaagtgacgaaccctctgttcgagaaaaggccgaagcagttcggcatcggcggcgcgttgcctcccaagaaggacctgcaccgattcgtcaagtggcccaaggtcgtgcgcatccagcgccagcgtcgcatcctcaagcagcgcctcaaggtgcctccg

SEQ ID NO: 37660 - DNA, 260 bp, Zea mays
ggaccgtggatcacaatgagagtgggattgccaatctttacagcctgcactcttggaatcggataggaacaattactttgtatggtattcagtggataattggattcgtcacgttcttcttccctggtgctgcgccaaacgtgaagaagggtgttcttccttggcacgtactctttgggctctttgtctacatcttagcactggctaatgcagaactcggctttcttgagaagctcactttcctcgagagctcaggtctc

SEQ ID NO: 37661 - DNA, 257 bp, Zea mays
gtgaagatggggtacaagaggctaaaggagaaggtcaaggagtacaaaagaagggatgccaaattatatggcaacatgatttccaagttgagcaagcttgaagacacggaagataatggccaaatgagtcaggcagtaaacaagaagcgtgagcgcttatggccactggcggaaatgcttaggagattcttcactgccgatggtagcaagggttccacgctgtggcttgtgctgaggctattgatcccggtaatagt

SEQ ID NO: 37662 - DNA, 257 bp, Zea mays
cgactccaagaaggtgaccccttgctgcctgctacaaggcgctcaacgagcaccatgtcctcctggagggtaccctcctgaagcccaacatggtgactccaggctccgactccaagaaggtgacccctgaggtgattgctgagtacaccgtccgtaccctccagaggaccgtccctgctgctgtgcctgctgttgtcttcctctctggtggacagagcgaggaggaggccacccgcaacctcaatgccatgaacaag

SEQ ID NO: 37663 - DNA, 258 bp, Zea mays
atccattccacacaaccaccactgctcttgccccagcccgccgcaggagttgccagatctgctccggtcacaggagctccgactccgagccctctccaatggcggttaaggtctacgtcgtgtactattccatgtatggacatgttggcaaactagctgaagagatccagaaaggtgcctcgtctgttgaaggtgttgaagctaaaacatggcaggtccctgaaaccctccctgaggaagtgcttggaaagatgggcg

SEQ ID NO: 37664 - DNA, 256 bp, Zea mays
cggacgctggacgagggagccaaaagcaataccatggacacaactttctcccataagatgtgagtccgatacctgggcacatttggatgttcgtccttgtgacataggttgctggcctactaatctgggctgggttatgggaccaataatcatctactcatgctttctgactggggcaactttggctttataccatggatctccacttggacgcgatttctgcaaatttgtacaggatgctggtgtgactgtatta

SEQ ID NO: 37665 - DNA, 258 bp, Zea mays
cccacgcgtccgcaactccgccacgcagtgccccgggcagtgcgcgtggccgttccaccggcctctgtacggtccccagacgccggcgctcgtgccgccgagcggcgacgtcggcgcggacggcatggtgatcaacatcgccagcatggtcgccggcgcggtgaccaacccgttccgcgacgggttctaccagggcgacaaggacgcgccgctggaggccgacactgcctgcacaggggtctacggcagcggcgccta

SEQ ID NO: 37666 - DNA, 251 bp, Zea mays
agttctagatcgcgagccgcgcacgtcgcggcatcgagctcatcgcctccgagaacttcacctccttcgccgtcatggaggcgctcggctccgcgctcactaacaagtactccgagggcgtgcccggcgcccgctactacggcggcaacgacgtcatcgacgagatcgagaacctctgccggtcacgcgcgctcgctgccttccaccttgacgccgcgtcctggggcgtcaacgtgcagccctactcgggc

SEQ ID NO: 37667 - DNA, 255 bp, Zea mays
gccatgtatgttgcaatccaagcagtgctctcactctatgctagtgggcgtactactggtattgttcttgactctggtgatggtgtgagccacactgtgcccatttacgaaggatatgcccttcctcatgcgattcttcgtttggatcttgctggtcgggacctcacagactccctcatgaaaatcctgactgagaggggttactccttcacaacctctgccgagcgagaaattgtaagggacatcaaggagaag

SEQ ID NO: 37668 - DNA, 291 bp, Zea mays
cccacgcgtccggcacttaatgcggtcgcctcgcggaacgcaaagtcttagttgtcggaaatccctgtaacactaatgcgctgatttgtttgaaaaatgccccaaacataccggcaaaaaaactttcatgcattgacgaggttggatgaaaatagagcaaagtgccagctggcactaaaagcaggtgtattttatgacaaagtatcaaacgtgactatttgggggaaccattcgacgactcaggttcctgatttcttgaatgccaaattgatggaagaccagtgaaagaag

SEQ ID NO: 37669 - DNA, 290 bp, Zea mays
cccacgcgtccggtttatggcccgggaaatactgatcctaaggagactcgaccaccccaacatcatcaaattagagggcttggtcacctccaggatgtcatgcagcctttaccttgtcttcgagtacatggagcatgatcttgctggtcttgcggcaagttgtgatgtcaagttcacgttgcctcagataaaatgttacatacagcagctgttgtcagggcttgagcattgtcatgacaataatgtattgcaccgggatatcaaggggtcaaacttgttgttggataata

SEQ ID NO: 37670 - DNA, 291 bp, Zea mays
gatgcaaaacttgaggcacagaaaaagtatgtaggaatgaaattacgtctagatcaagaccctgatgtactggacacatggttttcatctggtcttttccccttaacagtacttggttggccgtctgataccactgacctccgtgctttctaccctacatcggtactagaaactggacttgatattctcttcttttgggtagcaaggatggtgatgatgggaatgcaacttggtggtgacgtgccatttcagaaggtttatttacatcctatgattcgggatgcacatggc

SEQ ID NO: 37671 - DNA, 292 bp, Zea mays
cacatgttttctctacccatgatggctattctcttgatgtttttgttgttgatggctggcctgttcaggatgctgatggtttgcacaaagcactggaagcatccattttaagaaatgagggttcatggtctggttcatctcattcctcagccgctgaaagaacactgcccttccaagttaaaggtggtgagtgggaaatcgacaaacgacttctgaagatgggagggatgattgcttctggttcttgtggggacttgtgagttcagtttatacttttgatgagttagtttct

SEQ ID NO: 37672 - DNA, 295 bp, Zea mays
gttgcttttgagtagatatttgcaacaacttgtcatggaatctcttgggaaagaatttgatctggatggcaaccgggtaaatcaagggctatctgtatatggaaacaaaggaagtactgaccagcacgcttacattcagcagctgagagaaggtgtacacaacttctttgttacttttatcgaggtcttgcgtgacaggcctgctggtcatgattgggagcttgaacctggagtcacatgtggtgactatttgtttgggatgttgcagggaacacgttctgctctttatgcaaat

SEQ ID NO: 37673 - DNA, 294 bp, Zea mays
gttgcagagtccagacgccagacgccctctacttctctctagttagtgtacatttcaaactcttggccgccgcctcgctctctgttcgccgcgccccgccgcagaaatggcgctgccgaatcagcaggttgtggattaccccagcttcaagctcgtcatcgttggcgacggtggaactggcaaaaccacatttgtgaagaggcatcttactggcgagtttgagaagatatatgagcccaccattggtgttgaagttcaccctctcgattttagcactaactgtggcacaattcg

SEQ ID NO: 37674 - DNA, 296 bp, Zea mays
cccacgcgtccgcggacgcgtgggggcggcggaggagctgatgggcagccacctggacgaggtcaagcggatggtggccgagtaccgccaaccctcggtgaagatcgagggcgccacctcagcatcgcgcaggtggccgctgtggccaccggcgctggcgaggctcgggtcgagctggacgagtccgcccgtagccgggtcaaggcaagcagcgactgggtcatgagcagcatgatgaacggcaccgacagctacggcgtcaccaccggcttcggcgccacgtcgcacaggaggac

SEQ ID NO: 37675 - DNA, 286 bp, Zea mays
cggacgctgggcggacgcgtccgtccgctcggccaccagctttgaccgcctcccctcccctcctctccactgttcctccataccccactcaccccgcaggagcggcgcggcggcggcaaaggcaaaggcaaaggcaagatgttcgggcgcgcgccgaagaagagcgacaacaccaagtactatgagatcctcggggtgcccaagtcggcgtcccaggacgacctcaagaaggcctaccgcaaggccgctatcaagaaccaccccgacaagggcggtgaccccgaga

SEQ ID NO: 37676 - DNA, 287 bp, Zea mays
cgccatccatcgcaatggccgccgccgccgccgccgccgccaccgcgctcctcctcctcctgtgcgccgcgtctttcgcgtccgcagccgccgacgacgggttgacgaccttcaaggtgtacttccacgacgtcgtggcggggacgaacccgacggcggtgcgcatcgcgcaggcggcgtcctccaacacgtcgtccaccaacttcggcgcggtggtggccatcgacgacccgctgacgacgggtcccacgcgcgccgcgggcacggaggtgggccacgccagggca

SEQ ID NO: 37677 - DNA, 287 bp, Zea mays
ggcaaagtggtagctgacttcggctgtggctgtcgcactctggctgtggcgagtgctttactggatgctgaacatgttcttggtattgatattgacccacagtcacttgaacttgctcaagaaaatgctgctgatctggagctggacatcgatttagtttggtctgacataaagaacttaaatctgaaaggcgtccatgttgatactgttgtcatgaatcctccctttggtacacgaaggaatggagcagacatggagttcctctctatggccttgcaggttgcttc

SEQ ID NO: 37678 - DNA, 291 bp, Zea mays
cgaaaccttttcttgtgctctgtctgtgtgtttccaaagcaaacgaaagaggtcgaggatgtcttgcagctgcggatcaagctgcaactgcggatcaagctgcaactgcggcaagatgtaccctgacctggaggagaagagcggcgggggcgctcaggccagcgccgccgccgtcgtcctcggcgttgcccctgagacgaagaaggcggcgcagttcgaggcggcgggcgagtctggcgaggccgcccacggctgcagctgcggtgacagctgcaagtgcagcccctgcaa

SEQ ID NO: 37679 - DNA, 293 bp, Zea mays
cccacgcgtccgcccacgcgtccgatccccaaaccctagctcccgatctcgatggcgaaccctcgcgtcttcttcgacatgaccgtcggcggcgccccggcgggccggatcgtgatggagctgtacgccaacgaggtgcccaagaccgcggagaacttccgcgcgctgtgcacgggcgagaagggcgtgggcaagtccgggaagccgctccactacaagggctccaccttccaccgcgtcatccccgagttcatgtgccagggcggcgacttcacccgcggcaacggcaccgg

SEQ ID NO: 37680 - DNA, 292 bp, Zea mays
ccacatccatggtgtctgcaatggtgttactggcaagtaagaaatccttggaccctgtggctcctctacacaaatatggcgttgtctccatatcaaacatactgaccacaacctgccagtatgaggccctcaagtatgtcagcttccctgtccaaacacttgctaaatgtgccaagatgatacctgtcatgatctggggcacaataataatgagaaagaagtatggtggaaaagattacttctttgctgtcatcgtgactctgggctgcgcattgttcattctatatccggc

SEQ ID NO: 37681 - DNA, 281 bp, Zea mays
agcccatggtggtggagacattctcgcagtatcctccccttggtaggtttgctgtccgcgacatgaggcagacagttgctgttggagtcatcaagagtgtggagaagaaggacccgaccggcgccaaggttaccaaggcagctgccaaaaagaaatgatgcaacctgtcgttaatcctgtatctgcttttgcaatacctgacttgtcactccatcccgaagttttgtatgcggttgttactgttattgtgtactgttaagctctgctgcggcgtgccctgt

SEQ ID NO: 37682 - DNA, 286 bp, Zea mays
ttacaactccaaaggtttggtcgagacagacccagagggtgcacttgctggttttgatcaagtggtcagtatggagcctgaaaaggctgaatggggatttaaagctcttaaacaaactgtcaagctttactataagctggggaaatacaaagaaatgatggatgcatatagagagatgttaacatacataaaatctgcggtcacccggaactacagcgagaaatgtataaacaacataatggattttgtttctggatcagctagtcagaattttactcttctgcaa

SEQ ID NO: 37683 - DNA, 287 bp, Zea mays
cccaaatggcacaattaggaatattctgaatggcactgtgttcagagaaccaatcatctgcaaaaacatcccacggcttgttccagggtggacaaagcccatttgcattgggaggcatgcattcggcgatcagtaccgggcaactgatgcagttatcaaggggccggggaagcttaaattagtttttgagggaaaagaagagcaagttgagctggaggtgttcaacttcactggtgccggaggagttgccttatcaatgtacaacactgacgagtccatccatgcct

SEQ ID NO: 37684 - DNA, 129 bp, Zea mays
cagaggtgggctggcttctcctccccctcttatcaagtcctcctcgggttagggatccttagggttttgtggaggggcgatggcggcggctgatgtggagtaccgttgcttcgtcagctgacttgcctg

SEQ ID NO: 37685 - DNA, 281 bp, Zea mays
caaaaaatggaaggttctttcttcggcaacatggatcagaggaactacgtcatgagcggtggccatccaaggacacctttctaccaggcattcctaaagctagcaaagtccatatggttgctgcacaggttggcgtactccttcgacccaaaggcaaaggtgtttcaagtgaaaaaggggagtgaattttcggatatccacatggagagcgtcgtgaagaacatcatcctagaagaaggtgcggagaggccaaaagtcggcctgatggtgatgcctggttt

SEQ ID NO: 37686 - DNA, 271 bp, Zea mays
gtgttcgtggtgggtcacgactggggcgccatcattgcgtggtacctctgcctgttccggccggaccgggtggcggcgcttgtcaacaccagcgtcgccttcatgcgccacatcttcgtccgcgccgccgccgccgccgtcacgcccatcgactacttccaccgcacctacgggcccacctactacatctgccgcttccaggagcctggtgtcgcagagaaggagttctcgccggccaacgccgggtacctgatgaagcggatcctgtgca

SEQ ID NO: 37687 - DNA, 277 bp, Zea mays
cccacgcgtccgcacacagcaactatcaacgacataagttttgacgcggatggtgaatatataggcagctgctcggatgatggcacggtggcaataaacagcctcttcaccgatgaaaagctaaagtttgagtaccatcgccccatgaaggcaattgctctagaccctaattatgcccggaactatagaagatttgctactggtggtttagcaggccaagtacttgtgctgacaaagaagtcttggggaggttaccacaagaaggttttgcgtgatg

SEQ ID NO: 37688 - DNA, 202 bp, Zea mays
gtgagctggcggcggctgatgtggagtaccgttgcttcgtcggcgggcttgcctggggcaccagcaagtgagtcgctggagaatgccttcgcctcctacggcgagatcctcgactccaaggtcatcaccgaccgggagacgtggatgtctcgcggcttcggcttcgttaccttctcctccgaggactcgatgctcgacgcta

SEQ ID NO: 37689 - DNA, 271 bp, Zea mays
cccacgcgtccgcccacgcgtccggactagttctagatcgcgagcggccgctcccccacgcgaccgcccaagcgtccgcccacgcgtccgcttgagcggcgagggtggtgacgagacaaaagatatcctcctccttgatgtggctcctctcaccctgggtattgagaccgtcggtggagtcatgaccaagttgatcccgaggaacactgtcatcccgaccaagaagtcgcaggtgttcacaacctaccaggacgagcagaccactgtctcc

SEQ ID NO: 37690 - DNA, 270 bp, Zea mays
cccacgcgtccgcccacgcgtccggtgagaagaagagccgcaagcatgctgaagcttggcatgaagcccatcactggtgtcagccgcgtcactgtaaagaaaagcaagaatatactctttgtcatctccaaaccagatgtgttcaagagtccgaattccgacacgtatgtcatattcggcgaggctaagatcgaggacctcagctcccagctgcagacccaggcagcagagcagttcaaggctcctgacttgagccagatgatctcgaat

SEQ ID NO: 37691 - DNA, 265 bp, Zea mays
acagacacgcgtccgcggacgcgtggcgaccgtgggaagctgtcagcaagtgcacagcatgcgcacagaattcagagcttacaaccgcagaatatcactgtcgaaactgtggtgatattttttgcgataagtgcacccagggaagaactcctctgactacagatgcagatgctcaaccagttcgagtttgtgacagatgcatggctgaagtaacgcaaagacttaacaatgcaagggaagtggctaatcgacctattgttcacag

SEQ ID NO: 37692 - DNA, 270 bp, Zea mays
cccacgcgtccgcattcctcctccggatttcgcagtcagcggtggtgaaggtagcgggcgcggaggaagatggggctcgcgttcgggaagctcttcagccggctcttcgccaagaaggagatgcggattcttatggtcggtctcgacgccgccggtaaaaccaccatcctctacaagctcaagctcggcgagatcgtcacaaccatccccaccatcggtttcaatgttgaaactgttgagtacaagaacattagcttcacggtctgggat

SEQ ID NO: 37693 - DNA, 270 bp, Zea mays
ggaaccttttgtatgcaaaagagctcgtgaatggagacctgatgtaacatgcaatgacccagaagatatatctcaggatggtagcaggctttgggctattgacaaacccaatattgcacaaccccctcgcggatgggaaaggcagattaggataagaggtgaagggggtaccaaatttgctgatgtatactatacctctcctactggaaggaaacttaggtctctggttgaagtcgataggttcctccaagagaatccggagtatggtgc

SEQ ID NO: 37694 - DNA, 269 bp, Zea mays
ccacgcgtccgcgacgcgtgggtgtgatctgagtagtccaccatggatacctcgaacgccttcgcggtcgtcactctcctactactcccgctgcttctcgccctagcgcaacttgtacgacgtggatctccccagtacccgccggggccgatggctcttcctgtcatcggtcaccttcacctgcacctcttcgagaggcccctccaccgcaccctggcgtgcctcgcagctcgccacggcactgtcttccagctctggttcggttcccg

SEQ ID NO: 37695 - DNA, 271 bp, Zea mays
cgagccctcgcccgctcagtcacaaagcctcagatctcagtcgcctgcgccgccgcttcgttcgtgtggaggggagaagacaggaaatggcggcgactgagggcgtgctcttggggatgggcaaccccctcctcgacatctccgccgtcgtcgatgacgccttcctgacaaagtatgacatcaagctgaacaatgctattctcgctgaggagaagcacttgcctatgtatgacgagttggctagcaagagcaatgttgaatatattgccgg

SEQ ID NO: 37696 - DNA, 276 bp, Zea mays
gaagaaggttcttgaggttcatgttgagaaggggatgcaacacaaccagaagatcaccttccctggtgaagctgatgaagcgcctgatactgtcactggagacattgtattcgtcctccagcagaaggatcactccaaattcaaaagaaagggtgaagatctcttctatgagcacaccttgtctctgaccgaagcactatgtgggttccaatttgttcttacacatctggacaacaggcagcttctcatcaaatcagaccctggtgaagttgttaa

SEQ ID NO: 37697 - DNA, 271 bp, Zea mays
cggacgcgtggcgaccttcggttccagtcctccgctgtcgccgcgctgcaggaggccgccgaggcgtatctggtgggtctctttgaggacaccaacctctgcgccatccacgccaagagggtcaccatcatgcccaaggacatccagctcgcgcgccgcatcaggggcgagagggcctgattgctgctctgtcttcctgtttctgtaatgtctgaactaggcgatggactctatcgcttcttgtcctgcaatcgtgtaccgatgttcttgg

SEQ ID NO: 37698 - DNA, 267 bp, Zea mays
aaatgagggaacatctacttttgagcagtttattttgaccttaagatccacagttggtgctcaggttcttgtacaagcaattggaattggcaaaggaaaatatgacctgacaggatttgcattagatcctagtagaaatcatggtatctcagcacgcccagaaatccctgttggcaaggcttgctcagcactttcatctggagatatcataaagtttttgactggtgatttcagaatgagcaaggcaagatcgaatgatctattctg

SEQ ID NO: 37699 - DNA, 265 bp, Zea mays
ccaaaatggtgggtctggatatggttcaggatcagggtcagggtcggggtcaagtacatacaatcagggagggaattattcaggttatggagaatcttctaatgctggtggtactggtgggggtgggggtggtggacaagctggaggttattggaattccaacgctcaaggatccggtagtggcactggttctggttctagctatgctaacaggtattgggatggatcaagtgaaggaggtgcaaatgctaatggcaatggcggt

SEQ ID NO: 37700 - DNA, 267 bp, Zea mays
cggacgcgtgggctgatgttgctttagcatggtcagttgcacttggttcccccttcacgtttgctactactataggaacaggagtacaagagtgatatctttggagagcgaggcatcttgctgggtgctgtccatggtatcgtggaggctctgtttaggaggtacacagaacaaggaatggatgaagagtcggcctacaaaaacactgtcgagggcataactgggatcatctcgaaaaccatctcaaagaaagggatgcttgaagtg

SEQ ID NO: 37701 - DNA, 266 bp, Zea mays
atcacggtggccaccgtgatcgggtacaagcaccagacggacgcgtcggcgtcgggcgccgaccggcgtgcggcggcgtgggcgtgctggccatcgcctgggccttcggcggcatgatcttcgtcctcgtctactgcaccgccggcatctcggggggccacatcaaccccgccgtcaccttcggcctcttcctggcgcgcaaggtctccctggtgcgcgcgctgctctacatcgtggcgcagtgcctcggcgccatctgcggcgtc

SEQ ID NO: 37702 - DNA, 268 bp, Zea mays
gcttcctccaaagccactccaaacccccgcttccagaaccttctcgaaactctccgcctcctcctctactcgctccgatggcgaaggaaccgatgcgcgtgctcgtcactggcgccgcagggcaaattggatatgctcttgttcccatgattgctaggggagttatgcttggtgcagaccagcctgttattctgcacatgcttgatattccgccagcagctgaagcccttaatggtgttaagatggagttggttgatgctgcatttcc

SEQ ID NO: 37703 - DNA, 270 bp, Zea mays
gcggcgtgcacggtggcctccgctggagtctacccccgcagttttcaaccagttcgtgtggtcgctaggtgtcccggaggacgacgtggagttccacgacgtgtacgggctcgacgccgacgcgttggatatggttccccagcctgtgctcgccgttgttctctgcttccccgatccaccacaggatgcaagttacccttcagaacaactcttaatttctggagaaaaggtgaacaattacggtccttgtagatgcctccccctcctcat

SEQ ID NO: 37704 - DNA, 271 bp, Zea mays
ataaattccaccactccccttcgccgcttcctgtcgcgccgccgctcctctcacaacccagtcgctcaaaaccctagagctctcgcctgctcgcctccgccgccggagcgagctccccatcttcatccgtcaaccatggcgacccagatcagcaagaagaagaagttcgtcagcgacggtgttttctacgccgagctcaatgagatgctgacgcgggagctggcggaggatggctactctggcgtggaggtgcgcgtcacgccgatgcgca

SEQ ID NO: 37705 - DNA, 292 bp, Zea mays
accacgcgtccgcgacgctgggcacgagaagaagaagaaacaagccataccatagcacacaccaaaggttactcagtcacatggcaacataccagcacgggctgtctcgtcttgctctgccttgcgtctcccctcctcctccttcccagtgcggtggtccttggccacccatggggtgtcggcggcggcggcttgtccccacagttctacgaccactcgtgtcccatggcggagaagattgtgcagtccgttgtggcgcaggctgtggccaaggagaccaggatggcggcgt

SEQ ID NO: 37706 - DNA, 330 bp, Zea mays
ctagctatgagacggtcggaattccgggtcaccacgcgtccgggacggtgggctttgacaagggaaaaaaaccaggtctgtgtgtgtgtgtgagagagagagaggccacaggcaactcaggcgacgcgatggcgatggcggcgctgcgacgcgaggggaggcgcctcatcctctcctccaccgtccccaacccgtctctggcggctgcttcctctgcggtgacgcgatcctccgccgtctcgcaaccggagatggctccacttggtgcacggtctatttcaactcaaatcgtgaggaaccggatgaagagtgtcaggaatatccagaaga

SEQ ID NO: 37707 - DNA, 288 bp, Zea mays
ttcacattctggtgttactaatacttgtcagctgggaagcactaccctgatggacggccggaccatcaatgttattgatacaccagggttatttgatatgagcattgcatcagacgatgctggtaaagagattgttaaatgtatgaacatggctaaagatgggatacatgcagttctaatggtttttagtggcacatctcggttttctcgagaggatgcaagtacaattgagactattaaggtcttttttggagaaaagattgttgaccacatggttttagtttttac

SEQ ID NO: 37708 - DNA, 294 bp, Zea mays
cggacgcgtgggaaacggtagaaattactctgcatcatgaagatttttacacacaggaggaatttgtacgacggaataccacagaactggtggtgcgaagacaccagggacaaggaagccgttctcagaataaacataacgggcaacagctcaaccaaaaccaagacgcacaccatcaacgtccaacatcgctgcccaccaccatcggcgccaccgccggcgatgaaccaacaaccggtggctgccgcgccaccaagcaatgtccttgccagcgagggacactcatcaaagcgt

SEQ ID NO: 37709 - DNA, 288 bp, Zea mays
cgccgctcccctccgcggcctccgccgagcccctcttcgtcgaggccaagctccgccagcacatgcgggccgaggagcgccccgcgcgcggcgccgtgcccaggatcgcctacctcgtctccggctccgcgggggacggagccgcgctgcgccggacgctcagggcgctctaccacccggcaaacacgtacgtcgtgcacctcgacctcgaggctcccgccgccgagcgcgccgagctcgccgctgccgtccgcgccgaccccgtctacgccaggttccgcaacgtca

SEQ ID NO: 37710 - DNA, 298 bp, Zea mays
ctctcgttgcctcatcccgtggcaactttacgatggcctgtacttgatagaggttgatcgtatcctgcggcctggaggctattggattttgtctgggccaccaatcaactggaagaaacactggaaggggtgggacaggactaaagaagacctggatgcagagcagaaagccattgaggcagttgccaggagcctctgctggaagaagatcaaggaggcgggcgacattgctatctggcagaagcctactaaccacattcattgcaaggccatccacaaagttagcaagtccataccc

SEQ ID NO: 37711 - DNA, 303 bp, Zea mays
atcacctgagtagatttgcaacttgcagttaatcaactatcaacaattaatgcatttaatccggggggaattttcgattttccttatcgagtagagatctgactctctcttaaacagacatttactgaagaagatcgtcatgtttctgttcttccaaggtgtgccccccaagccctaagaaatacggcaaaggggactggaggaacatatcgcgcaacttcgtccagaccagaacgcctactcaggtggccagccacgcgcagaagtacttcatcaggctcaactccggcggcaacgacaaga

SEQ ID NO: 37712 - DNA, 290 bp, Zea mays
atcgaattcgccatgggcatggctgctccgcgcgcgccgctgcctctcccccaactgctgctcctcctcgttgctgcgctcctcgccgccgctcccctccctagggcggccggggcggacgagttcgacgtccgccgccacctctccaccgtcaccaggtatgatgtggccagggagtccagtagtgtcatctccatgccgtcaatcccagacgggtgccgtgtcattcacctcaatctagtggcaagacatgggactcgtgctcctaccaagaagcgcatcaaggagct

SEQ ID NO: 37713 - DNA, 290 bp, Zea mays
gtcggccgcagccaccgccgccgccgccttccaccacgagccgggcagccgcgtccgggaggagtgcaagtccaaggtgtcccggcgatacgtccacgccgacccctctgacctcagcctcgcggtgaaggacgggtaccaatggcggaagtacgggcagaaggtgaccaaggacaacccctgcccgcgcgcctacttccggtgctccttcgcgccgtcgtgcccggtgaacaagaacgtgcagcgcacgccgacgacaggacgatcttggtggccacgtacgagggcga

SEQ ID NO: 37714 - DNA, 287 bp, Zea mays
ggggaccaggctcgggcgctcggctccgtcctcccccacatccacctgcccgtttctcgctccgaagcttctcctctcgcgtctcgtaccaggtcaggttggagggagggagacgggagaaccagggagcggaggcgtgcgtgctgcggcctgcggcctgcaggaccagagatcggggactgagctagggtctgggactgggaggcggagatgtcgacgccggcgaggaagcgcctgatgcgggacttcaagcggttgcagcaggacccgcccgccggcatcagcgg

SEQ ID NO: 37715 - DNA, 289 bp, Zea mays
ggattctagaaaagtcaacatgtcatatgggtctaatggtgaggacgacccaagaaaggccaccacatcatatgggtcccatggtgagtatgaatcaaataaggccacaatgtcatatgggttccaaggcatggaagatataaggaaggccaccacatcatatggaatacaagatgaagagtatccaaggaaggccaccacatcatatggagttcaaggtgaggaggacccaaagaaagctaccatgtcatatgggtcacaagatgacgaggaatctagaaaaatcagc

SEQ ID NO: 37716 - DNA, 289 bp, Zea mays
cccacgcgtccgcgacgcgtgggcgctactactcatcactcgccaacgtgcagagatcagggaagcggcactccatccactagactgaccgatcatggcgaaggtccacctctacgtcgccgcggcctgcgccgtcgtcctcgcgctcgccaccccggccctcgccggtgaccccgacatgctgcaggacgtctgcccggctgactacgcctccccggtgaagctgaacgggttcgcgtgcaaggcgaacttttcggcggacgacttcttcttcgacgggctgaggaac

SEQ ID NO: 37717 - DNA, 285 bp, Zea mays
aaaatagccacctttgaaaaggctgcaggttttcaggcattgatccagtacactgatgcggctactgcttcagctgctaaagaatccttagatggaaggagcatcccaagttacttgcatccggagcatgtaacatcctgctgcctgcgaatttctttttctgcacataaggatttgaacatcaagtttcagtcgaaccgcagcagggattataataatccgtatcttccaatcaattattctgccatggatggtacattacagcctgctgttggagctgacgga

SEQ ID NO: 37718 - DNA, 283 bp, Zea mays
cgcatccgcagcctctcgagctctactccatcccctcgatctcgaagcgcacagcagcagtcaggcggccatggacgcgagcgcaccggagccggcgggaaggcgaagaagggcgcggccgggcgcaaggccggcgggccgaggaagaagtcggtgacgaggtccgtcaaggccgggctgcagtttcccgtcggccgcatcgggcggtacctgaagaagggccggtacgcgcacgcgtcggcacgggcgaccccgtctacctggccgacgtcctcgagtacct

SEQ ID NO: 37719 - DNA, 286 bp, Zea mays
ggccgctccgccaccccgcactcgcctgtcgcctcttctcgctttcgccaccggggcagcgctccggtgagtggcgaagggcccctcccggctcccgcttccctctgccatggctggacctgctgttctcaatgagcgtatcctttcttccatgtcccagaaacatgttgctgctcaaccatagcatgatttggagataggaccaggggctcctgaattcttcaattgtgtggttgagattcctagaggcagcaaggttaagtacgagttggacaaggcatctggt

SEQ ID NO: 37720 - DNA, 293 bp, Zea mays
agctcgtcggcgccaagttctttggcctggggtacgaggccgcgcacggcgggggcgcggtggacgagacggactccaggtccccgctcgataccaacggccacggcacgcacacctcgtccacggcagcgggctccgccgtgccgaacgccgccttcttcgactacgccaaaggcacagccatcggcatggctccgcgcgcccgcatcgctgcctacaaggcgtgctgggcgagggggtgcacgtcctcggacatcctcatggcgttcgacgaggccatcaaggacggggtc

SEQ ID NO: 37721 - DNA, 295 bp, Zea mays
ccatcatcaccagctagcacctcctttcccacgactcccgagctagcgctctgcgtgtggcgcgcggcagcatggcgactgcgaacgggagcagcaaggggtcgttcgaggtgcccaaggtggaggtcaggttcaccaagctcttcatcgacggcaagttcgtcgacgccgtctccggcaagacgttcgagacccgggaccctcgcaccggcgaagtgatcgcctacatcgcggagggagacaaggccgacgtcgacctcgccgtcaacgccgcccgggacgccttcgacaacgg

SEQ ID NO: 37722 - DNA, 267 bp, Zea mays
gggagactgatgcttttatggttgctagaggtgatctgggaatggagattccagttgagaagattttccttgcgcagaagatgatgatctacaagtgcaacattgctggcaaacctgttgttactgctacccagatgctcgagtcgatgatcaaatctcctcggccgacacgtgctgaggccactgatgttgcaaatgccgttcttgatggaaccgactgtgtcatgctcagcggcgagagtgccgctggagcctaccccgaggtgg

SEQ ID NO: 37723 - DNA, 267 bp, Zea mays
atcccttccccatcccgatgagcgtgtagagtatgagttctggacaaacagtaatgatgaatgtggtcctaaatgtgatatgcaaatggacttcgtgaggagctttagaggaactgcacaaattcttgagaaaaagggttacactcagtttactcctcattatatcacatggtattgtccagaagcttttgttgatagcaagcaatgcaaatcacagtgcatcaatcatgggagatattgtgcaccagacccagatcaggattttag

SEQ ID NO: 37724 - DNA, 262 bp, Zea mays
ggaccctgaacccggacgaggcggactggttctacaccccggtctacaccacgtgcgacctcacgccgtggggccatcccctcaccgtcaagtccccgcggatgatgaggagcgccatccagtacgtctccaagcgctggccctactggaacaggacggagggggccgaccatttcttcgtcactccacatgactttggagcgtgcttctacttccaggaagagaaggccatccagcgaggtgtcctcccggtgctgcgccg

SEQ ID NO: 37725 - DNA, 263 bp, Zea mays
atttcagccgccgccgcgcgtacaagcaggagcagcaaggatgccggctggccacgggctgcgctcgcggacgcgcgacctgttcgcgcgccccttccgcaagaagggctacatcccgctcaccacctacctccgcacctacaagatcggcgactacgtcgacgtcaaggtgaacggcgccgtccacaaggggatgccgcacaagttttaccacggccgcaccggtcgcgtctggaacgtcaccaagcgcgccatcggcgtcg

SEQ ID NO: 37726 - DNA, 263 bp, Zea mays
cgcttccaagaggtgaattcgcttcaaaagcacttagccacagcttcactgtgttcgcgaaagatatggttgaggcgatatcattctcaaatctgtatgcccctgagcatttgatcatcaacgtaaaggatgctgagcagtgggaggagttcatcgaaaacgcagggtcagttttcttgggccaatggaccccagagagcgtgggcgattatgcgagcgggacgaaccatgtccttccgacctatggttacgcaaggatgtac

SEQ ID NO: 37727 - DNA, 260 bp, Zea mays
cggacgcgtggcgagacgcgtgggttattctggccactttccctctgcttgtgcttgccaactttgatcagcaactttacaatgaagggctttgctggtgacacggcaaaggcacatgccaggagcagtatggttgcaggtgaagcagtgagcaatatccgcaccgtagcggcgttcaacgctcaaagcaagatcctgtcactcttcagccatgaactgcgtgtgccagagcagcaaatcctccgccgcagccagacatc

SEQ ID NO: 37728 - DNA, 258 bp, Zea mays
gttgggtttttcgatgacaagctgggggcgctctgcatgcaatggttggaagacaaggtcttttcaatcagagatgctgccgctaacaacttgaagcgccttgcagaagagtctggtccagagtgggcaatgcagcatataatccctcaggtgctggagaagatcaacaacccacactatttatatcgcatgacgattctgcaggcaatctccttgctagctcctgtcatgggtgcagagatcacctgtcaaaagctg

SEQ ID NO: 37729 - DNA, 257 bp, Zea mays
ggacgctggtgcgtggttctcttcctgcgacggaagcaaacactgcccgagacatagacagcgagacgtcgagatggccgacggggaggacgccgccgccgcgcgccgccgggccgccatcacagactaccgcaagaagctgctcaactgcagggagctagagtcgcgcgtcggcaccgtgagagaaagccttaaaactgcaaagaaggattttaccaagactgaggacgacttaaagtctctgcagagtgtggggc

SEQ ID NO: 37730 - DNA, 260 bp, Zea mays
gctacttcggcaacgtgatcttcacggcgacgcgctggccaacgccggcacggtgacggccggggtggcagagggcgcgtccgtgatccaggccgcgctggaccggatggacgacgggtactgccggtcagcgctggactacctggagctgcagccggacctgtcggcgctggtccgcggggcgcacacgttccggtgccccaacctggggctcaccagctgggtgcgcctgcccatccacgacgcggacttcgggtggg

SEQ ID NO: 37731 - DNA, 257 bp, Zea mays
caagctcttccccacgcgctcgcacaccgtcgcggctcagggaggcataaatgctgcacttggaaacatgagtgaagatgactggaggtggcatatgtatgacactgttaagggaagcgattggctgggtgaccaggattctattcagtatatgtgcagagaggcaccaaaagctgttatagagcttgagaactatggactaccattttcaagaactgaagagggaaagatataccaacgtgcctttggagggcaga

SEQ ID NO: 37732 - DNA, 253 bp, Zea mays
gctgtccggttctttcctgctcgcggaggatggtgacactcgcagcaggactggtggcttgagcgtcgcgctcgcgggatctgacggccgagttcttggagggtgtgtcgctggaatgcttatggctgcaactcctgtccaggtcgtggtggctagttttatcgcagaggggaagaaatctaagccagccgaagcgcggaaggtcgaaccgatggctgctcccccgccgccgccgccacagatggctgccttc

SEQ ID NO: 37733 - DNA, 254 bp, Zea mays
gcgcgtgtatgcttcgattcgttctgtgcatctttctgcagtggattctgcatgattgggatgatgcgaagtgcattaagataatggaacggtgcaaggaagcaatcggtggcaaagaaaggggagggaaagtcattataatcgacaccgtgattggatctaggccaaatgaggaagatatgatacgcagggaggctcaagtcctgtgtgatctaggtatgatgacaacgtcgaacggagctgagcgagaggag

SEQ ID NO: 37734 - DNA, 254 bp, Zea mays
cccacgcgtccgattgacggcaagcccgcagtcggattgtcatggggctttttgggaagactgttcctaagacagcagagaacttccgagctctttgcacaggagagaaaggaattggcaagagtggcaaagctctccactacaagggaagtacattccacagaatcattcccagcttcatgctccaaggaggtgacttcactcttggggatgggaggggtggtgaatctatctatggcatgaagtttgctgat

SEQ ID NO: 37735 - DNA, 253 bp, Zea mays
cctcttcgaccggccgcagcccaactcccccaccgtctacgactggctctacagcgacgagaccaggagcaaccaccgctagatcgggcgagatggatggacagtgaagaggccatgtttgctggtccttgtggttatctaaaacgcacgcatgctctattatagctagtcatcactatatatatacttgtgtttgtgtattgttgttcttgttctgctggtgtctccgccgtttaatttgacctatgttatg

SEQ ID NO: 37736 - DNA, 259 bp, Zea mays
cccacgcgtccgagcaggcagatcagatacatccatccattcgcggaccggaaggaaaggaaagggttgaactatgagcgccgtggcggtttcgtcgtcgctgaacccggacgcgccgctcttcatcccggcggcgctgctgcaggtggaggacttctcgccgcagtggtgggacctcatcaccaccactgcctggttccgcgaccactggtcccgcgagcgcgcccacctggacgagatggccgagcagatcgacgcg

SEQ ID NO: 37737 - DNA, 259 bp, Zea mays
attttgaattatgctaatcagctctgtgagcgtctccctagccccaatggcgagtcaactgttgattgccatcagatctcaaagatgccaaatcttgcattcaccatagcaaacaagactttcaccttaacaccagagcagtacatagtgaagctggagcaagcaggacaaactatctgcatcagtgggtttatggcatttgacgtaccgcctcctcgtggtcctctctggatacttggtgatgtttttatgggtgcct

SEQ ID NO: 37738 - DNA, 257 bp, Zea mays
gtcaaggctgaagcatgaaaatgttgtcgagttgcttggttactgtgctgatgggacactccgtgtccttgcttatgagttcgctacaatgggttcccttcatgatatgcttcacggaaggaaaggggttaaaggggctcaacccggtccagtcttatcgtggtcgcaacgtgtgaagatagcggttggggcagcgaaaggcctcgagtatcttcatgagaaagcgcaccccatatcatacaccgagacatcaagtc

SEQ ID NO: 37739 - DNA, 257 bp, Zea mays
cccacgcgtccgcggacgcgtgggcgaacccaaccgaagcgagagctgagcaaggcagaggcggcgtgaccggcgatggagcggctgcagcggctctttggcgcctccggcatggggcagccgccgacggactcgccgctgctcgattcctccgagcaggtctacatctcctccctagcgcttctcaagatgctcaagcacgggagggctggggtgcccatggaggtcatgggcctcatgctcggcgagttcgtcga

SEQ ID NO: 37740 - DNA, 253 bp, Zea mays
gaaaatgccgatcaataggatcgccctggggagccaccaggaggtgtaccacccgggcgccctcaaggcggcgttcgctgagttcatctccaccctcatcttcgtcttcgccggccagggctccggcatggccttcagcaagctgaccggcggcggcccgacgaccccggcgggcctgatcgcggcggcggtggcgcacgcgttcgcgctgttcgtggcggtgtcggtgggcgcgaacatctccggcgggcac

SEQ ID NO: 37741 - DNA, 251 bp, Zea mays
accacgcgtccgggacgcgtgggcaggacccccagaggcggccgtggcggcggtggcaggggtggccgcggcggtggcatgaagggcgggagcaaggccgtcgtggtggcgcacaagcacgccggtgtcttcatctccaagtccaaggaggatgcgctctgcaccaagaacatggtcccgggagagtccgtgtacggagagaagcgtgtctccgttcagaatgaggatggaacaaaagtcgaatacagggt

SEQ ID NO: 37742 - DNA, 252 bp, Zea mays
agcgccctccgatggggcttcgtccgcaaggtctacggcatcctcgctgcgcactgctcctcaccaccgccgtctccgccctcaccgttctccaccccaccctcaacgccacgctctccgactccccgggcctcgcgctcgtgctcgccgtcctgcccttcatcctgatgatcccattgtaccattatcagcacaagcacccacacaatttcgttttcctgggtctgttcacgttgtgcttgagcttcagca

SEQ ID NO: 37743 - DNA, 252 bp, Zea mays
cccacgcgtccgcccacgcgtccgcccacgcgtccgcccacgcgtccgccgcagttccccgaccacaccggtcctccgagcccaggagcagctccgcgccaggaggaagtttgttcttttaacaatgtcgagggaggagaatgtttacatggccaagttggctgagcaggctgaaaggtatgaggagatggttgagtatatggagaaggtggctaagactgtagatgtggaagagctcactgttgaggagcg

SEQ ID NO: 37744 - DNA, 252 bp, Zea mays
gcccgaggtggccaactactggaagcaggtgatcaagatcaacgactaccagaagagccggttcgtgaaccgcgtcgtggcctccatgttcaacaccgtcgccggcaagaagatcgccgtcctcggcttcgccttcaagaaagacaccggtgacaccagggagaccccggccattgacgtctgcaagggcctgctgggcgacaaggcccagatcagcatctacgaccctcaggtgacggaggaccagatcca

SEQ ID NO: 37745 - DNA, 251 bp, Zea mays
cttctcgtccccctccggttcgggttcgggttcgtgaggttctccggggttcggtttcgtgggtgagcggatcgagatggcggcgtcggatgttgagtaccgctgcttcgtcggcggcctcgcctgggccacggacgaccactccctccacaacgccttcagcacctacggcgatgtcctcgattccaagatcatcctcgatcgggagacgcagaggtcccgcggcttcggcttcgtcgacttctccacgg

SEQ ID NO: 37746 - DNA, 256 bp, Zea mays
atagcctgcagccacgaactcccgttctccatttccagccatggcggtgtcgatcgagctcaccaaggagtacggctacgtcgtgctggtgctggtggcctatgtcttcctcaacctttggatgggcttccaggtcggcaaggcccgcagaaactacaaggtgttctaccccaccatgtacgccatcgagtcggagaacaaggacgccaagctcttcaactgcgtgcagagggggcaccagaactctctagagtgg

SEQ ID NO: 37747 - DNA, 276 bp, Zea mays
ggtgtacgcgcacaaggccgggctggacgtggccaagtggctggaggccatctccaccggcgcacggtaccaagtcgctggaactgtatgggaagcggatcctggagagggatatggcggctggcttctatgtccggcacttcgtcaaggacctcggtatctgcctgttggaatgccaggccatggggctgtcgtgcggggctcgcctcgcgcaacagctgtacgtgtcgctgatcgcgcacgcgagggcgggtcggtacacagcgttatatggcg

SEQ ID NO: 37748 - DNA, 290 bp, Zea mays
gacaaattcagcaaacaacaaacaagcaaaaggcacgaccaccaccgccggccgggaagcaagctcaaaccctaatcgccgtccgccggcgacgccagcacgatggcccgctacgaccgcgccatcaccgttttctcccccgacggccacctcttccaggtggagtacgctctcgaggccgtccgcaagggcaacgccgccgtgggcgtccgcggcacggacaccgtcgtcctcggcgtcgagaagaagtccacacccaagctccaggactccaggtccgtgcgcaagat

SEQ ID NO: 37749 - DNA, 288 bp, Zea mays
gacattcacaaaaggggtggaactattcttggatcatctcgaggaggtcatgacaccgtgaagatagttgacagcatccaagatcgtgacataaatcaggtctatgtaattggtggagatggtactcaaaggggtgctggagtgattttcgaagaagttagaagacgcggtctcaaagtttctgttgctggcattccaaagactattgacaatgacatccctgtaattgacaagtcatttggtttcgacacagcagtcgaggaggctcaacgtgcaataaatgctgct

SEQ ID NO: 37750 - DNA, 288 bp, Zea mays
tttctattgtccgaaaatgagtacgacaatgatgatgcatcattcgggtgcgcagaacggtagtcaatgtttctctttgtcaatggcatttcaaaatttctcttctcagaattaatgtagctagtatgggtatgggcaatgccgcacacttaaaactggtgctatagaccaccaggagctttgttttgtactcactccgtaccaaaatataattcgttttaaactaatcatatattcattaagtaacatatgaatgttgtattattatcattttaatgaatgtggaca

SEQ ID NO: 37751 - DNA, 286 bp, Zea mays
cccacgcgtccgcagcctgccagccagccgcctttcgaaaccgagcaccagggagcagacgcggtctctggaacccaggttccagcgagcaaaccatctaaccaggcgctgagaattctgtgcggaggaggcggatggcaatggtggcggcggcggaggggagcgggcgcagggacgccgaggcggagctcaacctgccgccagggttccggttccacccaacggatgaggagctcgtggtgtactatctctgcaggaaggtagcgcggcagcaggtgcccgtgcc

SEQ ID NO: 37752 - DNA, 284 bp, Zea mays
gttccagatattcaccaacggtgacatggtccacgccgtgagagccctcaagaggctgggcctggaggactgcttcgaggggatcatctgcttcgagaccctgaacccgccctgcccgccgcaggagaccaggagcccgagatcttcgacatcgccgaccacttcgcccgctccggcaccgccgacgagctgcccaagacccccgtgctgtgcaagcccaacgtggacgccatggaggaggcgctcaggatcgccaacgtcaacccgcacaaggcggtgagttt

SEQ ID NO: 37753 - DNA, 283 bp, Zea mays
tccagagatggcttaagcaccatgactactgctggttatgatgcccctgcagcaaggttggccaaaaggaagaggaagaatcaatacaggggtatccgccagcgcccttggggtaagtgggctgctgagatcagagatccccagaagggcgttcgtgtttggcttggtactttcaatagtcccgaggaagctgcaagagcttatgatgctgaagcgcgcaggattcgtggcaagaaggccaaggttaactttcctgatgcaccagcagttggtcagaagtgcc

SEQ ID NO: 37754 - DNA, 281 bp, Zea mays
ctcccaaggtccctttttttttctcgatctggaagcgccgcagtagcagccatggacgtgagcggacaggcggtaaggcgaagaagggcgcggcggggcgcaaggccggcgggccgacgaagaagtcggtgtcgcggtcctccagggccgggctgcagttccccgtcagccgcgtcgggcggtacctcaaaaagggccggtacgcgcagtagtaggcacgggtgcccccgtctacctcgccgccgtcctggagtacctcgcggccgaggtgctcgagctcg

SEQ ID NO: 37755 - DNA, 284 bp, Zea mays
ggacgcgtggcgagaagaagaagaaacaagccataccatagcacacaccaaaggttactcagtcacatggcaacatccagcacgggctgtctcgtcttgctctgccttgcgtctcccctcctcctccttcccagtgcggtggtccttggccacccatggggtgtcggcggcggcggcttgtccccacagttctacgaccactcgtgtcccatggcggagaagattgtgcagtccgttgtggcgcaggctgtggccaaggagaccaggatggcggcgtccttggt

SEQ ID NO: 37756 - DNA, 284 bp, Zea mays
cccacgcgtccgatgagttatttcagtgtggtcagttctgtgctgtcttcatcaatccctgtatcttccatacaggtctctttgtgcttcagccctcaatgaacgtttttaagaatatgctacatgagctatcggttggacgtgaaaacccagatggtgcagaccaaggctttcttgctagttatttcccggacttacttgatcagccaatgttccatccaccagctaatggtacaaaacttcagggtacttaccgcctccctctaggctaccagatggatgcg

SEQ ID NO: 37757 - DNA, 281 bp, Zea mays
cccacgcgtccgcccacgcgtccgcggacgcgtggtgaccatccgtcgcatgatgtggcgagggggcagaggttcgtgaaagaggtgtatgagacactaagggccagtccgcagtggaacgagactgccctgatcatcacatatgatgagcatggtggattctatgaccatgtacctacgccggtcgttggagtgccccagcctgatggaatagttgggcctgatccatactacttcaagttcgaacggcttggggtgcgcgttcccacctttctcatctc

SEQ ID NO: 37758 - DNA, 281 bp, Zea mays
ggacctgggagtggatgcaaaagagggcacaactactggggtatctgccaaggacaggggcaacacggtcatgactcttgcatctcctgactctaagcctgaggacctcaaccgccctggtcatattttccctttgaaatacagagaagggggtgttctgaaacgagctggacacaccgaggcatctgttgaccttgccatgttggctggattacctcctgttgctgtcctttgtgaaattgtggatgatgcagatggttctatggctcgcctaccaaagt

SEQ ID NO: 37759 - DNA, 280 bp, Zea mays
ggccggcaaggaccccaacaagcctaagagggctcccagcgctttcttcgtgatcatggaggaatttcgcaaggagttcaaggagaagaaccctaagaacaagtctgtcgctgcggtggggaaagctgctggcgacaggtggaaatccctgagcgagtcggacaaggctccctatgtagccaaggctaacaagctcaagctcgagtacaacaaggccatcgctgcctacaacaagggcgagagcactgcagctaagaaggctcctgccaaggaggaagag

SEQ ID NO: 37760 - DNA, 277 bp, Zea mays
gtttcggtaggaagggtgttgccatcaactttgtgacccgcgacgacgagcggatgctgttcgacatccagaagttctacaacgtgttgattgaggagctgcctgccaacgtcgctgaccttctgtgatcattttgaagaaaaacagaactaaaagaacggtggtgggggtgatctggtaaggcttggttttgccgaaatattgtgggggaggagtgataaggtcggtggggtttctatgttaaagtcgtggtctcgggcaatatgcgatttttctt

SEQ ID NO: 37761 - DNA, 278 bp, Zea mays
ggccttgatgaaaaattcctcgggtgcaatgaatgattctaggattcttgactttgttaactcaatatgcaatatccaatatggcatgattgattttgaagagttctctgctgcggccattagtgtatatcaaatggaaggcctggagacctgggaagaacatgctcaacaagcatatgaattgtttgacaaggagggcaaccgaccaattgtgattgaagaacttgcatcggaacttggacttggcccttcgatctcacttcatgttgttctcaaag

SEQ ID NO: 37762 - DNA, 276 bp, Zea mays
cccacgcgtccgctgagtatcagctgattgatatttctgaggatggatttgtgagccttcttacttcagatggcaacactaaggatgatcttagactcccaactgatgagactcttgtggcccagattaaggaagggttcgaaagcgggaaggatcttgttgtgactgtccagtctgcgatgggggaggagcagatctgcgcgttgaaggatgttggccccaagtaacttccttggctttggagacggaaccctactgtatctcaacttaaatcgg

SEQ ID NO: 37763 - DNA, 275 bp, Zea mays
aagaaaaccgctccaatccggaagctgaaaatagcagaagaatccagaggcgactccaggtttgtcggcgatgctgcgagcgggaggcaggcggatcctcgccccggggctccgtcggctcggcctgggcacaggcgcctccggcgaggcgggtcctgccgcggcggcggcgggggtgagggcgtaccacgagcgggtggtggaccactacaacaacccgcggaacgtaggttccttcgacaaggacgaccccaacgtcggcactgggttggtcg

SEQ ID NO: 37764 - DNA, 266 bp, Zea mays
cggacgcgtggcaagcgcttcgtctacggccactacgaggagcacctggaggccaagttctactcctccgccctcgccatggacctcgaggccgccaccagaggtgacactgatgagaagccctccgacgaggtggactgggagtccacctacttcatccagcaccaccccaagaccaacgtcgccgacttcccagagatcacgccgccgacacgagagacgctggacgcgtacgtcgcccagatggtgtccctcgcggacgtctg

SEQ ID NO: 37765 - DNA, 262 bp, Zea mays
gggtgatgagaatgaagcaaggaactatacatatagcctagaggttggtggtaatgggaggaaaatggtatgggaaggtactcctagaagcatccgtgacagccaccgcaaggtccgtgacagccatgatggcctcatcatccagaggaatatggcgctgttcttctctggtggtgacaggaaggagctgaagctgagggtgactgggcggatctggaaagagcagacgaaccccgatggagcctgcattcctaacctttgc

SEQ ID NO: 37766 - DNA, 260 bp, Zea mays
cttgggcgtacgcggacacagccccgatccgaatcgtcctcctcgcgagcctcgtcgatccaccactcccctatcctcgcttcaagatgcagatctttgtgaagaccctcaccggcaagactatcaccctcgaagtggagtcttctgacaccattgacaatgtcaaggctaagatccaagacaaggaaggcatccctcctgaccagcagcgggttatctttgccggcaagcagcttgaggacggccgcacacttgctgac

SEQ ID NO: 37767 - DNA, 261 bp, Zea mays
cccacgcgcgcgcatacgtgtcgttgtctcgagcttcttcgtcaaggtgctccagctgccatggcgctgggggatgaagtacttctgggacaccttgctggatgctgaccttgagagcgacgcactaggctggcagtacatttctgggtctctccctgatggccgtgagcttgaccgcatcgacaaccctcagtttgaagggtacaagtttgatccgcacggggagtacgtccggcgatggctaccggagctggcaaggct

SEQ ID NO: 37768 - DNA, 265 bp, Zea mays
aaaatcccctcgtctgtcccacgccaaagcacaagtctaatgcttggccctggtcgtggttgttcagcgaggcaggggttcgggggggtttctcgacttgtgtgaggtcttcttaatacaatgtccaaggctgtctcacttccgcacgttgagttttttttcatgcactagcagtacacattcctaatgtatatacttgtattgtgtacattcatttttgattgtccacagggtacttaagcctttttcgattttccatatataa

SEQ ID NO: 37769 - DNA, 254 bp, Zea mays
cggacgctggtctcctccccctcttaccaagtcctcctcgggttagggttccttacggttttgtggacgcgcgatggcggcggctgacgtggggtagcgctgcttcctccgctggctttcctgggccaccagcaacgagtcgctggacgatgccgtcgccttctacggcgagatcctctactcgaaggtcatcaccgaccgggagatcgggaggtctcgcggcttcggcttcgttaccttctcctccgagaact

SEQ ID NO: 37770 - DNA, 255 bp, Zea mays
gaagcgcctgataccgtcactggagacattgtattcgtcctccagcagaaggaccactccaagttcaaaagaaagggtgaagatctcttttatgagcacaccctgtctctgaccgaagctctatgtgggttccaatttgttcttacacatctggacaacaggcagcttctgatcaaatcaaaccccggcgaagttgttaaacctgaccaattcaaggcgataaacgacgaggggatgcctatttaccagaggccc

SEQ ID NO: 37771 - DNA, 256 bp, Zea mays
cggacgcgtggcactcactcactcactcacacagcaaatacccacagtccacactccacagcaagacccgaagatgttcggaaacatcggaaagatcccgatcattggcgacctgacgggcagcaacaagaatgcgcacctcaagggcaacctggtgctcatgcgcaagaccgtgctcggcttcgacgtcaccagcatcgccggctccctcatggacggcctcggcgagttcctcggccgcggcgtcacctgccaa

SEQ ID NO: 37772 - DNA, 259 bp, Zea mays
cccacgcgtccgcccacgcgtccgcccacgcgtccgcccacgcgtccgttttgctcggaacgcacacttgccgactacaacatccagaaggagagcaccctccaccttgttctccgcctcaggggaggcatgcagatcttcgtcaagaccctcactggaaagactatcaccctcgaggtggagtcttctgacaccatcgacaacgtcaaggccaagatccaggacaaggagggcatccctccagaccagcagcggctca

SEQ ID NO: 37773 - DNA, 257 bp, Zea mays
cacataaaattcgaatccgaatcctgaacaaccaaggaagtagaagaaaaaaaattacaaacaaacagtttctacgctcagcacagctattggcagagcagcaccaagattagtaaaataagtattgtccgccgctaaacaccgttacaaaatttggctcggctcccggcactccacgtcaccaccaccatctacaaccatctacagctcgtcgtggtcgtcgtcaacaccgccgtcagcgtcacgatcaccgccag

SEQ ID NO: 37774 - DNA, 250 bp, Zea mays
ggacctgggtcagattgttgattatgaaggggaatagaagagtattttgctctggaggtgataatgctcaatgtgcccggtgtttatataatggaaactggaaatgggtcgatgatttcttccaaaatgaatatttgctaaattacatcattgcgacttacataaaacctcaggtttccattcttagtggaattgtcatgggtggaggagctggtgtttcaatacatggaagatttcgagttgccactga

SEQ ID NO: 37775 - DNA, 251 bp, Zea mays
ggagcaaaggtggtgaagaaggccgcggcggggcgtcgcggcgggggcggccccaagaagaagccggtctctcgctccgtgaaggccggcctccagttccccgtaggccgtatcggccgctacctcaagcagggtcgctactcccagcgtgtcggcaccggcgcccccgtctacctcgctgccgtcctcgagtacctcgccgccgagctcctcgagttggcggggaacgcagcgcgggacaacaagaagaa

SEQ ID NO: 37776 - DNA, 248 bp, Zea mays
ccagattcatcgtctaagcaaggtgatgccatcgaaactggtggcatcatcaggttgcaacacatgaggacacggaggtggttgcacagtcacctgcacgcttcaccgttgtctggtaaccttgaggttagctgattcggcggggatgaattgtcagatagtggtgaccattggaggctagaaattgaaggaagtggaaaagtatggaaaagagatcaaaaggtgcgacttagacatgttgacaccgg

SEQ ID NO: 37777 - DNA, 250 bp, Zea mays
cccacgcgtccggcgctctgcgctctcatcctcgcgtccgtggaaggtcgtctcgacatggcctccgagacggagacgttcgccttccaggcggagatcaaccagctgctatcgctcatcatcaacaccttctactccaacaaggagatcttccttagggagctcatttcaaactcctccgatgccttggataagatcaggttcgagagtttgacggacaagagcaagctggatgcccagccggagctgt

SEQ ID NO: 37778 - DNA, 243 bp, Zea mays
ccacgcgtccgccacgcgtccgccacgcgtccgccacgcgtccgctacgcgtccgcggacgctggcccgttgtctgcaacctttggtgtcgtgtttgccgatgtgcttggcttgttttttccttggaggcttcttgcgttaataggaaccttgccctgcctactgttgatacctggcctgttcttcattccggaatctccaagatggctggcaaggatgaatatgatggatgagtgcgaggct

SEQ ID NO: 37779 - DNA, 252 bp, Zea mays
cccacgcgtccggacggcgtgttcaacgcgtggtgtgggacgtggtggtggagccgtcgagccagggcctcgggctgggacgcgccgtcatggagcgcctcgtcgacgagctgcggcgcgacggcgtggccaacatcgtgctctacgccgagacgcgcgtggtggggttctaccgcctgctggacttcgccatggaccccgacggcatcagggggatggcatactaccgcaagtccgctactaccgccgctt

SEQ ID NO: 37780 - DNA, 258 bp, Zea mays
gagctaagctaagccgagctaagaagcacagcaagtctcaccagactagcggctagcgcgagaatggccaaggacatcgaggccgcggcggcgcacgagggcaaggactactcggacccgcccccggcgccgctggtggacgcggaggagctgaccaagtggtcgctgtaccgcgcggtgatcgccgagttcgtggccacgctgctcttcctctacatcacggtggccacggtgatcgggtacaagcaccagacggac

SEQ ID NO: 37781 - DNA, 287 bp, Zea mays
gaactcttggggcagcagctggggcgagtccggctacgtcaggatggagcgcaacatcaaggcgtccagcggcaagtgtggtatcgccgttgagccgtcgtaccctctgaagaagggcgccatccccccgaaccctgggccgaccccgccttcccccaccccgccgcccaccgtctgcgacaactactactcgtgccccgacagcaccacctgctgctgcatctacgagtacggcaagtactgcttcgcctggggctgctgccgctcgaggggccacctgctgcgac

SEQ ID NO: 37782 - DNA, 287 bp, Zea mays
cccacgcgtccgcccacgcgtccgttcagaattggagaaacttgtaaaggatgcctccactacggttgtggatggaaaagaaggtgctcctctacaaagcaccacactcctcttgaaatgtttgaaaattttggagaatgccacatttctaagtgacaacaacaagacccatttgctcagcatgagtcgaaaattgagccctagatgccgctcactttcttttgttggtgtcattctcaacattgttgagttactatcagctctctctctccttcagaaacctttca

SEQ ID NO: 37783 - DNA, 291 bp, Zea mays
cacgccatggtcgctatctcacagcctctgccatgttccgtggcaagatgagcactaaggaggttgatgagcaaatgattaatgtccagaacaagaactcgtcctactttgtggagtggatccccaacaacgtcaagtccagtgtttgtgatatccctccgcgtggcctctccatggcctccaccttcattggcaactccacgtccatccaggagatgttccgccgtgtgagcgagcagttcactgctatgttcaggaggaaggctttcttgcattggtacactggtgagg

SEQ ID NO: 37784 - DNA, 296 bp, Zea mays
gaacagcggaggcagagggtgagctcggccggcggcgagaacccggtcgacgacggccgtagctggaggaagtacggccagaaggagattctcggagccaagcacccaaggttagcacatctatctcactcaaacacgtattgttgatttggattggaaccgcgctctgtctgacgacctccgtcgtgccaaacctcgcaggggctactaccgctgctcgcaccgctactcgcaggggtgccaggcgacgaagcaggtgcagcgcacggacgaggacccgacgctgtacgacgtca

SEQ ID NO: 37785 - DNA, 299 bp, Zea mays
gtgaattagctatagccagccgtgtgtcgaacacgacacgcgataatggcactcatgcaggagagcagccaggacttgctcgaagcgcacgacgaactcttccaccactgcctgtgcttcgccaaatcgctcgcgctcgccgtggcgcaggacctccgcatccccgacgcgatccaccaccacggcggcggcgccaccctcccccagatcctcgccgagaccgcgctccacccaagcaagcttcgcgccctacgccgcctcatgcgcgtgctcaccgtctcgggcgtcttcaccgtcca

SEQ ID NO: 37786 - DNA, 284 bp, Zea mays
gacaagaagctggagcgcgagttcgcgtcggaggtggacatcctcggccacatccggcacagcaacatcgtgaagctcctctgctgcctctcccgcgcggagaccaagctactcgtctacgagttcatgggcaacggcagcctggaccagtggctgcacggccacagcaggctggccgggaccgggactgccatggccagggccccgtcggtccggcgtgagccgctggactggccgacgagggtcaaggtggccgtcggcgccgcgcgcgggctgtactacat

SEQ ID NO: 37787 - DNA, 286 bp, Zea mays
gtcgagaacgttgaggagaaccgccgtgccctccgtgagctcctattctgctgccctggtgctctccagtacatcagcggtgtgatcctcttcgaggagaccctgtaccagaagaccaaggatggcaagccttttgttgatgtcctcaaggagggaggcgtcctccctggcatcaaggttgacaagggcaccattgaggttgttggcactgataaggagaccaccacccaaggccatgacgaccttggcaagcgttgcgccaagtactacgaggcaggtgcccgct

SEQ ID NO: 37788 - DNA, 286 bp, Zea mays
gcactacaagtccgtgattgcgcaacttggtcagaaaggccggtaccgcaacctactcgatatgaatgcaaagtttggcggcttcgctgcggcattggtgaatgatcccttgtgggtcatgaacatggtccctactgtggggaactcaacaacccttggggcaatatacgagcggggcctcattggaagctaccaggactggtgtgagggcatgtccacttatccccggacctacgacctcattcatgcggattcactgtttacactgtacaatggcagatgtgag

SEQ ID NO: 37789 - DNA, 287 bp, Zea mays
agaggctctaccagatgcaggagaccggcgccctcctcttccctgccattaacgtcaacgattccgtcaccaagagcaagtttgacaacctgtatggttgccgccactcactccctgatggtctgatgagggccaccgacgttatgatcgccggtaaggttgccgtggtctgcggatacggtgatgttggcaagggttgtgccgctgcactcaagcaggctggtgcccgtgtcattgtgaccgagatcgaccccatctgcgccctccaggctctgatggagggtctt

SEQ ID NO: 37790 - DNA, 291 bp, Zea mays
  unsure (1)..(291): unsure at all n locations
ctgcctctccgcgaggccgacgcgctcccgttctccaccgggcgcttcgccgacatcctcgccatgttcgcgccgacgacatccgacgccatgggcgaagagatacggtcgacgctcgacacctgcgagaacacgcgcccgctccccggcgagaaggccgcctgcgccacctccctcgagtctctcgccaggatacccgccgtcctcctcgggacacgcaacgtccgcgctttctccggcgacatgcccaccgatcctgccggcacgtcggcgaacgnggggcggtataac

SEQ ID NO: 37791 - DNA, 290 bp, Zea mays
ggaccctgagatttgggatagacctgaaagcttcgtgccagagaggttcataggtgagaacagtgaaggcaagatgttcaacccatttggtatgggaaggagacgatgcccgggggagaatttgggcacgcagatggtaggacttgctctggggactatgatccagtgtttcaattgggaaagagtaggagatgatcttgttgacatgaccgagggagctggattaaccatacccaaaaaaagtgccactggaggccttctatgagccccgtgcttctatggcgaatctg

SEQ ID NO: 37792 - DNA, 327 bp, Zea mays
ttagccgcagtacggtcggaatccgggtcacaccggtccgggacgctggcttcatcctacgcgagggcgaaacccagaaaccctctccctcctgtactccggacgacacatccaggggcgatgacgctgggtagctccggcgccggatcgagcgtcgtcgttcctcgaaacttcaggctattagaggagctcgagcgtggagagaagggcattggtgatgggacagtgagctatggaatggatgatgctgatgacatctacatgcggtcatggactggtaccatcattggccctcacaatactgtacatgagggtcgcatctaccag

SEQ ID NO: 37793 - DNA, 266 bp, Zea mays
aggggggcgtggagggggccaagccgcccgacgcgcacgccttcctgcagcacgtcgccacgttcgccgttgcggagaaggaggacaggccgctgtaccgcagattgttgtcagcttctcctggcgccgacagatgccacgactcgccctcactctcggccttgaggaagaaatggctgatatcattgaggaactaattgctaagaggcagcagcttgatgctgtgaattttgcttacgaggctgggcttcaggagaagttccctc

SEQ ID NO: 37794 - DNA, 275 bp, Zea mays
ctcactgctcgttgccggctgcccccgcggccccggccagtccatcccctcgctcgctccccaactccagcaggcagatcagatacatccatccattcgcggaccggaaggaaaggaagggttgaactatgagcgccgtggcggtttcgtcgtcgctgaacccggacgcgccgctcttcatcccggcggcgctgctgcaggtggaggacttctcgccgcagtggtgggacctcatcaccaccactgcctggttccgcgaccactggtcccgcgag

SEQ ID NO: 37795 - DNA, 277 bp, Zea mays
caaccacttactctcgtgcgctctccgtgggagcgaggactcgcggccggcggcagcggcaggttctcctagatctccggcatcatcagtaacaaatggctgacggtgaggacattcagccccttgtttgtgacaatggaactggcatggtcaaggctggttttgctggtgacgatgcgccaagggctgttttcccaagcattgtcggacgcccccgtcacactggtgtgatggttggcatggggcagaaggatgcgtatgttggtgacgaggccca

SEQ ID NO: 37796 - DNA, 280 bp, Zea mays
cggacgcgtggggaaaggatgagtattctcaatggataactgctagtcagaggagccttcttgaagttatggccgcattcccttcagctaagccaccactgggagtgttttttgcagcaatagctcctcgtctgcaaccacgatactactcaatttcatcatctccaaagatggctccctccagaattcatgtaacatgtgcgttagtttatgggccttcaccaacaggaaggatccaccaaggagtttgttcaacatggatgaagaatacaattcctct

SEQ ID NO: 37797 - DNA, 271 bp, Zea mays
ggcaggcggcggccctcgggcattgtcccagcgggagcaggacatccagatgatgctcgccgccgatgtccacctcggcaccaagaactgcgacttccaggtggagcgctacgtgtacaagcgccgcactgatggtatctacattattaaccttggaaagacctgggacaagcttcagttggccgccagggtcatcgttgccattgagaatccgcaggacattatcgtgcagtctgctaggccctatggccagagggctgtcctcaagttt

SEQ ID NO: 37798 - DNA, 265 bp, Zea mays
ctcgtcttcgaggacctgctcgcgagggcggcctcgctgaggtcgagaagaagaacgcgcgcaaggccggcgccctctacgacaccatcgatgccagcggagggtactacgtctgccccgtcgacaagtccgtgcgctcgcacatgaacgtgcccttcaccctggccaagggcccggacttcgagaagcagttcatcgccgaggcggccaaggatggcatggtgcagctcaaggggcacaggtctgtcggcggcgtccgcgcctc

SEQ ID NO: 37799 - DNA, 261 bp, Zea mays
ggacgtgggtcgcctcgctctacgccaacaagcccgcgtccatctcctcctcgcactccgcgctgccccccatcctgccccgcctcctccgcaccttcctctgggtctcccttctcatgctcgcctaccacctcgtcttcgcgctcaccgtcctcctgctcatcgtcgtcttcatccccaacgcgtccgagtccgagtccgcgccgccctccctcgccttcgtactcttcctcgtcgtcgtcgtcttcgtcttcctcggga

SEQ ID NO: 37800 - DNA, 266 bp, Zea mays
gtagatatgggatgcaatcttctggttggccatttggcaacggcaacccaaatcagtttttaggtgttccaaaggattggcgtaatggagattggctctgcagctgtggatttcataactattcatctcgtacgcagtgcaaagagtgtggtgcacctgtaccatcgggcattccctccacaacaatgaaagctacatctgatgcctcttccacattaggaactaagcggttggcttcagaggacctggccaatgactgggataat

SEQ ID NO: 37801 - DNA, 262 bp, Zea mays
cccagtggacacagttcatggtcttttgctggtctaggcttccttgcatggtacttagctgggaaactcacagcctttgaccgcaaagggcatattgcgaactatgcattgtgttcctgcctctccttactgccgcacttgtggctgtttctcgagtggacgactactggcatcattggcaagatgtatttgcagggggtcttataggtcttacagttgcttcgttttgctacctacagtttttcccatatcctttcgatgg

SEQ ID NO: 37802 - DNA, 262 bp, Zea mays
cccacgcgtccgcagcaagctaggatcatcagcatctgagcttatatattactacatcgatcggttgccaaatggcggggatgacagtcggcaataagctggcgctggctgcggtgctgctgtgcgcggcggcggccatggccacggcgcacaggcctccggcgtgcgcgccacctacaacttctacaacccgcagcagaacaactgggacctcaacgccgtgagcgcgtactgcgcgacgtgggacgccagcaagccgctg

SEQ ID NO: 37803 - DNA, 262 bp, Zea mays
gagttactacgatatgcaggaaatgggtagatggttccactaataccgaggaattagttgaaggttttgaccaggaaactgcagctgttgtgttggcaagatacatctctttgaaaatggagatggaggaagagttcgatgcaacccggtggcttgatagatctctcatacgtctttgttcaagatttggggattaccggaaggatgatccctcttcatttagcctgcattcaaatttctcattgttccctcagtttatgtt

SEQ ID NO: 37804 - DNA, 267 bp, Zea mays
cttgcggatacaaatgaagccccctccttctgatcaaatttggtatggatttacgtcaatgcctgatctagaatgggatttggaatcttctgttggggataggaaaatcaccaacagtcatatcgctgcacttattggtaacagattcaaggcttcgcttcgagatagcttagtgcttccgaattgtgaaagcatctccatgccgtggatgttggctgaaaaggatgattgggtacctcgcaaggatgctccttttatttggctaaa

SEQ ID NO: 37805 - DNA, 266 bp, Zea mays
cccacgcgtccggtcagtcacagctcacagcaaacaccgcgaaccgcccccgctcccaaacccgaccgagcaaagcgcaaagccccccaaccgcggatcaatccgcagcatcgatggcgcccaaggcggagaaaaagccggcggcgaagaagcccgcggaggaggagcccgcgaccgagaaggcggagaaggctccggcagggaagaagccgaaggcatgaaacgcctccccgcgggcaagtccggcgccggcgagggcaagaagg

SEQ ID NO: 37806 - DNA, 255 bp, Zea mays
ggacctggcgcccggagacgggcctcgagaagctccgcaaggccaccaccgcccgtacgctcgtcatcaacaaagacgcggacggcggcagctacaagcgggcgcagtcgatgccgtcgaccccgacgacgccggtgacgccgtcgtcgtcgtcgtcgtcgacgagccgcgcggcgcaggcaacgtgtggcgcacgtcttccacccggggagcaacctggccaccaagggcatgggcgccaacctcttcgaccgg

SEQ ID NO: 37807 - DNA, 259 bp, Zea mays
cttcccctccgagcctcagttcgcatccacgcgcgccgccgccgcctcgccggtcgacgctcaccgcgcagcatggcggaacagactgagaaggctttcctcaagcagccaaaggttttcctcagctcaaagaaatctggcaagggtaagaagcctggcaagggcggcaaccgattctggaagagcattggccttggcttcaagactcccagggaagcaatcgaagggacctacattgacaagaaatgcccattcactg

SEQ ID NO: 37808 - DNA, 259 bp, Zea mays
ggacgctgggacaatggacaataagcttctgcaactatatttatatgaaaaatcaagatgtcctgggaggttctttgacctagtttatcatgaaaatgcccgtgttctactccatgatgagagcatataccgatttgaatgttgctcgagtccgacaaggttgtctattcagctgatggaatatggtcacgaaaagccagaagtgactgcagtatcaattgaaccaaatttttcttcgtatctttttagcgagtacttg

SEQ ID NO: 37809 - DNA, 240 bp, Zea mays
ggacgctgggcacctctaagccaaagcaagttgctaggtcctttgaaccagcaactgaaacttcctcgtctcatcatcgagaccagtaagcaacatggcggctaatctcaagtgggctcctgttctagccctcgtcgtcgtcgttgctgccatggttggcaccacgagcgccggcaacatcgcagtgtactggggccagaacggcaacgaaggcagcctggcggacgcctgcaactccgg

SEQ ID NO: 37810 - DNA, 263 bp, Zea mays
gctccctgttgaccattgggtattctgaaccatcgagccatggctgccaagctgactcgcctccacagtcttcgcgaacgccttggtgccaccttctcctcccatcccaatgaactgatagcactcttttccaggtatgttcaccagggcaagggaatgcttcagcgccatcagctgcttgcggagtttgatgccctgtttgatagtgacaaggagaagtatgcaccctttgaagacattcttcgtgctgctcaggaagcaat

SEQ ID NO: 37811 - DNA, 260 bp, Zea mays
ctcttcttttgcctcctctttatctccagcgcatcgtaaagggaggagcggacggcgaattcttgtggtttcccaagatgtcttctccaagcaagcgccgggagatggacctcatgaagctgatgatgagcgactacaaggtggatatggtgaacgatgggatgcaggagttctttgttgaatttcgtgggcctaacgaaagcatttatcaaggaggtatatggagggttagagtagaactgccagatgcgtatccttac

SEQ ID NO: 37812 - DNA, 261 bp, Zea mays
gaaacctccaaacacctacctctctacgaactacctgccgccggaaaaccctagagcgctcgaccatggatccgcagcagccggagcctgtcagttacctctgcggagattgcggactcgagaacaccctgaagcccggagatgtcatccagtgccgtgaatgtggctaccgcatcctctacaagaagcggacccgccggattgtccaatatgaagcgcgctgaagagtgaagacaagggaaaacactgaagatggttgat

SEQ ID NO: 37813 - DNA, 260 bp, Zea mays
acggcgtgctgcagagcgaattttcccccatcttgacttctcagtgcagcctcctgctcaggaactgcaggccagggatttgcacgatgcaatttggacattccgtcatatatatcgaggtcagcctaaaaggcatttgctgactactggctggagcctatttgtcagtggaaagagactccttgctggtgattcagtcctgtttattagggacggaagacagcaactcctcttggggataaggcgggcaaataggcagc

SEQ ID NO: 37814 - DNA, 261 bp, Zea mays
gagactccagaggcgcacgtgttcaaggccgacgtaccggggctgaagaaggaggaggtcaaggtggaggtcgaggacggcaacgtccttcagatcagcggcgaacgcaacaaggagcaggaggagaagacggacacctggcaccgcgtggagcggagcagcgggaggttcctgcgcaggttccgactgcccgagaacgctaagacggagcagatcacggccgccatggagaacggcgtgcttacagtcactgtgccgaag

SEQ ID NO: 37815 - DNA, 256 bp, Zea mays
ggacctgggctgaaagtcaatctttaactctgagtacaccttcctgtgatgccagtgcacctggaaaatgttacacaccaacagactttcagatttatgaggatcacagtaatatgtctggtgcagctactccacctccagagttctgctgcccaatatcaacaaagataatgcatgatcctgttataataacatctggacagacttatgaaagagaatatattgagaggtggtttaatgaaggatatgatacttg

SEQ ID NO: 37816 - DNA, 257 bp, Zea mays
cggaaacagtagtgctgccagtagagctctcagaactcgggaaaaaaaaatgtcagaggccgccgtgcgtgtgatcggcctatggcgagcccgttcgtgatccgcgtcctgatcgccctgaagctgaagggcgtcgagttcgagttcgtggaggaggtggtgggcaggaagagcgagctgctgctgaggtcgaacccggtgcacaagaagatccccgtcctgctccaccacggcaagcccatctccgagtctctgat

SEQ ID NO: 37817 - DNA, 258 bp, Zea mays
ctgggacaccatggctccgatgaagctgtacggggcggtgatgtcgtggaacgtgacgaggtgcgcaacggcgctggaggaggctggctccgactacgagatcgtgcccatcaacttcgccaccgccgagcacaagagccccgagcacctcgtccgcaacccgtttggtcaggttccagctctgcaggatggtgacttgtacctcttcgaatcacgcgcaatctgcaagtacgctgctcgcaaaaacaagccagagct

SEQ ID NO: 37818 - DNA, 256 bp, Zea mays
gggagttcttccccttccacctcctccgcactttcccgggcttcgccgctggcgtgacagcattcgattggtcaccggactctgcgttcctcctcgcgtcctgcaagacctaacagctcggctcttgcctgtcaagaagggactaggaggcaagcctttcctcttccttggccatcgcgcggctgtcgtaggtgccttctttgccacggacaagaagacaaggagagtcaagggggtttatacagtctccaaggat

SEQ ID NO: 37819 - DNA, 258 bp, Zea mays
cccacgcgtccgaggagtagtagcacttggacgcagcacctcctgctgctgttcttcctcgtcctcggcgtcgctaccaacagcagccattcttccaccatcaacatcaccaaccgatgctcctacacagtgtggccggccgccacaccagtgggcggcggcatgcagctggagcctgggaagacctgggtgcttcaagtgcctggcaacacgcaaagtggccgcgtgtgggcgcgcacgggctgttcgttcgacggc

SEQ ID NO: 37820 - DNA, 278 bp, Zea mays
atcgccgccgaaatcccgttgcgtctctcgcgcgttaccaagctctcaggggttctcgcgccgacggcaatggatgaggtcaccgaggccgtgaacaaccttaacatctcgggcgtaggggccgcgggcgttgccggggcggaagggcacaagaagaatcgcatccaggtctccaacactaagaagcccctcttcttctatgtcaacctcgccaagaggtacatgcagctgcacaacgaagtagagctgtcggccctcggcatggccattgcgacggt

SEQ ID NO: 37821 - DNA, 255 bp, Zea mays
ccaccaccaccgcctggccgtcgtcacgcgctcgcctccttccatggcgcccaggaacgctctccccgccgccagcggcgtggcgaacgtcatgggtgatgtagccgatgttccgcagcgtccggaagcgcccgtggggcaggttcgcggcggagatccgggacccggccaggaaggcgcgcgtggtggctcggcaccttcgacaccgcctgagccgcagcgcgcgcctacaacgccgccgcggtccgcttccgc

SEQ ID NO: 37822 - DNA, 275 bp, Zea mays
cccacgcgtccgctcatgcccagattacatgattaaggctgaggagtgtttaaagcgggagaaggacgcgagttggtcactatttgcatattagcagcgaacagaagttattggagaaagtgcaaaatgaattgcttgctcagtatgcaaccccgctgttagagaaggagcattctggatgttctgctttgcttcgcgatgacaaggttgaggatctttctaggatgtacagactcttctccaaaatctcccgtggtctggagcctatttcaaac

SEQ ID NO: 37823 - DNA, 274 bp, Zea mays
cccaaacaagcaaccaccgcctccccgatctcgtcgagaggaagcccaatcccgaaaccgccgccctattccaatggcgcccaaggccgagaagaagcccgccgccaagaagcctgcggaggaggagccggcggcggagaaggccacggcggggaagaagcccaaggccgagaagcggctccccgcgggcaagtccgcaggcaaggagggtggcgagaagaaggggaagaagaaggcaaagaagtcggtggagacgtacaagatctacatcttc

SEQ ID NO: 37824 - DNA, 269 bp, Zea mays
ggaacgagttcttggtcgaggtgctcatgcttacagtgctcaaccatcgcaaccttgtcagcttggtcgggttctgcgcgcagggggacgagaggctgctggtctacgagtacatgccgttcggaagcctggagagccatctgtttgacgtgcctctcggcaagaaaccactcgactggaacacgcgcgtgaggatagccgtgggagtcgcggaaggggtttcctacctgcacaacgtagccgacccgcctgtgatctaccgcgacatg

SEQ ID NO: 37825 - DNA, 272 bp, Zea mays
gaagtatttgagggtattaatgttaacaataatgagaaatgcatcattaagatcctcaagcctgtgaagaaaaagaagatcaaaagagaaattaaaattcttcagaatctttgtggaggccctaacattgtgaagctgctcgatattgttagagatcagcattcgaaaacgcccagcttgatctttgaatatgttaacaacacagatttcaaagtgctgtacccaacattaacagattatgacattcggtattacatctacgagttactcaa

SEQ ID NO: 37826 - DNA, 276 bp, Zea mays
ggtacggcggcggcgccaactcgctcgcctccggctactcccgcggcaccggcctcggcgccgagatcatcggcaccttcgtgctcgtctacaccgtcttctccgccaccgaccccaagcgcaacgcccgcgactcccacgtcccggttctggctcccctccccatcggcttcgccgtgttcatggtgcacctggccaccatccccgtcaccggcaccggcatcaacccggccaggagcctgggcgccgccgtcatctacaacaaggacaagccct

SEQ ID NO: 37827 - DNA, 274 bp, Zea mays
gtctgggcaaaggcggcgccaagcgtcaccgcaaggttctccgcgacggcatccagggcatcacgaagccggcgatccggaggctggcgaggaggggcggcgtgaagcgcatctcggggctcatctacgaggagacccgcggcgtgctcaagatcttcctcgagaacgtcatccgcgacgccgtaacctacacggagcacgcccgccgcaagaccgtcaccgccatggacgtcgtctacgccctcaagcgccagggtcgcaccctctacggatt

SEQ ID NO: 37828 - DNA, 271 bp, Zea mays
cagacgcgtgggtcgcctcgctctacgccaacaagcccgcgtccatctcctcctcgctcaccgcgctgccccccatcctgccccgcctcctccgcaccttcctctgggtctcccttctcatgctcgcctaccacctcgtcttcgcgctcaccgtcctcctgctcatcgtcgtcttcatccccaacgcgtccgagtccgagtccgcgccgccctccctcgccttcgtactcttcctcgtcgtcgtcgtcttcgtcttcctcgggatccacgt

SEQ ID NO: 37829 - DNA, 269 bp, Zea mays
tgttgatataccggatgctactgatgtattggcagtttttattgcacgggctattgttgatgaaattttgcctcctgttttcctcactcgagctagggcactacttccagaattttccaagggcattcaagttctgcaggttgttgaaaagagctatttgtcagctccccaccatgcagaattagttgaacgcaaatggggtggaagcacacactctactgtagaagaagcaaaaagtaagattaagaatattctaagagaatatattg

SEQ ID NO: 37830 - DNA, 267 bp, Zea mays
ccctggcacgtatcgactacgcgccattgggcgatattccgccgcacacccacccacgtgccacggagatcctcacggttctcgaggggacactgtacgtcgggtttgtcacctccaacccaaacaagctatttgccaaggtgctcaacaagggcgatgtgttcgtgttcccccaaggtctcatccattttcaattcaacccggtctatgacaagccggccgttgctatcgcggctctcagcagccagaaccctggggttattacca

SEQ ID NO: 37831 - DNA, 265 bp, Zea mays
ccgccgccctaagccacgtgctgaggctttcgttggtctcttcgccggcgacgagcacccagcagttctgtagaaatggctgatggtgaggacatccagcctcttgtctgcgacaatggcactggaatggtcaaggctggttttgctggcgatgatgcaccaagggcggttttccctagcattgttggccgtcctcgccacactggtgtcatggtagggatgggacagaaggacgcatatgttggcgatgaggcacagtccaaga

SEQ ID NO: 37832 - DNA, 268 bp, Zea mays
cccacgcgtccgcacgcgtccaaacatacagctagctagcctctgcatgcctacgtacagcatggccaaggccgagctgctgctcctcgccctcgtggcttcgctctccgtgctgccattctcctccctcgccgtgtaccaggacttctgcatcgccgacctatccgccgccgccacgccgggcggctacccgtgcaagcccccgatagacgtgaccgccgacgacttccactacggcggcctcgccacccccggcacggcgctgaaa

SEQ ID NO: 37833 - DNA, 269 bp, Zea mays
gggtgttctagttttgcctacagatgctgcattatttgaggacccatcgtacaaggtatacgcagaaaagtatgcagatgaccaggaagcgttctttaaagactatggtgaagctcatgctaagctgagcggtgttggtgcaaagtttgatcctcctgagggattctcactcgacgatgacacaagctcttcaccttccgacgagaagacggaagaacctacactggtagcggtaggagcggcagtagcaacagcgacagcggacgaca

SEQ ID NO: 37834 - DNA, 268 bp, Zea mays
cggacgctggtagcacgcaaaaaccccacgagagagacgaatcttccgaatctctcggtggcgaacgcgctctccgaccgctcccgcgagtcgctcctcccgagcttcctctacgcctcctcggcgcgctctttcgctgccacaggagccgccgcgcgcctccctgtctcctccccagcgcctgccacggctggagcaggaggcggcgtgccgttctcgatccaggcgcccaaggagaagatcgagatgtactcgccggccttctatg

SEQ ID NO: 37835 - DNA, 263 bp, Zea mays
agcagttcgaaaccaaggatccatccagaatccgaggaggaagagggagaagggcgcgcgcggccaggttcaagtggtgctggtgtcggccatggatcgggttcgcggatccgcgttcctgctcggcgtcctgctcgcaggatccctgttcgcgttttcagttgctaaggaggagaccaagaagctcggcaccgtgatcggtatcgatctcggaaccacctactcctgtgtgggtgtgtacaagaacggtcatgtcgagatca

SEQ ID NO: 37836 - DNA, 264 bp, Zea mays
gagaaacaagagaatggtgtttgtgggcgactcagtcaacaggaaccaatgggtctctctcgtgtgcatggtggaggcctcaatacctgacgacaggctcaagatacgcaccttcaatggctcactcatctccttcaaggcattggaatacaacgcaacgatagatttctactggtcaccactactggtggagtctaacagcgacaaccccattatccaccgggtggagtaccggatcataagggcagacagaattgagaagca

SEQ ID NO: 37837 - DNA, 266 bp, Zea mays
gctgatcaaatgtcgcacccaagccatgtcaagaaaggaatgccctacgtccgattgggaaagagcggcctaaaagtctctcgaatcattctaggatgcatgagctatggctctaaagaatggcaagactgggtacttgaggaagaagaggctttcaggcatattaaagcggcgtacgacgctggaatccagacttttgatacagcaaatgtatattcgaatggagtttcggagattattctcggcaaggcgatcaagaagctcaa

SEQ ID NO: 37838 - DNA, 263 bp, Zea mays
cccacgcgtccgctgatgatgagattgctgctcgtgttatcatgagagacatcattcgggctcggccagtgcagtcaaagaacacaaaaattgctttcatgttcttaacacccagtttattgccatttgagaagctatgggaaaaattcttcatgggtcatgaagacagatacaccatatacgtgcatgcatcaagagatataccgagtcattcaagtccaatattcgctggcagggatattcgaagcgaaaaggtgatatgg

SEQ ID NO: 37839 - DNA, 263 bp, Zea mays
  unsure (1)..(263): unsure at all n locations
cccacgcgtccggtcagtcacagctcacagcaaacaccgcgaaccgcccccgctcccaaacccgaccgagcaaagcgcaaagccccccaaccgcggatcaatccgcagcatcgatggcgcccaaggcggagaaaaagccggcggcgaagaagcccgcggaggaggagcccgcgaccgagaaggcggagaaggctccggcagggaagaagccgaacgcnagaaacgcctccccgcgggcaagtccggcgccggcgagggcaaga

SEQ ID NO: 37840 - DNA, 265 bp, Zea mays
ctcgaaaccttttcttgtgctctgtctgtgtgtttccaaagcaaacgaaagagctcgaggatgtcttgcagctgcggatcaagctgcaactgcggatcaagctgcaagtgcggcaagatgtaccctgacctggaggagaagagcggcgggggcgctcaggccagcgccgccgccgccgtcctcggcgttgcccctgagacgaagaaggcggcgcagttcgaggcggcgggcgagtccggcgaggccgcccacggctgcagctgcg

SEQ ID NO: 37841 - DNA, 263 bp, Zea mays
atcatgtccgagtacgccaacaagaagacccgcggcgccttcatcgccgccgtgttcgccatgcaggggttcggcatcctcttcggcaccatcgtggcgctcgccgtctcggctgcgttccggaacgcgttcccggccccgccctacttcgtggacgcccaggcgtcgctcgtcccggaggccgactatgtctggcgcgtcatcctcatgttcggcaccgtcccggccgcgctcacctactactggcgcatgaagatgcccga

SEQ ID NO: 37842 - DNA, 161 bp, Zea mays
agaacagcaattgccttcctgagggttgacgatgaacatatgaaagtattcgagaaccgtgtccggcagattctaatgtcatcagggtcaacaacattcaccaagatagtcaataagtggaatacagctctcattggccttattacatatttccgcgaaga

SEQ ID NO: 37843 - DNA, 287 bp, Zea mays
cacaacccagtcgctcaaaaccctagagctctcgcctgctcgcctccgccgccggagcgagctccccatcttcatccgtcaaccatggcgacccagatcagcaagaagaagaagttcgtcagcgacggtgttttctacgccgagctcaatgagatgctgacgcgggagctggcggaggatggctactctggcgtggaggtgcgcgtcacgccgatgcgcacggagatcatcatccgcgccacgcgcacgcagaacgtgctcggcgagaagggccgcaggatcaggga

SEQ ID NO: 37844 - DNA, 278 bp, Zea mays
ggacgctggtcacagcatcagtggtccttgcaggtttgttagcggcactcaaggtagctggtgggaccttggcagagcacacttatttattccttggtgctggggatgctggaactggtattgcagaactcattgctcttgagatttcaaaacagacgtcggctccaattgaagagtgccgcaagaagatttggttggtggactcaacaggtttgattggtgactctcgtaaaaactccgttcagtcattcaaaaaaccttgggcacatgagcatgag

SEQ ID NO: 37845 - DNA, 284 bp, Zea mays
gcaagcaccaatcagccagcagtccagcacaatatcatgaacaagcgtcatgtcgccgcggcggtggctgccctcctggcgctgctagccgcatcatcgacggccggcgccgtgacgttcgacgcgacgaacacggcgtccgatacccccggcgggcagcggttcgaccaggccgtcggcctcgactacgccaagcaggtcctggccgacgcgtccacgttcatctggaacaccttcgaccagcccagccccgccgaccgcaagcccgtcgacgcggtgaccct

SEQ ID NO: 37846 - DNA, 280 bp, Zea mays
gcttctacgagcccttctggctcctcgacgtcgccaacgccgccatcgccgtgcacctcgtcggcgcctaccaggtctactgccagcccctgttcgccttcgtcgagaagtgggcgcgccagaggtggcccaagtcccgctacatcacgggcgaggtcgacgtcccgctcccgctcgggaccgccggcagccggtgctacaagctcagcctgttccggctgacgtggcggacggcgttcgtggtggccacgacggtggtgtccatgctgctgcccttctt

SEQ ID NO: 37847 - DNA, 276 bp, Zea mays
gaacgatctatcagaagttcagaatctatctctctgctcctggttcaccattgcgcaaattggagcaagatgggaaggctagccctggctgtgccggtgatgcttctgctgctttgcacgacgtcagactgacgctcggaattacagacggtctgctcccgaacggcaacttcgagcggacccgctgccgtcgcagctgcgggggacccgggtggtgggcgcgtcggcgatcccgtcgtggcagacgtcggggttcgtggagtacatctcgtcggg

SEQ ID NO: 37848 - DNA, 273 bp, Zea mays
ggacctggtagggttgtgccgctgcactcaagcaggctggtgcccgtgtcattgagaccgagatcgaccccatctgcaccctccaggctctgatggagggtcttcaggtccttcccttggaggacgttgtctcggaagctgacatcttcgtgaccaccactggcaacaaggatatcatcatggttgaccacatgaggaagatgaagaacaatgccattgtctgcaacattggccactttgacaatgagattgatatgctcggccttgagacct

SEQ ID NO: 37849 - DNA, 276 bp, Zea mays
tgcgcctctacatttcttctctctctgctcctccgcctccgcctgatccatccaagacagggatcgccatgtcggactcggaggagcaccacttcgaatcgaaggccgacgctggggcgtccaagacctacccgcagcaggctggcaccgtccgtaagaacggcttcatcgtcatcaagaaccgtccctgcaatgatgtggaggtttctacctccaagactggtaagcatggccacgccaaatgccactttgtcgccatagacatattcaatggga

SEQ ID NO: 37850 - DNA, 275 bp, Zea mays
caattgttgagcctgagatccttgttgatggccctcatgacattgatcgctgcgcttacgtcactgagaccgtccttgctgcctgctacaaggcgctcaacgagcaccatgtcctcctggagggtaccctcctgaagcccaacatggtgactccaggctccgactccaagaaggtgacccctgaggtgattgctgagtacaccgtccgtaccctccagaggaccgtccctgctgctgtgcctgctgttgtcttcctctctggtggacagagcgag

SEQ ID NO: 37851 - DNA, 283 bp, Zea mays
agtcgaaaactcttcgctgctaaggcggcttgctgatgttaaccagaagttcaatgaagctgctgttgacaatagggtgctaaaggcagacgtcgaaaccttaagagcaaaggtgaagatggcagaggactcggtgaagcgggtaacaggcatgaacgcattgtaccctgccgtgtcggatatgtcttccctcagcatgccattcaatggctccccttctgactccgcctctgatagcaccgtcccggtacaagaggacctgaacagttacttcgccaaccca

SEQ ID NO: 37852 - DNA, 243 bp, Zea mays
gtttcggtaggaagggtgttgccatcaactttgtgacccgcgacgacgagcggatgctgttcgacatccagaagttctacaacgtgttgattgaggagctgcctgccaacgtcgctgaccttctgtgatcattttgaagaaaaacagaactaaaagaacggtggtgggggtgatctggtaaggcttggtattgccgaaatattgtcggggaggagtgataaggtctgtggggtttctatgtta

SEQ ID NO: 37853 - DNA, 280 bp, Zea mays
cggacgctggtcggtacgcgtgggactgggctggagagatcagaggcactcaaaaaggatctggaatggttcaagcaacagggccacacaattccagaaccatcgccccctggcaccacatacgcttctctattggaagaactgtctgagaaggacccccaggcatttatctgccatttctataacgtctactttgctcatactgctggaggccgaatgattggcaaaaaggtgtctgagaagattctggacaagaaagagctggagttctacaagtggg

SEQ ID NO: 37854 - DNA, 274 bp, Zea mays
cccacgcgtccgttttttttttgcaacctcagagaaacaaggcatttcttcttccattttaaatagcaaagggcaacttgcagcagggcacatacacacacaagcacattcgacccatctacagcctacgcatcaccgcatactggtatcaaggtcctgctaaacatcagatcactccagacagtcagtctatgccttcttgggggacttggcggccttcttgggcgacttggcctccttgctccgcatactggacgccttttcggccgtcttc

SEQ ID NO: 37855 - DNA, 279 bp, Zea mays
gagcaactgatgttgctttagcatggtcagttgcacttggttcccccttacacgtttgctactactttggaacaggagtacaagagtgatatctttggagagcgaggcatcttgctgggtgctgtccatggtatcgtggaggctctgtttaggagggacacagaacaaggaatggatgaagagtcggcctacaaaaacactgtcgagggcataactgggatcatctcgtaaaccatctcaaagaaagggatgcttgaagtgtacaactctttgagcgag

SEQ ID NO: 37856 - DNA, 244 bp, Zea mays
agaaaaacccaaagtgatactccctctatttttatttatttggcgttcccaccacgaaatgttatcttgctctagtgcaactgtcttgtatgaaacatgatttaaaaccattagtcattgatacatataaaaatgcactcttgaattataggctaataataataggcattaccaagggtactgcgaccatgaaattgtcacttccaattcagcgccattttctccaacaagtcgttccgtgtgc

SEQ ID NO: 37857 - DNA, 272 bp, Zea mays
cccacgcgtccgcttccagctcgtcagcgccaccgcggccgaccccagcaacgggagccgcggcaaggtcgggaaggcggcgcacctggaggaggcggtggtgtcgctcaagtcgacgacggacggggagaccgtgtaccgggtgagcttcgagtgggacgggtcgcagggcgtcccgggcgccgtcctggtcaggaacctgcagcacgccgagttcttcctcaagtcgctcaccctcgagggcgtccccggcaggggcaccgtcgtcttcg

SEQ ID NO: 37858 - DNA, 269 bp, Zea mays
acacaatccaccggcaccaacccagcgcggcgccaccggcgacccgtacccccttccccggagagcgatggcgacggagctgacggcggcgcactgcgcgcgtacgacggcaccgacccgtccaagcccatctacgtctccgtccggggcaaggtctacgacgtcacctccggccgcggcttctacggccccggcggcgcctacgccgtcttcgcgggccgcgaggcagccgcgccctcggcaagatgtccaaggacgaggccgacgtc

SEQ ID NO: 37859 - DNA, 264 bp, Zea mays
cgccttactccctcacagaacccagtaaaatattgccagtcccgccgtcgagatggccccacgccgcctgctcgtcctcgccgtcgtcgccctcgcggccaccgccgccgcggccaactccggcttcgcggactcgaacccgatccgccccgtcaccgaccgcgcggcctccgcgctcgagtccacggtcttcgccgcgctcggccgcacccgcgacgcgctccgcttcgcacgcttcgctgtgaggtacggcaagagctacga

SEQ ID NO: 37860 - DNA, 260 bp, Zea mays
gtcggcgactccttcagcgtcacctccatcaaggccatcccgacgcacggcgtctccggcggcaccaccgagctggagggcgtggtgttcgagatcgtcatcaccttcgcgctcgtctacaccgtctacgccaccgccgccgaccccaagaagggctccctcggcaccatcgcgcccatcgccatcggcttcatcgtcggcgccaacatcctcgccgcggggcccttcagcggcggctccatgaaccccgcccgctcctt

SEQ ID NO: 37861 - DNA, 281 bp, Zea mays
cccacgcgtccgaccgctacaaccgcgtcttcttctccaacgacacgtacctccccagccagatgccggcggcgctgaagccctaccgcgacgacgagctccggaacctgaggggcgacgaccagcagggcccgtaccaggagcacgaccgcgtctaccgctacgacgtctacaacgacctcggcctgcctgacagcgggaacccgcgccccgtcctcggcggcaccaaggagctcccctacccgcgccgctgccgcaccgggcggaagccaccaagagcg

SEQ ID NO: 37862 - DNA, 281 bp, Zea mays
gcgagtccgccgccgacgtcttcgaccgcgtcgccagtacgatcatccgatccgagccgagccgattcagtccatcgtctccctcttctcttctcctccccacaccattatttattgacacaccaatcaacgaacccatgcgtttgcgcaggcttccttgagtcgctgtggcgggacatcgacatggggcggctggaccaggaccccagctgcgagacgaacctggtgatcgtctcccacggcctcacctcgcgggtgttcctgatgaagtggttcaagtg

SEQ ID NO: 37863 - DNA, 286 bp, Zea mays
gaggatgtatctggagcagtacggtggtgccgacgacgtgtggattgggaaggtcctgtacaggatgtctctcgtcaacaacgagctcctcctccggacagctcaagccgacttcagaagtttccagagacaatgcaagctcgagtggcatggcctcagaaaatgggccagcaggagaaacctccaagcatacggcgtgacgtcgaacagcgcgctgcgatcctacttcttagccgcagccagcatctttgagccagacagagcgacagagcgtctgggatgggct

SEQ ID NO: 37864 - DNA, 276 bp, Zea mays
ctcttttttttttttttttttttttttaactcgaaaaaacaaatcttattcataaacaaaatgggttcacagatatttctccatacgtacatgctcattgtggtagacgcagctgaccacctagagctgcatacttacttattcagactgatccagcatgtggcaacgtcggaagttcacatgcttacagacgacaaattttcataacaatagcttggcttggctgcttcacagaataaccaaacgacaaccacgaaattgcgacgatataaaata

SEQ ID NO: 37865 - DNA, 278 bp, Zea mays
aacaagagcttgataagaatcaggtagttgacaaaacaatgaagtctggacggtcaacacagcataaaccaaaagtctccaatgcggatgcaaaagctgataaagatgacactaagagtctcatttcagtgaaggggaagaaacgtaaaagtcagcttgggactgagattcaggacaaggaaaaaagatcatcacatagtctactagtgttgcagtttcctttgccactgaagaagcaacttgtggatgattgggagtttgttacgcagatgggtaag

SEQ ID NO: 37866 - DNA, 277 bp, Zea mays
ctcctggagggtaccctcctgaagcccaacatggtgactccaggctccgactccaagaaggtgacccctgaggtgattgctgagtacaccgtccgtaccctccagaggaccgtccctgctgctgtgcctgctgttgtcttcctctctggtggacagagcgaggaggaggccacccgcaacctcaatgccatgaacaagctcagcaccaagaagccgtggtccctgtctttctccttcggccgtgccctccaggcgagcaccctcaaggcctgggctg

SEQ ID NO: 37867 - DNA, 277 bp, Zea mays
accacctcgccgacctgctcccgcgctgcgtgccgcgcgcgatatacctcgactccgacgtgctcgccgtcgacgacgtgcggcgcctctgggagacgcgcctgcccgccgccgcggtcgtcgccgcgcccgagtactgccacgccaacttctcccgctacttcaccgaggccttctgggacgaccccgtcctcggcgccagggtctttgccggccgccgccgcgcgccctgctacttcaacaccggcgtcatggtcatcgacctccggaggtggcg

SEQ ID NO: 37868 - DNA, 279 bp, Zea mays
cgcgccgccgccgccgccgccgtgacggaaggaagaggaggagcaaggagcacgacgcgatgggccactccaacgtgtggaactcgcaccctaagaactacggccctggctcccgcgtctgccgggtctgcgcgaaccctcacggtctgatcaggaagtacgggctcatgtgctgcaggcagtgcttccgcagcaacgccaaggacattggtttcatcaagtaccgttgaagaggccactgtgctgctgtggagaacttcctacatcaaagaaatgggt

SEQ ID NO: 37869 - DNA, 278 bp, Zea mays
cgtcatatggttcccaggatgagaagggatcaaggaaggtcataatgtcatatgggtctaatggtgaggatgatccaagaaaggccaccacatcatatggaatacaagataaagagtatcccaggaaggccaccacatcttatggagttcaaggtgagaaggacccaagggaagctaccatctcatatgggtcccaggatgatgaggattctagaaaagtcaacatgtcatatgggtctaatggtgaggacgacccaagaaaggccaccacatcatat

SEQ ID NO: 37870 - DNA, 272 bp, Zea mays
gtcgatccgctccatgcagatccgccaagtgctcatgcagatcatcagcctcggtatgattgttacctctgcattaatcatatggaagggtttgatagttttcacggggagcgagtcaccagttgtagtggtgctctcgggtagcatggagcctggatttaaaaggggtgatatcctgtttttgcatatgagcaaagatcctattcgcacaggagaaatagttgttttcaatatcgatggtcgtgagattccaattgtccaccgagtgatta

SEQ ID NO: 37871 - DNA, 271 bp, Zea mays
gcacgttacaggttttgcatgcacatcatgatgaagtgtggtttgtccaattttcaaacaatgggaagtatttagcctcagcgtcaaatgataaatctgcaattatatgggaggttaatgaagatggagagctattactgaggcatacattgagtggtcatcaaaagtcagtgatgatggttgcatggagttcagatgattgccagctcctcacatgtgggcaggaggaagccatcagacgctgggatgttaaatctggcaaatgtcttca

SEQ ID NO: 37872 - DNA, 272 bp, Zea mays
ggccaaaattgcagacttcaatctttcaagccaatctccagatatggctgctcgtctacattctactcgtgtccttggaaccttcggatatcatgctccagagtatgctatgactggccaactgactcaaaaaagtgatgtatatagttttggggttgtccttttagagcttcttactggaaggaaacctgtagatcatacaatgccaaggggccagcagagtcttgttacttgggcaacaccaaggcttggtgaggacaaggtgaaacaat

SEQ ID NO: 37873 - DNA, 268 bp, Zea mays
cggacgcgtggcaccgaccgaaccaaaaaaaacagagaatccaatagaaaggaacaggaaagggacgccagtctcatcacgtcccgcaccccccgccgccgccatggctgccctgggcctgctcctcctcctcctcgccgtcgccggtgccgccaacgccgcggcgcccggcggcagaatgtccatcatctcctacaacgaggagcacgccgcgcgcgggctggagcggacggagccggaggccggacgctgtacgagctctggctcg

SEQ ID NO: 37874 - DNA, 270 bp, Zea mays
ctcctggagggtaccctcctgaagcccaacatggtgactccaggctccgactccaagaaggtgacccctgaggtgattgctgagtacaccgtccgtaccctccagaggaccgtccctgctgctgtgcctgctgttgtcttcctctctggtggacagagcgaggaggaggccacccgcaacctcaatgccatgaacaagctcagcaccaagaagccgtggtccctgtctttctccttcggccgtgccctccaggcgagcacctcaaggcct

SEQ ID NO: 37875 - DNA, 268 bp, Zea mays
cccacgcgtccgcatcgatcgacgaccatggatatgattattatctatctagcttgtggtggtggttgaacaataataagcgaggccgagctggctgccatacataggtattgtgtggtgtgtgtgagagagagagaaacagagttcttcagtttgctatctctctctgcatgtttggcgtcagtctttgtgctcatgtacgtacgtgtgtctacctgcatgttggttgatccgattgcatctgctgtaaccatatattaattggtcc

SEQ ID NO: 37876 - DNA, 283 bp, Zea mays
tgacagaagtaacaagctatttgccagcttggttggaggtgacaaatccgacgtaaagtgtcccctcaagcacggtgagaatctcagtggcacgtgggtgtgtgtgtggaggattctgacctagtggtgcgtagtcaatgcgagccaacgagatccccaacgtgttgagtccaggcagctgcatgacattgatcaaagtaacgagctatttgccaaggttctcaacaagggcgatgtgtttgtattcccccaaggactaatccacttccagttcaacccagta

SEQ ID NO: 37877 - DNA, 285 bp, Zea mays
atcttgaacaattgtgtaataaccgtagatagagaagaggttagataagcttagcaagagcaaaactaaagatacacaagtaaaagtgaaggaacaagcagagaaatcacgattggaaaaaattcagcaagcacttatggaaggaaaaacctgcaagatcgatctatttggctgagcatgagaaacaagctataaaacatctttatctgctaactatgaaacctgtcatttatgttgctaatgtaacagaatcttatcttgctgaacctgatatcaatcctcatg

SEQ ID NO: 37878 - DNA, 277 bp, Zea mays
tacagcgtcgtacacgcgtcgtcagcgtccgggacgcgtggctcttaggtatccaaaagatactgaaaagctaatgttatcgagacaaactgggttgacaagaagtcagatttcaaactggttcatcaatgcccgtgtccggctgtggaagccaatgatcgaagacatgtacaaagaagagattggtgaggcggactagactccaactcttcctccgacaacgggcagcgaaacaaggacaaagcaccatctcccgaagaaaatgaggacctgcaga

SEQ ID NO: 37879 - DNA, 284 bp, Zea mays
cggacgcgtggcgagcgtgccgcatatgccaggaggaagatagcgtgaagaacctcgagaaaccgtgaccttgcagcggcagtctcaagtatgctcacagagcttgcgtgcaacgctggtgcaacgagaaaggagacactacttgtgaaatttgtcatgaggaatacaagccaggttacactgcgccacctcgtgttcagccagatgagacaaccatagacattgatggtgatttggttatggatttgcgagacccaaggattcttgctgtagcagctgcccaa

SEQ ID NO: 37880 - DNA, 283 bp, Zea mays
ggacgcgtgggttgcagataccacatttaactgtgaggtgtttgaggatgctattcttgttgattagcatcaatccttattggagcaagatggaatttaccatcatttcgagtgggctattggaacggatgaaggaaaatctgatattctaaactttgaaaatgtgggcatgattgggcaagtccacaggaaaggccttgatcttgatcagtttgaagactattttgttacactgagagcatgtaggctggatggccgccgtacagaattctgtgtgaaggcc

SEQ ID NO: 37881 - DNA, 278 bp, Zea mays
cagccgtccttgctgccaagcgtgcggaagcaatggcccgggaagccactgctgtatggaatcggcaccctgttggtcatgccactgaggacactgtatggagtgggtcgtgtttttggcgcaggacggtttctctgcaacatgaccaacgtctcttcgtcgctgcaaattgagcttgtatcatgccttcgagataactatgcgtatatcctgcatgatgttgatactggaacagttggagtagtggatccttctgaggctatgcctattataaatgc

SEQ ID NO: 37882 - DNA, 277 bp, Zea mays
atggcaacaccaaggctcgccgcaatcttcttctccttgctctgctgccgcgcagtcctccttgcgccctccgaatctcatctccaacagcagcgacggcgtcatcacccatctccctggcttccaggggcccctccccttccacctccaaacagggtacgtggaagtggacgaggacaatggcgtccacctcttctactacttcgtccggtcggagcgggaggacagccccggcgacgaccccgtcgtgctctggctcacgggcggccctggatgc

SEQ ID NO: 37883 - DNA, 276 bp, Zea mays
cggacgctggtcgtcgcgttcgcggcccgtgacagcacctacctcgccggcggcctggactacaaggatcccgtcgggccgccgtgacggcagagtgtccaaagaggaggaggtgctcgacaacaatgtccctgctccgactgacgaggtcgacgagctcatcgagagcttcaagcgcaaggggctcaacgccgacgacatggtcacgctctccggcgcgcacaccatcggccgctcccactgctcctccttcacgcagcgcctctacaacttcag

SEQ ID NO: 37884 - DNA, 269 bp, Zea mays
  unsure (1)..(269): unsure at all n locations
nccacgcgtccgcggacgctggcgagcgtggatctggcacggagggcaatcaaggatctgatggcaaggggattcagaaggatgatacctgttcattccagccagcagatatacaccagggcaaccaacacatgagggctgttttgcatcttgtcggcgggtctctagacggcttaatgttgctattatatcatgtttatttcaatcatggctcagtcagccttactgttgtgtcggatgttggaatatttttagattattgtactgtt

SEQ ID NO: 37885 - DNA, 277 bp, Zea mays
gaagagctcactgttgaggagcgtaacctcttgtcggtcgcatacaagaatgtgattggggctcgccgtgcttcatggcgcattgtctcttctattgaacagaaggaggagtcccgtaagaacgaagagcatgtgaaccttatcaaggaataccgtgcgaagatcgaggctgtactgctcaatatctgtgatggcatcctgaagctgcttgactcccacctagtgccttcttctactgctgctgaatcaaaggtcttctacctcaagatgaagggtg

SEQ ID NO: 37886 - DNA, 271 bp, Zea mays
ggccaccaccattccttccccaactctgcaggctgctcgtcgccctccctccacgccggacgcgccccgatccagatccaggggcgtaacatggcatcaaaacgtatcctcaaggaattaaaggacctgcaaaaggaccctccaacgtcatgcagtgctggtcctgctggtgaggatatgttccactggcaggcaaccatcatgggtcctcctgatagtccatatgctggaggtgttttcttagtgaacattcatttccccccggactacc

SEQ ID NO: 37887 - DNA, 272 bp, Zea mays
gaagaactacccgaccgtgagcgccgagtacagcgaggctgtggagaaggccaggcgcaagctccgagccctcatcgccgagaagagctgcgccccgctcatgctccgcctcgcgtggcactccgcggggacgttcgacgtgtcgtcgaggaccggcggtccattcggcacgatgaagcatcagtcggaattggctcacggcgctaacgcggggctggacatcgcggtgcggctgctcgagcccatcaaggaggagttcccaatcctctctt

SEQ ID NO: 37888 - DNA, 272 bp, Zea mays
cgaagagatcatgccctacctcggcacggccaacctgtgggactacctgccgttcctgcggtggttcgacgtgttcggcgtgaggcaaaagctcatggccgccgtgaggtggagggacgcgttcctgcggcggctcatcgacgcagagcgccggaggatggacggcgacggcgacggcgagaagaagagcatgatcgccgtgctgctctctttgcagaagtcggagccggagctgtacacggaaaccatgatcatggcgctgtgcggggact

SEQ ID NO: 37889 - DNA, 270 bp, Zea mays
cttcaggggatcttaaaaggatatgtgagactgatcttggattggtctcccaatgctgtctgactaaacatgttttcaaggcgaacaagcatcagtatcttgcaaatgttgccctgaaaataaatgttaaggttgggggaaggaatactgtacttgttgatgctttggcaaggagaatcccccttgtcagtgacgtagctactattatctttggtgctgatgtgacccatccccatcctggggaagattctagtccttccattgcagctg

SEQ ID NO: 37890 - DNA, 271 bp, Zea mays
cagctgcaacctccctgggctgcctcatcctaccttcagccgcgacccagtgcccttcttcctcacccccaggacgagcaacaagatggggctagaggctgcagtggaggcaactgtcgaattcctgaacaaggcggtgaagccagtccttgtcgccggccccaaactgcgtgtggcaaaggcaggaaaggcatttgtcgatatggtagatgccagtggctatgcctatgccgtgatgccatcggccaagggtcttgtgccagagactcac

SEQ ID NO: 37891 - DNA, 271 bp, Zea mays
ccatgacccggtgatcctgcagttcggcaaggtcgggagggacacgttcaccatggactaccggtacccgctgtcggccttccaggccttcgccatatgtctgacgagcttcgacaccaagctggcctgtgaatgaatgaatgaatgaatgaatgaacgaacgaacggtgagagagtcgttcgttttatgtgttccaaagtgataagcattctgagccttggcatgtaaataatttaagaagtaggtgtttgattcaagtattgtattgtt

SEQ ID NO: 37892 - DNA, 270 bp, Zea mays
cggacgcgtgggcgaggcgctcaagaaggcacaggcagagatcgacgcatcgtgggcacctcccgcctaatcgccgcagaggacgtgccccgactcggctacctgcaccgcgtcatcagcgagaccctgcgcatgtacccggccgccccgctgctcctgccgcacgagtcgtcggcggactgcaaggtcggcggctacgacgtggcccgcggcacgctgctcatcgtgaacgcgtacgccatccacagggacccgctggtgtgggaggac

SEQ ID NO: 37893 - DNA, 271 bp, Zea mays
ctgttcctccatacgccacccccccgcaggagcggcgcggcggcggcggcggcaaagccaaaggcaagatgttcgggcgcgcgccgaagaagagcgacaacaccaagtactacgagatcctcggggtgcccaagtcggcgtcccaggacgacctcaagaaggcctaccgcaaggcagctatcaagaaccaccccgacaagggcggtgaccccgagaagttcaaggagctcgcacaagcctatgaggttttgagtgatccagagaaacgtga

SEQ ID NO: 37894 - DNA, 278 bp, Zea mays
gttgccattatatcagcatattggctggggcagacctctggcttggtggacgagtctggcaacccaactggtggtctttttgggacagctgtagcaacaatggggatgcttagcactgcagggtatgttctcaccatggacatgtttggtcctatagctgacaacgctggtggtattgttgagatgagccagcagcctgaaagtgtgagggaaatcacagatgttctagatgctgtgggcaacacaactaaagctactacgaaaggatttgccatagg

SEQ ID NO: 37895 - DNA, 277 bp, Zea mays
ccgaaccccaaaccctagcttcgctcgttgcagcggcgagccggcgatggcgaagtctctgcgatccaaacgcgagaagcggcttcggacgttgcgccgggagatagcggaccgttctacgacaagaaggaggccgccaagctcgccgcgcaggccgccgccctagctgctgccccgctcccggtccgcgggcccccgccatcccaggatgccggcagctcccgcgcagctagctcggcctcggctatggatgtggagatgtctgatgcagggaaca

SEQ ID NO: 37896 - DNA, 142 bp, Zea mays
ctcattgttaccaggctgttgcctgatgctgctgggactacgtgcggtcagcggctggagaaggtcattggtactgagcacacagacatcattcgcgttccgttcagaaatgagaatggcatcctccgcaagtggatctctc

SEQ ID NO: 37897 - DNA, 268 bp, Zea mays
atagcctcgcggacgggtacggcgacggcgcgctcggcgactggaccaaggcgccccccggcgcctccatcttcgtggacccgagggagttttaggcagttttttttctccctccatggagggatgtacatacaggatccaaaaaagagggcgggtagcttaatttagaggaaatgagattaatttagagtttgagtgtgctgttacagtaacgcttttacatcacatcaatggacaagttgcaagcaaatcttgttttatttgcacc

SEQ ID NO: 37898 - DNA, 265 bp, Zea mays
ccaagaaccacagccaccgcgatggcgcagatcatcgatggcaaggccatcgccgccgacgtccgccgcgaggtcgccgccgatgtggccgcgctctcgtcggcccacggactcgtgccggggctggccgtggtcatcgtggggaccaggaaggactcgcagacgtacgtgaacatgaagcgcaaggcgtgcgccgaggtcggcatctgctccatcgacgtcgacctcccggtagacatctccgagaccgcgctcgtcgccgagg

SEQ ID NO: 37899 - DNA, 273 bp, Zea mays
cccacgcgtccgaagaaagtgatgacgacatgggcttcagcctcttcgactaagtctgtgcaatagccaagggtattgtttttgagtcgaggaagcagagggaagaaaaatagtagtcatgtttggactttaactttgttttatgttggaaagtacttgaaagacttttcctgtggtaattctaggcgtaggttgctgtgctggttggggtttactggtgaaccagagtttttctatctcccactatgaatttgttacctcaagttacctgga

SEQ ID NO: 37900 - DNA, 230 bp, Zea mays
cccacgcgtccgaccgcatcctctcatcagcttccttccacattcgtctcgagatctcgccccgtcgccatggacgcgatcgacagcgtggtggatcccctccgcgacttcgccaaggacagcgtccgcctcgtcaagcgctgccacaagcccgaccgcaaggagttcaccaaggtggcggcgcggacggcgatcgggttcgtcgtcatgggcttcgtggtcctcggtaa

SEQ ID NO: 37901 - DNA, 280 bp, Zea mays
gtggaagcctcataatcttaacaggacaagacggtgagaagccgcaacctataggaattatatggggtggtacagctaaccggggaaggttgaaacttaaaagtggccagggtccggagaactggacaagtggagttgatcttggccgccttcttgatctcttggagctagatctgatcacaacaagtgaagggctacaagctgccttggaagaacaaaggattactctagctgccgctgcggctgcagccactaattcaactgccacagaatcgtcacc

SEQ ID NO: 37902 - DNA, 276 bp, Zea mays
gggacctaccgttttgtccttcaggctgacccaccggatccctcaaagatccgtgaggaagacataattggtgtgactgtgctgctattgacatgctcttacatgggccaggagttcatgagagtaggctactacgtgaacaacgattatgatgatgaacaattgagagaagagcctccagcaaaggtgctaattgaccgggtgcaaagaaatatcttggccgacaagccccgagtcaccaagttccctatcaacttccatcctgaacccagtaca

SEQ ID NO: 37903 - DNA, 251 bp, Zea mays
gttggcttctcctccccctccggttcgggttcgggttcgtgatgttctccggggttcggtttcgtgggtgagcggatcgagatggcggcgtcggatgttgagtaccgctgcttcgtcggcagcctcgcctgggccacggacgaccactctctccagaacgccttcagcacctacggcgaggtcctcgattccaagatcatcctcgatcgggagacgcagaggtcccgcggcttcggcttcgtcaccttctc

SEQ ID NO: 37904 - DNA, 271 bp, Zea mays
aatcagaagagcggcggcgcgggcggacaaggagcaggcggaggaggagttgtgccaagccacaatgggtatctcgcgtgactcgatgcacaagcgccgagccaccggtggaaagcagaaggcctggaggaagaagcgaaagtatgagcttggtcgccagccagccaacaccaagttgtcaagcaataagacggtgaggagggtccgtgttcggggaggtaatgtgaaatggagggctctccctatagagccgggtaactactcatgggga

SEQ ID NO: 37905 - DNA, 258 bp, Zea mays
catatgcatctcaagatggggacaactcatggaaggccaccatgtcatatgggttccaaagtggtgagggctcgaggaaggtcaccacatcatatccgtaccgaggccaggacttaaggatggtcagcacatcatatgtatctcaagatgaggacaactcatggaaggtctcgatgccatctaggttccaagttggtgagggctcaaggaagctcaccacaccattcgaatcacaaaggaaggactcaaggaaggcca

SEQ ID NO: 37906 - DNA, 240 bp, Zea mays
cccacgcgtccgcccacgcgtccgcccacgcgtccgcgcctctcctcctctcctcccccacccgtccatcgcccctccctccggtctgcgctcccacagcctcacccctgcgcccccgccgattcgcgtcgccctttgttggaaggaacgatggagcagaccttcatcatgatcaagcccgacggcgtccagcggggcctgatcggggacatcatcagtctcttcgagaagaaagggttc

SEQ ID NO: 37907 - DNA, 274 bp, Zea mays
gcaagtcgtacctgtccaagtccctgttcgtgctgggcgagttcggcggcaacgactacaacgcgcagatcttcggcggctacaccccggagcaggcgagcgggcagagcgccaccatcgtggacgccatcggcaagggcgtggagcagctcatcagcctgggcgccatgtacgtggtggtcccgggcgtgctgcccgtggggtgcttcccgatctacctgacgctgtaccagacctccagcgccggcgactacgaccagtacggctgcctgaa

SEQ ID NO: 37908 - DNA, 272 bp, Zea mays
cccacgcgtccgcccacgcgtccgcaaaattttgtggagcttgtggagcaaaggctgtacctactgaagccgggaggcgtaagcagtgcagcaacgattcctgcaagaagaggatataccctagaattgatccggttgtgatcatgttggtcattgataaagaaaatgatcgggcactcttaagccgccagtcaagatttgtgcctcgtatgtggagttgtcttgctggtttcatagagccaggagaaagcctggaagaggcattaaaccga

SEQ ID NO: 37909 - DNA, 251 bp, Zea mays
ccccaaaccaatccgtcgcagacactcaaggtcgcaggatgccgccgccgcgtgagcaccaccagccccaggacgaagaggacgacgataccgcaggcgttgtcaagctcatcagcgccgagggcttcgaattcgttgttgacaggaaggccgccatggtctcaaacaccctccgcaacatgctcacatccccaggcggcttctctgagacgcgccaggccaaggtccgtttcccagagatcccaacaaca

SEQ ID NO: 37910 - DNA, 271 bp, Zea mays
aaagccggtgcagattatgatggtggccgggacttggatgactttgtcaagttcattaatgagaagtgtggcaccatccgggatccaaagggccacctgaatcaagaggctgggcttgtgccaagcttgaatcctcttgtgaaggagtttctcaatgctgctgatgacaagcggaaggaagtcctctctaaaatagaagaggatgttgctaagctcagcggttctgcagccaagcatggaaagatatatgtgacagctgcatagaagatca

SEQ ID NO: 37911 - DNA, 240 bp, Zea mays
caagattggaacacctgaggcccttgccttgagaggaaaggctgcagtagcacaggccaaactagcaaatcggctctaccagaagaaattctctggcccaaggtgggaggcgttggccaagaaaggtgccaagaaacaaaggttgttgtgggcatccaccggtgtcaggaacccagcttatcctgacactctttatgtggacagtctcatcggacctgacacggtcaacacgatgcccga

SEQ ID NO: 37912 - DNA, 271 bp, Zea mays
ctaatcctacacgtgacgctgcattgtcgtgtcacttgcctgatcaaggtaggggaaccggtgctgcaggtcgtcggtggtcggcacggcgccgcgcggcccgaaagcgtcgacctccgccagcagcttggcctcaacctccgggtggccggcgactaggtacactgccgacgagagcgtgaacgccgtggtggcagacccggcgaggaggtgctcgtaggtgagcgcgctcacgtagtccggcgtgagcagctcccgcagcgccgcactg

SEQ ID NO: 37913 - DNA, 267 bp, Zea mays
ggcgtcggatgttgagtaccgctgcttcgtcggccgcctcgcctgggccacggacgaccactccctccacaacgccttcagcacctacggcgaggtcctcgagtccaagatcatcctcgaccgggagacgcagaggtcccgcggcttcggcttcgtcaccttctccacggaggatgctatgcggaacgccatcgagggcatgaacggcaaggagctggactgccgcaacatcaccgtcaacgaggcccagtcccgctgcggccgtgg

SEQ ID NO: 37914 - DNA, 265 bp, Zea mays
agcagtagccacagccagaacaccagcagacagcagcatcagcagggaggaacacgatgagcggcgccggtccggatctgcagctgccaccggggttccggttccacccgacggacgaggagctggtgatgcactacctctgccgccgctgcgccggcctgcccatcgccgtccccatcatcgccgagatcgacctctacaagttcgacccatggcagctcccaaggatggcgctgtacggcgagaaggagtggtacttcttctc

SEQ ID NO: 37915 - DNA, 267 bp, Zea mays
cccacgcgtccggtcgaggtccgagtcctgctttgatggcgaccgacgtggctgagactcccgcgccgttggtggatgcggccccagacgcgcccgccgacgccccggcggcgcctgctgccgacgcgaaccggccaaggccaagaaggccaccgcgccgaagaagcgcgccagcccgacccacccgccgtacgccgagatggtctcggaggcgatcacgtcgctcaaggagaggacggggtccagcagctatgcgattgccaagtt

SEQ ID NO: 37916 - DNA, 260 bp, Zea mays
cccacgcgtccgcatttcggcctctgtcccttgcaagttcaatctcacctccaaccatgggtaaagagaagtcccacatcaacattgtcgttattcgccacgttgactctggcaagtcgaccaccacaggacacctgatctacaagcttggaggcattgacaagcgtgtgatcgagaagtttgagaaggaggctgctgaaatgaacaagcggtccttcaagtacgcatgggtgctcgacaagctcaaggctgagcgtgag

SEQ ID NO: 37917 - DNA, 267 bp, Zea mays
  unsure (1)..(267): unsure at all n locations
ggatgggacagaaggatgcttatgttggtgatgaagcccaatccaagaagggtattctgactttgaagtaccccatcgaacatggaattgtaagcaactgggatgacatggaaaagatctggcatcacaccttctacaatgagcttcgtgtcgcaccagaagagcacccagttcttcttacagaggcccctcttaacccgaaggctaacaggganaagatgacacaaatcatgtttgaaaccttcagtgttcctgctatgtatgttg

SEQ ID NO: 37918 - DNA, 275 bp, Zea mays
gtgaaaggggaactagagcaagatgggcggcgcactgctgcttgcgctcctcctcgtctctgctgctgccgcccctcaggtacttggagttggcaatggagacaatcacatgagaatcatccaggaggacatcatcgagacagtcaacaaccatcccagtgctgggtggacagcctcacgtaatccttacttttcaaactataccattgcgcaatttaagcacatacttggagtgaaacagcaccacagaatgcactaagcaatgttcctgtcaa

SEQ ID NO: 37919 - DNA, 276 bp, Zea mays
gatcgatcattcgatccccaccactgcccgaggccccctcctcgctgacttggctcctccgccgtggccggagcgaagcaagtggggaccacagaagcattagctgggtgaactctttcaaaaggggcaggtgcgctagtttgaatggctgctacaaagcttcaggccttttggaaccaccctgctggccccaaaaccattcatttctgggcgccaacattcaaatggggtatcagcattgccaacatagccgactttgcaaagccgcctgaaaag

SEQ ID NO: 37920 - DNA, 262 bp, Zea mays
gaaggagaaaagcagttcttcagctaggcaggagggcacaggaaggaggagatggcgtcaaagaggattcagaaggagctcaaggatctgcagaaggaccctcccacctcgtgcagtgcaggtcctgttggtgaagacatgttccactggcaggcaacaataatgggtccatctgatagcccatattctggtggagttttcctagtcacaatccattttcctcctgattatcctttcaaaccaccaaaggtggcatttcgta

SEQ ID NO: 37921 - DNA, 280 bp, Zea mays
gaagccgccgccgctgcagtgtccatagccaccgcagagactgagatggggggttttgtcaagacccacaagagcaatgcatacttcaagcgtttccaggtgaagttctagagaaggcgcgctggcaagacagactacagggccaggataaggctgattaaccaagacaaaaacaagtacaatacacccaaatacagatttgttgtgcgatttaccaacaaggacatcacagcacaaatcatatctgctagtatagcaggtgatatggttcttgcttctg

SEQ ID NO: 37922 - DNA, 277 bp, Zea mays
cggacgcgtgggcagagacttatgcttggtgagaacctgtatcctcttgttgaacagctggaacgtgagcaggctgccaaggtcactggcatgcttttggagatggatcagacggaggttcttcacctgctggagtcgccagatgctctgaaagccaaggttgctgaagccatggaggtcctccgctctgcccagcatctccagcagagcaatgtttctactgagcagcagctggctaatctatcattgaatgatggcgtcgtctccagctgaacgt

SEQ ID NO: 37923 - DNA, 277 bp, Zea mays
ctccgacaagatctggaacaacgggcccatcagcttccagctgcagtggttccagcaggtcacctccgccgtgtgcgggcaggactgcaagagctacctggccaactcgctgttcgtgttcggcgagttcgggggcaacgactacaacgccatgctgttcggcaactacaacgcggaccaggccagcacgtacacgccgcagatcgtgagcgccatcgcggccggcgtggagaagctgctggccatgggcgccacggacgtggtggtgccgggggtg

SEQ ID NO: 37924 - DNA, 276 bp, Zea mays
acgacggcaagctcgccggctacgacatccccgccgagtccaagatcctcgtcaatgcctggttcctcgccaacgaccccaagaggtgggtgcggcccgacgagttccggcccgagcgcttcctggaggaggagaagtccgtggaggcccacggcaacgacttccgcttcgtgccctttggggtcggccgccggagctgccctgggatcatcctcgcgctgcctatcatcggcatcaccctgggccggctggtgcagaacttccagctgctgccgc

SEQ ID NO: 37925 - DNA, 278 bp, Zea mays
ccgagcctctctccgtgttcgtcgacacgtacggcaccggcgcgatccccgacaaggagatcctcaagattgtcaaggagaacttcgatttcaggcctggcatgatcatcatcaaccttgacctcaagaaaggcggcaacgggcgctacctcaagacggcggcctacggccactttggaagggacgaccctgacttcacctgggaggtggtgaagccactcaagtcggagaaaccttctgcctaaggcggcctttttttcagtaagaagcttttggtg

SEQ ID NO: 37926 - DNA, 272 bp, Zea mays
aactgccttgctcctcttgctaaggtcatcaatgacaagttcggtatcgttgagggtctgatgaccactgtccatgccatcactgctacccagaagactgttgatgggccctcatctaaggactggtggggtggaagggctgctagtttcaacatcattcccagcagcactggagctgctaaggctgttggcaaagtgcttcctgtccttaacggaaagttgactggaatgtctttccgtgtcccaaccgtcgatgtttctgttgttgattt

SEQ ID NO: 37927 - DNA, 274 bp, Zea mays
caacatggtgactccaggctccgactccaagaaggtgacccctgaggtgattgctgagtacaccgtccgtaccctccagaggaccgtacctgctgctgtgcctgctgttgttttcctctctggtggacagagcgaggaggaggccacccgcaacctcaatgccatgaacaagctcagcaccaagaagccgtggtccctgtctttctccttcggccgtgccctccaggcgagcaccctcaaggcctgggctggcaaggtggagaacttggagaag

SEQ ID NO: 37928 - DNA, 274 bp, Zea mays
gacacgcgtccaaacatacagctagctagcctctgcatgcctacgtacagcatggccaaggccgagctgctgctcctcgccctcgtggcttcgctctccgtgctgccattctcctccctcgccgtgtaccaggacttctgcatcgccgacctatccgccgccgccacgccgggcggctacccgtgcaagcccccgaatgacgtgaccgccgacgacttccactacggcggcctcgccacccccggcacggcgctgaaacccttcaagatctccc

SEQ ID NO: 37929 - DNA, 275 bp, Zea mays
caccattcctcctccggatttcgcagtcagcggtggtgaaggtagcgggcgcggaggaagatggggctcgcgttcgggaagctcttcagccggctcttcgccaagaaggagatgctgattcttatggtcggtctcgacgccgccggtaaaaccaccatcctctacaagctcaagctcggcgagatcgtcacaaccatccccaccatcggtttcaatgttgaaactgttgagtacaagaacattagcttcacggtctgggatgtcgggggtcagga

SEQ ID NO: 37930 - DNA, 275 bp, Zea mays
cccacgcgtccgcccacgcgtccgcatctcctcccgggacgggcatgcagagcacggctgccatcggtctcgttcggccatgcgccgcgcggccactccccacctaccctagcccacggcgcggcgccggcgcgtgcagcggcgccgcacagccgatcctcgcgccccgcggcctctgcctctccgcccgcgccagcctactgccggactcgccgctggaggaggagtaccggagatgcacggccggccggcacgtggccgcggccgggaaggtg

SEQ ID NO: 37931 - DNA, 271 bp, Zea mays
gacaagggggtgaccagcctggcttcgggatgccctgaactcagggccgtcgacctgtgcggctgtgttcttataacaggtgagttgctttcacgtgtgttgggggtcaaattctactagtacagaactacgctggaacttacctgacctgaccgctattttggctggcccaacgcctgttcgatcttcctgccgcagatgagagcgtggttgcgctggcgaacggctgccttcacctgcgctccctgggtctctactactgccagaacat

SEQ ID NO: 37932 - DNA, 273 bp, Zea mays
cccatttcctgtgttggcggcgatggcgcggcacttcgtgctcaacaccggcgccaagatcccctccgtggggctcggcacctggcagtctgaccccggcgtcgttggcaacgctgtctacgccgccgtcaaggcgggttaccgacatatcgattgtgccagagtttacggcaacgaaaaggagattggtttggcgctgaagaagctatttgaagagggtgtagtgaagcgagaagatctgtttatcacctctaagctatggaatgatcatca

SEQ ID NO: 37933 - DNA, 272 bp, Zea mays
ctctctcctcggtttcctctcccaccaccaacccccagatcgcagcgatctccgccgccgccctctctgggattccgcgcgacaaagtcaggcgtagaggctccagggggaggagggaggcgcacatggcgggtgggggagatgttcctctgggactggttctacggggtgctggcctccctcggcctgtggcagaaggaggccaagatcctcttccttggcctcgacaacgccgtcaagaccacgctgctccacatgctcaaggactagcg

SEQ ID NO: 37934 - DNA, 267 bp, Zea mays
aatcagaagagcggcggcgcgggcggacaaggagcaggcggaggaggagttgtgccaagccacaatgggtatctcgcgtgactcgatgcacaagcgccgagccaccggtggaaagcagaaggcctggaggaagaagcgaaagtatgagcttggtcgccagccagccaacaccaagttgtcaagcaataagacggtgaggagggtccgtgttcggggaggtaatgtgaaatggagggctcttcgccttgatactggtaactactcatg

SEQ ID NO: 37935 - DNA, 268 bp, Zea mays
ctcagaggtgggttggcttctcctcccccaccggttcgtgttcaggttctggttcgtgggcgagagggaagagatggcggcgtcggacgttgagtaccgttgcttcgttggcggcctcgcctgggccaccgacgaccactccctcaacaacgccttcagcacctacggcgaggtcctcgagtcgaagatcatcctggatcgggagacgcagaggtcccgcggcttcggcttcgtcaccttctccacggaggacgcgatgcgcacgcca

SEQ ID NO: 37936 - DNA, 266 bp, Zea mays
cgggacctggcgtgttccgacgcttcgccttcgacaccatctgcaagatctccttcggcctcgaaccgggctgcctcgagcgggagatgcccatgtccaagctcgccgacgccttcgacaccgccacgcgcctctgcgccatgcgctgcgccgccgcgtcgccgttgctctggagggccaagcgcctgctcaacgtcggctcggagagggagctcagggaggccatccgtctggtcgacgagctcgcggctgccgtgatccgggag

SEQ ID NO: 37937 - DNA, 268 bp, Zea mays
actgcttcagttggtccaggctaatcctcaaatcttgcagccaatgcttcaagaactaggcaaacaaaacccacaaatcctgcgtttgattcaggaaaatcaagctgagtttgtccgcttggtgaacgaaactccggagggtggtcctggaggaaacatattaggtcaactggcagctgctatgccgcaatcggtgacagttaccccagaggaacgagaggccatccagcggcttgagggaatgggcttcaaccatgagcttgtgcta

SEQ ID NO: 37938 - DNA, 269 bp, Zea mays
ggggcctgcaggccgcggggttcgctcccgcccgcaccatccacatctcgcatgtccccgacgaggagatcggtggcgcggatgggttcgacaagttcgcccgatcggaggagttccgcgccctcaacatcgggtttatgctcgacgaggggcaggcgtcgccgacggacgtgttcagagttttctacgcggacaggctggtgtggaggctcgtcgtgaaggcggcgggggcgccagggcatgggtcgaggatgttcgacggcgccgcg

SEQ ID NO: 37939 - DNA, 269 bp, Zea mays
gcacgaacaaaacacaaagaagctcaagaaagctgaggcaagtccagaagaaggaaaaaaaagcctagaaggagagatgggaagaagcgaaggcagcacaagcccagcgcctgggggagccgcctgcgcgtgcgcggtctgcggcggcgccgcggtggtgtactgcgcggcggacgctgcggcgctctgcagcccctgcgacaccgctgtgcacgctgcgaacctgctggcgtcgcgccacgagcgcgtgcccctttccatggtgactg

SEQ ID NO: 37940 - DNA, 268 bp, Zea mays
cccgacaggacggcggaacagatcgtcgccgcggggaaagagttcggtttctttcaggtgatcaaccacggcgtggcggaggacgtgatggcctccatgatgagcgccgcggaggagttcttcaggctcccgacggacgagaagatggcgcactactccaccgacagcacgaagctgccgcggttccacacgagcgtcgggaaggagcaggagaaggtgctgtactggagagattgcctgaagatcggctgctacccgttcgaagagt

SEQ ID NO: 37941 - DNA, 238 bp, Zea mays
aacaaggcggcggccgtggccacgctcctgtccgtcgccgccgtcaacctggtgctcggcgtcctgccccacgtcgacaacctggcgcacctcggcggcttcctcgcgggcttcctactcggcttcgtcgtgctcatgcgcccccacttgggctggatggagcgctacggactccccgccggcgcgccctgcaccgccaggaagtacctcgcgtaccagtggaccctcctcgccgtcg

SEQ ID NO: 37942 - DNA, 263 bp, Zea mays
ggacctggtgcgtgccctaccctaggatccacttcatgctttcgtcctacgctcaactcatttctgctgagaaggcctaccacgagcagctgtccgtggccgaaatcaccaacagcgccttcgagccatcctccatgatggccaagtgcgacccccgccatggcaagtacatggcatgctgcctcatgtaccgtggtgatgtggttcccaaggacgtgaacgctgctgtggcaacaatcaagaccaagcgcaccatccagttc

SEQ ID NO: 37943 - DNA, 228 bp, Zea mays
cctcatcgtcgaacttcatgctgtactggggaacaggtggtctcagattgcaacaaggttgcctggaagaactgacaacgagatcaagaatctctggaactcgagcatcaagaagaagctccggcagaaaggcattgaccccaacacccacaagccgctccttgtcgaggttgaacgcagcaaagcagctccaacgaccagtaccgagagacctctgagccaatgatg

SEQ ID NO: 37944 - DNA, 261 bp, Zea mays
ggacctggggttgaaaagtatatcatcatacacagcattctcccgcattgtgctagttctacgtgcacttcatgtgaataatgagaaggcaaagatgttgctcaaacctgacaaaacaattgttactgaaccacatcatatatggccatctctgaatgatgaacagtggttgaaggttgagtgtgcactaagggacctcatcctttctgattatgcaaagaaaaacaatgttaatacttctgcactgacacaatctgaaat

SEQ ID NO: 37945 - DNA, 222 bp, Zea mays
ctttctttgagcataccactgcatgaggcaactaataaagagcagctagaagcttttaatgagaagaaagctgcaatgaacttggatggaaaagaagtgtctaatgaggatattgtcaggcctagagtcccattggaggcatgcttggcaagtttttcagggccagaggagattccagatttttatagcactgcattaaatttaaagactaccgtcactaag

SEQ ID NO: 37946 - DNA, 149 bp, Zea mays
ggaggttgctgtgaatgactttctaccagcgagcgccgcttatgaagccacacagcactctatggacctgtatgctacatacatcgttgagggcctgaggaggtaggattctgatggctaggaaaggtggggaggatgttgacgaaaaa

SEQ ID NO: 37947 - DNA, 230 bp, Zea mays
gaagaagctgaaaaagaacaatgttgctcttgacattgttgactttggtgaatccgatgatgaaaaacctgagaaactggaagcattgattgctgctgttaacagcagtgatagcagtcacattgttcatatccctcctggtgaaaatgccctctctgatgtcctcctaagcactcctatatttactggtgaagaaggtggaagcggttttgctgcttccgaagcagctg

SEQ ID NO: 37948 - DNA, 219 bp, Zea mays
cgcgacgagcgcttcggccacatcaagaagtcggacttctacggctacgccatcaaggcgctggtgaacgccgtcatcccggcaatccgcacctacgtcgacctgtcgcccggcgagttcgactccttcaaggacatcatgaagctgtacgagggcgggatccagctgcccaaaataccagccctcgaggacctgcggaagagttcccactcgagctcg

SEQ ID NO: 37949 - DNA, 242 bp, Zea mays
  unsure (1)..(242): unsure at all n locations
cggacgctggnctcggtgacccagttccggttcgacaaccagtactaccacaacatcctggagcatgaacgggctgctcagctccgacgagatcctgctcacgcagagccgcgagaccatggacctcgtccaccgctacgccgccgaccagggcctcttcttcgaccacttcgccaagtccatggtcaagatgggcaacatctcgccgctcaccgggagcgccggcgagatcaggcacaact

SEQ ID NO: 37950 - DNA, 257 bp, Zea mays
gcgttggccaagaaaggtgccaagaaacagaggttgttgtgggcatccaccggtgtcaagaacccagcttatcgcgacactctttacatcgacagtctcattggacctgacacggtcaacacgatgcccgaccaagctttgcacgcattcatagaccacggcactgtctcgaggacagttgatgcgaatgtgtccgaggcggaaggtgtatacagcgccttggagaagcttggcattgactggggcgaggtcggaaa

SEQ ID NO: 37951 - DNA, 259 bp, Zea mays
agggaaggggtgatggcgtacgcgtgccgctggtcgagagaggccgtggtgttgggtgtgtcctctacagccggtcaatagagactggattggacttaacccaactatcgtttctttaatcgggcccttgatcgggagggcccacgctaacctcggttggagcccccagacacacgacgttatatataggactaaagggtcgcaggaaagactaacgctagtacctcgccccaaaaccctagtcctcagaggcccccat

SEQ ID NO: 37952 - DNA, 185 bp, Zea mays
cagcaatctgcgtgcgaagtaactttggttcactatgaggacatgggcataccaaaagatgtagccagggttgctattcgccacggcatgtggggtgctgtgaagaaacttcagtctgggttcagagcgtaccagcaaatgagagacacagaaaataccctgtcacacagcgccattatggctcg

SEQ ID NO: 37953 - DNA, 243 bp, Zea mays
aaaataactgttgatacggacgtcagattgctcaaggaaatgggcatggacgcatataggttctctatctcttggcccagaatactgccgaaggaaccaaagaaggaggtattaacccggatggcatcaagtactacagaaacctcatcaacttgttgctagaaaacggcatagagccatatgtaacaattttccactgggatgtacctcaagcactagaagagaagtacggcggcttcctag

SEQ ID NO: 37954 - DNA, 238 bp, Zea mays
cagacaccacccagatccacacccacatgtgctactccaacttcaacgacatcatccactccatcatcgacatggatgccgatgtgatcacgatcgagaactcccggtctgacgagaagctactgtccgtcttccgtgagggtgtgaagtacggagctggcattggccctggtgtctacgacatccactctcctaggattccctccaccgaggagatcgcagaccgcgtcgagaagat

SEQ ID NO: 37955 - DNA, 260 bp, Zea mays
ctcatctgttttgtgttagaattgctcagggccttgttcacctcggaaagggcttgttgaccctttctccgtaccattctgatagatttcttctttccccgatggcacttggagggcttgtaactgttctgcatgcgtgtcttgatatgaagtccactatcctagggaaatatcactacatactttacattattgtcctggcaatgcagcccaggatgcttttaactgtcgatgaggatctgaagcccctctcagtacct

SEQ ID NO: 37956 - DNA, 245 bp, Zea mays
gcttgccagtgtcagcattgatagatgaaaagattctctgtatgcatggtggtctatctccggagttgaacaagcttgagcaaatactcaacctgaatcgccccacagacgtgcctgatactggattgctctgtgatcttctttggtctgatccttccaatgaagcaacaggctgggccatcaatgatcgtggtgtttcattcacatttggtcctgataaagtctctgaatttcttgagaagcat

SEQ ID NO: 37957 - DNA, 193 bp, Zea mays
gaggcctatcatcttttcactgtcaaatccaacctctcattctgaatgtactgctgaagaagcatataactggactcagggtcgtgtaatatttgccagtggcagtccatttggccctgtggagtacgatgggaaggtttttgtacctggacagtcgaacaacgcctacattttccctggatttggcctcggt

SEQ ID NO: 37958 - DNA, 266 bp, Zea mays
agggacgctggcagtctgatgaagcgcctcatactgtcactggagacattgtattcgtcctccagcagaaggatcactccaaattcaaaagaaagggtgaagatctcttctatgagcacaccttgtctctgaccgaagcactatgtgggttccaatctgttcttacacatctggacaacaggctgcttctcatcaaatcagaccctggtgaagttgttaaacctgaccacttcaaggcgattaatgatgaggggatgccaatttac

SEQ ID NO: 37959 - DNA, 263 bp, Zea mays
ggacctggggacgttcgagctctccgtcctctgccacgccgaggtcgcactcgtcgtctagtcgccgcgcggcaagctctacgaattcgccagcggaagtgcgcagaaaacgattgaacgttatagatcatacacaaaggataatgtcagcatcaagacagtgcagcaggatattgagcgagtataagctgatgcggatggcctgtcatagagactcggcgcacttgaagcttacaaaaggaatcttttgggtgagaggttgg

SEQ ID NO: 37960 - DNA, 290 bp, Zea mays
caagatgactgaggctgacacgggaagtacagaggtcaaagataaagaagagaagggagatgaagttgtggacacaactgtggataagcaggatgaatcgaaggagcaagaggaaggtgtttcggctgagcaagatgagaagcaaggagaggaagcagaagaaaaaggaaaagaaacggatgccgatgagaagcaagaagaggaagcagaagaaaaaggttctgctgatgagaaagatgaagatgaaggtgaccagaagatggaagagaataaggaggagactccgaaga

SEQ ID NO: 37961 - DNA, 284 bp, Zea mays
ctactctccggccttcctccgctgggcgctcaagccgccgtccttcttccgggcctggcacatcggcgttcgcgccaaggagtccaagaagctcgtcgccttcatctcgggcgtcccggcccgcatccgcgctcgggacgacgtcgtccgcatggccgagatcaacttcctctgcgtccacaagaagctccgatccaagcgcctggcgcccgtgctcatccgggaggtcacccgccgcgtccaccaggagaacatttggcaggctgcatacaccgcgggggtcg

SEQ ID NO: 37962 - DNA, 232 bp, Zea mays
ctcccaacctcgcatcgctgttcccccaaacccaaatccaaagcaagcacttcgtcggcgggcggcggccgagggcgaccatggggcagggcactccgggagggatgggcaagcagggcggcgctggcgaccgcaagcccggggacggcggcgacaagaaggacaagaagtttgagccgccggccgcgccctcccgcgtcggccgcaagcagcgcaagcagaagggcgccga

SEQ ID NO: 37963 - DNA, 273 bp, Zea mays
aaaaaggctaaaatccaaaaaagttggccttcctcgagctagcggctagcgccggtgactcgaccggtgaggccaggatccttggctcgaagaagcgatcgagcaccacacggggttatagatcgacgaaggatccaggatgcggatgagctgcaacgggtgccgcgtgcttcgcaaggggtgcagcgacaactgcgccatccggccgtgcttgcagtggatccgcagccccgacgctgcaggcaacgccaccgtcttcctcgccaagttcta

SEQ ID NO: 37964 - DNA, 277 bp, Zea mays
gtctgctctctcgcttgtgagggatcgagcaaagacgggagcgctgaagcgtctgactctgagttcatcgaagacggctgggaggaactcgtctgggcgcatcacctctttccaccgtggtggaggggccaagaggttgcagaggaaggtcgatgtgaaacgcgacgcctgttccacgggtattgtggagcggatcgagtacgacccgaatcgctcctcgagccttgctcttgtgcgatgggtgcaaggggtgcatttccgccgccccaagagtcca

SEQ ID NO: 37965 - DNA, 280 bp, Zea mays
  unsure (1)..(280): unsure at all n locations
gtgacagttaccttgttggaggccaaccattgccctggtgcagctctaatccacttccgactaagtgatggaaagacctgtctccacactggggattttagagcatcaaaaactatgcaatcgcatccacttctccagagaggccgagtaaatttggtttacctggacacaacatattgcaatcccaagtacaagttcccaccccaggaggatgttattgattttgttgtgagaaccactccaagatatctanagaaacaaccanaaaccctcattgttg

SEQ ID NO: 37966 - DNA, 262 bp, Zea mays
ccaacctctcgtctgctgcctgcctgcctgcctgcctgcaaaaaggagtttgtcatggcgtctaagcgcatcctcaaggagctgaaggacctgcagaaggacccccccacatcatgcagtgcaggtcctgctggtgaggacatgtttcattggcaagcaacaattatgggaccacctgacagtccctatgctggtggtgttttttttagtgaacattcatttcccgccagattaccccttcaaacctccaaaggtttctttc

SEQ ID NO: 37967 - DNA, 281 bp, Zea mays
ctccttcaaagccctgcggcgatttcgattcttcccctctatctccaggtatacccatcggagcagcactgacaaaaattctccagatatggcaagcaaaaggattcagaaggaactcatggatctgcaaaaggacccaccgacatcatgcagtgcagggcctgctggagaggatctattccactggcaggccacaatcatgggtcctagtgacagcccctatgcaggcggggttttctttattaatatccattttcctcctgactacccctttaagcctc

SEQ ID NO: 37968 - DNA, 279 bp, Zea mays
gcaagccttgcaggacaaaattgaacaaggtatccataacactgaacgagtaagggacagtgcaggcggaaggtacaaggatcttaagataccatgggaatggatgctcgactctggagtcataagccaactgaagatggcttccttgaagcttgcaaaggagtacatgaaccgcatcgcgagcactctgaagtcagatccatttgcgaacgacgaggagctacttctgcaaggcgtccgctttgccttccgcgtacaccagcttgctggtggctttga

SEQ ID NO: 37969 - DNA, 278 bp, Zea mays
gcatcgcctacgagtactcggagcaggagctgctgggcggcgccaagagcgacatcctcctccgctccaacccggtgcacaagaagatccccgtgctcctccacgacggccgccccgtctgcgagtccctcgtcatcctcgagtacctcgaggaggccttcccggaggcctcccccaggctgctccccgacgccgcctacgcgcgcgcgcaggcccgcttctgggcggcctactccgacaaggtctacgaggccggcacgcggctgtggaagctcagg

SEQ ID NO: 37970 - DNA, 274 bp, Zea mays
cccacccgacgtaccgcgagccggctatggcgacggtggcgatggacatctcgaagcccacgccggcagcgtccggtgacgaggcagcggcggcggcgaatgggaggagcggcggcgggggcgaggggctgcggcagtactacctgcagcacatccatgacctgcagctccagatccggcagaagacccataacctcaaccgcctcgaggcccagtgcaacgacctcaactcccgagttagaatgctcagggaagagttgcagttgcttcaaga

SEQ ID NO: 37971 - DNA, 271 bp, Zea mays
cggacgctgggtgcgtgctgcagctgatggagatgctgaccgcaacatgattcttggtaaaagattctttgtgacaccgtcggactctgttgccattatcgcagccaatgctgttcaatcaattccttactttgcttctggcctgaagggagttgccaggagcatgccaacatctgctgcccttgatgttgttgcaaagaatttgaaccttaagttctttgaggtgcctactggatggaagttttttgggaatttgatggatgctggaatg

SEQ ID NO: 37972 - DNA, 263 bp, Zea mays
agatgcccgagacggcgcgctacaccgcgctcgtggccaagaacgccaagcaggccgcggccgacatgtccagggtgctccagacggagatcgtcgacgagcaggagaagctggacgagatggtcaccgccgagagcaacaccttcggcctcttctccagggagttcgcgcgccgccacgggctccacctcgtcggcacctccaccacgtggttcctgctcgacatcgccttctacagccagaacctgttccagaaggacatc

SEQ ID NO: 37973 - DNA, 269 bp, Zea mays
ctcaaggtgtgtcttctacctggaaatgtgttgaccataacgatgtcaaagccctatggatttcgttacagaagtggacagtacatatttcttcaatgtccaataatttctccatttgaatggcatcctttctccatcacttcagcacctggagatgactacctcagtgtccacatccggacaaacggtgactggacacaggagctcaagcgcatatttgtggagaactacttctcgccgcatctcaacagaagagcttcgtttagcga

SEQ ID NO: 37974 - DNA, 236 bp, Zea mays
cggacgcgtgggtgcggaaggagtcggagggaaccgaaaactcagggtctcgaatttcctaggagcggaggcgatggctggtaagggaggaaaaggattgctcgccgcgaagacgacggcggccaagtcggcggagaaggacaaggggaagaaggcccccatctcacggtcctcccgcgcgggcctccagtttcctgttggacgaatccaccgtcagctgaagcaaaggactcagg

SEQ ID NO: 37975 - DNA, 267 bp, Zea mays
caccaaccaacaagcaaaaattccccaatcctctcgtctccgcggcgaagatgtcggggcgcggcaagggcggcaagggcctgggcaagggcggcgcgaagatcaccggaaggtgctgcgcgacaacatccaggggatcacgaagccggcgatccggaggctggcgcggcggggcggcgtgaagcgcatctcggggctcatctacgaggagacccgcggcgtgctcaagatcttcctggagaacgtcatccgcgacgccgtcaccta

SEQ ID NO: 37976 - DNA, 266 bp, Zea mays
cggacgcgtgggcggacgcgtgggcgctctgagtctctgaccgccccttccgtcgtccccgttcgaaggcgatgcaagcgagcatttcagccagattcgattcgacatgaatcccgagtacgactaccttttcaaacttctgcttattggtgattctggtgttgggaaatcatgcttgcttctcagatttgcggatgattcatatttggacagctacatcagcacaattggggttgattttaaaattcggacagtagagcaagatg

SEQ ID NO: 37977 - DNA, 256 bp, Zea mays
gtacaaggcggtgatggagaacgggtccgccgtggcggtgaagcggctcaaggacgtggacctcccggagcctgagttccgggagcgcatcgcggtcataggcgcagtgcagcacgagctggtggtgcccctccgcgcctactacttcagcaaggacgagaagctcctcgtctacgactacatgtccatgggcagcctctccgccctgctgcacgggaacgcgcctccggccggacgccgctggactgggagacgc

SEQ ID NO: 37978 - DNA, 268 bp, Zea mays
cgcggactgcgacgagcaggacgggtacgacgaggccatctgcccggtggactcgttccagaagggccccatcctggacgacgagatcaacgagaccatcgtccggccgctggtgcccggcgccaagctccacgccgtcgtcgacgcgtgccacagcgattccgtcctcgacctccccttcctctgcaacatgtccaggaccgggaactggcagtgggaggatcaccgtccaccgtcgggcgtctgaaagggcacgagcggcggccag

SEQ ID NO: 37979 - DNA, 270 bp, Zea mays
attcagaagagcatcttgcgtgatgcagtcactgacttgtctctgcactatcttgctaaggcaaagattctggtggtgaaggacgtggagagggatgagatggagttcatcaccaagaccctaaactgccttcccattgccaacattgagcacttccgcacggataagtttgggtatgcagatgttgttgaggaagtctctgttggagagggcaaggttgtgaagatcactggaatcaaggacatgggtaggaccgcaactgtacttgtc

SEQ ID NO: 37980 - DNA, 284 bp, Zea mays
cccagccgcacgaaaccctaacgccgccgccgcttcacaggtaagccgccgtcatggtctccggttccggcgtatgcgcgaagcatcgtggtggacgcgcgccaccacatgctgggccgcctgtcgtcgattatcgccaaggaactgctcaatgggcagaaggtggtcgtcgtccgctgcgaggagatctgtatgtcgggtggactcgtacgccagaagatgaagtacctccgctttctccgcaagcggatgaacaccaagccatcccatgggcccatccactt

SEQ ID NO: 37981 - DNA, 283 bp, Zea mays
gattgatctgattcttgcataccacagattagttgggcccataccacccgaaattggaaagttaaatcagttgcaaaccttgtcactgcaggggaacagtttgtatggttcactccctcctgaactggggaattgtaccaagctgcaacaattgtatctacaaggaaattatttaagtggatacatcccttcagaatttggcgatctggtggaactcgaggcattggacttgtccagtaatacattgagcggatctgttccacattctcttgataagttgtcc

SEQ ID NO: 37982 - DNA, 282 bp, Zea mays
gctggggataggcgtaggaccgttatgaggccaccacaagttcttatggagggaacaaagaagacagtttttgttaactttatggatttgtgtaaaacgatgcataggcaacctgagcatgtgatgatgtttttacttgctgaaatgggaacaagcgggtcacttgatgggcagcaaaggttggtgatcaaaggaagatttgcccccaaaaactttgaagcaatcctgaggagatacatcaatgagtacgtcatctgcaatggatgcaagagccctgatacc

SEQ ID NO: 37983 - DNA, 283 bp, Zea mays
agttactgaccacatccagggggtacggcctgctgctgaggcagagagaccaggatcttctggtagtggaagcacatctttctggaatcaaatatttacttccaacgaggatcgaacacatgctcctgcaagagataacacagcaaacaaatcttatgctatgcctgcccctaatctggatcattcattctccactatacagttaagagagccaccagtcgtcctgaagccttcagaacaccagtctgagcaggaggcacttgaaatagcaattacaaagttg

SEQ ID NO: 37984 - DNA, 286 bp, Zea mays
ctcaaaggttctcctgtcaatttgctcactgctcacggacccaaaccctgatgatcctcttgtccctgagattgctcacatgtacaagaccgacagggccaagtatgagtccaccgcacgctcctggacacagaagtatgccatgggctagaagcaaggctaaaagctggccaaactggtgaatgtgccggaccccaaatcgttatcacctaaataaccagtcaagtcgcaagtatgaatggacttttgaggaccattgtgccctgttgaactcatgtattacctt

SEQ ID NO: 37985 - DNA, 230 bp, Zea mays
gatatttctgcctccctatcgtgggtcgtccccaatggcctttggtcgcagacatctttgctgcttgtctatgctgagaataaatgtgaacggtgcccctggacgctggatccatgctggttttggacacgttgtctttttgtgtttaacttatctgctaccgtcctgtaacgaattcactaagttctagttcttttgtgctttgttaagaatataaacaatgaggtttc

SEQ ID NO: 37986 - DNA, 276 bp, Zea mays
gaggcatgcagatcttcgtgaagaccctgaccggcaagactatcacccttgaggtggagtcttcagacaccatcgacaacgtcaaggccaagatcaaacgctgctggtccggtgggatgccctccttttttttttttttttttttttttttttttttcaacaacagtatttcggtatttacaaaagttccatatccaattgacctacttggcaatacaaatgacatctaactgaatcaatctatatctacgtagaacacaacacgtacaacgcagt

SEQ ID NO: 37987 - DNA, 277 bp, Zea mays
cgctacactacatcttcaaactggcaggcagatgtggtcacctgggtttgcttttactatattgaaaaggttcatgccagaagagaaacttgcagatgtaaagggtgcaaccctcacggctgatggaacgggggttgtatttgatgttcctgcagcagatgttgaagattacattcaaggtataatggaccttctcttgttcgtgaaataattaagcatgaaaatattttactgatgtgctcttagaatcctctctcttgttatgcaattcaaataa

SEQ ID NO: 37988 - DNA, 276 bp, Zea mays
tctcctctctcgcatccgcagcctctcgagctctactccatcccctcgatctcgaagcgcacagtcagcagtcaggcggccatggacgcgagcgcaccggagccggcgggaaggcgaagaagggcgcggccgggcgcaaggccggcgggccgaggaagaagtcggtgacgaggtccgtcggccgcatcgggcggtacctgaagaagggccggtacgcgcagcgatcggcacgggcgcccccgtctacctggccgccgtcctcgagtacctggccgc

SEQ ID NO: 37989 - DNA, 277 bp, Zea mays
tcaaagcctacatctcatccaatctgtccctcagagatagtcaactcgctgcacaatttcaggaaatccctctggatctgaagatgattgaggcggaaaaggctggatttgagatcctgaaatctactatggtagagaagctccccaatgatctggaaggaatggagtcatcgatggggaagctttacattcttatcgatgagatctacaaatacgtcgatgatgttgtggaaggacgcgtggcacccgacaacagaattggaaggttcatctctga

SEQ ID NO: 37990 - DNA, 279 bp, Zea mays
aaagataggaacactaaacgggacatcaggaaagagctcaaaacgcttgcaaaagaggagagaaaacgacagcagcttgcagtcactgatgtactgaaaaatgcagatgttgtgctgaccactctgactggtgcatcttcgaaaaagttaaacggaattacatttgatttggttgttattgatgaagctgcccaggcacttgaggtggcatgctggatagccttgttgaaagggccgagatgtattcttgctggagaccatcttcaacttcctccaaca

SEQ ID NO: 37991 - DNA, 282 bp, Zea mays
cacaagagagcacgctactactcatcactcgccaacgtgcagagatcagggaggcggcacactccatccactgaccgctcatggcgaaggtccacctctacgtcgccgcggcctgcgccgtcgtcctcgcgctcgccgccccggccctcgccggcgaccccgacatgctgcaggacgtctgcccggctgactacgcctccccggtgaagctgaacgggttcgcgtgcaaggcgaacttttcggcggacgacttcttcttcgacgggctgaggaacccggcaa

SEQ ID NO: 37992 - DNA, 267 bp, Zea mays
cgcagactggtagtagccggcgcgccgtcaccgtatcctcagatcagaggcgagcagaaaccacaccactctactgacgcccgacgagcagtgtaacattttccttcagccatgggtaaggagaagactcacatcaacattgtggtcattggccatgtcgactctggcaagtcgaccaccactggccacctgatctacaagcttggaggtattgacaagcgagtgattgagaggttcgagaacagagctgccgagatgaacaagcgg

SEQ ID NO: 37993 - DNA, 271 bp, Zea mays
cccacgcgtccgaagattcgaacagagagaaccagatgatccctgtccatatcttctttccatatggaccccaggtgaaactgcacaatcgatcgatgcccccaagacattctgtgattcatgggagacgggtagactatgtggaagttcaacatgctttagttgcaacaatatacgagaaatgcaggctcagaaagtcagaggaacacttttgataccatgccgaacagcaatgagaggaagcttcccacttaatgggacgtattttcaa

SEQ ID NO: 37994 - DNA, 273 bp, Zea mays
aggcaccacacctcttcttcttcttcctcctcctcctagcacagctagcgcctgctccccttcgcctgtgatcatgtcttgcagcagcggcaagtgcgactgtggctccagctgctcctgcggcagctcatgcaactgcatgtcccctaacgtggagaccgccgccgccagcagcatcaagaccacggtcctcgccgcgccgaccaccaaggccagcgccggcggcttcgaggcggccaccgagggcggcggctgcgactgcaacacctgcaa

SEQ ID NO: 37995 - DNA, 259 bp, Zea mays
gcggactggtagtgacgggatcactgtggaagaaagcaaggaagctgatacaacaactaaagaggctactcatagaatctcccgtggaatccatgacaaggtagataaatctttgctatgtcagagctgtatttggttaatcaaaattatattgaatagcccagtgcacacaggattgtgtacagagcacatatttgacttatcaattgataatggatcaaaaaatgcaaaaaaaaacttcaatttggtccagtataat

SEQ ID NO: 37996 - DNA, 258 bp, Zea mays
ccccgctctccaagatgtcgtccccgagcaagcgccgcgagatggaccttatgaagctgatgatgagcgactacaaggtcgagatggtgaacgatgggatgcaggaattcttcgtcgaattcaaggggccggccgaaagtatctaccaaggcggtgtctggaaggttagggtagaactgcctgatgcatatccttacaaatccccgtccatcggcttcatcaacaagatttatcacccaaatgtcgatgagatgtctg

SEQ ID NO: 37997 - DNA, 233 bp, Zea mays
cccacgcgtccggaggttgcttccctataaggcgaacttagtagatgatttgctgaggtcattgcagctgattttgaaacttgatgcccgtgtagctgatgcttactgtgagaacattaccttggaggtcacactgcttgtcaaggccaatgcaacccatataaaatcccagatgggctggcggactatcatatccttgctctgcatcacggcacgccatcctgatgcttctg

SEQ ID NO: 37998 - DNA, 260 bp, Zea mays
cggacgcgtggcgagacgcgtgggggccgccttgacatgggccaggttgttgctatcaaacagcataatagggatggatatcaaggaaacaaagaatttctagtggaagttctcatgcttagtttgctgcatcatcaaaaccttgtcaatttggttggttattgtgctgatggagatcaacgccttctcgtgtatgagtacatgccacttggatcattggaggaccatttgcatgatctccctcctgacaaggagccttt

SEQ ID NO: 37999 - DNA, 262 bp, Zea mays
gcaatcaacggcgtgttcggctggctacaagccgacactgttgcagctgtttggattgttgcagctgcaaatccatagagagaaaaatactgtagaagccgcagccgcagccggattgcagccgcagcgaacaagctgcaagtcctctttcttttccgtctggcccacctgccaatctccataatggggccgtcgcattatcgcgccgcggtcggcacaatagtcatctcccgggcccgctggccagcgtgccacggcgtcg

SEQ ID NO: 38000 - DNA, 264 bp, Zea mays
agcacatggtggatgacaagatacattccagatgacgtggtcctgttcagatactcacccgacaaccagcagaggggcgatctcgtgatggtggtctccgctttggagaaatggaaacggattgtatgattgcacatggagcagctttcttcctgaaggaaaggctgtttgaccagagtgacgcatacagagtccatgtatgtgagaaatgtggtctcatcgcaattgctaatctaaagaaaaactcgtttgaatgtaggggct

SEQ ID NO: 38001 - DNA, 267 bp, Zea mays
accaagggatcaccgtggttgctggtgttgaagctagagggttcatttttggtcctcctatcgctttagccattggcgcaaaatttgtgcctttgaggaagccgaagaagttgccaggcgaggtgatctccgaagagtattctttggaatatggaactgacaagatagaaatgcatgtcggagctgtacaggccaacgaccgggctcttgtagtcgatgatcttattgctaccggtggaacactatgtgcagctgtcaaacttattg

SEQ ID NO: 38002 - DNA, 265 bp, Zea mays
cccactacagctaccccaccatcctggccgacgtcagcacggggctcggggaggccatggtcggcatcaacctcaacgaccccaaggtggaacgatacgccgccagatccgagtgaaccctttctttccgtagtcatctccatccatctgccttggattgcatttccgtcgtctcatgtctctcaatcagtaataatggaatgaatgaaatggtaagaaacaaagctatggtactatgcagaacctctttaattttgtgctactg

SEQ ID NO: 38003 - DNA, 249 bp, Zea mays
cccacgcgtccgctttccccgtgcttctccgccgtcgaggccgcgtcccagtgcgaagagaccacgactcagatggccagccgctgggtccggcccgaggtgtacccgctgttcgcggcaacgggcgtggccgtcggcatctgcggatttcagctcttccggaacatcaccggcaacccggaagtcagggtaaacaaggcagggagggcagctggtgtgcttgagaaccatgaggaggggaggcgttac

SEQ ID NO: 38004 - DNA, 250 bp, Zea mays
cggacgcgtggcggacgcgtgggcgccgtcgtgcgctcgctacccctctccctcgaggcctttgccgacgaacagcgcccagtcgcccaccaggatgaagtttgttgctgcctacctgcttgctgtcctcgctgggaactccagcccctctgccgaggacttgacagccattctggagtcagttggctgtgaagttgacaatgaaaagatggaactccttctgtcccaactgagcggtaaggacattacc

SEQ ID NO: 38005 - DNA, 256 bp, Zea mays
cccacgcgtccggttctacaacaactgcccgcgcacgcggggactgcgtcggccgcggcttcctccgccgcttctccttccagccgctcaaggagaaccccctcctcggccccacggccgccacgctgcagagatacggagccctcgactggtacaaggtcgtgcacgggaaccaggcctggcggctggagtcgtgcacctggctgcacgccggcctcatccacctgctcgccaacatgatcagcctcatcttcat

SEQ ID NO: 38006 - DNA, 248 bp, Zea mays
gatgcccctcagccatgtccttgccaccaagcttggtgctcgtctcacggaggttcgcaagaatggaacctgcccctggctcaggcccgatgggaagacccaggtgacagtggagtaccgcaacgagggtggcgccatggttcccatccgtgtgcacacagtcctcatctctacccagcacgacgagacagtcaccaacgacgagattgctgctgacctgaaggagcacgtcatcaagccagtcatcc

SEQ ID NO: 38007 - DNA, 245 bp, Zea mays
gtgccaccgtctgcatccagggcatcgcctggtccttcggcggcatgatcttcgccctcgtctactgcaccgccggcatctccggcgggcacatcaacccggcggtgaccttcgggctgttcctggcgaggaagttgtccctcaccagggcggtgttttacatcatcatgcagtgcctggacgccatctgcggcgcgggcgtcgtcaaggggttccagcaggggctgtacatgggcaacggcggc

SEQ ID NO: 38008 - DNA, 246 bp, Zea mays
gtccttccatgtcgaagtccatcggaaatggagtgcaattccttaaccgacacctgtcgtccaagttgttccaggacaaggagagtttgtaccccttgctgaacttcctcaaggctcataactacaagggcacgacgatgatgttgaatgacagaatccaaagccttcgtggtctccaatcatccctgagaaaggcagaggagtatctactgagtgttcctcaagacactccctactcggagttca

SEQ ID NO: 38009 - DNA, 243 bp, Zea mays
tatcaaggtccgggaccgtgggcacccttcatgagtggttcccttgtgagaaccttggcatagccgcgtgacatggctacttcctgaggtgtaagagggacgcggaatggaagacctgtgtcgctgccacagactgcagctggaagcagatcgcggagccggtgatgtgcctgtacagggagacgacggacggctcaaccatcgaggacagggagacggtgctcgtgtggaactacgaggacg

SEQ ID NO: 38010 - DNA, 246 bp, Zea mays
ccgacggtgtgggccgccgtggtggcggcggcggctaccgcggtcgcggccgcggctgcggtggcagcagcggctacggtggtggtggtggcggctacggcggtggcaaccgtggcggcgggtacggcaactccgacgggagctggaggaagtgagcggtggggcccgcgcgggcaagttatggtgttcgctaccgtgatgtttaggctagtgcggagggtttatcttcggtcgtctcgtttgttg

SEQ ID NO: 38011 - DNA, 254 bp, Zea mays
cccacgcgtccgatcaagctcagagcctcagaacgccaccaagtcttgcggtcgcgaagagcaacgcaacaagatggtgaagctcgcattcggaagcgtcggcgactccttcagcgtcacctccatcaaggcctacgtggcggagttcatcgccaccctcctcttcgtcttcgccggcgtgggttccgccatcgccttcgggcaactgacgaatggcggcgcgctggaccctgcgggactggtggcgatcgcgg

SEQ ID NO: 38012 - DNA, 255 bp, Zea mays
catggaagctctgtacaagaaggtccatgctgccatccgtgctgatgcttctgtggtcaagtcaaccaagcagccaccaaaggagcacaagaggtacaaccccaagaaactgacgtacgagcagaggaaggccagtctcattgaaaggctcaaccaactcaactcctcgggcggcgcagatgacgacgatgaggatgacgagtaaagtttggtcccatcgaagtagtgctatcttatgcggcgatcagtatttgt

SEQ ID NO: 38013 - DNA, 264 bp, Zea mays
accgctctcacttcagcatctgggcactcgccaaggctccgcttctgatcgggtgcgacgtgcgggcgatgagccagcagacgatgggcatactcagcaactcggaagtcatcgccgtgaaccaagatagccaaggtgcgcagggaaagaaagtgcagtccagcaatggcttggaggtttgggctgggccgctcagcaacaacaggaaggccgtggttctctggaaccggcagggataccaggcaaccatcaccgcacagtggt

SEQ ID NO: 38014 - DNA, 278 bp, Zea mays
cccacgcgtccgcccacgcgtccggcttgttatggagaccctgagtgcattccttcacgcactgaggcttcactgggtggagttccagaacaagttctatgaaggtgatggttacaagttcgccccattctactttgcgctgattcgtgaggaagaagattgagatcgtcccatgtagccgatgtacaatctttgatggcctttgttcccggaacaaatcattttttcatctgttgtctcggatggatcataaacctcagtccctttgtttagacatg

SEQ ID NO: 38015 - DNA, 199 bp, Zea mays
cgttatgatggcatcccagtatcatgggatgaacatgctgttacatcttgttctggcgggaagggaaacaagagcactggggataactttgatggggttcccaatatagatcatacacaaccatttgtacgcaaagatattatcgaatggttgatctggcttcgaaaatcagttggttttcaagatttccgctttgatt

SEQ ID NO: 38016 - DNA, 286 bp, Zea mays
  unsure (1)..(286): unsure at all n locations
ggctggttggccaggttcttggtgaagtaggttcactacctgatgtttacgtagagcttgagatcaatttcttcctactccggaggctgttgggtgtgaggacgaaaggtacagagaaggcagggaaggtgtcgaagctcaccaagggtgagatcctcatgcttaacatagggtccatgtccacaggcgcccgtgtggtcgctgttaagaacgatcttgcaaggttaaggttaacggggcctgtctgcacgagccgangagagaaggttgctctgagccgtcgcgt

SEQ ID NO: 38017 - DNA, 283 bp, Zea mays
ggagcggtcaagaggggttacctcaagacggacgaggagttcctcaagagggacgagagcgggggcgcgtgctgcgtcacagccgtcctccaaaagggtggactggtcgtctccaacgctggagactgccgtgcggtgctcagccgagcagggaaggcagaggcgctcacctctgaccaccgggcgtccagggaggatgagaaggaaaggattgagaatttgggtggatttgtggtgaattaccgtggaacatggcgagtccagggctccctggcagtgtcta

SEQ ID NO: 38018 - DNA, 236 bp, Zea mays
gtcatatctagctatagtagctcccttgagaagcatttgacggaggagccatgtctgaggagaagcaccaccaccacctgtttcaccaccgcaagccagaggaggagggcgcctccggcgaggtcgactacgagaagaaggagaagcaccacaagcacatggagaagctcggcgagctcggcgccatcgccgccggcgcgtacgccctgcacgagaagcacaaggccaaaaaggcc

SEQ ID NO: 38019 - DNA, 262 bp, Zea mays
cgaccccccatcccctccctgacatggccgacaacgcgaaggccgcggcggcgcatgcgaggccggagtcgtcgcaggaggaggaggaggactggaaggaggccgagggggacgtcgccgaagtcgaccgcgccgccaccaatggcgccggcgaggggggcgtgcccacagacaggccgatccgggtctacgccgacggcatctacgacctcttccacttcggccacgcgaagtcgctggagcaggccaagaagtcgtttcc

SEQ ID NO: 38020 - DNA, 278 bp, Zea mays
ggcgacttcacccgcggcaacggcaccggcggcgagtccatctacggcgagaagttccccgacgagaagttcgtgcgcaagcacaccgcccccggtgtgctctccatggccaacgccgggcccaacaccaacggctcccagttcttcatctgcaccgtcgcgaccccttggctcgacggcaagcacgtcgtcttcggccaggtcgtcgagggcatggacgtcgtcaaggccatcgagaaggtgggcacccgcaacggctccacctccaaggtggtcaa

SEQ ID NO: 38021 - DNA, 272 bp, Zea mays
cccacgcgtccgcgcattcggaagcgtcggcgactccttcagcgtcacctccatcaaggcctacgtggcggagttcatcgccaccctcctcttcgtcttcgccggcgtgggttccgccatcgccttcgggcaactgacgaatggcggcgcgctggaccctgcgggactggtggcgatcgcggtggcgcacgcgctggccctcttcgtgggcgtctccgtggccgcgaacacctccggcggccacctgaacatccgcgtgacgttcggcctgg

SEQ ID NO: 38022 - DNA, 271 bp, Zea mays
cggacggtgggcggacgcgtggggtgaaaacactgagagcacagcccaaagccaatgatcagtacttcccaccatttgtgatagttgatgacagtggcaatgctgttgggcctgtattagatggtgatgcagttgtcactatcaacttccgagctgatcgcatggttatgcttgcgaaagcactagagtatgcagattttgacaactttgaccgtgttcgtgtccccaaaatccgatatgctgggatgcttcagtatgatggtgagttgag

SEQ ID NO: 38023 - DNA, 273 bp, Zea mays
gggactactacgcgcgcgtcggcaaggcgtggaagcgcgggtacctcctgtacgggccccccgggacggggaagtcggccatgatcgccgccatggccaactacctcgactacgacatctacgacatcgagctcacgtccgtgcactccaacaccgacctccgcaagctcttcatcgagaccaccagcaagtccatcatcgtcatcgaggacatcgactgctccctcgacctcacaggcgcgcgcgaaaagaagaagccgccggaggaggacg

SEQ ID NO: 38024 - DNA, 273 bp, Zea mays
cttccaccgcgcttcgcccactcgctccagccgcttcaccgcgccgccaccgccaccgcgaggatgccgttcaagaggttcgtggagatcgggcgcgtggccctggtgaactacggggaggactatggccgtctcgttgtcatcgtcgatgtggtcgaccagaacagggcacttgtggatgcccctgatatggtcaggtgccaggtgaacttcaagcggctctcacttactgacatcaagattgacatcaaacgtgtccccaagaagacagcc

SEQ ID NO: 38025 - DNA, 272 bp, Zea mays
agcaagtattaactgatgatgttgatttcaatgtgatgctttcttttctagaattctatgagactcttctaggatttgtgaacttcaaactctatcattcaataaatgtaaattatcctcctattctggatccacgtctggaagctttagctgctgagctctatgcattgtgccgatacatgtctgctggttccagaagaatgattgggcattcacaaactgacgaagtaatggaagataaggatgagaaaagtacagctgaggaagtaatt

SEQ ID NO: 38026 - DNA, 272 bp, Zea mays
tcgggacgcgtggcggacgcgtgggcggacgcgtgggaagttatgcgcgcacttggtgactaccttagtgttaaagtcattgcatgcgttagaggaacatctgttcgtgaggaccaaaggattctcgccagtggtgtgcatgttgttgttggtacacctggtcgtgtgtttgacatgctgcgtagacagtccctccgccctgataacatcaagatgtttgttcttgatgaagctgatgaaatgctttctcgtggtttcaaggatcagattta

SEQ ID NO: 38027 - DNA, 272 bp, Zea mays
agattatcgatcggagtggaagattgaagtgcaccagcctattgctggaaactattatcctgttaatcttggcatctatgtggaggatggcagcaaagagctgtctgtactggtagacaggtcaattggaggttccagtataaaggatggacaaatagagctaatgctacacaggaggctactccatgatgatgggaaaggcgtcgccgaggcgctaaatgaaacagtctgtctcgataagcaatgtgaaggactcattatacaaggaaaat

SEQ ID NO: 38028 - DNA, 270 bp, Zea mays
gtccgagcggatcgtccaggacgcactggacagggtgatggtgaaccggacaacagtgatcgtcgctcaccgtctgtcaacaatacaaaatgcagatttgattgcggtcgtgaggaatggggttatcatcgagaagggaaagcacgatgccttgatcaacatcaaggatggcgcctatgcgtccctcgtcgcccttcactcggcagcctcttcatagcaggtgatggtatgggatcctgcatacgtctgctaagacatatatgaacagag

SEQ ID NO: 38029 - DNA, 266 bp, Zea mays
ggacctgggcgggcgctgaggaagatggggctcgcgttcgggaagctcttcagccggctctatgccaagaaggagatgcgtattcttatggtcggtctcgacgccgccggtaaaaccaccatcctctacaagctcaagctcggcgagatcgtcacaaccatccccaccatcggtttcaatgttgaaactgttgagtacaagaacattagcttcacggtctgggatgtcgggggtcaggacaagatcagacctctctggaggcatta

SEQ ID NO: 38030 - DNA, 256 bp, Zea mays
atctgcccttgccgccgccaccgcccgatccaggtctgcagactgctccctcctcctctccgctccgaatggcccgcacgaagcagacggcgcgcaagtcgaccggcggcaaggcgccgcggaagcagctggccaccgaagcggcacgcaagtcggccccggccacgggctgcgtgaagaagccgcaccgcttaccgcccggcaccgtcgcgctccggagatccgcaagtaccagaagagcacggagctgctcatc

SEQ ID NO: 38031 - DNA, 264 bp, Zea mays
cttaagaatgtcacaaactacattactgatatcatctgcaagcgtgcagatcttggttacaactatggtgttatccttataccagaaggcctgattgatttcatcccagaggttcaaaaactcatcgcggaattgaatgaaattttagcacatgatgttgttgatgaggcaggggcctggaaaagcaagcttcaggctgaatcaagggagctgtttgagtttttgcccaaaactattcaggagcaacttatgcttgaaagagat

SEQ ID NO: 38032 - DNA, 267 bp, Zea mays
agacgctgcagttcgagcacaagctgttctactttgatctgaaggagaacccgcgggggaggtacctcaagatctccgagaagacatcggccacgcgctccaccatcatcgtccccatcgacggcgtcgcctggttcctcgacctcttcgactactacatccgcaccgacgagcgcgacgtcttcagcaaggagctgcgactccagaccaaggtgttctatttcgatatcggggagaacaagaggggccgattcctcaaggtttctg

SEQ ID NO: 38033 - DNA, 265 bp, Zea mays
agacgcactccaccttcttcaaggcgtgccgcctcgccggcttcgaccccgccaacatccgctgcatccccaccggcccggagacggactacggcctcgacccggcgaggctgctcgaggtcatgcaggccgacgtcgacgccggcctcgtgccgacctacgtctgcgccacggtcggcaccacgtcgtccaacgccgtcgaccctgtgcgagccattgccgatgccgccgccgtgttcaacgcgtgggtccacatcgacgccgc

SEQ ID NO: 38034 - DNA, 260 bp, Zea mays
cccacgcgtccgctgcctcgtgtggccgtcgtctcccgttcggaacgccaagcccccctccggcgaaatggcccccaagcgaggtggcagggcgccggtgccggccaagaagaagacggataaagtgacgaaccctctgtttgagaagaggccgaagcagttcggcatcggcggcgcgttgccgcccaagaaggacctgcaccggttcgtcaagtggcccaaggtcgtgcgtatccagcgccacgtccgcatcctcaagc

SEQ ID NO: 38035 - DNA, 264 bp, Zea mays
cggacggtggtccccatccgcacctctctccatctccctgctcctccgccttcttcttgatccagacaagccagggatcgccatgtcggactcggaggagcaccacttcgaatcgaaggccgacgccggagcgtccaagacctacccgcagcaggctggcaccgtccgtaagaacggcttcatcgtcatcaagaaccgcccctgcacagttgtggaggtttctacctcaaagactggtaagcatggtcatgccaaatgccactt

SEQ ID NO: 38036 - DNA, 264 bp, Zea mays
cacgccaacaacatccgtgacaccttccgtattctgcttcagatgggcgccgtgctcatgttcggtggtcaggtgccggtcgtcaaggtggggaggatggctggccagtttgccaagccaaggtccgaaccgttggaggagagggacggcgtcaagctgccaagctacaggggcgacaacgtcaacggcgacgacttcaccgagaagagccgcgtgccagacccgcagaggatgatccgcgcctactcgcagtcggtggcgacg

SEQ ID NO: 38037 - DNA, 261 bp, Zea mays
gcaaatcagaatattatgcctatccagtcacagtttgacagccttatccgtgaaggatcactagagtggagaaacctttgtgagaacgagacatatagaaagcgttttcctgataagcactttgatcttgaaactgtccttcataccaaaattcacccgctgacagtttcccccagcaatcttttatttgatctgtcttattatgactatggatgagacttttgtgatataattgatgagactatggatttaaatattgtt

SEQ ID NO: 38038 - DNA, 261 bp, Zea mays
atcggggacccgcccttcaacgtcgacgtcggggagttcgccaaggaggtgaacgccgtggacgtgctggtgggcgtgcacggcgccgggctcaccaactcgctgttcctccccacgggcgccgtgttcatccagatcaacccgtacggcaagatggagcacatcggggaggtggacttcggcatccccgctgtggacatggggctcaagtacatcgcctactccgccggcgtcgaggagaccaccctggtggacacgctg

SEQ ID NO: 38039 - DNA, 262 bp, Zea mays
gggggaggatgggcaggcgcagaggttgaggaggaggaagaagaagaagggggctcggggtggtgctcttcaacttcggcgactccaacagcgacacgggcggcgtggcggcggtcatggggatccgcatcgcgccgccggagggcagggcctacttccaccaccccacggggcggctctccgacggacgcgtcatcctcgacttcatctgtgagagcctgggcatgccgcacctgagtccgttcatgaagccgctgggctc

SEQ ID NO: 38040 - DNA, 255 bp, Zea mays
cgttccatttccccatctcccagatccaattcgcgagttctccctcctctgcggccatggcgctctctgtggagaagacctcgtctggacgggagtacaaggtcaaggatctctcgcaggcggacttcggccgcctcgagattgagctggccgaggtcgaaatgcccggcctcatggcgtgccgcgccgagttcggcccgtccaagcccttcgccggcgctaggatctcggggtctctccacatgaccatccaga

SEQ ID NO: 38041 - DNA, 259 bp, Zea mays
ctcacgcgtccgaggacggtgagaaccggctcgtccgcccgttgcctgtcgtcgctatggccgccgtggaggtgtgcgtgaaggccgccgcggggaaccccgacacgctcggcgattgcccgttctcgcagagggtgctgctcacgctggaggagaagaaggtcccgtacgaggtgaagctcgtcgacctcggcaacaagcccgaatggtttctgaacatcagcccagagggtaaggtgcctttgttcaacggtggaga

SEQ ID NO: 38042 - DNA, 259 bp, Zea mays
gagcccacggcgggggcgccttctccggcaaggacccgaccaaggtggaccgcagcggggcctacgtcgcgaggcaggctgccaagagcatcgtcgccgccggcctcgcccgccgcgccattgtccaggtctcctacgccatcggcgtgcccgagcccctttcggtgttcgtggacacgtacggcaccggcgcgatccccgacaaggagatcctgaagatcgtgaaggagaacttcgacttcaggcccggcatgatcat

SEQ ID NO: 38043 - DNA, 262 bp, Zea mays
cccacgcgtccgcccacgcgtccgccgtgtccttgctcctcgctctggctctcctggccgccgcggcgtcggcggactcgtggctgtacgagaagttcacgacggagggcaacgtgcgcgcggactacaacgcgcaggggcagcaggtgacgtctctgatcctgacgcagcagtccggcggcgccttcagctcgcggcagaagtacctgtacggggagttcagcatccagatgaggctgatcccgggcaactccgcgggcac

SEQ ID NO: 38044 - DNA, 261 bp, Zea mays
ggaccgtggtgagcgcggctcctcctcctcggggccgccgtgctgctgctcgcgtcggccgccacggagcaggactgcctgtccgcgacgttcagcggcgggcggaccttcgggcggtgcaacaacctgccgtcgctgagcgccagcctgcactggacgtaccacccggagaacggcaccgcggacgtggcgttccgcgcgccatcggacgccagcggctgggtcgcctggggcatcaaccccgaccgcggcggcagcatg

SEQ ID NO: 38045 - DNA, 269 bp, Zea mays
cggacgcgtggacgagctccgcctccgctccgcgccagagggagcgcccagccgctgcgacgtccgccaccacgtccccgccgtcgtcttctccaccggcggctacacgggcaacgtgtagcacgagttcaacgacggcatcatcccgctctacatcaccgcgcgccactataacaagaaggtggtcttcgtcatgctcgagtaccacgactggtggatgaccaagtacggccacatcgttgagcagctctccgactacccgcccatcg

SEQ ID NO: 38046 - DNA, 289 bp, Zea mays
agcagattggggagttcctccaccaggcagtgaccatctgcctgaacatccagaaggagtacggcaagctcctcaaggacttcaacaagggcctggtgaacaacaaggacatcgagaacctcaaggtccaggtggagaagtttgccgactccttcgacatgcctgggttcacgcttgagagcatgaaatacaaggagtagatatgcctctttcatgcgcggcaaggtcctcctgtaccgatgtctttccttgtggtggcgcaggtgccatggcactgcattgctgccac

SEQ ID NO: 38047 - DNA, 282 bp, Zea mays
cctcgttcctgtcgcgcaccacgacctccacttcacatctcccccggcggcggcgcggtcagttgaacaatggcggactccaaggccacctcggcggtcaccctccgcacccgcaagttcatgaccaaccgcctcctggcccgcaagcaattcgtgcttgaggtgatccgacccggccgcgccaacgtctccaaggcggagttgaaggagaagcttgccaaggcgtacgaggtgaaggacccaaacaccatctttgtcttcaagttccgcacccacttcgga

SEQ ID NO: 38048 - DNA, 293 bp, Zea mays
gattttcgcggcgaaaggcctcgacctcaaggacctggctgtcctgtccggagcgcacaccctcggcacggcgcactgccggtcttacgccggccggctctacaacttcagcagcgcctacactgcggacccgtctctcgacagcaggtacgccgaccggctcaggacgcgctgcaggagcgtcgacgacgacgatgccgtgctttcggagatggaccccggcagcttcaagaccttcgacacgagctactaccgccacgtcgccaagcggagggagctcttccagtccgacg

SEQ ID NO: 38049 - DNA, 290 bp, Zea mays
ctcctcttccaccaaactccagaggcatccaacagcaggcgaggaaagcaagacacgcccacccacccgctccggcagccagcggctatgcagcagcagatgcccatgccgccggcgcccgctgccgccgcggcggcggcgcccccggcggccggcatcactaccgagcagatccagaagtatttggacgaaaataagcaacttattttggccatcctggaaaatcagaacttagggaagttggctgaatgtgctcagtatcaagctcaacttcaaaagaacctcttgta

SEQ ID NO: 38050 - DNA, 284 bp, Zea mays
cccacgcgtccgagcagctagggttccgtcctcgatccgatccgccgagtgcacaccacctttccccactccgatcgaatcgatggccgccgagggcgagaagaagatgataaccctcaaaagctccgatggcgaggagttcgaggtggaagaggcggtggcgatggagtcgcagaccatccgccacatgatcgaggatgactgcgccgacaacggtatccctcttcctaacgtcaactccaagatcctatccaaggtaatcgagtactgcaacaagcacgtac

SEQ ID NO: 38051 - DNA, 280 bp, Zea mays
cggacgcgtgggcggacgcgtgggcggacgcgtggggtcatcaagcctggtatggtagtcacctttggtccaactggcctgacgcctgaggtgaagtctgttgagatgcaccacgaggcgcttcaggaggctcttccgggcgacaatgttggcttcaacgtgaagaacgttgctgtcaaggatctcaagcgtgggttcgtggcctccaactccaaggatgaccctgccaaggaggctgccagcttcacctcccaggtcatcatcatgaaccaccctgggc

SEQ ID NO: 38052 - DNA, 283 bp, Zea mays
attcgaagctctctctgctcgcagccatggcgaagaattacccaaccgtgagcgccgagtacagcgaggccgtcgagaaggccaggcgcaagctccgcgccctcatcgccgagaagagctgcgcgcccctcatgctccgcctcgcgtggcactccgcggggacgttcgacgtgtcgtcgaggaccggcggtcccttcggtactatgaagtgcccggcggaactggctcacggcgccaacgcggggctggacatcgcggtgcggctgctcgagcccatcaagga

SEQ ID NO: 38053 - DNA, 277 bp, Zea mays
aaagaaattgagcctgcacttaagaagcagctcatcatctccaccgtcctgatgacttttggtattgctctaatcagctggttggcccttccagctaagttcaccatctacaacttcggtactcagaaggaggtttccaactggggtttgttcttctgtgtttcaattggtctgtgggctggtttgattattggttttgtcacagaatactacactagcaatgcatacagtcctgtgcaagatgttgcggattcgtgcagaactggtgctgccacta

SEQ ID NO: 38054 - DNA, 269 bp, Zea mays
  unsure (1)..(269): unsure at all n locations
gggtttcttggaacagaaaaacaattccaagctgcatatggaaaacccttgctagctgccaaagattctaaatgttcagcaaaggatgctgaagctggtattcttgcaatggaggcactgcataagcaggtcatgccgtttctactgagaagaacaaaggatgaagttttatctgatcttccagagaagataatccaggatagatattgtgatctcagtctattgcagctcaaactttatgacaattttccactccaatgcanagacga

SEQ ID NO: 38055 - DNA, 280 bp, Zea mays
gcagatcttgtgaccctccctcagccgcgtcgcgtcgcatcctacgatccaaagctctctctgctcgcagccatggcgaagaactacccgaccgtgagcgccgagtacagcgaggctgtggagaaggccaggcgcaagctccgagccctcatcgccgagaagagctgcgccccgctcatgctccgcctcgcgtggcactccgcggggacgttcgacgtgtcgtcgaggaccggcggtccattcggcacgatgaagcatcagtcggaattggctcacggcg

SEQ ID NO: 38056 - DNA, 246 bp, Zea mays
  unsure (1)..(246): unsure at all n locations
cctagctgcggctgctctgactgcagatcggcgctggtgtctcactggtacaccaattcagaacaatttggaggatttatacagccttttccggtttctgaaagttgaaccatggaggaactgggctttgtggaataaacttgtacagaaaccatatgaagaaggtgatgaaaggggcttaaagctactgcagtccattttgaagccaataatgctgagaaggactanaaattgcacagacaagga

SEQ ID NO: 38057 - DNA, 254 bp, Zea mays
cgcactttccttgcttctctatacagcgactatcttgaagctgcagacacgcctgggtggtactgcggacctaacttctacaccacagaagtcctccgcaagtttgccaggtcacagctcgactacattcttggcaagaacccattgaagatgagctacgttgtgggtttcggaaacaagtatccgaagcgccctcatcacagaggcgcgtcgatacctcacaacggcgtcaaatatgggtgcgaaagagggta

SEQ ID NO: 38058 - DNA, 288 bp, Zea mays
ctcttgagcagcacatcaagaacctcctcagcccgtccacaccgttcttcttcaacaccctgtacgacccctaccgtgagggtgctgactttgtgcgtggataccccttcagcctcagggagggtgcccacactgctgtctcccacggcctgtggctgaacatccctgactatgatgcacccacccagctggtcaagcctaaggagatgaacgaaaggtacgttgatgctgtcatgacaatccccaagggaaccttgttccccatgtgcggcatgaagcttgccttcg

SEQ ID NO: 38059 - DNA, 269 bp, Zea mays
cgtaagccttcaaaccgacgaatttgagcaactgcacccagagcgcgatccattgccggggaagaagcaacttgttgcgagcctcctctatggcgagctccgaccatggttccaccaccgcccccaaggacgtgccgggcagctacggcctgccgctggtgggcgccgtgcgcgaccgcctcgacttctactacttccaggggcaggacaagtacttcgagtcccgcgtggagcgctacggctccaccgtggtgcgcatgaacgtgccg

SEQ ID NO: 38060 - DNA, 261 bp, Zea mays
ctccgctcggccaccagctttgaccgcctcccctcccctcctctcctgtgttcctccataccccactccccccgcaggagcggcgcggcggcggcaaaggcaaaggcaaaggcaagatgttcgggcgcgcgccgaagaagagcgacaacaccaagtactatgagatcctcggggtgcccaagtcggcgtcccaggacgacctcaagaaggcctaccgcatagccgctatcaagaaccaccccgacaagggcggtgaccccg

SEQ ID NO: 38061 - DNA, 256 bp, Zea mays
cttcgtcctcgtctactgcaccgccggcatctcggggggccacatcaaccccgccgtcaccttcggcctcttcctggcgcgcaaggtctccctggtgcgcgcgctgctctacatcgtggcgcagtgcctcggcgccatctgcggcgtcggcctcgtcaaggcgttccagagcgcctacttcgacaggtacggcggcggcgccaactcgctcgcctccggctactcccgcggcaccggcctcggcgccgagatcatc

SEQ ID NO: 38062 - DNA, 253 bp, Zea mays
caagattaagctgtcggggaatgaagcgcatagcagtgcttgctatgatgtgctggtggatgttcccttcccgctgcagaaagagatgatggcattccttgccaacacagagaagcacaaggacattgaggcctgcgacgaggtgatatctgcttcgatcaagaagatccatgagcatcgcaggaggagggccttcttcctgggtttcagccagtccccagtggagttcatcaatgctctgatagcttctcag

SEQ ID NO: 38063 - DNA, 252 bp, Zea mays
cccacgcgtccgggcaaatctgtgattgctgagcccagcaatgtgattttcttgtccgcaatccttaacacagaaggatcaaaccctagtcacaagtgtgacaagaggtgccagaacgagaacatttttgggaacatgtaccgttgcaaactgactggaaccactcacatctgtgacaaaaactgtaaccagagaatcctctatgacaaccataactcgctctgccgagtgagtgggcagttttttccgctc

SEQ ID NO: 38064 - DNA, 256 bp, Zea mays
atcctcatcatcgtcacggccttcgtcacggtggcgctcacctacttccagctcgccgtcgaagaccaccagtggtggtggagatctgtcctgtgcggaggctcgacaggcatattcatattcttctactgcatctactactaccacgcgcggtcggacatgtcggggttcatgcagacgtccttcttcttcggctacatgacctgcgtgtgctacggcttcatcctcatgctggaacggtcggctttcgagcgtc

SEQ ID NO: 38065 - DNA, 254 bp, Zea mays
ctcccttgcaaacgttcctttcctcatactgggcaacaagattgacatcccatacgcggcttcagaggaggagctgaggtactacctcggcctgagcaacttcacaaccgggaagggcaacgtgaacttggccgactccaacgtccgccccctggagatcttcatgtgcagtgtggtgcgcaagatgggctatggcgaaggcttcaaatggatgtctcagtacatcaagtgagtcgctgctgtcctcttttgtc

SEQ ID NO: 38066 - DNA, 245 bp, Zea mays
cggacgcgtggaactctcccttgaaggtcatagattttggcctgtctgactttgtgaagccagacgaaagactaaatgatattgttggaagtgcatactacgttgctccagaggtgctccaccgatcttacggcaccgaggcagatatgtggagcatcggagtaatcgcctacatcttgctatgcgggagccgacctttctgggcgcgcacggagtcaggaatcttccgggctgtcttgaaggcg

SEQ ID NO: 38067 - DNA, 245 bp, Zea mays
gtgacggttgctctagatccgttcatcctggtggttttgtgaggtcgaaagcggcgagcgaattagaagatgctggacaagctgtgggacgacgtggtggccgggcctcgcccggagacgggcctcgagaagctccgcaaggccaccaccgcccgcccgctcgtcatcaacaaagacgcggacggcggcagctacaagcgggcgcagtcgacgccgtcgaccccgacgacgccggtgacgccgtc

SEQ ID NO: 38068 - DNA, 249 bp, Zea mays
gttgaaagggtggttggaaggcggcttgatcctgtaacagggaaaatatatcatttgaagtattctccgccagagaatgaagaaatcgcttcaaggcttacacaaagatttgacgatacagaagaaaaggttaagttgaggctggagacttattaccaaaatatcgagtccttgctatcaacatatgagaacattattgttaaagtgcaaggagatgccacagtggatgctgtctttgctaagatcgac

SEQ ID NO: 38069 - DNA, 239 bp, Zea mays
cggacgcgtggggacgaggtgggctacaaccggtcgacggggttcgtgtggctgcggcaggccgccggccgcacccacaccttcggctccatcggcaagcaggtgtggtacgacagggaggtgacggcgttcgtggagcccgggcggatgcacggcctcgccggggtgaagagcaaggagctcctcatctgggtcaccatctccgagatcgtcctcagcccctccggcaccaagatcgt

SEQ ID NO: 38070 - DNA, 238 bp, Zea mays
ggcacaccccccgagctcagcttagctccactccagctccaatcacagtcgtgaccagagcgcgagagctagctagagggccgtgaaaatgccgatcaataggatcgccctggggagccaccaggaggtgtaccacccgggcgccctcaaggcggcgttcgctgagttcatctccaacctcatcttcgtcttcggcggccaggggtccggcaatggcttcagcaagctgaccggcggc

SEQ ID NO: 38071 - DNA, 195 bp, Zea mays
caagtccacctccaagtgcgccaccgtcggcatccagggcatcgcctggtccttcggcggcatgatcttcgccctcgtctactgcaccgccggcatctccggcgggcacatcaacccggcggtgaccttcgggctgttcctggcgaggaagttgtccctcaccagggcggtgttttacatcatcatgcagtgcct

SEQ ID NO: 38072 - DNA, 264 bp, Zea mays
  unsure (1)..(264): unsure at all n locations
gagaaaacgccataattgttacaactgtgctctagtattttgtcattcctgcagcagtaaaaaatccctgaaggcttcattagcacctaatacaaacaagccctaccgtgtctgcgatacctgctacagcaaactgacaaagggacttgagacggatatgcattcttcagcgaacgngctgctactgtaccgggagtcagtgatgcaaatgaggaggatctggaaacaaggtcaaatgctcaactatcaaggttgtcttcaatg

SEQ ID NO: 38073 - DNA, 282 bp, Zea mays
cggacgcgtggcggacgcgtgggcgccgccgccggacttccggtgccccatctccctcgagctgaagggcgaccccgtcgtggcttctagcggtcagacgtacgaccgtgactccatcacgcggtggttcggctctggcaaatccacgtgccccaagaccgggcaagtgctgctgaatctggaactcgtgcacaacaaggcgctcaagaacttgatatcccggtggtgccgggagaacggcatccccatggagaccagcgactccggaaaatcagacccggc

SEQ ID NO: 38074 - DNA, 212 bp, Zea mays
gcggccgcccttttttttttttttttttgataacaagtatatcaggaagttcctttatttaaaacgcgctgctaatgcaggctacgtgttacaaatttattattattcaaaaccacggccatgtggataccacgtcgatgcagttttttggccccatcaaacaagtaggagcagatgagatcgagttgaggcacgcctcctcaattcgccca

SEQ ID NO: 38075 - DNA, 213 bp, Zea mays
aaagcagttcttcagctaggcaggagggcacaggaaggaggagatggcgtcaaagaggattcagaaggagctcaaggatctgcagaaggaccctcccacctcgtgcagtgcaggtcctgttggtgaagacatgttccactggcaggcaacaataatgggtccatctgatagcccatattctggtggagttttcctagttacaatccattttcc

SEQ ID NO: 38076 - DNA, 253 bp, Zea mays
gtctcgtactgctgttgctccacttgaacgattgaaaatattgcttcaggttcaaaatccgcacagcatcaagtacaatggtactgttcagggtctcaagtatatcttgagaacagagggcctccgtggacttttcaagggcaatggtaccaattgtgcaaggattgttccaaattctgccgtgaagttttttagctacgagcaggcgtcaaagggaattctgtgggcctaccgtcaacagactggtgaagag

SEQ ID NO: 38077 - DNA, 269 bp, Zea mays
ggcagaagctttcagccaggcgggctcagggcgcgggcacatcaatggctggcaaggaaatcctccacaaggtgaaggacaaggtgaaagatgcatttagttcatcaggaccagaaacagggaaaggcaagacaaagttatcaggcaagcgtgtcaagcatggttaccatctggtgaagggcaaatctaatcatccaatggaggattatctagtggcagagtaccggcaagttggtgaacatgatttgggattgtttgctatattcgat

SEQ ID NO: 38078 - DNA, 273 bp, Zea mays
gacaagctgtgggacgacgtggtggccgggactcgcccggagacgggcctcgagaagctccgcaaggccaccaccgcccgcccgctcgtcatcaacaaagacgcggacggcggcagctacaagcgggcgcagtcgacgccgtcgaccccgacgacgccggtgacgccgtcgtcgtcgacgacgccgcgcggcgccggcaacgtgtggccgcaggtcttccacccggggagcaacctggccaccaagggcatgggcgaaacctcttcgacgggc

SEQ ID NO: 38079 - DNA, 204 bp, Zea mays
cgcattcctcccatctcccaagacctcctcagacccgagaagcgcactgcggccatggacgccaccggcactggagctggagggaaggcgaagaagggagcggccggtcgcaaggccggcgggccgaggaagaagtcggtgacgaggtccgtgaaggccgggctccagttccccgtcggccgcatcgggcgctacctcaagaag

SEQ ID NO: 38080 - DNA, 106 bp, Zea mays
ggtgggttggcttctcctccccctccggttcgggttcgggttcgtgaggttctccggggatcggattcgtgggtgagcggatcgagatggcggcgtcggatgttga

SEQ ID NO: 38081 - DNA, 268 bp, Zea mays
cccacgcgtccgcacgacgcacgcagagccgcagagatccgtcacactgcaagttttgaaaactgaactgtaagatggcatcagcagagctttcccgtgaggaaaatgtgtacatggcgaactcgccgagcaggcagagaggtacgaggaaatggttgagttcatggagaaggtagcgaaaactgttgactcggaggagctcactgtggaggagcgcaacctcctgtctgttgcatacaagaacgtcattggagcccgccgtgcctca

SEQ ID NO: 38082 - DNA, 225 bp, Zea mays
ggaagtgaccaactgttttccgttccctatcagggaagaggatgatgaagcagatgcagatggtgccaattatcagcttgagatgatgaggtgtttgagggaagttaatgttgacaacaatactattggatggtatcagtcttgcttgcttggatcttttcaaactgtggaactgattgaaacatttatgaactatcaggagagcatcaggagatgtgtgggcat

SEQ ID NO: 38083 - DNA, 177 bp, Zea mays
gtggcgctaaagaactggcatgctagtggcataaaggtctacatatactcaagtggaagtagagaagcacaaaggcttctatttggcaatacaacatacggtgacctgcgaaagttcctgtgtgggtattttgataccacaactggaaacaaaagagaaacaaggagttattttgag

SEQ ID NO: 38084 - DNA, 264 bp, Zea mays
cttgcaatcacaacgaacagaagctctcgatctcaccgacaccgaggaagaagagatcaatggcgtccgagcagggagtcgtgatcgcgtgccacagcaaggctgagttcgacgcccacatgaccaaggcccaggaagccggcaagctggtggtcatcgacttcactgccagctggtgcggtccatgccgcgccatcgccccactgttcgtcgaacacgccaagaagttcactgcagtcgtcttcctgaaggtggacgtggacg

SEQ ID NO: 38085 - DNA, 122 bp, Zea mays
cggaagtgtctctggcctcaagcctggcctccatgggttccatgtgcatgcacttggtgacaccaccaatggctgcatgtcaactggaccacactacaatcctgcgagcaaggaacatggag

SEQ ID NO: 38086 - DNA, 252 bp, Zea mays
cccacgcgtccgaagaagatcaaggaggtttctcatgagtggcaattggttaacaagcagaagcctatctggatgaggaagcctgaggatattaccaaggaagagtatgctgctttctacaagagcttgaccaacgactgggaggagcatctcgccgtgaagcacttctctgttgagggtcagcttgagttcaaggctgtcctgtttgtgccgaagagggccccctttgacctctttgacaccaggaagaag

SEQ ID NO: 38087 - DNA, 253 bp, Zea mays
gtgaaagtattgttgagacttctgtatccactcctaaagaattgacacattttaaagaactagatagagaaaggaataaatccagggtaaagaggattgagaggaaggtgcgatcactcactccaacatctgacgagcttgcatctcttgatctcagagagggcaggaacgtggtaacatttacgttctcaactgcaattgttgggaaacagcaggttgattgccacatatatttatggagatggaatacacg

SEQ ID NO: 38088 - DNA, 243 bp, Zea mays
cttgcttatgcacatgatacacagcatgaaaagattataaggggtttgtcactgggaattgcactgacagtatatggcagagaagaggaagcagacaccttgattgaacaaatgactagagatcaagatcccatattacgttatggtggtatgtatgcattggctctagcctacaggggaactgccaacaacaaagccatccaccagctgctgcattttgctgtatcagatgtcagtgatgat

SEQ ID NO: 38089 - DNA, 254 bp, Zea mays
gttttcttctttttcccctgtgatttgaaggacttgtttggagctgggacggagaccacatcggtcacgacagaatgggccatgtcgcttctcctgaaccacccggaggctctgaagaaggcacaggcagagatcgacgcggtggtgggcaactcccgccgcctgatcaccgccgacgacgtgccccgcctcggctacctgcactgcgtcatcaacgagaccctgcgcatgtacccggccgctccgctgctgct

SEQ ID NO: 38090 - DNA, 119 bp, Zea mays
cggacgcgtgggcaagaaggttgttatctctgccccaagcaaagacgcacccatgtttgttgttggtgtcatatgaggacaagtacacctcggatgttaacattgtttccaatgctagc

SEQ ID NO: 38091 - DNA, 113 bp, Zea mays
ggcttctcctccccctcttatcgagtcctcctcgggttagggttccttagggttttgtggaggagcgatgtcggcggctgaagtggagtaccgttgcttcatcagcagacttg

SEQ ID NO: 38092 - DNA, 248 bp, Zea mays
agatcctttccaacccagagttccttgcggagggcactgccattgaggacctgttcaagcctgacagagtgcttatcggtggccgggagacccctgatggcaggaaggccgtccaggctctcaaggatgtgtacgctcactgggttcccgaggacaggatcctcaccaccaacctgtggtctgctgagctctccaagctcgctgccaacgcgttcctggcacagaggatctcctctgtgaacgccatc

SEQ ID NO: 38093 - DNA, 249 bp, Zea mays
ggatcggcaggctcgtggccagggtcgccctgcagagcgaggatgtcgagctcgtcgccgtcaacgaccccttcatcaccacggattacatgacctacatgttcaagtacgacaccgtgcacggccaatggaagcacagcgacatcaccctcaaggactccaagacgcttctcttcggcgagaagccggtcaccgtctttggcatcaggaaccccgaggagatcccgtggggtgaggctggtgctgagt

SEQ ID NO: 38094 - DNA, 247 bp, Zea mays
cggacgcgtggggggtggcgctcggtgtactgcatgccgaagcgggcggcgttcaaggggtcggcgccgaatcaacctgtccgaccgtctcaaccaggtgctccggtgggcgctggggtccgtcgagatcttcttcagccggcacagccccctgctgtacggctacaagaacggcaacctcaagtggctggagcgcttcgcctacatcaacaccaccatctaccccttcacctcgctcccgctgctc

SEQ ID NO: 38095 - DNA, 213 bp, Zea mays
caaacctaatcagcaggatctactagctagctagctgttgagagcttggcacaaagaagcgaccgatcgttcgagctagcttccaccatgtcttggagccagagcgagaacgcgcggttcgatcgcgcgctggccacctacgaccgggacacgcccaggcggtgggagctcgtggccgccgcggtgggctgcgggaagaccgccgaggacgcc

SEQ ID NO: 38096 - DNA, 245 bp, Zea mays
  unsure (1)..(245): unsure at all n locations
ggaagaagggcctcctgtatcctctcacttccctcagtcctcgtccgtctgctccctcctctctctacctagctctagctagccttcctgtagcgcggcagagatggctgcccctgcctccaccacggcggcggcggcggcagcgctgctgctgctgctcctcctgtcgctcgccgcggcggcggacatgtcgatcgtgtcctacggggagcgcaagcngcaggaggcgcggcggatgtacgcgg

SEQ ID NO: 38097 - DNA, 263 bp, Zea mays
gagaaggttctacaagaactggtgcaagagcaagaagaaggctttcacaaagtatgctctcaaatatgaaaatgatgctggcaagaaggaaattcagctgcagcttgagaagatgaagaaatatgcttctgttatccgtgtcattgctcatacccagattaggaagatgaagggtttgaagcagaagaaggctcacctgatggagattcaggtcaatggtggtaccattgctgacaaggtggactatggctacaaattctttg

SEQ ID NO: 38098 - DNA, 290 bp, Zea mays
cgaccacccgattcgaagcgtgcggagagaccgaagaagcgggagagatggctcgtaccaagcagactgctcgcaagtccacgggagggaaggctcccaggaagcagcttgccaccaaggctgcccgtaagtctgcccccaccactggtggagtgaagaagcctcaccgctaccgccctggaactgttgcactccgtgagatccgcaagtaccagaagagcactgagctgctgatcaggaagctgcccttccagaggctcgttagggaaattgcacaggacttcaagact

SEQ ID NO: 38099 - DNA, 283 bp, Zea mays
ctctctccatctccctgctcctccgcctccttcttgatccagccaagctagggatcgccatgtcggactcggaggagcaccacttcgaatcgaaggccgacgccggagcgtccaagacctacccgcagcaggctggcaccgtccgtaagaacggcttcatcgtcatcaagaaccgcccctgcacagttgtggaggtttctacctcaaagactggtaagcatggccatgccaaatgccactttgttgccatagacatattcaacgggaaaaagcttgaagatat

SEQ ID NO: 38100 - DNA, 285 bp, Zea mays
cggacgcgtgggcgagacgcgtgggtgaccagccaatgcagaccatggatcagatcatgcagattttaacagaggccaccataccacctgcctgttctcgcagtataaatgtcctagctgatggactggacatggacgacgacatggatgatcttgattccgactcagatcttgatgttgacagcagcggtgagattgtgtacgcaatgtgagtaacatctcagcagccatctcagcagtcaaccaaggaaccaatcaggcatgggatgccctgttgtatactct

SEQ ID NO: 38101 - DNA, 285 bp, Zea mays
caatatgcttgtttgttttactcatccagggtgttctactctacggtcctccaggaactgggaagaccctattggcaagggctatcgcaagtaacatcgatgccaactttttgaaggcgtgtgacttttcacttcattgatggtattcagtatttcttatccttcagatatgttgctccataatgcctgaaaacagattgtttcaagtgctattatcgacaaatacattggagaaagtgctcgtttgattagagaaatgtttggctatgcacgtgaccaccaagt

SEQ ID NO: 38102 - DNA, 151 bp, Zea mays
cggacgcgtgggtcggcatgtccacgtgctacccgcgcccgggcgccgtcacggtgcgcgacggcgagccgatcaccgtcgtgtccaggtacagcagcgaccggcgccacacgggcgtcatgggcctcttctacatcctcgtgggcgaaca

SEQ ID NO: 38103 - DNA, 266 bp, Zea mays
gaaggagggagagagcacgggggcttgatcgaagatggatgccggagtcaaaggtggtgaagaaggccgcggcggggcgtcgcggcgggggcggccccaagaagaagccggtctctcgctccgtgaaggccggcctccagttccccgtatgccgtatcggccgctacctcaagcagggtcgctactcccagcgtgtcggcaccggcgcccccgactacctcgctgccgtcctcgagtacctcgccgccgagctcctcgagttggcg

SEQ ID NO: 38104 - DNA, 277 bp, Zea mays
gttccatgtagataagatgtcctctgcacatgtgtatgtgagattgaataaaggtcaatcaatggatgacatgagtgagggtttgctggaagactgtgcgcacttagtcaaagctaattccattcaaggtaataaagtcaataacattgatgtagtttatactccatggtacaatttgaagaagacgccttcaatggatgtgggccaagttggttttcacaaccctaaattggttcgcactattaaagtggaaaagaggatcaatgagattgtgaac

SEQ ID NO: 38105 - DNA, 248 bp, Zea mays
aggcggccatggacgcgagcgcaccgggagccggcgggaaggcgaagaagggcgcggccgggcgcaaggccggcgggccgaggaagaagtcggtgacgaggtccgtcaaggccgggctgcagtttcccgtcggccgcatcgggcggtacgtgaagaagggccggtacgcgcacgcgtcggcacgggcgcccccgtctacgtggccgccgtcctcgagtagctggccgccgaggtgctggagctggccg

SEQ ID NO: 38106 - DNA, 273 bp, Zea mays
gctaggttgcggagtgtggtttgctcgttagacttattttcggacatccaaaaaacatgcttcctatgtgggatgatggttatctttatatttgtatgttaattagtctctttgctgttaaatttcgtgtaagttggtcctgccgatggagaatcgagcagctcccttttttgttctatcaactatgctgtaattctggctatgtatcggcaaaaacaattctatatgctgagttggagtcggcaaaaattaaaagaagccagagtactaaaa

SEQ ID NO: 38107 - DNA, 241 bp, Zea mays
cgtgcagcgccctccctatacgttcccccatttcctgtgttggcggcgatggcgcggcacttcgtgctcaacaccggcgccaagatcccctccgtggggctcggcacctggcagtctgaccccggcgtcgttggcaacgctgtctacgccgccgtcaaagcgggttaccgacatatcgattgtgccagacgttacggcaacgaaaaggagattggtttggcgctgaagaagctatttgaag

SEQ ID NO: 38108 - DNA, 259 bp, Zea mays
ggcgtttgctccccaatcccttcggcccgcccgctcgacgtgatcccaccggcagccatggatccatacaagcaccgcccgtctagtgggagcaactccagcttctggaccaccaactccggcgcccccgtctggaacaacaactctgccctcaccgtcggacagcgaggtccaatcctccttgaggattatcatctaatcgaaaagcttgctcagttcgacagagaacgtatccctgaacgtgttgtgcatgcacggg

SEQ ID NO: 38109 - DNA, 243 bp, Zea mays
atacatctgtctggatacggtgcaggaatcgcgggtcgattcacgcgtccgacaaccgttgttgtatgattgtatactggcttgtaagacttaaaaacactgggcttgatttggacgttaatgtgtgcattgtaactggtgtgccctatctgctgacagtgttgcacatcacatgtttggtgttaataaggacagactatgtatcatctgccagattgttgtacatatacattgtggtgatat

SEQ ID NO: 38110 - DNA, 252 bp, Zea mays
atcgagtccctctttgacgggaccgatttctcggagccgctgacccgtgccaggtttgaggagctgaacaacgacctcttccgcaagaccatgggccctgtcaagaaggccatggaggatgctggccttgagaagagccagatccatgagatcgtcctggttggtggaagcaccaggattcccaaggtccagcagctcctgcgggactacttcgacggcaaggagcccaacaagggtgtcaacccgatgagg

SEQ ID NO: 38111 - DNA, 250 bp, Zea mays
cttgtttctggtgtccagattgccatctctgcatccaacactggaggtgcctgggacaacgcaaagaaatacattgaggctggtgcatctgagcatgcaagaaccttgggcccgaaaggttcagacccacacaaggctgctgtcattggtgacaccatcggtgatcccctcaaggacacctcaggcccctcgctgaacatcctcatcaagctcatggctgtcgagtcccttgtctttgctcccttcttcg

SEQ ID NO: 38112 - DNA, 252 bp, Zea mays
gtttcaagaaccgggggatctggatctcgtgtaaccggtcatgtagcaccaccaaaatcatctgacttcttccaagagtatgggatgggtaatggattccaaaagaaatcaagcaacgcctcaaaagctcagattgaggaaactgatgaagcaaggaaaaaattctctaatgctaaggcaatttcgtcatctcagttttttggtactcaaaacagagaagagaaagaggctcagctatcccttcagaaattc

SEQ ID NO: 38113 - DNA, 254 bp, Zea mays
ctctcctcttgaaggtgaaccaaatcgggtctgtgaccgagagtatcgaagctgtcaggatgtccaagcgcgccggatggggagtgatggcaagccacaggagtggcgagacagaggacaccttcattgctgacctctcagttggcctgtctacgggccaaatcaagacgggagccccttgccggtctgagcgcctggccaaatacaaccagctgctcaggatcgaggaagagctcggtgatgccgcggtctac

SEQ ID NO: 38114 - DNA, 248 bp, Zea mays
agcaactgcagtgacattaactttggtgcagccaaaatcggacgcgtgggcggacgcgtgggcggacgcgtgggcggcagcgagggcggcaaggactactggatcgtgaagcactcgtggggcacccagtggggcgaggccgggtacgtccggatggcgcgcaacgtcagggtgagggccggcaagtgcggcatcgccatggagccgctgtacccggtgaaggacggccgaacccgccgccgggcccg

SEQ ID NO: 38115 - DNA, 258 bp, Zea mays
cccacgcgtccgctacactgagcgtgctgccgccttggtcttacgcactatcgttgaggtcgtgcagatgtgccataagcatggagtgatgcacagggatctcaaaccagaaaatttcttgtttgcaaacaagaaagaatcagcggcacttaaggccattgattttggcctgtctgtatttttcacaccaggcgaacggttttctgagattgttggaagtccttattacatggctccagaggtgctaaagagaaacta

SEQ ID NO: 38116 - DNA, 257 bp, Zea mays
cccacgcgtccgagctatagtagctcccttgagaagcatttaatggaggagccatgtctgaggagaagcaccaccaccacctgtttcaccaccgcaagccagaggaggagggcgcctccggcgaggtcgactacgagaagaaggagaagcaccacaagcacatggagaagctcggcgagctcggcgccatcgccgccggcgcgtacgccctgcacgagaagcacaaggccaagaaggacccagagaacgagcacggg

SEQ ID NO: 38117 - DNA, 247 bp, Zea mays
gagcgtacactggagaactttgtgcttttaaaacttgccaaaaatgtttcgaaacctttgactgtagtaatattcaatgagtagctctccagtcaaatgtttcgaaacctttgactgtagtaatattcaatgagtagctctccaacacaacatcaggatttattccagaaagtgtctgtacagcagcatctgttttggtcattccaacctgttctgggcgaaagaacaacctattcatgttagccaa

SEQ ID NO: 38118 - DNA, 247 bp, Zea mays
caagccatgggtctgcaggaggaatttgaggagcatgctgagaaggcaaagaccttgcctgagaacacgagcaatgagaacaagctgatcctatacgggctctacaagcaagccacggttggagatgtgaataccgatcgtccgggcatattctaccaaaaggacagggccaagtgggatgcctggaaggctgttgaaggcaaatcgaaggatgaggcgatgaatgactacatcaccaaggtgaagc

SEQ ID NO: 38119 - DNA, 247 bp, Zea mays
gcgcggggagggtggcggagacctctacgcggttctcgggctcaagaaggagtactccgacgccgagcttaaggtcgcttaccggaagctcgccaagaaatggcacccggacaaatgctcgtcctccagcagcgtgaagcacatggaggaagccaaggagaagttccaagagatccagggcgcctattccgtactctccgacgccaataaacggctcctctacgatgtgggagtatatgacgatgag

SEQ ID NO: 38120 - DNA, 255 bp, Zea mays
cccacgcgtccgggccaccaccattccttccccaactctgcaggctgctcgtcgccctccctccacgccggacgcgccccgatccagatccaggggcgtaacatggcatcaaaacgtatcctcaaggaattaaaggacctgcaaaaggaccctccaacgtcatgcagtgctggtcctgctggtgaggatatgttccactggcaggcaaccatcatgggtcctcctgatagtccatatgctggaggtgttttctta

SEQ ID NO: 38121 - DNA, 258 bp, Zea mays
atccaagatcggggttattgagtccctgttggagaagtgtgatatccttctcttgggtggtggtatgatcttcacgttttacaaggcacaaggtctccctgttggtgcttcattggtcgaggaagacaaactcgagcttgcgacgtctctccttgcaaaggctaaggaaaagggcgtctcccttatgctgccaactgatgttgtcattgctgacaagtttgcccctgatgctaacagccagattgttccagcatctgc

SEQ ID NO: 38122 - DNA, 252 bp, Zea mays
cgcaccacaagcgagcgatggacccggggcggaagaagagagagaagacgtctctctcctctcggcgtccccgttccccaacctctcgtctgctgcctgcctgcctgcctgcctgcaaaaaggagtttgtcatggcgtctaagcgcatcctcaaggagctgaaggacctgcagaaagacccccccacatcatgcagtgcaggtcctgctggtgaggacatgtttcattggcaagcaacaattatgggaccac

SEQ ID NO: 38123 - DNA, 250 bp, Zea mays
ggagaatatgtgaaacaagggttggcacaactagaggtgtggtgtggagaagtgaagccagagtatgcaggatctgcgttggatgaactcaagcatatcaggcaagctgtcggtttcttggtcatattcaaaaagttcaggatttcatatgatgagattgtcaatgatctctgcccagtactaagtgtgcagcagctttacaaaatatgcactcagtactgggatgataaatataacacagagagtgtgt

SEQ ID NO: 38124 - DNA, 246 bp, Zea mays
caagaagatttggtgcttcggacctgagaccaccggcccaaacatggttgttgatatgtgcaagggagtgcagtatctcaatgaaatcaaggattctgttgtggctggtttccagtgggcatcgaaggagggtgcactggctgaagagaacatgcgcgggatttgcttcgaggtctgtgatgtcgttcttcatgccgatgctatccacaggggtggtggccaggtcattccaactgccaggagggt

SEQ ID NO: 38125 - DNA, 239 bp, Zea mays
ctgctttataaaagcaaaatcattacgggtgcttcagaatgtctttgacaatgcacgggcaagagaaagggaacgggaaatgctttatcctgatgcctgtggtgcaggtggcagaggatggatcagccaagggatggctaactataggggtcatggaataagagaaatgtgtgctctacacactgcccacctttcatgtactacactggtggatttctggtcagcgcttggtgaaggaa

SEQ ID NO: 38126 - DNA, 241 bp, Zea mays
gacacaatggtaccatttcatggcgatcgtcatcgccggcatggggttcttcaccgacgcatacgatttgttctgtatcgcactcgtgaccaagctcctcggccgcatctactactccgaccccacctccaaggaccccggcagcctcccgcccaacgtgtcggccgccgtgaccggcgtcgccctctgcggcacgctggccggacagctcttcttcggctggctcggcgacaagctcggc

SEQ ID NO: 38127 - DNA, 244 bp, Zea mays
cggacgcgtgggctagacgcgtgggcggacgcgtgggcggacgcgtgggctcgccgtctgccttctgcgcctcactttcggcctcattcccttgcaaattcaatctcacctccaaccatgggtaaagagaagtcccacatcaacattgtggttattggccacgttgactctggcaagtcgaccaccacaggacacctgatctacaagcttggaggcattgacaagcgtgtgatcgagaggtttg

SEQ ID NO: 38128 - DNA, 244 bp, Zea mays
ctatgaccggtgcgccgctgccaacgaccgtacacggaagctggtccgcgcgcacgagggcctgcgcaacgaatgttcttccacaccgtcgacgtcgccaacctcacggacgagctccgcaagtacgacgtggtcttcctggccgcgctcgtcggcatggcggccgaggacaaggccaaggtggttgcgcaccttggcaggcacatggcggatggagcggctctcgtcgtgcggacgcccacgg

SEQ ID NO: 38129 - DNA, 250 bp, Zea mays
cccacacgtccgcccacgcgtccgaatgcattggtccgagtctctgctgtactaactaatgctccttatttgctgaacttggattgtgatcactatatcaataatagtaaggctataaaggaagcaatgtgttttatgatggatcctttgcttggaaagaaagtttgctatgtgcagtttcctcaaagatttgatgggattgatcgccatgatcgatatgctaacagaaatgttgtctttttcgatatca

SEQ ID NO: 38130 - DNA, 125 bp, Zea mays
cccacgcgtccgcaccagccgccgtcatgtcgaagcgaggtaggggaggttcggctgggaacaagttccgcatgtcactgggtctaccggtggcggccacggtgaactgcgcggacaacacgggc

SEQ ID NO: 38131 - DNA, 285 bp, Zea mays
cacaccccccgagctcagcttagctccactccagctccaatcacagtcgtgaccagagcgcgagagctagctagagggccgtgaaaatgccgatcaataggatcgccctggggagccaccaggaggtgtaccacccgggcgccctcaaggcggcgttcgctgagttcatctccaccctcatcttcgtcttcgccggccagggctccggcatggccttcagcaagctgaccggcggcggcccgacgaccccggcgggcctgatcgcggcggcggtggcgcacgcgt

SEQ ID NO: 38132 - DNA, 279 bp, Zea mays
ggaccgggacggaatcgacgcagacaaaagccctgagccgcacaagacgccaaagcaactcggtgctacacaggtggatcctgtcccagagagatgcccacaagcttcaaggggcacacagtgcaaatcacaaggcgggtcgactaggagctgcaagaaggtccacaagcaaggaatggcgctgggcaggtccgtggaccttaccaagttcaacggctacacggagctggtggcggactggacgagatgccgacttcaacggcgagctgaaagctgtag

SEQ ID NO: 38133 - DNA, 131 bp, Zea mays
agcaattgattttggcctgtctgtgttcttcaggcctggtgagcgatttacggaaattgtaggcagtccatactacatggccccagaggttctgaagcgaaactatggccctgaagttgatgtctggagtg

SEQ ID NO: 38134 - DNA, 278 bp, Zea mays
cccacgcgtccggtccaccatcacatcgaaatggttcggagaggacgagaaaaatgtccgggcactgttcagtttggctgccaaggtagctcccaccattatttttgtggacgaggtagacagcatgctggggcagcgcgctcgctacggcgagcatgaggcgatgcggaagatcaagaacgagttcatgagccactgggacggtctcttgtcaaaaacaggcgaaaaaatcctcgttctcgccgcgacgaataggcctttcgaccttgatgaagcat

SEQ ID NO: 38135 - DNA, 127 bp, Zea mays
gcaaagcggaagttgcggttggcctcgtcctcctcttctccgtcgcggctcagatctctgcgtgcggcgatggcgtcgttctcggaggctccccccgggaacccgaaagccggcgagaagatcttta

SEQ ID NO: 38136 - DNA, 274 bp, Zea mays
ttcctcctcgcggggcgcgacaccgtgtcctcggcgctcaccacgctcttcatgctcctgtccaagaacccggccgtggtggccgccatgcgcgccgaggccggggacggcgacggcgacggcgactcagcgccgctcacctacgagcacctcaagcgcctgcactacacccacgcggtgctgtacgagaacatgcgcctgttcccgccggtgcagttcgactccaagttctgcgccgggcccgacgtgctccccgacggcatctacgtgtccg

SEQ ID NO: 38137 - DNA, 271 bp, Zea mays
cccgtccccgatctccgatcccctcgtcgatccaaagatgcagatcttcgtcaagaccctcactggaaagactatcaccctcgaggtggagtcttctgacaccattgacaacgtcaaggccaagatccaggacaaggagggcatccacccggaccagcagcggctcatctttgctggcaagcagctcgaggacgggcgcacacttgccgactacaacatccagaaggagagcaccctccaccttgttctccgcctcaggggacgcatgcag

SEQ ID NO: 38138 - DNA, 272 bp, Zea mays
cgagcgtctccccatcggaaccctaatcctctctttccctactcgcggaagccaactccaccggctggggaagcggaagggaagcacctcggccccggcaagatggtgctcgcacagctgggcgggagcatctcccgcgccctggcgcagatgagcaacgccacggtgatcgatgagaaggtgctcaacgagtgcctcaacgagatctcgcgcgcgctcctacaggccgatgtccagttcaagatggtccgcgacatgcaggctaacatcaa

SEQ ID NO: 38139 - DNA, 271 bp, Zea mays
gttgttgggatcaagtgcaaagatggcattgtcctgggtgtcgagaagctggtaacctcaaagatgatgctggaaggatcaaaccgaagatccattcggtgcaccgtcactctggcttggttgttgctggtttagcagcagatggcaggcaaattgtttcaaggaccaaatcagaagctgccagttatgaaaaggtttatggagaacccatttctgtgaaggaattggctgatcgtgtggcaagttatgttcatctttgcacgctgtactg

SEQ ID NO: 38140 - DNA, 270 bp, Zea mays
gcacgacctcgagaaaaggcagtccgaatctgccaggatcagggataagtatcccgacagaattcctgtgattgttgagaaagctggcaaaactgatgtccccgagattgataagaagaagtaccttgtccctgctgatctcactgtcggccagtttgtctatgtggtgaggaagagaatcaagctgagcccagagaaggccatctttgtctttgtgaagaacaccttgccaccaactgcctctttgatgtctgcaatctacgaagagaa

SEQ ID NO: 38141 - DNA, 265 bp, Zea mays
gtctggtgcttcaatgaggtgccctgggtgccagggctcaggtatgacagtcaccattcgtcagctggggccttccatgatacagcagatgcagcagccttgcaacgagtgcacggggactggggagagcatcaacgagaaggaccgctgcccagggtgcaagggtgagaaggtcgttcaggagaagaaggttcttgaggttcatgttgagaagggaatgcaacacagccagaagatcaccttccctggtgaagctgatgaagcg

SEQ ID NO: 38142 - DNA, 121 bp, Zea mays
gagcagaacctctgcaggctgattgagccctactcaagggtggatattgctcacatagcagagatgattgagctgccaatgaaccatgttgagaagaagctgtcccagatgatcctcgaca

SEQ ID NO: 38143 - DNA, 262 bp, Zea mays
cacaatactccctcactattaccatgaaaatgtctcgatgggtaacctatgtaagttgcatggatggaaagtcagggagactccacgccgtgtctttgatgccgtgctcttcagcaatgagcttgacatccttgatatccgctggcacgagcttagcccgtatgtgtcagaatttgtgctgcttgagtccaattcaacttttaccggcataaagaaggaccttcacttcaaggaaaaccgccaacggtttggctttgcagag

SEQ ID NO: 38144 - DNA, 272 bp, Zea mays
atattgctcgattatgatggaactctggttccccaaacttccctcaacaaggaacctagtccacaggttttgagcatcatcaataccctttgctcagatagtagaaacatcgtttttcttgtcagtggtcgagacaaagataccttgggaaagtggttctcctcatgtccaagattggggattgcagctgaacatggttacttcttgaggtggtctagagaagaagagtggcaaacatgcactcaggcattggacttcggatggatgcaaat

SEQ ID NO: 38145 - DNA, 263 bp, Zea mays
cacaccagcacctgccctcctcgccgtcgccgcctccctccgcgcgaccgatctaccctccgccgccaccatgtcgctgatcgccggggaggacttccagcatatcctgcgtttgctgaacaccaacgtggatgggaagcagaagatcatgttcgccatgacctcaatcaagggtgtcgggcgccgcttctccaacatcgtctgcaagaaggccgacatcgacatgaacaagagggccggcgagctgacgcctgatgagctgg

SEQ ID NO: 38146 - DNA, 212 bp, Zea mays
cagacacgtggcttgagacgcccacgacaacttcggcatcgagatagctatgcgggagttcagggaattgttcgaggggatccagtccatgacctactgctgcggtaacttcggtgatgacaagggtgccagggccattgtcaaagccttcccacacataaaatgcactgtgctggcccctcccaagatcattgccaccaaaccggccgatg

SEQ ID NO: 38147 - DNA, 196 bp, Zea mays
cccacgcgtccggaaccaagtgtcgtctccatgagctttcaaacaagcgaaggatctctattgctggtgcttccaaactgttggctaacatcctttattcatatcgtgggatgggactgtcgattggtaccatgattgctggatgggatgagaagggtcctggcttgtaataagttgacagtgagggttcccggct

SEQ ID NO: 38148 - DNA, 266 bp, Zea mays
ggacgtcgagaaggacaggggcatatcgctgagaacactgatcgaccactctgtcgtcgagagcttcggatgcggggggcggacgtgcatcacggcgcgagtgtaccctgagcacgtggcggcaggcggcagtagccacctgtacctgttcaacaacggagctcacccagtgaccgtgtccaagatggaggcctgggagctcgggacggccagcgtcaacgttgaacaagacgaccgtgcggatccactgtgatcgcccgccctgc

SEQ ID NO: 38149 - DNA, 223 bp, Zea mays
cagacgcgtggcgagacgcgtgggcggacgcgtgggcggacgcgtgggcggacgcgtggggaagctagcaatcctagaaccatctgcttcagccttcagctagcaccaagtttagtcggccggtcggtgactgaagtagtaatggcctccgccaacagctggaccctcgaggtcgcgtcgccggtagccccgcagcgcctgttccgcgccgccgtgatggact

SEQ ID NO: 38150 - DNA, 265 bp, Zea mays
ggtattttcatggaggtacatgatgaccccttgaatgcaccatgcgatggcccaactcaatggccattgcgcaatctggaagagctgttggaggaattaattgcaattgctcgagttaccaagggaaagaagccattcaagatcgacctcactccgttccaggagtgatctgctttggttgatagaaagcacaatgccaccatccatggaattccacagggtggatttcaatatgaattgagtacttgctattgttgggagcata

SEQ ID NO: 38151 - DNA, 266 bp, Zea mays
atctgctccaagtgcaagggcaagggctcgaagtctggtgcctcaatgaggtgccctggttgccagggctcaggcatgaaagtcactattcgtcagctgggcccttccatgatacagcagatgcagcagccttgcaatgagtgcaaggggactggagagagcatcaatgagaaggaccgatgtccagggtgcaagggtgagaaggtcattcaagagaagaaggttcttgaggttcatgttgagaaggggatgcaacacaaccagaa

SEQ ID NO: 38152 - DNA, 259 bp, Zea mays
ggagaacaatgagaacaagcctgtcacaaacagccgtgacactcaggagatacgcctcgaacaaggccttcagatgctcaagatattcaaggatcatgtcagcaaaacttccatcctcgacgactttgccttctatgagagccgccagaagttgatgcaggataagaggtccaaacagcagcagctccaaaagcaggtctgggacactaggacccccgtttctgtcaccggtgaacgaccacaggaacctgctaatggg

SEQ ID NO: 38153 - DNA, 202 bp, Zea mays
ctggaaggagactccagaggcgcacgtgttcaaggcagacgtaccggggctgaagaaggaggaggtcaaggtggaggtcgaggacggcaacgtcctgtgcagatcagcggcgagcgcaacaaggagcaggaggagaagacgggacctgcgcaggaatctcgcgcccacgcgtccgctcctgcgggaccccgaaggccgccgt

SEQ ID NO: 38154 - DNA, 258 bp, Zea mays
cttccgtcggacttcaaaccctagcggcgatggcgtccgctgcggcgggcacaccgaagcgctgctactacgaggtcctgggcctatctcgcgactgctccccgacggacatcaagcttgctttccgccgcctcgcgctctcgctccaccccgacaagcagccccccggctccgacctcgccgccgccaccgccgccttccaggagctgtactgtgtggcgtgcaataaaaagttcacatcggacaaacagtggcaga

SEQ ID NO: 38155 - DNA, 243 bp, Zea mays
agcgagcgacacgtccgcggacgcgtgggcgacctgggcgagacgcgtgggcagacgcgtgggccggcctcgcccgccgcgccattgtccagatgtcctacgccatgcggcgtgccatatcccctttcggtgttcgtggacacgtacggcaccggcgcgatccccgacaaggagatcctgaagatcgtgaaggagaacttcgagttcaggcccggcatggtcatcatcaacctcgacctcaag

SEQ ID NO: 38156 - DNA, 261 bp, Zea mays
gtgacatgaatgtaactcttggtataccccggctgaaagaaatactgatgactgcatcagataatattaggacgcctgttatgaagtgtcctttgctcgaacatatttctgaggatgatgctaaaatggtggttgcaaagcttaggagggttcgtgtggctgatgtagtggagaaaattgaagtctgcacagttcctttttacaactctaatgggcgtgtttcaaccctgtacaagttacagatgaaactctatccacaag

SEQ ID NO: 38157 - DNA, 258 bp, Zea mays
gagagagagatcagcaacttaacaacaataatggccaccgccatagttcccacggacgccgagctgctgcaggcgcaggccgacctgtggcgccacagcctctactacctgacatccatggcgctcaagtgcgcggtggagctccacatcccgaccgccatccacaacctaggcggtgctgccacgctgccggacctcgtggccgcgctgtccctgccagcggccaagctcccgttcctcgggcgcgtgatgcggctg

SEQ ID NO: 38158 - DNA, 116 bp, Zea mays
ctacagcctcacggtgcgcaacggcacggcgtgcctggacgccaccaacccgcgggacgagtaccagcactggttcaaggacatgcggcacagcacccgggttcaggaccaagaag

SEQ ID NO: 38159 - DNA, 123 bp, Zea mays
gtaaccactgatggtggacggagtgggttctttaataaggttcagctaaaggaagggtcgttctgtggcgatgagttgctcacttgggacattggatcccaagtcagctgctaattttccagt

SEQ ID NO: 38160 - DNA, 211 bp, Zea mays
gcggtattcggacgatctcaggggccggagcctcaagagggggctcctcagcagcgacgagttccggatgtacagcttcaaggtgaagccctgctcgcgcgcctagtcccacgacttgaccgagtgccccttcgtgcaccccggcgagaacgcgcgccgccgcgacccgcgccgcttctcctacaggtgggtcccctggcgcgagttccgc

SEQ ID NO: 38161 - DNA, 261 bp, Zea mays
cttgtgtcggtagttttccgttggctctggctgccttcctctgcttctgagattccaacttgtcttgcccatctctccttttcctctctcatcctctctttcttgcaacacgtcatccagtggcgatgtcttcagcagattcttgtgtctcttctcctgcctcccctattggctttgagggctatgagaagcgcctcgagatcacgttctctgacgcgcctgtctttgaggacccttgtggtcgtggcctgcgcgccctct

SEQ ID NO: 38162 - DNA, 145 bp, Zea mays
atcgcgagcggccgccctttttttttttttttccgagggggaaaatctggatcttttatattataaataaataaattacggcgatgatgaggggcaaatgaggtaggcaacagcgaacctaaccacctgaagaaaaaactctaca

SEQ ID NO: 38163 - DNA, 144 bp, Zea mays
gtcgacgccgcggcggagtccggcgaggccgcccacggctgcagctgcggtggcaactgcaagtgcgacccctgcaactgctgatcacatcgatcgatgaccatggatatgattattatctatctagcttgtggtggtggttga

SEQ ID NO: 38164 - DNA, 144 bp, Zea mays
cggacgcgtgggctgcatggtcccgttgcagcacaattgggaacatacttgatcaaggtcactgtggctcttacttgggcttttggtgctgtggagtgcctccaggaccgtttttgcattcacctcaacatgagcattttactt

SEQ ID NO: 38165 - DNA, 289 bp, Zea mays
caagccgataccctaaccctcgcccttctcgatgtcggccgccaccaccggcccagccccttcagtagccactccgatggcgccccctccgtcctacccggcctcctccacggcctcttcctccatctccgcgtccgccgaggaggaggaggacctctatggccgcctcaaatcgctccaacgccacatggagttcgtcgaaatccaggaggagtacgttaaagacgagcagaagaacctgaagcgcgaactccttcgtgcgcaggaggaggttaagcggatccagtct

SEQ ID NO: 38166 - DNA, 125 bp, Zea mays
ataaatgttgtttgaatttattcatgattaagccatatgcggatcgacgatagttttgggtaacgagaacacaactatcgtgcgaccgcatatggcgtaatcatgaataagtggggtttgagttt

SEQ ID NO: 38167 - DNA, 142 bp, Zea mays
cgactcctacggcaccgggaccatccccgacaaggagatcctaaagatcgtcaaggagaacttcgacttcaggccagggatggtcaccatcaacctcgacctcaagaagggcggcaacaggttcatcaagaccgccgcatac

SEQ ID NO: 38168 - DNA, 270 bp, Zea mays
gtgcacaagaaggtgcccgtgctcctccacggcgacggccgggccatctccgagtccctcgtcatcgccgagtacgtcgacgaggccttcgacgggccgccgctgctccccgccgacccctacgcgcgcgccgcggcccgcttctgggccgacttcatcgagaccaggctcaccaagcccttcttcatggcgatctgggtggaggagcgcgaacgcacgtgcggttcgaggaggaggccaaggagctcgtggcgctgctggaggcgcact

SEQ ID NO: 38169 - DNA, 253 bp, Zea mays
cccacgcgtccgagaagctcggcatcatcccacaggatctcaagtggggagagcagtcagacgacgtgttcgatgctctggctggagacttcatgaagcccaggatacaggaggtggaccagctcctcaagcttggcgtcaatgtcaccatctacagcggacagctcgacctcatctgcgcgaccaaaggcaccatggactgggttcagaagctcaagtgggacgacctcaacagtttcctgagctctcctag

SEQ ID NO: 38170 - DNA, 241 bp, Zea mays
gtttgagattggcagtgggttcgctggtacggactttactggaagtgagcataatgatgagttctatatggatgaggctggaaatgtgaggacacgaactaatcgctcaggcggtgttcagggagggatatcaaatggtgaaattatttacttcaaagtggcttttaagccaacagcaactatcggaaagaagcaaaatactgtgtcaagggagcatgaggtgttgaacttttggcaaggg

SEQ ID NO: 38171 - DNA, 132 bp, Zea mays
cgagacgcgtgggagagcaggtcaatggtgctatggctagttgccaagctttgaagttggatgctctggttatcactggaggtgtcacttccaacactgatgctgctcaacttgccgagacatttgctgagg

SEQ ID NO: 38172 - DNA, 127 bp, Zea mays
cacaagtctagatgactatcttccaatgcgaacactgaagtgaaaaatcggacattaactggtgatatcacaagcctcagactaatcactgcagtgaaaaccccttatttgccagatggaagatttg

SEQ ID NO: 38173 - DNA, 264 bp, Zea mays
cccacgcgtccgcggcgaccaccggagcgcggaggatgcacaggcgccgatctagagacgatggccgccgcaggctcctcgccgtccttctcctcctcgagtaagcgactggaaaggaaggtggccctcgtcactggtggcgccaccggcatcggcgaggccatcgttcgcctcttcatggagcacggcgccaaggtctgcatcgcggacatccaggatgaggccggtcagcagctgcgcgacgccctgagaggtgacgcgcag

SEQ ID NO: 38174 - DNA, 270 bp, Zea mays
tgaggccggcggtgagacattccccgcgcataggtgcgtgctcgcggctcggtcgccggtcttcgctgcagagttctttggcgcgatggaggagagtaaaagcggcagtgcggtccacattcacgacatggaggctcgggtcttcaaggctttgcttcatttcatatatactgacttgtgttggaaaacgaatgaagttgaagaggaagaagaagacgatgtcatggctcagcacctgcttgttgcagcagacaggtataacttgccaag

SEQ ID NO: 38175 - DNA, 265 bp, Zea mays
atccatcgattggaacccagatccgcagccgcagcacaagagggtgggatcggatcggatcggagcagagcaaaagggacaaccgaccagaatccgccggcgaccaccatgggctccgcgagccgtgccgtctcgtgcctgtgctgcccctgcaagtgcctggcgtgcgggctcctgagctgcctgtgcagcatcctcgtctcgctcgccgtcgtcctgggcgtcgtcgccctcatcctctacttcatcttcaagccgcacatga

SEQ ID NO: 38176 - DNA, 266 bp, Zea mays
aaagctacagatttgggatacagcgggccaagaacgcttccgtactattaccactgcgtactaccgtggagctatgggtatcttgctggtttatgatgtcaccgatgaatcttctttcaacaacatccgaaactggattcggaacattgagcaacatgcctctgataatgtcaacaaaattttggtgggcaacaaggccgatatggacgaaagcaagagggccgtacctactgcgaaaggacaagcacttgctgatgagtatggga

SEQ ID NO: 38177 - DNA, 267 bp, Zea mays
ggaacgcacacttgccgactacaacatccagaaggagagcaccctccaccatgttctccgcctcaggggaggcatgcagatcttcgtcaagaccctcactggaaagactatcaccctcgaggtggagtcttctgacaccatcgacaacgtcaaggccaagatccaggacaaggagggcatccctccagaccagcagcggctcatttttgccggcaagcagctcgaggacgggcgcacgctggccgactacaacattcagaaggagag

SEQ ID NO: 38178 - DNA, 267 bp, Zea mays
ctgatattggaactgagaagttcatggacatcaaatgtaggtatagtggattggtgccgcagtgtgctattatcgtggccacaattagagctcttaaaatgcatggtggggggcctgaagtggtggctggaaagcctctggatcatgcatatgtgagcgaaaatgtggcccttgttgaagctggatgtattaatcttgctaaacatatatcaaacacgaggagttatggagttaatgttgtagttgcaatcaacaaatttgcatcag

SEQ ID NO: 38179 - DNA, 266 bp, Zea mays
gtttttgattttagccgccgccgctgctcatctcacatccctcgagaagacgcctgctcctcgccgatcgatacgatggccgtcttctccgacctccacaccgccgacggcctcaagtccctcgaggctcacctcgccggcaaaacctatgtgtctggtgactccattactaaggatgacattaaggtcttcgccgcggtgccgtcgaagcctggcgctgagtttcctaatgccgcccgctggtacgagaccgtctctgcggctgt

SEQ ID NO: 38180 - DNA, 273 bp, Zea mays
atgaaacggttcacccacctccagcatttggttcttcctccaatctagaggcgcttgcgctcgaaacaagtgagagtgatgtaaggagcactggtgatactgatcacagtgtacatctaatttccaggccgatgcacgagatcacttttgcaacgattgataagccaaagctccttagtcagctgacttgtttgcttgctgagctcggtcttgatatccaagaagcacatgcattttcaacaattgatggctactctttggatgtatttgttg

SEQ ID NO: 38181 - DNA, 265 bp, Zea mays
ggctactacgtgaacaacgattatgatgatgaacaattgagagaagagcctccagcaaaggtgctaattgaccgggtgcaaagaaatatcttggccgacaagccccgagtcaccaagttccctatcaacttccatcctgaacccagtacaggcccggggcagcagcagcagcaggaaccccagacgacctcgccagaaaaccacacaggcaatggcgaggccaatggtagcaagcctgaggctgaccaatgaacacagttggctt

SEQ ID NO: 38182 - DNA, 265 bp, Zea mays
gtcatatctagctatagtagctcccttgagaagcatttcccggaggagccatgtctgaggagaagcaccaccaccacctgtttcaccaccgcaagccagaggaggagggcgcctccggcgaggtcgactacgagaagaaggagaagcaccacaagcacatggagaagctcggcgagctcggcgccatcgccgccggcgcgtacgccctggtgagaacaaaaaaaccaacctcgatctctttgatcgcctgagccatgcatgccat

SEQ ID NO: 38183 - DNA, 265 bp, Zea mays
gagacacgcgtccaaacatacagctagctagcctctgcatgcctacgtacagcatggccaaggccgagctgctgctcctcgccctcgtggcttcgctctccgtgctgccattctcctccctcgccgtgtaccaggacttctgcatcgccgacctatccgccgccgccacgccgggcggctacccgtgcaagcccccgaaggacgtgaccgccgacgacttccactacggcggcctcgccacccccggcacggcgctgaaaccctt

SEQ ID NO: 38184 - DNA, 264 bp, Zea mays
gaattgtcttccaggaatctggagcaaatttttatacaccggccccagtatcattatcaaatgaactggttactgtatgggaccctgaacttggaagaaccaatccatctgagcacaagcagttaaagcttgctaggagcttgactcgtgggatagttgatagagatctaaaaccaagctcaaatgagagaaagttactacaaacaattattaagtttcctcctacacgcaccttggaagtggatgagaagcaattggtgtgga

SEQ ID NO: 38185 - DNA, 265 bp, Zea mays
ctctgttgtggagccttacaacagcgtgctctccactcactcactgctggagcacactgatgtctccatcctgctcgacaacgaggccatctatgacatctgcaggcgctccctcgacattgagaggcccaactactccaacttgaatcgccttgtgtctcaggtgatctcatcgctgactgcttctctgaggttcgatggtgccctcaatgtggatgtgaacgagttccagaccaacctggttccttacccgaggatccacttc

SEQ ID NO: 38186 - DNA, 264 bp, Zea mays
gttggcttctcctcgccctccggttcgggttcgggttcgtgaggatctccggggttcggtttcaccggtgggcggatcgagatggcggcgtcggatgttgagtactgctgcctcgtcggcggcctcgcatgggccacggacgaccactccctccacaacgccttcagcacctacggcgaggtcctcgagtccaagatcatcctcgatcgggagacgcagaggtcacgcggcttcggcttcgtcaccttctccacggaggaggcg

SEQ ID NO: 38187 - DNA, 260 bp, Zea mays
cccacgcgtccgcggacgcgtgggggcacccactgctccctcgccctccgcaggcgcggcgacggcgtggtcggcgacgacacacttcaacgactactacgacccgtcgctgaagaaggcgcgcagggcgctgctcgcctcccacggggtgttcgtcgtcgagggcgacatcaacgacggccgcctcctggccaagctcttcgatgtcgtgcccttcacccacgtgctccacctcgccgcgcaggccggcgtgcgctacg

SEQ ID NO: 38188 - DNA, 258 bp, Zea mays
aagttgtttcatctactggtgcactgtgcttgtcagagatcccgaaaaaactggtggtaatcggagcaggttatattggccttgagatgggttcagtctggaaccgccttggttcagaggtcactgttgttgaatttgccccggatatagtaccatcaatggatggcgaggtcaggaagcagttccaacgcatgctagaaaaacagaaattcaagttcatgctcaagacaaaggttgttgggtgtgataccagtggag

SEQ ID NO: 38189 - DNA, 260 bp, Zea mays
cggatttaacttcaaacatggcggacgtcgatgtcgagccggatgtcgccgccggtgctcccaagaagaggacgttccgcaagtacagctaccgcggcgtcgacctcgatgcgctgcttgacatgtccaccgacgacctcgttcagctcttcccagcgcgcgccaggagaaggttccagaggggtttgaagaggaagcccatggcgctcatcaagaagctgcgcaaggcgaaaaaggatgctcctgtcggcgagaagcca

SEQ ID NO: 38190 - DNA, 258 bp, Zea mays
cggacgctggggcgtggcgctcggtgtactgcatgccgaagcgggcggcgttcaaggggtcggcgccgactcaacctgtccgaccgtctcaaccaggtgctccggtgggcgctggggtccgtcgagatcttcttcagccggcacagccccctgctgtacggctacaagaacggcaacctcaagtggctggagcgcttcgcctacatcaacaccaccatctaccccttcacctcgctcccgctgctcgcctactgtacc

SEQ ID NO: 38191 - DNA, 259 bp, Zea mays
atcgcagatggtattgggcgacgccgtgcgttccagctcagtgcgctgcctatgattattggtgctgccataagtgctctctccaatagtttggagggtatgctccttggaagatttttggtaggaacagggatgggattgggtccaccagtagcttcactttatataacggaggtttctccttctacagtgaggggtacatatggtagctttgttcagattgcaacctgccttggaattatagtatcactactcattg

SEQ ID NO: 38192 - DNA, 140 bp, Zea mays
actcattctcctcgtccaggtagcagacgtttggtcctgtggtgtcacgctgtacgtgatgctcgtgggatcatatccatttgaagatcctgaggatccaaggaacttccggaaaacgatcagcagaattcttgacgtgc

SEQ ID NO: 38193 - DNA, 287 bp, Zea mays
cggacgctgggcgtacgagcgagcgagatgaacggggcgatggaagttgaactcgcagcagtacgggatcagcccgatggggagtcagcgatgtcaggcactcacttaaagtttctctggaagatctttagaatggagtctctaagaagctctctctttcgcgcaatgtcatctggtccaagtgcaagggcaagggctcgaagtctggtgcttcaatgaggtgccctgggtgccagggctcaggtatgaaagtcaccattcgtcagctggggccttccatgatacag

SEQ ID NO: 38194 - DNA, 289 bp, Zea mays
cctcacgccgccgccgccgccgccgtcgccgccaccacatccgtagcgcccagccgccggagaagaggagggagccagcaccagccaccatgggtcgcgtccgcaccaagaccgtgaagaagacctccaggcaggtgatcgagaagtactactcccgcatgaccctcgacttccacaccaacaagaaggtgctggaagaggtctcgatcctcccctcgaagcgcctccgcaacaaggttgccggcttcaccacccacctgatgcgccgcatccagcggggccccgtccg

SEQ ID NO: 38195 - DNA, 139 bp, Zea mays
cggacgcgtggggcattatacaaaagatttcaaaaacaaagatgtgacgaggaggcaaatagctgtggcaacataccttatcgataaactagcccttagggctggcaatgaaaaggacgacgatgaagctgatactgtt

SEQ ID NO: 38196 - DNA, 287 bp, Zea mays
caacatcaggctacctcctcaacagtgtcacaggcccagtctgggtgaaagcggttgcaaatctgtcggcattttttcagacagtcatagcgctgcacatctttgctagccccatgtatgaattcctggacacaaaatatggaagtgggcgtggtggcccttttgagatccacaacgtggcgttcagagtagcagtcagaggaggctacctgactatggacacactagtagtctgtgtgcaccgagactgtgacatttagcttaccgtagagagacatcctggcctt

SEQ ID NO: 38197 - DNA, 288 bp, Zea mays
cccacgcgtccgaacacattcaaagagattggcagagttaatgaagcaattcaggattatgttcaggcagcaacaatcaggccaaacatgccagaagcccatgccaacttggcctcagcatacaaggacagtgggcatgtagaaacggctataattagctacaagcaggctctccggctgcgtcctgattttcctgaggcaacctgtaatctcctgcatactctacagtgtgtctgtgactgggaaaacagagatggcatgtttcgagatgttgaagaaattattaga

SEQ ID NO: 38198 - DNA, 277 bp, Zea mays
aaagacgtctcctgttacttaccaagtcctgggccatcttaaaacatgccttgttcttacctttggttatgttttgcttcatgacccatttagctggagaaacatacttgggatcctaattgcagtagttggaatggtcttatattcatacttctgcacagtggagacccagcataagaacactgaagtctccccacagcaggtgaaagaaagtgaggcagcccctttgatctcagactctttgagcaaagttgaaaatgggggcggtgttgttgat

SEQ ID NO: 38199 - DNA, 281 bp, Zea mays
cccacgcgtccgctttgacaccctggccgtggtgtttaacagatcgagcagatttggaaggctgcagggagtgaagtgtgcgattgcaggaaggaacttgtacatgaggttcagctgcagcacaggggatgccatggggatgaacatggtctccaagggtgtgcagaacgtgctggactacctccaggccgacttccctgacatggatgtcatcagcatatcaggtaacttctgttctgacaagaagtcagctgctgtgaactggattgatggccgtggga

SEQ ID NO: 38200 - DNA, 279 bp, Zea mays
gacattttctcatcattctttggaccctcttttggaggaggtggtggaagcagcaggggaagaaggcaaaggaggggagaagatgtagtccactcacttaaagtttctctggaagatctttacaatggaatctcaaagaagctctctctttcgcgcaatgtcatctgctccaagtgcaagggcaagggctcgaagtctggtgcttcaatgaggtgccctgggtgccagggctcaggtatgaaagtcaccattcgtcagctggggccttccatgatacag

SEQ ID NO: 38201 - DNA, 243 bp, Zea mays
tcaccattgaaaataagcccatcaagctccagatttgggacacggctggccaagaatcattcagatctattactagatcatactacagaggtgctgctggtgcccttttggtttatgatattactaggagggagaccttcaatcatctcgcaagttggttagaagatgcaaggcagcatgcaaatgctaacatgactgtgatgctgattggaaccaattgtgatcttcctcatagacgtgctg

SEQ ID NO: 38202 - DNA, 275 bp, Zea mays
cagcctgtggttttcggattcagtgcaacaaatgggctatcatagtgaggctgctgcttggagagattcctgagaggactgttttcatgcagaaaggaatgaagaaagctctgataccttattttgagctcacaaatgctgtcagggttggggaccttgaactgttcagggctgttgcagacaaatttgcaagcacattcagcgcagacaggactcgtaatttgattgtgaggctgcgccataatgtcattcgactggactgcgcaacatcagca

SEQ ID NO: 38203 - DNA, 127 bp, Zea mays
agcagcggccttgctcgccgcgccatcgtccaggtgtcttacgccatcgggtgcccgatcctctctccgtgttcgtcgacacgtacggcaccggcgcgatccccgacaaggagatcctcaagattgt

SEQ ID NO: 38204 - DNA, 268 bp, Zea mays
cccacgcgtccgcggtctactaccactttgtgcacgggctagcggagttcccgcgcgaggacgacctcgaggcgcggttcatgctcccgggcctcccgacgctgtccgtcgccgacgtgccgtcgttcctgcacgcgtcagacccgtacaaggtactcggcgacacgattcaggaccagttccgcaacatgggcaaggcgtcgtgggtgttcgttaactcattcgccgagctggagcgcgacgttatcgccgcactccctagcgtcag

SEQ ID NO: 38205 - DNA, 187 bp, Zea mays
cccacgcgtccgcatgtaccatggagggaccaacctcgaccgcagctcaggagggcccttcatcgccaccagttacgactacgatgcccccatcgacgagtacagactagtcaggcagccaaagtggggacacctaagggatgtgcacaaggccataaagctctgcgaaccagcgctcatagcaact

SEQ ID NO: 38206 - DNA, 251 bp, Zea mays
aggttgatgttctgacacccaaagttttcattggactgattgttggtgcgatgctcccatactggttctcagcgatgacaatgaagagtgttggaagtgcagcaataaagaccgttgcgcgccacggcacggcagtaaaagaaaatacgcggggtcatggagggccttaggaagcgtgagtatgcgaagtgtgttaagatgtctactgatgcatctattaaggagatgataccacctggtgcacttgtgat

SEQ ID NO: 38207 - DNA, 260 bp, Zea mays
ctcgatcccgcatcagtgcgtcacattcaccgggaatggcaacgctcaaggtcccagccactgttcctcccgtcgccgatgactgcgaccagctgcgcaaagcattccaagggtggggcacgaacgaggcgctcatcatctccatcctcggccaccgcgacgccgcgcagtccgcgccatccgccgcgcttacgccgaggcctacggcgaggagctcctccgctccatcacggacgagatctccggcgacttcgagaggg

SEQ ID NO: 38208 - DNA, 252 bp, Zea mays
aacacgcgtccgggaccggggcagatttttgtgaagacattgactggcaagactatcaccttggaggtggagagctctgacaccattgacaatgtgaaggccaagatccaggacaaggagggcattcccccagaccagcagcgtctgatctttgcgggcaagcagctggaggatggccgcactctcgcggactacaacatccagaaggagagcacccttcaccttgttctccgcctcaggggtggtatgcag

SEQ ID NO: 38209 - DNA, 257 bp, Zea mays
agctgacgcgtcggtctcgaggatgggtacgcgcactgggttcccgatgacaagatcctcaccaccaacctgtggtccgcttagctctccaagctcgccgccaatgcgttcttggcacagaggatctcctctgtcaatgccatctccgctctctgcgaggcaaccggagccaatgtctctgaggtggcttacgccgtgggcaaggacacgagaattggccccaagttcctgaacgccagtgttgggttcggtggctc

SEQ ID NO: 38210 - DNA, 258 bp, Zea mays
acgagaggcttttctacaagcttttaattgataacgtggaggagctgcttcctgtggtttatacaccaactgtaggtgaggcctgccagaagtatgggtccatctttcgacaaccacagggtctgtatgtcagcttgagggacaaggggaaggtcctagaagttctaaggaactggccacataggaacattcaagttatctgtgttactgatggtgagcgaatcttgggacttggagatttgggttctcagggaatgg

SEQ ID NO: 38211 - DNA, 257 bp, Zea mays
gcaaaaccgcatcctctcatcagcttccttccacattcgtctcgagatctcgccccgtcgccatggacgcgatcgacagcgtggtggatcccctccgcgacttcgccaaggacagcgtccgcctcgtcaagcgctgccacaagcccgaccgcaaggagttcaccaaggtggcggcgcggacggcgatcgggttcgtcgtcatgggcttcgtcggcttcttcgttaagctcatcttcatccccatcaacaacatcatc

SEQ ID NO: 38212 - DNA, 249 bp, Zea mays
gaggcagagacgcaggaggcactcgatgcggctgctggtatggtggagaagctgctcaccccggtggatgacgtgctcaatgagcacaagcggcagcagctccgggagcttgccgctcttaatggaacaattagggacgacgagttttgtagaacatgtggtgaggctggtcacaggcagtatgcttgccctaacaagatgaacacgtttaagagtgatgtgcagtgcaagatctgtggggatggtggg

SEQ ID NO: 38213 - DNA, 252 bp, Zea mays
ctagccttcccgttcctgcatcgcggcgcagatgggcgcctccaccacgccgtgcccagcgctcgagctcctcgcctgccgcgagctcgcgccgcaacgccaccatgaagttcaacatcgcgaacccgtctaccgggtgccagaagaagctggaaatcgatgacgaccagaaactacgtgccttttatgaccgaagatctcccaggaggtcagtggtgatgctctgggtgaggagtttaaaggttatgtcct

SEQ ID NO: 38214 - DNA, 253 bp, Zea mays
gttgagcctgagatccttgttgatggccctcatgacattgatcgctgcgcttacgtcactgagaccgtccttgctgcctgctacaaggcgctcaacgagcaccatgtcctcctggagggtaccctcctgaagcccaacatggtgactccaggctccgactccaagaaggtgacccctgaggtgattgctgagtacaccgtccgtaccctccagaggaccgtccctgctgctgtgcctgctgttgtcttcctct

SEQ ID NO: 38215 - DNA, 290 bp, Zea mays
ctgtacctgcagtacggtcggaattccgggtcgaaccccgtccgggacctggcggacgcgtggggccaagaaggtggtgctgaagctggacctgcacgacaactgggacaagcaataggtgctcaaggcagtctccactctccacggtatcgactccatcgcggtggacatgaaggagtccaagctgacggtggtcgggctggcggaccccgtcgacgtcgtgggcaggctgcgcaaggtcggctccgcgccatcgtctccgtcgggccggccacggaggagaaaaagaa

SEQ ID NO: 38216 - DNA, 248 bp, Zea mays
ggaccgtggttttgtcccgctcgttatactcctgctagttggggccaagctggaggttatcatcatggagatggccaaggagatacaggacaaggcgacggtcatcaagggggcgcctgtagtggagccaagtgacaggttcttctggtttaaccgccctggctgggtcctcttcctcatccacctcacgctcttccagaacgccttccagatggcgcatttcgtttggacactgctcaccccagacc

SEQ ID NO: 38217 - DNA, 250 bp, Zea mays
gaaataaatgatgagttggagtttctaattatagctagtgatgggctgtgggatgtggttccgaatgaggacgctgtttcacttgtgaagatggaggaggatcctgaggcagcagcccggaagctgacagagactgcgttctcccgtgggagcggcgataacatcacctgcatcgttgtgaagttcgagcatgacaagcctggtggcggcggctactcgcctccaggcgacaagagttgattccatttgc

SEQ ID NO: 38218 - DNA, 249 bp, Zea mays
cgtttccaacaggccagtcccctcccactcccagtcccatctcgacgacatggccgcagccgcaggccatcaagctctgtgaaggagacgctcccgccggccctcggctccacctcccagccacctcccgtcttcgatggcaccaccaggctgtacatctgctacttctgcccgttcgctcagcgcgcctgggtcaccaggaacttgaagggtttgcaggacaagatggagctggtggccatcgatctg

SEQ ID NO: 38219 - DNA, 237 bp, Zea mays
caattcacaacgcatcgtcgtctcccacaacacgctccactaaccctagcgacacctcgggtcgtcgtttgatccccgcggggagctctagttccgccaagcgtgcgtaccggcgtccggatccgggaccgaagatgacggagtcctggtgcggaacaagccggggatggccagcatcaaggagatgccggtggtgcaagacgggccgccgccgggcggtttcgcgcccgtgcgctt

SEQ ID NO: 38220 - DNA, 249 bp, Zea mays
ggacttgatagcttggacactgtggagatcgtgatggcgtttgaggaagacttttcctttgagattcctgacaacgaagcagagaagattgactccatcaagacagcggttgatttcattgcttcgcatcctcaagcaaaataagaggatttcttttttttcgtatttcaaagtgtgttttgcatccagaacttatgcgacacgggactagttttctctagcttgccgcagtagataggaagtcatttc

SEQ ID NO: 38221 - DNA, 164 bp, Zea mays
cgcgagagaaacgcgtatacccaggcggcggttgaggaagaggaggagaagaagaagcagatggcttcctccgcatacgcctcatggtccaagcggtggatccgtcccgaggtgtacccgctgttcgtgccgatggccgtggccttgggcatctgctcgtacca

SEQ ID NO: 38222 - DNA, 195 bp, Zea mays
ggaacatgaaagcgtggtgaaggctatctatactggctcagaatacattactacagctactggtgatggggactttggtcttgtgctggaaagtacaagtttctatgctgaacaaggaggccagatatttgacactgggagcattgaggggtcatttggaactttcaatgtgaacaacgtccaagtgtttgctgg

SEQ ID NO: 38223 - DNA, 113 bp, Zea mays
gttctagatcgcgagcggccgcccttttttttttttttttttcaagttaatatcattattagtgccggcttttagcattttttttaactccagaagatacagcctcacgacaa

SEQ ID NO: 38224 - DNA, 233 bp, Zea mays
cagacgctggggcgccaacaacctacccagcccattcgacccgctcgacaagctccaggagaagttcacgaacttcaacctggacgacaccgacctcgtcgccctccaaggagcacacacttttggtaaagtacagtgtcaattcacacaagagaactgcacagctgggcagcagaggaaacactagaaaacctagaccaggtcacccccaacgtgtttgacaacaagtatta

SEQ ID NO: 38225 - DNA, 144 bp, Zea mays
cggacgctgggcggagctcgacaaggacgaccgacgacgcacgcggagatccggcgtactgcaaattttgcaaactgaactgtaagatggcatcagcagagctttcccgtgaggaaaatgtgtacatggcgaactcgctgagca

SEQ ID NO: 38226 - DNA, 246 bp, Zea mays
gagaatttgtggaggctagaggacagtggttcagatgactggatggtcgttagtttcgagataaccttcccccagctgctggagatggcaagagacttgggtctcgacgtgccctgcgacgagccatccctgctagctatctatgcaaggagagacgcaaagctcgcaagaatccctaaagaattactgcacgcttcaccgacaactctgcttctgagcatagagggaatgccgggcttagactgg

SEQ ID NO: 38227 - DNA, 261 bp, Zea mays
tgagcgtcccaacgagggtgctgttgttgaagtcaaaattatcggaaagcttcaggatggcgcggtgtttacaaagaaggggcatgacgaagagccatttaaattcaagaccgatgaagaggaagttattgccggtcttgatcgtgctgtgttgaacatgaagaagggcgaggttgctctggtcacattcctcctgaatatgcatttggttcactgagtcaaacaggatcttgctgttgttccacctacagacagtatata

SEQ ID NO: 38228 - DNA, 269 bp, Zea mays
  unsure (1)..(269): unsure at all n locations
gaggtgggttggcttctcctcccccaccggttcgtgttcaggttctacgttcgtgggcgagagggaagagatggcggcgtcggacgttgagtaccgttgcttcgttggcggcctcgcctgggccaccgacgaccactccctcaacaacgccttcagcacctacggcgaggtcctcgagtcgaagatcatcctggatcgggagacgcagaggtcccgcggcttcggcttcgtcaccttctcgacggaggacgcgatgcgcagngccatcg

SEQ ID NO: 38229 - DNA, 234 bp, Zea mays
caaacttgcactgtacacacactcactagtagcagcatcgatcgccggccggccgtttccgagcaacatggggaaacgcttcctccaccagctgctagccgtcgccctggcactcttcgtctcgccggcgagatcggacgactggcttccggccaccgccacgttctacggcggcgctgacggctccgacacgatgggtggcgcgtgcgggtatggcgacctgtacgagcaggg

SEQ ID NO: 38230 - DNA, 277 bp, Zea mays
cgatcgaggaggtgatctaccacgacgagacgtacgacgtgacgacgatccgggccagcacgcccatgttcctgatggctcgcaagatcaagtcgctgggcgtgaagatagtgctgtccggggagggctccgacgagctcctgggcggctacctctacttccacttcgcccccaacagggaggagctccacagggagacctgccgcaaggtgaaggccctgcaccagtacgactgcctgcgcgccaacaaggcgacgtcggcgtggggcctggaggt

SEQ ID NO: 38231 - DNA, 263 bp, Zea mays
cggacgctgggcggtggtggccgtacaaacgggcccgcagaagccgtctccgttgtcgtcccaggccgccgacggtcgaggatgaggcggacgcgctgcagaagcttctgaagagggagtataaatacgggtttgtgtccgacttcgagtccttctccatccccaaggggctgtcggaggccaccgtccgccgcatctcggagctcaaggcggagcggcgtggatgctggacttccgcctcgccgcctaccgccgcttcctca

SEQ ID NO: 38232 - DNA, 266 bp, Zea mays
cccatatccgctcccctacctctccagcatcctcccgtctccgtcgtctcgtctccgctcctcacctcgccagccatgggcaagatcaagatcggaatcaacggtttcggaaggatcggcaggctcgtggccagggtcgccctgcagagcgaggatgtcgagctcgtcgccgtcaacgaccccttcatcaccacggattacatgacgtacatgttcaagtacgacaccgtgcacggccaatggaagcacagcgacatcgccctcaa

SEQ ID NO: 38233 - DNA, 264 bp, Zea mays
atcccgttcaacaaggcgtacgggatgacggcgttcgagtaccacgggacggacccgcgcttcaaccgcgtgttcaacgagggcatgaagaaccactcggtgatcatcaccaagaagctgctggacttctacacgggcttcgagggcgtgtcgacgctggtggacgtgggcggcggcgtgggcgccacgctgcacgccatcacgtcccgccacccgcacatctccggggtcaacttcgacctgccgcacgtcatctccgaggcg

SEQ ID NO: 38234 - DNA, 250 bp, Zea mays
  unsure (1)..(250): unsure at all n locations
cggacggtggngggagtcaaagactcaggtggtgccagttcagttggaaggcgcacagaggttaaagatctcaatctatttcgcgacctggtgggcgcttaatgtgatatttaacatttacaacaagaaggttctcaatgctttcccttacccctggctcacctccacactctcccttgcctgcggctctgcgatgatgcttttctcgtggggcactcgtcttgttgaggcccccaagaccgacctagac

SEQ ID NO: 38235 - DNA, 262 bp, Zea mays
acttacagaagaagctctgcttgagaagcaccggggtgctatcacttccatacattattcaccagatgtttctatgtttgcttctgctgatgccaacagggaagctgttgtgtgggatcgggcaagtagagagatcaaactgaagaacatgttgtaccacacagctaggataaactccctggcttggtcaccggacagtcgattggttgccactggctcactggacacctgtgcaattgtctacgagatagacaagccagta

SEQ ID NO: 38236 - DNA, 262 bp, Zea mays
gaagtcttttatgagccaaagcaaccaggtcgcagggcttctgccattcacaaagaaggtcggactacctgaatcgcgagccttgtacaccgtgctgcggtcgccgcatatcgataagaagtccagggaacagttctcgatgcatgtcaagaaacagtttgtggaactgacagccaaaccgcacgagctccacaagaagttcttctggctaaaacgcctgcgcatacctggggcccagtacgaggtacagatttctttcaag

SEQ ID NO: 38237 - DNA, 261 bp, Zea mays
gtgcgctacggcggcggcgccaacgagctcagcgccggctactccaagggcaccggcctcgccgcggagatcatcggcaccttcgtgctcgtctacaccgtcttctccgccaccgaccccaagcgcaacgcccgtgactctcatgtccccgtgcttgcccctctccccatcgggttcgcggtgttcatggtccacctggccacgatccccatcaccggcaccggcatcaacccggccaggagcttgggcgctgctgtcatc

SEQ ID NO: 38238 - DNA, 258 bp, Zea mays
ggaggacgttgtctctgaagctgacatcttcgtgaccaccactggcaacaaggatatcatcatggttgaccacatgaggaagatgaagaacaatgccattgtctgcaacattggccactttgacaatgaaattgatatgctcggccttgagacctaccctggcgtcaagcgcatcaccatcaagccccagactgaccgctgggtgttccccgagaccaacactggcatcattgtccttgctgagggtcgcctgatgaa

SEQ ID NO: 38239 - DNA, 256 bp, Zea mays
cgtcggtcgtgatcggtaccaatggaaggcgcactggggatcaggacgaggccggcggtgtgcgtgaccggcgcgggcggcttcgtggcctcgtggctcgtcgagcgcctcctcgccggcggccgatacatggtccatggcaccgtccgtggtccgggcgacgccaagaacgcgcacctggcggcgatggacggcgccgcggaccggctgcgcctgttcagggccgaattgctcgactacggcagcgtggcggcgg

SEQ ID NO: 38240 - DNA, 261 bp, Zea mays
  unsure (1)..(261): unsure at all n locations
cggacgcgtggnggtgagaggccaggatgagtttgagcatgagatgagccagcttggtaacctcagccaccccaactctggttgcttttcagggttactactggtcatcctcgatgcagttgcttctgtcggaatttgtggccagcgggagcttgtatgaccacctccacggtagccatcctcacgctttctctgagagcagcagcagaggtgctggaggtgaactgtcttgggaacagaggttcaacgtcgcacttggag

SEQ ID NO: 38241 - DNA, 260 bp, Zea mays
cccaccgtccggaagtagcgaccttcgatattgttgggccagtttgtgagtctgcagatttccttggaaaagatagggaacttccaacacctgatgagggagctggactggttgttcatgatgcaggtgcctactgcatgagcatggcttccacctacaacctgaagttgaggccgccagagtactgggttgaagaggatggttcgattgttaagatcaggcatgaagagaagctcgatgactacatgaagttctttgat

SEQ ID NO: 38242 - DNA, 260 bp, Zea mays
ggaatttgagaagttgaacactgaggttcttggtgtttccattgacagtgtgttctcccaccttgcatgggtgcagacagacaggaagtcgggtgggctcggcgatcttaaatacccacttgtttctgatgtgaccaaatcaatttcaaaggcctttggtgttctgatccctgaccagggtattgctttgagaggactgttcatcattgacaaggagggagtgattcagcactctaccattaacaaccttgccattggtc

SEQ ID NO: 38243 - DNA, 264 bp, Zea mays
cccgcctcgagctcttcccggagcaaccggagccacagacgtcaggacagcctagcgcgttccacgccggtatgcagaaccagatcatgtgccatgcttgccggacccttctgctctacccgcgtggcgcgtccagcgtctgctgcgcggtttgccaggccatcaccaccgtgccgccaccaggattggagatggctcagcttatatgtggtggctgtcgaactttgctgatgtatactcgcagtgcagacaccgtaagtgttc

SEQ ID NO: 38244 - DNA, 254 bp, Zea mays
cggacgcgtgggtcgttaccaagattgataggcgatccggcaaggagctggagaaggagcccaaatttctcaagaacggtgatgctggtatggtgaagatggttcccactaagcccatggtggtggagaccttttctcagtatcctcctcttggtcgatttgctgtccgtgacatgaggcaaacggtggctgtcggagtcatcaagagtgtggagaagaaggacccaactggagccaaggtgacgaaggctgct

SEQ ID NO: 38245 - DNA, 257 bp, Zea mays
cggacgcgtgggcggacgcgtgggcatagaaggaaaaagccttgaagagaagaaatcactgctagccaagtgcgctgctacaacacactcttcaaaacttataggtggtgaaaaagaattctttgcttctatggttgtggatgctgtccttgccattggcaatgatgacaggcttaatcttattgggattaaaaaggttcctggaggtaccatgagagactcttttttggtgaatggtgttgcgttcaagaagacgt

SEQ ID NO: 38246 - DNA, 255 bp, Zea mays
gtcgcctgcgccgccgcttcgttcgtgtggaggggagaagacaggaaatggcggcgactgagggcgtgctcttggggatgggcaaccccctcctcgacatctccgccgtcgtcgatgacgccttcctgacaaagtatgacatcaagctgaacaatgctattctcgctgaggagaagcacttgcctatgtatgacgagttggctagcaagagcaatgttgaatatattgccggaggagccacccagaactctatca

SEQ ID NO: 38247 - DNA, 258 bp, Zea mays
caagcacacgcggctcaaggacttcccaagtttcgtgcgctcgacggaccccgacgagttcatgttccacttcgccctgaaggtgacagagcagatagtcggcgcggacgccgtcatcctcaacactttcgacgagctcgagcaggaggcgctggacgccatgcgcgccatgatcccgtcgtccgcgtccatccacaccatcgggccgctcgcgttcctcgccgaggagatagtgccccgcggaggcccgaccgacgc

SEQ ID NO: 38248 - DNA, 254 bp, Zea mays
cccacgcgtccggcgtggagcagatcagggaggtggcggccggcctggaagccagcgggcagcggttcttgtgggtggtccgagccccgcccagcgacgacccggccaagaagttcgagaggccgccggagccggaccttgacgcgctcctcccggaggggttcctggcccggaccaaggataggggtctcgtggtcaggtcgtgggcgccgcagcgggacgtgctggcgcacgcgtccgtgggcggcttcgtg

SEQ ID NO: 38249 - DNA, 255 bp, Zea mays
ctttcacttcacaactattctgtatgcacccttcgtctattgactcttatgtccaactcctatattggctattttatgcactttgcgcactaccgtagcaccagaacttctctctttgatggcattgaggagggtggaatcagggcaacatcctattcttcccatgagattgatgagcaagaaaatgatggagcgattgatggattgcaggatcgtgtcagcattctcaagcggttgtcaggtgatatccacgaa

SEQ ID NO: 38250 - DNA, 256 bp, Zea mays
cgccaagtccatcccgcacaagaagccaggcccgccgccgccagatcagtacacagaggcgctgcacaaggcgctcctcttcttcaacgcccagaaatccggccaccttcccaagaacaatggcatcaagtggcgcgggaactctggcctgtcagacggctccgacgccaaggacgtcaagggtggcctcgtcggcggctactacgacgctggcgacaacatcaagttccacttcccgatggccttctccatgacg

SEQ ID NO: 38251 - DNA, 255 bp, Zea mays
cccacgcgtccgccggattcgatgctctgcacgtcgctgcaaaggagggccacagagatatcgtgaaggtacttctggaccatgatccatcccttgggaaaacgtttggccaatcgaatgtgactcctctcataactgcggcgatcagaggccacatcgaggtggtgaacctactgctggagcgagtttctgggttggtcgagttatcaaaagcgaacggaaagaatgccctgcacttcgctgcccggcaggggc

SEQ ID NO: 38252 - DNA, 275 bp, Zea mays
gctatggcttcattctgtgcgctcgatcttgttgttaactacggactggatggcgtaaacctgatgacgtttgggcagcctcgtattggcaatgctgcatttgcttcttatttcaagacatacttgcctcaagcgatccgagttactcatgcccacgatatcgtgcctcacctgccaccatacttctcattcttcccacagaagacctaccatcacttcccaagagaggtatggatccataatattggactaggaaccctagtgtaccccgtgga

SEQ ID NO: 38253 - DNA, 282 bp, Zea mays
cccacgcgtccggaggcggaccaggtaagcagcagcaggaaccctagcaccgccgcatccgcagccatgggtatcgacctcgttgccggtgggaggaacaagaagaccaagcgcacagcgccgaagtccgacgatgtttatctcaagctccttgtcaagctctaccgtttcttggtcaggaggaccaagagcaacttcaatgctgtcattctcaagaggctcttcatgagaagaaccaatcgcccaccaatctgcatgcgccgccttgtcaagttcatggaa

SEQ ID NO: 38254 - DNA, 285 bp, Zea mays
cggacgcgtggcgcgggcaggacgggagctacctcacggagctgctcctgtccaagggatacgaggtgcaacgcctcatccgccgctcctccaacttcaacacgcagcggctggaccacatctaccacgacccgcacgcggtgccgtcggccccgcgtcccccgatgcggctccactacgccgacctctccgactcctcctccctccgccgcgcgctcgacgccatctcccccgacgaggtctacaacctcgccgcgcagtcgcacgtcgccgtctccttcgaga

SEQ ID NO: 38255 - DNA, 292 bp, Zea mays
ccctctgtttgagaagaggccgaagcagttcggcatcggcggcgttgccgcccaagaaggacctgcaccggttcgtcaagtggcccaaggtcgtgcgtatccagcgccacgccgcatcctcaagcacgcgcctcaaggtaccaccggcgctcaaccagttcacccgcaccctcgacaagaacctcgctacgaacctgtttaagatgcttctcaagtaccggcctgaagacaaggctgccaagaaggagaggcttctgaagagggcccaagctgagaatgaaggaaaaactgt

SEQ ID NO: 38256 - DNA, 266 bp, Zea mays
gagctactgggtttcttgggcgctatcttgtgcaacaacttgccaagatggggtctcaagtgcttgtcccattcagaggttgtgaggattctcctcgccacctgaagattatgggtgacttgggtcagattgtgcccatgaaataccatccgagagatgttgattcaattaaggctgttatggccaagtcaaatgtggttattaacctcataggacgagagtatgaaacaaggaactacagcttcgaagaagtaaaccaccatatg

SEQ ID NO: 38257 - DNA, 273 bp, Zea mays
  unsure (1)..(273): unsure at all n locations
cggacgcgtggngaagtacaatagagatgacttccctgttcagtacgatgctgcaaagttctttgtcattaaatcgtacagcgaggatgacatccacaagagcgtaaagtacaatgtgtgggcaagcacaaccaacggaaacaagaagcttgatgctgcttaccaagaagctcagtcaaagggatctgcatgccctatattcttgttcttctcagtgaatacaagtgggcattttttgggttcccaaaaatgagtggcgccgttgattttgag

SEQ ID NO: 38258 - DNA, 276 bp, Zea mays
gactttggctttgttcactttgcagaaagatcaagtgcattgaaggcagttaaaggaagtgaaaaatatgaaatcgatggtcaagtactggaagtgtccatggccaaaccattggcagataagaaacctgatcattcacacaggcctggaggaggccctaattatccccttcctccctatggtggtggtggctacatgggagatccatatggcgctaatggtcgcggcggtcctgcatacaaccagccaatgatatatggcagaggaccagcaccg

SEQ ID NO: 38259 - DNA, 280 bp, Zea mays
caatgctgtgcttaaggctcataatgctgttatatcagacatgcggcctggagttaattggatggatatgcacaaattagcagaacgggcaatacttgaatctctcaggaaggaacaaattgtacaaggggatgttgatgatatgatggctcaaaggttaggggctgttttcatgcctcatggtcttggccacttacttggtattgacacccatgatccaggaggctaccctgagggattggagaggcccaaggatccaggactgagctccttgcggacc

SEQ ID NO: 38260 - DNA, 236 bp, Zea mays
ccctctgtttgagaagaggccgaagcagttcggcatcggcggcgttgcccccaagaaggacctgcaccggttcgtcaagtggcccaaggtcgtgcgtatccagcgccacgccgcatcctcaagcagcgcctcaaggtaccaccggcgctcaaccagttcacccgcaccctcgacaagaacctcgctacgaacctgtttaagatgcttctcaagtaccggcctgaagacaaggctgc

SEQ ID NO: 38261 - DNA, 247 bp, Zea mays
ggagctgctccagggtcagctccagctctggcaccagttcctgggcttcttcaagtccctcgcgctcggcgtcgccatggacctccgcatcgccgacgccatccaccgcctcggtggcgccgccagccttccccagatactcgcggaggccgggatcaagatcggcccgcgcagcaacaagctccgcgacctgcggcgcgtcatgcgcgcgctcaccgtgtcgggcatcttcaccgtcgtccagcga

SEQ ID NO: 38262 - DNA, 262 bp, Zea mays
cgctgtcccagcaaatcaaggatgatggattgctgcacacaacttgtgggactccaaactatgtggcaccagaggtcctagaagatcagggctatgatggtgcaatggctgatctgtggtcatgtggagttatcctgtttgttctgctagctgggtatttaccttttgaggactctaaccttatgacgctgtataagaaaatctcaaatgcagaatacacatttccaccatggacatctttccctgccaagaggttgttgac

SEQ ID NO: 38263 - DNA, 191 bp, Zea mays
cttgcgcatccttcctcctctctcgtctatacctctttcttctcctcttctctctatctatccttaatcaaaaatgccatacacaaagggcgacgccagcaagggtgcttcattgttcaagacccgatgcgctcaatgccacactcttggtgctggcgagcctcacaaagtcggccccaacctgaacggta

SEQ ID NO: 38264 - DNA, 272 bp, Zea mays
ccgcaacactgcttccttctataaacgttttcttccaaaagagtggaatgataatctcatcgtctggcgggctccattcttccactcactctcggtggagttcacaaagtcccagattattgcctcaatacctggatttttcttttgcttgtggtatgcgtcaaagaagcattggcttgcaaacaatgtcctgggattggctttctgtattcaggggattgagatgctgtcattgggatcatttaaaactggagccattctcttgggtggac

SEQ ID NO: 38265 - DNA, 277 bp, Zea mays
gccaaacttgacatttataggaaatttgcaactgcattgattgtatctgttctggtgtccgttgggtggattggctatgagatttactccaaatcaacagatgtatttaacgaacgatggcagcatgcctggatcattcctgccttctggcatgtcttgtctttcttacttctttgtgtcatttgctacctgtgggcaccttcacagaactcaatgagattttcatatgacgcaagcgaattctttgatcgaaaggacaatctgtcattaattaggc

SEQ ID NO: 38266 - DNA, 281 bp, Zea mays
cagggcgcggcgggcccgacgacgcggacccgtcgctggacccgctgtacgccgcgaagttgcggctcaagtgcacagacgctgacggacaacacgacgatcgtggagatggaccccggcagcttccgcaccttcgacctgagctactaccgcggcgtgctcaagcggcggggcctgttccagtccgacgccgcgctcatcaccgacgccgcctccaaggccgacatcctcagcgtgatcaacgcgccgcccgaggtgttcttccaggtcttcgcgggctc

SEQ ID NO: 38267 - DNA, 278 bp, Zea mays
gcaactgctcttgaagttagagctactggaattccttacgcctttgctccctgtatagcggtttgtagagatccaagatggggacgctgctatgagagctacagtgaggatccaaaggttgtccagtcactgacttcactcatctctggcctgcacagtgacgctcctgcagattccgcgggaaggccgtatgttgggggaagtaagaaggtcgctgcgtgcgcgaacgactatgtcggtgatggtggaacgcataacggaatcaacgagaacaacac

SEQ ID NO: 38268 - DNA, 279 bp, Zea mays
gagctcggcgccgaggtccgctggtgctcctgcaacatcttctccacgcaggaccacgccgccgccgccatcgcgcgcgactcggccgccgtgttcgcctggaagggggagaccctcgaggagtactggtggtgcaccgagcgctgcctcgactggggcgaggcgggcggccccgacctcatcgtcgacgacggcggcgacgccacgctgctcatccacgagggtgtcaaggccgaggaggattacgagaagaccggcaagatccccgacccggagtcc

SEQ ID NO: 38269 - DNA, 281 bp, Zea mays
cccacgcgtccgtgtctgtcgctctcgctctcagacgactgggccgccgccgcttggtgctgaggctttggttggtctcttcggcggcgacgagcacccaccagttctgtagaaatggctgatggtgaggacatccagcctcttgtctgcgacaatggcaccggaatggtcaaggctggttttgctggcgacgatgcaccaagggcggtttttcctagcattgttggccgtcctcgccacactggtgtcatggtagggatgggacagaaggatgcatatgt

SEQ ID NO: 38270 - DNA, 288 bp, Zea mays
gagggttcatttttggtcctcctatcgctttagccattggcgcaaaatttgtgcctttgaggaagccgaagaagttgccaggcgaggtgatctccgaagagtattctttggaatatggaactgacaagatagaaatgcatgtcggagctgtacaggccaacgaccgggctcttgtagtcgatgatcttattgctaccggtggaacactatgtgcagctgtcaaacttattgaacgtgttggagcaaaggttgttgagtgtgcttgtgtcattgaattgccagaactga

SEQ ID NO: 38271 - DNA, 273 bp, Zea mays
ggaaactaacatatgcccacctgcatgaggctaccaatggcttcagctcggaagctcttgttggcacaggaggattcggtgaggtttacaaggctaggctcatggatggcagcgttgtggctgtcaagaagctgatgcatttcacaggccagggcgaccgggagttcactgcagagatggagaccattggcaagatcaaacatcgcaaccttgtgccgttgctaggctactgcaaagttggcgacgaacgtctgcttgtgtacgagtacatga

SEQ ID NO: 38272 - DNA, 278 bp, Zea mays
ctcacttctgcgccgccacccactacaggtaaggaagatgaggagggcaggatgtcgcaccgtaagttcgagcacccgaggcacggctccctcggcttccttcccaggaagcgctcctcccgccaccgcggcaaggtgaagtcatttcccagggatgaccccaagaagccttgccatctcactgccttccttggctacaaggctggcatgactcacattgtccgtgaggttgagaagccaggatccaaactccataagaaggaaacttgtgaggctgt

SEQ ID NO: 38273 - DNA, 272 bp, Zea mays
gaacaggtccgggacgcgtggcaaagttgtgcaccgtgacatcaaatccagcaatattttgattgatgctgagttcgagtccaaagtatcagatttcggtttagccaagcttcttggcgctggaaagagtcatgtcaccactagagttatgggtacctttgggtatgtggcaccagagtatgcaaatactggactcttgaacgaaaagagtgacatttacagctttggagtcgttctccttgaagcaattaccggaagggatcctgttgact

SEQ ID NO: 38274 - DNA, 272 bp, Zea mays
gggcacgctgcgcgaggcctgcgacacgggcacctacaccaccgtcatcatctccttcctccgcggcttcggccacggcgccgcctactactcgctcgacctctcgggccacccgctcgcggtcgtcgtcgccgacgtcaagcactgccaggccaagggcatcctcgtgctcctctccatcggccggccgcccaacaccaacaccggcggcggcgccggctactcgctcccgtccgcgcgggctgcggctgacctcgccgggtacctgtggg

SEQ ID NO: 38275 - DNA, 282 bp, Zea mays
ctgctgacttgtgaacgaggcagcatcatagttcagtttggaaacatgtcatcgaagaagatagagttggatcacaaggacatggtccatgattctgccatcgactactatggcaagcgccttgccactgcctcttcagacttcaccgtgaagatcgtcaacattggtgctgcaaatgccccatcccaggtccttgcaacgctaagtggccactatggtcctgtgtggcgtgttgcttgggcccatccaaagtatggtgcaatccttgcatcgtgcagttat

SEQ ID NO: 38276 - DNA, 272 bp, Zea mays
agattatccgcgcgtcaccgactcccggcgaagacgatggggaaggggttcgcatcctacctggcgatgaagacggggccggagggcggcgacgcggcggcggcgcagcaggctctgatcgacgcggacctgcgggagctcggcgtcgccgcgcggaagctcgccaaccacgcattcgtcctcggcggcgggctggggttcggcacctccttcctcaaatggctggccttcctcgccgcactgtatctcttgatattggatcgcacaaattg

SEQ ID NO: 38277 - DNA, 270 bp, Zea mays
cggacgcgtggctctcccatccgagtgtctcctcctccgccgccgccgccgccgcttccgtcgtctccgcaccgccgaggccatgccgtcccacaagaccttccggatcaagaagaagctggccaagaagatgcgccagaaccgccccatcccctactggatccgcatgcgcaccgacaacaccatcaggtacaacgccaagcgcaggcactggcgtcgcaccaaactcggattctgagcggtggaagaaatgctggctaatgacgcttg

SEQ ID NO: 38278 - DNA, 266 bp, Zea mays
cggacgcgtgggcggacgcgtgggcggacgcgtgggtgaagtttgctgatgagaacttcaagatcaagcaatctggaccaggacttctgtccatagccaatgctgggagagatacaaacggatctcagtttttcatcaccaccgtgacaacaagctggttggacgggaagcatgttgtgtttggcaaggtgttgtctggaatggatgttgtgtacaaggtggaagctgagggccggcagagcgggcaaccaaagagcaaggttgtc

SEQ ID NO: 38279 - DNA, 268 bp, Zea mays
ctgacgcgtggctcctgcgacgccacaaccacacgttcacggtagcgagagttatcgtcgtcggcggtagtgtcgctgaagctgcagaagcggctcgccgctagcgtcctcaagtgtgggaaacgctaagtctggcttgatccccatgaagtcagcgagatctccatggctaactgccgccagaacatccggtagttggctaaggatgggtttatcatcaggaagcctcagaaggttcactctaggtcccgtgcaagaagggcacatg

SEQ ID NO: 38280 - DNA, 273 bp, Zea mays
tctagtcctctcgcatccgcagcttccccagccagctagggtttgcagatgacgaccgcggcgcgccccacctgggcgccggccaagggcggcaacgagcaggggggcacccgcatcttcggcccctcccagaagttctcctcccgcgacctcgccgcgcacacctccctcaagccaagaaaagacggtcaacagacccaagaggagttacagaagaggaatctcagggaggaacttgaggaacgtgagcgcaacactactcttccaaggata

SEQ ID NO: 38281 - DNA, 276 bp, Zea mays
tggggaacagactacatcctcaaaaccttcaattcatctgctgacacgatagacaggattgtcgctcaggtgggtgtaggtgacacctctaaaggcagcagtcagcctaatgaccattactgctggatgagaccagaggacatcgactacaaaaggccagtcaccgagtgtcactcttgctcagatctagcgtctgaaatggctgctgccctggctgcagcttccatagtgttcaaggacagcaaaacctactccgacaagctcgtcaaaggcgca

SEQ ID NO: 38282 - DNA, 273 bp, Zea mays
agctgatgggcgaccccgtcgtggcttctagcggtcagacgtacgaccgtgactccatcacgcgctggttcggctctggcaaatccacgtgtcccaagaccgggcaagtgctgctgaatctggaactcgtgcccaacaaggcgctcaagaacttgatatcgcggtggtgccgggagaacggcatccccatggagagcagcgagtccgggaaagccgagccggcggctgtggtaggcgcgaacaaggccgcgctgaaggcggcgcgcatgaccg

SEQ ID NO: 38283 - DNA, 280 bp, Zea mays
ccgacgtttacggataactgagatggtcgaagaggatccacttacagttaaagttgaccatctaaaggaaaagccctacaacaaggacgatgatgttatgaaagctacatcattcgaagttatatcaactttaagggaagttctaaggacaagttccctttggaaggatcatgtgcaaacctacacacagcacattggtgactttaactaccaacggttagcagactttggtgctgctatctctggtgccaacaagttgctttgccaggaagttcttgag

SEQ ID NO: 38284 - DNA, 275 bp, Zea mays
cacgcggccgtcaacttcgggcagtacccgtacgccgggtacctcccgaaccgcccgtccgtcagccggaagccgatgccggcgccgggcagcgacgagtacgcggactgggagcgcaaccgcgacaaggtgttcgtgcgcaccatcaccagccagttccaggccctcgtcggcatctcggtggtggagatcctgtccagccactcctccgacgaggtgtacctcggccagcgcgacaccaaggagtggacgtcggacgcaaagcgcaggaggcg

SEQ ID NO: 38285 - DNA, 276 bp, Zea mays
gggatatgacaacccaaagggcaatgagaccaagaagcaaagaggtgatcctgaataaaatggtgaggaagatgaggaagaaccagaagatcaggagggtggcggcgacgacgatgatgacgacgatgacgatgatgagaacggggatgacgaggacgacgacaatggggatgacgataaggagggtgtagatgaagaagccgatgacgaggacgatgatgaggaggaagatgatgatgaagactcgctccagcccccaaagaagaggaagatgtg

SEQ ID NO: 38286 - DNA, 276 bp, Zea mays
aaactacatgcttacaaaggtgactatgacacatttgagaggacaagggaagagcaccttaagaatcagcagaaagcctttgaaacaaatgagaaggccagacagcacatgcagacattcaatgacaagtttcggtacaatgcaaagagagcatcacttgttcaattaagaatcaaggcattggagcgaatggaacatgttgatgcagttgtcagcgatccagactataaatttgaatttccaaccccagatgaccgccctgggccacaaatcatc

SEQ ID NO: 38287 - DNA, 228 bp, Zea mays
cccaaatataccggtctacaagtttttcagtctcgctgagacagtctcggccaattcaaggccagtccatgacgggctatatcgcgccattgatatgtatctgaaggagcacccaagcttgggcaagagcgacaagaagaggctctgtgccctcatggactgcaggaagttgtcgcctgatgcatgcgctcacgctgtgcagaacgagcggctgctctgaggattgtg

SEQ ID NO: 38288 - DNA, 275 bp, Zea mays
cactgataatctctgaagagctcactctttgtgattgccctggtctggtcttcccttccttttcaagctcaaggcatgagatggtggcatgtggtgtgttaccgattgataggatgacaaagcaccgggaagctattcaagtggtggcagatcgtgtcccaagggacatccttgagcagatttacaaaattgcattgccaaagccaaagccatatgaaccccagtcccggccgccaactgctgctgagctgttgcgtggctactgcgcgtctcgt

SEQ ID NO: 38289 - DNA, 277 bp, Zea mays
aggtcatccgcgccgccaccaagtccatcgagcgcgaggtcaactccgtgaacgacaacccggtcatcgacgtccaccgcggcaaggcgctgcacggcggcaacttccagggcacccccatcggcgtgtccatggacaacgcccgcctcgccatcgccaacatcggcaagctcatgttcgcgcagttctccgagctcgtcaacgagttctacaacaacgggctcacctccaacctggccggcagccgcaaccccagcctggactacggcttcaaggg

SEQ ID NO: 38290 - DNA, 273 bp, Zea mays
cttcacgatctgtgactgtgatctatactataaggtgaacaagatctctttgtctactgtagttgcaacaccagcagcagaagagcagccccagagctccagcaataatggccgagaagggcgtgaaggtgttggggatgtgggcgagccctatggtgatcagggtggagtgggcgctgaggctgaagggcgtcgagtacgagtacgtcgacgaggacctcgccaacaagagcgccgacctgctccgccacaacccggtgaccaagaaggtgc

SEQ ID NO: 38291 - DNA, 267 bp, Zea mays
cggacgcgtgggcaagaagctgctggacttctacacgggcttcgagggcgtgtcgacgctggtggacgtgggcggcggcgtgggcgccacgctgcacgccatcacgtcccgccacccgcacatctccggggtcaacttcgacctgccgcacgtcatctccgaagcgccgccgttccccggcgtgcgccacgtgggcggggacatgttcgcgtccgtgcccgccggcgacgccatcctcatgaagtggatcctccacgactggagcga

SEQ ID NO: 38292 - DNA, 173 bp, Zea mays
cagacgcgtgggcagacgcgtgggcgccgacaaaaccagaccaccaaacaagtgccagcgccctctcgcagacgccgcaatggacagcaccttcatcatgatcaagcctgacggcgtccagaggggcctcattggtgagatcatcagccgttttgagaagaagggcttctacc

SEQ ID NO: 38293 - DNA, 266 bp, Zea mays
ggagggccagaatgacatctactacatcactggcgagagcaagaaggccgtggagaactcccccttcctcgagaagctgaagaagaagggctatgaagtcctgtacatggtggacgccatcgatgagtatgctattggccagctcaaggagttcgagggcaagaagctcgtctcggccaccaaggagggcctgaagctcgacgagagtgaggatgagaagaagcggaaggaggagctcaaggagaagttcgagggcctgtgcaagg

SEQ ID NO: 38294 - DNA, 261 bp, Zea mays
atcgccggcatcgagggcggcttcttcaagctcaaccccaaggagggcctcgccatcgtcaacggcacgtccgtgggctccgcgctcgcagccaccgtgatgtacgacgccaacgtcctggccgtcctgtcggaggtcctgtccgccgtcttctgcgaggtcatgaacggcaagcccgagtacacggaccacctgacccacaagctgaagcaccacccggggtccatcgaggccgcggccatcatggagcacatcctggat

SEQ ID NO: 38295 - DNA, 237 bp, Zea mays
gaagaaggtgcggtgccaggcgaaggtggccgggacgctggtgaccgtagccggcgcgatgatgatgacgctgtacaagggcccgctgatgaagatggcgtggaccagcagcggccacggccacgcgcacggcagcggcggcgccgaggcggccgtcatcgaccccagcggcagggagtggttcctgggctcgctcttcgtcatcgtcgccaccctcgcctgggcctcgctcttcat

SEQ ID NO: 38296 - DNA, 264 bp, Zea mays
actggattcattccaaattctgtttttttccttgagtctaattatgtattcactattcaacaaacaaaggtgttgatggttgtgggagcaggacggggacctctagtatgagcatcgttgcaggctgctgaagaaactggtcgaaaattaaaagtatatgatgttgaaaaaaatcctaacgctgttattactcttcatgtaagttattgagtggttgttctgtctcatatttcttcaatcatgcatgtccattagtttggtact

SEQ ID NO: 38297 - DNA, 203 bp, Zea mays
cccacgcgtccgcccacgcgtccgggagaccaggatggcggcatctttagtcagactgcatttccatgactgcattgtcaagggctgcgatgcttcggtgctgttggacaacagcagcagcatagttagtgagaaagggtccaacccgaacaggaactccctcagggggtttgaggtgatcgaccagattaaggctgctcttg

SEQ ID NO: 38298 - DNA, 263 bp, Zea mays
ccgatccccaattcctccttcggatctcgcattcagcgcacgacaggtgtgaaggaagggggacgcggaggaagatggggctcgcgttcgggaagctcttcagccggctcttcgccaagaaggagatgcggatcctcatggtcggcctcgacgccgccggtaaaaccaccatcctctacaagctcaagctcggcgagatcgtcaccaccatccccaccatcggtttcaatgttgaaactgttgagtacaagaacattagcttc

SEQ ID NO: 38299 - DNA, 292 bp, Zea mays
cgacgaaggagaggcatccctcccttccgcgtggtgtgctctctgttcctacgccgtttcctctcccgactctctcctcgccggcgacgccgcggagtaggtgcaacagaaactgctcgaggcggaggcggacctgcggctgcacagacatgggtgatcacgaggcgcgcggtgatgacttcgagaagaaggcggagaagaagctctcgggctggggcctcttcggctccaagtacgaggacgccgccgacctcttcgacaaggctgcgaactccttcaagctcgccaagaa

SEQ ID NO: 38300 - DNA, 284 bp, Zea mays
gcttgccactctcaccaatcaagttttcatgtctgatctcgacattcagatcccaactgccttcgatcccttcgctgaggccaatgctggggactctggtgcggcagcagggtcaaaggactacgtacacgtgcgcatccagcagcgtaatggtcgcaagagcctgactaccgtccagggattgaagaaggagttcagctacagcaagatcctcaaagatctcaagaaagagttctgctgcaatggtacagtggtccaggacccagaacttggacaggtcattc

SEQ ID NO: 38301 - DNA, 280 bp, Zea mays
  unsure (1)..(280): unsure at all n locations
gagaagcgcaggaggccccagcactagcgccgccccgccgccgcatcagacatggcgctggccgctcgcctcgtctcgcgctcccgtcagctatattcggttcaagccactttggggaatggaggtgtcactcaagttcgctcctttgccaaggatgcagctccagctgaccgtcctcctgtcagtggggatgatctcctgaagggcatattctttgaggtaaagaagaagtttgagacagctcttggtgttcttanaaaggaaaagatcactattgatc

SEQ ID NO: 38302 - DNA, 276 bp, Zea mays
atgtgttctatttgcggaacttcggagaatctttggatatgtctaatctgtggccatgttggctgtggaaggtacaagggtggacatgctattgaacactggaaggaaactcaacattgttattcacttgagtaaagacccaaaaagtgtgggactatgctggggacaactatgtacaatcgcttattcagtcaaaaacagattggaagctagttgagtacaatttccatggtgatcacacagcagagagcacgtgttcactatgcagtgggtgat

SEQ ID NO: 38303 - DNA, 283 bp, Zea mays
ccttggacagcggcaccagaacctctgcctccgccggtgcttgctggtatcattacaatctggtacgttttagtggttgggcttgacttcctactattcagaaacacagtaccgagaagtctttaggtggggtcaaagatggtgtcgctgaagttgcaaaagcgccttgccgcgagctacctcaagtgtgggaaaggcaaggtgtggcttgacccaaatgaagttagtgagatctccatggcaaactcccgccagaatatccggaagttgtttaggatgggtt

SEQ ID NO: 38304 - DNA, 288 bp, Zea mays
ccaaattgctgctctagctgtagccttgaaacaggccatgtcacctggattcaaggcctatatccagcaggtcaagggaaacacagtttcccttggtaaccatttgatgagtaagggctacaagttggttactgatggaacagagaaccaccttgttctctgggatctgcgccctcttggcttgactggcaataaagttgagatgctatgtgacctatgcaacattacactgaacaaaaatgctgtctttggtgacagcagtgcattatcacctggcgggtgtgcgca

SEQ ID NO: 38305 - DNA, 286 bp, Zea mays
cacgcgtccaaacatacagctagatagcctctgcatgcctacgtacagcatggccaaggccgagctgctcctcgccctcgtggcttcgctcgtcgtgctgccattctcctccctcgccgtgtaccaggacttctgcatcgccgacctatccggcgccgccacgccgggcggctacccgtgcaagcccccgatagacgtgaccgccgacgacttccactacggcggcctcgccacccccggcacggcgctgaaacccttcaagatctccctgggctcggccgtcgtc

SEQ ID NO: 38306 - DNA, 273 bp, Zea mays
ctggagttgcgccattcgctctttgcctcttcttctccaaattggttgcatataccttcctgtactggctacccttctacatcagccatacacgcatcggtggcgtgtacctctccgatgcaatggccggcagcttatcgacgatcttcgacgtcggtggcgtgttgggaggagtcctcgccggccacatctccgaccgtctaaacgcgcgggcgatcacagctgccagcttcatgtactgcgcgatacccgccctcttcctgtaccgcgcgt

SEQ ID NO: 38307 - DNA, 273 bp, Zea mays
cgctttcttcggttcttcctcctcgagcagccacttccgtctctaactctacagcgacgacgagagcgacgatatgaaggggaagaagccggtcaaggagctcaagctcaccgtgccggcgcaggagaccccggtagacaagttcctgacggcaagtggcacgttcaaggatggtgagctgaggctcaatcagagcggcttgcggcttatctctgaggacaacggggatcaagatgaatctacaaagctgaaggtggaagatgtgcagttatc

SEQ ID NO: 38308 - DNA, 237 bp, Zea mays
cccacgcgtccgagaattatcacttgaagatgaaagcgtcaaggtttattttcagtgagatcagccagaagttcccaatcatgccttttactgctagggcattagaagagaagcgtgcgcgtttaggcttggtggaatgcatgaaccatgaactattgcagccgtaccctgtacttcatgagaagccaggcgatcttgttgcacacataaagttcactgtgctgctgatgcccaatg

SEQ ID NO: 38309 - DNA, 261 bp, Zea mays
cgtgccccggcacggtctcgtgcgcggacatcgtcgcgttcgccgcccgcgacgcgtcctacttcctcagcggcggcggcatcagcttcgccatgaccgcggggcgctacgacgggaacgtctccctcgccagcgagaccctccccaacctgccctcgccgttcaccggcttcgaccagctcgtcaaggtgttcgccgacaaagggctcgacgccttcgacatgatcacgctctccggcgcgcacagcatcggccgctccc

SEQ ID NO: 38310 - DNA, 279 bp, Zea mays
ggtttatgactcaactgaaaaaggctttaggagaatgtcctttacttgctatttgcacagatgcttgtaaaggtcttgagattgctgttgggcaagtgtttccacaagctgaacaaagggaatgttttagacatctaatgcagaattttatagagagatatagtggtgaaagtgggtgacatatgtggcctgctgcaagagcatatgacaaagaagcttatgagaaacatttggatattatttataggggtattcctgatgctaagttgtggtttgtgg

SEQ ID NO: 38311 - DNA, 275 bp, Zea mays
cggacggtgggcatgaatggtctggtctttgatgttcgtcctgcacagggttttactctggaggaaagcaatggatttgagtccacaacttcctttaagcaagaagaacaagatccccagtcctcagtattcacatcaagagatcaaaggcctttgcatgaagttatatttgcatgtgacgataagccaaagcttcttagtcagttaacctctctcctcggggagcttggtcttaatatccaagaagcacatgcatattcgacgagtgatggcta

SEQ ID NO: 38312 - DNA, 274 bp, Zea mays
  unsure (1)..(274): unsure at all n locations
cccacgcgtccgcatcccctttgcaagtatagtctctctgctaagcgaacgancttcaagctagtctcggcggctctagaagacgatgggcaaggacgacgtgatcgagagcggcgctggcggcggcgagttcgctgccaaggactacacggaccctcccccggcgccgctgatcgacgcggcggagctggggtcctggtcgctgtaccgcgccgtgatcgccgagttcatcgccacgctgctgttcctgtacatccacggtgcaccgtgatcg

SEQ ID NO: 38313 - DNA, 271 bp, Zea mays
tgcttctgaattcttcggtgagaaagacaagacttatgatcttaatttcaaggaggagaacaacgatggctcaaacaaaatttcaggcgacagctgaaagacctgtacaagtcctttgtttctgagtaccctatcgagtcgatcgaagacccatttgatcaggatgactggagcacttatgccaaactcactgatgagattggacagaaagtgcagattgtaggagatgatcttctcgttaccaaccccaccagggtcgccaaggccatca

SEQ ID NO: 38314 - DNA, 241 bp, Zea mays
ctcactctctcctccagctcagggtccggcggcgaagggaaggcaagatgtacaccgcgaggaagaagatccagaaggagaagggtcttgagccctccgagttcgaggactccgttgcccaggctttctttgatctggagaacgggaaccaggagctcaagagcgacctcaaggacctgtacatcaacaatgctatccagatggatgttaccggaagtaggaaggctgttgtcattcacgt

SEQ ID NO: 38315 - DNA, 275 bp, Zea mays
ggacgcgtgggcggacgcgtgggcaagaacgacgcctccctcatgtcctccgtcatcacgggcctcgtcaacgtcttcgccaccgtcgtgtccatcgtcaccgtcgaccgcgtcggccgccgcaagctgttcctccagggcggcgcgcagatgatcgtgtgccagctcatcgtgggcacgctcatcgccgccaagttcgggaccagcggcacgggggacatcgccaagggctacgccgcggtcgtcgtggtcttcatctgcgcctacgtcgccgg

SEQ ID NO: 38316 - DNA, 279 bp, Zea mays
gtttatctatccttctatccccattcccatcccgagacaggagagggcaaggatgctgctcctgagctcccccttcgtgtccgtgtcgccgccgccgccgccgctcagctcccatggcgctcgcccggcgctgcggatcgaggcggccaggcagctgacggggcgggtggtgacgaccaaggcggacaagacggtcggggtggaggtggtgcgcctggctccacaccccaagtacaagcgccgggagcgcatcaagaagaagtaccaggcgcacgaccc

SEQ ID NO: 38317 - DNA, 275 bp, Zea mays
ggacctggggtagctacctgttatatgaactcccttctacagacactataccatatagtctacttcaggaaggctgtatatcatatgccaaccactgaaaatgacataccatcaggaagcattcccttggcgctgcagagccttttctacaagctccagtacagtgacagtagtgtagctacaaaagagctgacaaaatcttttggttgggacacatatgattctttcatgcagcatgatgtacaagagctcaacagatttctgtctgagaaact

SEQ ID NO: 38318 - DNA, 253 bp, Zea mays
cggacgtggcgacagcaaaaaagagaaaaaaagatgtgacatcctagaggaggcctttgccatgatgggtgcgctcgcatggcaggccaggtattaataaaaagatgattattgtgtgccgggggaggagatcgcacgggggttgatgtttttggccccggggtctcctccctcatcttgttccgtgttcctgtatccgttgtttccgcgcctgttggtccgctgcgcacgccggatttttgcatcgatcacg

SEQ ID NO: 38319 - DNA, 272 bp, Zea mays
ggcagacgacatcaaatgttgggcacctaaataagccatcgattcaggctcttatccatgggctgaacaggcactactactcaattgcaatcaattaccggaaaaatgagctagaggagaaaatgttgttgaacttgcacaaaaagaaatggacagatggactaattttgaagaggtttgacactcactcaaaaaccaacgagcagactgtccaggaaatgctaaacctagccatcaagtacaacaaggcagtgcaggaggaggacgactgc

SEQ ID NO: 38320 - DNA, 152 bp, Zea mays
tctccctacctcgccgtcgccgtcgcatctgccatgggggcgtacaagtacgtctcggagttatggagaaggaagcaatccgacgtgatgcggttcgttcaacgcgtgcgctgttgggagtacaggcagcagccgggcatcgtccgcctcac

SEQ ID NO: 38321 - DNA, 314 bp, Zea mays
atccgcagtacggtcggaattccgggtcaccacgcgcccgggacctggcggacgcgtgggcggacgcgtgggcggacgcgtggggcgccggcaaccgccgccatcgatcgatcgcccggaaaatgacctctaccgatgtctggagccggcgaggaggataagaagcccgcggagggcggcgcccacatcaaccttaaggtcaagggacaggatggcaatgaggtgttctttcgcataaagaggtccacccagctgaagaagctgatgaacgcctattgcgaccgccagtctgtggacatgaatgccattgcatt

SEQ ID NO: 38322 - DNA, 264 bp, Zea mays
cccacgcgtccgggctaactttcttcaagctgctgttgactacaagaagaagattggattcaacggaacactattgatagagcctaaaccacaggaaccaacaaaacaccagtatgactgggatgttgcgactacgtttgcttttctacagaagtacggtcttacaggagagttcaagattaatgttgagtgcaaccatgctactctatctggacacagctgccatcatgaattggagactgcacggattaatgggctgcttgg

SEQ ID NO: 38323 - DNA, 272 bp, Zea mays
tcccttttttttttttttttttttttttttttttttttggaaagttttgtggtgctttatttagacactcatgagtcatgaccatagtattaaaccatgtttcgcttcgaaatttccagccttcaaagtttgattgcgattatgcctacgttttggggcatgtgtgctaccacatcatagctgccggattgaacggttacatggctacggtgacaaatcttaagaatccagtgaacaagtggcgatgtggcgcgactcctatttcgtctatg

SEQ ID NO: 38324 - DNA, 246 bp, Zea mays
ggccccgacgcggcgtgcgggggcgtcggcgtgctcggcatcgcctgggccttcggcggcatgatcttcatcctcgtctactgcaccgcgggggtgtcgggagggcacatcaacccggccgtcaccttcggcctcttcctggcgcgcaaggtctcgctggtgcgcgcgctgctatacatcgtcgcgcagtgcctcggcgccatctgcggcgtcgggctcgtcaagggcttccagagcgccttctac

SEQ ID NO: 38325 - DNA, 172 bp, Zea mays
ggacgcgtggttttcactggttcaaaagacaacctgaagaagtggattggccacccaagatttgagctcatccgtcatgatgtcaccgagccgcttcttgtggaagttgaccaaatctatcaccttgcgtgccctgctgcaccaatcttctagaaggacacccctgttaaga

SEQ ID NO: 38326 - DNA, 230 bp, Zea mays
  unsure (1)..(230): unsure at all n locations
aagcatacaatcagagtccgcggacgctgggagtggnaagcagatgatttgctgctgcaacaagatggatgcaaccaatcccaagtactccaaggcacgttatgaagagattgtgaaggaagtcttatcctacctcaagaaagttgggtacaaccctgataagattgcctttgttcccatttctggttttgagggcgacaacatgattgagcagtccaccaaccttgact

SEQ ID NO: 38327 - DNA, 274 bp, Zea mays
ggcaagggttgtgctgctgccctcaagcaggctggtgcccgtgtcattgtgaccgagatcgaccccatctgtgccctccaggctctgatggagggtcttcaggtccttcccttggaggacgttgtctctgaagctgacatcttcgtgaccaccactggcaacaaggatatcatcatggttgaccacatgaggaagatgaagaacaatgccattgtctgcaacattggccactttgacaatgaaattgatatgctcggccttgagacctaccctg

SEQ ID NO: 38328 - DNA, 209 bp, Zea mays
ggacgagcccaagcccaagcccttcgccgcccccagcagcgcgctcgccagaggtggactaaacactggtgcagctggtgtcgatggccctgctgcaaattcagttaaaaggaagaggaagaaccagttcaggggtatccgccggcgcccgtggggcaaatgggctgctgagatcagagatcctcgcaagggcgtgcgcgtctggctcg

SEQ ID NO: 38329 - DNA, 239 bp, Zea mays
agccgcgccgaggcgcagaggcagcggcgcaggcgaggccagcgctacgccttcagctgcgcgctcttcgcgtccctgaacgccatcctcctcggttacgatgttggcgtaatgagtggcgcgatcatctacatgcagaaagacctccacataaccgagtttcagcaagaaatcctagtaggctgtctgagcgtggtctcactcttgggaagcctatcaggggggcgaacatctgacgc

SEQ ID NO: 38330 - DNA, 265 bp, Zea mays
agctcacctgagcctttcccaagttgtttctcttctcttgctccgcaaaccagcgcaagcccttccctgacagcggcggcgacatggtgctcgaggcgacgatgatctgcatagacaactcggagtggatgcggaacggcgactacgccccgtcgcggttccaggcgcaggccgatgccgtcaacctcatatgcggtgccaagacccagtcgaacccggagaacacagtaggcgtgatgacgatggccgggaagggcgtcgcgtg

SEQ ID NO: 38331 - DNA, 201 bp, Zea mays
gtttgatccagagtttgtaggagatgccatgtcaactatcgcagctaattgtgatgtcccagttagtgttaaatgcagaattggtgttgacgatcgtgattcttatgaagaactatgtgaatttgtagataaagttatctcaaaatctccaaccaggcatttcattattcatgctcggaaggcattgcttagtggtctcag

SEQ ID NO: 38332 - DNA, 203 bp, Zea mays
agcgcttcctcgaccacatggtttcggacgaagttccgctcgtggtgtcgcgtcaattgctccagacgttcgcgcaggacctagggaagctggagtcggacgcgcagaaggaggttgcccactacgcgctcacgcagatccagccgcgtgtggtctccttcgaggagcaggtggtagtgattagagagaagcttgcagagcta

SEQ ID NO: 38333 - DNA, 202 bp, Zea mays
gcttttgctgcccagaaggttgttgaggttgatgctcttgctaaggcattggctggtcaaaaggatgaggcttacttcgcagcaaatgctgcagctcaggcctcgaggaaatcctcaccccgtgtgaccaatgaagaagtccagaaggctgctgctgctctcaagggctctgaccaccgccgtgcgaccaacgttagtgcta

SEQ ID NO: 38334 - DNA, 199 bp, Zea mays
gcgcgtcgaccacctcgacgtcgccgacctgccgatgctcaacaccgacctcgagacgaacggtggtacgggcttcccgcccgccgtcgaggcgttccgcgccaaggtccgccatgccgactgcttcctcttcgcctcgcccgaatacaactactccatcaccagcccactgaagaacgcgcttgactgggcttctaga

SEQ ID NO: 38335 - DNA, 201 bp, Zea mays
gcccctgcaagttgtggaggtttctacctcaaagactggtaagcatggtcatgccaaatgccactttgttgccatagatatattcaacgggaaaaagctcgaagatattgttccttcgtcacacaactgtgatattccgcatgtgaaccgtactgagtatcagctgattgatatatcagaggatggatttgtgagccttct

SEQ ID NO: 38336 - DNA, 198 bp, Zea mays
gcacttcccacatgtgcccgataagaatccactggcatgtgaagctcaactacaaggattactggagagtgaaaatcactatcacaaacttcaacttccgcatgaattacacgcagtggaacttagtagcccagcatccaaactttgataatatcactcagttgttcagcttcaactacaaaccacttactccatatg

SEQ ID NO: 38337 - DNA, 184 bp, Zea mays
ggacctggtcttgcgatgaggccaatgccctcttgaagaaaaacttggaaaatgctaaggccaccttagaagtccttgttgctgatcttcagttcttgcgagaccagcaaaccatcactcaggttacaattgctcgggtattcaactgggatgtacaccaccggagaagcaaacaggctgtaaa

SEQ ID NO: 38338 - DNA, 196 bp, Zea mays
cttggatcttagctggaaccagttgaaaggatctataccgactaataggctttcttcaaatattactacaattgatttatcacacaactttcttcaaggaactgttccatcaaacttctcagggctacctaatattcagtacttgtcagtcaatggcaacctcctaaacggttctgttccaccgacaatttggagt

SEQ ID NO: 38339 - DNA, 200 bp, Zea mays
aatcatgaaaggttatctgaatgatccagaggcgacaaagaacaccattgataaggacggatggctgcacaccggggacattggttatgtggacgatgacgacgagatcttcatcgttgacaggctgaaggagataatcaaatacaagggcttccaagtacctcctgcggagcttgaagcccttctcatcacacatcctg

SEQ ID NO: 38340 - DNA, 190 bp, Zea mays
ccccgctctccaagatgtcgtccccgagcaagcgccgcgagatggaccttatgaagctgatgatgagcgactacaaggtcgagatggtgaacgatgggatgcaggaattcttcgtcgaattcaaggggccggccgaaagtatctaccaaggcggtgtctggaaggttagggtagaactgcctgatgcata

SEQ ID NO: 38341 - DNA, 190 bp, Zea mays
atttgattatggtggctatccgcctcaggccaactaccttttcttgggtgattatgtggatcgtggaaagcaaagcctagaaacaatatgtcttcttttggcttacaaggtcaagtacccggagaacttctttcttctaaggggcaaccatgaatgcgcatcagtaaatcgcatctatggtttttatgac

SEQ ID NO: 38342 - DNA, 192 bp, Zea mays
atgatcgccctcgtgcagatattggtcttatagtggaacaattcattgctgagttcgaggtagcagctgaagaagatgcaaatttgaatcggcaatcaaagccagccattaacaaacttatgaagcttcctctgctcatagaggttctctccaagaagaatcttcaacaggaatttcttgaccatggagttc

SEQ ID NO: 38343 - DNA, 190 bp, Zea mays
gaatcgtctcgctcgtggctgccctgctcatactgcttgccctcgccgtatcgtccacccgcaacgcacaggaggattccatggccgacaacaccgggacgttggcgggcggcatcaaggacgtgccggggaacgagaacgaccttcacctccaggagctcgcccgcttcgccgtcgatgagcacaacaa

SEQ ID NO: 38344 - DNA, 192 bp, Zea mays
aaaaagaggtatcttgaccttgaagtaccccattgagcacggtatcgtgaacaactgggatgatatggagaaaatctggcaccacaccttctacaatgaactgcgtgttgctcctgaagagcacccagttctgctgacagaagcacctctgaacccaaaggcaaacagagagaagatgacccaaattatgtt

SEQ ID NO: 38345 - DNA, 277 bp, Zea mays
attctagggttttgctgctctccgaccccgagctccgaacgccgcagcatcaggcgcgccccccctcgcgtgtgaccgagatggcgctgccgaatcaggggaccgttgattaccccagcttcaagctcgtcatcgtcggcgatggtggaactggtaaaactacatttgtgaagaggcatctcactggagagtttgagaagaaatatgaaccaaccattggtgtggaagttcatccgttggatttcaccactaactgtggtaagatcaggttctactg

SEQ ID NO: 38346 - DNA, 277 bp, Zea mays
caacaacgacgaccacagctcccccggacaagtcagttttccagaggatcagaaaatctcccaggttgcatgcggatggaggcatactctggccctctccgagaagaaaaatgtcttctcctgggggaggggcactagcggacagctcggcaacggtgaaatagtcgacaggaacacgcctgtgctgatcgatgccctgagctcagacggttctgcctgcacgaagctggagtcatccacggcagccccattcgcagccaaagtttgggtgtcgccg

SEQ ID NO: 38347 - DNA, 275 bp, Zea mays
ctcgtcttgtgttgttcggagcgggcagcagcacacagccccatcccaatcctagtcgatcttcttcccctcctcaaggaagaaaagaagctgaaccatggggaagagaaagtcagctgctaagccacctcctaagaagcggatggacaagcttgacactgtcttttcctgcccattctgcaaccacgggagtagtgttgagtgccgaattgacatgaagaatctgattggcgaacatcttgtagaatctgtcaggaaaacttcagcacaactgt

SEQ ID NO: 38348 - DNA, 270 bp, Zea mays
gaattctgttcttgagcaattcattgacatttatgatggtttatgtctggagcaagcacaacccttttatccatatgagctttctgggcctgtttacctttacggctgcgtacttaccatgggttcttttgggcttctctatcctcgttggaagcagcacatgggtggacctcttgggtatgattgctggacatgtgtactacttcctggaagatgtatacccacgaatgactgggcgtcgcccctaaggacacgtccttcattaaggcg

SEQ ID NO: 38349 - DNA, 273 bp, Zea mays
cccacgcgtccgacgagggcattgacttctactccaccatcacccgtgccaggtttgaggagctcaacatggacctgttcaggaagtgcatggagcctgttgagaagtgcctgagggatgccaagatggacaagagcagcgtccatgatgttgtccttgttggtggctccactaggatccccagggtgcagcagctgctccaggacttcttcaacggcaaggagctgtgcaagaacatcaatcctgatgaggccgttgcctatggtgctgccg

SEQ ID NO: 38350 - DNA, 269 bp, Zea mays
ggcactgctggggtgtggaggatcaaggcattggaggactcaggtggatggttggaacggacaaccgtggaggatatggacattgctgttagggcacatctccatggctggaagtttatattcctgaatgacgttgagtgccagtgcgaattgcccgagtcttatgaggcttacaggaagcagcagcatcggtggcattcgggtccaatgcagctattcaggctttgtttaccggacatcatcaaatgcaagattgcattttggaagaa

SEQ ID NO: 38351 - DNA, 273 bp, Zea mays
agacgctgcagttcgagcacaagctgttctactttgatctgaaggagaacccgcgggggaggtacctcaagatctccgagaagacatcggccacgcgctccaccatcatcgtccccatcgacggcgtcgcctggttcctcgacctcttcgactactacatccgcaccgacgagcgcgacgtcttcagcaaggagctgcgactccagaccaaggtgttctatttcgatatcggggagaacaagaggggccgattcctcaaggtttctgaggcct

SEQ ID NO: 38352 - DNA, 272 bp, Zea mays
actggatttggcaatttctcttattattatgtgaggaaggatttcagtcttggaagatttgctcagatgatgtggcgcctcaatttctttgttatattctgctgcattgtcctgaacaatgattatacactctattatatttgtcctatgcacacccttttcaccctcatggtttatggtgctcttggaattctaaacaaatacaacgagattagatcagtgatggcaatgaacatttgttgcttgcttcttggcagttgtcctggtttggg

SEQ ID NO: 38353 - DNA, 273 bp, Zea mays
cagccaactaaagagaaggagagcgtgtgttcgtttcgaggacgcacacacagacgccatggaggtgacaccaaaccacaccctgaccgtgaccgggtgggcggcaatgaacgagtccgccggcaaggtggagcccttcgtcttcaagagaagggagaacggccctgacgacgtgacgatcaaggtgcagtactgcggcatgtgccacacggacctgcacttcatcaacaacgactggggcatcaccacgtacccgctggtcccggggcacga

SEQ ID NO: 38354 - DNA, 275 bp, Zea mays
ctactccgccgccgcccgccgctccgcctcagcgcatagcccgccgcgacctcatcgatcaccttcaactttcaatcatggcggacgtcgatgtcgaaccggaggttgccgccggagctcccaagaagaggacgttccgcaagtacagctaccgcggcgtcgacctagatgcgcttctcgacatgtccacggacgacctcgtccagctcttccccgcgcgcgccaggagaaggttccagaggggtctgaagaggaagcccatggcgctcatcaag

SEQ ID NO: 38355 - DNA, 273 bp, Zea mays
cagccgccgccgccgccgcctaaggagaagagggtccggccgtctccttgccccgatggcgtccgagaagaagcagtccaacccgatgcgggagatcaaggtgcagaagctggtcctcaacatatccgtcaaggagagcggcgaccgcctcacccgcgccgccaaggtgctggagcagctcagcggccagacccccgtcttctccaaggcgaggtacacggtgcgctcgttcggcatccggcgtaacgagaagatcgcctgctacgtcacggt

SEQ ID NO: 38356 - DNA, 272 bp, Zea mays
ggactagtctctcgccagcaccatcatcatcaatcacggcggcgaccccgacccgcctcgatcgcccacgctgcccgactggaaccggacgctgctgctgctgctgctaggctgacagcgacgacgagggggccatggctcagatcttgctccacggcacgctccacgccaccatcttcgaggccgagtcgctctccaacccgcaccgcgccaccggcggcgcccccaagttcatccgcaagcttgtggaagggattgaggataccgtgggt

SEQ ID NO: 38357 - DNA, 270 bp, Zea mays
cgacaggatatgggtgtccgaggtttcagaatcagtttccagcagtggcaacggtctggaagatctgagctccgccgccgtctctcggccggccacactgggcctgctcctgcacggcgtgtttgagaacaccagcgcggaggtggtcagagagaaggacggcgggcaggctgttctgggaaccccgacagagagggcgatcttggagtttggactgaagctagaagcacgacgtcgtgatgctggagacaggagctgcaccaaggtcaa

SEQ ID NO: 38358 - DNA, 268 bp, Zea mays
gactatgcaaattttgaactctgatgatcatgcgaattatttgaggaagcagaatcgcaatcctgcagattataggcctgatatcattcatcaggctctactagcaatatttgatagccctctaactaaggctggaaggttacaggctgtttatgtgagaactgaaaagggcgtattgtttgaaatcaaacctcatgtccgcatgccaagaacctttaaacgtttctgtggtttaatgtcacaattgttgcaaaaactgagcattacg

SEQ ID NO: 38359 - DNA, 270 bp, Zea mays
ccgccctcgtatcctcacgcccacaaaacacccgaagaaaagaagagactgaacgccgcgagttcacgtgacgatggagaacgccgcctccgccatcgctaagccgtcgctgtccaagaagccctcgccgtcgttccgcctccggaacggcagcctcaacgcactgcgcctgcgccgcgtgttcgacctcttcgaccgcaacggcgacggcgagatcaccctcgacgagatggcctcggcgctcgacgcgctcggcctcggcgccgaccg

SEQ ID NO: 38360 - DNA, 284 bp, Zea mays
tcgcagtacgtcggaattccggtcaccaccacgacacgagcgggacctgggaggtgcagggctgggagaggatttacccttgaggagctgaaggatgccgagcattccaaagaagcttgccccaaccattggcatttctgtggatcaccgccgcaagaacaaatctctcgagggactgcaggccaatgtccagaggcttaagacgtacaaggccaagctggttatcttcccaaggcgtgctcgcaaggccaatgccggcgactctactccggaggagcttgcca

SEQ ID NO: 38361 - DNA, 267 bp, Zea mays
ctcacgtcagacgaaagctcctatagaggagtgccgcaagaaaatctggcttgttgattcaaagggcttgattgtcagtacacgaaaggagtcccttcaacacttcaagaaaccatgggctcatgagcataaaccactcagcaacctcttagatgctgttaatgctatcaaaccaacagtgttgattggcacatccgggaaggggcaaactttcacaaaagacgttgttgaagcaatctcctcatttaacgagagaccaatcattct

SEQ ID NO: 38362 - DNA, 263 bp, Zea mays
cccacgcgtccgaactgcagtgattactgatgcaattaaggatggtgttggacggcctcgtccagattttttctggcgctgtttccctaatggaaatgatgtttatgataacattactactggtgttatatgcaatggagtgaagagcgtaatcaaggaaggccacaagagctttcccagtggacacagttcatggtcttttgctggtctaggcttccttgcatggtacttagctgggaaactcacagcctttgaccgcaaag

SEQ ID NO: 38363 - DNA, 266 bp, Zea mays
gtggctcccaatgacaatggtgtagaccccttgctggttgaggtcgatgggcgcgaggcacttgaggccggtgtggtaatccccgaggagacagtgtatccttaggaggccaatcatgctgtagtagcccagcaccttgagcacgttgctgccaccctcgtagtcgtagccatcggtggcagtgaactgctccaggccctccttctccttctcgaggatctgcgtgatcatggacttctcaaccaacgcttgcaggtagttgagga

SEQ ID NO: 38364 - DNA, 256 bp, Zea mays
cccacgcgtccgcccacgcgtccgcccacgcgtccgatcagcagctagcgcgctcctcgagccgagcagagacaggccggcagcgctaatcgtaatagccatgggcgccagcgccggcgacgtggccgcggtggtggacgaggaggcgtgcatgtacgcgatgcagctggcgtcgtcgtccatcctgcccatgacgctgaagaacgccatcgagctgggcctgctggaggtgctgcagaaggaggccggcggcggc

SEQ ID NO: 38365 - DNA, 263 bp, Zea mays
agcaggcacacccatttcttgtgtcagtcttcctctccctctctccgatcctctctactagcagagaggcaagttcaatcttctagctagcagcatcggagaaggcagagctcgactgacacaatggcgggaggccagctcaacgtgctgaccacactcgaccaggccaagacacaatggtaccatttcatggcgatcgtcatcgccggcatggggttcttcaccgacgcatacgatttgttctgtatcgcactcgtgaccaa

SEQ ID NO: 38366 - DNA, 264 bp, Zea mays
ggagcggtcaagaggggttacctcaagacggacgaggagttcctcaagagggacgagagcgggggcgcgtgctgcgtcacagccgtcctccaaaagggtggactggtcgtctccaacgctggagactgccgtgcggtgctcagccgagcagggaaggcagaggcgctcacctctgaccaccgggcgtccagggaggatgagaaggaaaggattgagaatttgggtggatttgtggtgaattaccgtggaacatggcgagtccag

SEQ ID NO: 38367 - DNA, 266 bp, Zea mays
cacaggtgccagggccattgtcaaagccttcccacacataaaatgcactgtgctggcccctcccaagatcattgccaccaaaccggccgatggagcgaagataaactatgtcgaaggtgacatgttcagtttcattccacctgctcaaactgtcgtgctaaagcttgtgctgcaccacctgaccgatgaggagtgcgtcaagctcctggctcaatgccggacagcgattcctccacggaatgacggcgggaaagttataatcggtg

SEQ ID NO: 38368 - DNA, 264 bp, Zea mays
gcggcggacacggaggcgaaggaggaggagcagcagcagcaggcggcgccgaggagcggcatcccactcagtgcttgcaaccatggctaggggattgaagaagcacttgaagaggctcaatgcgcccaagcattggatgctcgacaagcttggcggagcttttgctcccaagccatcttctggacctcacaagtccagggagtgccttcctctgatcctcatcatcaggaacaggctcaagtatgctctgaactaccgtgaggt

SEQ ID NO: 38369 - DNA, 259 bp, Zea mays
cccgtcctgtccttccacccggcggcttaaaccctagttctcactcccatcgccgcttcagctccgccgctgcagatggagttctggggtctcgaggtcaagcctggttccactgttaagtgtgagcctggatatggctttgtgctgcacctttcccaggctgctcttggggaatcgaagaagagtgataatgccttgatgtatgtcaaaattgatgatcagaaacttgccattggaaccctctctgttgacaagaacc

SEQ ID NO: 38370 - DNA, 262 bp, Zea mays
gtgctctgtctgtgtgtttccaaagcaaacgaaagaggtcgaggatgtcttgcagctgcggatcaagctgcaactgcggatcaagctgcaactgcggcaagatgtaacctgacctggaggagaagagcggcgggggcgctcaggccagcgccgccgccgtcgtcctcggcgttgcccctgagacgaagaaggcggcgcagttcgaggcggcgggcgagtctggcgaggccgcccacggctgcagctgcggtgacagctgcaa

SEQ ID NO: 38371 - DNA, 263 bp, Zea mays
cccacgcgtccgggcaaagactatagccgcctcgtcgtcatcgtcgatgtggtcgaccagaacagggcacttgtggacgcccctgatatggtcaggtgccagattaacttcaaacggctctcacttactgacatcaagattgacatcaaacgcgttcccaagaagtcaaccctgatcaaggctatggaggaagctgatgtgaagacgaagtgggaaaacagctcatggggcaagaagctgattgtccagaagaggagggctgc

SEQ ID NO: 38372 - DNA, 294 bp, Zea mays
gttgatgcactttgtgatgtcgtttcagcctcaccaaccaaggcatcagctgctatcgttctccaggccgagaaggacttgcagccttggattgctagagatgacgaacaaggtcagaagatgtggagagtcaaccagcgtatagtgaagcttatagctgagcttatgaggaaccatgacagccctgaagcgttggtgatactcgctagtgcctccgaccttctacttcgtgctaccgatggaatgctcgtcgatggtgaagcttgtactttgccacagcttgagcttctggaa

SEQ ID NO: 38373 - DNA, 292 bp, Zea mays
atttcctgcattttgatggcctgtgcacatctggcagctcttcgtatgggtaagcagattcacgcttatgtcacccgtcaccatgaatatgaaccatctgtgtactttgtggcaaattgccttattgatatgtactcgaagtgtggtgatgttgatactgctagaaatgtatttgatagcatgcctaaaaggaatgaagtatcttggacttcaatgatgtcagggtatggaatgcatggtcgtggtaaggaggctttagacatatttgacacgatgcagaaggcaggctttg

SEQ ID NO: 38374 - DNA, 291 bp, Zea mays
cacacgcgtccgcggacggtgggcaacttcacagcgtatcatcgttttccatcgctcctactcctatcatccagaaaatctgagcggtattgatggcgcccaaggcggagaagaagccggcggcgaagaaggtggcggaggaggagccctcggagaaggcggctccggcggagaaggcccccgcggggaagaagcccaaggcggagaagcggctacctgcgggcaagtccgccggcaaggagggcggcgacaagaagggtaggaagaaggcgaagaagagcgtggagacct

SEQ ID NO: 38375 - DNA, 291 bp, Zea mays
gcgtccggcaccatgccggaccccggctggatcgccgccagcggctccaccgcgctggagatccccgccaaggtgccctacgacttcctcgtcatccctcgtcagggacgtcggccgggactgggacatcgactacgagctccaggtcgggctcaccgtcgacctccccatcgtcggcaacttcaccatcccgctctccacctctggcgagttcaagctccccaccctcaaggacttgttctgatctagtagtagctcgcttgccttgtgttctgtgcgggcgcgcaccag

SEQ ID NO: 38376 - DNA, 289 bp, Zea mays
gacaataccgtgcctgtgttcagaacttgctcaacttcaaggcacatatatcttgcaaggggattatgatttaaaggtcatgcgccaggagtactacattaacaggcaaaaaacgttcatcaatcacttggttaatcagcttgccagacaccagtttctgaagattgcttgccaacttgaaaggaagaatatagctagtgcgtactcattgcttagagtaatagaatctgagttacaaagctacctttcagcagtcaatacccgcttgggtcattataattcattgatt

SEQ ID NO: 38377 - DNA, 287 bp, Zea mays
gccgcaaacgcgaaaccctagcctcgagctctatctccggccacagctggtcaggtaggaccgtaggaatctcctttcctcatcgttcctcgggtggttcgtgccccgcgccccgctgctttctggcgacgaaggatgagcaggcgctggagccgcacgatctacgtcgggaacctccccggcgacatccgggagagggaggtggaggatctgttctacaagtatggtaaaattgttgacattgacctgaaggtccccccaagaccacctggttatgcttttgttga

SEQ ID NO: 38378 - DNA, 285 bp, Zea mays
cgcgtgcgaaccaagcagaccacagcaagaagcgtagtcgtcgccggaaggaaaggcgcggacaagatgtcgtggcaggcgtacgtcgatgagcacctgatgtgcgagatcgaaggacaacatctcagcgccgccgccatcgtcggtcacgacggcagcgcttgggcgcagtccgagagcttccccgagttaaagcctgaggaggttgctggtatcataaaggactttgatgaacctggtactcttgcaccaactggtcttttcgttggaggtacaaagtacatg

SEQ ID NO: 38379 - DNA, 287 bp, Zea mays
  unsure (1)..(287): unsure at all n locations
agagggtggttatgagctctttagggaccaaggtgtggaaggacaaagatgagcaagccagtacgattacaagtatcacagttgcacatagactgtccacagtcataaatgctgatacgatagttgtgatggagaaaggaaaggttgttgaacttggtaatcaccaagagttgatctctgctgaagatggcgtttactcaagattgttccacttgcaaagcaacatgaaagaatgaccatctattcaagttccattatggccanagaccanagacacttagcaagaa

SEQ ID NO: 38380 - DNA, 290 bp, Zea mays
cgacctttccccctcccccgcattccacctcgcggagatccagtccagccctagggtttcgccagcggcgagccaaactccacgagcgggggaagaggggaaagcagggacgacgagggggcagccatggggcagcagtcgctgatctacgcgttcgtggcccgtggcacggtcatactggccgagtacacggagttcaccggcaacttcaccaccatcgcctcccagtgcctcatgaagctccccgcaagcaacaacaagttcacctacaactgcgacggtcacacttt

SEQ ID NO: 38381 - DNA, 288 bp, Zea mays
gaacagcgtccgcggacggtggggctgatcggcgggaccgacttctccgaggaggatgcggaggcgacgatgaagctgctgctggacgagaacgacgaggcgcgcatctccgccttcctcgtcctcctcagggccaagggcgagaccttcgaagagatcgtggggcttgcgaaggcgatgttgagctgctgcatccgagtcgatggtctggatgacgccgtcgacattgtcgggacaggcggcgacggcgcagacaccgtcaacatctccagcgggtccacatcctcg

SEQ ID NO: 38382 - DNA, 287 bp, Zea mays
gaaggagatgacaatcagaatgttgtagttttacgtgatattctgttaacatattccttctacaatttcgaccttggttattgccaaggaatgagtgactttttggctcccatactttatgtcatggaggatgagtctgaatcattttggtgctttgcttccctgatggaacgtctaggtgccaattttaatcgtgaccagaatggcatgcatgctcagctacttgcattatccaagcttgtggagcttcttgatccttcattgcacaactattttaggcaaaatga

SEQ ID NO: 38383 - DNA, 281 bp, Zea mays
gcactctgcggttcaggcttaccttcttggcgcagaagtaggattcgatgctttctatttcttccggattgattaccaagaccgtgatacacggaaaggaacaaaagaactcgaggttgtatggaggggctccaagaccttgggctcatcggctgatatctttgctggcatctttccaaaaaactatgaaccacctcctggtgatttttattttgaagttgatgataattcccctgttgtccaggatgatccccttcttttcgattataatgttgaagaac

SEQ ID NO: 38384 - DNA, 267 bp, Zea mays
gagttctcgccggccaacaccgggtacctgatgaagcggatcctgtgcaaccgcttcacctcctcggcggccggcgacgagaagccggcggcggcggacgccgcgaggaggagccgctgccgccgtggctgacggaggaggacgtgggccacttcgagtcagagttcgagcggacgggcttcacggggcccatcaactactaccgcaacatggaccgcaactgggagctagcagcggcgtgggcggacgacaaggtgcgggtgccac

SEQ ID NO: 38385 - DNA, 279 bp, Zea mays
cttcaggtctgcagcccccaactacccccagcctcggaaggaaccttccagaagcgcaagactctaaaggccgtcgccttcccattcttcctcgccgcgggggtcgcctgagatcacataaacaatggtgaaggctgttgctgtgcttggtagcagcgatggtgtcaagggcaccatctttttcacccaagagggagatggccctaccgctgtcaccggaagtgtctctggcctcaagcctggcctccatgggttccatgtacatgcacttggtgacac

SEQ ID NO: 38386 - DNA, 279 bp, Zea mays
  unsure (1)..(279): unsure at all n locations
cggacggtggngcagacgcgtgggctttgggagtgtcacggcacaggatgttgttgacataataaagtcacaacttaataggngagtcgacaagaagctggtgacggttccagaaatccgtgaaatcggagagtatgttgcagagatcaagcttcacccagacgtgacagcgcgagtaaggctgaatgtctatgcgaaatgagctcagcagttacagaacctcgagtaatggactttggcgaagctgatgtttgccagtgcagagattttgctgaaagt

SEQ ID NO: 38387 - DNA, 279 bp, Zea mays
tttatttttttttttttttttttacaagtcaacgtgaacaatacagtgctactgttcatctatttataggcacaagacgcagcctgtgtaaattacattcatgcccttgacatttactattgacctagggataatctatcaaggactagacaaccttttcccctttaggtcggttccattttttgctgttaagccgaagcttctccacaggtagcttcggaactggttcatccttctcccgatccctgctttttatatcatgtatagcttcatcccaag

SEQ ID NO: 38388 - DNA, 283 bp, Zea mays
cggacggtgggctgacgcgtgggcggacgcgtggggcctgggcatacaaccccagcgccatggacatgagctacgcgctcttcacctcctccggcaccgtcgtgcaggacggcgcctacgggtaccagaacctcttcgacaccaccgtcgacgccttctacgtcgccatgggcaagaacggcggctccggcgtgccgctcgtggtgtcggagagcgggtggccgtccggcggcggcgtccaggccacgccggccaacgcgagggtgtacaaccagtacctcat

SEQ ID NO: 38389 - DNA, 275 bp, Zea mays
  unsure (1)..(275): unsure at all n locations
cngacgctgggcgtacgcgtgggcgcgaccggcagagccagagccacagccacagccaccccgccggcgagtagggccaggggaaaaggacgctcaagtgccccgacctcaacctggacctctgcatcagcccgccgtgccnnnnnnnnnnnnnnnnnnnnnnnnnnnctgcgatgagagtgagaccggcggtgaagcgggaggccgggctctgcttcggctgcagcctgggactccccaggaccgcggactgcaagtgcagcagcagcagcttc

SEQ ID NO: 38390 - DNA, 272 bp, Zea mays
gttgttattgttggtctggtaccatactttgctatggacccagacacccctatttcatctgcttttgccaaacatgggatgcactgggcaatgtatcttgtaacaactggtgctgttcttgctctctgctcaaccttgatgggatctatattgccacagccaagaatattgatggccatggcacgagatggcctgctaccatcattcttctctgatgtccataagacgacacaagttccagtcaaaagcacagtagtgactggcatctgtgc

SEQ ID NO: 38391 - DNA, 281 bp, Zea mays
ccgccgtcatgtcgaagcgaggtaggggaggttcggctgggaacaagttccgcatgtcactgggtctaccggtggcggccacggtgaactgcgcggacaacacgggcgcgaagaacctctacatcatctccgtcaagggaatcaagggccgcctcaaccgcctcccgtccgcctgcgtcggcgacatggtcatggccaccgtcaagaagggaaagcccgacctcaggaagaaagtgatgcctgccgtcatcgtccgccagcgcaagccgtggcgtcgcaag

SEQ ID NO: 38392 - DNA, 257 bp, Zea mays
caataggcatatcaatgggagtttatgacatctgccatcggtatttgaaagaaagaaagcaatttggagctccactggcagcttttcagctcaatcaagaaaagcttgtccgcatgcttggcaacattcaggctatgcttctcgttggatggcgactgtgcaagctgtatgagtcaggcaaaatgacaccaggccggtctagtttaggcaaggcatggacgtccaagaaggccagggaagtggtttctcttgggcga

SEQ ID NO: 38393 - DNA, 265 bp, Zea mays
tgccatcacccttgataggaaaactgctggtccgctcattattgcttgcagcaagggaggaaccagtattgaagatcttgcggagaagtatcctgatatgattatcaaggttcctgttgatgtatttaaaggaataacagacgaggatgcagctaaagttgttgatggtctagctctaaagtcagcggataggcagtcttctatagaactgattaagaaactgtatgaacttttctgcaagtctgattgcacatggcgggagaaa

SEQ ID NO: 38394 - DNA, 189 bp, Zea mays
aaatccccaaagcctccgacccccttcctctctccctccgccgccgctgcgcacgagggaacaagcgacatgggcgtctacacctttgtgtgccgcaacaacggcggcgagtggaccgccaagcagcactccggcgatatcgaggcttccgccgctaccccatacgagctgcagcgccgcctcgtcgct

SEQ ID NO: 38395 - DNA, 202 bp, Zea mays
cccacgcgtccggcgccacatttgtcactacgtgcaatgcctgctgccatgatatcgaaactggtcaaagctggcggtgtgagatctgtccagattttgacgtgtgcaacgcttgtttccaaaaaggagcggttactcatcctcataagttagcgacccatccatcagctgctgactgtgacgctcagaacgcagaacctcg

SEQ ID NO: 38396 - DNA, 226 bp, Zea mays
aacctgagtacggtcggaatccgggtcacccgcgaccagagcggcggacgctggcggaccgtgggaaggaagttaagcaagagggagagcattctggtgtagcgtcagaagatagcaagttcttggaaagtatctttgctctaatgcagaaggaggaaacattctctgggcaggttaaattaatggaatggattctgcaaataaataatgttacagttcgtagtag

SEQ ID NO: 38397 - DNA, 277 bp, Zea mays
gtcatatctagctatagtagctcccttgagaagcatttgagggaggagccatgtctgaggagaagcaccaccaccacctgtttcaccaccgcaagccagaggaggagggcgcctccggcgaggtcgactacgagaagaaggagaagcaccacaagcacatggagaagctcggcgagctcggcgccatcgccgccggcgcgtacgccctgcacgagaagcacaaggccaagaaggacccagagaacgagcacgggcaccgggtcaaggaggaggtggc

SEQ ID NO: 38398 - DNA, 107 bp, Zea mays
cccacgcgtccggttacgtgctgccttcgcttccctggtcagctgaattctgacctccggaagcttgcagtgaacctgattaccccttcccacgatctggcaacttc

SEQ ID NO: 38399 - DNA, 165 bp, Zea mays
gcgcaagactccaaagccgtcgccttcctatccatcccttcctcgccacgggggtcgcctgagatcacataaacaatggtgaaggctgttgctgtgcttggtagcagcgatggtgtcaagggcaccatctttttcacccaagtgggagatggcctaccactgtca

SEQ ID NO: 38400 - DNA, 187 bp, Zea mays
gattgctgagaacaaggaggactacaacaagttttacgaggctttctccaagaacctcaagcttggcatccatgaggactcgcagaacaggaccaagatcgccgagcttctgagataccactccaccaagagtggtgatgagctgaccagcctcaaggactacgtgaccaggatgaaggagggacag

SEQ ID NO: 38401 - DNA, 221 bp, Zea mays
ctccattctcagccgccgccaatcccttcccgtgctccgcaaccgctgagtgagaagaagagatggccggcaagggcgatggcccggctatcggcatcgatctcggcacgacgtactcttgcgtcggcgtgtggcagcacgaccgcgtcgagatcattgccaacgaccagggtaaccgcaccacgccctcgtacgtcgccttcaccgactccgagcgcctc

SEQ ID NO: 38402 - DNA, 221 bp, Zea mays
ctcgagaactccatttcgatcccatttgaaatcaacccatcctcgtttcctccgtctagcagcctctcaccctcatggccaagatcaagatcgggatcaatgggtttggcaggatcggaaggctggtggccagggtggccctgcagagcgacgacgtcgagctcgtcgccgtgaacgaccccttcatcagcaccgattacatgacctacatgttcaagtat

SEQ ID NO: 38403 - DNA, 184 bp, Zea mays
accagcaaccctacaattttccagaaggccatctcatcctccagcgcatatgatgatcagttcaagcagctcatttcgggcggaaaggacgcggagagcgcttactgggaactcgttataaaggatatccaagacgcgtgcagtctttttgagcctatctacgatgagaccgatggggctgatg

SEQ ID NO: 38404 - DNA, 147 bp, Zea mays
cctacaacgccacgctctccgttcaccagctcgttgagaacgcagacgagtgcatggtgctcgacaacgaggctctctatgacatctgcttccgcacgctcaagcttgccacaccaacctttggtgatctcaaccaccttatctctg

SEQ ID NO: 38405 - DNA, 190 bp, Zea mays
cctcatctcaagtgtgtagacgagacagagagacactgagagagcgccatggccagcctccaagtcactcctacttcggcgttcactgagtggaacgagctgaagttcgaaggcctgtacctgttccaaacgcccctgggctcaggggccaaccagctcgggtcataaacaacaaggcgccgattggcat

SEQ ID NO: 38406 - DNA, 186 bp, Zea mays
ccacagagtggtggagagcgtgggggacggggtggaggatctggccgccggcgaccatgtgatccccatcttcaacggcgagtgcggggcgtgcgcctactgcgagtccgatcggacaaacctgtgcgggacctaccgcgtggacgcttccaagagcaccatggtctctgacggcggcaccaggtt

SEQ ID NO: 38407 - DNA, 290 bp, Zea mays
gtgcttttgatgttgttataattgatgaagctgcacaagcggtggaacctgcaactcttattcctttgatccatggctgcagacaaatttttcttgttggtgacccagttcagttgcctgcaactgtcatttcacagactgcacagaagttgggatatggaacgagcttgttcaaaagatttcaagctgctggttttccagtgcaaatgcttaaaatccaatatcgcatgcatccagagattagtacattcccttcaaaagaattttatgaaggggtactacaagatggg

SEQ ID NO: 38408 - DNA, 283 bp, Zea mays
cacacacatacgaacacgcgtccgcggacgcgtgggcgaccgtgggtttttttgaaacctcattgtttacattcttaacaaagcacaaaagaactagaactacagtgaattcattacaggacggtagcagataagttaaacacaaaaagacaacgtgtccaaaaccagcatggatccagcgtccaggggcaccgttcacatttattctcagcatagacaagcagcaaagatggtctgcgaccaaaggccattggggacgaccacgatagggaggcagaaatat

SEQ ID NO: 38409 - DNA, 260 bp, Zea mays
cttcatcgctccgccccgctccgccgccgcttcgacggcgcgccgaccggctaggactcgcctccgactcggctagtgtctcgctctgtctaatccgacggccgctcgctgctgcatcgggcgcttgcagtgcgtcgcgtgggctcggctggatgcaggcggaacctttcctaggtctcagagatggcggcgcgccggctatggccctggccgactacgactacctcatcaagctgttcctcatcggcgatacggtgttg

SEQ ID NO: 38410 - DNA, 275 bp, Zea mays
  unsure (1)..(275): unsure at all n locations
ggcagatcagatccatccaaccacgaacaggaaggaaggtaggaggcctgaggggctgaagttgaaccatgagtgccgtcgcggtttcgtcgtcgctgaacccgaacgcgccgctcttcatcccggcggcgctgctgcaggtggaggacttctcgccgcagtggtgggacctcatcaccagcaccgcctggttccgcgaccactggtcccgcgagcacgcccacctggacgagatagccgagcagctcgagttggtcgcctccttngctacgatg

SEQ ID NO: 38411 - DNA, 201 bp, Zea mays
cggacggtgggctagctcctcccaccagtgagatcgatcgagcttccacctcctgtcatcctcctcctactcttgcaagtcgcagctgagcagcaacaaggccggaaaggatgtcgtggcagacctacgtcgacgagcacctcatgtgcgagatcgagggccagcaccacctcacctcagccgccatcatcggccacgacg

SEQ ID NO: 38412 - DNA, 246 bp, Zea mays
acacagacgagcttagctacctcaaggttggtattcctatgggcaagatcttcataataaaccccaagggtgaagtcgcagtgaaccgacgggtcgatacaaagtcgtacacatccttgcatgctcttgtccacgggatgttccctccaatattgtcgtcatctgagcaggaggactacaatgcttggaattactggaagatgccatgcctgatgttgatttgtgaagtacaagtcgagtctgcac

SEQ ID NO: 38413 - DNA, 262 bp, Zea mays
cggacgcgtgggagcgagcagctgctcttcttcgcgacgctggtggccaagaagctgctggtgagcgccacgacgaagccctacatcccggacttcaagctggcgttcgagcacttctgcatccacgcgggcgggcgcgccgtgatcgacgagctggagaagaacctgcagctgagccccgcgcacgtggaggcgtcccggatgacgctccaccggttcggcaacacctccagcagctccatctggtacgagctcgcctaca

SEQ ID NO: 38414 - DNA, 283 bp, Zea mays
ccctgggtgggatcggcaagcgtggggtgtgctacctcagccgcgtcccgccgcacatgaacccgtcgcacatccgccagatgctttccaagtacggcgaggtgctcaggatttacctcgtgcccgatagtcaaggtcatcgcaagcatactagtgttaaagcgaaggcttactcggaagggtggattgaatttgcaaagaagagtgttgccaagagagtggctaatctgcttaatggtgaacaaataggcggtaagaagagatctccattttattatgacat

SEQ ID NO: 38415 - DNA, 282 bp, Zea mays
aaattctgccgtctccaccgccgccgcagccagcgtcaccggagggatctgccgtctcccttgctccacgcgatgaacaccgacatcaccgcctcgactaagccggagtacccggtggtggatcggaacccggccttcaccaaggtggtcggcaacttctctgcgctcgactacatgcgcctctccaccatctccgccgtctccgtcaccgttggctacctctccgggatcaagccggggatccggggcccgtcgatggtcacgggcggcctcatcggggtc

SEQ ID NO: 38416 - DNA, 230 bp, Zea mays
gcctccgcctgatccatccaagacagggatcgccatgtcggactcggaggagcaccacttcgaatcgaaggccgacgctggggcgtccaagacctacccgcagcaggctggcaccgtccgtaagaacggcttcatcgtcatcaagaaccgtccctgcatagttgtggaggtttctacctccaagactggtaagcatggccacgccaaatgccactttgtccgcatagaca

SEQ ID NO: 38417 - DNA, 276 bp, Zea mays
gccccctcgtgggcgctgccatcgcggccttctaccaccagtacatcctccgggctggcgccatcaaggccctcggctccttcaggagcaacgcgtgatgagcggggcttggctgtggagcaatggcgggcgacctacgggcggggggccgtgagcgaggagaatgccatcattcatcgatcgacttgggtgccggtggttggttcgggtcgccttattttgtttcagcagctgctgcgttgcgcgcgtgcgtgagatttggtttggtttcgttcc

SEQ ID NO: 38418 - DNA, 276 bp, Zea mays
cccacgcgtccgcccacgcgtccgcccacgcgtccggccactctcaccaatcaagttttcatgtctgatctcgacattcagatcccaactgccttcgatcccttcgctgaggccaatgctggggactctggtgcggcacagggtcaaaggactacgttcacgtgcgcatccagcagcgtaatggtcgcaagagcctgactaccgtccagggattgaagaaggagttcagctacagcaagatcctcaaagatctcaagaaagagttctgctgcaatg

SEQ ID NO: 38419 - DNA, 273 bp, Zea mays
cccacgcgtccggagtgccatgtcatcaacgaggacctggtgtgcgacgagcttgaggacatgatggaagaaggtggtatactagtagattaccacggatgtgatttctttccagaacgttggtttgaccttgtagttgtgctccagactgacaactcaattctgcatgatcgcctgacgggcagaggttacatgggttccaagctcgccaacaacatagagtgcgaaatcttccaagtgctcctcgaggaggcgatggagagctacagagag

SEQ ID NO: 38420 - DNA, 274 bp, Zea mays
cgtgaacgaggggcaccccgacaagctgtgcgaccaggtgtcggacgccgtgcttgacgcatgcctcgcgcaggaccccgacagcaaggtggcctgcgagacctgcaccaagaccaacatggtgatggtgttcggcgagatcacgaccaaggcgaccgtggactacgagaagatcgtgcgcgacacctgccgcgagatcgggttcacctccgacgacgtgggcctcgacaccgaccgctgcatagtgctggtgaacatcgagcagcagtccccc

SEQ ID NO: 38421 - DNA, 258 bp, Zea mays
ggaagagcgacgtgtacagcttcggcgtgctgctgctcgagctcctcacggggcgggaggccatatgcgccgacacggggtgccgcctcgccgccgcggtgggtcctacgctcagcgaaggagaagtggccgacgtggtggaccggaggctcggagacgagtacgatgcccatgaggccgcgaccgtggcggcgcttgcgctgcggtgcgtcacgagggctccgggatgcgcccctccatgacggaagtggttcgcgt

SEQ ID NO: 38422 - DNA, 291 bp, Zea mays
ctggaatggaagacttatttaaagactcaccagctgtgccattatcctcagctccagctgtttcccaagtaaacgctaagaatgatatcatgagtttgtttgagaagtccaatatggtatcacctttcgctgcccatcaacagcagctggcgctcatgtctcagcagcaagctcttctaatggctgctctcaaagctggaaatgcaccacaaatgatgattccagggactgccaatcagctaaatgctaacggaaccttgcctttccaaaactggacaaatctttatcaaa

SEQ ID NO: 38423 - DNA, 256 bp, Zea mays
ctggctatgcaatcctgtgcacaagcatcgtgagctccgtggtctcacctcttcaggcaagaagttccgtggcctgcgtggcaagggccacactcaccacaagaataggccgtcgaggagggccacctggaagcgcaaccagaccctgtccctccgccgctaccgttgagcacacacatcttgatgctctgctaccgtggaacccgccccatgcaggctatgatagtatttggtatttttgttgcattgttaaatt

SEQ ID NO: 38424 - DNA, 292 bp, Zea mays
cccacgcgtccgggacccggcacgggacggcgtaagcctgctcaagatctggaacatgaacaagttcaccggcgtgctgggcgtgtacaactgccagggcgcggcgtggaactccgtggagaagaagaacaccttccaccagaccggcaccgaggccctgacctgcggcgtcaagggcggcgacgtccacctcatctccgaggccgcgacggacgccgaatgggacggcgactgcgccgtgtaccggcatgccgacggcgacctcgtcgtcctcccgcacggcgcggcgttg

SEQ ID NO: 38425 - DNA, 285 bp, Zea mays
cttttccccaaggcaaccaaaccatctcgattctcgactcgtggggaagtttcgctctcgccggcgtcgacggcctagggttcgaggaacgtccgtccgtccgtccggggaaggagcggtagggaggcggagatgatcgaggtggtgctcaacgaccgcctggggaagaaggtgcgggtcaagtgcaacgaggacgacaccatcggcgacctcaagaagctggtggcggcgcagacggggacgcgcccagagaagatccgcatccagaagtggtacaacatctac

SEQ ID NO: 38426 - DNA, 297 bp, Zea mays
gctcacacaggcacacagctcctcttggcggcgcctctgacttcgtcgcccttctcctttttcgtcgcccttctcctttttcgtcgccttcgatcggcggctgcctccttcctccacttccgtcccttcaccgagccgccgccgccactatgaagggacccggcctcttctccgacatcggcaagaaggccaaggatctactcagtaaggactacacttacgaccagaagctgaccatctccaccgccagcgcctctggactgggcctgacttccacagctgtgaagaaaggagggc

SEQ ID NO: 38427 - DNA, 292 bp, Zea mays
ggaggtgtaccgcatctcccgcgcgcagacgctcatcgcgctctgcggcacagtcccgggctactggttcaccgtcgcgctcatcgacgacgtcggccgcttcgccatccagctgctgggcttcttcatgatgaccgtcttcatgctcggcctcgccatcccctaccaccactggaccacgccgggcaaccacatcggcttcgtcgtcatgtacgccttcaccttcttcttcgccaacttcgggcccaacagcaccaccttcatcgtgccgccgagatcttccggcgcgctg

SEQ ID NO: 38428 - DNA, 284 bp, Zea mays
cactctccccagctcgagtaaccacagcgagaaccaatcgccaagcaaaaagcccgagaaagaaagaacaaacaggagacacagatggcggctgcagcgaaggcgtcgtggatggtggcgatgagcgtcggggccgtggaggcgctcaaggaccaggcgggcctgtgccgctggaactacgcgctgcgctccgtccaccgcgccgccaaggccaacgctcccagcttcgcgcaggccaggaagctggcgccgcccgccgcggacaaggccgccgcggaggaggg

SEQ ID NO: 38429 - DNA, 280 bp, Zea mays
gagcaggcttcctatccagctgaccaacaagtccttatacatcaaggaaaggtgctcagcgatgacaccacattagaggaaaatcaagtgactgagaataatttccttgttataatgctcagacagaacaagggatcatcaagtgcagcaccggctaagacaactgcgaatcaggcacctcctactcagacagtgcctgttgttccacctcaaacgtcagcagccccagctgcaccagcacctattgtacctgtcagtgcactggctgcaactgctacag

SEQ ID NO: 38430 - DNA, 286 bp, Zea mays
ggcaaacgggcctgaaggagcttggggacacgcccatcgagttccttggcgtgccgccgatcccggcgtcgcacatcatcagggagatgctcgaggacgcggaggacgaggtgcgcacggccatggcgaagatctggaagcgcgacacggacacccggggcgtcctcatcaacaccttctactcgctggaggcccaggccctgcaggcgttcagggacccgctgtgcgtccctggcaaagtgttgcctcctgtttaccccatcgggccgttggttggcaagggcgg

SEQ ID NO: 38431 - DNA, 286 bp, Zea mays
tgcatagtggggctggaaacaagaatgccttcaaagcacttattgctgcagaatacagtgggatcaaggttgagttgaccaaggattttgagatgggtgtctccaacaagacccctgagtttcttaagatgaacccccttgggaaggttcctgttctggagactcctgatggccctgtttttgagagtaatgctatcgcacgctatgttgctcgcttgaaggatgacaaccctctttttgggacttcccgtattgaacaagcccacgttgagcaatggatggattt

SEQ ID NO: 38432 - DNA, 288 bp, Zea mays
cccacgcgtccgctcaggagtacactgattttctgcaagaatttatgactgctgtgaaacaaaactatggggagaaagttcttattcagtttgaggattttgccaaccataatgcttttgatcttcttgcaagatatggcaccactcaccttgtattcaatgatgatattcagggaacagcttctgtggttcttgctgggcttattgcagcacaaacattacttggtggttcattggcagatcacacttaccttttccttggtgctggagaggctgggacaggtatag

SEQ ID NO: 38433 - DNA, 275 bp, Zea mays
ggtagctgccgcccgctccacgctgggcccgtcagcctcatgcactggtcgggcaagggcaagccctgggaccgcctcgacgccggcaggccgtgcccgctcgaccacacctggaagtcgtacgacctctacatccccggcgactctggaggcgccgcctcgccggcgtccgggccggcattgtccgcatccgtgttctcttggtagagagatagcttctagttccattgtcttgctgtggctgttgccgccgctgctatgatctagctgccgct

SEQ ID NO: 38434 - DNA, 279 bp, Zea mays
cccacgcgtccggcgcgacgtggccgacgcgcacctccgcgtcttcgagagcccccgcgcgtccggccgccacctctgcgccgagcgcgtcctccaccgcgaggacgtcgtccgcatcctcgccaagctcttccccgagtaccccgtcccagccaggtgctccgacgaggtgaatccgcggaagcagccgtacaagttctccaaccagaagctccgggacctggggctgcagttccggccggtcagccagtcgctttacgacacggtgaagaacctcca

SEQ ID NO: 38435 - DNA, 281 bp, Zea mays
gttccgggcgaagactagctataggattgttgagcctgctcatatggccagcagggaggaaggagagctgcaggggagcgagaaggaggagagctgcggggagggaggagagctgctgacggctgagagggagatagatatttgtgctggagctagcggagcctactataaaggatgcttttggaaaatgtgtgcaacaaggagcatcccgagttattatcagtccatatttcctttcccctggacgacactggaagcaagacattcctgctttagcagca

SEQ ID NO: 38436 - DNA, 286 bp, Zea mays
cccacgcgtccgagacgcagtcggtctgccgcagactggtagtagccggcgcgccgtcaccgtatcctcagatcagaggcgagcagaaaccacaccactctactgacgcccgacgagcagtgtaacattttccttcagccatgggtaaggagaagactcacatcaacattgtggtcattggccatgtcgactctggcaagtcgaccaccactggccacctgatctacaagcttggaggtattgacaagcgagtgattgagaggttcgagaaagaggctgccgagat

SEQ ID NO: 38437 - DNA, 284 bp, Zea mays
cccacgcgtccggggcgccattaccgggcacagggaggtgggatgagagtgaaagagtcgtcgcatggatccggccgccgaccccctacgttccttcgccgtcctcgggctggcggcaaccactgccgcagccaactccggcttcgcggactccaacccgatccgtcctgtcaccgtccgcgcggcctctgcgctcttccaccgtcttcgtcgcgctcggccgcacccgcgacgcgcttcgattcgccatcctcgatacacctggtgcaggcctgggtgttgcg

SEQ ID NO: 38438 - DNA, 270 bp, Zea mays
gggtttttgattttagccgccgccgctgctcatctcacatccctcgagaagacgcctgctcctcgccgatcgatacgatggccgtcttctccgacctccacaccgccgacggcctcaagtccctcgaggctcacctcgccggcaaaacctatgtgtctggtgactccattactaaggatgacattaaggtcttcgccgcggtgccgtcgaagcctggcgctgagtttcctaatgccgcccgctggtacgagaccgtctctgcggctgtag

SEQ ID NO: 38439 - DNA, 269 bp, Zea mays
cccacgcgtccggggcgccggtggaggcatgggcggtggtgccaatggtgcatatggttctggtgctggtggaggcgttggcaagggcgagggtgtgagtggtgtggcactcgcaccatcgtccaacggctactacaatggcggtgccgccgatgctaccggtggcggttccggcgccggcggtggacatggtggtggcgcagcggagctccaagctatggaaccggaggcggcctcggcggaggcaagggtgaggccggcagcgatgg

SEQ ID NO: 38440 - DNA, 273 bp, Zea mays
ggacgctgggtggctgaggtcccggtgaccgaggtgccagcggaggtcccggcggcccagatggccgaggcgcccaaggcgaagaaggcgcccaaggagaagaaggcgcctaaggagaagaagccgtccgcggcgaagaagccggcggcgcaccctccctacgctgagatgattgtagaggcgatcgctgccctcaaggagaggaaggggtcgagctcggtggccatcagcaagtacgtcgaggggaagcacggcggcaagctccccaccaac

SEQ ID NO: 38441 - DNA, 273 bp, Zea mays
gctgctgtggccattacaactacagaccttgttagcaagagcattgctgtccagactgagattggaggagtggctattagaataggtgggatggctaaaggttctggaatgattcacccaaatatggcaacaatgcttggtgttttgaccacagatgctcaagtcagcagtgatgtctggagagaaatgatccggatgtcagtgagtagaagtttcaaccaaattacagtggatggtgatactagtaccaatgactgtgttattgctatggca

SEQ ID NO: 38442 - DNA, 275 bp, Zea mays
catctcccaagacctcctcagacccgagaagcgcactgcggccatggacgccaccggcactggagctggagggaaggcgaagaagggagcggccggtcgcaaggccggcgggccgaggaagaagtcggtgacgaggtccgtgaaggccgggctccagttccccgtcggccgcatcgggcgctacctcaagaagggccgctacgcgcacgcgtcggcagcggtgcccccgtctacctcgcggccgtcctggagtacctcgccgctgaggtcctgga

SEQ ID NO: 38443 - DNA, 266 bp, Zea mays
ggcgctgttgttcgattgcgatggtgtgctggtggacaccgagaaggatggccaccgcatctccttcaacgaaaccttcgctgagagggaattaggtgtcagctgggatgttgaactgtatggagaattgctcaggataggtggtggaaaggaaaggatgacagcttacttcaaccagacaggatggccggctaaagcaccgaagacagatgacaaaagaaaggagttcatagcttctcttcacaagaggaaaacagaattattca

SEQ ID NO: 38444 - DNA, 243 bp, Zea mays
gatttccacaggaatggatcacttcatgatctactccacctttcagatgagtacagcaagccacttagctggaacactcgtatcaagatcgcactcggctctgcccgtgcactggaatgctggacttgcaagctttattcctgatgctgaattccaggcagcagaacaaagtgccggatacactgccccagaagtggacatgaccggtcagtacaccctcaagagtgatgtctacagctttgg

SEQ ID NO: 38445 - DNA, 269 bp, Zea mays
cctgcctctgcagatagcgctctccttcatccgctcactgtcgtccctttctccgttcagtatatttgcagacgtgtgcaatgtccttgccatggcaatcgttatcaaagaggatcttcagctctttgaccaccccttttcaaacagaagcgcttttaatggactgtgggcagtaccattcaccttcggtgttgcagtcttctgtttcgaaggattcagcatgacccttgcactagaagcgtcgatggcagaccggagaaagttccgct

SEQ ID NO: 38446 - DNA, 271 bp, Zea mays
ggagcacttatgccaaactcactgatgagattggacagaaagtgcagattgataggagatgatcttctcgttaccaaccccaccagggtcgccaaggccatcaatgagaagacctgcaatgctctcctcttgaaggtgaaccaaatcgggtctgtgaccgagagtatcgaagctgtcaggatgtccaagcgcgccggatggggagtgatggcaagccacaggagtggcgagacagaggacaccttcattgctgacctctcagttggcctgt

SEQ ID NO: 38447 - DNA, 273 bp, Zea mays
gaacaatcttgcccaagtccatggacgaggcacagtcgaaatctgcgttccagatgcaagttttcaagatgccaccagacctgaaccggactaagctgttcccccctgctaatttcaagatcgtgggtgcatcatcgctgaacccggactatgcctgtggccagccggtgcctgtcagcccaaccgcgttcccagacccgagcgggcttgactcgacgacgcttgctgtggcaacatggcaggtcgtgtgcaacattaccacgacaaaggggg

SEQ ID NO: 38448 - DNA, 265 bp, Zea mays
gaaggttcgagcagcagaatataacaatgtaaggagccagcttactgcaatcaacagaaagcaaagtgggagcttagcagttcgtgatctttccaatctggtaaaaccagaggatatggtctgctcagagcatctagtaacacttcttgctattgttccaaagtactcccaaaaagactggttgtcaagctatgaatcactcgacacatttgtggtacccaggtcatctaaacagctctatgaagacaatgagtacgcactctac

SEQ ID NO: 38449 - DNA, 265 bp, Zea mays
gccaattgcggtggccaccacttccaatccactccccgcgttcgcctcgccgagctgttcttgctctgtcctctctccaactccacgatttgttccacacccggttcccgagcctccgcagcgcttcttgctgaaaaagggaactccgagttctccagctctggatcggcagagagcggtggttccttttgcggactctgaggtccagttcttgtttttgatttgtctcatcaacccaccagtcgggctgcaggcttagagctgg

SEQ ID NO: 38450 - DNA, 267 bp, Zea mays
cggacgcgtggcataaacaaaaaccagtcctttgttcttcttcccccggcacgcccagcgccagtcacacaaccttccactccctccctccgtcgccatggcgcgcaagaagatccgggagtacgactccaagcgcctcctcagggagcacctcaagcgcctcgccggcatcgacctcaccatcctctccgcccagatcacgcaatcaacggacttcgcggagcttgtgagccagcagccatggctgtcaaccatgaagctagtggt

SEQ ID NO: 38451 - DNA, 263 bp, Zea mays
atggggctgatgggtatgtctccgtagaggtgtctcctaggttggcaaatgacactcaaggaactgttgaagcggcaaagtggttacacaaagtggtcaaccgccccaatgtctacataaagatcccagctactgcagaatgtgttccttccatccaggaagttatcgctaatggcattagcgtcaacgtcacgcttattttctcaattgcaagatatgaggctgtgattgatgcttacctcgatgggctagaggcttctggc

SEQ ID NO: 38452 - DNA, 264 bp, Zea mays
gtttcatttacttgcattacacagaagcctatgaagggagaggtcatggttgggcacgtggacaggatcctcaagcatggcgtgttcctcaaatccggacccgtggagagcatcttcctggctgagaagtcgatgagtaattacaagtacataggtggggagaatgcgatgttcatgaacgaccactcgaagctggagaaggacaccgccgtgcgcttcaaggtcctagggttccgctggatggaggctgaccgccaattccag

SEQ ID NO: 38453 - DNA, 284 bp, Zea mays
atggcaagatcaacaaatgtgttactttccctgatatgttggacatggttccttttgtgactgggtctggtgacaatccccctctttatttcttgtatgccgtggttgtacatgtggatacagaaaatgcatcattctctgggcactatatatcatatgtcaaagatatgcagggtacatggttgagaattgatgattcagaggtccaggttgtatcagtgaatcaagttatgtcagaaggtgcatatatgcttttctacatgaggtctttcccccgaccacca

SEQ ID NO: 38454 - DNA, 284 bp, Zea mays
cccacgcgtccgaaacaagggaggagacatggaggaggaaggccatggcatcgtcattgtcggcggcggcatctgcggcctcgccactgctcttgcccttcaccggaaagggattgctagtgtagtgctggagaagtccgagaccttacgatcagacggagccgcgattggtgttcacgccaacggatggagagccctggagcagcttggagtagctgcagagctcagggaaactgcagaccttatcaccgggactcatgacgtgtggcaggtggcaaacaaga

SEQ ID NO: 38455 - DNA, 285 bp, Zea mays
ctcaagaactgggatgcggacttcgtcaaggtcgaccaggccacgcttttcgacctcatcttggctgcaaactatctgaacatcaagggtctgctcgacctgacctgtcagactgttgctgacatgatcaagggcaagacaccagaagagattcgcaagaccttcaacatcaagaatgacttcacccctgaggaggaagaggagatccgcacggagaaccagtgggccttcgagtaaggaggtgctggatctattgatgcctaagtttcgtggtgtctactacta

SEQ ID NO: 38456 - DNA, 109 bp, Zea mays
cagacccatgcatcaaccagcatggactgtggatcgatggatgctgttactcctgtcaggatttgttctaagttaatcctaaggaaaaaatggtgcttcttggtgctgc

SEQ ID NO: 38457 - DNA, 285 bp, Zea mays
gcacaggcggcggtggcggcggcggatcccaaggcggctctggtggcggtggaggctctgggtccggatccggcagcggtggaatccactgagcttgcacttcagtagctagagcctagagccccgcattagtgtcagtccattctgtggttttttgctgtctttgttacgagaattaatcaggaataaagcgtaatgggcttcgtgattgtagttcgagtaggtagcaaagcatgcaactgatatgaatgcatgtaatggctatctacgagtgtgtgcccctat

SEQ ID NO: 38458 - DNA, 282 bp, Zea mays
cggatccggcggccatggcgaggaaccccggctgcaccgtcttcataggtaacttggatgacaaggttcctgagagggttctatatgaaattcttattcagatctctgggcaagacaaaccctcattaaatggcaatattcctgtaactcctagtttgaactctgtaccacagccaaagcctcctcatcaacatatgaggtctagtgatatccctttgccacaacatacagcaatgagtggcaggagtgctgggtatggtatctcacaaaatcattcatatg

SEQ ID NO: 38459 - DNA, 281 bp, Zea mays
  unsure (1)..(281): unsure at all n locations
agcaaagcgaacgcngcgcacagagatctagctgaggctgagagctactagctagcagctgctgcaggtctcctgacatggcgaacaggacatcgaagcatcggggcccgaggccggcgagttctcggccaaggactacaccgaccctccgccggcgccgctaatcgacgcggatgagctcaccaagtggtccctctaccgcgcggtcatcgccgagttcatcgccacgctgctcttcctctacatcaccgtggccaccgtcatcgggtacaagcaccaga

SEQ ID NO: 38460 - DNA, 277 bp, Zea mays
gtggatgaccacagagctgggaagatcgtggtggagctgaatggaagactgaataaatgtggtgttattagcccacgttttgatgtaggtgttaaggagatcgagggatggacggcgaggcttcttccatctcgccagtttggctacatcgtcctaacaacttctgctggaattatggaccatgaggaggcccgccgtaagaatgttggtggcaaggttctaggtttcttttattgaaaatgtgtttttttgagccacagatgcgtccaagaactcg

SEQ ID NO: 38461 - DNA, 278 bp, Zea mays
ccacaccccacgcactcacggtcacgcagaagccagaacccctcgtctcccggcgcctgttccccgcgcgcaccgcggctacacataccctctccccatcccatttcccagatcccaccaacgcagcgcagggatcgagtagcccaccaccccaccccgcgacgctaaccgacgcaatggcgacgctcaccgttccttcctccgtcccggccgtcgccgaggactgcgagcagctccacaaggctttcgaaggttggggcacaacgagaagctgatca

SEQ ID NO: 38462 - DNA, 280 bp, Zea mays
gaggccaacctcggcgccttcgacttcgccttcgtcgacgccgacaagcccaactacgtcaattaccacgagcagctgctccgcctggtgcgcgtcggcggcaccatcgtgtacgacaacacgctctggtgcgggaccgtggccatgccgccggagacgcccatgtcggacatcgacaggaggttctcggccgccatcagggacctcaacgttcgcctctccgcggacgagcgcgttgaggtctgccagctcgccatcgccgacggcgtcaccatctgcc

SEQ ID NO: 38463 - DNA, 278 bp, Zea mays
cggacgcgtgggcggacgcgtgggcagcgactaccttttcaaacttctgcttattggtgattctggtgttgagaaatcatgctagcttctcagatttgcagacgattcttatttggacagctatatcagcacaattggggttgatttcaaaattcgcacagtggagcaagatgggaagaccataaaacttcaaattgtaagattactatgctgtattgttcttttattcatcatatgtgcatggtttgatgtcttgtgatgccatatgtgacatgttt

SEQ ID NO: 38464 - DNA, 275 bp, Zea mays
cctcgcccagcagcagggagcagccatgccaggggaccacggctccaagggcgacatctccttcgccggacgcttcacggccagcgccatcgcagcatgcttcgcagagatatgtaccatcccgctcgacacggccaaggtcaggctccagctgcagaagaacgtcgtcgccgccgccgcctccggggacgccgcgccagcgcttcccaagtaccgcggcctgctcggaactgccgccaccatcgctagggaggaaggggccgcagcgctctgga

SEQ ID NO: 38465 - DNA, 199 bp, Zea mays
ggcgcccgagtacctcctgacgggccgcgccaccgagtgcaccgacgtgttcagcttcggcgtgctggcgctggaggtggcgtgcggtcggcggccgatcggcaccgccggcacggccgatggcggcaacctggtggagtgggtgtggagcctgcacggagaggcccggctgctggacgcggtggacccgcggctgggt

SEQ ID NO: 38466 - DNA, 163 bp, Zea mays
cgcgccgaggatcctggccctcggcctgctagcgctcctgtgcgctgccgccggcccggccgccgcgcagaactgcggctgccagccaaacttctgctgcagcaagttcggctactgcagcacgacctacgcctactgcggcgacaggtgccagtcgggcccg

SEQ ID NO: 38467 - DNA, 273 bp, Zea mays
cggacggtgggcggacgcgtgggcggacgcgtgggccatcctttctcattctggaataatcaaggatgtgagctctttcaaaaaataaaaaaaagggacggccgctcgcggttctgcccattctacaaatccgtttggatgatgcgcaacattattcacttcaacacattggcaaatcaggctgtggagcgggcagctggtactgacggccataagataacatacagtgtcataaagcatcggttgggggatctattttatcgcctagtatcc

SEQ ID NO: 38468 - DNA, 274 bp, Zea mays
ggcatcttctggcaggaggacatcatccccttcttccagaacgtgaccatccccaaggactgcgacaccgtccaaaagtgctacatctacctctctggacaagtgaaggagaagctgggcacgattgacccctactttgtcaagctcggtgacgccatggtcacctggatcgaggcctgggatgagctgaacccgtcgacccctgccgccgcaaatggcaaggccaagtagatgtgccatcacttcggcactggagtgaaaaagaaagtatgat

SEQ ID NO: 38469 - DNA, 274 bp, Zea mays
gttcgcggtgttcatggtccacctggccacgatccccatcaccggcaccggcatcaacccggccaggagcttgggcgctgctgtcatctacaacaacgacaaggcctgggatgaccactggatcttctgggtgggtccattcatcggcgccgccatcgccgcggcgtaccaccagtacgtgctgagagccagcgccgccaagctgggatcgtctgcctccttcagccgctagatcgatggcctcccgccggacaaggacagccggaggcgtgaa

SEQ ID NO: 38470 - DNA, 277 bp, Zea mays
cggacgcgtgggcataaacaaaaaccagtcctttgttcttcttcccccggcacgcccagcgccagtcaccaacattccactccctccctccgtcgccatggcgcgcaagaagatccgggagtacgactccaagcgcctcctcagggagcacctcaagcgcctcgccggcatcgacctcaccatcctctccgcccagatcacgcaatcaacggacttcgcggagcttgtgagccagcagccatggctgtcaaccatgaagctagtggtgcagcctgat

SEQ ID NO: 38471 - DNA, 277 bp, Zea mays
cccacgcgtccgcccacgcgtccgcccacgcgtccgcccacgcgtccgcggacgcgtgggtacgagagggggaaacggggggacgggaataggcgtcgtcggccatgtcgtcgtcgtggaactcggtgggtctggcgatcctgtaccaggtgctgggctgggtcgccttcgccgcgtggtccttcagcttctacccgctagtcctcctcaactacaagcgcaagagtgttgtgggcctgaatttcgattttctggtgttgaacttgacaaagcactc

SEQ ID NO: 38472 - DNA, 276 bp, Zea mays
aacctcagggaccccattctcaagaacaccgtcgcggtgcacccctacggctggacggcgctgcggttcagggccgacaaccccggcgtctgggcgttccattgccacatcgagtcccatttcttcatggggatggggatcgccttcgaggaaggcgtcgaccgcgtcgctccgctcccgccacagatcatggggtgcgggaaaaccaggggtggccactaactgatggtgttcagaagcttaactgaaccacaccgttgatccattcggtggttt

SEQ ID NO: 38473 - DNA, 276 bp, Zea mays
cggacggtggacgagacgcgtgggtccagtgtcaagttgaaaacaaattcagagaatttctgttgacaaaggactttgaccgggatccacacgccaaaattgatttctggatccagtgaaggtggtgcagctgtattcaagcttctgtacaatggtcaacctgcttgcttggcacaatctcctcagttgcacaagcagatggctctatgtggtggttttgaacgagtatttgaggttggccctgtgtttagagcagaaaattcaaacacacacagg

SEQ ID NO: 38474 - DNA, 272 bp, Zea mays
cggacgcgtggcgtgacgcgtgggccgaacgttcgcaaagatggcggtgccgctgctgacgcagaagatcgtgaagaagagggtcaagcagttcaagaggccccatcttgatcgctacaagtgccttaagccaagctggcgcaggcccaagggtatcgactcccgcgtcaggcgtaagttcaagggatgcaccttgatgcccaacattggatatggctccgacaagaagaccaggcactaccttcccaacaagttcaaaaagtttgttgttc

SEQ ID NO: 38475 - DNA, 273 bp, Zea mays
agaagaccgggcccgtgttcgcgtcggcgttcagcccgctgatgatgatcatcgtggccgtcatgggctccttcatcctcgccgagaagatattcctcggcggcgtcctcggcgccgtcctcatcgtcatcgggctctactcggtgctctggggcaagcacaaggagacgcaggacaaggaggacgatgagacgacagagctgcccgtcgtggcaataatggcatccaaaaccaatggagtcgtctacgacgacgacgatgacgtcgtcttcg

SEQ ID NO: 38476 - DNA, 273 bp, Zea mays
gagagagaacaggtggcttttatgcttgcaatcgttatgaatcagcaaagaaagagggagtttacgacgagactgatgcaaggagggaaagagctaaaaactctcttgagagatatatgcattactatgagcgctgggcatccaatcagacatcgaggcagaaggcccaagcagatctgctaaaagcggaaaaggaccagattgcaaatttaactgacattttcgggataccagagacccagcttaagttcataatcgaagcttggtcacaga

SEQ ID NO: 38477 - DNA, 271 bp, Zea mays
ctcctcgcatttcttcccatccgatccccccttcgcaaccaaaaccccaactcgccccgcatcgatggcgcccaaggccgagaagaaacccgcggcgaagaagccggcggaggaggagcccgcggccgagaaggcgcccgccgggaagaagccgaaggggcagaagcgggtccccgctggcaagtccgctgccaaggaaggcggcgagggcaagaggggcaagaagaagggcaagaagagcgtggagacctacaagatctacatcttcaag

SEQ ID NO: 38478 - DNA, 267 bp, Zea mays
cgacccagatcgagggctcgatccgtcggccatggcgctggagtgggtggtgctgggctacgcggcgggcgcggaggcgatcatgctgctgctgctgacgctgccggggctcgacggcctgcgccggggcatgatctccgtggtgcggacgcgctgaagcccatgatgtcggtggtgcccttctgcctcttcctgctcatggacatctactggaagtacgagacgcgccccacctgcgacgacgagcacgcctgcaccccctccgag

SEQ ID NO: 38479 - DNA, 267 bp, Zea mays
ctcatcaatgatatgctaaacgtgcttgcacttcgtttagatcacaccagagttgtagacataatgcgcaaggctggtcagttgcatcttgtgaaaccatatatggttgcagttcagagtaacaatgtatctgccgtgaatgaagccttgaatgagctttatgtcgaagaggaggactacgagagactccgtgaatcagttgacatgcatgacaactttgaccagattggtcttgcccagaagcttgagaagcatgaaatgctggag

SEQ ID NO: 38480 - DNA, 267 bp, Zea mays
cccacgcgtccgcccacgcgtccggatgaactcaagagggtttttcttgaaggaaatccttatcttcttggattgactatggtcgtttctctattacactccctgtttgattttctggccttcaaaaatgatatccagttctggaacaagaacaagtccatggaaggtctatcggcaaaatctgtggttctgaattttgtgtgtcaactagttgttttcctgtaccttcttgacaatgacacttcatggatgatccttgctagctct

SEQ ID NO: 38481 - DNA, 267 bp, Zea mays
ctcaccgtcatgggcgtctccaagtccacctccaagtgcgccaccgtcggcatccagggcatcgcctggtccttcggaggaatgatcttcgcgctcgtctactgcaccgccggcatctccggaggacacatcaacccagctgtgactttcgggctgttcttagccaggaagctgtccctgactagggccctcttctacatcatcatgcaatgcctgggtgccatctgtggagctggagtggtgaagggcttccagcagggactttac

SEQ ID NO: 38482 - DNA, 265 bp, Zea mays
cacacgcgtccgcggacggtgggcgatggagaagcagaatgacaccagcatcttggtcctgctgcaggagtgtttcggcgaggggctcaaaaccatcaaccagatgaccaaaggctttgcccgtgtcaaggaaggccttgatgatctgatcctcgacatcccaaatgcccaggagaagtttggagagtatgtggagctggcaacagagcgcggctggctgctgccgaccttcgcctccgttccctgagcatccaccactggcgat

SEQ ID NO: 38483 - DNA, 246 bp, Zea mays
agcagaggaagcgaggcggcgggggcggagatgtcggcgggactggtgaccgacgaggccaccgtggggcggctgtaccggatccggcgcacggtgatgcagatgctccgtgaccgtggctacctggtggtggaccacgagctggcaacaagccgcgcgacttcctccgcaagttcggcgagtccttccaccgcgaggacctcctcatcaacaagtacaaagaggacgacccatcggaccagatat

SEQ ID NO: 38484 - DNA, 261 bp, Zea mays
tgaactcagtggaaaccacaagaaagctatgtcgctgtggattcttgatcctgctggacgtgatgcaactgttttgagagaagctctaaatggtgacactatggatctgagagcagccactgagattatatgttccaggacaccatcacagttgcaaataatgaaacagacttattatgctagattcggtacttatcttgagcatgacattgctcaccacacatccggtgatcaccagaagcttttacttgcatatatggg

SEQ ID NO: 38485 - DNA, 262 bp, Zea mays
gtttgctggctatgttctacatattggctcatttacaaaaggttcgaaggttttgtctcttggagatagtgtgatatgcaaggttgattacaaccggcgcacactgattgctccaaatcatacgtgtacccacatgttgaactttgctctaagggaagtacttggtgatcatgttgaccagaagggttcaattgttctaccagagaagctaagatttgattcctctcatggaaaacctgtccagcctgaagatctgaggaaa

SEQ ID NO: 38486 - DNA, 258 bp, Zea mays
accgaagctattttagatgaagctgtttctcgactgttgaacgaagctgcggaagcagttttggaagaatagttattattgtaaaacatttggaatgtaatatttgctgaacaaagtgtgtaatatttttataactttgaatgtaatatataagttgcttgtaaaaaaaaaaaaaaaaaaaaaaaaaaaaaaaaaaaaaagaaaaaaaaaaaataaaaaaaagatagaatcgtctacgacaaagagggtgacgtctta

SEQ ID NO: 38487 - DNA, 263 bp, Zea mays
cctcatctcaagtgtgtagacgagacagagagacactgagagagcgccatggccagcctccaagtcactcctacttcggcgttcactgagtggaacgagctgaagttcgaaggcctgtacctgttccacacgcccctgggctcaggcgccaaccaagctcgggtcatagacaacaaggcgccgattggcatcggtgccaccgtagttaacaactggacagtgtatgacgggccagggccgaacgcaaagctggttgcccgtgc

SEQ ID NO: 38488 - DNA, 258 bp, Zea mays
gacgcgtggtcgtcaggttctccggggttcggtttcgtgggtgggcggatcgagatggcggcgtcgattgttgagtaccgctgcttcgtcggctgcctcgcctgggccacggacgaccactccctccacaacgccttcagcacctacggcgaggtcctcgagtccaagatcatcctcgatcgggagacgcagaggtcccgcggcttcggcttcgtcaccttctccacggaggaggcgatgcggaacgccatcgagggg

SEQ ID NO: 38489 - DNA, 261 bp, Zea mays
atccgaccaatcaattggagttacatgaagaaagggctgaccgtatggttagatgtcccactggatgcacttgcaagaagaatcgctgctgtaggaaccgcgtctcgaccactcttgcatcaggaatccggtgatccttatgcaaaggcttatgcaaaacttacgtcactttttgagcaaagaatggactcgtatgctaatgctgatgccagagtttcacttgaacatattgcattaaaacaaggccataatgatgtcact

SEQ ID NO: 38490 - DNA, 264 bp, Zea mays
cggacgcgtggcaggacgcgtgggcagacgccagacgccctctacttctctctagttagtgtacatagcaaactcttggccgccgcctcgctctctgttcgccgcgccccgccgcagaaatggcgctgccgaatcagcaggttgtggattaccccagcttcaagctcgtcatcgttggcgacggtggaactggcaaaaccacatttgtgaagaggcatcttactggcgagtttgagaagaaatatgagcccaccattggtgttg

SEQ ID NO: 38491 - DNA, 245 bp, Zea mays
cgtaatagccatgggctccaccgccggcgacgtggccgcggtggtggacgaggaggcgtgcatgtacgcgatgcagctggcgtcgtcgtccatcctgcccatgacgctgaagaacgccatcgagctgggcctgctggaggtgctgcagaaggaggccggcggcggcaaggcggcgctggcgcccgaggaggtggtggcgcggatgcccgcgagcgccatcgaccccgccgccgccgcggccatgg

SEQ ID NO: 38492 - DNA, 267 bp, Zea mays
ccggcagcgacgtgtcacgctcgtcggcgaccggggcggtggacctagagtccgtggcggtgcacgagatcggccacctcctggggctcggccactcctcggtgccggacgccatcatgtacccgacgatccggacggggacgaggaaggtggagctggaggccgacgacgtccaggggatacagagcctgtacgggagcaaccccaacttcaagggcgcgaccccgacttcgccggcgacgagcagccgcgagatggacagtagcg

SEQ ID NO: 38493 - DNA, 263 bp, Zea mays
cccacgcgtccggcaaggaagtcgtagaaactagaccctcgtcttcgcagcagagcagactccagagggtagagccatggcagacagctccgatcaagttcctcccgctgcaagaaagctggacggcaaggtagcgctgatcaccggcggcgccacgagcatcggggagtgcacggcgcggctcttcgtgaagcacggcgcgcgcgtcgttgtggcggacatccagtacgagcctggctcccgcctctgcgccgagctgggag

SEQ ID NO: 38494 - DNA, 276 bp, Zea mays
ggacgcgtgggcgcagctatgcagaaatggaaaatatcattgctcggacaaaacgtgaatctgagaactccaaaaaatatgcagtacagaacttctctaagagcctgctagatgttgctgacaatttggctagggcatcatctgttgtcaaggaaagcttctcgaaaattgatacctcaaaagattctgctggagctgtcccactactgaaaaccctgctggagggtgtggacatgactgagaagcaacttgcagaggtcttcaagaagtttggag

SEQ ID NO: 38495 - DNA, 265 bp, Zea mays
gaaacaatcaaccagcaacactcttctcgtataacataatacagcgaaggtaactcacatggcaacttccatgggttgtctcgtcttgctctgccttgtttcttctctccttcccagtgccgtccttggccacccatggggtggcttgttcccacagttctatgaccattcgtgccccaaggcgaaggagattgtgcagtccattgtggcacaggctgtggccaaggagaccaggatggcggcatctttggtcagactgcatttc

SEQ ID NO: 38496 - DNA, 260 bp, Zea mays
gcaaagcgctcgcgagctgctgccatggcaggcgccggtgcgcccgcagttccccaggccggtcgcccagcccccaacttcgacgtcatcgtggtgggcgccggcatcatgggcagctgcacggcgcacgcggcggcgtctcgcggcgcccgcgtcctgctgctggagcgcttcgacctgctccacccgctgggctcctcgcacggcgactcccgcatcatccgggacgcctacgtgcaccgcggtacctccgcatggtg

SEQ ID NO: 38497 - DNA, 260 bp, Zea mays
cggacgctgggcggacgcgtgggcggacgcagtgtgcatgcatataagagcaacaagatactggcgcagtggagcaatgcacggcatggatgccttcgctgctgtgtcactactcgccacactctttctggttcgtgcggcagctgcccatcctccggcggcggctgcggacgccatgacgccgacggactattggcgagcggtgcttcctgagaccccgatgccccgagccatactcgacctattgaccacatctacag

SEQ ID NO: 38498 - DNA, 260 bp, Zea mays
gttccccgaccacaccgttcctccgagcccaggagcacccccgcgccaggaggaagtttgttcttttaacaatatgtcgagggaggagaatgtttacatggccaagttggctgagcaggctgaaaggtatgaggagatggttgagtatatggagaaggtggctaagactgtagatgtggaagagctcactgttgaggagcgtaaccttctgtctgttgcatacaagaatgtgattggggctcgccgcgcttcatggcgca

SEQ ID NO: 38499 - DNA, 259 bp, Zea mays
tgcagattgtggctggattactggacatagttatgtgacatatggtccactattgaatggagccacatttcttgttttcgaaggggccccaaattaccctgatcctggccgctgttgggacattgttgataaatatggagtgacaatattttatactgcaccaacacttatacgttcacttatgcgtgatggtactgagtatgttgctcggtactctcgcaagtctctccgagtacttggaagtgtgggtgagccaatc

SEQ ID NO: 38500 - DNA, 255 bp, Zea mays
cggacgcgtgggcggacgcgtgggcggacgcgtggggccgtcgccagtcgctacttcccctccgatcctcgccgccgacgcaaccacccgaaccatcctccgcgacctcgccgtcgccgcagccttggccatgtcgatcttcgagtataatgggtccgccgtggtggcgatggtggggaagaactgtttcgcgatcgccagcgaccggcggctgggcgtgcagcttcagaccatcgcgacagacttccagcgggt

SEQ ID NO: 38501 - DNA, 256 bp, Zea mays
caaaagagaggaccttgagcaggaagtcatgattgatggctggtttcacactggagatattggcgagtggcagccagatggatccttaaaagtgattgatagaaagaagaatattttcaagctttcgcagggggaatacgttgcagtggaaaatctagagaatgtgtatggtgttcttcaagatatagattcgatatgggtatacgggaacagcttcgaatcttctctcgtcgccgtcgccaacccgaaccagcaa

SEQ ID NO: 38502 - DNA, 255 bp, Zea mays
actcaagcatcatttcctactattgggaggtgcaagactcgaacgccgtgctctatagccgacagaagtctgcggaggcgaaattgtacgagacttggatgatgccgaccatgtgttcgttgaaatcccctcaaggtagttcaaggtgccagattggttcctcgacaggaatgactacaaggacaacaggttctcacagatcatctccaacgccctcggtatgaagctcagggacaacctcaacaagctcaaaaa

SEQ ID NO: 38503 - DNA, 252 bp, Zea mays
  unsure (1)..(252): unsure at all n locations
cggacgcgtggngcggacgcgtgggggcgcacgacagccccgcggcggaggcgccgctggagtccgtccagactcgcctctcgaacgtgcagtccaggttcgcgggtgccatcagcgacggcgggggcgacatcgtcctggagggccgggtcaagtacggcgtgcctcacctcaccctcgtggggccctacgtggtggacgtcagcctggcgggcacctgatcctgtgccgccagatcgacctgcccgggat

SEQ ID NO: 38504 - DNA, 234 bp, Zea mays
ctccgatgaagctgtacggggcggtgatgtcgtggaacgtgacgaggtgcgcaacggcgctggaggaggctggctccgactacgagatcgtgcccatcaacttcgccaccgccgagcacaagagccccgagcacctcgtccgcaacccgtttggtcaggttccagctctgcaggatggtgacttgtacctcttcgaatcacgagcaatctgcaagtacgctgctcgcaaaaaca

SEQ ID NO: 38505 - DNA, 262 bp, Zea mays
gccagtccaccaccgcttcccgtgcagcgccctccctctacgttcccccatttcctgtgttggcggcgatggcgcggcacttcgtgctcaacaccggcgccaagattcccttcatggggctccgcaactggcagtctgaccccggcgtcgttggccacgttgtctaagccggcgtcaaggcgagttaccgacatatcgattgtgccagagtttacggcaacgaaaaggagattggtttggcgctgaagaagctatttgaaga

SEQ ID NO: 38506 - DNA, 264 bp, Zea mays
aacgggtgacgtcgaattccggtcaccacgcagcgacacggtgcgacacaatacgacacggtccgggacctgggacggccctgagtagatttgccgtcagtgacatgaggcagacggttgctgttggagtcatcaagagtgtggagaagaaggacccaaccggcgccaaggtgaccaaggcggctgccaagaagaaatgatgcgataccgtgtctgcttttgcagtgcctggataacttgccactaaagttgtgtatgcggttg

SEQ ID NO: 38507 - DNA, 248 bp, Zea mays
cacacgcgtccgatcaccctcgaggtggagtcttcagacaccatcgacaatgtcaaggccaagatccaggacaaggagggcatcccaccggaccagcagcgtttgatcttcgctggcaagcagctggaggatggccgcacccttgcggattacaacatccagaaggagagcaccctccacctggtgctccgtctcaggggtggtatgcagatctttgtgaagacactcactggcaagacaatcaccct

SEQ ID NO: 38508 - DNA, 275 bp, Zea mays
gtcaagatgggaaacatccaggtgctcacggggacccagggccagatcaggctcaactgcagcatcgtcaacaacggctcgtcgtcgttggggatccagcagatgacagtgcccaactcctactctggcgccaccgcgtcccttgatgatgagatcgccacgagctgatctagatcggcgcggtgtgatgtgatgatagatatttgcattgtgtgtccatctttaggctattaattagtacgattgctcccggtacgcgcgagagtgcgtagttc

SEQ ID NO: 38509 - DNA, 275 bp, Zea mays
gtttcttaaaggctttggtggtcttctgttcatagtcagcagctcatttggagcattcctcctgctcatttacttggcgtttataacccctattgtgtatgacttctacaaccatgaaatggagtcaacactgtttgtcgatctttttttcaagttcatacagaacttggcgtttatgggtgccctgcttttcttccttgggatgaagaactcaattccaaaacgtcgctccaagggaaggacaacaaaaaccaagacaaactgatgtcagtggt

SEQ ID NO: 38510 - DNA, 274 bp, Zea mays
gccatggcctccgcccccaactcctccttccgcccagaggaggcgcgctcccctcccgccctcgagctcccgatcccgccgctctccaagttcaaggtggcgctgtgccaactctcggtgacggcggacaagagtcgcaacatcgcgcacggcgagcgccatcgagaaggcagcctccgacggcgccaagctcgtggttctccccgagatatggaatggcccttactcaaatgacagctttccagagtacgccgaggacattgaagctggcgga

SEQ ID NO: 38511 - DNA, 273 bp, Zea mays
agaaggttgccaatttccttgctcggttcaagtccatccccagcatagttgagcttgacagcttgaaggtttctggtgatgtctggtttggctctggaattacactcaagggcaaggtgacaattatcgccaagcctggagtgaagttggagattccagatggagacgtacttgagaacaaggatgtcaatggccctgaggatctttaagcaatgtttgtcatcaccagtttttcccaaggacatgtcacaggaactgccaagcctagtcact

SEQ ID NO: 38512 - DNA, 275 bp, Zea mays
accagaacctgttcgcgctggacctggtgacccagttccggttcgacaaccagtactaccacaacatcctggccatgaacgggctgctcagctccgacgagatcctgctcacgcagagccgcgagaccatggacctcgtccaccgctacgccgccgaccagggcctcttcttcgaccacttcgccaagtccatggtcaagatgggcaacatctcgccgctcaccgggagcgccggcgagatcaggcacaactgcaggagggtcaacacttctagc

SEQ ID NO: 38513 - DNA, 244 bp, Zea mays
ggcttcaagggcaccgagatcgccatggcctcctactgctccgagctccagtacctgggcaaccccatcaccaaccacgtgcagagcgcggacagcacaaccaggacgtgaactccctgggcctcgtctcggccaggaagaccgccgaggcgatcgacatcctgaagctcatgtcgtccacctacatcgtggcgctgtgccaggccgtggacctgcgccacctcgaggagaacatcaaggcgtc

SEQ ID NO: 38514 - DNA, 272 bp, Zea mays
cttgcttcctataagaaccaaggtggtttcgatttgctcggtaggagtatcgatcagatccgcactactaagcaagtgaatgctgcaatgacaacatgccacagtctgaacttggatgggttggtcatcattggaggtgtgacctccaattcagatgctgcacagcttgcggagacccttattcagaataactgtaagaccaaggttgttggtgtgccagtttcattgaatggtgacctcaagaaccagtttgttgaaacaacagttggatt

SEQ ID NO: 38515 - DNA, 270 bp, Zea mays
cccacgcgtccggtctttttgtttcaaaaatctgctcttcacaagtgcaacatggctggaaagcctgctgttgtcactcgtgttgtggacagtatgactgacaacctcaggcctactcgagcggaggcaactgatgtggcaaatgcagtacttgatgggagtgatgccattctccttggtgctgagactctccgaggtttatatccagttgagactatttcgacagtgggcagaatttgtgctgaggctgagaaggtattcaaccaagat

SEQ ID NO: 38516 - DNA, 265 bp, Zea mays
ggacctggtgacagctgcggatcaagctgcaactgcggatcaagctgcaactgcggcaatatgtaccctgacctggaggagaagagcggcgggggcgctcaggccagcgccgccgccgtcgtcctcggcgttgcccctgagacgaagaaggcggcgcagttcgaggcggcgggcgagtctggcgaggccgcccacggctgcagctgcggtgacagctgcaagtgcagcccctgcaactgctgatcctgctgcgttgtttcgtttg

SEQ ID NO: 38517 - DNA, 271 bp, Zea mays
gcggcactggcgggtgggacgacgatgcatattgactttgtcattcccgtggacggcaacttgactgcagggatggagtcctacaagcacaaagccgcaaaagctgccatggattatggctttcacatggccattacaaagtggaatgatgaggttgcaagggaaatggaagtgatggttaaagaacatgggataaattctttcaagtttttcatggcatataaaggctccttgatggttactgatgacctcctcctgcacagcctacgga

SEQ ID NO: 38518 - DNA, 275 bp, Zea mays
cgcgtccagtgtgtccgctactccgctccccctcagtcctcagttcctcacctagcggtagcgtgcgcgcgggagacgtagatggcggcttcggaggcggcagcggcggcggcaacaccggtgacgccgacagaggggacggtgatcgcgatccacagcctggaggagtggagcatccagatcgaggaggccaacagcgccaagaagctggtggtgattgacttcactgcaacatggtgtcctccgtgccgcgccatggctccaatttttgctga

SEQ ID NO: 38519 - DNA, 268 bp, Zea mays
cccgcgcaaagcagtacgccgaggaatacgatgcccaggagaaggaactggtgcagcttaagcgcgaggcccgtttgaagggtggtttctatgtcagtcctgaggcaaagctgctctttgtggtccgcatccggggtattaatgccatgcaccctaagaccaggaagatcttgcagcttctgcgattgagatcttcaatggcgtgtttctcaaagtcaacaaggctactattaacatgctacgcagggttgagccatatgttgcatat

SEQ ID NO: 38520 - DNA, 265 bp, Zea mays
gtcgccgtcatcgatcgatcgccggaaaactaacccctaacgatgtctggagccggcgaggaggacaagaagcccgcggagggcggcgcccacatcaaccttaaggtcaagggacaggatggcaatgaggtgttctttcgcataaagaggtccacccagctgaagaagctgatgaacgcttattgtgaccgccagtctgtggacatgaatgccattgcgttcctgtttgatggccgcagcttcgcggcgagcagacccctgatga

SEQ ID NO: 38521 - DNA, 265 bp, Zea mays
gacaattaggcgctgtagaagggtggtatttattggttgtggaacaagttacaatgctgccttagctgcaagaccttttgtggaagaactgactggtattcctgtgactatggaggttgcaagtgacttgctggacagacaaggtcccatctacagagaagacactgcagtttttgttagtcaatctggggagacagcagataccctccttgctctagattatgcactagaaaatggagctctctgtgttggcataacaaatact

SEQ ID NO: 38522 - DNA, 288 bp, Zea mays
cagacgctgggattcgttcccggcctcaccccgagccagtcgtctcgctagggtttcgccgccgccgacatgcctcgccgcagctcaggaaggtctgccccacgcccagctccccgtgctgcttcactgaggaacccgccacagccagcacgccaggctcctcctccagctcctgttcgagatggtggtggctccatgtttggaggaattgggtccaccattgctcaaggtatggcgtttggcacgggtagtgccatggcacacagggctgttgactctgtattaggt

SEQ ID NO: 38523 - DNA, 291 bp, Zea mays
gtaacatggcatcaaaacgtatcctcaaggaattaaaggacctgcaaaaggaccctccaacgtcatgcagtgctggtcctgctggtgaggatatgttccactggcaggcaaccatcatgggtcctcctgatagtccatatgctggaggtgttttcttagtgaacattcatttccccccggactaccctttcaagcctccaaaggtatcttttaagacgaaggtcttccatccaaacatcaatagtaatggaagcatatgtctcgacattcttaaggagcagtggagccctg

SEQ ID NO: 38524 - DNA, 266 bp, Zea mays
cccacgcgtccggctaaggagcgaaatggccattgctaccttagatttgatgacacaaatccagaagctgaaaagaaagaatacatagatcacattcaggaaatcgtccattggatgggatgggagccctacaaagtaacatacacgagtgactatttccaagctttgtatgaacatgccgttgagttaatacagaaagggctagcatatgtggatcaccagactgcagaagaaatcaaggaatacagggaaaagaagatggatag

SEQ ID NO: 38525 - DNA, 287 bp, Zea mays
gcttggatctaacagggaagagacacatcaatgttcgcagccaccctcttttctttggcatcactttgagtctgcttgctgaaattatcaattctaggctatttacaacagttcgagattccatgggattaacatatgatgtttcttttgaattgaacctttttgacaaattggatcttggttggtatgtgatcgcagtcacttcaactccaagcaaggtccataaagctgttgatgcctgcaaaggtgttctgagaggattgcatagtagccgaattgtggaaagg

SEQ ID NO: 38526 - DNA, 285 bp, Zea mays
cgaacccaaccgaagcgagagctgagcaaggcagaggcggcgtgaccggcgatggagcggctgcagcggatctttggcgcctccggcatggggcagccgccgacggactcgccgctgctcgattcctccgagcaggtctacatctcctccctagcgcttctcaagatgctcaagcacgggagggctggggtgcccatggaggtcatgggcctcatgctcggcgagttcgtcgacgactacactcgtcaggtcgtcgacgtcttcgccatgccgcagagcgtgact

SEQ ID NO: 38527 - DNA, 287 bp, Zea mays
ccaccctccagcgcctccaccttcctcgccgcctcactccctctgaggtcgcagatccgtccggttagacgaagccgcccgcacccatggcctccggtgagctcgcctgcacctacgccgccctcatcctcagcgacgacggcatcgccatcaccgccgagaagatcgccaccatcgtgaaggcggccaacatcaaggtcgagtcctactggccggcgctcttcgctaagctcctggagaagcgcagtctcgaggatctaatcctctccgtgggatctggtggtggc

SEQ ID NO: 38528 - DNA, 291 bp, Zea mays
ctcctctcagcgcgacgattacggtaacgccgtcgccgccctacggctcagatcttcgtcgtcatcttctccggcaacgagcacccaaagatggtggtccttcaaccagatcggttcctgagcgagctgacgagcatgtacgagcggacacggagaagggctccgtctgggtcaccatgaagcgatcaactctcaagggcaaggcacagttgcggaagatggagaataaggggcaggaggtagagcacaggtgcctcgtccgcgccccaaatggcaagaagaacatctcca

SEQ ID NO: 38529 - DNA, 282 bp, Zea mays
ctacaacttctgagagatcaagaactcatatatgcgcacaacactcttcctctgacaagagtttgttctgcaactaaccactatatatatagatcgatcctctatctgacaaggtgcaggtgcaggtgatcatatgaactccatggaatcatgcgtgcccccgggtttcaggttccaccccaccgacgaggagctcgtcggctactacctcaggaagaaggtggccgcccagaagatcgacctccacgtcatacgcgacatcgacctctaccgcatcgagcc

SEQ ID NO: 38530 - DNA, 262 bp, Zea mays
cccacgcgtccggttggcttctcctccccctccggttcgggttcgggttcgtgaggttctccggggttcggtttcgtgggtgagcggatcgagatggcggcgtcggatgttgagtaccgctgcttcgtcggcagcctcgcctgggccacggacgaccactccctccacaacgccttcagcacctacggcgaggtcctcgagtccaagatcatcctcgatcgggagacgcagaggtcccgcggcttcggcatcgtcagcttct

SEQ ID NO: 38531 - DNA, 284 bp, Zea mays
cgactccgtcctcgacgtcgtgcgcaaggaggccgagaactgcgactgcctccaagggttccaagtatgccactccctgggtggcggcactggttctggcatgggcacgctgctcatctccaagatccgggaggagtatccagaccgcatgatgctgaccttctccgtgttcccgtcgcccaaggtgtccgacaccgtcgtggagccctacaacgcgaccctgtccgtgcaccagctggtggagaacgccgacgagtgcatggtccttgacaacgaggcgctct

SEQ ID NO: 38532 - DNA, 287 bp, Zea mays
tcttcgtaagccttcaaaccgacgaatttgagcaactgcacccagagcgcgatccattgccggggaagaagcaacttgttgcgagcctcctctatggcgagctccgaccatggttccaccaccgcccccaaggacgtgccgggcagctacggcctgccgctggtgggcgccgtgcgcgaccgcctcgacttctactacttccaggggcaggacaagtacttcgagtcccgcgtggagcgctacggctccaccgtggtgcgcatgaacgtgccgccgggccccttcat

SEQ ID NO: 38533 - DNA, 270 bp, Zea mays
tgttgatcggaagggcaccatcaagatctctgacttcggcctcagcgctctacctcaacatctcgggagtgacggacttctgcacacaacatgtggcagccccaactacatagctcctgaggttctgcaaaacagaggctatgacggctccttgtcagatctctggtcgtgtggggtgatcctctacgtgatgcttgttggctgccttcccttcgacgacaggaacctcgtcgttctttatcagaagattttcaagggagactgtcagat

SEQ ID NO: 38534 - DNA, 266 bp, Zea mays
actagttctagatcgcgagcagccgcccttttttttttttttttttttttttttttttttttttttttttttttttttttttattttttaaacgggaatttcagttctcatagcattatcatgaatctcagaacataacaggtgaaacacgaatcaagcagaggcgccatggggttcacagatccacacctaaaccgctaaattaaactgcgagcgatacatgataaactaagaccaccactcagatcaccaccatcttattcaga

SEQ ID NO: 38535 - DNA, 277 bp, Zea mays
cccacgcgtccgcatatctggaaaaaacaatgggatgaataatgagctacacaacagcatcagctcagcaattcttcatactcgcagaattcttggcatcttggaagccgttttctccctgaagccatcatcagttggtacctcatggagctatagctcaaatgaaatagttgcagcagctatggttgctgctcatgtttctgagttatttcgtcggtccaggccatgccttaatgcactctctgcactaatgagatgcaagtgggatgctgagatt

SEQ ID NO: 38536 - DNA, 233 bp, Zea mays
aatgaggccatctatgacatctgccgccgctcccttgacattgagcgcccaacctacaccaacctcaacaggcttgtctcccaggtcatctcatccctgacggcttccctgaggttcgatggtgctctgaacgttgatgtgaacgagttccagaccaacctggtgccctacccgaggatccacttcatgcttgcgtcctacgctccagtcatttctgctgaaggcctaccacg

SEQ ID NO: 38537 - DNA, 231 bp, Zea mays
ggaccgggtcttggactattccaacttggctttccccaggttgggaaatgtgaggagattgggcttccaatgctaattcttgcggtggttgtgcaacagtatgtgccaattacttcagttatatccatcaacgggtcaccttcttgtttgagaggtattcgtggctctttgtatcggcatcgtgtgggcctttgcagctatccttactggctccggtgcatatgaccatgc

SEQ ID NO: 38538 - DNA, 269 bp, Zea mays
gagcccgccgcgagcgccgacggcgcaacaagggcctgttcgtcaaggtcaacatggacggcgtccccatcggccgtaagctcgacctggcggcgcacgcggctacgacacgctctccgccgccgttgacagcctcttccgcggcctcttcgctgctcaagcggcggggccaggcggggagcagcaggctgtcgcgggtatcctgagcggcggcggcggcggcgagcacacgctggtgtacgaggacgacgagggcgaccagatgctgg

SEQ ID NO: 38539 - DNA, 271 bp, Zea mays
ccttcgtcgggtcaggccccttgccgttcagctcgctcgtgctcgccgcccgccacctgcccaacacgacgttcgacaactacgaccggtgcgccgccgccaacgaccgtgcgcggaagctggtccgcgcggacaaggacctgaacgcgcgcatgtccttccacacggtggacgtagccaacctgacggatgacttcggcaagtacgacgtcgtcttccttgccgcgctcgtcggcatggcggccgaggacaaggccaaggtggtcgcgca

SEQ ID NO: 38540 - DNA, 266 bp, Zea mays
tgcttggttactgtgctgatgggacactccgcgtccttgcttatgagttcgctacaatgggttcccttcatgatatgcttcatggaaggaaaggggttaaaggggctcaacccggtccagtcttatcgtggtcgcaacgtgtgaagatagcggttggggcagcgaaaggcctcgagtatcttcatgagaaagcgcagccccatatcatacaccgagacatcaagtctagcaacgtccttcttttcgatgacgatgtagctaagatc

SEQ ID NO: 38541 - DNA, 267 bp, Zea mays
atcgtgatcccgacgatccgcaacctcgacttcctcgagatgtggaggcccttcttccagccctaccacctcatcatcgtgcaggacggcgacccgaccaagaccatcaaggtccccgagggcttcgataacgagctctaaaacggcaacgacatcaaccggcatcctcgggcccaaggcctcctgcatatccttcaaggactccgcctgccgctgcttcggctacatggtctccaagaagaagtacatctacaccatcgacgacga

SEQ ID NO: 38542 - DNA, 266 bp, Zea mays
ggaacgacaagaacatcatcttccaggtggacgacgtgacggtgcgcgtcttcaagcgctacgatgacctgccgtacccggacgccaagcccatggcggtgcacgccacgctgtgggacggcagctactgggccacgcgcaagggcgaggtcaagatcgactggtccagcgcgcccttcgtcgtctcctaccgagactacaccgccaacgcctgcgccgtccacggccggaacggcggcggcagctcgtcgtgccccgccggtgcc

SEQ ID NO: 38543 - DNA, 265 bp, Zea mays
caacaagctaggcagctgcaacatctcccaaatcccagcctgctgccccgcgcgaacacacttctcttgtcgttgcattgcagggcagctagccggctacagcatccgccatggcgcgcggcggggacggcctgcaggtgctcagcgcgctggacgcggcgaagaccagtggtaccacttcacggccatcatcgtcgccggcatgggcttcttcacggacgcctacgacctcttctgcatctccctcgtcaccaagctgctgggg

SEQ ID NO: 38544 - DNA, 265 bp, Zea mays
cctacggtggctggggagcccacggcgggggcgccttctccggcaaggacccgaccaaggtggaccgcagcggggcctacgtcgcgaggcaggctgccaagagcatcgtcgccgccggcctcgcccgccgtgccatcgtccaggtctcctacgccatcggcgtgcccgagcccctgtcggtgttcgtggacacgtacggcaccggcgcgatccccgacaaggagatcctgaagatcgtgaaggagaacttcgacttcaggcccgg

SEQ ID NO: 38545 - DNA, 262 bp, Zea mays
cacaagtccaaggctgagaaggccagagagaagacactttctgatcaggttgaggccaagcgtgcaaagagcaaggcaagccgtgagaggaagattgctaggagggaggagaggctggcccagggcccaagagaaccaacagcacctgtcgcagccccagctccatctactggggtgccaaagaaagcaaagaagtgaagtatggaaacaaagctgtagctttttggtactatataagcatgactttggagcacctgaagta

SEQ ID NO: 38546 - DNA, 267 bp, Zea mays
tgttaaacctgaccaattcaaggcgattaatgatgaggggatgccaatttaccagaggcctttcatgaaggggaagctgtacatccatttcacggtggagttccctgactcgttggcaccagagcagtgcaaggctctcgagacagtacttccaccaaggccttcatccaagctgacagacatggagatagatgaatgcgaggagacgactatgcatgatgtgaacaacatcgaggaagagatgcgcaggaagcaagctcacgctgc

SEQ ID NO: 38547 - DNA, 265 bp, Zea mays
gggattcgctgagccttttcaggcacgccaggggcatcatgtacgccctcaaggagaaggggatcgacatggcgattgcttctcgctcccccaccccggacatagccaaggtgttcctcgacaagttggagttccagtccatgttcgtcgcccaagaaatattctccagctggactcacaagactgagcatttccaaaagatccataggaaaactgggattccctacaaatccatgctgttctttgatgacgagaacaggaatat

SEQ ID NO: 38548 - DNA, 263 bp, Zea mays
cccacgcgtccgcccacgcgtccgaccttccaaaggccaaagcttctctgactgctgccagaactgcagccaatgccatttatgtgccgccatctcagcagggcacaattgatctgcagagtgggatccttcatgctgaagagaaggattacaagactgcttacagctacttcttcgaagcatttgaagctttcagttcactggaagatcccaaggctatcttcagcttgaagtacatgcttctgtgcaagataatggtcaac

SEQ ID NO: 38549 - DNA, 258 bp, Zea mays
ctcagatactactcaagtttggaggtagcatcagaatatttcaggtccggtgctgacaaaatttcaattggaagtgatgctgtttatgctgctgaagcctttttacagactggtgtatagacagggataagcagcttggagcaaatctctagagtatatggcaatcaggctgtagttgtcagtattgatcctcgacgggtatatgtcaaaagtcaagaagatgtgccatttaaaactgtaaaggtggccactaaaggt

SEQ ID NO: 38550 - DNA, 261 bp, Zea mays
gtcgaagcgaggcaggggaggttcggcggggaacaagttccgcatgtcgctgggtctgtcagtggccgcgacggtgaactgcgcggacaacaccggcgctaagaacctctacatcatctccgtcaagggcatcaagggccgcctcaatcgcctcccgtccgcttgcgttggcgacatggtcatggccaccgtcaagaaggggaagctcgacctcaggaagaaggtgatgcccgccgtcatcgtccgccagcgcataccgtg

SEQ ID NO: 38551 - DNA, 261 bp, Zea mays
cccacgcgtccggggtcacatgctggaaacaagcttgccatgcaggagttcatgatcctcccaactggagcctcctcgttcaaggaggccatgaagatgggagttgaggtgtaccacaacctgaagagcataatcaagaagaagtacggtcaggatgcgacaaacgttggggatgaaggtggttttgcacctaacattcaggaaaacaaagaaggccttgaactattgaaggcagccatagaaaaggctggctacactgga

SEQ ID NO: 38552 - DNA, 263 bp, Zea mays
gccacatgttcgggtacgccaccgacgagacccccgagctgatgccgctgagccacgtgctggccaccaagctgggcgcgcgcctcaccgaggtgcgcaagaacggcacctgcgcctggctgaggcccgacggcaagacccaggtgacggtggagtacgtgaacgagggcggcgccatggtgcccgtccgcgtgcacaccgtgctcatctccacccagcacgacgagaccgtcaccaacgacgagatcgccgccgacctcaag

SEQ ID NO: 38553 - DNA, 263 bp, Zea mays
accgggtgctttggtttcggcatccaggagcacatcgaccttggtatcaagtacgatccttcaacaggcatctacggaatggacttctacgtcgtgctggagcgtgcgggctaccgtgtggcacgccgcaggaggtgcaagtcccgcgtcgggattcagcacagggtgaccaaggaggactccatgaagtggttccaggtcaagtacgaaggcgtcatcctcaacaaggctcaggccaacacgttgtaaacctcacctgtggg

SEQ ID NO: 38554 - DNA, 240 bp, Zea mays
ccgaactccatctatctcttccccacgaacgcttgcggcggcggcggaattaggaggcgatggggcactccaacgtctggaactcgcaccccaagaactacgggcccggatcccgcgtctgccgtgtctgtgcgaaccctcatggactgatcaggaagtacgggctgatgtgctgcaggcagtgcttccgcagcaatgccaaggacattggcttcatcaagtaccgctgaaatcaggtgg

SEQ ID NO: 38555 - DNA, 279 bp, Zea mays
gtcgctggtgctcacgtacgccggccagacggcctacctgatcaaccacgtgggcgacttcggcgacgggttctacaagttcgtgccgcgccccgtgtactggccaatgttcgtcatcgcgacgctggcggcgatcgtggcgagccagtcgctcatctccgccaccttctccgtggtcaagcagtcggtggcgctggactacttcccgcgcgtccgggtggtgcacacctccaaggacaaggagggggaggtgtactccccggagaccaactacctgct

SEQ ID NO: 38556 - DNA, 276 bp, Zea mays
gacattgagtggcctcctcgaagaagctcgtcatccgacttcagtgcatccttgtctattagcaaggagaatgaatctggaaggctatctagcgatggacttgacgatattgatccttttgctgattggcccccaaaacctagcaatgttactagcattacagcaaccgagcatcgtccaagcataaatcaaaatatttctggatttagctcaggtaacatagggtttggtggcagcgggaattctatagggcaagcgaaaagcaaccaaatgagc

SEQ ID NO: 38557 - DNA, 276 bp, Zea mays
aatccatttcggcatttccaacgccttcgccctaccagccacgtcgcttcgaggccgatcgaccgagcagctggtggcaatggcggcggcggcggaggtcgtgctgctggacttctgggtgagccccttcgggcagcgctgccggatcgcgctggcggagaagggcgtggcctacgagtaccgcgagcaggacctcctggacaagggcgagctgctcctccgctccaaccccatccacaagaagatccccgtcctgctccacgccggcaggcccgt

SEQ ID NO: 38558 - DNA, 277 bp, Zea mays
gtttgctcggtatcttctggttcagtggaatatgcgaaacaggttcttgccactctacatgaagctggttttcatgttgatattgacgcgagtgacaggacaatacaaaagaaggtacgggaagctcaactggcccaattcaactacattcttgtcgtaggtgcacaagaggccgagactggaaatatatgcgttagggtaagagacaatgctgacctggtcacaacgagtgtagatggcttcatcacacgtttgagggaggaaatcgcagccttca

SEQ ID NO: 38559 - DNA, 272 bp, Zea mays
atacgtcctcctccattaatattggcagcaagctaggatcatcagcatctgagcttattattactaaatcgatcggttgccatggcggggatgagagtcggcaagctggcgctggctgcggtgctgctgtgcgcggcggcggccatggccacggcgcacaggcctccggcgtgcgcgccacctacaacttctacaacccgcagcagaacaactgggacctcaacgccgtgagcgcgtactgcgcgacgtgggacgccagcaagccgctgtcg

SEQ ID NO: 38560 - DNA, 276 bp, Zea mays
cggacgcgtgggatttcaaatccttcgatcgcgcagccgcccgccctctcgcagctctctccgatggcacgcacgaagcagacggcgaggaagtcaactggcggcaaggcgccgcggaagcagctggccaccaaggcggcgcgcaagtcggctccggccaccggcggcgtgaagaagccgcacaggttccgccccggcaccgtcgctctccgcgagatccgcaagtaccagaagagcacggagctgctcatccggaagctgcccttccagcggctg

SEQ ID NO: 38561 - DNA, 275 bp, Zea mays
ttcttctctctctgctcctccgcctccgcctgatccatccaagacagggatcgccatgtcggactcggaggagcaccacttcgaatcgaaggccgacgctggggcgtccaagacctacccgcagcaggctggcaccgtccgtaagaacggcttcatcgtcatcaagaaccgtccctgcatagttgtggaggtttctacctccaagactggtaagcatggccacgccaaatgccactttgtcgccatagacatattcaatgggaaaacacttgaag

SEQ ID NO: 38562 - DNA, 273 bp, Zea mays
caggatcctggcggccgacggcgtagtcctggtcggcgagaagaaggtgacctccaagctcctccagacctcccgctccgccgagaagatgtacaagatcgactcccacctggcgtgcgctgtggcagggatcatgtccgacgccaacatcctcatcaacaccgcccgcctccacgcccagcgctacgcgctctcctaccaggagcccatccccgtcgagcagctcgtccagtccctctgcgacaccaagcagggttacacccagttcggtgg

SEQ ID NO: 38563 - DNA, 275 bp, Zea mays
cggaccgtggcggacgcgtggggggcgcagagaatccccaagcaaacaaacagggtagagggagaggagaggagaggagacgagaggttgggtctgggacaccatggctccgatgaagctgtacggggcggtgatgtcgtggaacgtgacgaggtgcgcaacggcgctggaggaggctggctccgactacgagatcgtgcccatcaacttcgccaccgccgagcacaagagccccgagcacctcgtccgcaacccgtttggtcaggttccagctc

SEQ ID NO: 38564 - DNA, 269 bp, Zea mays
cccacgcgtccggctcgagttcagatcgagcgcgcgccaagcaagtcttccggccggccgcgaagagcgcaatcaagcaagacaagatggtgaagctcgccttcggaagcgtcggcgactccttcagcgccacctccatcaaggcctacgtggccgagttcatcgccaccctcctcttcgtcttcgccggcgtcggttccgccatcgcctacgggcaactgacgaatggcggcgcgctggacccggcgggcctggtggcgatcgcgatc

SEQ ID NO: 38565 - DNA, 273 bp, Zea mays
gtcttcggataccattgacaatgtcaaggccaagatccaggacaaggagggcatcccaccggaccagcagcgcctcatcttcgccggcaagcagctggaggatggccgcaccctggcggattacaacatccagaaggagagcactctccacctggtgctccgcctcaggggtggcatgcagatttttgtgaagacattgactggcaagactatcaccttggaggtggagagctctgacaccattgacaatgtgaaggccaagatccaggacaa

SEQ ID NO: 38566 - DNA, 270 bp, Zea mays
cccacgcgtccgaattatgcttaactcccgcaccgttgggatgaagaaaacattgatatttcatgaaggcaaggcccctaagggcgacagaactgattgggtgatgtacgaatacagaatggaagatgaggatttggtttctgctggtttctcaaaggatgcttatgtactctgcaaaattttcaagaaaagtggccttggtccaagaatcggagagcaatatgggctccatttaatgaagacgaatgggataatgcagaagtcgaaact

SEQ ID NO: 38567 - DNA, 270 bp, Zea mays
gaggcggtgggtcttagccatcgccattcccattctcgccgctgcttcggcggcggcgctgttccttggggctgaggcccaggcggtccagcagggccaccagacagagaggatctcaggaagtgctggtgacgtgttggaagataaccctgttgggaggctcaaggtttacgtgtatgatctccccagtaaatacaacaagaagctggtgaagaaggatcctaggtgcctgaaccacatgtttgctgctgagatcttcatgcaccggtt

SEQ ID NO: 38568 - DNA, 270 bp, Zea mays
cggacgcgtgggcgttagactaggttaggctaggctagggtgtcgaccagctcgcggtaatggtggccttacggttccatcagtaccaggtggtggggcgcgcgctgccgacgcccggcgacgagcaccccaagatctaccgcatgaagctctgggccaccaacgaagtccgcgccaagagcaagttctggtacttcctgaggaagttgaagaaggttaagaagagcaacggtcaggtcctggccatcaacgagatcttcgagcgtaacc

SEQ ID NO: 38569 - DNA, 268 bp, Zea mays
attgaagggaagctcccactgaatcatgagattttgtatcatttgcaggatgtctttaatctccttccaaatctgaacgtaaatgagctaattaaagcctttgcagtgaaaacaaacgacatgatgttggtaatatatctgtcttctctgatccggagtgtcattgcgcttcacaatttgatcaacaataagatgctaaacaaggagcatgagaaggctgaggattcgaaaccagccgccattccaactgctgccggtggagggggag

SEQ ID NO: 38570 - DNA, 269 bp, Zea mays
cggacgcgtggggcgttgcatgagattgatgggaacgtggtaaggttaaagctgcaaggagcatgtggttcatgcccggcttcagtaacaacgatgaagatgggtattgaacggcgcttgatggagaaaataccagagattgttgcagttgagcccattgctgatgaggaaactggccttgagttgaaccaagagaacattgaaaaggtacttgacgagattaggccataccttgctggcacaggaggtggcgagctcgagtttgtcac

SEQ ID NO: 38571 - DNA, 260 bp, Zea mays
ggacctggtgcatattgagaatttgcgatacccgataccgatctaggagaagagacaggcgtcatgtcgtcgttcggacgcaattcatggtgtatcctcgtgctggcctccgtgctcctcctgtcctgcctcgccgagacggccctggccaaccgaacaggcgagctcaccgtcttctggggccggaacaaggaggagggcaccctgcgtgaggcctgcgacacaggactctacaacaccgtcatcatctccttctacag

SEQ ID NO: 38572 - DNA, 260 bp, Zea mays
gtgtaaatgagggaacggatcaacaagtgcaaggagtgctgaatcttatagatctagcaggcagtgagcgcctgaacaaaagtggtgccacgggtgatcggttgaaagagacagtggctatcaacaaaagcttgtcatgtttaagtgatgtcatcttctcgattgcaaagaaagaggaacacgttccatttcggaactcaaagctgacatatctgctccagccgtgtctcggaggggactcgaagacactgatgtttgtg

SEQ ID NO: 38573 - DNA, 261 bp, Zea mays
gagcaggccgcaccgccaccgccccatccgcctcgtcgacgacgccaacgtcggcaccgccaagcacttcgagtacatgttctacgtcgacttccaggcgtccctcgcagagccccgcgcgcagaacgcgctggccgaggtccaggagtacacgtccttcctccgggtgctcgggagctaccccatggacatgacccccatgaccgccggctcctcctccaccgttgtttcctcgtccgatgatccctcgtagtcttgatt

SEQ ID NO: 38574 - DNA, 262 bp, Zea mays
cccacgcgtccgctccaatttcccaacggtgtgtccatgagcaaggatggctcattctttgttttctgtgaaggatcgcgcggcaggttgagcagatactggttgaaaggcgagaaggcaggcactgtggatcttttcgctatcttgcctggcttcccagacaatgtgagaacgaatgagaagggcgagttctgggtggcaatccactgccgccgaggtctgtacgcccggcttatgagccgccatgtcaagctgaggaagt

SEQ ID NO: 38575 - DNA, 261 bp, Zea mays
caaagaatcgacttgcttcaaactggtggcaatctatctgttcttggcgaagtggggggttcttcgaaggacaataatataaacaatgcaaaaaacccggaggaattaaagccattgtctttgtctcagggggaaattgttttcaacattgggaaaagtgtagttgagaataaatctgattctcttgcattcagacgtcctggactacaaaaagaaggatcaaaggtcgtctatggtgttccaaaacatggaaagaagaag

SEQ ID NO: 38576 - DNA, 253 bp, Zea mays
cccacgcgtccgatgaaattggcaagcaattcaggaatgaaggaattgatttaacacacaatcctgaattcacaacttgtgaattttatatggcgtatgcagattataatgatttgatggagcttactgaaaccatgttgtcaggcatggttaaggacctgacaggtggctattagataatatatcatgcgaatggagttactaaccccccaatagaaattgatttcacgcctgccttcagaaggatagatat

SEQ ID NO: 38577 - DNA, 254 bp, Zea mays
cggacctggtgtaaatcaacccatcctcgtttcctccgtctagcagcctctcaccctcatggccaagatcaagatcgggatcaatgggtttggcaggatcggaaggctggtggccagggtggccctgcagagcgacgacgtcgagctcgtcgccgtgaacgaccccttcatcagcaccgattacatgacctacatgttcaagtatgacactgtgcacggacagtggaagcaccatgaggtcaaggtgaaggact

SEQ ID NO: 38578 - DNA, 258 bp, Zea mays
cccacgcgtccgatgcaatggaaccacagatcaggtcgagaagattgtcaaaaccctgaatgaaggacaggttcccccttcagatgttgtcgaggtcgttgtcagccctccttatgtcttccttcctgtggtcaagagccagctgcgccaagagttccatgttgctgctcagaactgctgggtgaagaagggaggtgctttcactggtgaagtcagtgctgagatgctcgtcaaccttggtgttccctgggtcattct

SEQ ID NO: 38579 - DNA, 263 bp, Zea mays
ccgaagaagaggagaagcgaacgaagcaggcttcgagaacaagactgcagggggagggggaggaccaagcgaaaggggaactagagcaagatgggcggcgcactgctgcttgcgctcctcctcgtctctgctgctgccgcccctcaggtacttggagttggcaatggagacaatcacatgagaatcatccaggaggacatcatcgagacagtcaacaaccatcccagtgctgggtggacagcctcacgtaatccttacttttc

SEQ ID NO: 38580 - DNA, 250 bp, Zea mays
gtggtggcggagatccaggagcggcacggcgccgtggcggggctggagcgcacctgctggagctgcagcaggtgttcaacgacatggccgtgctggtggccgcgcagggggagcagctggacgacatcgagggcaacgtcggccgcgccaggtccttcgtcgaccgctgacgcgagcagctgcaggtggcgcggaagcaccataagagcacccgcaagtggacctgcatcgccatcctcatcctcctcgt

SEQ ID NO: 38581 - DNA, 251 bp, Zea mays
atactttaaagaatgctttgtcactatataaacttggaggtgctgctggaggaagtgattttgatccaaagggaaaaagtgataatgagataatgcgcttttgccaaagtttcatggatgagctgtatagatatttgggccctgatcaggattttcccgctgaagatattggtgttggtccaagggaaatgggttacctttttgggcagtatagacgtctttctggtcattttcaggacctaaaattttct

SEQ ID NO: 38582 - DNA, 256 bp, Zea mays
cccacgcgtccgccctcgtggccggcaggttccacgtcaacctgctcaggctgacgtggaggacgacgttcgtggtggtgagcacggtgctcgccatcgtgttgcccttcttcaacgatatcctgggcttcctcggcgccaacggcttctggccgctcaccgtgtactacccagtggagatgtacatccggcagcggcgtatacagaagtacaccagcaggtgggtggcgctgcagctgctcagcttcctgtgctt

SEQ ID NO: 38583 - DNA, 254 bp, Zea mays
agcaggcgctgcgatacattccacacaacaacacccagctctgccccagcccgccacaggagttcccgcatctccctctggtccggtcacaggagctccgagacctctccaatggcggttaagatctacgttgtgtactattccatgtatgggcatgttggcaaactagctgatgagatcaagaaaggtgccttatctgttgaaggtgttgaggctaaaatatggcaggtccctgaaattctctctgaagaagt

SEQ ID NO: 38584 - DNA, 273 bp, Zea mays
cccacgcgtccgcccacgcgtccgggcaccacatacgcttctctattggaagaactgtctgagaaggacccccaggcatttatctgccatttctataacgtctactttgctcatactgctggaggccgaatgattggcaaaaaggtttctgagaagattctggacaagaaagagctggagttctacaagtgggagggcaatctctcccagctgctgcagaacgtccgcaacaagcttaaccaagtcgcttcaagctggtctcgggaggagaag

SEQ ID NO: 38585 - DNA, 272 bp, Zea mays
actagttctagatcgcgagcagccgcccttttttttttttttttttttttttttttttttttttttttttttttttttttatttttttttaaacgggaatttcagttctcatagcattatcatgaatctcagaacataacaggtgaaacacgaatcaagcagaggcgccatggggttcacagatccacacctaaaccgctaaattaaactgcgagcgatacatgataaactaagaccaccactcagatcaccaccatcttattcagatccaa

SEQ ID NO: 38586 - DNA, 275 bp, Zea mays
gaaacaatcaaccagcaacactcttctcttataacatagtacagcgaaggtaactcacatggcaacttccatgggttgtctcgtcttgctctgccttgtttcttctctccttcccagtgccgtccttggccacccatggggtggcttgttcccacagttctatgaccattcgtgccccaaggcgaaggagattgtgcagtccattgtggcacaggctgtggccaaggagaccaggatggcggcatctttagtcagactgcatttccatgactgct

SEQ ID NO: 38587 - DNA, 270 bp, Zea mays
cagctactccatcctctgggctcccacccacatcatcttctacgtcgacgacacgccgatccgggaggtgatccggcacccggacatgggcggcgacttcccggcgaaccgatggcggtgtacgccaccatctgggacggctccgcgtgggccacggacgggggcaagtacaaggtcaactacaagtacgcgccgttcgcgtccgacttctcggagctggccgtcgtcggctcccgcgccgacccggtgctccgcgtcccgcgccgggac

SEQ ID NO: 38588 - DNA, 319 bp, Zea mays
tagtactcgagtacggtcggaatccgggtcgaccacgcgccgggacgctggcgggctgcaggacggcgctgtccaacgtcgtgatggcggcggcggtgctggtgacgcagctgttcctcatgccgctgttccactacaccccgaacgtgatcctggcggcgatcatcatcacggcggtggtggggctggtggacgtgcgcggcgccgccaggctgtgtgaaggtggacaagctggacttcctggcgtgcgtggcggcgttcctcggcgtgctgctggtgtccgtgcagacgggcctgggcgtcgccgtcggcatctcgc

SEQ ID NO: 38589 - DNA, 269 bp, Zea mays
cccacgcgtccgatccgttcgactgcgccgtgtgcctgtgcgagttctcgcccgacgaccggctccggctgctgccccagtgcagccacgcgttccacctcgagtgcatcgacacgtggctgctgtcccactccacctgcccgctctgccgccggaacctcctcgctgatctctcgccggcgtcgtccagccccgtcgtggtggtgcagctcgggtccgggagcgcccgcgacatggccgcgtcggcgggtggtgcctaccacgacgat

SEQ ID NO: 38590 - DNA, 267 bp, Zea mays
gcttctccatccttccacgaactagacgagggaagagcgctgaagctgtggaggaaaacgaaggatctccccgtgcttgtgtatgccaggtcgcctgctctccgtccgcatcccgtccctcgcgaaactcggcgctcccagcaggtgtgcaaaatccatggcttcagacactggcaagaagctcatccagatcgatgtgagctcggacacagtatgcccttggtgctttgtcggcaaaaagaacctcgagaaagcgatggagcaaag

SEQ ID NO: 38591 - DNA, 267 bp, Zea mays
tgccgtgtagggaccgtagactcagcgactgcgaaggagggataaggggatggccgggatcggaccgatcaggcaggactgggagccggtcgttgtgcggaagaaggcacccaccgccgccgccaagaaggatgagaaggccgtcaacgccgcgcgccgcgcacggtgcggagatcgataccatgaagaagtacaacgctggtacgaacaaggcggcatccagcggtacatccctcaacaccaagcgcctcgacgacgacaccgaaa

SEQ ID NO: 38592 - DNA, 264 bp, Zea mays
cggacgcgtggggatgccaagcccatggatgtggacaaagccaagacaaaacgcagactttatgtaggccaagagttagagttcaggagggatcacatggaggtgatttcatctatgaaagatggaacggtaactgactgggatattgttgataatatatggaatcatgctttcagacggaggttgttgatcaatcctgaagagcatcctatgctcattgctgaaccatctacaaacactgcacagcaaagagagaaagcagcg

SEQ ID NO: 38593 - DNA, 128 bp, Zea mays
cccacgcgtccgggcttctcctccccctccggttcgggttcgggttcgtgaggttctccggggttcggtttcgtgggtgggcggatcgagatggcggcgtcggatgttgagtaccgctgcttcgtcgg

SEQ ID NO: 38594 - DNA, 263 bp, Zea mays
aagacaaatgttattggtaccctgaacatgctaggacttgcaaagagagttggagctaggattttgttgacatcaacctctgaagtttatggtgatccacttgagcatcctcaaactgaggcctactggggcaatgttaacccgattggtgttaggagttgttatgatgagggtaagcgtgtagcagagacgctgatgttcgactatcacaggcagcatggcattgaaatccggattgccaggattttcaacacctatgggcc

SEQ ID NO: 38595 - DNA, 259 bp, Zea mays
  unsure (1)..(259): unsure at all n locations
gccacgcatccgnccacgcgtccgcggacgctgggcgagcgtggggaccttcagcactactggtgcacatgaggctgcatatacccaggcaactggcaagcacatctctctctatgagcaacagcttattgactgtggttttgcattcaacaatttcggatgcaacggaggccttccatcccaggcctttgaatacatcaaatacaatggtggccttgacactgaggaatcttacccttaccaaggtgtcaatggaatc

SEQ ID NO: 38596 - DNA, 273 bp, Zea mays
ccatcgtcttctccctcgcgccatcagcttccccaagccagcggcgaccatgatctccccggacaccatccgcacggccatcggcgtcatcggcaatggaactgcactcgtgctcttcctctccccagtgcctacgttcatccgcatctggaagaaagggtcggtggagcagtactcgccgatcccgtacgtggcgacgctgctgaactgcatgatgtgggtgctgtacgggctgccggcggtgcacccgcacagcatgctggtgatcaccat

SEQ ID NO: 38597 - DNA, 277 bp, Zea mays
caagcaatggagaaggccgtcgacaggcagcgggtcctgctgcggcacctgaaccccgccgcggcggccagccccgccccgcacgccatctccgcaagcgcgtgcgcggcggtgggacagcgcggcgtaccaccggaggccggccttcgccgacgacgtcgtcatcgtcgctgcttacaggacggcaatttgcaaggccaagagagggggtttcaaggatacctttgctgaggacctcttggttcctgatttcaaggctttggtagacaagacgaag

SEQ ID NO: 38598 - DNA, 279 bp, Zea mays
acgggcgcgtcgtcggggttgggcctggcggcggccaaggcgctggcggagaccggcaagtggcacgtggtgatggcctgccgcgacttcctcaaggcggccaaggcggccaagggcgccggcatggcggacggcagctacaccatcatgcacctggacctggcctccctcgacagcgtgcggcagttcgtggacagcttccggcgcgccggcatgccgctcgactcgctcgtctgcaacgccgccatctaccggcccacggcatagacgccgacgttc

SEQ ID NO: 38599 - DNA, 264 bp, Zea mays
ggacccgttccgggtgcccaccaaggacaacatccggatggcgatgcagtggctggctgcaggggtgcagcagcggcgactccctggtgttccacttctctgggctgggcgcgcaggtcgccgacgcggactgcgacgagcaggacgggtacgacgaggccatctgcccggtggactcgttccagaagggccccatcctggacgacgagatcaacgagaccatcgtccggccgctggtgcccggcgccaagctccacgccgtcg

SEQ ID NO: 38600 - DNA, 265 bp, Zea mays
cccacgcgtccggctgtccagggtgcaagggtgagaaggtcattcaagagaagaaggttcttgaggttcatgttgagaaggggatgcaacacaaccagaagatcaccttccctggtgaagctgatgaagcgcctgatactgtcactggagacattgtattcgtcctccagcagaaggatcactccaaattcaaaagaaagggtgaagatctcttctatgagcacaccttgtctctgaccgaagcactatgtgggttccaatttgt

SEQ ID NO: 38601 - DNA, 241 bp, Zea mays
cggacgcgtgggcgaggaatcgctgatcgtatgagcaaggagatcacttcccttgcaccaagcagcatgaagatgcaggtcgttgcaccgcctgagaggaagtatagtgtctggataggagggtccatcctagcctcgctgagcactttccaacagatgtggatatctaaggaggagtacgatgagtctggcccggcaattgttcacaggaagtgcttctaggcttcgcaagttcctcatc

SEQ ID NO: 38602 - DNA, 242 bp, Zea mays
ctttgcttcctcgtcgaggtccaagttcctgcattgatggcgaccgaggtggctgagactcccgcgccgttggcggaggcggtccccgagacccccgcggaggcaccggcggcgcccgccgccgaggcgaagctagccaaggccaagaaggcctctgcgcccaagaagcgtgccaacccgacccacccgccgtacgccgagatgatctcggatgctgtcacgtcgctcaaggagcggacggg

SEQ ID NO: 38603 - DNA, 258 bp, Zea mays
gacttgtttcattgattcttgaagagatcgagcttcttttgcaccacaaggtcgaggatgtcttgcaactgcggatcaagctgcggctgcggctcaagctgcaagtgcggcaagaagtaccctgacctggaggagacgagcaccgccgcaggccaccgtcgtcctcggcgtggccccggagaagaaggccgcgcccgagttcgtcgaggccgcggcggagtccggcgaggccgcccacggctgcagctgcggtggcaa

SEQ ID NO: 38604 - DNA, 259 bp, Zea mays
gttggattgggttcaaagttgggcttttggacagctgtggtgtgcacggcagctctgtgacttgtgaggaggaagggaggaagaaagcggatccatggcgtcgaagcggatcctcaaggagctcaaggacctgcagaaggatcctcccacctcttgcagcgcaggccctgttgccgaagatatgttctactggcaggcgacgattatggggccatcagatagcccatacgctggtggcgtatttttggtcactattcac

SEQ ID NO: 38605 - DNA, 265 bp, Zea mays
cccacgcgtccggtcttcgtcaatgttgtggcatctgtgcaatatcgtgcccttgccgataaggcatctgatgcattttacaggcttagtaacaccagggagcaaatccagtcatatgtttttgatgtcatcagggcaagtgttccgaagatgaacttggatgatgcctttgagcagaagaatgaaatcgccaaagctgtagaaaatgaacttgaaaaggcaatgtctatgtatggatacgagattgtgcagactctgattgttg

SEQ ID NO: 38606 - DNA, 263 bp, Zea mays
cagccgtcgtctgctgcggactccgcctccagtttggtctgtttcttgcaagttgatcttgtggtagttcccccaactgtcaccatgcagaacgaggagggtaagactgtggacctctatgtccccaggaagtgctcggccacaaacaggatcatcactgccaaggaccatgcctctgtccagatcaacattggccacttggatgcgaatggcctgtatgatggtcacttcacaacgtttgctctctctgggtttgtccgtgc

SEQ ID NO: 38607 - DNA, 271 bp, Zea mays
cccacgcgtccggcaagaccatgcttgccaaagcagttgcacatcataccactgctgcttttatcagggtcgtcggttcagagtttgttcaaaagtacttgggtgagggacctagaatggtgcgtgacgtgttccgtttggccaaggagaatgccccagcaatcattttcattgatgaggttgatgctatagccactgctcgttttgatgctcagactggtgctgaccgagaagttcagcgtattcttatggagctactcaatcagatgga

SEQ ID NO: 38608 - DNA, 268 bp, Zea mays
gaccacgcgtccgggaccggggcacttcgacctcagcaggctggtgttcccgccggagctcacgtacctgcacctgtcccacaacctcatcagcggcaccgtgccgctgtcgctggagcgcctgtccacgctgcagaagctggacctcagctacaaccgcctgtgcggcccgctccccaagggccacggcgtcatcaagcacgggtgcaagccgtacgcgcacaaccagtgcagcaaagggaccccgctcgctggatgccaggacctg

SEQ ID NO: 38609 - DNA, 272 bp, Zea mays
cgtcatcgtcgatgtggtcgaccagaacagggcacttgtggacgcccctgatatggtcaggtgccagattaacttcaaacggctctcacttactgacatcaagattgacatcaaacgcgttcccaagaagtcaaccctgatcaaggctatggaggaagctgatgtgaagacgaagtgggaaaacagctcatggggcaagaagctgattgtccagaagaggagggctgcgctcagtgactttgacaggttcaaggtcatgctggcaaggatca

SEQ ID NO: 38610 - DNA, 271 bp, Zea mays
gcaccctccacctggtgctccgcctcaggggtggtatgcagatttttgtgaagacattgactggcaagaccatcaccttggaggtggagtcgtctgacacaatcgataatgtcaaagccaagatccaggacaaggagggcattccaccggaccagcagcgcctgatctttgctggcaagcagctggaggatggccgtaccctcgccgactacaacatccagaaggagagcaccctccacctggtgctccgcttgcgaggtggtatgcagat

SEQ ID NO: 38611 - DNA, 272 bp, Zea mays
ctccaaccgggcgggcgcgggccactggaccagcgacacatccgggagaagaaagctcggaggatccgaacgacgctgacggcgaggccgtaaccgctgagcagcggttgttgggatctcctgctcctggtcctggatgctggcacttgaattccagcatgaggtcaaagaagatatttggtttatccatttcccttgtactcatcaacctagcttctatattggaacgagctgatgagaatctcctcccagctgtatacaaggaagtcagt

SEQ ID NO: 38612 - DNA, 269 bp, Zea mays
acccgccgtcctcctcgggacacgcaacgtccgcgctttctccggcgacatgcccaccgatcctgccggcacgtcggcgaacgggggcggtataacgtaacggccgtgcagaagctctccgagtcactgacggcggcggcgtgccatgacctgacgtacccctacgccgtgttctactgccacacgaccaacccggcggccacgtacctggtgaagctggcagcccacgatggcggggcgccggacatggaggcgttggtcgtgtgcca

SEQ ID NO: 38613 - DNA, 266 bp, Zea mays
agcagaaggtgctcaaggcagtctccactctccacggtatcgactccatcgcggtggacatgaaggagtccaatctgacggtggtcgggctggcggaccccgtcgacgtcgtgggcaggctgcgcaatgtcggctccgccgccatcgtctccgtcgggccggccacggaggagaaaaataaagacggcgacaagaaggaggccggcgacaagaagggcgacgacaagaagttcccgctgcccccggtgtacccgtacccgtacccg

SEQ ID NO: 38614 - DNA, 262 bp, Zea mays
atgctttccagctcattggaatgtcctcctgccttgatctatccggattttttgagaaagaggatgtttctgaaaggaaaatcagatttgcatcaaattattccccagcttatttatttgagaagattgagagcattgtcagaaaaatggggttccaggtacataagagcaacggcaagctaaaagtgatccaagactgcaagggactagcaaattcaagagggcaagagtcattattaatttctgctgatgtgtttgagat

SEQ ID NO: 38615 - DNA, 268 bp, Zea mays
catcccgtcgcatcccatcccactaccacccatctcgtcgtccgccgattcgatccggttcttccaacccaggggcagtgatggcgacgaagacgagcgtgggcaccctcggcgaggcggatctgaaggggaagaaggtgttcgtgcgcgccgacctcaacgtcccgctcgacgatgcccagaagatcaccgacgacacccgcatccgcgcctccgtccccaccatcaagttcctcctcgagaagggcgccaaggtcatcctcgccag

SEQ ID NO: 38616 - DNA, 263 bp, Zea mays
cacctcgccgcgatctccgtagcctccgtcgcgtcgagcatcgatcatgtcggcctactgcggaaagtacaaggatgagctcatcaagaatgctgcctacattggcacccctggcaagggtatccttgctgctgatgagtccactggcaccattggcaagcgcctttccagcatcaatgtcgagaacgttgaggagaaccgccgtgccctccgtgagctcctattctgctgccctggtgctctccagtacatcagcggtgtga

SEQ ID NO: 38617 - DNA, 267 bp, Zea mays
cgccctctcgccgggccgtccgattccgccatggcttccgatgagagcaaaaattcaaaaccagagaagccatcttcagcagctggtgcaggcctccccaatccgtttgatttttcttctatgagcaacttgctcaatgacccatcgataagagagatggctgagcaaattgcaagtgaccctgtgttcaaccagatggctgaacagcttcagaaaagtgctcagggtgctggagaacagggtattcctgcattggatcctcaacag

SEQ ID NO: 38618 - DNA, 268 bp, Zea mays
gatgcaccctcagctggttggcatggttccgtcctctcgagtgccactgccgatcgagccagccgctgaagagcccatctatgtcaacgcgaacagtaccacgctattctccggaggagacagctccgtgcaaagctagaggcggaaaacaagctcgtgaaaagccgcaagccgtacctccacgagtctcggcacctgcacgcgatgaagagagctcggggaacatgcgggcggttcctgaacacgaagcatcatccggagtcccccg

SEQ ID NO: 38619 - DNA, 271 bp, Zea mays
accatttacatatatgcccttgccccggatcctttccccggccccaactccattatttgcttgatccttgacgagcgggagagagagagagaggaagacgagaggcagcgaaggaaacagtagttcttcagttaggcaggagggcacaggaggaggaagatggcgtcgaagaggatccagaaggagctcaaggatcttcagaaggaccctcccacctcgtgcagtgcaggtcctgttggtgaagatatattccactggcaggcaacaataa

SEQ ID NO: 38620 - DNA, 274 bp, Zea mays
atagtcgggatctgaaagatgctgacttctacaagcagcaagcaaaactgttgttcaagaacttgtccagagggcagcatgaggcgtcaaggatgtcaattcagacaggaccgtaccttttccactacatcatagaaggccgtgtttgctatttgactttgtgtgaccgttcttatcccaagaaacttgcattccagtatctcgaagatctcaaaaatgaatttgagaaagtcaatggcagccaaattgaaactgctgcaaggccatatgcatt

SEQ ID NO: 38621 - DNA, 277 bp, Zea mays
gagagagagagatcagcaacttaacaacaataatggccaccgccatagttcccacggacgccgagctgctgcaggcgcaggccgacctgtggcgccacagcctctactacctgacatccatggcgctcaagtgcgcggtggagctccacatcccgaccgccatccacaacctaggcggtgctgccacgctgccggacctcgtggccgcgctgtccctgccagcggccaagctcacgttcctcgggcgcgtgatgcggctgctggtcacgtcgggcgt

SEQ ID NO: 38622 - DNA, 254 bp, Zea mays
attgtgacaatattttgttacaaatggaaacagttctgactggattccagacagaaattggttccataagttcagagataaaggtccttcaggagaaatctatggacatgggattaaagctgaaaaatcgtaaggctgcagaatctaaattgtcaaaatttgtcgaggatataatagtacctccaagaatgattgacataattgttgatggagaggtcaatgatgaatacatgaaaacacttgagactctaagc

SEQ ID NO: 38623 - DNA, 260 bp, Zea mays
ggatcgcctgcctcttccttgtcaagggcctgccgcaccctgtgtggaccatccaccacgccgtctggtacattctcatggtgcccatcttcctcctggacctcaagatctacggccagtggatgtccggcggcgaccgccggctgtccaaggtggccaccccgaccaaccaccttgccgtggtcggcaacttcgtgggagcgctgctgggcgccaagattgggctccgcgaggtgcccatcttcttcttcgccgtcggg

SEQ ID NO: 38624 - DNA, 262 bp, Zea mays
gatcccctccctcgctagggttttcgtccccgcgccgccgctctcccggatcccacctaaacaaccatggccggcggtcccgcggcggtgtcgttcctgaccaacatcgcgaaggtggctgctgggctcggagccgcggcctcgctcgcctccgcgtcgctctacaccgtcgacggcggcgagcgcgccgtcatcttcgaccgtttccgcggggtgctcccggagaccgtcggctagggcacccatttcctcgtgccctggt

SEQ ID NO: 38625 - DNA, 262 bp, Zea mays
cccacgcgtccgggtatatgctgtgatgtcattcctttcccttatcctccctaacaacgcgatatactttaattctattcgggagatttatgatgcttgggtcatctacaattttctctcactctgcttggcatgggtgggaggtcctggtgctgtggtggtaagtttgagtggccgaaccctgaaaccatcatggattctgatgacttgctgttatccagctattcctctagatggacgttttatacgaagatgcaaacaa

SEQ ID NO: 38626 - DNA, 268 bp, Zea mays
cacagtgctatccatggtgcaatggcggggtacagcttcactgttgggatggtcaacggaagacatacctatatacctttctacagggtgacatccacaaggaacaaggttaaagtcactgacaggatgtgggcaaggcttctgtcgtccaccaaccagccaagtttcctgagtcagaaggatatcgacgaagcgagtgaggcggataggctggcaaacaggccaccactgccaacgggtgccagctctcgcgtggtgaggtctttcg

SEQ ID NO: 38627 - DNA, 280 bp, Zea mays
cggacggtggggatcctatggttctctgtacaatggaagaatctggtgagcatatcattgctggagctagtgagcttcatcttgagatttgcctgaaggatctgcaggaggacttcatgggtggtgctgaaattattgtttccccacccgtcgtctccttccgtgaaacgttcttgagaagtcctgccgtactgtcatgagcaagtctcccaacaagcacaaccgtctgtacatggaagcgcgccccttggaggagggtctcgctgaggccatcgatgac

SEQ ID NO: 38628 - DNA, 288 bp, Zea mays
ggagactgccaggaccagctctagtgttgagaagagctacgagctgcccgatggccaggttatcacaatcggtgcagaaaggtttaggtgccctgaggttctattccagccatccttcattggcatggaatctgctggcatccatgaagccacgtacaactccatcatgaagtgcgacgtcgatatcagaaaggatctgtacggtaatgttgtcctcagtggtggctccactatgttccctggtattggtgaccgcatgagcaaggagattactgcacttgcccccag

SEQ ID NO: 38629 - DNA, 288 bp, Zea mays
cacaggatgaggtgaggaaagagctggggctggaccctcagctgcccgctgttctgctgatgggaggcggcgaggggatcggccccgtggaggagaccgcgagggcgctcggcgaggagctctacgaccgccggagacggcgccgggtgggacaggtcgtggtcgtgtgcggcaggaaccgggcgctgcggtccaccctgcagtccctcagatggaaggtccctgatcaagtagggtgccactggcatgcatgatcatgacagaatggatatgccgccgtatctaagg

SEQ ID NO: 38630 - DNA, 287 bp, Zea mays
cacgcgcgcacacacacatggcgtcgcagcagaggcaacagcaggcgggagcggcggcggcggcgtcctccgccgtgggcttcgaggactacctgccggtgatggcggacggctgggcgaggacgggctgatgcgggagctggcgagcgggttccggctgctgatagacccggcgcgcgggctcatcaccttcgacagcctccgccgcaacgcgccgctactgggcctgggcggcatgtcggacgccgacctccgcgggatgctcgccgagggcgacttcgacggcg

SEQ ID NO: 38631 - DNA, 290 bp, Zea mays
caagcaccagggtatcacccagctcaagttccagaggaacaagaggtctgtcgctgaggagagagctggacgtaagcttggtggactgagggttcttaactcctactgggtgaatgaggatagtacctacaagtacttcgagatcatccttgtggacgttgcccacaaagccatcaaaaccgacccgaggatcaactggctatgcaaccctgtgcacaagcaccgcgagctccgtggcctcacctcagcaggcaagaagtaccgtggcctgcggggcaagggccacactc

SEQ ID NO: 38632 - DNA, 285 bp, Zea mays
ccgtcggcacctccgcttcaagatgcagatctttgtgaaaaccctgactggcaagactatcaccctcgaggtggagtcgtctgacaccattgacaacgttaaggccaagatccaggacaaggagggcatccccccagaccagcagcggctcatctttgctggcaaacagcttgaggacgggcgcacgcttgctgactacaacatccagaaggagagcaccctccaccttgtgctccgtctcaggggaggcatgcagatctttgtgaaaaccctgaccggcaagac

SEQ ID NO: 38633 - DNA, 276 bp, Zea mays
  unsure (1)..(276): unsure at all n locations
nccacgcgtccgcggacgctgggcgacgcgtggggccgggccgaggacagcgccacaacctgagcgcgtcgacggcgagcggcggcaaacagaggagggcgtaccgaacgacctgcgcccacttctactgggtcacgagggagcctgggtcgttcgagtggttcaagggggtgatgaacgaggtcgccgagatggacaagaagggtgtcattgagctgcacaactacctgacaagcgtgtacgaggagcgagacgcgaggacgactctgctgtcca

SEQ ID NO: 38634 - DNA, 286 bp, Zea mays
cccacgcgtccggcttctcaaccggataggtagcaccggagcaggtagaacgctgcacaatccccttcgccgccgccaagatggtgaacgttcctaagaccaagaagacgtactgcaagaacaaagagtgcaagaagcacacactccacaaggtgactcagtataagaagggcaaggatagcctgtctgcccagggaaagcgccgttatgaccgcaagcagtcaggatatggtggtcagaccaagcctgtcttccacaagaaggccaagaccaccaagaagattgt

SEQ ID NO: 38635 - DNA, 281 bp, Zea mays
ccccatcctagtagcgtagaaacctcctgcattttcattttgatctccctaatctctccggctagctgctttccagtgaccaaaagatatcagagaccacctcccgtggctgtctgccatctggctctgaaacgatggcagtcctacaagctgctgcccctccccctgtctctgtgattggattcgagggatttgagaagcgccttgagatcagcttctctgaggcacctgtcttggctgaccccagcggaaggggactgcgtgcgctctcgcgtgcccag

SEQ ID NO: 38636 - DNA, 283 bp, Zea mays
gcttctccatccttccacgaactagacgagggaagagcgctgaagctgtggaggaaaacgaaggatctccccgtgcttgtgtatgccaggtcgcctgctctccgtccgcatcccgtccctcgcgaaactcggcgctcccagcaggtgtgcaaaatccatggcttcagacactggcaagaagctcatccagatcgatgtgagctcggacacagtatgcccttggtgctttgtcggcaaaaagaacctcgagaaagcgatggagcaaagcagggacaagtttgac

SEQ ID NO: 38637 - DNA, 285 bp, Zea mays
gcctgagggtgctgtttatgattacgaagacaagatcaactttgcagtgttcccatctctccaaggtggccctcacaaccaccagattgctgcacttgctgttgctctacagcaaactatgtcgcctggcttcaaggcctatgcaaagcaagtgaaggccaatgctgttgcaattggaaactatctcatgagcaagggctacaagatggtgactgatggaactgagaaccaccttgttctctgggatctccgcccccttggcttgactggaaacaaggtcgaaaa

SEQ ID NO: 38638 - DNA, 283 bp, Zea mays
cccacgcgtccgagcagtatcagcgtatcatatggagctcagccccaacaacagcacggaccagagcttgctcgatgcgcactcgagctctggcacaccaccttcgcgttcatgaagtccatggcgctcaagtccgcaatacacctccgaattgccgatgccatccacctccatggcggtgccgccagcctatcccagatactaagcaaggtccatctccacccgtccagagtttccagcctccgtcgcctgatgcgcgtgctaacaaccaccaatgtcttcg

SEQ ID NO: 38639 - DNA, 285 bp, Zea mays
gtttctttggttaaaaaaacttcatgcattggatgcaattcaaccattccaaaccaacttattgataattaatactagaaagtagagagacatgaaagcatagaaaatacagggtccagaatgtaaccacagataatgataagtcaggtaggtacgacacccagcaaccccttgctgcgatttctgcttcttttgagcggcctaaagcaactctaataccaaagtcaattaaagcgagccctgatgcaagcaagccccaaattgaagcgaacaagcctacactag

SEQ ID NO: 38640 - DNA, 273 bp, Zea mays
ggcgtctggaaatgtgacagttgatacagtgaagaaaatcggagaaacgggggtcacctatatttcaagtggagcattaacgcactctgtgacggcgcttgacatctctctcaagatagacaccgagctggctcttcaggttggaagacgcacaaatcgtgcttgactcccacagcattacgttgtggacgcaacgcacgcaagtaaggcaggatgacagagggaccagcgtggcaaaccagcttaaatagcctaataataacttggcgctga

SEQ ID NO: 38641 - DNA, 277 bp, Zea mays
gaaatacccctatgacttacaaccttaggcctgtcattgaagagatccaaaggtctgcagaggataatggtgataaacgaacttcaaagatgtgcttggggatgctaaagaccatgagaaatcgctctgaacagaacttcgttgcttatagaaagggtctcggtgttgtttgcaacaaaaaaggtggatttggtgtcgatgactttgttgtagagttctttggggaggtttacccttcttggagatggtatgaaaagcaagatggtattaaacatat

SEQ ID NO: 38642 - DNA, 278 bp, Zea mays
ctcccatatccgctcccctacctctccagcatcctcccgtctccgtcgtctcgtctccgctcctcacctcgccagccatgggcaagatcaagatcggaatcaacggtttcggaaggatcggcaggctcgtggccagggtcgccctgcagagcgaggatgtcgagctcgtcgccgtcaacgaccccttcatcaccacggattacatgacgtacatgttcaagtacgacaccgtgcacggccaatggaagcacagcgacatcgccctcaaggactccaag

SEQ ID NO: 38643 - DNA, 277 bp, Zea mays
cccacgcgtccgagaagagcggcggcgcgggcggacaaggagcaggcggaggaggagttgtgccaagccacaatgggtatctcgcgtgactcgatgcacaagcaccgagccaccggtggaaagcagaaggcctggaggaagaagcgaaagtatgagcttggtcgccagccagccaacaccaagttgtcaagcaataagacagtgaggagggtccgtgttcgtggaggtaatgtgaaatggagggctcttcgccttgatactggtaactactcatggg

SEQ ID NO: 38644 - DNA, 275 bp, Zea mays
ctttctttcccgcggcgacggtgacgacgaccgcgcgacgccgccgactccctactgcatcaggtgcctcggccttcgtcgtgctctccgccggcaacgagtatagacgggcgcgcatggccaccttcgagctgtaccggaggtccaccatcggcatgtgcctcaccgagacgctcgacgagatggtctccaacggcaccctcagcccggagctcgctatccaggtcctcgtccagttcgacaagtccatgacggatgctctggagaaccaagtg

SEQ ID NO: 38645 - DNA, 272 bp, Zea mays
gccgcactagccctctcctctcagaggacaagccggcgagggtggaggacgtcatgcccatcgccacggggctcgagcgggaggagctagaggccgagctccaggggaagaagcggtttgacatggattccccggtcggccccttcggtaccaaggaggaaccagctgtcattgagtcatactataacaagcggatagtcggttgtcctggtggcgagggtgaggacgaacatgatgttgtatggttctggttgaaaaaagacgagccgcat

SEQ ID NO: 38646 - DNA, 271 bp, Zea mays
cggacgcgtgggcggacgcgtgggctggtcggctggtcaactgcagggagcgaatgaatttctgtcctctaggtgcttgtgcactggctggaactggacttcccattgataggtttcaaactgctaaagatttgaaatttacggctccaatgaagaatagcattgatgcagtatcagaccgtgactttgtacttgagtttcttgctgccaattcgattgctgctgttcatctttcgcgaattggtgaagaatgggttctttgggcatcaga

SEQ ID NO: 38647 - DNA, 273 bp, Zea mays
ggaggaggagtacatcatccgtcagaaggagctgcaggaccgggtggccagggcggccgggcgggaatccaaggaggagctcatgcgggtgcgcaaggagatcgtcgacttccacggcgagatggtgctgctcgagaactacagcgccctcaactacacaggattggttaagattctcaagaaatatgacaagagaactggagccctgatccggctgcctttcattcagaaagttcttcagcagcctttcttcaccactgatctcctgtataa

SEQ ID NO: 38648 - DNA, 273 bp, Zea mays
gactagttctagtacgcggatgagctcatcaagaatgctgcctacatcggcacccctggcaagggtatccttgctgctgatgagtcaactggcaccattggcaagcgcctttccagcatcaatgttgagaacgtggaggagaaccggcgggctctccgtgagctcctgttctgctgccctggtgccctccagtacatcagcggtgtgatcctcttcgaggagaccctctaccagaagaccaaggatggcaagccttttgtcgatgtcctcaag

SEQ ID NO: 38649 - DNA, 272 bp, Zea mays
cccacgcgtccgcccacgcgtccggtcagaaacgactaggcagtttgctcttccatctatcgcacagcgccacatcttggctggtctggcatcagcagttggcggtctgagtgcaccatatgaaagagcatcacgtattcatgaaagacatgtagtgaactggctgtgggctgcaggctgtcatccgtttggaccattctcgaactcctcacagatcagtcaaattcttcaggatgtagcactgagaactacaatttatgctcaagtcgatg

SEQ ID NO: 38650 - DNA, 270 bp, Zea mays
aacacccttctctggtcgtcgcatcgcagggcagctagctaggtagctaacatccgccatggctcgcgggggagacggcctgcaggtgctgagcgcgctggacgcggcgaagaccagtggtaccacttcacggccatcatcgtcgccggcatgggcttcttcacggacgcctacgacctcttctgcatctccctcgtcaccaagctgctgggccgcatctactacacggacaccagcaaggacagctccgggtcgctgccgcccatcgtc

SEQ ID NO: 38651 - DNA, 269 bp, Zea mays
gcatccggcgagcctccgcttcttctagctgcctcggtgcactgcgcaatgagggaggccatcagagctgccaggaaggaattctcggtctgcactggtccagcaaactctgccatcacgttcgagatggacgtgccggcgacgatgcccatcgtcaaggagctctgcggcctggatgttgtggagaggtacctggagagcatgtccactgccggaccaacaaccactgccaaagcatagatccagcaggtgcaccgcccatggtgaga

SEQ ID NO: 38652 - DNA, 267 bp, Zea mays
cggacgcgtggtggcaagagtatagtaagggagactctaggtatgttgctagggacactgcaactgttacggtacaagggatcaccgctgtattggaaggccctgcatcactacttgctgtctacgctattgcatccaggaagtccttcagccacattctccagttcgccgtctgtctgggccagctctacggatgcctggtttacttcatcaccgcgtacttggacggcttcaacttctgggtcggcccgttctacttctgggcgt

SEQ ID NO: 38653 - DNA, 264 bp, Zea mays
cttttgctcggaacgcacacacagcccggtccccgatctccgatcccctcgtcgatccaagatgcagatcttcgtcaagaccctcactggaaagactatcaccctcgaggtggagtcttctgacaccattgacaacgtcaaggccaagatccaggacaaggagggcattcccccggaccagcagcggctcatcttcgctggcaagcagctcgaggacgggcgcacacttgccgactacaacatccagaaggagagcaccctcca

SEQ ID NO: 38654 - DNA, 255 bp, Zea mays
agggagctcatcttatccccaacaccggcgatccgacgcatactgctgtcggccgtcggcctgcacttcttccagcaggcctctggcagcgattccgtcgtcctgtacagcccgagcgtgttcaagagcgcgggaatcaccgacgacaacaagctcctggacctgggcgtcacctgcgcggtgggcgtcgccaagacgctcttcatcccggtggccacgttcctgctggaccgcgccgggcgtcggcctctgctg

SEQ ID NO: 38655 - DNA, 268 bp, Zea mays
aacaggcagtatgaacattttaataaggttgcaaaggtggtagatgagctactagaggagcagggtgggaaacgtcttgttcctgttggccttggagatgatgatcagtgcattgaggatgatttcactgcatggaaagaactagtgtggccagagttggatcaattgctccgcgacgaggatgacacaaatggtgcatcaactccatatactgctgctattcctgaatacagagttgttttcattgataaatctgacctgtcattcc

SEQ ID NO: 38656 - DNA, 261 bp, Zea mays
atcacaacgaacagaagctctcgatctcaccgacaccgaggaagaagagatcaatggcgtccgagcagggagtcgtgatcgcgtgccacagcaaggctgagttcgacgcccacatgaccaaggcccaggaagccggcaagctggtggtcatcgacttcactgccgcctggtgcggtccatgccgcgccatcgccccactgttcgtcgaacacgccaagaagttcactcaggtcgtcttcctgaaggtggacgtggacgaat

SEQ ID NO: 38657 - DNA, 260 bp, Zea mays
cccgatgcacctgcagccgacgagcccgacggccgtgaagcaggtgagcagcgtgtgggacgcgtacgaggccaccaagggcgcccacgggctgtgcatcctgaccgagtgggacgagttcaagaccctggactaccagaagatcttcgacaacatgcagaagcccgccttcgtcttcgacggccgcaacatcgtcgactccgagaagctgagggagatcggcttcatcgtctactccatcggcaagccgctcgacgcct

SEQ ID NO: 38658 - DNA, 257 bp, Zea mays
ggttttgctgctctccgaccccgagctccgaacgccgcagcatcaggcgcggcccccctcgcgtgtgaccgagatggcgctgccgaatcaggggaccgttgattaccccagcttcaagctcgtcatcgtcggcgatggtggaactggtaaaactacatttgtgaagaggcatctcactggagagtttgagaagaaatatgaaccaaccattggtgtggaagttcatccgttggatttcaccactaactgtggtaaga

SEQ ID NO: 38659 - DNA, 254 bp, Zea mays
cggacgcgtgggcaatcctaataccatctgcttcagctagctccaagtttagtcggccgatcattcactgaagtagtaatggcctccgtcaacagctggaccctcgagatcgcgtcgccggtggctccgcagcgcctgttccgcgccgccgtgatggactggcacaccctggcgcccaaggtcgcctcccacgtcgtcgccagcgcgcaccctgtggagtgcgacggcggcgtttgcagcgtcaggcagttcaa

SEQ ID NO: 38660 - DNA, 258 bp, Zea mays
cgcgtgcgaaccagaccccagcagaagaagcgaagtcgtcgccggagcatgaggaagagcgagcagcaagatgtcgtggcaggcgtacgtcgatgaccacctgctgtgcgacatcgaaggccagcacctcagcgccgccgccatcgtcggccacgacggcagcgtctgggcacagtccgagaacttccccgagttaaagcctgaggaggttgctgggatgataaaggactttgatgaacctggaactcttgcaccaac

SEQ ID NO: 38661 - DNA, 260 bp, Zea mays
ctcgcgcggcgaccacccgattcgaagcgtgcggagagaccgaagaagcgggagagatggctcgtaccaagcagactgctcgcaagtccacgggagggaaggctcccaggaagcagcttgccaccaaggctgcccgtaagtctgcccccaccactggtggagtgaagaagcctcaccgctaccgccctggaactgttgcactccgtgagatccgcaagtaccagaagagcactgagctgctgatcaggaagctgcccttc

SEQ ID NO: 38662 - DNA, 299 bp, Zea mays
ggggaagaaaagaagaaggcgaacttcctttctgctgatgattttgagccagcacttatcccatccaagaccattcctgaccctgatgacaagaagccggaggactgggatgagagagctaaaattcctgatccagatgcagtaaagcctgatgactgggatgaggatgccccgatggaaattgtggatgatgaagccaccaagcctgagggatggttggatgatgaacctgaggagattgatgatcctgaggcagccaagcttgaggactgggacgattgagaagatggtgaatggga

SEQ ID NO: 38663 - DNA, 291 bp, Zea mays
ggacgctggttgtaacttgctttttcctggatacggcacacaatatcgttgaatacatcgagatcacatcaaaagttctcaaggatggtggggtctggattaatttgggtccccttctgtatcactttgctgattcatatgggccagatgatgatatgtctattgaattaagtttggaagatgtgaaaaaggttgcttaccattatggatttacaatggaggtggagaaaatgatcgagactacttacactgcaaacatgaaagcaatgatgcagaatcggtaccgtgcag

SEQ ID NO: 38664 - DNA, 211 bp, Zea mays
gtccaagttcgtggttagtgattacgaccagcaagtcacaagtgagtgctggatatgttgaggttgaggaagagcagaggaatccattccaggagtgtttaatggcgggatgcaatgaagcgcacggttgggtcaccagggatgtctctggtcacctctctccttatcacttctcacggagggttcagatatacgtcgacgtcactatcaa

SEQ ID NO: 38665 - DNA, 297 bp, Zea mays
ggagatgatcatcccttggcagaccaatcttgggttctgcagataacgtcaagtcaatcaccaaagaggacctcgagaactacattgcaactcattatacagcttctagaatggttatcacagctgcaggcaatgttaaacatgaagacattgttgagcaggcaaagaagttgttcagcaagctatcaactgatcctacaacaacaaacatgttggcctctaagcagccagccacgttcacaggttctgaagctgcagactatgttagtggcatcgtttacgctcaatttgctgttg

SEQ ID NO: 38666 - DNA, 285 bp, Zea mays
cccacgcgtccgaacctccagctccccagcccccaggtggtcaagactcaagagacagagagagcatggccgctgctcccatggtggtgccgcgcgtgaagctgggctcccaggggctggaggtctcggcgcagggcctcggctgcatgggcatgtccgcctactacggccctcccaagccggagccggacatgatcgcgctcatccaccacgccgtcgccgctggtgtcacactcaactacagctccgacgtgtacggcccccacaccaacgagctcctcctcg

SEQ ID NO: 38667 - DNA, 257 bp, Zea mays
  unsure (1)..(257): unsure at all n locations
gaggaagaaaaaaaaaagatggtgaagctcgcatttggaagctttcgcgactctttgagcgccgcgtcgctcaaggcctatgtggccgagttcatcgccacgctgctcttcgtgttcgccggcgtcgggtccgccattgcctactcgcaattgacgaagggcggcgctctggaccccgccggcctggtggccatcgccatcgcccatgcgntcgcgctcttcgtcggcgtctccatggccgccaacatctccggcgg

SEQ ID NO: 38668 - DNA, 284 bp, Zea mays
gtgacattggaccccaccttactcttcatggtgtctccctggcacgtatcgactacgcgccattgggcgagaacccgccgcacacccacccacgtgccacggagatcctcacggttctcgaggggacactgtacgtcgggtttgtcacctccaacccaaacaagctatttgccaaggtgctcaacaagggcgatgtgttcgtgttcccccaaggtctcatccattttcaattcaacccggtctatgacaagccggccgttgctatcgcggctctcagcagccag

SEQ ID NO: 38669 - DNA, 293 bp, Zea mays
ggaggagaggggacggtccgcgaatcctgcctagccttcgccgccttcctccgctcgagcggctcgccgaggaaatagcgaaagggcgctatgagttcagcgaatggtacaaccaatgtccatgggaaagaagcagcaccgtatgaggagcagctgttcaagattggtaaagttagaactgacctaggacaactatctggaaaatcagctctatattgctcagatgcttcaattgcaaggtacctgatagcaaggaactgggacataaggaaggctactaaaatgctgaagaa

SEQ ID NO: 38670 - DNA, 288 bp, Zea mays
ggccgcttcgtgccgcgcgctgtgctcatggacctcgagcccggcaccatggacagcgtccgcaccgggccgtacggacagatcttccggcccgacaacttcgtcttcggccagtctggtgcagggaacaactgggccaagggccactacacagagggcgctgagctcatcgactctgtgcttgacgtcgtgaggaaagaggcggagaactgcgactgccttcaaggattccaagtttgccattcccttggaggaggcacaggatctggaatgggcacccttctcatc

SEQ ID NO: 38671 - DNA, 286 bp, Zea mays
cttgtgtctttggttggctattgcatttctggaggcaagaggttgcttgtctatgagttcgtccccaacaacacattggaattccacttacatgggaacgatcgaccaacaatggagtggcccactagattaaagatcgctctgggtgctgccaagggtttagcttatcttcatgaagactgccatccaaagatcatccaccgcgacattaaggcatctaacattcttcttgacttcaaatttgaagctatggttgcgactttggacttgcaaagttcactactga

SEQ ID NO: 38672 - DNA, 209 bp, Zea mays
acggacaccgcgtgcgaaccaagcagaccccagcagaagaagcgaagtcgtcgccggagcaggaggaagagcgagcagcaagatgtcgtggcaggcgtacgtcgatgaccacctgctgtgcgacatcgaaggccagcacctcagcgccgccgccatcgtcggccacgacggcagcgtctgggcacagtccgagaacttccccgagttaa

SEQ ID NO: 38673 - DNA, 283 bp, Zea mays
gaagcaagaaaactagaaaagcctcctcccgaccgcaacgcccctcatctccctcgaccccgacatccccgacccgatggcgcccaaggcggagaagaagccagcggagaagaagccggcggccgaggagaaggcggagaagacgaccgcacggtagaagcccaaggccgagaagcggctgcccgcgtccaagtcctccggcaaggagggcggcgagaagaaggggaagaagaaggccaagaagagcgtggagacctacaagatctacatcttcaaggtgctg

SEQ ID NO: 38674 - DNA, 283 bp, Zea mays
cacatctcctcgcatttcttcccatccgatccccccttcgcaaccaaaaccccaactcgccccgcatcgatggcgcccaaggccgagaagaaacccgcggcgaagaagccggcggaggaggagcccgcggccgagaaggcgcccgccgggaagaagccgaaggggtagaagcgggtccccgctggcaagtccgctgccaaggaaggcggcgagggcaagaggggcaagaagaagggcaagaagagcgtggagacctacaagatctacatcttcaaggtgctga

SEQ ID NO: 38675 - DNA, 271 bp, Zea mays
gttggcttctcctccccctccggttcgggttcgggttcgtgatgttctccggggttcggtttcgtgggtgagcggatcgagatggctgcgtcggatgttgagtaccgctgcttcgtcggctgcctcgcctgggccacggacgaccactccctctacaacgccttcagtacctacggcgaggtcctcgagtccaagatcatcctcgatcgggagacgcagaggtcccgctgcttcggcttcgtcatcttctccatggatgagttgatgctga

SEQ ID NO: 38676 - DNA, 282 bp, Zea mays
gaaggtgcttatggtggtcatccccctgcaggtcgtagctaacatcgcgcaggtggtgattgacgaatctggaccctatgcccgggactgggtcacctggaagcagattttcttgctggtcgatgtggtctgctgctgtgctgtgctcttcccgattgtgtggtccattaagaacctccgggaggctgctcgcttggacgggaaggctgcggtgaacctcatgaagctcaccctcttccgccagtactatgtggtggtcatctgctacatttacttcacgcg

SEQ ID NO: 38677 - DNA, 289 bp, Zea mays
cggacggtgggagcgatgaccaagtatacgaggaacaaaaaaagttcatcttctcacagtagttccagattcacaaagagtttccagaaaggagatgtcatttgcagtggagaaatacgcatggacaaatgcaacttgtccagtatgcatggaattcccacacagcgctgttcttctactctgttcgtcacatggcaatggctgccgtccatatatttgtgcgtccagctaccagcactcaaattgtcttgatcagcttgtaatgtcatgcagaaaagaagcctctgag

SEQ ID NO: 38678 - DNA, 199 bp, Zea mays
gtgggtgagcctgcccaagggcaagggaatcaagctgagcatcatagaagagcaaaggaagcgggatgccgctgcccaggctgctgccaacgcataaatcctctgaatgtgctgtgttgagagttttttctagttgctctgcaaggatatagaacaatgttctaagactaccatgtttttaagtctgcctgatgctaaa

SEQ ID NO: 38679 - DNA, 275 bp, Zea mays
attacatgagaggtgccatgaggatctcggccctgtctgaagccggagtcatctatgtcatgacccacgactctattggtctcggagaagatggcccgacccatcagcccatcgagcacctggtgagcttccgtgcgatgccgaacatactgatgctccgccctgctgatggcaacgagactgccggagcatacaaagtcgcggtcctcaacaggaagaggccgtccatcctcgctctctccaggcaaaagctccctcacctgcctggcacctcg

SEQ ID NO: 38680 - DNA, 270 bp, Zea mays
cagaagcccagcggctcagagtccagggggagggagctcgcggcggctgaggaaggcgttcaccaccgtcgcggatttcattgaggaagagatggggctctcctttgggaagctgttcagccgcctcttcgccaagaaggagatgaggattctcatggtcgggctcgatgccgccggtaagaccaccatcctctataagctcaagctcggcgagatcgtcaccaccatccccaccattggattcaatgttgaaactgttgagtacaagaa

SEQ ID NO: 38681 - DNA, 270 bp, Zea mays
ggacctgcgactcccagaagatcttcaggtgattctggctcctcgactcctggtcattcagatggtgattcttctaacagaacggtatatgttggtgggcttgaccccaatgtcagtgaagatgaactgagaaaagcctttgccaaatatgatcttgcctctgtgaaaattcctctaggaaagcaatgtggctttgttcaatttgttagcagaactgatgctgaagaagcactacaaggattaaatggatcactcattggaaagcaggca

SEQ ID NO: 38682 - DNA, 272 bp, Zea mays
cccacgcgtccgggatggcttcgagcgtttcgctcaaggtcacctgatcactcttttctcagcgacaaattactgcggaacggcaaacaacgcaggagcgatcttagttctcggaagggatctggtcgttgttccaaagctcatccatcctttgccgcctgccattacgtcacctgagacctcaccagagcaccacattgaggacacatggatgcaggagttgaatgccaatagaccgccaacaccaaccaggggccgccctcaagcgccca

SEQ ID NO: 38683 - DNA, 272 bp, Zea mays
gttctttgttatcaaatcatatagtgaggatgatgtgcacaagagtataaaatacaatgtgtgggctagcactcctaatggaaataagaagctggatgctgggtaccgagaggctcaggagaaatccagtgactgcccggtgttcttgtttttctctgtgaacacaagtggtcagtttgttggtgttgctgaaatggttggtcctgtcgactttgataagactgtggagtattggcaacaagacaagtggaatggttgttttccactcaagt

SEQ ID NO: 38684 - DNA, 254 bp, Zea mays
cggacgcgtggcggaccgtgggggacgtgaggcaagctctatatgcctccaagatctgcagttacgcgcaaggcatgaacagcatcaaggccaagagctcagagaaaggatggggcctcaaccttggtgagctagcgaggatctggaagggagggtgcatcatccgtgccatcttcctcgaccgcatcaagaaggcgtacgataggaaccctaaccttgccaacctcctcgttgaccccgagttcgcccaggag

SEQ ID NO: 38685 - DNA, 265 bp, Zea mays
gacgcaccaaccgaggccacaggccaccaccattccttccttgttcctaccccagctccgcaggctgctcatcgccctccctccgcgcccccgatccagatccagatccaggggcttgtcatggcatccaaacgtatcctcaaggaattaaaggacttgcaaaaggaccctccaacatcatgcagtgcaggtcctgctggtgaggatatgttccactggcaggcaaccatcatgggtcctcctgatagtccatatgctggaggtg

SEQ ID NO: 38686 - DNA, 267 bp, Zea mays
cggacgcgtgggtcggacgcgtggggtctgaggtggtggcgatggcggggcaggcctacatgaagcagctgcaggcccacccgctgacgcaccaaggctatcacctccggcgtcctggccggctgcagcgacgccgtcgctcagaagatctccggtgtttccaagctccaactcaggaggctcctcctcatcgcgctatatggatttgcatacgcgggaccgtttggacatttcctccacaagctcatggataggtttttcaaggga

SEQ ID NO: 38687 - DNA, 265 bp, Zea mays
cggacgcgtgggcggacgcgtggggccgtttttcctcgtcctcgatccagcccctgccgcttccagctccgaacgatctgatcccaccccaccaccacgcccatggcggaccaactcaccgacgaccagatcgccgagttcaaggaggccttcagcctcttcgacaaggacggggatggttgcatcacgaccaaggagctgggaactgtcatgcgttcactggggcaaaaccctacagaggctgagctccaggacataatcaatg

SEQ ID NO: 38688 - DNA, 264 bp, Zea mays
cgttttggtctcatggcctacgcttcatcgctggatgttgtgggatgctttggttcgtcggtttttgacactgcaaccatcttatctgttgttgctggccatgacaagatggacgcaaccagcagttcacaggttgttccagagtacgcatcggagttggtctccctagatttactagaatcgaaaccattaaatggtgtgagaattgggattatacaagaaactcttggagaaggtgttgccagtggagtcgtatcatcaatc

SEQ ID NO: 38689 - DNA, 267 bp, Zea mays
ggacgactccatcttccacaacgaggagaagctccgcgaggccctcaagttctccaacgcctgcggcgccatctgcaccaccaagaagggcgccatcccggcgctgcccacggtcgccaccgcccaggacctcatcgccaaggccaactagatggccgcatgccccgccgttccaccacgtcactgtcccccgccgccccgcccctcgtcgtcgacgtcctcggtttcggttcattaggtagatcgagtcttagcgtccgtctctgc

SEQ ID NO: 38690 - DNA, 224 bp, Zea mays
ggagaaacaggtgaaacaaatgttggggctcattggcgatggagagttctctacagaaaaagctgaggtgttctatgagaagcgacctttacttatttctcatgtggagaacttctatcgtatgtatcgtgctcttgctgcacgatatgacagtgtaactgaacaactggggcaaaacattcccatcatctcttccatccataatggcccattgggggcccctg

SEQ ID NO: 38691 - DNA, 259 bp, Zea mays
ggaccctgacagcaaggttgcttgcgagacctgcaccaagaccaacatggtcatggtctttggtgagatcaccaccaaggccaatgtcgactacgagaagattgtcagggagacatgccgcaacattggtttcgtgtcgaacgatgtcgggcttgacgctgaccactgcaaggtgcttgtgaacattgagcagcagtcccctgatattgctcagggtgtgcacggccacttcaccaagcgccccgaggagattggagct

SEQ ID NO: 38692 - DNA, 257 bp, Zea mays
aaatattccgcatatatcttaaaaagcttaagttggacaacaaaccatcattttattctcaaaggctagctgccttgacacctgggttcgcaggagctgacattgccaatgtttgtaatgaagctgctttaattgctgcgagaagtgaggaaactcagattaccatgcagcattttgagtccgcaattgataggattatcggtggtttggagaagaaaaatagggtcattagcaaactggagcgccgtactgttgct

SEQ ID NO: 38693 - DNA, 257 bp, Zea mays
ctccacctctcctccggctagggtgttcacgcctgccgcggcgaacttctgccctccccggcgtcgcgctctggtcgtcgtcggccgggaagatggctggcggcttcagggtacttcatctggtcaggccctttctggctttcttgccagaggtgcagagcgcggataggaagataccattcagagaaaaagttatctacactgttatttctctcttcatttttctggtgtgcagccagctcccactctatggcatt

SEQ ID NO: 38694 - DNA, 257 bp, Zea mays
cactcccccgcctacagaggaccaaccattctgttcttccaagaaaatgctggcaacatcgctcaccgtttggaatttgttcgactaatgatgcagcgtctacagtgcaatgcttttatgctttcttatagagggtatggtgagagtgatggttatccttctcagaaagggatcacatatgatgcacaggctgcacttgatcatctagctcagaggaaggacattgacacaaccaggatagttatctttggaagatc

SEQ ID NO: 38695 - DNA, 259 bp, Zea mays
aaccggataggtagcaccggagcaggtagaacgctgcacaatccccttcgccgccgccaagatggtgaacgttcctaagaccaagaagacgtactgcaagaacaaagagtgcaagaagcacacactccacaaggtgactcagtataagaagggcaaggatagcctgtctgcccagggaaagcgccgttatgaccgcaagcagtcaggatatggtggtcagaccaagcctgtcttccacaagaaggccaagaccaccaag

SEQ ID NO: 38696 - DNA, 259 bp, Zea mays
ggaggtcttcttcctgggacaactgaggcaccctcacctcgtgaagctgatcggctactgctacgaggacgagcacaggctgctcgtctacgagttcatgaccaggggcagcctggagaagcatctcttcaaaaagtacgcggcgtcgttgccttggtccacacggctgaagatcgccattggcgctgccaaagggttggccttcctccatgaagccgagaagccggtcatctaccgggacttcaagacctccaacatc

SEQ ID NO: 38697 - DNA, 270 bp, Zea mays
gcggcgccgagcaaccaacccctctcctcgtccgccgccgtctccccggaccatgtccatggccgcctcctcccggctgctctgggcgtcccgcgccgccgcctacctcaagatctccaccttccccagggccttctccaccgtgctgaaggatctgaagtatgctgacactcatgaatgggtgaaagttgagggtgattcagcaaccgtggggattactgaccatgcccaggatcatttgggtgatgttgtttgtgtggagctaccaaa

SEQ ID NO: 38698 - DNA, 296 bp, Zea mays
ctgaagacagctaaagcaatagctcttgagtgtggaatactcgatgactcagaggcatctgcacaagctataatagagggaagagttttccgtgcttacgatgatactgaaagggagaatgttgctgacaagatttctgtgatggcacgatcttctcctaatgacaaacttctcctagtaaaagctcttaagaaaataggccatgttgtagctgttactggtgatggaacgaatgatgctcctgcattgcatgaggcagatattggtctttctatgggcatccaaggaacagaagt

SEQ ID NO: 38699 - DNA, 290 bp, Zea mays
cggacgcgtggcggacgcgtgggcggacgcgtgggtttttttttttgccccacaaaaaagtaaaattaatatagtttaaactcttttagccactcattgagggactagagactaaatcagttcagtccatgttttagtcccaccatttggtaatttagagactaaatgagactaaaatagagggactaatctttagtccctcaaaccgaagagggccataatccgcattccgtgataaaagatgaccattaccagataaagcaaaacattaagtcttatgtttggactgc

SEQ ID NO: 38700 - DNA, 206 bp, Zea mays
ggggcggaagaagagagagaagacgtctctctcctctcggcgtccccgttccacaacctctcgtctgctgcctgcctgcctgcctgcctgcaaaaaggagtttgtcatggcgtctaagcgcatcctcaaggagctgaaggacctgcagaaagacccccccacatcatgcagtgcaggtcctgctggtgaggacatgtttcattggc

SEQ ID NO: 38701 - DNA, 286 bp, Zea mays
atgacttcttcgatgttggtggatcaaaagaagaacaagaaaatctcatcgaattagttgagaactgggatgagcaccacaaagttgagttctgttcggagaaagtagaaatagttttctatgctgtctataatacagtgaaccagcttggatctatggcttctgcagtacagaagcgcgatgtgacaaaacacctcgctgaatcatggctaaaagtattgctgtgcatgctgacggaggcagactggcaaaggaggcaatttgtaccaacagttgaggaatacat

SEQ ID NO: 38702 - DNA, 289 bp, Zea mays
cggacgcgtggcgcgagcggccgctcggatctagaactagctggaagcctcaggagatacccaacccggagtactttgagcttgacaggcctgattttgatccaattgctgctattgggattgagatctggacaatgcaggatggcatcctgttcgacaatatcttgattactgatgatgagaaagttgccacctccattctcgagaagacctggaagcccaagtatgatgttgagaaggaaaaggagaaggctgaggaggctgctgctggtgcagatggtctttctga

SEQ ID NO: 38703 - DNA, 290 bp, Zea mays
cccgagggctctccggaggctgaggacctcttgtgagagggccaagagaactctgtcttccactgcccagaccaccattgagattgactcgctgtacgagggcattgacttctactccaccatcacccgtgccaggtttgaggagctcaacatggacctgttcaggaagtgcatggagcctgttgagaagtgcctgagggatgccaagatggacaagagcagcgtccatgatgttgtccttgttggtggctccactaggatccccagggtgcagcagctgctccaggact

SEQ ID NO: 38704 - DNA, 137 bp, Zea mays
ctctgctctcccccacctcccggtccggcagcagagagcgggggtgcagagagatcgagatccggaggccgcgagtgggagcgccaccaccagcgactgcggcaatggcgggcacggtgacggtcccggggtcgtcg

SEQ ID NO: 38705 - DNA, 282 bp, Zea mays
gatccaactcctgagcactttctcctcgtccccgacaagccaatcgaagccgagatacggccatggactccaccggcaccggagcagggggtaaggggaagaagggagcggccgggcgcaaggtcggcgggccaaggaagaagtcggtgtcgaggtccgtgaaggccgggctccagttccccgtcggccgcatcgggcgctacttgaagaagggccgctacgcgcacgtgtctggcaccggcgcccccgtctacctcgccgctgtcctcgaatacctcgccg

SEQ ID NO: 38706 - DNA, 280 bp, Zea mays
cggacgcgtgggcaagttcaagcggaagattaagtcatggatgcgtggtgctcttctgggaagcggctcatatgggatggtgtacgaggggatcagtgatgagggtgcttttttcgctgtgaaggaagtatctttgcttgaccaaggaagcaacgcacaacaatctattgttgcacttgagcaggaaattgcactcctcggtcagtttgaacatgaaaatatagtccagtattatggaactgacaaggaagaatccaaactctatatttttattgagctt

SEQ ID NO: 38707 - DNA, 283 bp, Zea mays
atcacaacgaacagaagctctcgatctcaccgacaccgaggaagaagagatcaatggcgtccgagcagggagtcgtgatcgcgtgccacagcaaggctgagttcgacgcccacatgaccaaggcccaggaagccggcaagctggtggtcatcgacttcactgccgcctggtgcggtccatgccgcgccatcgccccactgttcgtcgaacacgccaagaagttcactcaggtcgtcttcctgaaggtggacgtggacgaagtgaaggaagtcaccgcggccta

SEQ ID NO: 38708 - DNA, 280 bp, Zea mays
aacaggggcatctcctggtgaaggcactggagcgaccatgtctgatgatgaagacaaccaggtggatagcgaaccaacatgtttgatggaaatgatggatcagatggtatgggctttggccccttaatgctgacagagggtgaacgatccttagttgagcgtgtacggcaggagctgaagaacgagcttaagcagggttacaaagaaaagcttgttgatatcagggaagagattatgcgcaacgcagagctgggaaacttcctggagatactgcatctgt

SEQ ID NO: 38709 - DNA, 280 bp, Zea mays
cccacgcgtccgattttgtgctagaagggaatgcccttaaagccatagagctgacagaagaaatggcacctaacttgctagagaatgatatggatctacattttgatcttcttagtctccacttcattgagctagttcgctccaaaaaattcacagaagctcttgactttggccagaaaaaattgacatcatttcagaaggttaccaagtatattgagaaactagaggactttatggccctcctggcttatgaagagccggagaagtcacctatgtttca

SEQ ID NO: 38710 - DNA, 280 bp, Zea mays
ctgcgacatggcgcacatcagcgggctcgtcgccgcgcaggaagctgcaaatccttttgaatattgtgatgtggttaccacaaccacgcacaagtccctcagagggccaagggctggcatgatcttctacaggaaaggccctaagccccccaagaagggccagcctgagggtgctgtttatgattacgaagacaagatcaactttgcagtgttcccatctctccaaggtggccctcacaaccaccagattgctgcacttgctgttgctctacagcaaact

SEQ ID NO: 38711 - DNA, 277 bp, Zea mays
cggccatcctgtcggggctgcgccaccccaacctcgtcatgttctacggctgcacgtccagccacagccgcgagctccttctggtgtacgagttcgtggccaacggcacggtcgccgaccacctgcacgggcagcgggcccccgagcgcgccctctcgtggccgctccgcctcagcgtcgccgtggagtccgccgcggcgctcacctacctgcacgccatcgagccgcccgtcgtgcaccgcgacgtcaagaccaccaacatcctcctggacgccga

SEQ ID NO: 38712 - DNA, 280 bp, Zea mays
tggaatacaagataaagagtatcccaggaaggccaccacatcttatggagttcaaggtgagaaggacccaagggaagctaccatctcatatgggtcccaggatgatgaggattctagaaaagtcaacatgtcatatgggtctaatggtgaggacgacccaagaaaggccaccacatcatatgggtcccatggtgagtatgaatcaaataaggccacaatgtcatatgggttccaaggcatggaagatttaaggaaggccaccacatcatatggaatacag

SEQ ID NO: 38713 - DNA, 282 bp, Zea mays
ccccttcgttaacttgaaggggttgctagccttgctgtgccagatgtatggcaggccagtcttgactcccaggctcaggtggtcgcagatgaccttcgttaacttgaagaaggaatacaagggcatcttctggcaggaggacatcatccccttcttccagaacgtgaccatccccaaggactgcgacaccgtccaaaagtgctacatctacctctctggacaagtgaaggagaagctgggcacgattgacccctacttggtcaagctcggtgacgccatggt

SEQ ID NO: 38714 - DNA, 277 bp, Zea mays
cggagcagctcatccgcaagctgcccttccagcgcctcgtccgtgagatcgcgcaggatttcaagaccgacctccgcttccagtcctccgctgtcgccgcgctgcaggaggccgccgaggcctacctcgtggggctcttcgaggacaccaacctctgcgccatccacgccaagcgcgtcaccatcatgcccaaggacatccagctcgcgcgccgcatcaggggcgagagggcttgatctcccgttgtcgtcgtccacgttgttgggcctttcctctg

SEQ ID NO: 38715 - DNA, 270 bp, Zea mays
ctagttggaatgttggtgaaacaccaaatattctagtaccaatcgctaatgggacagaggagatggaagcaactatgataattgacattttgcgtagggcgaaagcaaatgttgtggttgcctccttggaagacaagctagagattgttgcatccaggaaggtgaagatgattgctgatgtgctgttggatgatgctcttaaggagcaatatgatctcattctgttacctggaggtctgggtggtgcagaagcatatgcaaaatctgata

SEQ ID NO: 38716 - DNA, 270 bp, Zea mays
gcaagatccgacactctttcaaggaaccataagatataatctagaccctcttgggcaattctctgatcaacaaatatgggaggttctaggcaaatgtcagcttcttgaagctgtccaggagaaggagcagggattggactcacttgttgtggaagatggttcgaactggagcatgggtcaaaggcagctcttttgtttgggacgtgcacttctaagaagatgccgtatcttagttcttgatgaagccacggcatctatagacaacgctac

SEQ ID NO: 38717 - DNA, 269 bp, Zea mays
ggaggagcagccatggcttcatcggtggccgccgcggcgagcacattcctgggcacccgcctggcggacccggcgccacagaacgggcgcatcgtggcccggttcgggttcgggttgggcggcaaggcgaagctgctccgaagaaggtggcgaagacatcgacctcctctgaccggccgctgtggttccccggcgccgtggcgcccgactacctggacggctcgctggtcggcgactacgggttcgacccgttcggtctcgggaagccc

SEQ ID NO: 38718 - DNA, 266 bp, Zea mays
aaacaactccaaaggtccaaagccaacccgtactaatccgtgatccccaaccatggccgtcggcgacgtggagacggcggcgccgctgctgcccccgccggcgtctgccctggcggacgagccctccgcgggcccgcctccagacgaccggctcggcatcggctacctcatcttcttcaccctgggcgccggcttcctgctcccctggaacgcgttcatcaccgccgtcgactacttcgacttcctctacccgggggcccccgtcg

SEQ ID NO: 38719 - DNA, 263 bp, Zea mays
gaatgggcaccgcatcaccggactccggcgaccttatcgaggtggggccggcgaggccgggatctccggtagccgtggtgaccatcaaccggccttcggcgctcaacgcgctgacgaagcccatgatgatctccatggcggctgcgttccggcggctgggtgccgacgacgccgtggcagcggtggtgctcgcgggccgcggtcgcgcgttctgctccggggtggaccttactgcggcggcggatgtgttcaagggcgatgtg

SEQ ID NO: 38720 - DNA, 263 bp, Zea mays
cgactggggcgaggcgggcggccccgacctcatcgtcgacgacggcggcgacgcacgctgctcatccacgagggtgtcaaggccgaggaggattacgagaagaccggcaagatccccgacccggagtccaccgacaacgctgagttcaagatcgtgctcaccatcatccgcgacgggctcaaggctgaccccaagaagtaccgcaagatgaaggagaggcttgtcggcgtctctgaggagaccaccacgggtgtcaagaggct

SEQ ID NO: 38721 - DNA, 246 bp, Zea mays
gtcgacgacggcggcgacgcacgctgctcatccacgagggtgtcaaggccgaggaggagtacgagaagaccggcaagatccccgacccggagtccaccgacaacgctgagttcaagatcgtgctcaccatcatccgcgacgggctcaaggctgaccccaagaagtaccgcaagatgaaggagaggcctgtcggcgtctctgaggagaccaccacgggtgtcaagaggctctaccagatgcaggaga

SEQ ID NO: 38722 - DNA, 261 bp, Zea mays
ggttcagggtctggtttaggatcaagtacatatggtcaaggaggttattattcgggatatggaagatcttctaatgctgggggtactggtggaggtggcggtggaggacaagccggaggttatgaaaattccaatgctcaaggatctggtagtggcaccggttctggctctagctttgctagcaaatattgggatggatcaagtgaagtaggtgcaaatgctaatggcaatggtggtggaacaggaaatagtcaaaacggt

SEQ ID NO: 38723 - DNA, 262 bp, Zea mays
gtgtccaggaggaaagaagtgcagccatttcactagctgacaagatgattgagtctttaaaatttcaggctgttctggttcgcatttatgaaggaaaggaacccactgaatttttcccaatatttcaaaacttggttatatacaagggagggacaagtactgggtataagaaatttgtctcagaaaatggcattgaagatgatacttattcagaaaatggggttgcactttttcgagttcagggctcagggccagagaatat

SEQ ID NO: 38724 - DNA, 263 bp, Zea mays
  unsure (1)..(263): unsure at all n locations
cggacgcgtggngcggacgcgtgggcggtcaatcagtaatcaccccaaatcctagggttctagtcgcttctcgtcgtttcgttcgtagatcacagcgacaatggtgaaggcagttgctgtcctcgccggcactgatgtcaagggcaccatcttcttttcacaggagggggatggtccgaccaccgtgactggaagtatctctggcctcaagccagggctccatgggttccatgtgcacgcgcttggcgacaccaccaacggct

SEQ ID NO: 38725 - DNA, 261 bp, Zea mays
caaaaaaaaactgctcggttgctgctcctgctccgccgcgccggcatcatgtgtggcatcttagccgtgctcggttgctccgactggtctcaggcaaagagggctcgcatcctcgcctgctccagaaggttgaagcacaggggccccgactggtcgggcctctaccagcacgagggcaacttcctggcgcacagcggctcgccgtcgtctccccgctgtccggcgaccagccgctgttcaacgaggaccgcaccgtcgtgg

SEQ ID NO: 38726 - DNA, 259 bp, Zea mays
cccacgcgtccggcgctcaggagcattcgagaagccgaagaaaattcgaagacgaggagcagctacactgcggacggacttcgggcatggagggccagttccaggttggcaaggaggaggtcatccaagcatggtacatggacgacagtgaagaggaccagaggcttcctcatcatcgcgagcccaaagaattcatccctctcgacaaactttccgaactaggaatattaagctggcgcctaaatgctgatgattggga

SEQ ID NO: 38727 - DNA, 260 bp, Zea mays
aagagcttacgctgctggggttatgggcgagcccgttcgtgctccgggcgcgcatcgcgctcagcctcaaaggcctcacctacgcttactccgaggagaacctcgacgacaagagcgagtttctcctcagctccaaccccgtgctcaagaaggtgcccgtgctcatccaccacggcaagcccgtctgcgagtcccagatcatcgtgcagtacgtcgacgaggctttccccgccgccgcacctaatttccttccatccgac

SEQ ID NO: 38728 - DNA, 257 bp, Zea mays
cggacggtgggcccttgccaaggctttggcaggccaaaaggatgaggtctactttgcagccaatgctgctgctacggcctcaaggagatcatcgcccagggtgacaaacgaggaggtccagaaggctgcagctgctttgaggggatctgaccaccgccgttctaccactgtttctgctagattggatgctcagcagaaaaagctcaaccttcctgtccttcccacaaccacaattggttcattccctcagactgtgg

SEQ ID NO: 38729 - DNA, 257 bp, Zea mays
cccacgcgtccgaaactgttctatttgttggggatttgtcgtatgctgatagatatgaacataatgatggcattcgttgggattcctggggtcgattcgttgagcacagtactgcataccagccatggatttggaatactggaaaccatgaaatagagtacaggcctgatctgggagaaacttctgtattcaagccatatttgcataggtacatgactccatatttagcatcaaagagcagttctcctatgtggtat

SEQ ID NO: 38730 - DNA, 299 bp, Zea mays
gtgggccacccgtcttgttgaggcccctaagaccgacctggacttctggaaagttcttttcccggttgctgtggcgcatacaattggccatgttgctgctacagtgagcatgtctaaggtggcagtgtcattcacacacataattaaaagcgcagaacctgcattcagtgttttggtgtcaaggttcttccttggggagacgtttccaattccagtatatctttctcttcttccaatcattggtggttgtgctctatctgctgtcacagagctgaactttaatatggttggatttatgg

SEQ ID NO: 38731 - DNA, 294 bp, Zea mays
gcgtcgcatccgctccacaggatcctctgcgccaccgcaaccgtgtgaccgcccgtgccgccggcgatcccgatccgccgacccgtcccagccccgctcgcagccatgtcgccgtcggagccgacgcgggaggagagcgtgtacatggccaagcttgcggagcaggcggagcggtacgaggagatggtcgagttcatggagcgcgtcgcgcgctacgccgggagcgccggcggcggggacgagctctcggtggaggagcgcaacctgctgtccgtcgcctacaagaacgtcatc

SEQ ID NO: 38732 - DNA, 289 bp, Zea mays
ggttttgctgctctccgaccccgagctccgaacgccgcagcatcaggcgcggcccccctcgcgtgtgaccgagatggcgctgccgaatcaggggaccgttgattaccccagcttcaagctcgtcatcgtcggcgatggtggaactggtaaaactacatttgtgaagaggcatctcactggagagtttgagaagaaatatgaaccaaccattggtgtggaagttcatccgttggatttcaccactaactgtggtaagatcaggttctactgctgggataccgcaggcaag

SEQ ID NO: 38733 - DNA, 149 bp, Zea mays
cggacggtgggacggacgcgtgggcggacgcgttggtggcttctcctccccctccggttctggttcgggtacgttaggttctacggtgttcggtatcgtgggtgggcggatctagatggcggcgtctgatgttgagtaccgctgcttcg

SEQ ID NO: 38734 - DNA, 287 bp, Zea mays
atgtgctactccaacttcaacgacatcatccactccatcatcgacatggatgccgatgtgatcacgatcgagaactcccgatctgacgagaagctactgtccgtcttccgtgagggtgtgaagtacggagctggcattggccctggtgtctacgacatccactctcctaggattccctccaccgaggagatcgcagaccgcgtcgagaagatgctcgccgtgctggacaccaacatcctctgggtgaaccctgactgtggtctcaagacacgcaagtacacggaggt

SEQ ID NO: 38735 - DNA, 285 bp, Zea mays
aacacccttctctggtcgtcgcatcgcagggcagctagctaggtagctaacatccgccatggcgcgcgggggagacggcctgcaggtgctgagcgcgctggacgcggcgaagacgcagtaggtaccacttcacggccatcatcgtcgccggcatgggcttcttcacggacgcctacgacctcttctgcatctccctcgtcaccaagctgctgggccgcatctactacacggacaccagcaaggacagccccgggtcgctgccgcccaacgtcgcggcggcggtca

SEQ ID NO: 38736 - DNA, 219 bp, Zea mays
gcccgtcgccaccaccgagaacggcgccgcgaaggcgatagagcagcggcccgtgcaggtcgcagagcggctggaaaagttcaagacaacaattttcactcagatgagcatgcttgccatcaagcatggagcaataaaccttggccagggctttccgaattttgatggcccagactttgtgaaagaggccgcaattcaagctatcaatgctgggaagaa

SEQ ID NO: 38737 - DNA, 288 bp, Zea mays
gagctgcagcagcatcagctgccacctcctgcctctcctccttccttcctgcctgcataggttgttgctacacgtatatattctgaagaagagatcgagatgaccagcgtgtggaagaccaaggttctgcctggcctcaacaagatctttgacaaggatggcaagaaggctgcagctgcaggcttcttgaagtccttcaacaaggaggagattgacaaggagattgaggacaagaagacagagctggagcccaaggtcgtggaggcctacgaagcatctcctcctgag

SEQ ID NO: 38738 - DNA, 292 bp, Zea mays
  unsure (1)..(292): unsure at all n locations
ggacagtgcagtgctccccgaggtccccaaaagacaagcaggcaagcagcaaagacacgcctccctgcttgcactccccacacgcccagtcgcccacacctccaacagacaaagacaatctagcaagcacacacagcatcnnnnnnnnnnnnnnnnnnnnnnncagaagcaaagaatggggagagctccgtgctgcgagaagatggggctcaagagggggccatggacgccggaggaggacaagatcctggtcgcgcacatccagagcttcggccacagcaactggcgcgcg

SEQ ID NO: 38739 - DNA, 292 bp, Zea mays
cgcgcgagatcgccgccccgggtgggctctagatcccgatggcctcgcgccgccgcaccctgctcaaggtcatcatcctcggcgacagcggggttgggaagacgtctttgatgaaccaatatgtgaacaagaagttcagcaaccagtacaaggctacgattggggcggatttcctcaccaaggaggtgcagttcgaggacaggctcttcactctgcaaatatgggacactgctggtcaggaaaggtttcagagtcttggcgttgcattctaccggggagcagattgttgtgt

SEQ ID NO: 38740 - DNA, 290 bp, Zea mays
  unsure (1)..(290): unsure at all n locations
gtttgaggaaccactccatccaaaataagatgatgcatcatgagttcaatcctcaaatttggtggatgacctcatttctcatattagtaactaactaactatgaggaatgaggtggtgatggatctactcatttcattccacaaaccaaacaaagaagtaaggagtgagaagattatggactagctcatttctcaaaccaaacactccataaatgaatcatattggtgtattgcatatgctgtttagaggtatgcttcgtcttggattcaccanatgaaataaattggct

SEQ ID NO: 38741 - DNA, 280 bp, Zea mays
ccaccaccgcttcccgtgcagcgccctccctatacgttcccccatttcctgtgttggcggcgatggcgcggcacttcgtgctcaacaccggcgccaagatcccctccgtggggctcggcacctggcagtctgaccccggcgtcgttggcaacgctgtctacgccgccgtcaaggcgggttaccgacatatcgattgtgccagagtttacggcaacgaaaaggagattggtttggcgctgaagaagctatttgaagagggtgtagtgaagcgagaagatat

SEQ ID NO: 38742 - DNA, 281 bp, Zea mays
cggacgcgtgggcccgagaccaagaacgtgcccatcgaggagatggtgcttgtctggaagtcacactggttcatggaaaaggttcatcgccgacgaggacgtgcacgtcggcattggcaacaaccacccggccaaaaacggcagcgacaccaagggggccgacgcgtgaacgtgatctcaacatctatattccatctacagtcacaactgaaatgtacatttaggcttccattgttccatcaactagtagctacatgtcctcctagtaaagtaccagtgtt

SEQ ID NO: 38743 - DNA, 281 bp, Zea mays
ctacaagccattcgagcatgtctggctggagcgcaagtagacggcacccgacgtgttcacccgctggaaaacctgcctgttgaacagttcgttgacagaaatgttcctgacagagaaccagtgaagccagctgatttagaggatacaccatttacgctggttcaagatcacaaaggcttaacagaattagctaagaagttgaagagcgtaactgaatttgctgtagatctggagcataatcaatataggtcatttcagggcttgacctgcttgatgcagat

SEQ ID NO: 38744 - DNA, 284 bp, Zea mays
cccagcacccggagctcgaccgaacgccgctcaccatgatcatccccaagaagaaccgcaatgagatctgcaagtacctcttcaaggagggcgtgctgtatgccaagaaggactacaacctggcgaacacccgcagatcgatgtgcccaacctccaggtgatcaagctcatgcagagctttaagtccaaggagtatgttagggagaccttctcctggcagtactactactggtatctcaccaacgatggcattgagcacctacgcaactacctgaacctcccgt

SEQ ID NO: 38745 - DNA, 281 bp, Zea mays
aaacaaacacgcgtccgcggacggtgggcggaccgtggcggacgcgtgggcggacgcgtggggcactacggaccttgcgggagctgaaactccttcaccatctccggcatgagaatgtcaacgctttgaaggatataatgatgccaatacacaggagaagctttaaggatgtgtacttggtatacgaactcatggatactgatttgcaccagataatcaaatcacctcagggcctttccaatgaccactgccagtattttctttttcagttgctccgagga

SEQ ID NO: 38746 - DNA, 279 bp, Zea mays
cggacgcgtggggttggaactgctgaccgtcatcttgttgtcttcaatttgcagaatcctcagacggagttcacgcgaatccaatcaccactaaaataccagacacggtgccttgctgcattccctgatcaacaagggtttttggttggttcaatagaaggaagagttggcgttcatcatatcgatgacgcacagcaaagcaaaaacttcacattcaaatgccacagggaaggaaatgatatattctctgtcaattcactcaacttccaccctgtccat

SEQ ID NO: 38747 - DNA, 276 bp, Zea mays
agtctctcggccaggtctccctctccccggctctccgccttcctcttccagtccccgcgcgcgagatcgccgccccgtgtgggccctagatcccgatggcctcgcgccgccgcaccctgctcaaggtcatcatcctcggcgatagtggggttgggaaaacttccttgatgaaccaatatgtgaacaagaagttcagcaatcagtacaaggctacgatcggcgcggatttcctcaccaaggaggtgcagttcgaggacaggctcttcactctgcaaa

SEQ ID NO: 38748 - DNA, 276 bp, Zea mays
cccatccgcacctctctccatctccctgctcctccgccttcttcttgatccagccaagccagggatcgccatgtcggactcggaggagcaccacttcgaatcgaaggccgacgccggagcgtccaagacctacccgcagcaggctggcaccgtccgtaagaacggcttcatcgtcatcaagaaccgcccctgcaacgttgtggaggtttctacctcaaagactggtaagcatggtcatgccaaatgccactttgttgccatagatatattcaacgg

SEQ ID NO: 38749 - DNA, 259 bp, Zea mays
ccagtcgatatcacgagtcattgttgacaagagtgcccttctgtttacgacagtcgggaatgatttgacgtttcaaccgaatcctaattctgtgtatcaaactgagcacctctcatacttcaaatttgttggacgagtggttggcaaagctctcttcgatggtcagcttttagatgcccacttcactagatctttctacaaacacatacttggtgtcaaggttacataccatgacattgaagccatcgatccttcgtac

SEQ ID NO: 38750 - DNA, 273 bp, Zea mays
ctttgcgatgacagcaccagcggacaaggggaagaaggccaagactgatgccgacggcggcgaggagaacgaacagatcgacggcgtcctcgtcctctccatcgagaagctccaggagatacaggacgagctcgagaaggtaaatgaggaagcaagtgacaaggttatggaggtggagcagaaatacagtgagatccgcagacctgtctatctcaagaggggtgacattatcaagaccatcccggacttttggctcacagcgtttatgagcca

SEQ ID NO: 38751 - DNA, 284 bp, Zea mays
gagaatgccaatgtcatcatggcaacatatgaagataagctccttggtgatgtccaagtatacccagagaaggggacagttgctttttctgctggtctgcacggatgggccttcaccctcactaacttcgcaaagatgtatgcatctaagtttggagttgatgaaactaagatgatggagaggctatggggtgagaacttctttgaccctgccacaaagaagtggaccaccaagaacacaggttctcctacctgcaagagaggatttgttcagttctgctatga

SEQ ID NO: 38752 - DNA, 284 bp, Zea mays
ctcagcctcccctcctctccggtgtacgtctccgccgagatggccgccccgctccggcggacctcccctcccttggtcgcgcgcttctcacgccggcctctgatgccctcgttgagatcaagcccggggagatcgggatggtctccggcatccctgaggagcatctccgccgtaaggttctaatttattcaccagctaggactgcatcccagcaaggttcaggcaaagtcgggaggtggaaaattaattttttgtcaacccaaaagtgggagaacccgttgatg

SEQ ID NO: 38753 - DNA, 195 bp, Zea mays
gtcgcccgccgaagcctccacggtggcaacttccagggcactcccgtcggggtgtccatggacaatactcgtctggccgtcgctgccatcggcaagctcatgttcgcgcagttctccgagcttgtcagtagcttctacagcaatggccttccctccaacctgtccggcgggcgcaacccgagcttggactacggt

SEQ ID NO: 38754 - DNA, 198 bp, Zea mays
aattcatcatttctgctttttacggacatgtggtggagttttccatgcatccctatggttgccgtgttattcagagggtattggagcattgtgatgatgaaagcacacaaaatgccatgatggaagagatcatgcagtccgtggttactttaacagaggaccagtatggtaattatgtaatccagcatgtcctgcagc

SEQ ID NO: 38755 - DNA, 277 bp, Zea mays
ggatgatgctgttgtggctgaggtcccggtgaccgaggtgccatcggatgtcccggcggcccatgtggccgaggcgcccaaggcgaagaaggcgcccaaggagaataaggcgcctaaggagaagaagctttccgcggcgaagaagccggcggcgcaccctccctacgcttagatgattgtagaggctatcgctgccctcaaggagaggaaggggtcgagctcggtggccatcagcaagtacgtcgaggggaagcatggcggcaagctccccaccaac

SEQ ID NO: 38756 - DNA, 274 bp, Zea mays
gtcgatttcctcaagaaccccgacaagtacaccgcgctcggagccaagatccccaagggttgtctcctcgtcggcccgcctgggaccgggaagaccctcctcgcgcgtgccgtcgccggggaggccggggttcccttcttctcctgcgctgcctctgaattcgtcgagctcttcgtcggtgtcggtgcctccagggtgcgcgacctcttcgagaaggccaaggccaaggcgccctgcattgtcttcattgatgagattgatgccgttggaaggc

SEQ ID NO: 38757 - DNA, 272 bp, Zea mays
caagggtgatggccttggcgctgagattgttggcaccttcatcctagtctacaccgtcttctcagccaccgatgccaagaggaatgccagggactcccatgttcctatccttgccccactgccaattgggttcgcggtgttcctggtccaccttgccaccatccccattactggcactggcatcaacccagctaggagccttggcgctgccatcatctacaacagggatcacgcctggaacgaccattggatcttctgggtcggccccttca

SEQ ID NO: 38758 - DNA, 275 bp, Zea mays
cccacgcgtccgcccacgcgtccggaaatatgatggaatttcactcccattcaggctcaatcagcagcagttgcagagatctggctctgggaggttggaacatggaaagctgttgcccgcttgcaatctcacagtctaacagtgacacaaatggagttctctcgtaataatgcgtttcttttaagtgtttcgcgggatcgccatttgtctatcttttcaatcaggaaaactgaaggaggagcagagcatcgtctggttgcgaacgtcgaagcaca

SEQ ID NO: 38759 - DNA, 225 bp, Zea mays
ctcctctccgccgcccgccgcagcagcacccaccgggcaagatgaagacgatcctggcgtcggagacgatggacatcccggagggcgtcatggtcacggtggccgccaagctggtcacggtggagggcccccgcggcaagctcacccgcaacttcaagcacctcaacctcgacttccagctgcaggaggccggccgcaagctcaaggtggacgcctggttcggca

SEQ ID NO: 38760 - DNA, 270 bp, Zea mays
cggacgcgtgggtgccgcctcaccgcctctctcaatctgataccgcagatccgtcgtccggtgagtggaagccgcacgaacccatggcctccggcgagcttgcctgcacctacgccgctctcatcctcagcgacgatggcatcgccatcaccgccgagaagatcgccacgatcgtgaaggcggccaacatcaaggtcgagtcctactggccggccctcttcgccaagctcctggagaagcgcaacgtcgaggacctcatcctctccgttg

SEQ ID NO: 38761 - DNA, 268 bp, Zea mays
atttcagtgggggtcaatggaattcgggcggcagttgtgacagggaaacagagccaataacggatgaccagtacctcacgccatacccaacaaagatgagcattttggaggaggtgctccgggggatgaaaactcccgttgtgtacctgaacataacaaggatgactgactacaggaaggaggcccacccttcagtctaccgcaagcagaagttgaccgaagaggagaggaaatcgcctgagctataccaggactgcagccactggtg

SEQ ID NO: 38762 - DNA, 270 bp, Zea mays
  unsure (1)..(270): unsure at all n locations
cggacgcgtgggctcattcggcgccgcggcaccccctgctcgtcactcgcgatggcccggatcaaggtgcacgagctgcgcggaaagagcaagacggatctgcaagcgcacntcaaggagcttaaatcggagctctccctcctacgcgtcgccaaggtcaccggcggggctcccaacaagctctccaaaatcaagattgtgcgcacctccatcgctcgcgtgctcaccgttatctcgcagaagcagaagtcggcgctgcgtgaggcgtac

SEQ ID NO: 38763 - DNA, 270 bp, Zea mays
cccacgcgtccgcccacgcgtccgggtgaattctgctgccaaccacttgaaggttggagacttcggccttagcaagatcatcaaagcgcacatgcgaatgatgtatacaagatgactggagagacaggaagctatcggtacatggcccctgaagttttcaagcaccggaaatatgacaagaaagttgatatcttctcttttgccatgattctatatgagatgctggaaggtgattcacccttctccaactacgaaccttatgaggctgct

SEQ ID NO: 38764 - DNA, 271 bp, Zea mays
cccacgcgtccgcccacgcgtccgcggacgcgtggggtctcgctgggcctggccgctggcggcaagggagagatggggaagaaccaggcgtataaggcgatgcagcgggcgaggctggggacctcgtccggcgcacctggcgccgccgacgcccccgaagacggcatgacggacggttcatttcattctccagagtggcatgcggcgcgcctggccagccttaacaagacgcacaccgtcacctgggaggagtcaaaaagaagcagaagga

SEQ ID NO: 38765 - DNA, 273 bp, Zea mays
gataagctatagccatcttcttctcttctctgaattccagtccaagggccggaataccgtcagagcagagggagtgggaggaagaaaaaaaaaagatggtgaagctcgcatttggaagctttcgcgactctttgagcgccgcgtcgctcaaggcctatgtggccgagttcatcgccacgctgctcttcgtgttcgccggcgtcgggtccgccattgcctactcgcaattgacgaagggcggcgctctggaccccgccggcctggtggccatcg

SEQ ID NO: 38766 - DNA, 196 bp, Zea mays
caagaccttccctgatgatccaagccgaacgtatgtcataattttagcaattctttcaagtactgaaccatccacactgacagttaccatctcctctggaactggacaatcagctttgctcctatgaagagttgttggaatatcattggttactccctcctccatgttgtaaataaatgacatccggccaggaaga

SEQ ID NO: 38767 - DNA, 276 bp, Zea mays
ggtttccaaagccaagtgtgtgtactagcaaccagctagctcgggcggcagcaggcagccatcatgtcggaggagaagcaccaccacttcttcaaccaccacaagaaggacgaggagcagcccgccggcgagtacgggtactccgagaccgaggtggtcaccgccaccggcgagggcgagtacgagaggtacaagaaggaggagaaggatcacaagcacaagcagcacctcggcgaggcctgcgccatctccgccggcgccttcgcactctacgag

SEQ ID NO: 38768 - DNA, 273 bp, Zea mays
gaaggccatcacggggagcttcatcggcagcatcgacgagaccgctgaggtgcttcagttctgcgtcgacaaggggctcacctcccagatcgaggtggtcaagatggggtacgtgaacgaggcgctggagcggctggagcgcaacgacgtccgctaccgcttcgtcgtcgacgtcgccggtagcaacgtcgaggcggaggcggcggcggcggatgcggccagcaactgatggcaccgcgtcgtcgagtcgaaccacgtctgtgcgccgcgtgc

SEQ ID NO: 38769 - DNA, 272 bp, Zea mays
gagctctttcccttcctcgcttggaaccaaatcaaatcggagcggcggacaatacgatccctcgcctcgcttccattcgaatcatctcgaacggggcactaatcgggaagctaatgtcgcgcaattcgcgagatctgtagcgccactcggcttcaccggcggcgcggcgggcatggaagcgcagaacggctccggcgtaggggcgcccgtggtgctcaacgtgtacgaccttacgcccatgaacaactacctctactggttcggcctcggta

SEQ ID NO: 38770 - DNA, 274 bp, Zea mays
cccacgcgtccgcgttgggcctcgcttccgatgcgccggagctcgcacgcgatgggagcgcaacagattcggcagctgctgcttctgctgctcgcagcggcggcggcggaggcgcgcttcgttgtggagaagaacagcctgatggtgacgtcgccgacttcgttgcggggacgacacgacagcgctatagggaacttcggaatcccacagtacggcgggagcatggcgggcgccgtcgtctaccctaaggacaacgccaaggcttgcgacgatt

SEQ ID NO: 38771 - DNA, 276 bp, Zea mays
aaagactgcaaaaattgtccgtggaataattgatgctgtcgccaagatacctggaacatcagatcttcagatttcactctgcaaggaaatggtagaatggacccgggcagagaagcgtactttcctccggcagcgtgtggaggcaaggttggcagctctcctgttagagaatcaggagtatactgaagcccttaccctgcttactagtcttatcaaggaagtcaggagacttgatgacaagttacttcttgtggacattgaccttttggaaagcaa

SEQ ID NO: 38772 - DNA, 277 bp, Zea mays
ctgacatatgcaagggttaagtgctacatatgtcgtgtggttagagatcctcagctgagtaaatcgattcggatcgccgttatatccccggagagtggagacttgatctctgacctgcaacctaagtcaggatgtaaacattatgaataaaaatgatgttgtattgatgatatggtgaaattagactagatgcaaccagagtctattaatatttaatctggcgtaaaaatattgaaagtagggactcactatagtaagctatttctgcaaaagtatc

SEQ ID NO: 38773 - DNA, 272 bp, Zea mays
cgaaaccttttcttgtgctctgtctgtgtgtttccaaagcaaacgaaagagctcgaggatgtcttgcagctgcggatcaagctgcaactgcggatcaagctgcaagtgcggcaagatgtaccctgacctggaggataagagcggcgggggcgctcaggccagcgccgccgccgccgtcctcggcgttgcccctgagacgaagaaggcggcgcagttcgaggcggcgggcgagtccggcgatgccgcccacggctgcagctgcggtgacagct

SEQ ID NO: 38774 - DNA, 272 bp, Zea mays
atgttttctgaaagcagtaataactgtaagctctcgatgagccgattattaaggtgctgtccaacatgcccgtttaagctgtgcctaagttgctgtcagaagatacgtgaaggaaacacgtcggacaacacccctgaagataaattcaagaatcggttgattcaacaagagtctgtccatgaggatggcagtattacttgcccttcgattgagctgggtggatgtggtgacgccatgctgaacttaatatattcatctccatctagccagtc

SEQ ID NO: 38775 - DNA, 238 bp, Zea mays
gccgcccgacgcgcacgccttcctgcagctcgtcgccacgtttgccgtcgccgagagggaggacaggccgctgtaccgcaggattgtcgtcagcttctcctggcgccgccagatgccacgcctcgcgctcaccctcggactcgaggaacaaatggccgatatcattgaggaactgattgctaagaggcagcagcttgatgctgtaaatttcgcttatgaggctgggcttcaggagaag

SEQ ID NO: 38776 - DNA, 270 bp, Zea mays
ctgggtatacggggacagtttcagatcaagtttagttgcagtagtcaatccacaccaagaaaacacaatgaagtgggcagagtccaatggctacaagggttcttttgatgaaatctgcaaacttgaaggactcaaagagtacatcctgaaagagctggcagccgttgcgcagaagaacaagctacgaggcttcgagtacatcaaaggcgtagtgttggatcctgtgccttttgacatcgagagggatttggtgactgcaacaatgaagaa

SEQ ID NO: 38777 - DNA, 262 bp, Zea mays
gccacgaggaggaccaggaggcgctgctggccgtgaactccgcgctgggcagcccctatcacttcgcgtcgtggacgcccgacaccttctgctgcgactggtacgacgtggactgcgacaacgtcacgggccgatcgtcggcctcaccgtcttcggcgacggcaacctgacgggcgccatcccggacgccatcgccaatctgaccaacctccgcacgctggtcctgcgccacgtcccgggcatctccggcggcatcccggtc

SEQ ID NO: 38778 - DNA, 149 bp, Zea mays
tgcatatgttggcgatgaggcacagtccaagagaggtattctcacgctcaagtacccgattgagcacggtattgtgagcaactgggatgacatggagaaaatatggcatcatactttctacaacgagcttcgtgttgccccagaggagc

SEQ ID NO: 38779 - DNA, 268 bp, Zea mays
ggtggcacctgtgaaacctgcagctgaggcgaagaagcccaaggccacagtgaccgacggtgctggaagcagtggcgacaaggatgagaaagaggacgaaaaggaggagacagcaggcccacgtcggaggacccgaacgagacatagagacctatttttgatgtgtttggatgttctggcgcctgcttattttgaggactcttaatatttctgagtgtataataggaacttgtgtcacctctgcggcttccctgctgcttatttgttt

SEQ ID NO: 38780 - DNA, 264 bp, Zea mays
ggacgcgtgggtgcaaatgaagattttgaggcagataatgcccactggaaacgggttgtaagtaaatcatatgtgaatggcatgggaattgactggtccaaagtgagaaatgtcatggacatgagagctgtctatggaggttttgctgcagctctgagggaccaaaaggtctgggtcatgaatatcgtgccgatcgattcaccagacacgctgcccatcatctacgagcgcggtttgtttggcatgtaccatgactggtgcgag

SEQ ID NO: 38781 - DNA, 304 bp, Zea mays
tgaccgcagacggtcggaatccgggtcgaccacgcgtcgaacacgcgtccgcgaccgtgggtcgtggaacgtgacgaggtgcgcaacggcgctggaggaggctggcaccgactacgaactcgtgcccatcaacttcgccaccgccgagcacaagagccccgagcacctcgtccgcaacccgtttggtcaggttccagctctgcaggatggtgacttgtacctcttcgaatcacgcgcaatctgcaagtacgctgctcgcaaaaacaagccagagctgttgagggaaggaaacctcgaggaggca

SEQ ID NO: 38782 - DNA, 261 bp, Zea mays
ggacctggctttggcgcctacacggcgcctgggtcgccgagctcgccgcgccccttgactgcctacaggcgctccacctgcgtcgcatgaccgtcacccgacgaggacatcgccgtgctcgtccacgcgcgcggccacatgctacaggcgctcaagctcgacaagtgctccggcttctcaacagacgccctccgcctcgtcgcgcgctcctgcaggtctctgagaaccttgttcctggaagaatgtataattgaggatgaa

SEQ ID NO: 38783 - DNA, 260 bp, Zea mays
cagacgcgtggcgcgtcgcatcctgcggtccaaagctctctctgctcgcagccatggcgaagaactacacgaccgtgagcgccgagtacagcgaggctgtggagaaggccaggcgcaagctccgagccctcatcgccgagaagagctgcgccccgctcatgctccgcctcgcgtggcactccgcggggacgttcgacgtgtcgtcgaggaccggcggtccattcggcacgatgaggcatcactcggaattggctgagggc

SEQ ID NO: 38784 - DNA, 282 bp, Zea mays
tgtatggggggagtcttggatcaatgccaagacacaggctgaatgctaccattatcttttagatgcttgcatcaagctctatcagctaggtattgattggacaacccctgaacatggatcaataaacaatccaaggagaccgcacagcattttgagccctgaaatttgtaatggatgtcatgctgctgattcatcaaagtgtgttgtactagacattgaggggacaaccactccaatatcatttgtgactgatgtcatgttcccttatgctcgtgataatgt

SEQ ID NO: 38785 - DNA, 281 bp, Zea mays
tcaaacagtgatcttgttttgctactgatatctgattctgctcaggctgataactacgagaaaattttctcgcacatgaaaccaaacagtattcttggtttgtcacatggatttctccttggacatttgcaatctctgggttttgatttccctaaaagcatcagtgtgattgctgtatgggccatgggacttgagtcatcagtcataagacttggtgttcagggcaaagagatcgatggtgctggtatcaatgctagctttgctgttcaccaggatgttga

SEQ ID NO: 38786 - DNA, 283 bp, Zea mays
gttcttgctgtttgcctccgcattcaagtgaacaaagacaacaaagaattcaaggaccttcccccagaaagggcctttgctgatttcgtcctatgcaatctggtgctccacctggtgatcatgaatttcctcggataagcaactgctgcaccatgttggttaaaggttttgtagccccaggttgtggtcgctgattgttgcctttaaatgtttggaactgttgtgatcgtgatgtcgaatatccatatgatctgttgaaggattacttgtgtaagctgagtat

SEQ ID NO: 38787 - DNA, 284 bp, Zea mays
  unsure (1)..(284): unsure at all n locations
cccaagggcacaagcagaagttgcggttgtacttttcttcctccgccgtcggctcagatctctgcgtgcgggctagcgatggcgtcgttctcggaggctcccccagggaacccgaaggcgggcgagaagatcttcaagaccaagtgcgcgcagtgccacacagtcgagaagggcgccggccacaagcaaggtccaaacttgaatggtctttttgggaggcagtcgggtaccaccacaggctactcctattccgcgggaaacaanaacaaggctgtgatctggga

SEQ ID NO: 38788 - DNA, 284 bp, Zea mays
cggacgcgtgggtggagtcggtgctgcagcagcccttcttcaagacggagacggtgtcgcatctggtgcgggacgtgcgagtccttgatggaggccgtgttcccggaggcgcgcgatcggggccaggccgccgccgcggcgctcgccgtcgcggaggcggagcagggcatcttccgcaacaccgtggccgcgctcctcaccatgcaggacgtccgcgcggggagctccaccagaggaagccactcgctgccgccgctcaacctgccggactccgactggctccg

SEQ ID NO: 38789 - DNA, 284 bp, Zea mays
acgagcccgtttacgggctcacgccggcgtctcgccttctggtcggcccggggctgaaccagaccccgttcctgaccttgatgctcagcactttcttcgtgtcctccttcctcggcctcgacgagtggttccagcacgagacgggtccgtccccgttcgagctggccaatggccgggacatatggaccctgtccggccacgacgcgagcttcggcaagctcttcgacgacgggatggtcgcggacagcggtttcatcatggacgtcgtggtcaaggagtgcggc

SEQ ID NO: 38790 - DNA, 278 bp, Zea mays
acagagtcgaagtgcgctgtggcctgtggactctcccctccccaactccggcgaagggagcagaaacgttggcgtgttggttgggtggcgtcggcatggacgaggcaacgaagaagaatgtggaggctacggtgctggagatcctccggggctccgatatggagtccgtgacggagtacaaggtccgcgccgctgccagcgaccgcctcggcatcgacctctccatacccgaccgcatactcttcgtccgcggcgtcgttgaggaatacctactttca

SEQ ID NO: 38791 - DNA, 236 bp, Zea mays
ctactatctcaacctgaccggcatatccctcggcacgacggcactgtccatcccgcccgacgccttcttgctcaacgcggacggcaccggcgggctcatcatcgactctggcaccaccatcacattactgggcaacacggcgtaccagcaggtccgggcagcggtcgtctccctggtgacgctgcccaccacagacgggtcggcagccacggggctcgacctgtgcttcatgctgc

SEQ ID NO: 38792 - DNA, 276 bp, Zea mays
gtgattttgacttcgaaccctgcggctactccatgaatgcaatccatggctctgcgttctccacgatccatgtgacgcctgaggatgggttcagctacgccagttatgaggttatgggcttggatgccactgccctgtcttacggtgaccttgtcaagagggtccttgggtgcttcggcccctcggaattttctgtcgccgtgaccatcttcggcgggcggggccaagctgggacatggggaaaggaacttggtgcggaggcttatgactgcaaca

SEQ ID NO: 38793 - DNA, 271 bp, Zea mays
gtcgacggaggaggctgttgtggctgaggtcccggtgaccgaggtgccagcggaggtcccggcggcccaggtggccgaggcgcccaaggcgaagaaggcgcccaaggagaagaaggcgcctaaggagaagaagccgtccgcggcgaagaagccggcggcgcaccctccctacgctgagatgattgtagaggcgatcgctgccctcaaggagaggaaggggtcgagctcggtggccatcagcaagtacgtcgaggggaagcacggcggcaag

SEQ ID NO: 38794 - DNA, 268 bp, Zea mays
ataaatgtgtataatcaagaatacgagagtgcagcagcattttggccaagtgttcatggacgcataatcacagcgttgattgtatcacagctgcttctccttgggttacttagcacaaaaggcgctggccagtcaacacctgtgctccttgttcttcctgtagtgaccttctatttccacaagtactgcaacaaccgctacaaaccgacttttgtgaaatgcccattgcaggaggcgatgaagaaggataccctggaacgtgccagag

SEQ ID NO: 38795 - DNA, 268 bp, Zea mays
cccacgcgtccgcccacgcgtccggttccgaatgaggacgctgtttcacttgtgaagatggaggaggatcctgaggcagcagcccggaagctgacagagactgcgttctcccgtgggagcggcgataacatcacctgcatcgttgtgaagttcgagcatgacaagcctggcggcggcggctactcgcctccaggcgacaagagttgattccatttgctgttggttatacgctttgccggtgccccttttaccctgggccggattttgc

SEQ ID NO: 38796 - DNA, 271 bp, Zea mays
gtttggatacaagggatccagtttccaccgtgtcatcagcgactttatgatccagggcggagattttgacaagggcaatggtaccggtgggaaaagcatatatggacgcactttcaaagatgagaacttcaaattggttcacactggacctggagtggtcagcatggctaatgctggaccgaacaccaacggcagccagtttttcatttgcactgtcaagacgccttggttggatggaaggcatgtcgtgtttggccaggtcgtggaaggg

SEQ ID NO: 38797 - DNA, 274 bp, Zea mays
cccacgcgtccggtcagtgcaaaaggcatgaatgatggctgcaaatgggtggaaatgtttgaagatgtccgcatggtaatattctgtgtagcactcagtgactatgaccaattgggaccccctgtaagtggcagcagtcggcctcttgtgaacaaaatgatgcaaagcaaagagttgtttgaggctacaatccggcagccatgcttctgcgatactccatttgttctggttctgaacaagtacgaccttttcgaggagaagatcaaccgcgcgc

SEQ ID NO: 38798 - DNA, 274 bp, Zea mays
cacacattgacaaagatacttgcagaaaaaacaagtaaatgggttgaacaatatctcgacgcaatggaaaaggttaaactgaaacaaggactgaagagtgcaatgggcatttctagtgatggaaatgcgtatctgcaggagagtcagttttggaaactttacaaggaagatcctgcagcatgtgcgatcgtgatgaaaacttcagttggccttgtctacctgcttgcctgtctgctatcacctttcatgccctccttttctgatgaagtattac

SEQ ID NO: 38799 - DNA, 279 bp, Zea mays
cccacgcgtccggcgacttcctcttccacctacctcgccatcggccgcaaaaccctaaaccccgccccctccgtagccacagccgccacctccgtctccttccccgccacgcagcacccatgcctcgtcgccgcctccgcggaccgccgccgcgccgtggctgcgaaggtctcgtcgccgtcggtcatcggcaccgccatgccgtcgctcgacttcgagacctccgtcttcaagaaggaaaaggtgtccctggccggccatgaggagtatattgtgagg

SEQ ID NO: 38800 - DNA, 273 bp, Zea mays
cccacgctccgcccacgcgtccgcggaccgtggcgcgacgccaccaccacacgttcacggtagcgagagcttatcgtcgtcggcggcgaagatggtgtcgctgaaactgcagaagcggctcgccgcgagcgtcctcaagtgtgggaaaggcaaagtctggcttgaccccaatgaagtcagcgagatctccatggctaactcccgccagaacatccggaagttggttaaggatgggtttatcatcaggaagcctcagaaggttcactctaggtc

SEQ ID NO: 38801 - DNA, 269 bp, Zea mays
gctggagggacattcaatgagcaaggggaactcagcaagtatgtgaatgttaaatttccatcaagactatgctccttgggacttacttacatgggaacaaatgaaatgcccattatgttccctttttctgcaatactaaagaagctggatttgcaatacactttcctcaccactgaggaccattgccagctcattgcaaaatgcccgaacttactagttctcgcggtataatctcctgctcatgtaaattatgaagatactgaattggc

SEQ ID NO: 38802 - DNA, 176 bp, Zea mays
gtctgcagcacccaactacacccagcctcggaaggaaccttccagaagcgcaagactctaaaggccgtcgccttcacattcttcctcgccgcgggggtcgcctgagatcacataaacaatggtgaaggctgttgctgtgcttggtagcagcgatggtgtaaagggcaccatctttt

SEQ ID NO: 38803 - DNA, 232 bp, Zea mays
cggctgctccgtctgcctccaggatttccaggtcggggagaaggtgcggacctgccggactgctggcacgtgttccacgtgccgtgcatcgacggctggctcatcaagcacggctcctgcccgctctgcaggaggaagctgtaggcggatcgaccggacgacgccatgaacgatgttcttctctgcgatcgagccgatgatgtgtgtgtgtgtgcccccgccgccaccacgg

SEQ ID NO: 38804 - DNA, 278 bp, Zea mays
ggccctcccaaagtcccaaaggccgccgccgcccgccatcccaccatggccgcgcagtccttcctcctcgccgccactgtcgccgccatgtcccccgcggtcttcgccgctccctattcctccgcacgccctttccactcggtccacttcgtctccggcccgttgggcgccgtcgccgccaaggctctcgtcgtcgcggacgccactatgaaggccgtagccgtcctcaagggcgcgtcttatgtctaggtcgtggtcacgctcactcaggacgacga

SEQ ID NO: 38805 - DNA, 274 bp, Zea mays
cggacgcgtggcgtgacgcgtggggagcggttctacgtccgagtcgtcgcatcaggtcccctcgaatcgccggcgggacaccaaccaagctcatacatctgaattgactagtcaaactcagtgatctctttggggactaatcaaactcaagaactaagtttcatgtctgatctcgacgtccagcttccatctgcttttgatccgtttgcagaggcaaatgctgaggactccagtgctggtgctggatcaaaggactatgtgcacgtgcgtattc

SEQ ID NO: 38806 - DNA, 280 bp, Zea mays
aaagcaacaaggcagcagcacaagcaagaaccacacctcctcccttcgcctgtgatcatgtcgtcttgctgcggcggcaagtgcgggtgcggctccagctgctcctgcggcagcggatgcaacggctgcggtatgtaccctgacgtggagaccgccgccaccagcagcgtcaagaccacggtcctcgccgcgccgaccaccaaggccagcgccggcggcttcgaggcggccaccgagggcggcggctgcgactgcaacacctgcatatgcggcaccagct

SEQ ID NO: 38807 - DNA, 269 bp, Zea mays
cggacgcgtggcgtgacgcgtgggcaaatatgctggactagtgagtgcccaagcccatcgccaggagctgatacaggatcttttcaaagtatggcaagatccacagagaaggacagtaactggtggcatgataaaggaacttctcatttctttcaagagagcaactggacagaagccccagcggatcatattctacagggatggtgtcagtgagggacagttctatcaagtattgttgtatgaacttgatgccatcagaaaggctgtgc

SEQ ID NO: 38808 - DNA, 271 bp, Zea mays
cctagctcccgcaactgccgccgccactcccacgcccgcagccatgccgcccaagctcgacccgtcgcaggtggtggaggtgttcgtccgtgtgaccggcggcgaggtcggcgcacgtcttcgctggcccccaagatcggcccgctcggtctttcccccaagaagatcggagaggacatcgccaaggagacggccaaggactggaagggcctccgcgtcaccgtcaagctcaccgtccagaaccggcaggccaaggtctccgtcgtcccct

SEQ ID NO: 38809 - DNA, 256 bp, Zea mays
cttcggtcttccgtgctcaccttcgagagatcaagttgctgctgcggtagtccccaaccatcatcatgcagaacgaggagggtaagacggtggacctctacgtccccaggaagtgctcggccacgaataggatcatcactgccaaggatcatgcctctgtccagatcaacattggccacttggatgcgaatggcctgtacgatggtcacttcaccacgtttgctctctctgggtttgtccgtgctcagggtgatgc

SEQ ID NO: 38810 - DNA, 239 bp, Zea mays
cggacgcgtgggttgttgtgccccctggcaacactgggctggatccgtcccagacctctttcttccacggtgcttaacatccccaccaagattaacaagggtaccgtggaaattatcacccctgtggagctgatcaagaagggtgaaaaggtgggctcgtccgagtctgccctgctcgccaagctgggtatccgccccttctcgtagggcctccaggtcaccagtgtctaggaggatgg

SEQ ID NO: 38811 - DNA, 259 bp, Zea mays
gccgagaagggcgtgaaggtgttggggatgtgggcgagccccatggtgatcagggtggagtgggcgctgcggctgaagggcgtcgagtacgagtacgtcgacgaggacctcgccaacaagagcgccgacctgctccgccacaacccggtgaccaagaaggtgcccgtgctcgtccacgacggcaagccggtcgcggagtccaccatcatcgtggagtacatcgacgaggtctggaagggcggttaccccttaatgccgg

SEQ ID NO: 38812 - DNA, 132 bp, Zea mays
gtggatgacgccgatcaagaagagccagccgtcggcgcacgacgccttcgtgggcaactggaagccgaccaagaacgacacgctcagcaaacgcctgcctgggttcggcgccaccatgaacatactctacgg

SEQ ID NO: 38813 - DNA, 274 bp, Zea mays
cagaaacagaaaataggccattgcctctgtcgcacactagcaatgatgtccgtgcattaagaataagtgatttcatacatgcgcatgaacaggtgtgtgcaagtgtttcctcagattccagtaacatgaacgagcttgtgcaatggaatgatctctatggagaaggcgggtcaaggaaaaagacaacgctaagctacttcatgtagctgatgttgcaagtatatcgggagaagtgccctggcacaaagcagaaatggttggaggcagttggggg

SEQ ID NO: 38814 - DNA, 264 bp, Zea mays
gtttcgtctcctgttgaacatctcacacttcattatcaggttaggcaccttgatacttctgagaagagtgaattgcacaagctacaacaactgaaagatgaacaaggtgaattgtccagcagtgatgagaagaaatacaaggcactaaagcgtgccactgaaagagagatactgcagagtgccgatgtcatttgttgcacctgtgttggtgctggagatcctcgtctttcaaacttccgtttccgacaagttcttattgatgag

SEQ ID NO: 38815 - DNA, 264 bp, Zea mays
cggacgcgtgggttccgccgccgcctactcttccgccgatcaaggagcgggaatcattgcgcgatgcaccagtcggtgctggtggaacgcgcgacgagcgagtcgctcatcggccctgactggtctctcaaccttgagatctgcgacatcctcaaccacgacccctcgcaagccaaagatgtagtgaagactatcaagaaacggattgcacacaagaactcaaaggtccagcttcttgcattaacgttgctggagaccttgatt

SEQ ID NO: 38816 - DNA, 256 bp, Zea mays
ggattttgttgtttctggaacagcatcagaatctttgtatggtgcttgtgaatccatgtacaagccggacatgcaacctgatgaactcttcgagactatatcccaagctctgaattcatcagtagatcgtgactgccttagcggatggggtggctatgtgctgattgtgacaccgactgaagtgagggagcatgtgattaagagcaggatggactaaataatggccactagaattattagctggtttccaatgctt

SEQ ID NO: 38817 - DNA, 270 bp, Zea mays
agcgaatccagctaacccttcaattgagcttggacctgagttcaagaaggttgccaatttccttgctcggttcaagtccatccccagcatagttgagcttgacagcttgaaggtttctggtgatgtctggtttggctctggaattacactcaagggcaaggtgacaattatcgccaagcctggagtgaagttggagattccagatggagacgtacttgagaacaaggatgtcaatggccctgaggatctttaagcaatgtttgtcatcac

SEQ ID NO: 38818 - DNA, 273 bp, Zea mays
ccatgttccctggcatcgctgacaggatgagcaaggagattactgccctcgcgccgagcagcatgaagatcaaggtcgtggcgcctcctgagagaaaatacagtgtctggattggtggctcgatccttgcgtcgctcagtacgttccagcagatgtggatatccaaggatgagtacgatgagtctggccctgctatcgtccaccgaaaatgcttctgagcttagctatctgccgcgcctttcatagcgtgtcaagctgttgagatctgcgttg

SEQ ID NO: 38819 - DNA, 264 bp, Zea mays
cccacgcgtccgagcgcacacacacgcaaccagatctcccccaaatccagccgtcggcacctccgcttcaacgatgcagatctttgtgaaaaccctgactggcaagactatcaccctcgaggtggagtcgtctgacaccattgacaacgttaaggccaagatccaggacaaggagggcatccccccagaccagcagcggctcatcttcgctggcaaacagcttgaggacgggcgcacgcttgctgactacaacatccagaagga

SEQ ID NO: 38820 - DNA, 260 bp, Zea mays
gttggcttctcctccccctccggatcgggttcgggttcgtgaggttctccggggttcggtttcgtgggtggtcggatcgagatggcggcgtcggatgttgagtaccgctgcttcgtcggctgcctcgcctggtccacggacgaccactccctccacaacgccttcagcacctacggcgaggtcctcgagtccaagatcatcctcgatcgggagacgcagaggtcccgctgcttcggcttcgtcaccttctccacggagga

SEQ ID NO: 38821 - DNA, 270 bp, Zea mays
cccacgcgtccgcccacgcgtccgaaaataactggtggattagcaaggttatcaggaaaaagcatgaatcttctgtcactagtcttgcatggcatccaaacaatatatatcttgcaacatcgtctacggatggtaaatgcagagtgttctctacttttatcaagggtgtagacacaagaggatcaaaatcgagcacttcaaccgattcaaaattcggagagcaaatcgctcagcttgatctatcatctacctgggtatttggtgtaaggt

SEQ ID NO: 38822 - DNA, 291 bp, Zea mays
  unsure (1)..(291): unsure at all n locations
aatatgggacactgctggccaggaaaggtttcagagtctcggcgttgcattctaccggggagcagattgttgtgtcctagtctatgatgttaattctatgaaatcatttgacaacctgaacaactggcgagaagagtttctaattcaggctagcccatcagatcctgataatttcccttttgttctattgggtaacaaagttgatgtagatggtggcaacagccgcgtggtatctgagaataaggcaaaggcatggtgtgcttccanagggaacatcncgtactttgagac

SEQ ID NO: 38823 - DNA, 288 bp, Zea mays
ctaaatttgtcatttgcttatgtggaaggggagagcttactgatgggtctgaaggaggtggctgtgtcaagtggtagtgcctgcactagtgccagcttggagccctcatatgtgctgcgcgcacttggggtggaggaggatatgcacacacttctattcgtttcggcatgggtcgctttaccactgacgaagaggtggacagagcaattgagcttactgtgcatcaggtgaagaagctccgtgacatgagcccactctatgagatggccaaggctggcattgacctca

SEQ ID NO: 38824 - DNA, 275 bp, Zea mays
cagatcctgagatccggcaccggccccaagccgataaagggccagaaggtcaccgttcactgcaccggctacgggaaggatcgtgatctgtccaagaaattttggagcaccaaggaccctgggcagcagccattcagtttcagcattggtcagggttcagtgatcaaaggatgggacgagggagttatgaccatgcaagtgggtgaagttgctcgtatccagtgcacgcctgattatgcttatggagccggcgggttcccagcctggggaattca

SEQ ID NO: 38825 - DNA, 293 bp, Zea mays
gggcgaagaggactctgtcttccactgcccagaccacgattgagattgactcgctgtatgagggcatcgacttctactccaccatcacccgtgccaggtttgaggagctcaacatggacctgttcaggaagtgcatggagcctgttgagaagtgcctgagggatgccaagatggacaagagcaccgtccatgacgttgtacttgttggtggctccactaggatccccagggtgcagcaactgctccaggacttcttcaacggcaaggagctgtgcaagaacatcaaccccgat

SEQ ID NO: 38826 - DNA, 280 bp, Zea mays
tcgaggtgctggacgggttgctgggcccctactggaaggcggcgggtctggccttcaactgcacgttcctgctgttcggctccgtcatccagctgatcgcctgcgcgagcaacatctactacatcaacgatcggctggacaagcggacatggacgtacatcttcggcgcctgctgcgccaccacggtgttcatcccgtccttccacaactaccggatctggtccttcctgggcctcggcatgaccacctacaccgcgtggtacctcgccatcgccgcgct

SEQ ID NO: 38827 - DNA, 233 bp, Zea mays
tgtagaaacagatcctccgagaactaaggatcttgatactgttgctttgcttgatcatctaccatcattgcagcaactccttttccgtcttcttgcttgccagccacaaggagcgtcgtcttacaatgttataatccagcatgcactctcaatggttgctttagagagtattaagatctacactgcgattagtgatggaacaatcaatctagttgacaagttcttcgagatgc

SEQ ID NO: 38828 - DNA, 283 bp, Zea mays
ctctagggtttttgattttagccgccgccgctgctcatctcacatccctcgagaagacgcctgctcctcgccgatcgatacgatggccgtcttctccgacctccacaccgccgacggcctcaagtccctcgaggctcacctcgccggcaaaacctatgtgtctggtgactccattactaaggatgacattaaggtcttcgccgcggtgccgtcgaagcctggcgctgagtttcctaatgccgcccgctggtacgagaccgtctctgcggctgtagctcaagat

SEQ ID NO: 38829 - DNA, 280 bp, Zea mays
cccgacgacgcggacccgtcgctggacccgctgtacgccgcgaagttgcggctcaagtgcaagacgctgacggacaacacgacgatcgtggagatggaccccggcagcttccgcaccttcgacctgagctactaccgcggcgtgctcaagcggcggggcctgttccagtccgacgccgcgctcatcaccgacgccgcctccaaggccgacatcctcagcgtgatcaacgcgccgcccgaggtgttcttccaggtcatcgcgggctccatggtcaagatgg

SEQ ID NO: 38830 - DNA, 280 bp, Zea mays
aaaggaacagaaataaggtgtacaagaggaacagaaactctttggttggatcgtatatctgcaaaggttactgccttggcaggcaatacaaatttctgggctgttggctgtgaagatggttacctgcaggtttacacaaaatgtggaagacgagccatgccggcaatgatgatgggatctgcagctgtttttatagactgtgatgactgctggaaattgcttcttgtcacaagaagaggtttaatgtatatatgggacctccataacaggacctgcattt

SEQ ID NO: 38831 - DNA, 280 bp, Zea mays
gcccgatacttcaaagatgcatgtgataggagcctcacgccatacgagtttgttgaaggcatgaaaaagaagggaatccgtgtgcctgggattggtcacaggattaagagcagagacaacagggataagcgtgtgcagcttctacagaaatatgctcacacacatttcccttcagtcaagtacatggaatacgctgttcaggttgagacctacaccttgtcaaaagccaacaatttggttatgaatgtcgatggtgcgatcgggtcccttttcttggatc

SEQ ID NO: 38832 - DNA, 283 bp, Zea mays
aagaaagatgttatgtcgaaaaatgtttcaatctacaaatcccaagcatctgcccttgaagcccatgcagctcccaactgcaaggttctggtggttgccaacccagcaaacaccaatgctcttatcttgaaagaatttgctccatctattccagagaagaacgttacttgcctgacccgtctggaccacaacagggctcttggccagatttctgagagacttaatgtccaagttagtgatgtgaagaatgttatcatctggggtaacactcgtcctctcagta

SEQ ID NO: 38833 - DNA, 280 bp, Zea mays
aaaagatggtgcaaaggttcctgtatcagaacttgttgggaagactgtccttgtttacttctcagcaaaatggtgcccaccatgccgtgccttcctgcccacacttgtcaaggagtacaacaagatcaaagagaagaacagtgattttgagatcgtcttcatctctagtgacgaggatcagagctcattcgatgattttttctctgaaatgccatggcttgctgtaccctgggaagatgaaaggaaagcatcgctgaagaaaaccttcaagatccgtgga

SEQ ID NO: 38834 - DNA, 278 bp, Zea mays
  unsure (1)..(278): unsure at all n locations
cggacgcgtgggcggacgcgtgggcggacgcgtgggcggacgcgtgggcgaggcaggagcggcgatccattacacacaaccacacctgctcttgcaccagcccgccgcaggagttgccagatctgctccggtcacaggagctccgactccgagccctctccaatggcggttaaggtctacgtcgtgtactattccatgtatggacatgttggcaaactagctgaagagatccagaaaggtgcctcgtctgttgaaggtgttgaagctanaacatggca

SEQ ID NO: 38835 - DNA, 274 bp, Zea mays
ctaaaaccatctgcttcagctagccccaagtttagtcggccgatcattcactgaagtagtaatggcctccgtcaacagctggaccctcgagatcgcgtcgccggtggctccgcagcgcctgttccgcgccgccgtgatggactggcacaccctggcgcccaaggtcgcctcccacgtcgtcgccagcgcgcagccgtggagggcgacggcggcgttggcagcgtcaggcagttcaacttcacctcagtcatgccgttcagcttcatgaaggagc

SEQ ID NO: 38836 - DNA, 278 bp, Zea mays
gcaaggccgcccgcttgccggcaacatgaagaagatcttcggcgccaagaagaacaaggatccgccgcccacaatccaggacgcaaccgacagaatcaccaagcgcggcgacaccgtcgatgaaaagatcaagaagctcgacgccgagctcgcgcgctacaaggagcagatcaagaagacgcgcccaggccccgctcaggaggccgtcaaggcacgagccatgagggtcctcaagcagcgcaggatgtacgaagggcagcgtgacatgctctacaacc

SEQ ID NO: 38837 - DNA, 279 bp, Zea mays
ctgcaaggcacttgctcacccttgacgagaagaacccccgtcgtatctttgagggtgaggcgcttcttcgccgcatgaaccgctatgggctgcttgctgagggtcagaacaagcttgattatgttcttgccctcaccgctgagaacttcctcgcaaggcggcttcaaacacttgtcttcaaggctggcatggccaagtccattcaccatgctcgtgtcttgatcaagcagcgtcacatcagggttggcaggcaaattgtcaacgtcccatcattcatgg

SEQ ID NO: 38838 - DNA, 263 bp, Zea mays
cctttcagttgattatggcaagaaatccaagcttggtttcaccatttatccttccccacaggtgtcaacagctgttgtagagccatacaacagtgtcctctccacccactccttgcttgagcacactgatgttgcagtcctcctggacaacgaggctatctatgacatatgcaggaggtcccttgacatcgaaaggccaacctacaccaacttgaacaggctgatctcacagatcatatcatctctaaccacctccctgaggt

SEQ ID NO: 38839 - DNA, 250 bp, Zea mays
agctcttgaaaaatgttaccgacaagaagtttgacaacaaagttgaatggggaattgatttagcctctgagcatgaaaggtatttaacagaggatatatttaagaagccagttattgtctataactatccgacaggagtaaaggcattttatatgagactcaatgatgatgacaagacggtggctgcaatggatgttcttgtgcctaaggttggtgaattgattggtggaagccaaatggaagaacggtt

SEQ ID NO: 38840 - DNA, 261 bp, Zea mays
gccaccatacctaggcggcggggacttccagaatggtgcaaactttgcggtcggcggggcaactgccctcaatggctcgttcttccgtgaacgcggcgtggagcctacatggacacctcactcccttgatgagcagatgcaatggttcaagaagcttctcacatccattgcaccgttggagacagagcaaaacaaaataatttccaagtcacttttctttgtgggagaggtcggtggaaatgattacaaccatttaatcgt

SEQ ID NO: 38841 - DNA, 260 bp, Zea mays
caagtaccacctctgcctcgacctcgtccgccaggtcccattcttccagcacatggacgacctcgtgctcgagaacatctgcgacagggtgaaatccctcatctttcccaagggagaaaccatcgtgagggagggcgacgtggtgcagcggatgctgttcatcgtgcggggccacctgcagtgcagccaggtgctgcggaacggcgcgacgagcagctgcacgctggggcctggcaacttcagcggcgacgagctgctgt

SEQ ID NO: 38842 - DNA, 258 bp, Zea mays
tgaagggtttgcatttgtctacatggaagatgaacgcgatgctgaagatgctatcagtagacttgatggaattgattttggcagaaaaggaaggaggatcagggttgagtggacaaaggaggatcgcactgttggccgaaaaagcagctcaaggaggtctccaaccaatacaaaaccgaccaaaaccttgtttgtgatcaactttgacccgatcaacacaagaatccgagatctggagaggcacttcgataaatatgg

SEQ ID NO: 38843 - DNA, 251 bp, Zea mays
gtgattttgacttcgaaccctgcggctactccatgaatgcaatccatggctctgcgttctccacgatccatgtgacgcctgaggatgggttcagctacgccagttatgaggttatgggcttggatgccactgccctgtcttacggtgaccttgtcaagagggtccttgggtgcttcggcccctcggaattttctgtcgccgtgaccatcttcggcgggcggggccaagctgggacatggggaaaggaactt

SEQ ID NO: 38844 - DNA, 253 bp, Zea mays
cccacgcgtccgggcatgaattactacgcttgcctgtcaattatgtccctggtcatactgactccatttgctatagctatggaaggccctcaaatgtgggctgctggttggcaaaaggctcttgcagaagttggacccaatgttgtctggtggattgctgcacagagcgtgttctaccacttatataaccaggtgtcctacatgtctctcgatcagatttctccattgacattcagcattggcaatacaatga

SEQ ID NO: 38845 - DNA, 254 bp, Zea mays
cttcccgaagatgccggccttcgactacacgccgccgccgtacgacgggccgcgcgccgaggagatcttccggaagcgcgctcagttcctcagcccatccctttttcatttctacgatcgcccattgaacatagtcgaaggaaagatgcagtacctatttgatgaggatggccgtcgttacctggatgctttcggtggcattgcaacagtttgttgtgggcactgccatccagatgttgttgaagccatagtaa

SEQ ID NO: 38846 - DNA, 251 bp, Zea mays
gttgggcgcagagaatccccaagcaaacaaacagggtagaggtagagggagaggagaggagaggagaggagaggagaggttgggtctgggacaccatggctccgatgaagctgtacggggcggtgatgtcgtggaacgtgacgaggtgcgcaacggcgctggaggaggctggctccgactacgagatcgtgcccatcaacttcgccaccgccgagcacaagagccccgagcacctcgtccgcaacccgttt

SEQ ID NO: 38847 - DNA, 279 bp, Zea mays
gctgagattgttggcaccttcatcctagtctacaccgtcttctcagccaccgatgccaagaggaatgccagggactcccatgttcctatccttgccccactgccaattgggttcgcggtgttcctggtccaccttgccaccatccccattactggcactggcatcaacccagctaggagccttggcgctgccatcatctacaacagggatcacgcctggaacgaccattggatcttctgggtcggccccttcattggcgctgccctggctgccatctac

SEQ ID NO: 38848 - DNA, 274 bp, Zea mays
ggacctggtgctgatacaggtagatgggattcggtaacgttggttcctgggcagctcagctgataagtgaagccggtggcaaggtgattgctatcagtgacgtcacaggcgccgtcaaaaacgtcgatggcctcgacatcgcgcactcagtgaagcactcggcggagaacaaggggatcaagggcttcaaggggggagacgccatcgctccagactcgttgctcactgaagagtgcgacgtcctcatcccagcagcgcttgggggagtcataaa

SEQ ID NO: 38849 - DNA, 274 bp, Zea mays
cccaggtagagaaacagtttctccgtactctagcagatggcaaggataaagcctaagcaattgctaatccaaagcaaaacaaagaaggctccatctcgaatcagctactctactatcatcacatggaacttgattgtcatattggttgtgctatctctctatgctacctacagccattggcatcaaaggtctacccaagacttcgaaatggagcttcatgaagctgagcttgctgtgagaccggaggatccaaaaatgataagtagaccaagat

SEQ ID NO: 38850 - DNA, 272 bp, Zea mays
gggttgtatccatagattcgttcgagcgtgtgcccatcaactacgagagagcgctgcagaaggccgtggcgcaccagcctgttagtgccagcattgaagcatctcggcgcgcgttccagctctacagttctggcatcttcgacgggagatgcgggacgtacctggaccacggtgtgacggtggtggggtacggcagcgagggcggcaaggactactggatcgtgaagaactcgtggggcaccagtggggcgaggccgggtacgtccggatgg

SEQ ID NO: 38851 - DNA, 272 bp, Zea mays
gcagctcgtgggcttcactaccttcacactggtgcaaagcacaccatcatccaccgggatgtgaagacaacaaacatccttctggatgagaaatgggttgccaaggtttcagattttggtctgtccaagactggcccatctatggaccatactcatgtgagcacagttgtcaaaggcagtttcggataccttgatcctgaatactttcgcaggcagcagctcacagagaagtctgatgtatactcttttggtgttgtgctgtttgaggtcct

SEQ ID NO: 38852 - DNA, 209 bp, Zea mays
gttggcttctcctccccctccggttcgggttcgggttcgtgaggttctccggggttcggtttcgtgggtgagcggatcgagatggcggcgtcggatgttgagtaccgctgcttcgtcggcggcctcgcctgggccacggacgaccactccctccacaacgccttcagcacctacggcgaggtcctcgagtccaagatcatcctcgatcg

SEQ ID NO: 38853 - DNA, 271 bp, Zea mays
cccacgcgtccgcaacaagctcctgggcgtcacctgcgccgtgggcgtcaccaagacgctcttcatcctggtggccacgttcctgttggaccgcgtggggcgtcggcctctgctactgaccagcacgggtggaatggtcatctcgctcatcagcctcgggacggcgctcaccgtcgtggggcatcacccggacgccaagatcccgtcggtcgtcgctctgtgcatcgcgtccaccctggccttcgtcgccttcttctctatcggcctcggg

SEQ ID NO: 38854 - DNA, 263 bp, Zea mays
  unsure (1)..(263): unsure at all n locations
tgccacggtccgggacctgcgacgggccgcccgtggccgcggcggcgtcggagctcaaccggcggaacatcgcggagcanatggccatgacgctgacgcgggaccccagcttcaaggcggcgttcgtcaccgcgctgtccggccggctcttcgagatgtcgccgaccaaggactgacggaacggatcggatggattgggagattggcatcgcaggagattctggatcagattgtcttcgagcgcacgccgcaatggtcaactg

SEQ ID NO: 38855 - DNA, 269 bp, Zea mays
ctcctactgcatctccctcgctctcgtcgcctcgttcgcttcgcctccgccccgccccgccccgagcagagcgcagccctatccggagctgggatggcggacgcgaacagcagcagcagcagcagcagcagccacagcaggcggcagcggcagccaccggcgtgtggaagacggtcaagcccttcgttaacggcggggcctctgggatgctcgcgacctgcgtcatccagcctatcgacatggtcaaggtgaggatccagttgggtgag

SEQ ID NO: 38856 - DNA, 145 bp, Zea mays
ctcacgcgtccgcccacgcgtccgggttctccggggttcggtttcgtgggtgagcggatcgagatggcagcgtcggatgttgagtaccgctgcttcgtcggcggcctcgcctggtccacggacgaccactccctccacaacgcct

SEQ ID NO: 38857 - DNA, 264 bp, Zea mays
gcagaatctaaattgtcaaaatttgtcgaggatataatagtacctccaagaatgattgacataattgttgatggagaggtcaatgatgaatacatgaaaacacttgagactctaagcaaaaaaatcaaattcatcgatgctgaccccatggttaaatcatccaaggctctaaaagatgttcaacctgaggttgagagactacgacagaaagccgtctcaaagattttcgagtttgtcatccaaaagttctatgccttgagaaaa

SEQ ID NO: 38858 - DNA, 269 bp, Zea mays
ccctagccctcgcgccgccgccgccgtgcccagcgctcgagctcctcgcctgccgcgagctcgcgccgcaacgccaccatgaagttcaacatcgcgaacccgtctaccgggtgccagaagaagctggaaatcgatgacgaccagaaactacgtgccttttatgaccgaagatctcccaggaggtcagtggtgatgctctgggtgaggagtttaagggttatgtcttcaagatcatgggtggatgtgacaaacaaggcttcccaatgaag

SEQ ID NO: 38859 - DNA, 269 bp, Zea mays
cgagccctatccttttccccactcccgggtctccagcattcctatcctctccccgcccgcccgtaccgccgccgcggcttcccttcctctcccgagccaagatgaatgttgaaaagctcaagaagatggcaggtgctgtgcgcaccggggggaagggtagcgtgcgcaggaagaagaaggcagtccacaagactacaaccacagatgacaaacggcttcaaagcaccttgaaaagaataggagtgaacagcattcctggtattgaagag

SEQ ID NO: 38860 - DNA, 270 bp, Zea mays
ccgctcctcgcgccgccgccgcgtctcctcctgtacaggtaaggagaggaagagggcgaaatggtgaagcacaacaacgtcatccccaacgggcacttcaagaagcactggcagaactatgtcaagacatggttcaaccagcccgcccgcaagcagaggcgccgcatcgctcgtcaaaagaaggctgtgaagatattcccccgcccgactgctggtcctctacgccccattgttcaatgccagactttaaagtacaacatgaagtcaagg

SEQ ID NO: 38861 - DNA, 268 bp, Zea mays
agataagtgtggatcaaccaacaaggttcatttcatccttaagcacaagaatcctaagactggaaagtatgttgagcatcatctcaaattcccaccatctgtcccatatgacaagctctctcatgtctacacggctatcttgaagccagacaatgaggtcaaaattttggtagatggggaagaaaagaagaaggcgaacttcctttctgctgatgattttgagccagcacttatcccatccaagaccattcctgaccctgatgacaag

SEQ ID NO: 38862 - DNA, 269 bp, Zea mays
agggacgcgtggcggacgcgtgggtgacccacgagggatccgcagatgaagatcattccggtcccttagcctggatgacaactatgcctacttaatcgtggacgagagcaccaagaaggcagcggccgttgaccctgtggaaccggagaaggttctcaaggcggccggcgaggtcggcgcctacgtcgactgcgttctcaccacccatcaccactgggatcatgctggtggcaatgagaagatgaggctgcaggtgccagggataaagg

SEQ ID NO: 38863 - DNA, 271 bp, Zea mays
caaatcccgtcccctccacccgcactccattggcgccgctcccctcccctcgccgccgccggagatctgatccgatccgatccgatccgtttgtgcttgtgctgcagcaggagtgagaagtaaaaaaatatggctgccctgccactggccaccgccgaagtatgcgacgctaaccctcacctgatcatgaacggcgagctccgcgcgctccagccaatcttccagatctacggacggcgccaggtcttcgccggccccatcgtcacgctca

SEQ ID NO: 38864 - DNA, 271 bp, Zea mays
cccacgcgtccgcccacgcgtccgcccacgcgtccgcgaggtcttgcgtgacaggcctgctggtcatgaatgggagcttgaacctggagtcacatgtggtgactatttgtttgggatgttgcagggaacacgttctgctctttatgcaaatgaccgtgaatctatctctgttactgtgcaagaggtaactcctagagctgttggagcactggttgcactttatgaacgtgctgtggggctttatgcttctttggtaaatatcaatgcctat

SEQ ID NO: 38865 - DNA, 281 bp, Zea mays
tgcacgacttcgccgtcaccgagaaccacgccatcatcccggaccagcagatcgtgttcaagctccagtagatggtgctgggcggctcgcccgtggtgtacgacaggaacaagaccgcgcggttcggggtgctgccgaagcgcgccaccgacgcgtcgcggctgctgtgggtggacggccccgactgcttctgcttccacctctggaacgcgtgggaggacgaggccacgggctaggtcgtgctgatctggtcctgcatgacccccgcggacgccgtgttc

SEQ ID NO: 38866 - DNA, 235 bp, Zea mays
ggcactggtcagtttgccatggcaaacggtgtcatctccaagaagtttcatgagcagagaagcgaagggaacatcatacaactcaccatccatgctttctgtccggtgctcggaccgacaaagcgcttgtccacaaaagttggaccgtggggtgggagcggcgggtctccgatggacatcactgcagagccccagcgtctgaagagcatcaccgttgctactggcatcgcggtga

SEQ ID NO: 38867 - DNA, 281 bp, Zea mays
atgaattcaggccctgtttcaaccttccaagtccatgaacatttaagacctaagctctgtgatctgtacgagaatgactcaattttcgacaagtttgagtgctgtcttagtggggatggacttcgtgttgcaactggttcttatggtaatatatttcgtgttttcggtcgtcctccgggaagcatagaggcaacaactttggaagcaagtaggaacccaatgaggcgtcagattgcaaatccagcaaggcccacacggacactaacttcttttgcccgtgg

SEQ ID NO: 38868 - DNA, 278 bp, Zea mays
ggacctggggaaagttggtggatgatgcatctaagtttcttaatgagaaaattacaaaagacgtggttacagtaccagcatacttcaatgattcacaaaggacagcaactaaagatgctggccgcattgcaggactggaagttctccgtattataaatgaaccaactgctgcatcattggcctatgggttcgagaagaaaaataatgaaacaattctagtgtttgatttgggaggtggtacctttgatgtctctgtattggaagttggagatggtgtg

SEQ ID NO: 38869 - DNA, 282 bp, Zea mays
cacaagcacaagcgcactctagcaatggcttctgaggttgtccgccctagcgacgccgagctactaaaggcacaagccgacatatggcggctcagcctctcctacctcacgcccctgtcactgaggtgcgccgtggagcttggcatccctacggcgatctaccgccatggcggggctgcctcagccgctgagctggtcacggcgctgtctctcccctccactaagctgccgttcctccgccgcctgctgcggctcctcgccgcgtcgggcgtgttcaccgtc

SEQ ID NO: 38870 - DNA, 281 bp, Zea mays
gctcgatgcgcacctgagcttttcatccaccttgtcccagacaaggccacgaacacgctctccatcatcgacagcggcatcggcatgaccaagtccgaccttgtcaacaacctcggtaccatcgccaggtccgggacgaaggagttcatggaagcccttgctgccggcgctgatgtgtccatgattggccagttcggcgtcggtttctactctgcctacctcgtcgccgatagagttgtcgtgaccaccaagcacaacgatgacgagcagtacgtgtggga

SEQ ID NO: 38871 - DNA, 284 bp, Zea mays
ggcgccgctctcgtccgccttctcttccatgactgcttcgtcaggggatgcgatggttctgtcctcctggacgcttcctacgacaaccctcatccggagaaggaggcgccggtgaacatcggcctcgccgccttcgacctcctggaggagatcaaggccgctgtcgagaagaggtgccccggcgtcgtctcctgctcggacatcctcatctacgcggcccgcgacgcggccagcgtcctcagcaacggccacgtccacttcgccgtccccgccggccgcctgga

SEQ ID NO: 38872 - DNA, 277 bp, Zea mays
tggaaactccacagtacctccgccgccgcctctttccgatgcacaagaacctgaagtttgtgggactgcttccaccgctcgatgcaccacaccatgtgcgcaacagaatggtccgagtttcgtgaaggtgtaacattggaaagtgatccctcaaaggggactcttgttgatgtcggattaagtaagaatgttctggttgaacaaaaactagaaccaggcaaaagagttactgtagccatgggaacaaaccgtgacctaacgacagcttgcataagga

SEQ ID NO: 38873 - DNA, 264 bp, Zea mays
cagatcctgagatccggcaccggccccaagccgataaagggccagaaggtcaccgttcactgcaccggctacgggaaggatcgtgatctgtccaagaaattttggagcaccaaggaccctgggcagcagccattcagtttcagcattggtcagggttcagtgatcaaaggatgggacgagggagttatgaccatgcaagtgggtgaagttgctcgtatccagtgcacgcctgattatgcttatggagccggcgggttcccagcc

SEQ ID NO: 38874 - DNA, 276 bp, Zea mays
cggacgcgtggcggacgcgtgggtcatcctagattttacaaaatcaaagaagcaatcagacatgactgtaatgatctacaagatacttcaatgtgattggatcggacccagaggggcgactaggagaagctccaaggccagagctacgcgagcatggacggatatccggtgcttgctttgatgcggctttgggaatcattccagggctaaaggttcgtggaactgattactccactgcagatggaccttgtattagggactacatcgatgtcacag

SEQ ID NO: 38875 - DNA, 274 bp, Zea mays
cgtgtccgcgtcgttcaaggccaggttcccagccccggcctacgccgtcgaccccgccgggtccacgccgccgcaggccgacttcgtgtggcggatcatcctgatgctgggcgcgatgcccgcggcgctcacctactactggcgcaccaagatgcccgagacggcgcggtacacggcgctggttgccaagaacgccaagcaggccgcggctgacatgtccaaggtgctgcaggtggagatctcagccggcgccgccgaggaggacgccgtggct

SEQ ID NO: 38876 - DNA, 271 bp, Zea mays
cccacgcgtccggaagctagctaacaattaagcagctcgatcgagcacacacacacttgatcactactagacagtaaacacattgcgcaaaggccgccatggcttaccgcgcctttgctacgctgcttgcagtgctagcatttgtgggcttcgcttcagttccccgtggtctggcaactgacccgacccagctccaggacttctgcgttgctgataacaagaaccctgtgctggtgaacggggtggtgtgcaagataccgaacatggtgaa

SEQ ID NO: 38877 - DNA, 270 bp, Zea mays
ctcaaggcagagcaactaaaggcaaagcgatagacctcgatgatatcaaatttcatcagtgtgtacgtttggctagatttgagaatgatagaactatatcgttcatacctcctgatggatcttttgatctaatgacatacaggcttagcactcaggtaaaacctcttatctgggtcgaagcacagattgagaaacattctagaagccgtatagaactcatggtgaaggcaaggagtcagtttaaagaaagaagcacagcaacgaatgttg

SEQ ID NO: 38878 - DNA, 269 bp, Zea mays
ctcgattcgaccccgattcgtccgcccgcgaccgggattccctccgccaagcgcggatctgaacgctgcgctccgtgtcgccgctcgaatccgccatgaagggggccaaatccaagggcgccgccaaggccgatgccaagctggcggtgaagagcaagggggcggagaagcccgccaagggcaggaaagggaaggccggcaaggaccccaacaagcctaagagggctcccagcgctttcttcgtgttcatggaggaatttcgcaaggag

SEQ ID NO: 38879 - DNA, 272 bp, Zea mays
gtcgctccgccgccgccgaaacagcacatcgctctctcgatctcagccatggcggaggtggagcagccccaggacgcggtgaagctcttcaaccgctggaccttcgacgatgtccaggtgaacgatatctcgctgaacgactacctggctgtgactgcggcgaacacgcgacattcctgccgcactccgcggggcgctactccaagaagcggttccgcaaggcgcagtgcgccatcgtcgagcgcctcaccaactcgctcatgatgcacggg

SEQ ID NO: 38880 - DNA, 274 bp, Zea mays
tttttattttttttttttttttttgaaagagaaagacatgatcattgtaccaagataacacaaatgtaatacaacaagaaccaaatttgagcgaaattacagacatggtaaaatcccttggttgaaaacaaacggatatgtccattgacgcaaggataggcgtaagacacaaccaaaagcagtcagtctccaaaactagactagttactaccatcaggagaggaactagcttaaaaacggggggcatatctcagttggccatcatcaccttcag

SEQ ID NO: 38881 - DNA, 280 bp, Zea mays
cttgaagagatcgagcttcttttgcaccacaaggtcgaggatgtcttgcaactgcggatcaagctgcggctgcggctcaagctgcaagtgcggcaagaagtaccctgacctggaggagacgagcaccgccgcgcaggccaccgtcgtcctcggcgtggccccggagaagaaggccgcgcccgagttcgtcgaggccgcggcggattccggcgaggccgcccacggctgcagctgcggtggcaactgcaagtgcgacccctgcaactgctgatcacatcga

SEQ ID NO: 38882 - DNA, 271 bp, Zea mays
cccaggtggtggttatggcactggcggatacggcagttacggtggagcaggtggtactggtggtgggagtacaggtgctcggggttcgagcaggtaccatccatatggaaaataagggcgtgttcggctggctgcaaccgacactgttgcagctgtttggactgctgcagctgcaatccatagagagaaaaatactgtagaagccgcagccgcagccggattgcagccgcagcaagccgcagcgaacaagctgtaactacaagttcaatca

SEQ ID NO: 38883 - DNA, 269 bp, Zea mays
tggaccgggctggcgagaagatctttaagaccaagtgcgcgcagtgccacacgagcgacaagggcgccggccacaagcaaggtccaaacttgaacggtctttttgggagacagtcgggtaccactgcaggctactcctactctgcgggaaacaaaaacaaggctgtagtctgggaagaagacactttgtatgagtacctgcttaaccctaaaaagtacattcctggaaccaagatggtcttccctgggctgatgaagccgcagagcgtg

SEQ ID NO: 38884 - DNA, 272 bp, Zea mays
cccacgcgtccgcccacgcgtccgcccacgcgtccgcggacgcgtggcttgctcatcatcatcatggaagctcctccaaacaacccaccgagccacagaacagcgaactaggcaggaaggagaagcctgcctgcaagaagaaccctctcgtaaaaatcaacatggacgggatccccatcggaaggaaagtagaccttgcagcctacgacagctacgagaggctatcactgggcgtcaaagagcttttccacggttttcttcaagctcaaaag

SEQ ID NO: 38885 - DNA, 270 bp, Zea mays
atcgaatcgtctcgctagtggctgccctactcgtgctgcttgccctcgccgccgtttcctccacgcgcagcatcaaaaggagtccgcggctgacaacgccgggatgttggcaggcggcatcaaggacgtgccggcgaacgagaacgacctccagctccaggagctcgcgcgcttcgccgtcaatgagcacaaccaaaaggccaatgctcttctggggttcaagaagcttgtaaaggccaagacacaagtggttgctggcacgatgtacta

SEQ ID NO: 38886 - DNA, 265 bp, Zea mays
agcttgtcgaatctgagagccctggtaccggttggaactatgccatcttctggcagctctcgcgcacaaagtctggtgatctcgtccttggatggggggacggctgctgccgtgagccccgaggtggggaggtgggagctgctgcttctgcaggcagcgatgataccaagcagaggatgcgcaagcgtgtgctgcagcggttgcacatagcattcggggttgctgacgaggaagattatgcccatggtattgatcaggtcactga

SEQ ID NO: 38887 - DNA, 261 bp, Zea mays
ggacctgggaggaattgttcccttctgcaaggggcttgatgtcattcagcaagagcaatctggtacaggaaagacagcaaccttctgttctgggatcttgcagcagcttgactatggtctggttgaatgccaggccctggttcttgctcccacccgtgagcttgcacagcaaattgtgaaagttatgcgcgcacttggtgactaccttggtgttaaagtccatgcatgcgttggaggaacatctgttcgtgaggaccaaag

SEQ ID NO: 38888 - DNA, 268 bp, Zea mays
gacgcccttcttatcttgtcgttaatgctgatgagagtgagcctggaacttgcaaagatagagaaatcatgcgccatgacccccacaagcttctggaaggatgccttattgctggagttggaatgagggcatcagctgcttacatctacattagaggtgaatacgtgaatgagcgtctcaaccttgagaaagctcggcaggaagcgtatgcagctggacttctgggtaagaatgcttgtggctctggttatgattttgatgtgcatat

SEQ ID NO: 38889 - DNA, 268 bp, Zea mays
ggaaaaaaatggatgagaggagggagaaagggaagaggaggccgaaatatcctccccctttccaaatcctggctcaataatctctccatcaggggatcctaaggctgatcactgatcaggtcggaggactcggcgggcgcagcatggaacgagaaggcgtccgtctccaaggagctcaacgccaagcacaagaagatattggaaggtcttcttcggcttcctgagaatagagaatgtgcagactgcaagtcaaagggtcctcgatggg

SEQ ID NO: 38890 - DNA, 263 bp, Zea mays
acctcactcgctacaaacaagaaacaacaagcgaaagttttctctcgagagaggaggagaagaccaacaccgggaggagatggcagcagcagcagcgacgaaggcgtcgtcgtggatggtggccatgagcgtgggcgccgtggaagcgctcaaggaccagggaggcctctgccgctggaactacgcgctgcggtccgtctaccggaccgccaaggccaacgtgcgcactgcagcagaagcttcgccgcgcagggagcaaggac

SEQ ID NO: 38891 - DNA, 265 bp, Zea mays
gagagtttgaatcaaaacaggaggcacatggtgaccaaattttgatcaaggcctcagtcctggctgagttacagaggcggatactaaaagccgaggccacagtacgtgaaaaggatgaagagaacgagatgcttcatcagcggcttcagcaatatgaaaaccgctggttagagtacgagcagaaaatgaaagctatggaggaaatgtggcagaagcaaatgcgttcgctgcaatcgagcctttccgtagcaaagaagagccttgt

SEQ ID NO: 38892 - DNA, 262 bp, Zea mays
ctcaaacacaagcctcagatctcagtcacctgcggcgccgcttcgttcgtgtggaggggagaagagaggaaatggcggcgaccgagggcgtgctcctggggatgggcaaccccctcctcgacatctccgccgtcgtcgatgacgccttcctgacaaagtatgacatcaagctgaacaatgctattctcgctgaggagaagcacttgcctatgtatgacgagttggctagcaagagcaatgttgaatatattgccggaggagc

SEQ ID NO: 38893 - DNA, 278 bp, Zea mays
cagacacacaccgctgcttcaagaaaccaccgagagcccaaccgcacaggcaggagagagagcagggagccagggacagtagcgtggggccggggagcaacgatggaggggaaggaggaggacgtgcgcctgggcgccaacaagttctcggagcgtcacccatcggcacggcggcgcagggcgcggcgccggggacgacgacaaggactacaaggagcccgcgccggcgccgctgttcgagccgggggagctcaattcctggtccgtctacggggggg

SEQ ID NO: 38894 - DNA, 272 bp, Zea mays
gggctacctcaggagcctcagttctttggacctgtcgaacaatgcgctcaccggtgagataccggcgagtttctccgagctcaagaacctgacgctgcttaacctgttccggaacaagttgcgcggcgacatccccggcttcgtcggcgacctgcccagcctcgaagtgctgcagctgtgggagaataacttcaccggcggtgtgccacgccgcctcggccgcaacggcgcctccagctgctcgacctctcgtcgaacaagctcaccggcac

SEQ ID NO: 38895 - DNA, 298 bp, Zea mays
cgcagtcggctgccgcagacaggtagtagccggcgcgccgtcaccgtatcctcagatcagaggcaagcagaaaccacaccactctactgacgcccgacgagcagtgtaacattttccttcagccatgggtaaggagaagactcacatcaacattgtggtcattggccatgtcgactctggcaagtcgaccaccactggccacctgatctacaagcttggaggtattgacaagcgagtcattgagaggttcgagaaagaggctgccgagatgaacaagcggtcattcaagtatgcgtgg

SEQ ID NO: 38896 - DNA, 299 bp, Zea mays
agagagagagagacggccaacgaggcgaacaggccggccaatctagcatcagcgcgcggggtctgagagcagagcgacagggcgccatggcggcatcggtggcgctgagcagcgggcaccggatgccggcggtggggctgggcgtgtggcggatggagaaggcggacatccgcggcctcatccacacagcgctccgcgtcggctaccgccacctggactgcgccgctgactaccagaacgaagctgaagttggtgacgcgctcgcagaggcattccagaccggactcgtcaagcgggag

SEQ ID NO: 38897 - DNA, 297 bp, Zea mays
ctgctcgcctctcgctccgaagcttctcctctcgcgtatcctaccaggagggtgggagacccagggagcggaggtgtgcgaacacgcctcgcaccacgcgctgcggcctgcggggcgagagatcggggcctgagctagggtctggtggcggagatgtcgacgccggcgaggaagcgcctgatgcgggacttcaagcgcctgcagcaggacccgcccgccggcatcagcggcgcgccgtacgacaacaatatcatgctctggaacgccgtcatattcgggtatcagcccgcctatttc

SEQ ID NO: 38898 - DNA, 297 bp, Zea mays
ccaggatccagctgaaacgacgggagaggacaaattccactccttccacccggtggccaccatcctgagctacctcaccaaggcacccctggttccccctggcacaccggtggtgaacgctctggccaagcagagggcgatgctggagaacatcatgagggcctgcgttgggctggccccagagaacaacatgatcctggagtacaagtgagccaagtggcgtgccctgcagcgcgaggttagctgctggaagggaactagaaaggcgagattagctgtgggattgtgttgggcttg

SEQ ID NO: 38899 - DNA, 294 bp, Zea mays
agcagaccgaattcccctactatgcaaacaccgacctcttaatcgtgttcccatgcgagcacgaatgtcacacaggtacaaatacaagttcctccgagcgaccacctcgaacatccccagcagtgccgtgaaggagaaccgcaggaccaaggtctcgatcgggaggggagggatgctgaaggtccagcacctggtgtcgcttgccaggccaggcatgccgtacttccgtagcattggtggagggaacgagcagacgagccggatcgcgcatatagagttcttcgtgaagccaga

SEQ ID NO: 38900 - DNA, 297 bp, Zea mays
cgtcctctgttacctctccctccgccgccacacccctcccattcaccgccagcgccaattccataccgtcctccgccacctctgctgagagcgagaagagatggcaggcaagggtgatgggccggcaatcggcatcgatctcggcacgacgtactcttgcgtcggcgtctggcagcacgaccgtgtcgagatcatcgccaacgaccagggtaaccgcaccactcccctcccattcaccgccaccgacaattccataccgtcctccgccacctctgctgagagcgagaagagatggca

SEQ ID NO: 38901 - DNA, 296 bp, Zea mays
aacgactcaaacccgagccgcctcccgcaagtatcagagctcaggaatcggcgccatggcgagtgagacggagaccgtcgcatttcaggctgagatcaaccagctgctctcacgcatcatcaacaccgtctacaccaacaagcagatcgtcctccgcgagcttatcgccaacgcttccgatgcgctggacaagatcaggttcgagagtctcaccgacaagagcaagctcgatgcgcagctgagcttttcatccaccttgtcccagacaaggccacgaacacgctctccatcatcga

SEQ ID NO: 38902 - DNA, 294 bp, Zea mays
atctgctgatgcactaaatgcaaatgctggctttgttactttcgttgtttaccctcggcatgttgagggtaaaaagctagatagaacagtttggaatttgttgacatttcatgcttatgtaagctatcatgtaaagtgttctgaaggattcatgcataccaggatgaggcgcagggttgagtcgctgatccaggcgttggaccgggcgaagtctgatgctgagaagttgaagaagttggtacacggtggatctttcaaaagactgagcctgaagaacgagggggactcgcgttt

SEQ ID NO: 38903 - DNA, 291 bp, Zea mays
ggtggacatggtaattgtaccagctacaactggtcagatgggcgttttgccaggccatgttgccacgattgcagagctcaagcctggtgttctctcagtacatgaggggaacgatgtgaccaagtactttgtgagcagtggatttgctttcgtccatgcaaactccattgctgatattgtggctgttgaggctgtccctgtggatcagatcgacccagcttttgttcagaagggtctcgctgaattcactgccaagcttggttcggcctctactgacctggagaaggctga

SEQ ID NO: 38904 - DNA, 299 bp, Zea mays
ctcgcactcgcacgtacaccacactagttaccacagacgacgggcgccatgaaagtcccggtgcttctcctcctggtctccctgtgcttctcgctcgcgctcgcgtggcaaacggacacggaatcgggctcaggcaggccgtaccactacggcgaggagagtttccggcactggacgcgctcccggcaggaccggttcagggtgctggaacggttcacccacgagctgctggaggacgccgtcggcaactaccgcgtcgccgagctggaagccgcgccgcgcacgttcctgcagcccag

SEQ ID NO: 38905 - DNA, 290 bp, Zea mays
cttggaacttcaacttcatgggagtgaagcacgacccacagatgaagtacaacatgaagctgggcatgccccgggacttctatcacgaggaccacaggccgacacacttccttgagttcagcaacatcgaggagggagaggtcgctgaaggtgatagggaggacacattcacgtagggcgctgggcgcctgttttagaaactcagtatctcaaacgcactttagctctgttttgaatggcaatgtgtgaaagctgtaacctgactcgacgggtgtcatctgtttttttgg

SEQ ID NO: 38906 - DNA, 279 bp, Zea mays
cccgactcgtcagacgtcagccagcagttcgaaaccaaggatcgatccaggagcttccggaagctaggcgcgcgcgagtcgaggtgctggtgccggtgccgcccatggatcgggctcgcggatccgcgttcctgctcggcgtcctgctcgcaggatccttgttcgcgttttcagttgctaaagaggagaccaagaagctcgggaccgtgatcggtatcgatctcggtaccacctcatcctgtgtcggtgtgtacaagaacggtcatgtcgagatcatcg

SEQ ID NO: 38907 - DNA, 285 bp, Zea mays
ctcgaggaatggcgtcggtgcaggtctccggcgcgggggtcggtgccgcggccttctctgtgaaggggaaggcctccaccggtgcgctccggcttcgctctacgttgaccttcggcgaggtctgcccggcgcggcgggcgttccgcggcctagtcgtcagggccgctaccgtcgtcgcccccaagtatacaacacttaagcccttggctgatagagtgcttgtaaagattaactcttccgagaagaagacaactggtggaatcttgctccctacgactgctcagt

SEQ ID NO: 38908 - DNA, 287 bp, Zea mays
cgccacagggtagctggaaccggcggcgcgttcccccatgcagctgagcacaagacgggcggcggcatccttcgccgctccggcagcagctccagctccagcagctcgtcatctgaagacgacggcatgggtgggcgccggaagaagggcctgaaggagaagatcaaggagaaaatgccaggaggccacagggaaggccagggccaggcgacggccaccggtgcgtacggcgggacagggtacgtggctgggccgacgaccggaggcccccacgagaagaagggtgt

SEQ ID NO: 38909 - DNA, 286 bp, Zea mays
ccatgccgctcccgacgcccagaattcacgagaacgcacccggccgcctccgccttccgtccccatccagatgatgcttagggtttccgcgtctccggccgccgcggtggccaaccagctctctggtggggccgcggcccggctcctgccagggtgacggcgcacgcagcgtcgtctcgctgtccgccgccgccgccggcaacgggaaggaggtgctcagcggggtggtgttccaacccttcgaggagatcaaggaggatctcgccctcgtggcccagtgccccga

SEQ ID NO: 38910 - DNA, 283 bp, Zea mays
ctcctctcagctcatgcacgccaacttccaggcctttcaccactgccaatcaaatctctcgctcgacgctggtcacacgcacgcccagccgagctcctgcttccctctcccgcggtgcctggcttcctccaagcccgcccccaaccacaaccacgccctggtccgcgctccagccctccccatcctcttcttgctatggtgcccagccgagctctatctccttcctgccatggccgacgcccctccctgctgcagctcgatgcactcccctgcagcaagcagt

SEQ ID NO: 38911 - DNA, 205 bp, Zea mays
cttcggcataaagctgcctctttttgtgcaccatctgtaacctaaggtttttgccatgattactactatataccatgcgaaggttgtgggttttgaagggttatatcagttactcatggtctgcccaattatccaagctatgctccttccttcgtctgttatacctgttttccgcatttcctcgtcgagatcattgatgggaaga

SEQ ID NO: 38912 - DNA, 303 bp, Zea mays
gtcaaggaatcattgccttaaacatggaagatggaactcttcaccgtttccgtgcttctaatacaattctagccacaggaggttatggcagggcatatttctcagcaacctcagcacacacttgtactggagatggcaatgctatggttgcacgtgctggtttacctcttcaggatcttgagtttgtacaattccatcctacaggcatttatggtgctggatgcctgattactgaaggttctcgtggtgaaggtggtatccttagaaatagtgaaggtgaacggttcatggaacgatatgctc

SEQ ID NO: 38913 - DNA, 311 bp, Zea mays
ggctcaagtatgctcttacataccgtgaggtcatttccatcctgatgcaacgccatgtacttgttgatggcaaggtcaggacagacaagacctaccctgctgggttcatggatgtcatttccatccccaagaccaatgagaactacaggctgctgtacgataccaagggccgcttccgccttcacccaatcagggatgaggatgctaagttcaagctttgcaaggttaggtctgttcagtttgggcagaagggcatcccttatctgaacacgtatgacggccgcaccatccgctaccctgaccccctcatc

SEQ ID NO: 38914 - DNA, 313 bp, Zea mays
ccagtgtagtatctgttcttatcagttgaatatctgatatgtggaccatgtgttcacttcgatattaaatttattttttgtcgcggagggctcactacagtcaagtctaaattacttttttatcttgttttgttgatcggccttgaaatggtgtctgaaataaagtccgagcacgtcaatcatactcaagttgaaaatctgtttatcagttatagagaatattatgcggtgatttatgtataaaaaaatatttgtagggctagtttgaacctctattttcgttttctatttttcccacagaaagaaaatgaat

SEQ ID NO: 38915 - DNA, 304 bp, Zea mays
agcagagcgagcagcaggagtcggcgctggtgacgtgctcccaggagagcaccctcggcgaggcgatcgaggcggcgacatcgaggcacgtgcaccggctgtgggtggtcgacgaggaagggctcttgcgtggggtcgtgtcgctcaccgacatcctccgggcagtgcgggaggccgcgctcggcgaggacctggagctgcacagcatcgtgccgtgagcccgtgggccgtgagtcgtgacgtccaagaacaagctcgtagctgtttctgcccatagtgtccgtccacctgtcgtgctcctgca

SEQ ID NO: 38916 - DNA, 272 bp, Zea mays
cgcgccaacgagaactactgcctggccgtccgcgacggcgccgtcgtgctggcaccggtcaaccccaaggacgaccaccagcactggtacaaagacatgcgcttcagcacccgggtcaaggacgaggaaggcatgccggcgttcgcgctcgtcaacaaggccacggggctcgccatcaagcactccctcggccagtcccacccggtcaagctcgggcctttcaacccggaccaggaggacgcgtcggtgctgtggacggagagcaaggacgt

SEQ ID NO: 38917 - DNA, 302 bp, Zea mays
cgaccagtgaggcgcggttggccagccagcggcgagccaaaccgagcgtacgccatggatcgcgagtcgggctccaagcccggcagccgcggtgccgcctccgcccagaatgaggctattgaccggcgggagcgtctccgccgcctggccctcgagaccatcgacctcgccaaggatccctatttcatgcgcaaccacctcggcagctatgagtgcaagctgtgcctgacgctgcacaacaacgaggggaactccctagcccacacgcaaaggaaagaggcaccagaccaacctcgccaagc

SEQ ID NO: 38918 - DNA, 122 bp, Zea mays
attcctttactgttcacggattcctgtatttgcaatcgcatcattcgggaaccaatctttgccaaggcagaggtataactgtattcaatgattaaatatactgagtagatataatatggttc

SEQ ID NO: 38919 - DNA, 298 bp, Zea mays
cgaggaagggtacccggccttcgcgctcgtcaacagggtcaccggcgaggccatcaagcactcccagggcgagggccacccggtcaagctggtgccctacaaccccggctaccaggacgagtcggtgctgtggacggagagccgcgacgtcggccacggcttccgctgcgtccgcatggtcaacaacatctacctcaacttcgacgccttccacggcgacaaggaccacggcggcgtgcgcgacggcaccaacatcgtgctctggaagtagtgcgagggcgacaaccagcgctggaag

SEQ ID NO: 38920 - DNA, 300 bp, Zea mays
gcttgtttatctatcctctgaagattgtcatcaagacctgtggcactaccaagctcctgctcaccattccaagaatccttgagcttgctgaagagctgtctatgccacttgctgctgtgaagtactcccgtgggacgttcatctttcctggcgcacagccagccccccacaggagcttctctgaggaagttgctgcacttaaccgctactttggcggcctgaaatctggtggtaatgcttatgtgattggagatccagcaagacctggacagaagtggcacgtcttctacgccactgagt

SEQ ID NO: 38921 - DNA, 298 bp, Zea mays
ccgtcgtccgccgccgccgaagacggaaggagaagatggtacggccgtctcctcgcccccatggcccacgagaagaagctgtccaacccgatgcgggagatcaaggtgcagaagctcgtcctcaatatctccgtcggggagagcggcgaccgtctcacccgcgccgcaaaggtgctcgagcagctcagcggccagacccccgtcttctccaaggcgaggtacacggtgcggtcgttcggcatccggcgtaacgagaagatcgcctgctacgtcacggtgaggggcgagaaggccatgc

SEQ ID NO: 38922 - DNA, 296 bp, Zea mays
ccgtcactcaacacagcacaggcagctcgagagagagagagagagaaagacgtcgtggttcgggcaccaccaacacaaccagccggctcccccggcgtcgggccccaaccaggtgttcaagatcttctgccgcgccaacgagaactactgcctggccgtccgcgacggcgccgtcgtgctggccccggtcaaccccaaggacgaccaccagcactggtacaaggacatgcgcgtcagcacccgggtcaaggacgaggaaggcatgccggcgttcgcgctcgtcaacaaggccacgg

SEQ ID NO: 38923 - DNA, 300 bp, Zea mays
cgcgactacagggcgctgtacaagtacttctccacggtggcgaacaggcgctggacaccgccgagggcctggggcctgtcgcgcgaggaggcctgccacaacctcctcttcgccaccaccttcaacagctacggcggcctcaaggtgctgttcccgggcctgctggccaacgtggccagcggcggcgagaagctccacgagcggctggtggccgagatccgcggcgccgtggccgacgccggcggcaaggtcaccctcgcggcggtggagacgatggagctggccaagtcggtggtgtgg

SEQ ID NO: 38924 - DNA, 296 bp, Zea mays
cggacactatccacagataatgcaagatctcgtgaaggagaggctgcccaggttcactcctgagcaggctaaactggtgaagggctcggcagactacatcggtatcaacgagtacacatccagctacatgaaggggcagaagctggtccagctggcgcccagtagctactctgccgattggcaggttcaatatgtttttgcacgcaatggcaaaccgattggaccacaggcgaattctaagtggctctacatcgccccgacggagatgtacggctgcgtgaactacctcaaggaga

SEQ ID NO: 38925 - DNA, 281 bp, Zea mays
  unsure (1)..(281): unsure at all n locations
cacacacccgagcatatcacagtgacagacacgatggtgagcgccagacttgctgtcctcctcgccanccgcctatgcgctgccgccgcagtcgcgtcgtcctgggaggacgacaaccaccaccaccacgggggccacaagtccgggcaatgcgtgcggcggtgcgaggaccggccctggcaccagcgcccccggtgcctggagcagtgcacggcggaggagcgggagaagcggcaagatcggagcaggcacgaggccgacgaccgcagcggcgagggctc

SEQ ID NO: 38926 - DNA, 245 bp, Zea mays
gtgggccgggacctcaagggcggcaagaacaacgtggtcgcggtgatcggcgacggcgccatgacggccgggcaggcgtacgaggccatgaacaacgccgggtacctggactccgacatgatcgtcatcctcaacgacaacaagcaggtgtccttgcccacggcgacgctcgacgggccggtgccgcccgtaggcgcgctcagcagcgacctcagcaagctgcagtcaagcaggccgctcaagga

SEQ ID NO: 38927 - DNA, 277 bp, Zea mays
ggaggcgtacggcgggaagcagcagcagcagcaggcgacgacgacgaaggtgacgttcccgatcctggcggacccggcgcgggacgccatccggcagctgaacatggtggaccccgacgagaaggacgcggcggggcggagcatgccgtcccgcgcgctccacgtcgtcgggcccgacaaggccgtcaagctgagcttcctgtacccggccaccacggggcggaacatggacgaagtgctgcgcgctgtcgactcgctgctcaccgccgccaagcat

SEQ ID NO: 38928 - DNA, 292 bp, Zea mays
cacacacagccgagctttgcttaggcaagatgaacaggaagccaggagactgggactgcagggcgtgccagcacctcaacttcagccgccgagacatatgccagcgctgcagcgagccacgtggagttgctgatcgtggcggcggaggaggaggaggcgactacgccagcttcggtggccgcggtggctcctccttcggcggcggctttggcgctgctggctctgacgtccggcctggtgactggtactgctcctgcggcgcgcacaacttcgccagccgctccagctgctt

SEQ ID NO: 38929 - DNA, 286 bp, Zea mays
caccccccgagctcagcttagctccaccccagctccaatcacagtcgtgaccagagcgcgagagctagctagagggccgtgaaaatgccgatcaataggatcgccctggggagccaccaggaggtgtaccacccgggcgccctcaaggcggcgttcgctgagttcatctccaccctcatcttcgtcttcgccggccagggctccggcatggccttcagcaagctgaccggcggcggcccgacgaccccggcgggcctgatcgcggcggcggtggcgcacgcgttcg

SEQ ID NO: 38930 - DNA, 287 bp, Zea mays
gaaaggaaatcgattcccccgcatccgatctcttcggtgctagagaaatataggccgccgcctcctcctcattcggtgaaaggtgggcggttagggttgggagatctcttgactcacgacacgagcagcagaattcgtcgagggccgctggttgctgcgagaggtccgggccttcgtgggatcttgaaaattgaatgttctaatggagtccaagggtggcaagaagaagtctagcagtagtcgttcctccctgatgtacgaagctccccttggctacagcatcgagg

SEQ ID NO: 38931 - DNA, 279 bp, Zea mays
cacccgagcatatcacagtgacagacacgatggtgagcgccagaattgttgtcctcctcgccaccctcctatgcgctgccgccgcagtcgcgtcgtcctgggaggacgacaaccaccaccaccacgggggccacaagtccgggcaatgcgtgcggcggtgcgaggaccggccctggcaccagcgcccccggtgcctggagcagtgcagggaggaggagcgggagaagcggcaagagcggatcaggcacgatgccgacgaccgcagcggcgatggctcgt

SEQ ID NO: 38932 - DNA, 284 bp, Zea mays
cgaagcgaccaacccagccatggagaaggcgatcgatcggcagccggtcctcctggcgcacctcctcccctccgcctccgccgcctcctcgcagcctcagcttgcggcgtcggcgtgcgcggccggggacagcgccgcctaccagaggtcctcctccttcggggacgatgtcgtcgtcgtcgctgcctacaggacgccgatatgcaaggccaagcgaggaggcttcaaggacacctacccagaggacctcctcactgttgttctcaaggctgttctggacaaca

SEQ ID NO: 38933 - DNA, 247 bp, Zea mays
cggaagcacacaccgcccgtccccgatctccgatcccctcgtcgatccaaagatgcagatcctcgtcaagaccctcactggaaagactatcaccctcgaggtggagtcttctgacaccattgacaacgtcaaggccaagatccaggacaaggagggcatccccccggaccagcagcggctcatctttgccggcaagcagctcgaagacgggcgcacacttgccgactacaacatccagaaggagagc

SEQ ID NO: 38934 - DNA, 149 bp, Zea mays
ctttgttgcaaactcagacaacttgggtgctatagtcgacaacaagatcctaaaccatctgatcaataaccagaacgagtattgcatggaggttactccaaagacgctggctgacgttaagggtggcactctcatctcttacgaaggaa

SEQ ID NO: 38935 - DNA, 291 bp, Zea mays
cgagctagtgaactcttgaagccagatgagatcatagaacaagtagactctaggactattgctgtatctccgcttgccttgcaatgtaaagcaggaagacgtccaatcttttttcacaaattatgcaaaggtaaatagcgtgagacttccacgcaatattgccaacaaaaaacacttctgtgggactcgctttggttgagttttctgaagaagaggaagcaaaaagaattatggagactgctttagtatttgcaggggcaaatctggaaataaggccaaagaaggagtttg

SEQ ID NO: 38936 - DNA, 310 bp, Zea mays
cagaaaacccagccgccgccgcatcggcctcccaggtaagcagtagcgtccaccccagccgccgccatgaagcgcaacccccgcgtcacgagctcccgccggaagtgccgcaaggcgcacttcacggccccgtcctccgtccgccgcgtgctcatgtccgcggcgctatcgacggagctccgccacaagtacaatgtgcgttccatcccgatccgcaaggacgacgaggtgcaggtcgtgcgcggcacctacaagggccgtgagggcaaagtggtgcaggtgtaccgccgtcgctgggtcatccacgttg

SEQ ID NO: 38937 - DNA, 311 bp, Zea mays
gagaatttgtttgaagcaaaggaggagtataaaagagagacaagattcacctcacagtggcccccaaaagagataatcacaaagatcgaagaagctgcaaagccgcttggctttgatgttcagaagaaaaaatacaagatgcggatggagaacccgaaagcaggtagaaagggcaatctgaatgttgcaactgaggtcttccaaatagccccatccctgcatgtagtcgagctaaagaaggcgaagggggacactctggagttccaaaagttctacagaagcctgtcgacccagctgaaggatgttgtgtg

SEQ ID NO: 38938 - DNA, 309 bp, Zea mays
cccagatccaattcgcgagttcttcctcctctgcggccatggcgctctctgtggagaagacctcgtctggacgggagtacaaggtcaaggatctctcgcaggcggacttcggccgcctcgagattgagctggccgaggtcgaaatgcccggcctcatggcgtgccgcgccgagttcggcccgtccaagcccttcgccggcgctaggatctcggggtctctccacatgaccatccagaccgccgtcctcatcgagaccctcaccgcgctcggcgccgaggtccgctggtgctcctgcaacatcttctcca

SEQ ID NO: 38939 - DNA, 312 bp, Zea mays
cgcctcgccaagcgcacagccgccgcagcacatcgctctcttgatctcagccatggcggaggtggagcagcaacaggacacgccgaagctcttcaaccgctggaccttcgatgatgtccaggtgaacgacatctcgctgaacgactacctcgctgtgaacgcgacgaagcacgcgatgtacctgccgcacaccgcggggcgctactccaagaagcggttccgcaaggcgcagtgcccgatcgttgagcgccttacaaactccctcatgatgcacgggcgcaacaacggcaagaaggtcatggctgtccgcat

SEQ ID NO: 38940 - DNA, 320 bp, Zea mays
tctcgccgtcgtctagacctcttcacgcactgggaaggttagagtccgacatcactggcgaagatcatcctgatctcatcatgtgccggaacgagcctggcatcgcgattggccgcctttgcgagaactgtgatggcaagtgtgttgtctgcgtatcgtacgtgcgcccatgtacgcttgtccgggtctgcgacgagtgcaattatggttcgttccagggaaggtgtgtgatctgtggaggagtcggcatctcagacgcttactcatgcaaggagtgcacccagcaggagaaggaccgggacggttgccccaagatcgtg

SEQ ID NO: 38941 - DNA, 309 bp, Zea mays
  unsure (1)..(309): unsure at all n locations
ctctcccctcgcctatctcctcccccgacgcgcctgcaccaacagtggaagagctcgctagcgaacaggcctgngttgcggcgcacagcgtgaacgcgttcggcaagagaccctcctcgagcgtctcaccgaaaaggcggagcgcctccgcctcagcgccattttgcgagacgcaggacaccatggccgtccaggagatgaggtcccgcacgccgacgggcattccgtcgaacacgctgcgcgcagcggccacgacgctacacatgcagtagagcgtgaggagcgagttggcgacgacggaatcagtct

SEQ ID NO: 38942 - DNA, 307 bp, Zea mays
agccttctgcgcctccatttcggcctctgtcccttgcaagttcaatctcacctccaaccatgggtaaagagaagtcccacatcaacattgtggttatcggccatgtcgactctggcaagtcgaccaccacaggacaccttatctacaagcttggaggcattgacaagcgtgtgatcgagaggtttgagaaggaggctgctgaaatgaacaagcggtccttcaagtacgcgtgggtgctcgacaagctcaaggctgagcgtgagagaggtatcaccattgatattgctctgtgcgagtttgagaccac

SEQ ID NO: 38943 - DNA, 300 bp, Zea mays
ggcctcttctccttctacgaggacggccaccaggagtgctgccgggtgcgcaaggtgcggcccctgcgcagggcgctcaaggggctcagggcgtggatcaccggccagaggaaggaccagtcccccggcaccagggccagcatcccccttgtccaggttgatccttccttcgaaggcctggatggcggggctggtagcttggtcaagtggaaccccgtggccaacgtcgacggcaaggacatctggactttcctgcggaccatggacgtacctgtcaacaccctgcatgctcagggctac

SEQ ID NO: 38944 - DNA, 280 bp, Zea mays
gtctccgcccccgacgactgcgacaggttcgttcggaccgcgatcagtcactacgaccgattggaccatctcgtgtgcaatgccggcgtcgcgagcgtcggcgcgttcgaggagatcccggacgtcaccagctacagctcccagcttgacgtcaatttctggggttccgttcaaacaaccttcgctgccctgcctcacctgaagaggagccgaggaagaatcgtggtgacggcatctgcgaccggatggaacccagttcctagaatgagcatctacaacg

SEQ ID NO: 38945 - DNA, 307 bp, Zea mays
aggatgccgcgtcgcttgatttggtggagtgcgcgatgaagaagcccgagtggagcgtgatgggtgggcgggaccatttcctcgtcgcggggaggatcacttgggacttccgaacgctgacggaggaagagtcggactggggcagcaagctgcttttcctgccggctgcaaggaacatgtcgatgctcgtggtggagtcgagcccgtggaactcgaatgattttgggataccatatcctacgtacttccacccaggcaaggacgccgaagttttcctttggcaggatagaatgaggagcctggaacg

SEQ ID NO: 38946 - DNA, 298 bp, Zea mays
gccagagaacaccaactttgcagttgaattgacatacaactatggcgttgacaagtatgacattggaacgggctttgggcatttcgcaattgctaatgatgatgtgtacaagttagctgagaatatcaaatccaagggtggtaagatcacccgcgaacctggtcctgtcaagggaggatccactgttattgccttcgcacaggatcctgatggctacatgtttgagcttatccagagggctgacacacctgagcctctttgccaggtcatgcttcgtgttggtgaccttgagcgttct

SEQ ID NO: 38947 - DNA, 284 bp, Zea mays
agcagttcgtaaccaaggatcatccagaactcgggcggagagggagacggcggcgggcgaggttcaagtggtgctggtgtcggccatggatcgggttcgcggatccgcgttcctgctcggcgtcctgctcgcaggatccctgttcgcgttttcagttgctaaggaggagaccaagaagctcggcaccgtgatcggtatcgatctcggaaccacctactcctgtgtgggtgtgtacaagaacggtcatgtcgagatcatcgccaatgaccagggtaaccgtatca

SEQ ID NO: 38948 - DNA, 294 bp, Zea mays
ccgcagctcccatcctctcgctcgccaggagaagcagccgccgttgctagtgccgcgtccacagaatggggggtttcgtgaagacccataagaccaatgcgtatttcaaacgtttccaagtgaaattcaagagaaggcgggctggcaagacagactacagggccaggataaggctgattaaccaagacaaaaacaagtacaacacacccaaatacagatttgttgtgcgatttaccaacaaggacatcactgcacaaatcatatctgctagtatagcgggtgatatggttcttg

SEQ ID NO: 38949 - DNA, 211 bp, Zea mays
ctcagccccggcccacggcaggctcccggagtgcttcatcatcccggccgacaagctcccgcaggccaaggccacctcagcgacggtctccctgcccatcgtgcgacatctccctcggccgcgacgaggtgcggcgcgccatcctcgaggccggcaaggagatcggcttcttccaggtggtgaaccacggcgtctccctggaggcgatgca

SEQ ID NO: 38950 - DNA, 309 bp, Zea mays
atgtcctcaaggagggaggcgtcctccctggcatcaaggtcgacaagggcaccattgaggttgttggcaccgacaaggagaccaccacccagggccacgatgacctcggcaagcgctgcgctaagtactacgaggccggtgcccgctttgccaagtggcgtgctgttctcaagattggccccaacgagccgtcacagcttgccattgacctgaatgctcagggtctggctcgctacgccatcatctgccaggagaacggtctggtgccaattgttgagcctgagatccttgttgatggccctcatgaca

SEQ ID NO: 38951 - DNA, 293 bp, Zea mays
ctgtgctatccgctacggtttatctgctcgaggaatggcgtcggtgcaggtctccggcgcgggggtcggtgccgcggccttatctgtgaaggggaaggcctccaccggtgcgctccggcttcgctctacgttgaccttcggcgaggtctgcccggcgcggcgggcgttccgcggcctcgtcgtcagggccgctaccgtcgtcgcccccaagtatacaacacttaagcccttggctgatagagtgcttgtagagactaactcttccgagaagaagacaactggtggaatcttgc

SEQ ID NO: 38952 - DNA, 210 bp, Zea mays
gttataccttcacaaccaccgccgagcgagaaattgtaagggacatcaaggagaagcttgcgtatatagctcttgactacgagcaagagttggagacagccaagaacagctcctcagttgaaaagagctatgagctacctgatggccaagtaatcaccatcggtgcagagagattcaggtgccccgaggtcctcttccagccatccatga

SEQ ID NO: 38953 - DNA, 304 bp, Zea mays
gcagccgcggcgaggtcgtccgtcggattcggaagctcagttattactgaaaagataatacagtacctatggcttctctggacgccgtgcgaggagacctcgccctgctgattctgtacctgaacaaggccgaggcgcgggacaagatctgccgagcgatccagtacgggtccaagttcatcagcaacggcgagccagggcctgcgcagaacgtcgacaagtccaccagcctggcccggaaagtgttccggctctgtaagttcgtcaacgatctgcacgctttgatcaccctcctgccaaggga

SEQ ID NO: 38954 - DNA, 305 bp, Zea mays
acaacatgtgctgccaacatatgctcaaaatggggaaattttgcaagaccttttagtgcaaaagctagtggaaatgaggttattgggattgatttggggacaactaactcttgtgttgctgttatggaaggaaagaacccaaaagttattgagaatgctgaaggtgcgagaacaacaccatctgttgtcgcatttactcagaagggtgaaagacttgttggtactccagccaagcgccaggcagtaaccaatccccagaatactttctttggaacaaagaggatgattgggcgacgctttgatga

SEQ ID NO: 38955 - DNA, 204 bp, Zea mays
aacgcaaacacgaccacagacagagcgcgcatcaaggccttttttttttgagacaacaaggaggacacgaggagatggcggtcacgatcaccatcggtaaggcgaggcagatcatcgacagccgcggcaacaccaccgtcgaggtggacgtaggcctcagcgacggcagctacgcgacgagggccgtacccagcggcgcatcca

SEQ ID NO: 38956 - DNA, 302 bp, Zea mays
ctcgcactcgcacgtacaccacactagttaccacagacgacgggcgccatgaaagtcccggtgcttctcctcctggtctccctgtgcttctcgctcgcgctcgcgtggcaaacggacacggaatcgggctcaggcaggccgtaccactacggcgaggagagtttccggcactggacgcgctcccggcagggccggttcagggtgctggaacggttcacccacgagctgctggaggacgccgtcggcaactaccgcgtcgccgagctggaagccgcgccgcgcacgttcctgcagcccagcca

SEQ ID NO: 38957 - DNA, 299 bp, Zea mays
cagcaagcaggctgggacgcagagctggtgaaccagtcctacccttgggtcgaagagaggatcgtccactggcccaaagtggcgccatggcaggctgcgctccgggacgggcttctggaagcaggggtctcaccatacaacgggtattcctatgaccacctctacgggactaaagtcgggggcaccatattcgacgacaccgggcgccggcacacggctgccgacctccttgctgctggaaaccctagcaacctccgggtgctgctccatgctaccgtcgacaagattctcctcgcaag

SEQ ID NO: 38958 - DNA, 204 bp, Zea mays
cagccacgccgacgcgcacggcatctgctacgtggcggaacgcgagggagtggtgacgacgatcgagaacggcgagaggcggtcatacaccatcaagcaaggccacgtcttcgtggcgccggccggggcggtcacctacctggccaacaccgacggccggaagaaactggtcatcgccaagatcctccatgccatctccgtgcc

SEQ ID NO: 38959 - DNA, 199 bp, Zea mays
cccgagcatatcacagtgacagacacgatggtgagcgccagaattgttgtcctcctcgccacgcgcctatgcgctgccgccgcagtcgcgtcgtcctgggaggacacaaccaccaccaccacgggggccacaagtccgggcaatgcgtgcggcggtgcgaggaccggccctggcaccagcgcccccggtgcctggagca

SEQ ID NO: 38960 - DNA, 304 bp, Zea mays
gataactcaacatggatttaccttgctccaggcaagctctttggtgggaaacacatcatgaagccattcaaggctatgtttccacgtcttaaaaaccatagtatgatcagaagtggaaagctggaagaaaatatccgaaggctagcagggtcagcagttgattacatggtctgtctcctgtcggacatttttatatatgatggtccgagcaacatcgcagacaatctcatgggtcatcgtctatactaaggtttccgaaccacgatcacaccaaacaagaaggcccttgctcggatattcatgg

SEQ ID NO: 38961 - DNA, 202 bp, Zea mays
tgttcgtggattcacgcggtggtgaacaatctggatgacgcgcacgagcagatcgacacggccattgccacggcactgagggagagcaagcccgtgtacctcagcatcagctgcaacctccctgggctgcctcatcctaccttcagccgcgacccagtgcccttcttcctcacacccaggacgagcaacaagatggggctag

SEQ ID NO: 38962 - DNA, 304 bp, Zea mays
cttgtgcaaagaggaagggccaccacctgttatggaggaccgacggccaaggaagaggggaagaaaaccagcaaatgggagggaagaaccacttaaccacgtcgaggcggagcgccagagcgagggagaagctcaaccagcggttctatgcgcttagagctgttgtgccaaacatatcgaaaatggacaaggcgtccctgctgggcgatgcgataacgtacatcactgacctccagaagaagctcaaagagatggagacggagagggaaaggctgttggagtcgggtatggtggacccaaggga

SEQ ID NO: 38963 - DNA, 301 bp, Zea mays
caatctcacctccaaccatgggtaaagagaagtcccacatcaacattgtggttataggccatgtcgactctggcaagtcgaccaccacaggacaccttatctacaagcttggaggcattgacaagcgtgtgatcgagaggtttgagaaggaggctgctgaaatgaataagcggtccttcaagtacgcgtgggtactcgacaagctcaaggctgagcgtgagagaggtatcaccattgatattgctctgtggaagtttgagaccaccaagtactactgcacggtcattgatgcccctggaca

SEQ ID NO: 38964 - DNA, 197 bp, Zea mays
agagcggaggcggagatggcgacgcggatgaaggacgtggcgcggaggtcgaccaagaagtacgtggaggaggcgctgtaccggcgtctgttccggaagggtcgacgccgagcgttcgagaggaggtcgatggcttcctcgacagccggaagcgggcgttcaagtgggaggtgggcgtttgcatccgccggatgcgg

SEQ ID NO: 38965 - DNA, 219 bp, Zea mays
gacgagaagaggagagagagacgcgaggaaggagggagagagcacgggggcttgatcgaagatggatgccggagcaaaggtggtgaagaaggccgcggcggggcgtcgcggcgggggcggccccaagaagaagccggtctctcgctccgtgaaggccggcctccagttccccgtaggccgtatcggccgctacctcaagcagggtcgctactcccagcg

SEQ ID NO: 38966 - DNA, 299 bp, Zea mays
cgccacagcagcctccttcctcctctcactctcgctcgcgctgcgctcgctacactcgttcgcattccattcgaaaagaggggaggaaaggcaagatgttcatcgagagcttccgcgtcgagagcccccacgtgcggtacggcccgatggagatcgagtcggagtaccggtacgacacgaccgagctggtacacgagggcaaggacggcgcctcacgctgggtcgtccgccccaagtccgtcaagtacaacttccggaccagaaccgccgtccccaagctcggggtgatgcttgtaggg

SEQ ID NO: 38967 - DNA, 152 bp, Zea mays
ctcccagatccaattcgcgagtacacccacctctgccgccatggcgctctctgtggagaagacctcgtctggacgggagtacaaggtcaaggatctctcgcaggcggacatcggccgcctcgagattgagcaggccgaggtcgaaatgcccg

SEQ ID NO: 38968 - DNA, 153 bp, Zea mays
cagaccctcacacactcactatacacagctctgctgcagcaagaaggaagaagctagcgcctccctagctctcgttgtcagcaatggccaccaccgccgcgtccagcctcctcaagtcctccttcgcgggctcccggctcccatcggccacgc

SEQ ID NO: 38969 - DNA, 152 bp, Zea mays
ctgaaacaagttgatattataggacaaggttctggtgcggaggtggatcagaaacttaagtatgctaatgatctttcgtcgggtgtgatattcggaagagagcttgtgaacactcctgcaaatgtccttacccctgctgtgcttgcggagga

SEQ ID NO: 38970 - DNA, 156 bp, Zea mays
cgagatcaacgccccgggtaggctctagatcccgatggcctcgcgccgccgcacactgctcaaggtcatcatcctcggcgacagcagggttgggaagacgtctttgatgaaccaatatgtgaacaagaagttcagcaaccagtacaaggctacgat

SEQ ID NO: 38971 - DNA, 145 bp, Zea mays
gtgcggaggactgcagtgttggctctcggcttcgttctctacaacgagcctgaacagacacccagaatcgtgtccctactgtcggaatcatacaatccacatgtccgttacggtgcagctctagctgtcgggatctactgcgccg

SEQ ID NO: 38972 - DNA, 139 bp, Zea mays
caagctgtcgagtttgctgacgcgagcccgcatccgccgcgcagccagctgttggagaacgtgtttaccgaccccaaaggctttggaatcggccccgatgggaagtacaggtgcgaggatcccaagttcacccaaggca

SEQ ID NO: 38973 - DNA, 135 bp, Zea mays
ggaaacatctcaaaccctagccgcctccagcaagtttcagagctcaggaatcagcgccatggcgagtgagacggagaccatcgcatttcaggctgagatcaaccagctgctctcactcatcatcaacaccttcta

SEQ ID NO: 38974 - DNA, 140 bp, Zea mays
ccaaatcctaacgaggattcacgtttcgatatcttgaagatccattcaagaaaaatgaacttgatgcgtggcattgatctgaaaaagatcgcggaaaagatgaatggagcctcaggagctgagctcaaggccgtctgcac

SEQ ID NO: 38975 - DNA, 143 bp, Zea mays
gtcggctgccgcagactggtagtagccggcgcgccgtcaccgtatcctcagatcagaggcgagcagaaaccacaccactctactgacgcccgaagagcagtgtaacattttccttcagccatgggtaaggagaagactcacat

SEQ ID NO: 38976 - DNA, 205 bp, Zea mays
cggcactggacgcgctcccggcaggccggttcagggtgctggaacggttcacccacgagctgctggaggacgccgtcggcaactaccgcgtcgccgagctggaagccgcgccgcgcacgttcctgcagcccagccactacgacgccgacgaggtgatgttcgtgaaggaaggcgagggcgtcatcgtgctgctccgcggcgggaa

SEQ ID NO: 38977 - DNA, 146 bp, Zea mays
ctcgccgtcagccttcagcgcctccatttcggcctctgtacacttgcaagttcaatctcatcgccaaccatgggtaaagagaagtcccacatcaacattgtggttataggccatgtcgactctggcaagtcgaccaccacaggaca

SEQ ID NO: 38978 - DNA, 298 bp, Zea mays
agaacctgcagagccatgacaacaccgagatatatgagaaggctgtgaagatgctggaatcctactggctggaggaggaagatgatgccatgccctcaggcgacaatccccagaatggcttcaactttgggaaccagccctctgttccatcaggtggattcaactttggctgaagatgcccatttggaatggccgctgtgccattatgccttggctagtgctctgggctagtcagaggtgtggggtagcggcgtcaaccaagtcatggttgagtcccattggtctggtctcagggagt

SEQ ID NO: 38979 - DNA, 298 bp, Zea mays
gtcctgtacaagattattgatgttatcgagaagggagagaagcagcccaacatcactattggcattttggtctccgttgtcatcgtgttcgttaccgttctcttcaagatcctttttggtggcaagaagccggtggcacctgtgaaacctgcagctgaggcgaagaagcccaaggccgcggagacggacggtgctggaagcagtggtgacaaggatgagaaagaggatgaaaaggacgagacaggcccacgtcggaggacccgaaggtagacatagacctgtttttgacgtgttttag

SEQ ID NO: 38980 - DNA, 296 bp, Zea mays
ccagctttgaccgccgcctcccttcccctccgctacagctcctccccaccccactcccccgcaggagcggcggcggcggcggcgaggtcgtaccccacatcggcgagcggcggcggcaccgcggaggcaaaggcaagatgttcgggcgcgcgccgaagaagagcgacaacaccaagtactacgagatcctcggggtgcccaagtcggcgtcccaggacgatctcaagaaggcctaccgcatagctgctatcaagaaccaccccgacaagggcggtgaccccgagaagttcaaggag

SEQ ID NO: 38981 - DNA, 195 bp, Zea mays
cgaagaagcagtagcaaaaggattccattctcgtgttcttggagtggtccatcgatcgagctccgtgagagagatagcaagcaatggcgacacagggaaggtgatcaagtgcagagccgccgtggcgtgggaggccggcaagccgctgtccatcgaggaggtggaggtggcgccgccgcaggccatggaggtgcg

SEQ ID NO: 38982 - DNA, 196 bp, Zea mays
gtctccttggtcctggtctcaacaaggcaggcaagttcccgaccctggttactcaccaggaatccctcgagtccaaggtgaacgagactaaggcaaccgtcaagttccagctcaagaaggtcctttgcataggtgtcgccgtcggcaacttggcgatggaggagaagcagatccagcagaacatccagatgagcgt

SEQ ID NO: 38983 - DNA, 196 bp, Zea mays
ccccatcaacaccgtctttgatgccaagcgtctcattggcaggaggtttagtgatgcctctgtccagagtgatattaagctgaggcccttcaaggtcattccagggcccggtgagaagccaatgatagttgttcagcacaagggggaggagaaacagtttgcagccgaagagctcctctatggttctcatcaagat

SEQ ID NO: 38984 - DNA, 202 bp, Zea mays
gcctgatagagcaaagtacaatagagatgacttccctgttcagtacgatgctgcaaagttctttgtcattaaatcgtacagcgaggatgacatccacaagagcgtaaagtacaatgtgtgggcaagcacaaccaacggaaacaagaagcttgatgctgcttaccaagaagctcagtcaaagggatctgcatgccctatattc

SEQ ID NO: 38985 - DNA, 298 bp, Zea mays
gatgggttctggaaaaagtactgtggggaagatcatgtctgaagtcttgggttattcgttctttgatagtgacaaattagtggagcaagctgttggaatgccttcagttgctcaaatattcaaagttcacagtgaagccttctttcgggataatgagagtagcgtcttgagggatctgtcctccatgcgacgattagttgttgccaccggagtggtgctgtcatccgaccagttaactggaaatatatgaagaagggcctatccgtttggttagatgtgcccttggatgctcttgcta

SEQ ID NO: 38986 - DNA, 299 bp, Zea mays
cgcctctcgagtctcgtccacccgtcgtcctcctagctcctctactcgccagtcgccatgggcaagcttaagatcggaatcaacggcttcggaaggatcggcaggctcgtggccagggtcgccctccagagcgaggatgtcgagctcgtcgccgtcaacgaccccttcatcaccacggactacatgacctacatgttcaagtacgacaccgtccacggccactggaagcacagcgacatcacactcaaggactccaagacccttctcttcggtgacaagccggtcaccgtctttggcat

SEQ ID NO: 38987 - DNA, 137 bp, Zea mays
ccgcaacacggattgcttggagcccctgttggatttcctccgtggccaccggcacaaggggcatgttatgatgcttaatgatagaatacaaaacttggggaggcttcagtctgtgctgaccaaagctgaggagcact

SEQ ID NO: 38988 - DNA, 142 bp, Zea mays
ctcaggccctacatggagtccatggtgccacttcccggtatctatgatccggacttcatcgcggctaaccagggctctcgcgccaacagtgtcatcaagggcaccaagaaagaacaggtggagcagatcatcaaggatatca

SEQ ID NO: 38989 - DNA, 142 bp, Zea mays
cagatatatcgacgaaggaatcgcagagcttgtagtacgtgttttgttcattgatgaggtccacatgttggatatcgaatgcttttcttatcttaaccgtgcattggagagcccattatcaccaattgtgatacgcgctacg

SEQ ID NO: 38990 - DNA, 286 bp, Zea mays
cgagttccttgattcctcccctttggaaacactatgtgtatatggtgggactccaattatgcagcaaataaggaaacttaattatggcgttgatgtggtcattgggacacctggacgtgtgattgatctgctaaaaagaggttctcttagtttggcagagatccgttttgttgttcttgatgaagcagaccagatgttgtctgttgggtttgatctagatgttgagacaattttggagagggtgcctccgcaacgtcagacattgatgttctctgcaacaatgcca

SEQ ID NO: 38991 - DNA, 142 bp, Zea mays
tagagctctcgcctgctcgcctccgccgccggagcgagctccccatcttcatccgtcaaccatggcgacccagatcagcaagaagaagaagttcgtcagcgacggtgtttactacgccgagctcaatgagatgctgacgcgg

SEQ ID NO: 38992 - DNA, 298 bp, Zea mays
cctccttctacaaatacaactcagtctcagtcccccaccacatccgctccccgccttccgcttccctaccccccgcatcacctaccaacgccgacaccatgggggccttcgcgaaggaggagcaccagttcctcgccgagctcggcctcgcgcacgcaacccgggcgcgttcgcatgcggtgcgtggggcggctcaggtcccaccgtcacctccacgagcccgaccaacaatcaggtcatcgcagaggtcgtggaggcgtccgtgcacgactacgaggagggcatgcgcgcctgcttc

SEQ ID NO: 38993 - DNA, 135 bp, Zea mays
ctcgagccgagcacagcgacatcaccctcaaggactccaagacgctattctatcggcgagacccggtcaccgtctttggcatcaggaactccgaggagatcccgtggggtgaggctggtgctgagtatgtcgtgg

SEQ ID NO: 38994 - DNA, 289 bp, Zea mays
taactttgctgagagcaataggcttggtgaaggaggctttggtgctgtctataagggcatccttcgtgatggtcaagaaattgcagtgaagaggctgtcacagagttcagggcaagggatacaagagctgaaaaacgagcttgttttggttgccaagctccaacaaaagaaccttgttaggcttgttggtgtttgcttgcaagaacatgagaaactgcttgtgtatgaatacatgcccaatagaagcatcgacaccatccttttcgatcctgagagaaacaaggagcta

SEQ ID NO: 38995 - DNA, 200 bp, Zea mays
ctcgttcctgtcgcgcaccacgacctccacttcacatctcccccggcggcggcgcggtcagttgaacaatggcggactccaaggccacctcggcggtcaccctccgcacccgcaagttcatgaccaaccgcctcctggcccgcaagcaattcgtgcttgaggtgatccaccccggccgcgccaacgtctccaaggcggag

SEQ ID NO: 38996 - DNA, 123 bp, Zea mays
  unsure (1)..(123): unsure at all n locations
gtacaatgtcatggtgattgatcggcttggtncaagtctggaggacttatttaacgagggcagcagnaagttcgcccttangacagtacgaatgcttgctgatcagatgatcagcagagtaga

SEQ ID NO: 38997 - DNA, 271 bp, Zea mays
ccgatagcaagtagcgccgccgacgtttcgagagcagagtatccaagctagccaagcgcgcacctcggtgacctagctagctacctagctagttcaggcgacgatatggcgtctggtcaggagagcaggaaggagctggaccgcaaggctcgcgagggcgagaccgtcgtccccggcgggaccggcggcaagagcgtcgaggcccaggagcacctcgccgaaggcgcagcgcggaggccagactcgcagggagcagctggggcagcagggg

SEQ ID NO: 38998 - DNA, 286 bp, Zea mays
caagaagattactttttgacaaaagtgctaatgatgagcatgagagaagtattctgacaaagctcaaacaacagtgtgggggacagtttacttcaaaaatggagggcatggttactgaccttactgtcgctagagatcatcaaactaagtttgaggagtttgtagctggacatccagagttgaatcctgggatagacttagctgttactgttttgacaacgggattctggccaagctacaaaacttttgacataaaccttcctgccgagatggtgaaatgtgtaga

SEQ ID NO: 38999 - DNA, 313 bp, Zea mays
cgcgtggttcgttaggaaaggaaatcgattccccccgcatctgatctcttcggtgctagagaaatataggccgccgccgcctcctccttgttcggtgaaaggtgggcagttagggttgggagatctcttgactcacgacacgagcagcagaattcgtcgagggccgctggttgctgcgagaggtccgggccttcgtgggatcttgaaaattgaatgttctaatggagtccaagggtggcaagaagaagtctagcagtagtcgttcctccctgatgtacgaagctccccttggctacagcatcgaggatatccg

SEQ ID NO: 39000 - DNA, 313 bp, Zea mays
acgcgcagccaaaccctctccagcagccgtcgtcgccaccgctgcagcgcggaggcgacccccatcgccgccaagatgcagatcttcgtgaagaccctgacggggaaaaccatcacgttggaggtggagtactcggacaccatcgacaacgtgaaggccaagatacaggacaaggagggcatcccgccggaccagcagcggctcatcttcgccggcaagcagctcgaggacggccgcaccctcgccgactacaacatccagaaggagtacaccctccacctggtgctccgcctccgaggtggcgccaagaagc

SEQ ID NO: 39001 - DNA, 308 bp, Zea mays
cccacaccgggcacaccccccgagctcagcttagctccactccagctccaatcacagtcgtgaccagagcgcgagagctagctagagggccgtgaaaatgccgatcaataggatcgccctggggagccaccaggaggtgtaccacccgggcgccctcaaggcggcgttcgctgagttcatctccaccctcatcttcgtcttcgccggccagtgctccggcatggccttcagcaagctgaccggcggcggcccgacgactccggcgggcctgatcgcggcgacggttgcgcacgcgttcgcgctgttcg

SEQ ID NO: 39002 - DNA, 308 bp, Zea mays
gctacgagtctacgaccagttcggcagcacggcgagcatcccgtccgaccatccgctcgctcctcagagctagcctccaaactcgcaactatataactaccgtcccttgcaactttccagaccttttgcccccctgcttcctccgcctgcaccctctcacgagcgcccgctcgcccagatctagggttccatccgcgggcaagatgagcagcccccatggcggcctcgacgaccagatcgagcggctcatgcagtgcaagccgctcgctgagcccgaggtaagggctctgtgtgagaaggcaaaggag

SEQ ID NO: 39003 - DNA, 119 bp, Zea mays
agtaccggcagcagcagcagcagggaggaggcgggcgaccgatcggtgagcaggtgaaaaacggcatgctccacgacaaggggccgaccgcgtcgcaggcgctgacggttgcgacgctg

SEQ ID NO: 39004 - DNA, 305 bp, Zea mays
tgaatctaacacaagagtcacctaagcttcttgaagctggcaaaaagttggatatgacttattcagtgaagtgggtgcaaacaaatgtggcatttgcacggcgctttgaggtttacttagactacccgttctttgaacaccagattcattggttctccatcttcaattcattcatgatggttattttcttgactggtttagtgtcaatgatattgatgaggacactaagaaatgattatgcaaaatatgctcgtgaagatgatgatctggaatcacttgagcgagatgttaatgaagaatccggg

SEQ ID NO: 39005 - DNA, 304 bp, Zea mays
cgcgggtcgcctggcgcccggccacggtttgcctgtacgctcgcgctcgccgccgccgcactgacgctcgcccaggctaagaaggacctgacggaggttacccacaaggtctacttcgacatcgagatcgacggcaagcccgcagccggattgtcatggggctttttgggaagactgttcctaagacggcagagaacttccgagctctttgcacaggagagaaaggggttggcaagagtggcaaagccctccactacaagggaagtaagttccacagaatcatccccagcttcatgctccaagg

SEQ ID NO: 39006 - DNA, 299 bp, Zea mays
cagtgacagacacgatggtgagcgccagaattgttgtcctcctcgccaccctcctatgcgctgccgccgcagtcgcgtcgtcctgggaggacgacaaccaccaccaccacgggggccacaagtccgggcaatgcgtgcggcggtgcgaggaccggccctggcaccagcgcccccggtgcctggagcagtgcagggaggaggagcgggagaagcggcaagagcggagcaggcacgaggccgacgaccgcagcggcgagggctcgtcggaggatgagcgagagcaggagaaggagaaacag

SEQ ID NO: 39007 - DNA, 303 bp, Zea mays
agccatctatgacatctgccgccgctcccttgacattgagcgcccaacctacaccaacctcaacaggcttgtctcccaggtcatctcatccctgacggcttccctgaggttcgatggtgctctgaacgttgatgtgaacgagttccagaccaacctggtgccctacccgaggatccacttcatgctttcgtcctacgctccagtcatttctgctgagaaggcctaccacgagcagctgtccgtggccgaaatcaccaacagcgccttcgagccatcctccatgatggccaagtgacgaccccg

SEQ ID NO: 39008 - DNA, 180 bp, Zea mays
gtgaatatactttgctaggggaataagtcataagtctgtctggaagggtaaagtttgagctttgctagtgtggctgggcactctagtcactggatgtgttgtgcatgcatcagctgtatgcccgtcgtctgttatggaaaatattggtcaaatgtattctcttgctgaataatttgtgac

SEQ ID NO: 39009 - DNA, 296 bp, Zea mays
gagaatgcatcatcacttgctggttttgatatccagactgttgggcgccagcttgcctatattctccgcggcgaggcaaaaatcaagaacatcaagaagaacaagaccacaggaggcttctcggtaactttcctgggtgacattgtggcaactggactgaaggtcgaggaccagctctcccttgggaagaggctgtcgctagttgccagcactggcgcgatgcgagcccaaggggaaactgcatatggagctaacttggaggcacgcctgaaggacaaagactatccgattggcca

SEQ ID NO: 39010 - DNA, 303 bp, Zea mays
tcgcaaatgactaaacgaagaggtgatcaggaagtccacaaagtaactgaggagagacctggctggtgtagcgaccctcacctgccaccatgtgcagcgtttgttgaaattatggcaactgtattctcaagggatgcatggcgctgtgtatggcatatgattcagaacgacttggtccatggatggggccttgattttgctcttaggaaatgtgtggagccagcccatgagaaaattggagtcgttgactcccagtggattgttcatcaagtcatcccttcgcttggtaaccagggcaaggca

SEQ ID NO: 39011 - DNA, 312 bp, Zea mays
gacgatggtcagggtttgctccacaactttgtggaatacatcaagaagcagaagtgtgttcccctagaggacctagctgcagagttcaggatgcgaacccaggactgtatcaatcggattgttactctggaaagcatggataggttatctggggtgatggatgaccgtgggaagttcatctacatctccactgaagagatgaaggcagttgcagagtacattaggaagcaagggagagtgagcatatcacatctggccaacaactcaaaccagttcatcgatctggagccgaaggccagtacgaggtggaga

SEQ ID NO: 39012 - DNA, 159 bp, Zea mays
gaaatcacaaggaacaaagaaagctacaaggatatttgttgctcgaattccacagtcagtcgacgagtcgatgtttcgtaggcattttgaagcttttggagaaattcttgatccttacatgccaaaggaacatggttcaaaggggcatcgtggaattgg

SEQ ID NO: 39013 - DNA, 309 bp, Zea mays
gtccggccgtctccttgccccgatggcgtccgagaagaagcagtccaacccgatgcgggagatcaaggtgcagaagctggtcctcaacatatccgtacgggagagcggcgaccgcctcacccgcgccgccaaggtgctggagcagctcagcggccagacccccgtcttctccaaggcgaggtacacggtgcgctcgttcggcatccggcgtaacgagaagatcgcctgctacgtcacggtcaggggcgacaaggccatgcagctgcttgagagcggcctcaaggtcaaggagtacgagctgctcaggag

SEQ ID NO: 39014 - DNA, 315 bp, Zea mays
tggcgagaagaccaactggatcatgcacgagtaccgcctcgccgacttcgaccgctcggcgcgcaagaagaacatcctcaggttggatgactgggtcctgtgccgcatctacaacaagaagtgcggcgggctggagaaggcggcggcgccggcagccggcggcgaccacaagcctgtgttcgccactgcggcggtgagctccccgccggagcagaagccgttcgttgcggcggcgggcgggctgcccccggcgttcccggagctggccacgtactacgaccggccgtcggactcgattccgcggctgcacgcgga

SEQ ID NO: 39015 - DNA, 310 bp, Zea mays
gccacagcagcctccttcctcctctcactctcgctcgcgctgcgctcgctacctcgcttcgcattccattcgaaaagcggggaggaaaggcaagatgttcatcgagagcttccgcgtcgagagcccccacgtgcggtacggcccgatggagatcgagtcggagtaccggtacgacacgacggagctcgtacacgagggcaaggacggcgcctcacgctgggtcgtccgccccaagtccgtcaagtacaacttccggaccagaaccgccgtccccaagctcggggtgatgcttgtcgggtggggaagcaac

SEQ ID NO: 39016 - DNA, 314 bp, Zea mays
gcaagtttgtccattcgcattggtctgaatactgtagctactagcgcgagtgccactgtgccgcagctgcctgctcgccattactgcaagctgtgttcaatcaaagcttaattaggctccctctacatctgatccagctaagtagctagccagcactacagaagggcgtggcaagaatcaggagagagatagcaggggggctagctagctgagctcgtgcgacgaagaatggccggaattggcaggaacatggtggcgccgctcctggtgctcaacctcatcatgtacatcatcgtcatcggcttcgcgagctg

SEQ ID NO: 39017 - DNA, 310 bp, Zea mays
  unsure (1)..(310): unsure at all n locations
cgcggacgtaaggcgaaggagtagcagcagcaggcggcgccgagtagcggctccccatctcgagcttgccaccatggctagaggattgaagaagcatttgaagaggctcaatgcccccaagcattggatgctggacaagcttggcggagcttttgctcccaagccatcttctggacctcacaagtctagggagtgcctgccactgatcctcatcatcaggaacaggctcaagtatgctcttacataccgtgaggtcatttccatcctgatgcaacgccatgtacttgttgatggcaaggtcangacagac

SEQ ID NO: 39018 - DNA, 153 bp, Zea mays
ccaagtttctatctcccaggctaagaacaggctatttattgggaatgtacgccatgactggacacatgatgaattcaaaaccgcagtggaagaagttggtcctggagttttaaaagttgaactcatgaaggcgccaggcttagatcgcaataa

SEQ ID NO: 39019 - DNA, 310 bp, Zea mays
cagccgccgtgcctgttctctctgcctttctaaaagtgcggcgactggttgggctgccgccgactgccggggccttcgccgacctcttcgccggcgaagaggtcccatcaggagaaggagtagatcgtcgacccagaaccctcgctgatggcgactttcgcgaaacctgagaacgcgctgaagagagccgaagaattaatccatgttggtcaaaagcagtcagcactgcaggcttaacatgatctcattacctcgaaaaggtacaggtcatggcagaagctctcgaaaagatcatgatgaagtatgtaga

SEQ ID NO: 39020 - DNA, 310 bp, Zea mays
aacaccccgaggcatatggcgacccagccgacgacggtgagccccctgtagttgagcagcgtcagcaccgccgtgagtccgagcaccgcgaacgccctcggcgggccgccgcccagggcaggcacggcggacttgaggtagtccaggaagaggacggggtacagggcattgtcgatgacgccactgagccacttcacccacccttgctggaatccccagtaggggccgagcgccgaggcgacccacacgacgtacccgccgttctccgggaacatggtgcccagctccgcggtaatcagcgcctccggga

SEQ ID NO: 39021 - DNA, 303 bp, Zea mays
ctttgttaacaaagaattccctcatagccgccgccgccgccgccgacgccgctcatctcgccgagaggtgacgggaccgaggaactcgccgagttctaagatagagaatcgcttttcacagcctggggtctgctgcgtagggtggtgttgaaggggagaagtttaagatctgttccacagatcacgcgtgcgcgctcgcgaatcgggggttccacacatagcttcgtcgttttgaatttgatgtactaatggagtctaagggtggcaagaagtctagcagtagtcgttccatgatgtatgaag

SEQ ID NO: 39022 - DNA, 144 bp, Zea mays
ctgctctgctgcagcaagaaggaagaagctagcgcctccctagctctcgttgtcagcaatggccaccaccgccgcgtccagcctcctcaagtcctccttcgcgggctcccggctcccttcggccacgcgcaccaccacgccgtc

SEQ ID NO: 39023 - DNA, 301 bp, Zea mays
cactcgcactcgcacgtacaccacactagttaccacagacgacgggcgccatgaaagtcccggtgcttctcctcctggtctccctgtgcttctcgctcgcgctcgcgtggcaaacggacacggaatcgggctcaggcaggccgtaccactacggcgaggagagtttccggcactggacgcgctcccggcagggccggttcagggtgctggaacggttcacccacgagctgctggaggacgccgtcggcaactaccgcgtcgccgagctggaagccgcgccgcgcacgttcctgcagcccag

SEQ ID NO: 39024 - DNA, 148 bp, Zea mays
accacaccgacaccgacgtggtgatcgtaggcaccgggtccgcagacctgtcctgcgcgtacgaactgtccaaggaccccacagtgagcatagccatcgtggagcagtccgtgtccccaggcagcagcgcgtagctgggccggcagct

SEQ ID NO: 39025 - DNA, 145 bp, Zea mays
gtgacagacacgatggtgagcgccagaattgttgtcctcctcgccaccctcctatgcagtgccgccgcagtcgcgtcgtcctgggaggacgacaaccaccaccaccacgggggccacaagtccgggcaatgcgtgcagcggtgcg

SEQ ID NO: 39026 - DNA, 141 bp, Zea mays
caaatgagtggattgagaagctcaaacttgctggtgccaacttctatgccagggttgtcaaagatattgattgtctaattgcatgtcgtgagctcgacaatgaaaatgctgaagtcaggaaagcaaggaggctgaagatac

SEQ ID NO: 39027 - DNA, 145 bp, Zea mays
ctggagtcgacgatcctgtacgtgctggcgcgggacgacgacgggtacctgtcgcgggacgccatgcggcgcgtgtacgacggcagcctcttcgagtacgtggagacgcagcgcgcgcacacgccaagatgtcctagctagaggg

SEQ ID NO: 39028 - DNA, 304 bp, Zea mays
gtccgcacagccgctcatcgtctcccacagcctgcactctccctgcgccggccggtgccccgacgcgccatgtcgtacaacaaggccccgtccatcaccgccgagaccataaatcccagggtcaagatcatcagatacgcgccttgcggggagatcgtcaagcacgcagcgcggctggagcaggagatagaggagaaccctgcttctatccctttccaagagataatatactgcaacctcgggaacccccaggtccttggtcagccgccactaaatttctttcgtgaggttctctccctgtgcg

SEQ ID NO: 39029 - DNA, 302 bp, Zea mays
cccgagcatatcacagtgacagacacgatggtgagcgccagaattgttgtcctcctcgccacgctcctatgcgctgccgccgcagtcgcgtcgtcctgggaggacgacaaccaccaccaccacgggggccacaagtccgggcaatgcgtgcggcggtgcgaggaccggccctggcaccagcgcccccggtgcctggagcagtgcagggaggaggagcgggagaagcggcaagatcggagcaggcacgaggccgacgaccgcagcggcgagggctcgtcggacgatgagcgagagcaggagaa

SEQ ID NO: 39030 - DNA, 142 bp, Zea mays
ctcgatcacagccaaggagatgctcaatgggcagaaggtggtcgtcgtccgctgcgaggagatctgcatgtcgggcggcctcgtccgtcagaagatgaagtacctccgcttcctccgcaagcggatgaacaccaagccgtcc

SEQ ID NO: 39031 - DNA, 269 bp, Zea mays
agccctactacgtcgaagcggcgccgcggtggacgtgaacaagaacacagagtggttcatgtacccgggcgtctggaccacctacatcctcctgctcttcttcgcttggctcctcgtcctctccgtctctggttgctcccccggagcagcctggaccgtcgtaaacctcgcgcacttcgccatcacttaccacttcttccattggaagaaaggaactccttttgctgctgatgaccaaggcatctacagcagattgacatggtgggagc

SEQ ID NO: 39032 - DNA, 137 bp, Zea mays
cttgcagatggcggccttgcaaacggtcctttcctcatactgggcaacaagattgacatcccatacgcaggttcagaggaggacgtgaggtactttctcggcctgagcaacttcacaaccgggaagggcaacgtgaa

SEQ ID NO: 39033 - DNA, 133 bp, Zea mays
gcatgacgttgcccgtatgtctggaattgaggcgcagctcagcgaccagaacagagttggctggaaactggtttatgaagatcacgagaaggatgtcctattagttggtgatgacccatgggaggacttcgtg

SEQ ID NO: 39034 - DNA, 140 bp, Zea mays
atgacttctcaaagcctttgatcaacatgatgaaggctgcaggttgggatcttgatggggctgctagtgcgatcgagcctggtgtggtttacacaagaagggctcacaagaagtttgcttttgaatcctatatttgccaa

SEQ ID NO: 39035 - DNA, 133 bp, Zea mays
atcctgtccaaaaggttaccttaatcccaaggagtcaagctcgtggtcttacatggtttatcccgatggatgacccaacactcatctccaggcagcaactttttgccagaattgttggcggccttggtggtag

SEQ ID NO: 39036 - DNA, 297 bp, Zea mays
  unsure (1)..(297): unsure at all n locations
ccgttgccggcttgccccgtccgtgacgtccatctgtttccnccttggatcctcgacaagcaatggccatggaggaggagcagacaccacccgagcngcgcnacntctcgggcctgggcaacaccttcacgtcggaggcggtgccggggtcgctccccgnggggcagaacaacccgctagtgtgcccgctgggactctacgccgagcagctctccggcacctccttcacnacnccgcgcgcccggaacctgcgcacgtggctgtaccggatcaagccgtcggtgacccacgaaccct

SEQ ID NO: 39037 - DNA, 139 bp, Zea mays
cctcaggatgctggatgggatgccaaggagtgtgataatgagactccatacactattatgtttggtccagataagtgtggatcaaccaacaaggttcatttcatccttaagcacaagaatcctaagactggaaagtatg

SEQ ID NO: 39038 - DNA, 299 bp, Zea mays
cattcctcccaacaccacctcgccgcgatctccgtagcctccgtcgcgtcgagcatcgatcatgtcggcctactgcggaaagtacaaggatgagctcatcaagaatgctgcctacattggcacccctggcaagggtatccttgctgctgatgagtccactggcaccattggcaagcgcctttccagcatcaatgtcgagaacgttgaggagaaccgccgtgccctccgtgagctcctattctgctgccctggtgctctccagtacatcagcggtgtgatcctctttcgagagaccctgt

SEQ ID NO: 39039 - DNA, 154 bp, Zea mays
  unsure (1)..(154): unsure at all n locations
aagaaatttaacgctttcaagaagattgcaagatccatgggatacggcgaggatgatcggcctctagtatcatttcagtctgtctccanaggatactatggagagtgtggtaaaagaggaggttacatggagattacgcngttcagtgctccgg

SEQ ID NO: 39040 - DNA, 150 bp, Zea mays
tggattctcctccccctccggttcgggttcgggttcgtgaggatctccggggttcggtttcgtgggtaggcggatcgagatggcggcgtcggatgttgagtaccgctgcttcgtcggcagcctcgcctggaccacggacgaccactccct

SEQ ID NO: 39041 - DNA, 210 bp, Zea mays
gtgcgtcaagcctccgatcatctacggtgacgtgagcacgcccaaccccatgaccgttttctggtcgaagacggcacagagcatgacgtctcgcccaatgaaggggatgctgactggcccagtcacaatcctcaactggtccttcgtccggaatgaccagccgaggtttgagacttgctaccagatcgctcttgcgatcaagaaggaagt

SEQ ID NO: 39042 - DNA, 87 bp, Zea mays
catagccagcaagccagcgcacgtcggtaggcacgccaccatgccggggctcaccatcggcgacaccgtccccaaccaggagcagga

SEQ ID NO: 39043 - DNA, 139 bp, Zea mays
atcaggcaggactgggagccggtcgttgtgcggaagaaggcacccaccgccgccgccaagaaggatgagaaggccgtcaacaccgcgcgccgcgccggtgcggagatcgataccatgaagaagtacaacgctggtacga

SEQ ID NO: 39044 - DNA, 93 bp, Zea mays
gtgcacgggcgtgtgggtgatcgcgcacgagtgcggccaccacgccttctccgaccacgcgctcctggacgacgccgtcggcctggcgctgca

SEQ ID NO: 39045 - DNA, 211 bp, Zea mays
gtttgcctcttctccctcttgccggtcccgaataaagagcagcagcgcaagaggtcggtagagcgagaagaaggcaatggcggccgagagcttccttttcacatcggagtccgtgaacgaggggcacaccgacaagctgtgcgaccaggtgtcggacgccgtgcttgacgcatgcctcgcgcaggaccccgacagcaaggtggcctgcgag

SEQ ID NO: 39046 - DNA, 180 bp, Zea mays
taggcgcctccaccacgccgacgcgggcgtccacaccttccgcctcgggctcaaccgcttcgccgacctcaccaacgacgagtaccgcgcaagctacctcggcgtcaggagcaggccgcagagggagaggaggctcggtgacaggtacctggccggcgacaacgaggacctgccggagtc

SEQ ID NO: 39047 - DNA, 305 bp, Zea mays
ctcagctcccatatccgctcccctacctctccagcatcctcccgtctccgtcgtctcgtctccgctcctcacctcgccagccatgggcaagatcaagatcggaatcaacggtttcggaaggatcggcaggctcgtagccagggtcgccctgcagagcgaggatgtcgagctcgtcgccgtcaactgacccttcatcaccacggattacatgacgtacatgttcaagtacgacaccgtgcacggccaatggaagcacagcgacatcgccctcaaggactacaagacgcttctcttcggcgagaagc

SEQ ID NO: 39048 - DNA, 306 bp, Zea mays
gtccccgacaagccactcgaagccgagatacggccatggactccaccggcaccggagcagcggggaagggaaagaagggagcagccgggcgcaaggtcggcgggccaaggaagaagtcggtgtcgaggtccgtgaaggctgggctccagttccccgtcggccgcatcgggcgctacttgaagaagggccgctacgcgcagtagtcggcaccggcgcccccgtctacatcgccgctgtcctcgaatacatcgccgctgaggtactgcagattgagcccagttctttgtttgtactgatttggcgacg

SEQ ID NO: 39049 - DNA, 200 bp, Zea mays
cttctcttctctctagttatacatatcaaacacttggccgccacagcggtctctgttcgccgcgcaccgccgcagaaatgagcgtgccgaatcagcaggttgtggattacaccagcttcaagctcgtcatcgttggcgacggtggaacaggcaaaaccacatttgtgaagaggcatcttactggcgagtctgagaagaaa

SEQ ID NO: 39050 - DNA, 211 bp, Zea mays
ctcagctcgctcgcgctctgggatgtacctcttatcaccgatgcttggctcgcggagattgctgccgggtgtccctcgctcgagcgtctggatatctgtcgatgtcccctcatcacagacaagggcctcgtcgctgttgcgcagggatgccccaacttggtgtctctgaccattgaggcatgcaccggtgttgccaatgagggcctgaggg

SEQ ID NO: 39051 - DNA, 281 bp, Zea mays
gtgcaatctgatcttgcaggtaggcactcagttgatatcagctgcaactgtcatctatgctctaagaaacctgagccatgcttctacaacagctgtggttctgagaccttggttcattgcactagtggcagctacagctatcgaaaggcttgcaggattggcgctaggagtttccatggagcgcgactcggttgtgttgcaggaacaaacaggcctgttgcattagctcaagctaatgctgtgctcaatcgacttgatctagtttgtgagacagttggtgc

SEQ ID NO: 39052 - DNA, 304 bp, Zea mays
  unsure (1)..(304): unsure at all n locations
gcaatgagcgatttgaggtaaggatgatgatgctanaagtaatcgcgaggaccattgggctgcatcacttggttttgttgaacttctacccgtatcttcanagatacgttcaacctcatcaacgagatgtgacgactctactcgctgcagcagttcaggcttgccatgatatggtacctccagatgctgttgaaccactgttcaagcagatagtaaatcagtttgtgcatgaccgttctcgtcnagaggctattgctgttggcttagatgttgtgagagagatctgcatgagaatacctttgat

SEQ ID NO: 39053 - DNA, 184 bp, Zea mays
atcccgtcgcatagcatcccacaaccacccatctcgtcgtccgccgattcgatccggttcttccaacccaggggcagtgatggcgacgaagaggagcgtgggcaccctcggcgaagcggatctgaaggggaagaaggtgttcgtacgcaccgacctcaacgtcccgctcgacgatgcccagaag

SEQ ID NO: 39054 - DNA, 190 bp, Zea mays
cagacgagaatcttctcctatgctgatacccagaggcaccgccttggtccaaactatctgatgcttcctgtgaatacaccaaaatgtgcccaccacaataaccaccatgatgggttcatgaacttcatgcacagggacgaagaggtgaactacttcccttcgaggtttgataccgcccgtcacgcggaga

SEQ ID NO: 39055 - DNA, 286 bp, Zea mays
gagcatatcacagtgacagacacgatggtgagcgccagaattgttgtcctcctcgccaccctcctatgcgctgccgccgcagtcgcgtcgtcctgggaggacgacaaccaccaccaccacgggggccacaagtccgggcaatgcgtgcggcggtgcgaggaccggccctggcaccagcgcccccggtgcctggagcagtgcagggaggaggaacgggagaagcggcaagagcggacaggcacgaggccgacgaccgcagcggcgagggctcgtcggacgatgagcg

SEQ ID NO: 39056 - DNA, 317 bp, Zea mays
ctccgctgggccaccagctttgaccggcgcctcccttcccctccgctacagctcctccccacgccactcccccgcagagcagcggcggcggcggcgaggtcgtacaccacatcggcgtcgagcggcggcaccgcggaggaaaggcaagatgttcgggcgcgcgccgaagaagagcgacaacaccaagtactacgagatcctcggggtgcccaagtcggcgtcccaggacgatctcaagaaggcctaccgcatagctgctatcaagaaccacaacgacaagggcggtgacaccgagaagttcagagagctcgcacaag

SEQ ID NO: 39057 - DNA, 244 bp, Zea mays
gcggtgggttggcttctcctcccccaccggttcgtgttcaggttctggttcgtgggcgagagggaagagatggcggcgtcggacgttgagtaccgttgcttcgttggcggcctcgcctgggccaccgacgaccactccctcaacaacgccttcagcacctacggcgaggtcctcgagtcgaagatcatcctggatcgggagacgcagaggtcccgcggcttcggcttcgtcaccttctccacgg

SEQ ID NO: 39058 - DNA, 233 bp, Zea mays
ccggcgttgagatgttggtttatcaggatctcctatctggcgacgagctcctgtcggattcattcacctacaaggagctcgagaacagcgtcctgtgggaggtcgagggaaagtaggtcacccaaggtcctgttgatgtggacattggtgccaatccatccgccgagggtggtgaggacgaaagcgttgatgacacagctgtgaaggtggttgatattgttgacacattccgt

SEQ ID NO: 39059 - DNA, 232 bp, Zea mays
cccagcagagcgaggatgtcgagctcgtcgccgtcaacgaccccttcatcaccacggattacatgacctacatgttcaagtacgacaccgtgcacggccaatggaagcacagcgacatcaccctcaaggacaccaagacgcttctcttcggcgagaagccggtcaccgtctttggcatcaggaacaccgaggagatcccgtggggtgaggctggtgctgagtatgtcgtgga

SEQ ID NO: 39060 - DNA, 231 bp, Zea mays
cgagaagagcggcggcgcggtcggacaaggagcaggcggaggaggagctgtgccaagccacaatgggtatctcacgcgactcgatgcacaagcgccgtgccaccggtggaaagcagaaggcctggaggaagaagcgaaagtatgagcttggtcgccagccggccaacaccaagttgtcaagcaataagacagtgaggagggtccgtgttcgtggaggtaacgtgaagtgga

SEQ ID NO: 39061 - DNA, 225 bp, Zea mays
gcacgatgaggagcagcagcagcaggcggcgccgaggagcggcatcccactcagtgcttgcaaccatggctaggggattgaagaagcacttgaagaggctcaatgcgcccaagcattggatgctccacaagcttggcggagttttgcacccaagccatcttctggagctcacaagtccagggagtggcttcctctgatcctcatcatcaggaacaggctcaagta

SEQ ID NO: 39062 - DNA, 234 bp, Zea mays
ctcgcaggcggacttcggccgcctcgagattgagctggccgaggtcgcaatgcccggcctcatggcgtgccgcgccgagttcggcccgatcaaagcccttcgccggcgctaggatcacggggtctctccacatgaccatccagaccgccgtcctcatcgagaccctcaccgcgctcggcgccgaggtccgctggtgctcctgcaacatcttctccacgcaggaccacgccgccg

SEQ ID NO: 39063 - DNA, 188 bp, Zea mays
cgccgaggaagtacagatcgcgcaccgtcgccggatcaagctaaagcggggagacttcgccgacgaggcctccgcgccgacggagatcgacatcgaggagacgctcaagcacctcgtctcgcagctcggcaagtcgcgggatgaggtcatcgacgcgctcaagaaccagaccatcgacatcgttttca

SEQ ID NO: 39064 - DNA, 225 bp, Zea mays
cgccgctgcgccgtctcctccgctcccgtcgtccggacagatggcgtcccacattgttggataccctcgcatggggcccaacagggagctcaagtttgcacttgagtctttctgggatgggaagagcaccgctgaggatcacgagaaggttgctaccgacctcagggccagtatctggaagcagatagctgatgctgggatcaagtacatacccagcaacacttt

SEQ ID NO: 39065 - DNA, 301 bp, Zea mays
gaaggaggaggagcagcagcagcaggcggcgccgaggagcggcatcccactcagtgcttgcaaccatggctaggggattgaagaagcacttgaagaggctcaatgcgcccaagcattggatgctcgacaagcttggcggagcttttgctcccaagccatcttctggacctcacaagtccagggagtgccttcctctgatcctcatcatcaggaacaggctcaagtatgctctgaactaccgtgtagtcatttctatcctgatgcaacgccatgtacttgttgattgcaaggtcaggactga

SEQ ID NO: 39066 - DNA, 226 bp, Zea mays
tctggcagagtcagcaacagggcatgtattaacttctctcggaatgtgtcagatagtaacgctagggagttctgtcatgaacaagcaatcatgtgccaaatatcaggaatggatttttctcttgagcctgtacagcctccagtgacagcaaggccagaacatgttgaaagagcgttgaaggcacgttatctagatgcaatgaacatactgaggccacaggggaggg

SEQ ID NO: 39067 - DNA, 282 bp, Zea mays
tcacgactgaacaacatctagtacggtaggccacttctcaactctatgatattgatgccataacgaagatggttgatccttccattcgaggacaatgttctgataaggcattatcccgttttgctgacattattagccgctgcattcagcatgaaccagaattcaggccaccaatgtctgaagttgtccaagacttaactcgcatggtaagtaatgtatcaagggattccatgtaggcgatcccttaaacaagggtagaatgtggcagtccgtccttataga

SEQ ID NO: 39068 - DNA, 329 bp, Zea mays
caattctgggaaggagtttcacctgtcgagttcggaacattaccggcccttcaggacgcattactgttgttggttatccaattggaggagatactatatccgtgacaagtggagttgtctctaggatagaaatactttcatacgttcatggttctacagaacttctaggattgcagatagatgcagctattaattcaggaaattcaggtggtccagcttttaatgatagaggcaaatgtgtcggtatagcatttcaatctcttaaacatgaagatgccgagaatataggctatgtgataccgactccagtcattacacatttcatcgag

SEQ ID NO: 39069 - DNA, 323 bp, Zea mays
  unsure (1)..(323): unsure at all n locations
tgatataccaccttccttccccagcaaaggctcaaaagtatcgtgtggagaacttgtacgaaggaccccttgatgatgtgtatgcaactgctatcagaaactgtgatccagagggtcctcttatgctgtatgtctcaaagatgattcccgcatctgacaagggcaggttctttgccttcggtcgtgtcttctcagggaaggttgccacacgcatgaaggttcggatcataggtcccaactatgtccccgggcagaagaaggatctgtatgtcaagagtgtccagcgtactgttatctggatggganagaagcaagagtcggtt

SEQ ID NO: 39070 - DNA, 177 bp, Zea mays
  unsure (1)..(177): unsure at all n locations
aggataattcaacagataagtacataagcgtgaaatatgatgcaacaacggtaacatnagcaaggactctcaataaagagagtctgcaagcagaagtcggataacctgtagacacgagcataactgttatagttttcatcgggcgtctcgaagaacagaaaggatccgacatactca

SEQ ID NO: 39071 - DNA, 259 bp, Zea mays
ctcgccttcacccctcgccgccgacgccgacgccgccaccgacgtcgccgtcgcaagctacgatgctcgacatcaacttgttccgcaccgacaagggcggcaacccggaccttattcgcgagtcccagcgcagtaggttcgcctccgtcgagctcgtcgacgaggtcatcgccctcgacaaggcatggcgcgaaacgcagttcgagctggttaacatccggcaggacgttaacgctagcagcaagaagatcggcaagct

SEQ ID NO: 39072 - DNA, 216 bp, Zea mays
ccgagcctcagttcgcatccagacggggcgccgccgcctcgccggtcgacgaccaccgcgcagcatggcggaacagactgagaaggctttcctcaagcagccaaaggttttcctcagctcaaagaaatccggcaagggtaagaagccaggcaagggcggcaaccgattctggaagagcataggccttggcttcaagacacccagggaagcaatcga

SEQ ID NO: 39073 - DNA, 247 bp, Zea mays
  unsure (1)..(247): unsure at all n locations
ccgatttccaatctcaaatccctcgatcgcgcagccngcccgccctctcgcagctctctccgatggcccgcacgaagcagacggcgaggaagtcaaccggcggcaaggcgccgcggaagcagctggccaccaaggcggcgcgcaagtcggctccggccaccggcggcgtgaagaagccgcacaggttccgccccggcaccgtcgctcttcgcgagatncgcaagtcacagaagagcacggagctgct

SEQ ID NO: 39074 - DNA, 233 bp, Zea mays
ccgatatactggggcctagtttgtgggattcatggaattcattaggccaatccatgccatcggaaatggtggcttgcattgccatggagtccatttccatcttggaaagcatgcatactaaaggatatgtgcatggagacgtcaaacctgagaactttcttctggcgcagccttcaacgcctcatgaaaagaaactttatcttgtggcatttggattagaggaacagtcagat

SEQ ID NO: 39075 - DNA, 219 bp, Zea mays
  unsure (1)..(219): unsure at all n locations
cctcagcncccatatccgcncnccnanntcnccagcatctcccgtctccgtcgtctcgtctcnnnnncntcacntcgccgccagccatgggcaagatcaagatcggaatcaacggtttcggaaggatcggcaggctcgtngccaggntcgccctgcagagcgaggatgtcgagctcgtcgccgtcaacnacccttcatcaccacggattacatgaccaa

SEQ ID NO: 39076 - DNA, 260 bp, Zea mays
  unsure (1)..(260): unsure at all n locations
gcgacatcagagaagaaggaatacccagtggatgcatcgcttccggacatcaagaacagcatctatgcttctgatgagttccgcatgtaatcgttcaaggttcgcccttgctcacgggcatactctcatgactggactgagtagccctttgtccacccaggagagaatgctcggcgccgagacccccgcaagtaacattacagttgtgtgccatgcccagatttcaggaanggtgtgtggcgtcgcggagacatgtgtga

SEQ ID NO: 39077 - DNA, 286 bp, Zea mays
agcttcgcccacgcgctccagccgcttcaccgcgccgccaccgccaccgcgaggatgccgttcaagaggttcgtggagatcgggcgcgtggccctggtgaactacggggaggactatggccgtctcgttgtcatcgtcgatgtggtcgaccagaacagggcacttgtggatgcccctgatatggtcaggtgccaggtgaacttcaagcggctctcacttactgacatcaagattgacatcaaacgtgtccccaagaagacagccctgatcaaggcgatggaggaag

SEQ ID NO: 39078 - DNA, 178 bp, Zea mays
cctcagtccctcacacgctcactatacacggctctgctgcagcaagaaggaagaggctagcgcctccctagctctcgttgtcagcaatggccaccaccgccgcgtccagcctcctcaagtcgtccttcgcgggctcccggctcccttcggccacgcgcaccaccacgccgtcgtccgt

SEQ ID NO: 39079 - DNA, 179 bp, Zea mays
gaccagcagctcaagctcatggggcagatccacccgacggggctcacgcccaacctgcttaagctcttcgaaccgcgtccaccgctcgagtacaagcccccgctggagaagcgcaaattgccggcctacaccgggatggcacaatttgtgtcgcactttgctgagcccgaggatccaga

SEQ ID NO: 39080 - DNA, 171 bp, Zea mays
ggaggagcgcaacccgctgtccgtcgcctacaagaacgtcatcggcgcccgcaggcactcgtgagcggatcatctcctccatcgagcagaaggaggagggccgcgggaacgaggcgcacgccgcctccatccgcgcctaccgctccaagatcgagaccgagctcgcccgca

SEQ ID NO: 39081 - DNA, 171 bp, Zea mays
ggcggctgcggcggacacggaggcgaaggaggaggagcagcagcagcaggcggcgccgaggagcggcatcccactcagtgcttgcaaccatggctaggggattgaagaagcacttgaagaggctcaatgcgcccaagcattggatgctcgacaagcttggcggagcttttg

SEQ ID NO: 39082 - DNA, 170 bp, Zea mays
ggctttttggaggccgaggccattggtgccatgcggccagcccttttcttctccatggttcccatcgatgtgtttttgttcggttctctcgtcagatctgtataaataggcgcctcccttctccgccattcctcggtcctctgaagcgtttcagttcatcgattcagttc

SEQ ID NO: 39083 - DNA, 172 bp, Zea mays
  unsure (1)..(172): unsure at all n locations
cgacgatcgagaacggcgagaggcggtcatacaccatcaagcaaggccacgtcttcgtggcgccgaccgnggcggtcacctacctggccaacaccgacggccggaagaaactggtcatcgccaagatcctccataccatctccgtgcctggcgagttccaattcttcttcgg

SEQ ID NO: 39084 - DNA, 173 bp, Zea mays
agacaacactcaccgatagcaagtagcgccgccgacgtttcgagagcagagtatccaagctagccaagcgcgcacctcggtgacctagctagctacctagctagttcaggcgacgatatggcgtctggtcaggagagcaggaaggagctggaccgcaaggctcgcgagggcga

SEQ ID NO: 39085 - DNA, 164 bp, Zea mays
catcttcatccctccaattgtatggaccataaaccagagtaggtcatctataatgaatatgtcttgaccaccaggaatttcattcgcacagtcaccgatatccgtggggacaggctaattgatattgcgccacattactatgatctgagcaatttcccgtcatg

SEQ ID NO: 39086 - DNA, 166 bp, Zea mays
cccacaccgggcacaccccccgagctcagcttagctccactccagctccaatcacagtcgtgaccagagcgcgatagctagctagagggccgtgaaaatgccgatcaataggatcgccctggggagccaccaggacgtgtaccacccgggcgccctcaaggcggcg

SEQ ID NO: 39087 - DNA, 167 bp, Zea mays
gcggattcatctgtaggcgggaaaacggggattaaccacccactagggaagaacttgattggacgattctcatcagccacaatgtgttctaattgacacagctacactgaacacattgcctgacagggagctagcctcaggcattgccgaggtagtgaagtatgggc

SEQ ID NO: 39088 - DNA, 167 bp, Zea mays
agcccaatcagccaatctcctcctcctcctccgctctcagacgagcagcggttgccatcacttttcacttcccacgcccgcagcgggctcgcaggcggcagagaattgtctgtaacgccgggtgggaatttgattcggtcggattcgctgcgccgcgatgacggagc

SEQ ID NO: 39089 - DNA, 162 bp, Zea mays
agaaaatgagagagaaagtccaaaagatcatagcacacgggatcaactgttttgtcaataggcagttaatctataacttccctgaggaactctttgccgacgctggcatacttgcaattgagcatgctgactttgagggcattgaacggttagctcttgtta

SEQ ID NO: 39090 - DNA, 167 bp, Zea mays
agaggatctccaagggaaagaagggtggcaagaaaaagaccgtcgaccctttctctaagaaggattggtatgacatcaaggcaccgtcggtgttcagtgtgcgcaacatcgggaagactctcgtatccaggacacagggtaccaggattgcttctgagggtctgaag

SEQ ID NO: 39091 - DNA, 168 bp, Zea mays
acaccatccgggcgcggctgtcaccgggcacggcgttcgtggtgcccgcgggccacccgttcgtcgcggtggcgtcccgggacagcaacctccagatcgtgtgcttcgaggtccacgccgacaggaacgagaaggtgttcctggccggcgccgacaacgtgctgcaga

SEQ ID NO: 39092 - DNA, 274 bp, Zea mays
cggatacaggcagtttaatatgggtgatgtcctggttgatggaaagtccactgggttttgtgctggtggttgtgcagcaatagcagattctggaacttccttgcttgctggccccacagccattattactgaaatcaacgaaaagatcggtgctgctggtgtagtcagccaggagtgcaagactgttgtttctcaatacggacaacagatcctagatcttctgctagctgagacgcaaccagcgaagatctgttctcaggttggcctgtgcact

SEQ ID NO: 39093 - DNA, 272 bp, Zea mays
cgattccatttctacaccgagaccaccagccgtccgcccctgaaccctcagccttctccgtcccgcctcggcactcgacggccgccggcacacaccgcgcagtctcgagacaggaaccggaggaacgaggatggaggatgactcgccgctgacgaagacgatgaagggtgcggtgacaggactcgccgcggggaccatctggggcaccgtcgtcgccacctggtacgacgtgccccgtgtggagcgccacgtcgcgctccctggccttatcc

SEQ ID NO: 39094 - DNA, 119 bp, Zea mays
gtgaacaggcaatttaaagatccagacttgacaacttttgtatgtgcttgtatcccggaatttctttcattgtatgaaacagcaagattggtgcaagagttagcgaagtttgagattga

SEQ ID NO: 39095 - DNA, 117 bp, Zea mays
cgagcatatcacagtgacagacacgatggtgagcgccagaattgttgtcctcctcgccacgctcctatgcgctgccgccgcagtcgcgtcgtcctgggaggacgacaaccaccacca

SEQ ID NO: 39096 - DNA, 273 bp, Zea mays
ctgcaactccagctttgagtgcaatatctgtcttgacccagctaaacagcctgtggttacaccctgcggtcacctcttctgttggccatgcttgtaccagtgagttcatgcacattcaccccactctgagtgccctgtatgcaagggtgaggtgctagaactgaatgtcactccgatatatggaagaagcggtgaagaagggaattccaccaaccctgacttcccacctaggccacgagcaaacagaagggagagcctgaggcaacagctgca

SEQ ID NO: 39097 - DNA, 273 bp, Zea mays
gcttcctcggcggattcctcctccctcgaccgtccccgtccccgtccccttccggcgcgcgagctcacccgagatggcaaacgcgagatcgggtgtcgctgtgaatgacgagtgcatgctcaagttcggcgagctgcagtcgaagaggctgcaccgcttcctaactttcaagatggacgacaagttcaaggagatcgttgtggaacaggtcggggatcgcgctaccagctacgaggacttcaccaacagcctccccgagaatgactgccgata

SEQ ID NO: 39098 - DNA, 269 bp, Zea mays
caccgggcacgcgccccgagctcagcttagctccacgccagctccaatcacagtcgtgaccagagcgcgagagctagctagagggccgtgaaaatgccgatcaataggatcgccctggggagccaccaggaggtgtaccacccgggcgccctcaaggcggcgttcgctgagttcatctccaccctcatcttcgtcttcgccggccagggctccggcatggccttcagcaagctgaccggcggcgacccgacgactccggcgggcctgat

SEQ ID NO: 39099 - DNA, 262 bp, Zea mays
gttccacattgggttgccttttgtggaaccagctaactgtcccagaagcatcactctactcatgggattccaaatccacttacattcatgcgcccccttactttaaggacatgaccatgtccccacctggcccctctacagtgaaagatgcctactagttgctgaacttcggggacagcattactacagatcacatttcacctgcaggaagcatacacaaagacagtcctgctgccaagtatttgatggagcgtggtgtgga

SEQ ID NO: 39100 - DNA, 183 bp, Zea mays
ggccgagctgcagcgcgccgtggagcgcgcgtccgcgctgctccgcccgcacagcgccgccgtgggtggagtacaccagccaggcctacaccaagagcatcccgggccactacgtcgtctactgggagctcctgcaggccaaggggggcgccgcggtggacggggagacgctggaagggtgct

SEQ ID NO: 39101 - DNA, 179 bp, Zea mays
cgctacaagaagcaccgccgacgtatcgagagcagagtatccaagctagccaagcgcgcacatcggtgaccaagctagctaccaagctagttcaggcgacgatatggcgtctggtcaggagagcaagaaggagcaggaccgcaaggctcgcgaggacgagaccatcgtcaccggcggga

SEQ ID NO: 39102 - DNA, 178 bp, Zea mays
agcggcggcggcggacaaacgcaggcgaaggcgagggtgtgagggaaggagcaccagccatggtgcacgtcaacttctaccgcaactatggtaagacgttcaagaaaccaaggcgtccttatgagaaggagcgtcttgatgctgaactgaagctggttggtgagtataggctgaggtg

SEQ ID NO: 39103 - DNA, 178 bp, Zea mays
cgttcccaacccattccccttcctcgcccgccgtcataaatagccagccccatccccagcttctttccccaacctcatcttctctccttttgctcggaacgcacacacagcccggtccccgatctccgatcccctcgtcgatccaagatgcagatcttcgtcaagaccctcactggaa

SEQ ID NO: 39104 - DNA, 172 bp, Zea mays
gcaagtagcatgcacctatgattgacaacaccaactacaagggaatctggaagcctcaggagatccccaaccctgagtactttgagcttgacaagcctgactttgatccaattgctgctattgggattgagatctggacaatgcaggatggcatcctgtttgacaatatctt

SEQ ID NO: 39105 - DNA, 170 bp, Zea mays
aagcgacttttttttcaagaagacaggagaagggagtagtagtgagtcttaagaatggcgagtgcacaggcagtggggcaaggagaacgaggccacttcgttctgaagagcggacacaccattccggccgttggtctaggcacttggagggccggctcagataccgctca

SEQ ID NO: 39106 - DNA, 168 bp, Zea mays
cccatccgcacatctctccatctccctgctcctccgccttcttcttgatccagccaagccagggatcgccatgtcggactcggaggagcaccacttcgaatcgaaggccgacgccggagcgtccaagacctacccgcagcaggctggcaccgtccgtaagaacggctt

SEQ ID NO: 39107 - DNA, 168 bp, Zea mays
caaaccctagatccgccgcactcagttccggtgagaccctcctttccagcgaaaataccgaacctcgagtaccggatgtatgagcagcggttcccggaggtggacgccgcggtgatgatccaggtgaagcacatcgctgacatgggcgcgtacgtctcgttgctcgag

SEQ ID NO: 39108 - DNA, 169 bp, Zea mays
gcctctacatttcttctctctcagctccaccgcctccgcctccgcctgatccatccaagacagggatcgccatgtcggactcggaggagcaccacttcgaatcgaaggccgacgctggggcgtccaagacctacccgcagcaggctggcaccgtccgtaagaacggctt

SEQ ID NO: 39109 - DNA, 311 bp, Zea mays
aggcagatgcccattcactatgggtcgaaccgtctgaactatttcacagtctcgtcacctatcgcaacacagctccctcatgctgttggagcagcctactctctgaagatggacaagaaggacgcgtgtgccatcacatactttggggacggtgggacaagtgagggagacttccatgcagcgctcaacttcgcggctgttatggacgcgccggtgatcttcttctgccgcaacaatggctgggccatcagcactccgactactgaacaattcagaagtgatggggttgtcatccgtggccaggcttatgg

SEQ ID NO: 39110 - DNA, 309 bp, Zea mays
agcaggctcaagggctccacgctccttaccgaagagtggtgacggatggatcagatgaatgggcaatctacggcgggaccggagagtttgctatggcgagaggtgtcgtcaaaagaaggtaccttgccgatagggatggcgccgggaacactgacgagctcagcatgcaggttttctgcccggtgtttggctcatcacagcaaccaaacaagcaggactccagcatctctgtcaccaagattgggttatggggtggcgaaggagggtcggcgcaggacatcacgacgacggagccaccgcagcgcctgc

SEQ ID NO: 39111 - DNA, 177 bp, Zea mays
cttacgtgaaagcatcaagcgacatgagcattttcttgccctaccacttaggttgaaaccaggaatgaaggttttagatgtaggctgtggaataggtggaccgctgagagaaattgcaagatttagctcaacttcagttacgggattgaataacaacgaataccagataaccagggg

SEQ ID NO: 39112 - DNA, 177 bp, Zea mays
caggctcctccgcggcatccgggactaccgcgtggcggtcctggaggcgaacccgcgctcgttcgtggtgcccagccacaccgacgcgcactgcatctgctacgtggcggaaggcgaaggagtggtgacgacgatcgagaacggcgagaggcggtcatacaccatcaagcaaggcca

SEQ ID NO: 39113 - DNA, 176 bp, Zea mays
gttgttgtcatcaagtacgtaccgtacgtgggagacagtaagaaggctatggacgagtacacatcagagatcttcatgggcggcaagagcaccatcgtgctgcacaacacctgcgaggactcgctcctcgccgcgcctatcatccttgatcaggtgctcctggctgagctcagcac

SEQ ID NO: 39114 - DNA, 112 bp, Zea mays
acagcatggactgtggatcgatggatgcagttacacctgtcaggatttgttctaagttaaacctaaggaaaaaatggtgcttcttggtgcagcaaaaaaaaaaaaaaaagga

SEQ ID NO: 39115 - DNA, 171 bp, Zea mays
ccgccagccacaccaaacacttgcgccgccgctgcctcacaggtaatgccgccatggtctccggatcgggcgtgtgcgcgaacatgcgatggtcgacgcgcgccaccacatgctgggccgtctctcctcgatcatagccaaggagctgctcaatgggcagaaggtggtcgt

SEQ ID NO: 39116 - DNA, 174 bp, Zea mays
  unsure (1)..(174): unsure at all n locations
accgggcacacaccccgagctcagcttagcgccacgccancgccaatcacagtcgtgaccagagcgcgagagcgagctagaggggcgtgaaaatgccgatcaataggatcgcccaggggagccaccaggaggtgtacgacccgggcgccctcaaggcggcgttcgctgagttca

SEQ ID NO: 39117 - DNA, 169 bp, Zea mays
acaaaaatggaaatgattgactcgttgtttaaaccacgggaaactgatgacgatggtctgattcgggagtgtctgattgacttctacaccagttcagggaagagaaagcccgaccaagtcatcatcttcagggacggtgttagtgaaagtcagtttaatcaggtgctga

SEQ ID NO: 39118 - DNA, 170 bp, Zea mays
cccagtcgctcaaaaccctagagctctcgcctgctcgcctccgccgccggagcgagctccccatcttcatccgtcaaccatggcgacccagatcagcaagaagaagaagttcgtcagcgacggtgttttctacgccgagctcaatgagatgctgacgcgggagctggcgg

SEQ ID NO: 39119 - DNA, 169 bp, Zea mays
cctggaacaatgggtgctacagctcaatccaattggaaattcaaggttgttcagatgggagtacaccatgcgcttaatccagaccccttcagaggtgcttttggttctgacggggagaaatacgccagagatgttcaggaaatcatcgaatttggaactacagggagag

SEQ ID NO: 39120 - DNA, 173 bp, Zea mays
ccccaatcgcgttctcttcctcggcgacatggcggccgccaccggctacaccgacgccccaaccgacgagcaactgctggcgtacgctgagctgcccagacatggccgctacatggcggaggtgttcgccgtgcgcatcctcgccaccgccggaggagaccctccgccccatg

SEQ ID NO: 39121 - DNA, 163 bp, Zea mays
acgacgccttcatcacgacggattacatgatctacatgttcaagtacgacaccgtgcacggccaatggaagcacagcgacatcattctcaaggactccaagacgcttctcttcggcgagaagccggtcaccgtctttggcatcaggaacttcgaggagatccc

SEQ ID NO: 39122 - DNA, 160 bp, Zea mays
cgcccgtcaagcacaacctccggaccagaaccgccgtccccaagctcggggtgatgcttgtcgggtggggaggcaacaacgggtccacgctgacggctggggtcattgccaacagggaggggatctcatgggcgaccaaggacaaggtgcagcaagccaa

SEQ ID NO: 39123 - DNA, 293 bp, Zea mays
aaccgtccagcctcacggacaagaagccgacccattccaacagccacggcaggcactacgagatcaccggcgacgagtgcccgcacctccggctgctcgacatggacgtcggcctggcaaacatcgcccgcggttctatgatggcgccgagctacaacacccgtgccaacaagatagctatcgtcctcaagggccagggctacttcgagatggcgtgtccgcacgtctccggcggccggtcgtcgccgcgccgtgagcgcgggcacggccgagaggaagaggaggagcgggaa

SEQ ID NO: 39124 - DNA, 302 bp, Zea mays
tgcagatcggctggatctatggatcaattaccgaggatatcttgaccggatttaagatgcaccgccatggttggcggtctatttaccgcatcccgaagcggcctgcattcaaaggttccgcacctcttaacctttcacaccgtcttcaccaggtccttcgttgggctcttgggtctgtggaaatcttcttcagcaagcactgcccactctggtacggatatggcggcgggctaaaatttctggagaggttttcttatatcaactctatcgtatatccctggacatccattcctctcttggct

SEQ ID NO: 39125 - DNA, 244 bp, Zea mays
tccactcagaaaacccagccgccgccgcatcggcctcccaggtaagcaggagcgtccaccccagccgccgccatgaagcgcaacccccgcgtcacgagctcccgccggaagtgccgcaagcgcacttcacggccccgtcctccgtccgccgcgtgctcatgtccgcggcgctatcgacggagctccgccacaagtacaatgtgcgttccatcccgatccgcaaggacgacgaggtgcaggtcgt

SEQ ID NO: 39126 - DNA, 244 bp, Zea mays
cgaccgtctctagcatggaaaacataatcatctgccggacagagcacatgttctttgcttcagacgagaggattaaggctgtcaggcagatgattatggctcccacgcttgagctgaggcagcaggcgctcgaccgtctcttgccgtatcagaggtctgacttcgaaggcatacaccgtgctataactggactcccggtgaccatccgactcctggaccctcccctccacgagttccttccaga

SEQ ID NO: 39127 - DNA, 242 bp, Zea mays
ctaacacacccgagcatatcacagtgacagacacgatggtgagcgccagaattgttgtcctcctcgccactctcctatgcgctgccgccgcagtcgcgtcgtcctgggaggacgacaaccaccaccaccactggggccacaagtccgggcaatgcgtgcggcggtgcgaggaccggccctggcaccagcgcccccggtgcctggagcagtgcagggaggaggagcgggagaagcggcaagag

SEQ ID NO: 39128 - DNA, 242 bp, Zea mays
cgcccaacctacaccaacctcaacaggcttgtgtcccaggtcatctcatccctgactgcttccctgaggttcgatggtgctctgaacgttgatgtgaacgagttccagaccaacctggtgccctaccctaggatccacttcatgctttcgtcctacgctccagtcatttctgctgagaaggcctaccacgagcagctgtccgtggccgaaatcaccaacagcgccttcgagccatcctccat

SEQ ID NO: 39129 - DNA, 234 bp, Zea mays
ctcgagccgcgacaccgccgccgcaagccgtccgccttgccctacacgaaggcttggtcaccctccttgtatctccacaccccccttcacagatccgttcctccagctagggttagcgttcctctgcagcgatggcgatcaagcggaccaaggcggagaagaagatcgcgtacgacaagaagctgtgcagcctgctcgatgagtacaccaaggtgctcatcgccctcgccgaca

SEQ ID NO: 39130 - DNA, 232 bp, Zea mays
cgcagtcgctcacagcgtgcgccaaaagcagcagcagctccagccgtcgccgtctccactctccagtctccagcacagctccgcgcgcgccggatcgagggaaggcaggcggacgaggaggagagatgagtctcttcgggcttggacgaaaccagaagacattccgccccaagaagagcgctccatcaggtagcaagggagcacagctccgaaagcacatagatgccactct

SEQ ID NO: 39131 - DNA, 233 bp, Zea mays
gttcggcgagtcgcacggcccctacagcctcctggaccagcggcccagcatcgccaaccagcacgggcagctctacgaggccgacgcgcgcagcttccacgacctcgccgagcacgacgtcagcgtctccttcgccaacatcaccgcggggtccatgagcgcgccattgttcaacacccgttcgttcaagatcgcctacgtgccgaacggcaagggctacgccgagatcgtgt

SEQ ID NO: 39132 - DNA, 231 bp, Zea mays
gccaagtgtttggaaacaggtgagactgttgccataaagaaggttcttcaagacaagcgttacaagaaccgcgaactgcagaccatgcgcctccttgaccaccctaatgttgttgctttgaagcattgcttcttttcaacaactgagaaggatgagctttatctaaatttggtccttgagtatgttccggagacagttcatcgagttgtgaaacatcacaacaagatgcac

SEQ ID NO: 39133 - DNA, 237 bp, Zea mays
aggacataaagaaaagatcattgttatcttccttggaggattacagtacactacatcttcaaactggcagaccgatgtggtcacctgggtttgctataacattccggtgatcgtgtttcttcatcgtcggggtcatatttgttcccattggtgttatcttcagtttgacgtcggcaacgtggtcatggtgaccggcgggaggaacaccgggcatgtaagagtgatcaagaactggga

SEQ ID NO: 39134 - DNA, 267 bp, Zea mays
tgctcctccgtctcccccgcgccgcgttccctagagccgccgccgcagccaaaaaaaaaacttctaaactcccaatccatggcgtcgagcagcacttaccttgccgacgacggcttcgcggcgccgcgacttttctcgcagggtgtatcctacacatacgacgacgttatcttcctcccgggctacatcggcttccccgccgactccgtcgacctctacacacgcctctcccgccgcataccgctatccatcccctgcgtcgcgtct

SEQ ID NO: 39135 - DNA, 268 bp, Zea mays
attgggcgcagagaatccccaagcaaacaaacagggtagaggtagagggagaggagaggagaggagacgagaggagaggttgggtctgggacaccatggctccgatgaagctgtacggggcggtgatgtcgtggaacgtgacgaggtgcgcaacggcgctggaggaggctggctccgactacgagatcgtgcccatcaacttcgccaccgccgagcacaagagccccgagcacctcgtccgcaacccgtttggtcaggttccagctct

SEQ ID NO: 39136 - DNA, 228 bp, Zea mays
caagtaccacacctttcacccggtggccaccatcctaagctacctcaccaaggcaccactggttccccctggcacaccggtggtgaacgctctggcaaagcagagggcgatgctggagaacatcatgagggcctgtgttggcctggccccagagaacaacatgatcctggagtacaagtgagcgaaatggcgtggcctgcagctagatatgcaggaggctgcacgaag

SEQ ID NO: 39137 - DNA, 226 bp, Zea mays
ctggaatcgtcgtggtccctggatctggatttcgtcaagttcctggaacatggcacatcagatgcacgatcctgccgcagaagacaagatccccgcggtgatcagccgcttcagggctttccatgaggcgttcttggccgaataccgcgactaaactgttacgctgtgtgtgagttaagttggaggttcagtagaactgtagaagagctcagtgacagcgcagaaa

SEQ ID NO: 39138 - DNA, 242 bp, Zea mays
ctccgaaaagcccccagcggcctcacctccgcaccgcagccatggccgccaccggcgtggtcgccgagccgaagaccaagtacgatcgccagctcaggatatggggtgatcaaggccaggctgcactggagaaggctagcatatgcttgcttaactgtggtcctaccggaaccgaagcattgaagaatctcgtgcttggaggcataggaagtgtgactgttgttgatggctccaaagttgaa

SEQ ID NO: 39139 - DNA, 222 bp, Zea mays
gtgacagacacgatggtgagcgccagaattgttgtcctcctcgccactctcctatgcgctgccgccgcagtcgcgtcgtcctgggaggacgacaaccaccaccaccacgggggccacaagtccgggcaatgcgtgcggcggtgcgaggaccggcccttgcaccagcgcccccggtgcctggagcagtgcagggaggacgacctggagaagcggcaagagcgg

SEQ ID NO: 39140 - DNA, 219 bp, Zea mays
ctccgctgggccaccagctttgaccgccgcctcccttcccatccgctacagctcctccccactccactcccccgcaggagcggcggcggcggcggcgaggtcgtactccacatcggcgagcggcggcggcaccgcggaggcaaaggcaagatgttcgggcgcgcgccgaagaagagcgacaacaccaagtactacgagatcctcggggtgcccaagtcg

SEQ ID NO: 39141 - DNA, 220 bp, Zea mays
cgacaccgagaaaggaggcctggctgtcaacaacaacttcttcgtcgattttagcaccgagcctgatggtcctgccctggcccacgagatgagatatcctggtggggactgcacctctgatatatggatctgaggtcaaggattcggcgtaattaacaggctgctggagaatccctgttgttgtatgcactgtaattaacatggtatccgtgcggtgttc

SEQ ID NO: 39142 - DNA, 211 bp, Zea mays
agtacctacagggtggaaattttttgggaatttgatggatgctggaatgtgctcaatctgtggtgaagaaagctttggcactgggtctgaccacattcgtgagaaagatggcatctaggctgtgcttgcatggctttctattattgctttcaagaataaggacaaccttggaggagataagcttgtcactgttgaagatattgtccgtcag

SEQ ID NO: 39143 - DNA, 215 bp, Zea mays
agaggccgcgggacttccacctctctcacgctcggctccggccacatcgcctctacccccttcgcgctcgcacacgcgctcgacccatctgggctggggcacgcagcacactcactcgtcggcttagggacccccctgtctcgaaacgccgacatgatggttctattgttaagcaaaagtaggctaaatgcctaagatgttcacataaagctaag

SEQ ID NO: 39144 - DNA, 212 bp, Zea mays
ctccgatccccaattcctccttcggatctcgcattcagcgcacgcaggtgtgaaggaagggggacgcggaggaagatggggctcgcgttcgggaagctcttcagccggctcttcgccaagaaggagatgcgagatcctcatggtcggcctcgacgccgccggtaaaaccaccatcctctacaagctcaagctcggcgagatcgtcaccacca

SEQ ID NO: 39145 - DNA, 224 bp, Zea mays
aacatgtatgttttctgttgttcatacacgcacaatgttgcgccaagagggaagttcattgcatttgtatctgcagaagcagagactgataacccgcaatctgagctaaagcctggaattgatctacttggttctgtggatgagatattatatgatatttatgacagatatgaaccagtgaatgaaccatctcttgataattgctttgtcacaacgagctatga

SEQ ID NO: 39146 - DNA, 224 bp, Zea mays
ctcaccaccaaggaggggaagctcaccgtggagcgcgagaaggcgaagatcgagacgcagcccttctccccccgtggtgcagttcgagcaggaccccgtgcagatcctggacgcgctgctcccgctctacctcaacagccagatcctccgtgccctgcaggagtcgctcgccagcgagctcgccgcccggatgagcgccatgagcagcgccaccgacaacgcca

SEQ ID NO: 39147 - DNA, 221 bp, Zea mays
caggaggaacatcactgttgataaagctcagccacaaggacctggtagagaccgtaatggtgaccgtgattattaccgcgagcatggatctcgttatgaacgtggtcgtgactatcgtggtgggcgtgcaccgcgaggtggtggtggtggtggtggtggtggtgactgcttcaagtgtgggaaacctggtcattttgctagagagtgcccatctggggatg

SEQ ID NO: 39148 - DNA, 225 bp, Zea mays
aaacaaacctggaaggatcaccataattacaaggatgggggcagagaacatgagggtgaagttgcctcatctcatccgtgctgttcgcaatgctggactgattgtcacatggattactgatcctatgcatggaaacaccatcaaggccccttgtggcctgaagactcgtccatttgactccattctggctgaagtgcgtgccttcttcgatgtgcatgaccaaga

SEQ ID NO: 39149 - DNA, 217 bp, Zea mays
cgccgacgtttcgagagcagagtatccaagctagccaagcgcgcacatcggtgacctagctagctacctagctagttcaggcgacgatatggcgtctggtcaggagagcaggaaggagctggaccgcaaggctcgcgagggcgagaccgtcgtccccggcgggaccggcggcaagagcgtagaggcccaggagcacctcgccgaatggcgcaccgcg

SEQ ID NO: 39150 - DNA, 216 bp, Zea mays
gatacatcaagtcccttccctatacccctggtgttcctctcgtaagtatgtacccacatgcgcaccctcttgccattgatctgttgcagaagatgctcatcttcgaccccaccaaaaggatcagtgtcaccgaagctctcgagcacccttacatgtcccctctgtatgatccaagcgcaaatcccccagcccaagtgcccatcgatctggacatag

SEQ ID NO: 39151 - DNA, 181 bp, Zea mays
accggggttcggtttcgtgggtgggcggatcgagatggcggcgtcggatggtgagtaccgctgcttcgtcgggcagcctcgcctgcgccacggacgaccacaccctccacaacgccttcagcaccaacggcgaggacctcgagtccaagatcatcctcgatcgggagacgcagaggtaccg

SEQ ID NO: 39152 - DNA, 214 bp, Zea mays
caaaaggcacgaccaccaccgccggccgggaagcaagctcaaaccctaatcgccgtccgccggcgacgtcagcacgatggcccgctacgaccgcgccatcaccgttttctcccccgacggccacctcttccaggtggagtacgctctcgaggccgtccgcaagggcaacgccgccgtgggcgtccgcggcacggacaccgtcgtcctcggcgtc

SEQ ID NO: 39153 - DNA, 211 bp, Zea mays
atacctccagcatcttcccacttcaaaacgtcttcatccgcaagatgaagatactcaaggcccccaagttcgatcttgggaagctcatggaggttcatggcgactacaaagaggatgttggtgtgaagcttgagaggcatgtcgagggagatgaggctgtgcaggaggttgctgctgccgagtagtttgtttgctacttctatatctaggc

SEQ ID NO: 39154 - DNA, 208 bp, Zea mays
aaaacatggctcctctgtctcctagactggtagtgcccgtagacgtgaagaagctgccgcgggagcaaaaggatcctctccacaaccgctggcacccggatatccctcctgtcgctgatgtaaccgaagggaattgttccgcgttgagatggtcgattggagtagagggcgggttagggatgataactctgcagatgatctgaaattc

SEQ ID NO: 39155 - DNA, 183 bp, Zea mays
catgtactaccgcaaccccagcgctgacatgctcctcaccgccgacgagctcaacgtcgagctcatcaagaggagtgcggtcttccactacggatcaataagcttgattgctgagccttgccggacagcacatctccgtgccatggagattgccaaagaggcaggtgcacagctctcttatga

SEQ ID NO: 39156 - DNA, 327 bp, Zea mays
aaacctggcaaacatcgcccgcagttctatgatagcgccgagctacaacacccgtaccaacaagatagctatcgtcctcaagggccagggctacttcgagatggcgtgtccgcacgtctccggcggccggtcgtcgccgcgccgtgagcgcaggcacggccgagaggaagaggaggagcgggaagaggagcaaggcggtggcggtgggcaaaaggcgaggagctacaggcaggtgaaatcccgcatcagagagggctccgtcatcgtgatcccggcggggcacccgaccgcgctggtcgccggcgaagacaagaacctcgccgtcct

SEQ ID NO: 39157 - DNA, 316 bp, Zea mays
cgcccgcatacccgatcccgctcgctcgccgccagttgtcccgcagctcggatcgtctcatacctcggcgaaaatgagagagatcttgcacatccagggagggcaatgtggcaaccagatcggtgccaagttctgggaggtcgtgtgtgacgaacacggcattgacactacaggtcggtacactggcacttctgaccttcagttggagcgcgtcaatgtctactacaatgaggcctcctgtggccgctttgtgccccgtgctgttctcatggacctagagcctgggacaatggacagtgtccgcactggaccctat

SEQ ID NO: 39158 - DNA, 320 bp, Zea mays
gctacaccaacaactcaaatccatccttattgagcttagtgttagatccatggacacggaaggagtagcagcaaaggtggcagatgagacgactaaaccggcaagccaagaagacggcgagagcaaggccgggatgactgatcagctgatgctgaccgacaagtcgcagctgcaggcgctagcgatgctgctgcggaacaacgaggagctcatgatgagccaagcgatcaagtcggagacggagcgcgttgagtacctcaagacgtgagcgaccactacacgcggacaatgaagctccctgacgactaccaggcggccag

SEQ ID NO: 39159 - DNA, 325 bp, Zea mays
tgctagctgagctcgtgcgacgaagaattgccggaattggcaggaacatggtggcgccgctcctggtgctcaacctcatcatgtacatcatcgtcatcggcttcgcgagctggaacctgaaccacttcatcaacgggcagaccaactaccccggcgtggccggcaacggcgcgacgttctacttcctggtgttcgccatcctggccggcgaggtgggcgcggcgtccaagctggcgggcgtgcaccacgtgcgcgcctggcgccacgacagcctggccaacaacgccgcgtcgtcgctcatcgcctgggacatcacggcgctcgc

SEQ ID NO: 39160 - DNA, 296 bp, Zea mays
  unsure (1)..(296): unsure at all n locations
ctcctaccaccgttttataatccacttctcccactccccctgntttttcttcttccgctgttctactccggcgtgntggtcgacggcggcgcagatgacgaccctcgatctgatgggagggtacgggcgggtggacgagcaggttgccatccaggaggccgccactgcggggctgcgcgggatggagcgtctcatcttgcagctctcccatgctggcacctgggagcggtcgtcgtccccaccggcggtacatgcgcacgccagcagcagaagcagctggagcagatccagcagca

SEQ ID NO: 39161 - DNA, 172 bp, Zea mays
cagatatcggagaaagtgaagccgcacccggtggtggtcaccctgctgactcaggtggaggagatcatccccaagtggaagatcgtccccaccaaggacgtcatcgactccgcattcaaggaccccgtcaagcgcgagaaggtcaatggaatattgctgtctgattttgcgg

SEQ ID NO: 39162 - DNA, 171 bp, Zea mays
ctcgagccgctctggtcatgctgactcccctcatcgttggaaccctctttggcgtcgagactctctccggcgttcttgctggtgccctggtttctggagtgcagatcgccatctctgcttccaacaccggcggtgcatgggacaatgccaagaagtacatcgaggctggtg

SEQ ID NO: 39163 - DNA, 305 bp, Zea mays
cgagcatatcacagtgacagacacgatggtgagcgccagaattgttgtcctcctcgccaccctcctatgcgctgccgccgcagtcgcgtcgtcctgggaggacgacaaccaccaccaccacgggggccacaagtccgggcaatgcgtgcggcggtgcgaggaccggccctggcaccagcgcccccggtgcctggagcagtgcagggaagacgagccggagaagcggcaagagcggagcaggcacgatgccgacgaccgcagcggcgatggctcgtcggaggatgagcgacacccagagaaggaga

SEQ ID NO: 39164 - DNA, 307 bp, Zea mays
gcaagaaacaaggggggcaataatggcggagtaccagggcgagtatggacacccgtacccgcgcgtcgaccagtacgggaaccccgtgccgccggtggaccagtacggcaacccgctcccgagggagccggcgtccggtttcggcgccatcgctcccccctacagcgctggcgacacgccgcggggcacgtagcggcgcctgtcgagtacggtgccgacgccaagtatccgcacgatggcacggggagcggtggcggcggcggcgtcacgctccgaccggtgtggtggcgtacccagcggtggcgtc

SEQ ID NO: 39165 - DNA, 315 bp, Zea mays
  unsure (1)..(315): unsure at all n locations
aggtagtccagatgagcaatcttggcctcaaggattgtcacttgcagaagcaatgaagtatcagttcccacagatcaaaggcagtcaactggccgaggtgatgacaacagccagtagcgatgcaattgatctcatctcatcactatgctcatgggatcctagcaagagaccanaggccgcagaagtcctccagcataccttttttcagggttgtacatgtgttccacttcctgtccgtccanaagcttcatcacttcctagaacacctccatgtgttggatcaaaaggacattcagagaacagtgtggctagaag

SEQ ID NO: 39166 - DNA, 306 bp, Zea mays
gctagctgagcttgaattggctgacctaaaatctgtccatcctgtatttgaggatgacgtctatgaatacctgggggttgaaaacgctgtaaacaagttcatatcctatggctctactggttcagaacaagtgaaaaagcagcttgaggactggcgcatccagctcggggtgagctcataagggttggcatggttcaagaaataagctcgcaaattagtgcttgcgatttttgaaggtgtatgttgacgtcgtgaactttttctgtgtgtttgttcatacatttcgaaaactggaatgaatgatgt

SEQ ID NO: 39167 - DNA, 309 bp, Zea mays
ctcacgtggtggccgcggcagccgcggcgagggtcgcgactcgggttcttcttcttcttccaagtgggagatcaaaccgtccagcctcacggacaagaagccgacccattccaacagccacggcaggcactacgagatcaccggcgacgagtgcccgcacctccggctgctcgacatggacgtcggcctggcaaacatcgcccgcggttctatgatggcgccgagctacaacacccgtgccaacaagatagctatcgtcctcaagggccagggctacttcgagatggcgtgtccgcacgtctccggcgg

SEQ ID NO: 39168 - DNA, 317 bp, Zea mays
gcagatcgcggaagcccagcggctcagagtccagggggagggagctcgcggcggctgaggaaggcgttcaccaccgtcgcggtgagtgctcccagtcaagcgcctcttccttcgtagtgtcaacaattccgccccgcgcccgcgcggatctgattgtctcgatcgtccaatcgagcggatttcattgaggaagagatggggctctcctttgggaagctgttcagccgcctcttcgccaagaaggagatgaggattctcatggtcgggctcgatgccgccggtaagaccaccatcctctataagctcaagctcggcga

SEQ ID NO: 39169 - DNA, 301 bp, Zea mays
  unsure (1)..(301): unsure at all n locations
ctcctgagcactttctcctcgtccccgacaagccaatcgaagccgagatacggccatggactccaccggcaccggagcagggggtaacgggaagaagggagcggccgggcgcaaggtcggcgggccaaggaagaagtcggtgtcgaggtccgtgaaggccgggctccagttccccgtcggccgcatcgggcgctacttgaagaagggccgctacgcgcacgtagtcggcaccggcgcccccgtctacatcgccgctgtcctcgaatacctcgccgctgangttctggagctcgccggtaat

SEQ ID NO: 39170 - DNA, 295 bp, Zea mays
acggaggcgaaggaggaggagcagcagcagcaggcggcgccgaggagcggcatcccactcagtgcttgcaaccatggctaggggattgaagaagcacttgaagaggctcaatgcgcccaagcattggatgctcgacaagcttggcggagcttttgctcccaagccatcttctggacctcacaagtccagggagtgccttcctctgatcctcatcatcaggaacaggctcaagtatgctctgaactaccgtgaggtcatttctatcctgatgcaacgccatgtacttgttgatggc

SEQ ID NO: 39171 - DNA, 304 bp, Zea mays
gatggtgagcgccagaattgttgtcctccgcgccactctcctatgcgctgccgccgcagtcgcgtcgtcctgtgaggacgacaaccaccaccaccacgggggccacaagtccgggcaatgcgtgcggcggtgcgaggaccggccctggcaccagcgcccccggttcctggagcagtgcagggaggaggagcgggagaagcggcaagagcggagcaggcacgatgccgacgaccgcagcggcgatggctcgtcggaggatgagcgagagcaggataaggagaaacagatagaccggctgccgtac

SEQ ID NO: 39172 - DNA, 308 bp, Zea mays
tgccgattcgatccggttcttccaacccaggggcagtgatggcgacgaagaggagcgtgggcaccctcggcgaggcggatctgaaggggaagaaggtgttcgtgcgcgccgacctcaacgtcccgctcgacgatgcccagaagatcaccgacgacacccgcatccgcgcctccgtccccaccatcaagttcctcctcgagaagggcgccaaggtcatcctcgccagccacctgggtcgtccaaaaggtgtcactccaaagtacagcttgatacctcttgttccacgcttgtctgagctccttggagtt

SEQ ID NO: 39173 - DNA, 260 bp, Zea mays
caaaaacagcgcagagagaaagaacgtgacaaaacaagaaaggtttttgttgaaaagactgacatgagacccaaaagaatggctcgaaaagcaggtgctctagtcatatttgttgtagacgctagtagtagcatggctctgaatcgtatgcagaatgctaaaggtgcggcgttgaagttgcttgcagaaagctacaccagcagagatcaggtttcaatattccttttcgtggagattatctgaggtttgctccaccatca

SEQ ID NO: 39174 - DNA, 214 bp, Zea mays
agaaggggagctggaagcagtcacgcaggcagcctcgccgtgattcatatggaacaagctggagtcagtatctgctgtaccactcactgtttaccttaagattattacctgtgttgttgtcctttgctcgttagggctgataacataatgactcattagaaaatcatgcctcgtttttattaactgaagtagacacttcgcattcttgcccgtt

SEQ ID NO: 39175 - DNA, 296 bp, Zea mays
ccaagatcgacaggcgatctggcaaggagctcgagaaggagcccaagttcctgaagaacggcgatgctggtatggtgaagatgattcccaccaagcctatggtggtggagacattctccgcgtatcctcccctgggtagatttgccgtccgtgacatgaggcagacggttgctgttggagtcatcaagagtgtggagaagaaggacccaaccggcgccaaggtgaccaaggcggctgccaagaagaaatgatgcgataccgtgtctgcttttgcagcgcctggataacttgccact

SEQ ID NO: 39176 - DNA, 301 bp, Zea mays
gcctccgcgccaccaacccttgcctccccacacctcagcatgaaccactcgtctctttttctccgccccgcccgaagccgaggaggagaggggagcagcgagatcgtgcgcacctccgagatctccacgaagttgtggtaacatggggctcaccttcacgaagctcttcagccggctcttctccaagaaagagatgaggatccttatggttggtctcgatgcagctggtaagaccaccatcctctacaagctcaagctcggagaaatcgtgaccaccatccctacaatcgggtttaatgtg

SEQ ID NO: 39177 - DNA, 300 bp, Zea mays
agatcatcaagctcttccccgcctcctgaatttattgacacagaaccacaagaaaagcattaagaaagaggcatgctggacgatttcaaatattactgctggaaacaaagatcagatacaggctgtcataagtgctggtattatcgctcctttgttgcaactgcttcaaggagcagagtttgatatcaagaaggaggctgcttgggccatctcaaacgctacctctggtggttcccatgagcaaatcaagtacttggtgtctgaaggctgcatcgtgccgctgtgcgaccttcttgtttg

SEQ ID NO: 39178 - DNA, 288 bp, Zea mays
cgagcactcgccgccactcaccagcaaattcccaagccgccccttcccccatctctttcgcgccccatttgatcgattcctgatggcgcccaaggccgagaagaagcccgcggagaagaagccggcggaggagaaggccgagaagaagccaagggcggagaagcgcgtgccgagcaaggagggcggcgagaagaagggaaagaagaaggcgaagaagagcgtcgagacgtacaagatctacatcttcaaggtgctcaagcaggtgcacccggacattggcatctcgtc

SEQ ID NO: 39179 - DNA, 285 bp, Zea mays
aggccgtcttcctgatgccaccaagggttctgaccacctgaggcaagtctttggcaagcagatgggtttgagtgatcaggacattgttgccctctctggtggccacaccttgggaaggtgccacaaagagcggtctggttttgagggggcctggactacgaaccctttggtctttgacaactcttacttcaaagggaacttctgagtggcgacaaggagggtcttcttcagctcccaagtgacaaagccctgctgagcgaccctgtcttccgccctcttgtggag

SEQ ID NO: 39180 - DNA, 287 bp, Zea mays
gtgcagcctcgggaagttagtgacgccaaaagtcccagcggaggagcccgaggacgccgaccccgtccctcgctggtgggacggcatcatggccgcctcgtagtagagcctgccacggtacgccgcgaggtcggcgtagtagacgggcgtcgccagcgacacgggcttggtgcaccgcgcgaacacgaagcagaggttgtagaccagcttctgcaggtcgtcggaccggaagccgtgctcgtccaccaggctgtagtagtgcgtcggcctgctcgtgcccaggatcc

SEQ ID NO: 39181 - DNA, 289 bp, Zea mays
atcacaacgaacagaagctctcgatctcaccgacaccgaggaagaagagatcaatggcgtccgagcagggagtcgtgatcgcgtgccacagcaaggctgagttcgacgcccacatgaccaaggcccaggaagccggcaagctggtggtcatcgacttcactgccgcctggtgcggtccatgccgcgccatcgccccactgttcgtcgaacacgccaagaagttcactcaggtcgtcttcctgaaggtggacgtggacgaagtgaaggaagtcaccgcggcctacgaggt

SEQ ID NO: 39182 - DNA, 293 bp, Zea mays
ccagcctcacggacaagaagccgacccattccaacagccacggcaggcactacgagatcaccggcgacgagtgcccgcacctccggctgctcgacatggacgtcggcctggcaaacatcgcccgcggttctatgatggcgccgagctacaacacccgtgccaacaagatagctatcgtcctcaagggccagggctacttcgagatggcgtgtccgcacgtctccggcggccggtcgtcgccgcgccgtgagcgctggcacggccgagaggaagaggaggagcgggaagaggag

SEQ ID NO: 39183 - DNA, 291 bp, Zea mays
tgcgtcagtactcttctcaatgagatgaagcgccgcggcaaggattgccggttcggagtgatttctatgtgcataggttctgggatgggtgctgctgctgtgttcgagcggggagacggcgttgatgagctcaccaatgctcggggaatctcgacccacaactggctttccaaggacgccatgtaaagctacacccaccaaaatttgccggaactggtagcattgtttccagatcgctgtagggagcgaattggggaataaaatgattttgtatctgtcgcccctgctggg

SEQ ID NO: 39184 - DNA, 283 bp, Zea mays
gtcgatgacctgccgacgccgtcatcttcctgatgggtcactactccggcatggagcatgtcaatgtggggagtgggagcgaggtgaccatcaaggagctcgccgaactagtcaaggaggtggtcggcttccaggggaacctggtgtgggactccagcaagccggacggcacacccaggaagctcatggatagctccaagatacaggggatggggtggaagcccaagatcgccctcaaggaaggcctcgtggaaacctacaaatggtacgtcgagaatgtcat

SEQ ID NO: 39185 - DNA, 281 bp, Zea mays
ggtggtcctcgactcctcgttctgcaggatcctggcgaaccggcagtctgcggcgaggtccaaggagaggaagatcaagtacaccagtgagctggagaggaaggtgcagacgctgcagacagaggccaccacactttcggcacagctcacgcttcttcagagggacacctctggtttaaccactgagaacagggagctgaagctccggctgcaggccatggaagaacaagctaaactccgagatgctctaaatgacgccctgagagaagaagtccagcggc

SEQ ID NO: 39186 - DNA, 285 bp, Zea mays
cagcctcatccccttgcccacttctacagcccctctgctgcagcaagaaggaaagaagctagcgcttatagcttgtcagccatggccaccgccgccgcgtctagcctcctcaagtcctccttcgcgggctcccggctcccggccgccacgcggaccacaccggcgtccctcgtggtggccaccggcccgcgcggcgccggcgcggggcccatctgcgcgtccatgtccatgtcctcctccaacccgccctacgacctgacgtccttccggttcagccccatcaag

SEQ ID NO: 39187 - DNA, 285 bp, Zea mays
gaagaaaaggctgcatgttgtttcaaagcttcacgctatcttgcgtccattccttctaaggcgtatgaaggaggatgtggaacagatgcttccacgaaagaaagagataatcatatatgccaacatgactgagcaacagaagcaaatccagcatcacctgatcgaaaaaacatttgacaactacttgcacgaggaatcagatattatattgaaaagacctggcattagggcaaggttgcataatctaatgattcagctgaggaagaattgcaaccatcctgatct

SEQ ID NO: 39188 - DNA, 283 bp, Zea mays
aactcgaggaatcggctcgagggaagatctgttgatacttggtgatagcacctcatgatcctatgcaatcgagccttctcaatgctacactagaggataaaaacctttcagaaatcccaaatttcaggttattgctgaagcagctggttaccatggaggtcatccagtggacagcattgtgggaattctctaagcacgaatttgaaaacgagaagaatctgctaggaggagctttgggtgccaaagctgcagaagatttgaagctaagaataattgaacataa

SEQ ID NO: 39189 - DNA, 289 bp, Zea mays
ggagaaaggccacggtagggtcctcgtggtcgacggcggcggcagcatgcgctgcgccatccttggcggcaaccccgtccagcaggcgcagaacaacgggtgggctggtatcctggtcaacggctgcatcagggacgtggatgagatcaacggctgcgacatcggtgtccgggctctcagctcgcaccctatgaaggccaacaagaaggggatgggcgagaagcacgtccccgtcaacatcgctggaaccaggatttgcgacggcgagtggctctacgccgatcccgat

SEQ ID NO: 39190 - DNA, 275 bp, Zea mays
ctgaccctatcattgcgaagaaatatggagcaaagccggacatagaaaccttggacatcctgaacactacagctacccagaaggatatcgtggtggttgtgaaagtcctgtggggtgatccgcgtgagaagctctgtcaagttatccatgataccccgctgagctgcttggttataggaagcaggggccttggcaagcccaagagggtgctcttgggaagtgtcagcgactatgttgtgaacaatgcaacctgccctgtcaccgtcgtcaagtca

SEQ ID NO: 39191 - DNA, 277 bp, Zea mays
gttctccggggttcggtttcgtgggtgggcggatcgagatggcggcgtcggatgttgagtaccgctgcttcgtcggcggcctcgcctgggccacggacgaccactccctccacaacgccttcagcacctacggcgaggtcctcgagtccaagatcatcctcgatcgggagacgcagaggtcccgcggcttcggcttcgtcaccttctccacggaggatgcgatgcggaagccatcgagggcatgaacggcaacgagctggacggccgcaacatcacc

SEQ ID NO: 39192 - DNA, 277 bp, Zea mays
ctcatggactggaggagagattggatttgacacctacttctccatggccaggggcaacgccactgttcctgctatggagatgaccaagtggtttgacaccaactaccactttattgtccctgaattgggcccaaacaccaagttctcctatgcttctcacaaggctgttaacgaatataaggaggctaaggcgctcggtgttgataccgtgccagtacttgttggaccagtctcgtacctgttgctctcaaagcctgccaagggtgtggagaaggga

SEQ ID NO: 39193 - DNA, 279 bp, Zea mays
cccaaatccagccgtcggcacctccgcttcaagatgcagatctttgtgaaaaccctgactggcaagactatcaccctcgaggtggagtcgtctgacaccattgacaacgttaaggccaagatccaggacaaggagggcatccccccagaccagcagcggctcatcttcgctggcaaacagcttgaggacgggcgcacgcttgctgactacaacatccagaaggagagcaccctccaccttgtgctccgcctcaggggaggcatgcagatcttcgtgaag

SEQ ID NO: 39194 - DNA, 283 bp, Zea mays
gccgcagtcgcgtcgtcctgggaggacgcaaccaccaccaccacgggggccacaagtccgggcaatgcgtgcggcggtgcgaggaccggccctggcaccagcgcccccggtgcctggagcagtgcagggaggaggagcgggagaagcggcaagagcggagcaggcacgaggccgacgaccgcagcggcgagggctcgtcggaggatgagcgagagcaggagaaggacaaacagaaggaccggcggccgtacgtgttcgaccggcgcagctttcgtcgcgtggt

SEQ ID NO: 39195 - DNA, 286 bp, Zea mays
ctgctctgctgcagcaagaaggaagaagctagcgcctccctagctctcgttgtcagcaatggccaccaccgccgcgtccagcctcctcaagtcgtccttcgcgggctcccggctcccttcggccacgcgcaccaccaccccgtcgtccgtggccgtggccaccccgcgcgccggcgggagccccatccgcgcgtccatctcctcctcccccactccgccctacgacctgacgtccttccggttcagccccatcaaggagtccatcgtgtcccgcgagatgacccgg

SEQ ID NO: 39196 - DNA, 160 bp, Zea mays
ccaagtgcgtctctgcatccctcaagaaactgtggacgctgcacatactgagatttgtgggcaactgttcgaaaaggttgtcaaagaagccattgcatctgttgacggatataatgctgatagacgtgaggctgttaggaaggcagcacaaagtctaaac

SEQ ID NO: 39197 - DNA, 305 bp, Zea mays
ctgccgccgcccgccagcaccaaacttccatccgccccgagctctgcctccgccgccgccgcgccatgaggcctctcgacgagaaggagacgactcaggtattcgagaagctgttcaagttcacggggcccaacctgaagcacctcctggagcgccccgcagtggagggccccgacgcggagcccggccgctactgcctccggcttcaccgcaatcgcgtctactacgcctccgaggcgctcgtgcgccgcgccaccgccgtgtcccgaccgcgcctcgccggcgtggggacgcccatcggcaag

SEQ ID NO: 39198 - DNA, 303 bp, Zea mays
agctgccgcagactggtagtagccggcgcgccgtcaccgtatcctcagatcagaggcgagcagaaaccacaccactctactgacgcccgacgagcagtgtaacattttccttcagccatgggtaaggagaagactcacatcaacattgtggtcattggccatgtcgactctggcaagtcgaccaccactggccacctgatctacaagcttggaggtattgacaagcgagtgattgagaggttcgagaaagaggctgccgagatgaacaagcggtcattcaagtatgcgtgggtgcttgacaag

SEQ ID NO: 39199 - DNA, 314 bp, Zea mays
ctgctgctccgaccttccagtcttctccgtaggagcttcgctccatagatttcgccgcaacgggcaacggcacacccaccaactgacctgacccacgagggatccgcagatgaagatcattccggtcccttgcctggatgacaactatgcctacttaatcgtggacgagagcaccaagaaggcagcggccgttgaccctgtggaaccggagaaggttctcaaggcggccggcgaggtcggcgcctacgtcgactgcgttctcaccacccatcaccactgggatcatgctggtggcaatgagaagatgaggctgc

SEQ ID NO: 39200 - DNA, 306 bp, Zea mays
ctaccaccgcaccacgcgctcccgtttccgccgatccgagcgcgcagatcgcggaagcccagcggctcagagtccagggggagggagctcgcggcggctgaggaaggcgttcaccaccgtcgcggtgagtgctcccagtcaagcgcctcttccttcgtagtgtcaacaattccgccccgcgcccgcgcggatctgattgtctcgatcgtccaatcgagcggatttcattgaggaagagatggggctctcctttgggaagctgttcagccgcctcttcgccaagaaggagatgaggattctcatggt

SEQ ID NO: 39201 - DNA, 308 bp, Zea mays
agatccacacacatccgcatccctctctcctcggtttcctctcccaccaccaacccccagatcgcagcgatctccgccgccgccctctcagggattccgcgcgacaaagtcaggcgtagaggctccaggaggaggagggaggcgcacagggcgggtgggggagatgttcctctgggactggttctacggggtgctggcctccctcggcctgtggcagaaggaggccaagatcctcttccttggcctcgacaacgccggcaagaccacgctgctccacatgctcaaggacgagcggttggtgcagcaca

SEQ ID NO: 39202 - DNA, 309 bp, Zea mays
ctcgagccgtgagaacctcccggtgaaggtctttgtgctaaacaaccagcacatggggatggtggtgcagtgggaggacaggttctataaggccaacagagcgcacacatacttgggaaacccagagaatgaaagtgagatatatccagatttcgtgacgatcgccaaagggttcaacattccagcggtccgtgtgacaaagaagaacgaagtccgcgcacgataaagaagatgctcgagactccagggccgtacctcttggatataatcgtcccacaccaggagcatgtgttgcctatgatccctagt

SEQ ID NO: 39203 - DNA, 311 bp, Zea mays
agtcgcagtcgcagcacacactgaattctctttagctagctaagagagggtagccacaccaagacaggatgcagacagcgaaggtgaaggcgaaggacatggtgagctcggcgaaggagaaggtgaaggaggggtcggcaaagatgcagggcaagacgggcgaggcgacggcggccacgcacggcgagaaggagatggccaaggaggcggcccgcgccaagaaggaccaggccaacgccgacaagcaccaggagaaggccgaccaccgagcggacgccgccactggccaccacggcacgcgcgtgctcctc

SEQ ID NO: 39204 - DNA, 299 bp, Zea mays
ccccgagctcagcttagctccacgccagctccaatcacagtcgtgaccagagcgcgagagctagctagagggccgtgaaaatgccgatcaataggatcgccctggggagccaccaggaggtgtaccacccgggcgccctcaaggcggcgttcgctgagttcatctccaccctcatcttcgtcttcgccggccagggctccggcatggccttcagcaagctgaccggcggcggcccgacgaccccggcgggcctgatcgcggcggcggtggcgcacgcgttcgcgctgttcgtggcggtg

SEQ ID NO: 39205 - DNA, 301 bp, Zea mays
ctgttttgactcctctctagccacttggccatacttgtgctaacccttaacaagtttttgtggcttaagtattgaagttttacaggatcacctattcacccccccccctctaggtgctctcatgactgccatacctgcagggtgctgcacaagtgctgttttattttctatttttgtggccgtttgcttttcctcaacggcctttggtctccatttcttttgcagtgcaataagtgtggctctgtagtatgtacgtgcggatacgatgctgtatgctactgaggcaagtcccataaataaa

SEQ ID NO: 39206 - DNA, 305 bp, Zea mays
acgtattggtcctgcagcaagtaggaaaaatacaggaggtgttgttcaagagagagtaccaaattctcaaggagctcagtctgagaatgatcctaacaataccactatatttgttggtgggcttgaccccaatgtcactgaagataccctaaaacaagttttttctccttacggtgaagtcgtccatgttaagatccctgttgggaagagatgtggttttgttcagttcgttaccagaccttctgctgaacaagcgctgctaatgctgcaaggggccttgattggtgcacagaatgttcgacttt

SEQ ID NO: 39207 - DNA, 294 bp, Zea mays
ctagtcctctgttacttctccctccgccgccactcccctcccattcaccgccaccgccaattccataccgtcctccgccacctctgctgagagcgagaagagatggcaggcaagggtgatgggccggcaatcggcatcgatctcggcacgacgtactcttgcgtcggcgtctggcagcacgaccgtgtcgagatcatcgccaacgaccagggtaaccgcaccacaccctcgtacgtcgccttcaccgactccgagcgcctcatcggagatgcggccaagaaccaggtcgccatg

SEQ ID NO: 39208 - DNA, 303 bp, Zea mays
ctccttttgctcggaacgcacacaccgcccgtccccgatcaccgatcccctcgtcgatccaaagatgcagatcttcgtcaagaccctcactggaaagactatcaccctcgaggtggagtcttctgacaccattgacaacgtcaaggccaagatccaggacaaggagggcatccccccggaccagcagcggctcatctttgctggcaagcagctcgaggacgggcgcacacttgccgactacaacatccagaaggagagcacctccaccttgttctccgcctcaggggaggcatgcagatcttc

SEQ ID NO: 39209 - DNA, 282 bp, Zea mays
agtcactctctgcctgttcgctacgccctacgcatctgtgctcgacgcctacccgcatgtgaaggcctggtggtctggtctgatggagaggccgtctgtccagaaggtcgctgccctgatgaagccatctgcttgaaacggttgccctgtcaatcggtgaatggaataagccaagtctgttctgggttgtttgcttgttcagtgatgtgtcttctatgacgaaagttgagtgcctatgtgtgagcatgcttgcttgtaacgagacattgaattgttcggaaa

SEQ ID NO: 39210 - DNA, 279 bp, Zea mays
cgactgtgcctcgtaccatttcgatccaatggcgccgacgtcgaagctgtcgacgggcatcaagcgcgcttcgcggtcgcacgcgtaccatcgccgtgggctgtgggccatcaaggccaagaacggcggcgccttccccaaggccgacaaggccgccgccgccgtggaacccaagttctaccctgccgacgacgtcaagccccgcgttcccagcacccgcaagcctaagcctaccaagctcaggtcgagcatcacgcctgggacggtgctgatcctcct

SEQ ID NO: 39211 - DNA, 277 bp, Zea mays
ttcgactcctttctggagcagctagggttccgtcctcgatccgatccgccgagtgcacaccacctttccccactccgatcgaatcgatggccgccgagggcgagaagaagatgataaccctcaaaagctccgatggcgaggagttcgaggtggaagaggcggtggcgatggagtcgcagaccatccgccacatgatcgaggatgactgcgccgacaacggcatccctcttcctaacgtcaactccaagatcctatccaaggtaatcgagtactgcaa

SEQ ID NO: 39212 - DNA, 282 bp, Zea mays
ggcctctgtcccttgcaagttcaatctcacctccaaccatgggtaaagagaagtcccacatcaacattgtggttattggccatgtcgactctggcaagtcgaccaccacaggacaccttatctacaagcttggaggcattgacaagcgtgtgatcgagaggtttgagaaggaggctgctgaaatgaacaagcggtccttcaagtacgcgtgggtgctcgacaagctcaaggctgagcgtgagagacgtatcaccattgatattgctctgtggaagtttgaga

SEQ ID NO: 39213 - DNA, 280 bp, Zea mays
atatcacagtgacagacacgatggtgagcgccagaattgttgtcctcctcgccactctcctatgcgctgccgccgcagtcgcgtcgtcctgggaggacgacaaccaccaccaccacgggggccacaagtccgggcaatgcgtgcggcggtgcgatgaccggccctggcaccagcgcccccggtgcctggagcagtgcagggagcacgagcgggagaagcggcaagagcggagcaggcacgatgccgacgaccgcagcggcgagggctcatcggaggatga

SEQ ID NO: 39214 - DNA, 277 bp, Zea mays
cccacaccgggcacaccccccgagctcagcttagctccactccagctccaatcacagtcgtgaccagagcgcgagagctagctagagggccgtgaaaatgccgatcaataggatcgccctggggagccaccaggaggtgtaccacccgggcgccctcaaggcggcgttcgctgagttcatctccaccctcatcttcgtcttcgccggccagggctccggcatggccttcagcaagctgaccggcggcggcccgacgaccccggcgggcctgatcgcg

SEQ ID NO: 39215 - DNA, 273 bp, Zea mays
ctcgctttggatcgattggtttcgtaactggtgagggactgagggtctcggagtggattgatttgggattctgttcgaagatttgcagaggggggcaatggcgaccgcggggaaggtgatcaagtgcaaagctgcggtggcatgggaggccggcaagccactgtcgatcgaggaggtggaggtagcgcctccgcaggccatggaggtgcgcgtcaagatcctcttcacctcgctctgccacaccgacgtctacttctgggaggccaaggggca

SEQ ID NO: 39216 - DNA, 273 bp, Zea mays
gaagtttggtgatcttatactgaaggcaactgaaccacagatggttctttataatatatatgatgattggttgaaaagtatatcatcatacacagcattctcccgcattgtgcttattctacgtgcacttcatgtgaataatgagaaggcaaagatgttgctcaaacctgacaaaacaattgttactgaaccacatcatatatggccatctctgaatgatgaacagtggttgaaggttgagtgtgcactaagggacctcatcctttctgatta

SEQ ID NO: 39217 - DNA, 303 bp, Zea mays
actccctctcgtcgccgtcctctcccgttcgcaacgccacgctccccaccgccgaaatggccccgaagcgaggtggcagggcaccggtgccggccaagaagaagacggataaagtgacgaaccctctgttcgagaaaaggccgaagcagttcggcatcggcggcgcgttgcctcccaagaaggacctgcaccgattcgtcaagtggcccaaggtcgtgcgcatccagcgccagcgtcgcatcctcaagcagcgcctcaaggtgcctccggcgctcaaccagttcacccgcaccctcgacaaga

SEQ ID NO: 39218 - DNA, 304 bp, Zea mays
attccaactcacacagatctcgtacccggcagtggcgacgaatctcgcggggcggaggtggtggcgcgactgaagcggtgtcgactccgacgaactcgcagccaccgggggatacgcagcagcagcaccggcgtactccatcgacgttcatatttaaggacttggtttggataattctactcgtcaacaaaagtgattaaaaatggtggttcttgcagcttcaatcgtttcaaagtcgggaaaagcacttgtttcaagacagtttgttgacatgtctcgcataagaattgaaggattacttgct

SEQ ID NO: 39219 - DNA, 304 bp, Zea mays
ctcgcactcgcacgtacaccacactagttaccacagacgacgggcgccatgaaagtcccggtgcttctcctcctggtctccctgtgcttctcgctcgcgctcgcgtggcaaacggacacggaatcgggctcaggcaggccgtaccactacggcgaggagagtttccggcactggacgcgctcccggcagggccggttcagggtgctggaacggttcacccacgagctgctggaggacgccgtcggcaactaccgcgtcgccgagctggaagccgcgccgcgcacgttcctgcagcccagccact

SEQ ID NO: 39220 - DNA, 304 bp, Zea mays
acgccagaagaggtttgatgaatgcccgttatctcccttgtcactgaaaggtgttaaggctgctgggtatgaacagatgactgctgttcaggaggctactcttcctattatacttcaagggaaggatgtactagccaaagcaaagacaggaactggaaaaactgtagctttcttgctaccagcaattgaagttatttcgaaattgccacctgttgatcgtgatctaaagaaacctcccatcagtgttgtagtagtgtgccctacacgtgagcttgctgatcaggctgctgcagaagctaacaag

SEQ ID NO: 39221 - DNA, 299 bp, Zea mays
caggtcggacggacccttgccggagacgagcacacgccacagcaggaattatcgggcgtagagcagcgcgaacgagagatccaatggcggcggcggaggggcagtgggtgctcatggcaacggggcggacgccgaccaacattgcggtgatcaagtactgggggaagcgggacgaggcgctcatcctccccatcaacgacagcatcagcgtaacgctcgaccccgaccatctctccgccaccaccactgtcgccgtcagcccctcattcccttccgaccgcatgtagctcaatggcaag

SEQ ID NO: 39222 - DNA, 297 bp, Zea mays
agctcgccggcccaaaatcgcctcatcgaccacgcccccttccaggctcccgtctccatgggtctcctctcaaacaggattgggagggagagcctcaaggcgggggatcatatctactcctggagggcggcgtgggtctacgcgcatcacggaatatatgtgggcgatgataaggtgatccatttcacaagaggaagaggacaggaggtcggaacaggaactgtcgtcgatattattcttgtgagttccaccccaaaacgaagcaacacgccttgcccggtgtgcaccgacgaaacc

SEQ ID NO: 39223 - DNA, 295 bp, Zea mays
acagaagcggcggcggcggacaaacgcaggcgaaggcgagggtgtgagggaaggagcaccagccatggtgcacgtcaacttctaccgcaactatggtaagacgttcaagaaaccaaggcgtccttatgagaaggagcgtcttgatgctgaactgaagctggtcggtgagtatgggctgaggtgcaagcgtgagctttggagggtccagtatgcactgagcaggatccgtaatgctgcaaggcacttgctcacccttgacgagaagaaccccgtcgtatctttgagggtgaggcgc

SEQ ID NO: 39224 - DNA, 296 bp, Zea mays
ccgcgggccgccagaggcaatttcgccctcgattcgaccccgattcgtccgcccgcgaccgggattccctccgccaagcgcggatctgaacgctgcgctccgtgtcgccgctcgaatccgccatgaagggggccaaatccaagggcgccgccaaggccgatgccaagctggcggtgaagagcaagggggcggagaagcccgccaagggcaggaaagggaaggccggcaaggaccccaacaagcctaagagggctcccagcgctttcttcgtgttcatggaggaatttcgcaaggag

SEQ ID NO: 39225 - DNA, 297 bp, Zea mays
ggcgagggagtggtgacgacgatcgagaacggcgagaggcggtcatacaccatcaagcaaggccacgtcttcgtggcgccggccggggcggtcacctacctggccaacaccgacggccggaagaaactggtcatcgccaagatcctccataccatctccgtgcctggcgagttccagttcttcttcggccccggcgggaggaacccggaatcgttcctgtcgagcttcagcaagagcatccagagagctgcatacaagacctcgagcgaccgtctggagaggctgttcgggaggcat

SEQ ID NO: 39226 - DNA, 291 bp, Zea mays
agactggtacaagggcccaaccctacttgaggctctggacttgatcaatgagccaaagaggccttcagacaagcccctgcgtctcccccttcaggatgtgtacaagattggtggtattggaactgtccctgttggacgtgttgagactggtgtcattaagcctggtatggttgttacttttgggcctactggtcttactactgaggttaagtccgttgagatgcaccatgaggctctccaggaggcccttcccggtgacaatgttggcttcaacgtgaagaatgttgctgt

SEQ ID NO: 39227 - DNA, 291 bp, Zea mays
acgccgtgctaccactgttgctgctagattggatgctcagcagaaaaagctcaaccttcctgtccttcccacaaccacaattggttcattccctcagactgtggaactcaggagggtccgtcgtgagtacaaggcaaagaagatctccgaggaggaatacatcagtgccatcaaggaagaaatcagcaaggttgtcaagatccaagaggagcttgacattgatgtgcttgtgcatggagagccagaaagaaatgacatggttgagtacttcggtgagcaattatctggttt

SEQ ID NO: 39228 - DNA, 290 bp, Zea mays
cgaagcatcgtccccgtcccagcctccccggactccaggggcaaaagctgcagcgtcgagatggtgaaggggcgcacggggcagcgcgtgaggctctacgtccggggcaccgtccttggatacaagcggtccaagtcgaaccagtacgagactacgtcgctggtgcagatcgagggggtgaacaccaaggaggacgtcgcgtggtactgcgggaagcggatggcctacatctacaaggccaagaccaagagcagcggcacccactaccgctgcatctggggcaaggtcgc

SEQ ID NO: 39229 - DNA, 291 bp, Zea mays
ccttgacagattcatggacacatcattgccttcaagaaacatggacatgaggtcacagaggcttgacttcgatgatgtctctgagtgcgaaattccttgggaagatcttgtgattggtgaaaggattggcttaggttcatatggagaggtttaccgtgctgactggaatggaaccgaagtagctgtaaaaaaattcttggatcaagatttttatggcgatgctctggatgagtttaggagtgaagttcgaattatgcgtcggctgcgccatccaaatattgttctctttat

SEQ ID NO: 39230 - DNA, 287 bp, Zea mays
cgtgtactcggccaacacgcaccagtcggaatggttccgcgtcgtcatgctcctcagccccgtcgtctccacgtctggacgcttcgaggagttcttccccatcggaggcgagagccccgagtccttcctcagcgtcttcagcgacgacgttatccaggcgtcgttcaacactcgccgggaggagtgggagaaagtgttcgagaagcagagcaagggggagatcacgacggcgtccgaggaacagatccgggagctgagcaggtcctgctcacgtggtggccgcggca

SEQ ID NO: 39231 - DNA, 286 bp, Zea mays
ccttttgctcggaacgcacacaccgcccgtccccgatctccgatcccctcgtcgatccaaagatgcagatcttcgtcaagaccctcactggaaagactatcaccctcgaggtggagtcttctgacaccattgacaacgtcaaggccaagatccaggacaaggagggcatccccccggaccagcagcggctcatctttgctggcaagcagctcgaggacgggcgcacacttgccgactacaacatccagaaggagagcaccctccaccttgttctccgcctcagggg

SEQ ID NO: 39232 - DNA, 280 bp, Zea mays
ggcggcggctgccggtggcggtggtgggaggcggccccgccggtggcgccgcggcggaggcgctggccaagggcggcgtggagacggtgctgatcgagcggaagatggacaactgcaagccctgcggcggcgctatcccgctgtgcatggtgtcggagttcgacctgccgctcgacctcgtggaccgcaaggtgaggaagatgaagatgatttcgccgtccaacgtcgccgtcgacatcggccgcacgctcgcgccccacgagtacatcgggatggtcag

SEQ ID NO: 39233 - DNA, 285 bp, Zea mays
acagtcttcaccatttctgaacaagcctttattgccttatgaggaatggtgcattgagttttcagagatcactgttggcattcgtgtgggagtagggttttttggggaagtcttccgtggcctttggaacggaacagatgtagctataaaagtatttctggagcaggatttgacaacagagaatatgaaagatttctgcaacgagatatcaatacttagccgacttcgacaccccaatgtcatactctttcttggtgcatgtatgaagcctcctcacttatccct

SEQ ID NO: 39234 - DNA, 176 bp, Zea mays
ggatagcttacctcccatcgacggtcggtgagccgttggtgagtggcgagacagcgggtgcgctgggcaagaacaggcgacgaagaagatgagcacgctggacacgcggacgctcaaggacgagctgacgagcatggacaggaagtgcctcgtggacctcggccacccgctgctca

SEQ ID NO: 39235 - DNA, 295 bp, Zea mays
gcgagcgcgacgcgacaagggcaggaggagcgaagaagaagaagaagaatcgtctgaggagcaggaggaggccgggcaggggtaccacaccatccgggcgcggctgtcaccgggcacggcgttcgtggtgcccgcgggccacccgttcgtcgcggtggcgtcccgggacagcaacctccagatcgtgtgcttcgaggtccacgccgacaggaacgagaaggtgttcctggccggcgccgacaacgtgctgcagaagctcgaccgggtcgccaaggcgctgtcattcgcctccaag

SEQ ID NO: 39236 - DNA, 292 bp, Zea mays
cgctgaaggtgcagaaaatggccttgatttcacaatcgtgagacctttcaattggattggaccaaggatggacttcattcctggtgttgatggtcctagtgaaggtgtgcctcgggttttggcttgcttcagtaacaatctgctccggagagagcccttgaagcttgttgatgggggtcagtctcagagaacctttgtctacatcaaggatgccatcgaagctgtagtgctgatgattgaaaatcctgctcgagccaatggccacatcttcaatgttgggaatccgaacaat

SEQ ID NO: 39237 - DNA, 290 bp, Zea mays
cttgcgatcgccactacgtcagcgcggaggatgcacggccaccagcagcagccgtacccatacgggctgcggcaagacccgctgcggcggatgcgaggtctggacgtgaaatcggcgctccaggccagcccgcgcacatccacggtggccacggccgcactcgtcgtcccgctgggtgccgcgctgctgtgcgcgtcggggatcgcgctggctgcgaccgtgaccggtctcgcgctcgccacgcatcccctcgtgattttcagcccggtgctcatacccttcgcgctggc

SEQ ID NO: 39238 - DNA, 292 bp, Zea mays
gttcgccctcgtcaacaaggccactgggctcgccatcaagcactccctcggccagtcccacccggtgaagctggtgccgttcaacccggagtaccaggacgagtcggtgctgtggacggagagcggcgacgtgggcaagggcttccgctgcatccgcatggtgaacaacatccgcctcaacttcgacgccttccacggcgacaagggccacggcggcgtgcacgacggcaccaccgtggtgctgtgggagtaggccaagggagacaaccagagctggaagatcctgccctgg

SEQ ID NO: 39239 - DNA, 285 bp, Zea mays
atagccaccgcagagactgagatggggggttttgtcaagacccacaagaccaatgcgtacttcaagcgtttccaggtgaagttcaagagaaggcgcgctggcaagacagactacagggccaggataaggctgattaaccaagacaaaaacaagtacaatacacccaaatacagatttgttgtgcgatttaccaacaaggacatcacagcacaaatcatctctgctagtatagcaggtgatatggttcttgcttctgcttactcgcatgagttgccacgatatggt

SEQ ID NO: 39240 - DNA, 285 bp, Zea mays
cctagctctgggtcattcagctccaaggtgaccagcgcaagaatgttgctactttcctagttcaggtattcagaatcttcagacctggccagctgaatactgttttaccataccgataaatgttccatctgttaatactgattgtgtaattattacttgtcttggtaggctgggattgcgaagaaagagaacatcaagattcacgggttctaagggacctgtaaatgcttgtgccctatattgtgtgcctcaacatattggggagcttgaagcatcgacagttgc

SEQ ID NO: 39241 - DNA, 166 bp, Zea mays
gaaaacctccaaggctccaaccctagccgcgatccgacaacgcctccatccctagccgactgctgcaagcttcagagctcaagagtcagggcgccatggcgacagagacggagaccttcgcctttcaggctgagatcaaccagctgctctcactcatcatcaacac

SEQ ID NO: 39242 - DNA, 288 bp, Zea mays
cgaggagaccctgtaccagaagaccaaggatggcaagccttttgttgatgtcctcaaggagggaggcgtcctccctggcatcaaggttgacaagggcaccattgaggttgttggcactgataaggagaccaccacccaaggccatgacgaccttggcaagcgttgcgccaagtactacgaggcaggtgcccgctttgccaagtggcgcgctgttctcaagattggccctaatgagccatcacagcttgccatcgacctgaacgctcagggtctggctcgctatgccat

SEQ ID NO: 39243 - DNA, 283 bp, Zea mays
gcctccatagctcttcatggtggagctcatgtcccctattaccttgatgaaaaaacagggtggggtttggagatctctgatcttaagaaacaactcgaagatgctcggtcaaaaggcattgatgttagggccttggtggttatcaatccaggaaatccgactgggcaggttcttgctgaagacaaccaatatgatatagtgaaattctgtaaaaatgagggccttgttcttctagctgatgaggtatatcaagagaacatctatgttgacaacaagaaattta

SEQ ID NO: 39244 - DNA, 223 bp, Zea mays
ggctaggccaagatcttcggtgtgcaaataacctgtctcccatgagacggtggacgatatgtgtaggcctgtgagcagttagtacaccggcgccagtgtgttctggaggatttttcatgtcagagcctttctcttgtgtgcttgctgtagatgccaaggggagcttattggctgttgaagcctgatgcaaaataaagtacgaaactatgttttttgtttaact

SEQ ID NO: 39245 - DNA, 258 bp, Zea mays
gacaacactcaccgatagcaagtagcgccgccgacgtttcgagagcagagtatccaagctagccaagcgcgcacctcggtgacctagctagctacctagctagttcaggcgacgatatggcgtctggtcaggagagcaggaaggagctggaccgcacagctcgcgagggcgagaccgtcgtccccggcgggaccggcggcaagagcgtcgaggcccaggagcacctcgccgaatggcgcagctgcggaggccagactc

SEQ ID NO: 39246 - DNA, 308 bp, Zea mays
gttcggcttcgggcaccacggccaccacggccagaacccgccggcgcacggcgcgtgcaccagcccaccttcaagatcttctgcaaggccgacgaggggtactgcctcaccgtccgcgacggcaacgtggtgctggcccccgccaacccgcgcgacgagcaccagcactggtacaaggacatgcgcttcagcacccaggtcaaggacgaggagggcaaccctgcgttcgccctcgtcaacaaggccactgggctcgccatcaagcactccctcggccagtaccacccggtgaagctggtgccgttcaa

SEQ ID NO: 39247 - DNA, 305 bp, Zea mays
cacgtggtggatgacatggtctcaagcaatgccattctctatgggcccggcgagcatcccgatcatgttgttgtcatcaagtacgtgccgtacgtgggagacagtaagagggctatggacgagtacacatcagagatcttcatgggcggcaagagcaccatcgtgctgcacaacacctgcgaggactcgctcctcgccgcgcctatcatccttgatctggtgctcctggctgagctcagcaccaggatccagctaaaacctgagggaacggacaagttccactccttccacccggtggccaccat

SEQ ID NO: 39248 - DNA, 302 bp, Zea mays
tgccgcccttttttttttttttttattccgaagacccattttattccggaaacagattgccaggctttctccgggtcctctgatagaagctcacataggttcacagttcagacttgacttacaaacagtcgcacaaaacatacagcactctgttctaactcgggacacgaaatcctctctttctctctccctctccctctccgctcactgcctcaatctaggaagactgccggagctccgggcgcacaaagtcggcgttggcaggcacagagatgtcgacggtgggcctcagctcggcgcag

SEQ ID NO: 39249 - DNA, 279 bp, Zea mays
  unsure (1)..(279): unsure at all n locations
gcggtggcaaaccctctagcttcccactccgctcggccaccagctttgaccgcctcccctccccaccgctcctgccccttcatancccanacccccgcaggagcggagcggcggcggcggcggcaaagccaaaggcaagatgttcgggcgcgcgccgaagaagagcgacaacaccaagtactacgagatcctcggggtgcacaagtcggcgtcccaggacgacctcaagaaggcctaccgcacagcagctatcaagaaccaccccgacaagggcggtga

SEQ ID NO: 39250 - DNA, 302 bp, Zea mays
ctggccaggtctctcccatatcgggttctcccttcctcttcctgtttccgcgcgcgagatcgccgccccgggtgggctctagatcccgatggcctcgcgccgccgcaccctgctcaaggtcatcatcctcggcgacacggggttgggaagacgtctttgatgaaccaatatgtgaacaagaagttcagcaaccagtacaaggctacgattggggcggatttcctcaccaaggaggtgcagttcgaggacaggctcttcactctgcaaatatgggacactgctggtcaggaaaggtttcagag

SEQ ID NO: 39251 - DNA, 303 bp, Zea mays
cgattccatttctacaccgagacctccagccgtccgcccctgaaccctcagccttctccgtcccgcctcggcactcgacggccgccggcacacaccgcgcagtctcgagacaggaaccggaggaacgaggatggaggatgactcgccgctgacgaagacgatgaagggtgcggtgacaggactcgccgcggggaccatctggggcaccgtcgtcgccacctggtacgacgtgccccgtgtggagcgccacgtcgcgctccctggccttatccggacgctcaagatgtgcggcacctacggggc

SEQ ID NO: 39252 - DNA, 304 bp, Zea mays
caccaccacacgttcacggtagcgagagttatcgtcgtcggcggcgaagatggtgtcgctgaagctgcagaagcggctcgccgcgagcgtcctcaagtgtgggaaaggcaaagtctggcttgaccccaatgaagtcagcgagatctccatggctaactcccgccagaacatccggaagttggttaaggatgggtttatcatcaggaagcctcagaaggttcactctaggtcccgtgcaagaagggcacatgaggccaagcagaagggaaggcactctggatatggcaagcgcaggggtaccagg

SEQ ID NO: 39253 - DNA, 293 bp, Zea mays
cacgagcatatcacagtgacagacacgatggtgagcgccagaattgttgtcctcctcgccaccctcctatgcgctgccgccgcagtcgcgtcgtcctgggaggacgacaaccaccaccaccacgggggccacaagtccgggcaatgcgtgcggcggtgcgaggaccggccctggcaccagcgcccccggtgcctggagcagtgcagggaggaggagcgggagaagcggcaagagcggagcaggcacgatgccgacgaccgcagcggcgagggctcgtcggaagatgagcgaga

SEQ ID NO: 39254 - DNA, 298 bp, Zea mays
atgatgacgggtttaccgaggagcaaaatgaattaatcgagtcatctgcagagatgctgtacggtttaattcatgcacgatacattttaaccagcaagggtctagctgcaatgttggagaagttcaagaactacgactttggtagaagccccagggtgtacagctgtggccagccctgccttccagcagggcaatcagatgttcctagatcgagcactgtgaagatatattgtccgaaatgcgaagaacttaactatccaagatccaagtaccaaggcagtatccttttgatataatc

SEQ ID NO: 39255 - DNA, 297 bp, Zea mays
agaggatgtgcctccgagatatctgtaatcgcattttgtacaacaaaaggttcaatgtatttcacttcccagtattagaagatgaggtgcctgactatcgatcaataatccacaagcctatggatatggctactgtcttgcagcgggtggactctggacagtaccttaccagggcagcatttataaaggatattgatcttattgtctcaaacgcaaagacttacaacggggatgactacaatggatctaggattgtcagtagagcatgtgaactcagagatgtggtccaaggcatgt

SEQ ID NO: 39256 - DNA, 299 bp, Zea mays
agagggagagattagagggagcgccctgcccaagcaaagagaaaccgcggcggagaagagggaggaagggcagacgggcgagcaggatgagagagatcatcagcatccacatcggccaggccgggatccaggtcggcaacgcctgctgggagctctactgcctcgagcacggcatcgagcccgatggcaccatgcccagtgatacctcggttggcgtcgcacatgatgccttcaacacgttcttcagcgagaccggttctggcaagcatgtgccgagggccatcttcgtcgaccttgaa

SEQ ID NO: 39257 - DNA, 298 bp, Zea mays
gcaggccgtaccactacggcgaggagagtttccggcactggacgcgctcccggcaggccggttcagggtgctggaacggttcacccacgagctgctggaggacgccgtcggcaactaccgcgtcgccgagctggaagccgcgccgcgcacgttcctgcagcccagccactacgacgccgacgaggtgatgttcgtgaaggaaggcgagggcgtcatcgtgctgctccgcggcgggaagagggagtcgttctgcgtcagggagggcgacgtcatggtcatccccgcgggcgccgacgtg

SEQ ID NO: 39258 - DNA, 296 bp, Zea mays
ggatttctgaactgaggcatcctaacatacttggtcttgttggatactgtgcggagtttgagcagcgattacttgtctatgagtactgtagcaagatgaccctacatgatgaacttcgtcatgtggatgactcaagcaagccattatcgtggaatgctcgcctccaagttgcttcagaggcagcaaaagcattgcaacatcttcatgacggttgccaaccaccagttgtacaccagaattttgaaccctctgttgttctgctcaacagcaccttagttgtgcatatttctgaatgt

SEQ ID NO: 39259 - DNA, 288 bp, Zea mays
  unsure (1)..(288): unsure at all n locations
gcgccatgaaagtcccggtgcttctcctcctggtctccctgtgcttctcgctcgcgctcgcgtggcaaacggacacggaatcgggctcaggcaggccgtaccactacggcgaggagagtttccggcactggacgcgctcccggcagggccggttcagggtgctggaacggttcacccacgagctgctggaggacgccgtcggcaactaccgcgtcgccgagctggaagccgcgccgcgcacgttcctgcagcccagccactacgacgccgacgangtgatgttcgtga

SEQ ID NO: 39260 - DNA, 289 bp, Zea mays
ctcgagcgcaccgatagcaagtagcgccgccgacgtttcgagagcagagtatccaagctagccaagcgcgcacctcggtgacctagctagctacctagctagttcaggcgacgatatggcgtctggtcaggagagcaggaaggagctggaccgcaaggctcgcgagggcgagaccgtcgtccccggcgggaccggcggcaagagcgtcgaggcccaggagcacctcgccgaaggcgcagcgcggaggccagactcgcagggaccagctggggcagcaggggtacagcga

SEQ ID NO: 39261 - DNA, 300 bp, Zea mays
caaaacctcccagataacgcccgcgcgctccccgatggcgtcgtcgtgccagaacgtggagattcccggcaagccgacggagacggggacggcgctgctggagacggcgacgggcaccatccaggggttcgcgccgctgagccagatccaccagcacctgtgcgcgttccacttctacgcggacgacatggggcggcaggtggaggcgcaccacttctgcgcgcacctgaacgaggacgtgcggcagtgcctcatcttcgacgggcccggcgccggcgcgcgcctcatcggcgtggagta

SEQ ID NO: 39262 - DNA, 296 bp, Zea mays
gacgcgcagagacagacattgcgactttgcgagagacaaaacctcccagataacgcccgcgcgctccccgatggcgtcgtcgtgccagaacgtggagattcccggcaagccgacggagacggggacggcgctgctggagacggcgacgggcaccatccaggggttcgcgccgctgagccagatccaccagcacctgtgcgcgttccacttctacgcggacgacatggggcggcaggtggaggcgcaccacttctgcgcgcacctgaacgaggacgtgcggcagtgcctcatcttcg

SEQ ID NO: 39263 - DNA, 291 bp, Zea mays
cggctagcagcacagcagcagccagagccatcccctctcctcgctacgcttcgcttcctcggcgccgattcctcctcctcctcctccaccctcgtccgtcccgttccggcgcgcgagctcgcccgagatggcgaacgcgagatcgggtgtcgctgtgaacgatgagtgcatgctgaagtttggcgagctgcagtcgaagaggctgcaccgcttcataactttcaagatggacgacaagttcaaggagatagttgtggaccaggtcggggatcgcgctaccagctacgatga

SEQ ID NO: 39264 - DNA, 295 bp, Zea mays
gcgcacacacacacaaccagatctcccccaaatccacccgtcggcacctccgcttcaagatgcagatctttgtgaaaaccctgactggcaagactatcaccctcgaggtggagtcgtctgacaccattgacaacgttaaggccaagatccaggacaaggagggcatccccccagaccagcagcggctcatctttgctggcaaacagcttgaggacgggcgcacgcttgctgactacaacatccagaaggagagcaccctccaccttgtgctccgtctcaggggaggcatgcagat

SEQ ID NO: 39265 - DNA, 291 bp, Zea mays
gaacagtagtagtccctgtgtacgtctagcaacgatccgcaccgagctcgccagttttgctcgttagtttggggacggcgatggcgtccggtcaggaaagcagggaggagctggcgcgcatggccgaggaggggcagaccgtcgtccccggcggcaccggcggcaagaccctcgaggcgcaggagcacctcgccgaaggtttgtatcctacggccggccggccttgtgatcctcttatcttcctttcacttgtgtgtgctataaacccactactaatgcgcgtaagtagcc

SEQ ID NO: 39266 - DNA, 289 bp, Zea mays
gagaagatgaagaaatatgcttctgttatccgtgtcattgctcatacccagattaggaagatgaagggtttgaagcagaagaaggctcacctgatggagattcaggtcaatggtggtaccattgctgacaaggtggactatggctacaaattctttgagaaagaggtccctgttgatgctgtcttccagaaggatgagatgattgacatcattggtgtgaccaaggggaaaggttatgagggagtggtcactcgatggggtgtcaccggcttccccgcaagacccacag

SEQ ID NO: 39267 - DNA, 287 bp, Zea mays
ttcgcttctattgctgggacactgctgggcaagaaaagttcggtggcctcagggatggctactacattcatggtcagtgtgccatcattatgtttgatgtcacttcgaggctgacatacaagaatgttccaacatggcacagggacctgtgcagggtgtgtgagaacatccccatcgttctctgcggaaacaaggttgatgtaaagaacaggcaggtcaaagccaagcaagttacattccacaggaagaagaacttgcagtactatgagatttctagccagagcaat

SEQ ID NO: 39268 - DNA, 291 bp, Zea mays
ttggcttctcctcccccaccggttcgtgttcaggttctggttcgtgggcgagagggaagagatggcggcgtcggacgttgagtaccgttgcttcgttggcggcctcgcctgggccaccgacgaccactccctcaacaacgccttcagcacctacggcgaggtcctcgagtcgaagatcatcctggatcgggagacgcagaggtcccgcggcttcggcttcgtcaccttctccacggaggacgcgatgcgcacgctcatcgagggcatgaacggcaaggagctcgacggccg

SEQ ID NO: 39269 - DNA, 296 bp, Zea mays
ccctccgctacagctcctccccaccccactcccccgcaggagcggcggcggcggcggcgaggacgtaccccacatcggcgagcggcggcggcaccgccggaggcaacaggcaagatgttcgggcgcgcgccgaagaagagcgacaacaccaagtactacgagatcctcggggtgcccaagtcggcgtcccaggacgatctcaagaaggcctaccgcaaggctgctatcaagaaccaccccgacaagggcggtgacaccgagaagttcaaggagctcgcacaagcctaagaggtttt

SEQ ID NO: 39270 - DNA, 285 bp, Zea mays
cccaccgctacagctcctccccaccccacacccccgcaggagcggcggcggcggcggcgaggtcgtaccccacatcggcgagcggcggcggcaccgcggaggaaaggcaagatgttcgggcgcgcgccgaagaagagcgacaacaccaagtactacgagatcctcggggtgcccaagtcggcgtcccaggacgatctcaagaaggcctaccgcaaggctgctatcaagaaccaccccgacaagggcggtgaccccgagaagttcaaggagctcgcacaagcctat

SEQ ID NO: 39271 - DNA, 283 bp, Zea mays
ctccggcagcgatcttgtgttgctgctgatatccgatgctgcacaggctgacaactatgagaagatcttctctcacatgaaaccaaacagtatccttggtttatctcatggatttcttctgggacatttgcaatcactcggactcgatttcccaaagaacatcagtgtgattgctgtatgccccaagggaatgggtccatccgtccgcaggctttatgttcagggcaaggaagtcaatggcgctggcatcaactctagctttgctgtgcaccaggatgttgat

SEQ ID NO: 39272 - DNA, 294 bp, Zea mays
cgccgtttcgtcgcacccaccaacacgagagatgagctccggcggcgcggacaagcccggcagtggcggcggcgcggtgaagacgccgtcggacttcctcaagtccatcaggggccgccccgtagtcgtaaagctcaacaccggcgtcgactacagaggtatattggcttgtctggatggttatatgaacatcgcaatggagcagaccgaggagtacgtgaattgccagttgaagaacaagtatggcgatgccttcataaggggcaacaacgttcagtacatcagcacgacgaa

SEQ ID NO: 39273 - DNA, 254 bp, Zea mays
gcataggaatacagatcctgcaacagtttgctggcatcaacggcgttctctactacactcctcaaattcttgagcaagcaggcgtcggtgttcttctgtcgaacctcggccttaacgcatcttcggcatcaatcctcattagcgccctgacgaccttactgatgctcccaagcatcggcattgcgatgaggctcatggatatgtccggaaggaggtttctcctcctcgcgacgatcccagtcctaatagtcgcg

SEQ ID NO: 39274 - DNA, 281 bp, Zea mays
gtttcagcttgtattcccactctgtcgcacagcgtcgcccgtcgccgctgagatcctaggaagaaatggagctctctcgcaagctcttcacggccgtcctcctcgtcatgctgctgctgctgtccgcagaggtcgggccggtggcggtggcggaggcgcggacgtgccagtcgcagagccacaggttccggggcccctgcctccgccggtccaactgcgccaacgtctgcaggaccgaggggttccccggcggcaggtgccgcggcttccgccgccgctgc

SEQ ID NO: 39275 - DNA, 301 bp, Zea mays
agtctctcacacactcactatacactgctctgctgcagcaagaaggaagaagctagcgcctccctagctctcgttgtcagcaatggccaccaccgccgcgtccagcctcctcaagtcctccttcgcgggctcccggctcccttcggccacgcgcaccaccaccccgtcgtccgtggccgtggccaccccgcgcgccggcgggagccccatccgcgcgtccatctcctcctcccccaccccgccctacgacctgacgtccttccggttcagccccatcaaggagtcgatcgtgtcgcgcgag

SEQ ID NO: 39276 - DNA, 285 bp, Zea mays
gcggctctggcgaggctcaagacgtacgaaggcgtcccgccgccgtacgacaagaccaagcgtatggtcatccctgacgctcttaaggttctgaggctacagcctggacacaagtacagcctcctcggcgagctctctaaggaggtcgggtggaactaccatgacaccatcagggaacttgaggagaagaggaaggagaaggccaaggttgcctacgagaggaagaagcaattggccaagctgcgtgtcaaggccgagaaggcagccgaggagaagttggggtct

SEQ ID NO: 39277 - DNA, 191 bp, Zea mays
gagaaccggagatcgacatgagccaggcgcagccgaggaggcggcagggcgaagagggcatgcacgcgcaggacaagcccgtcaagttcggcgacgtgctcgacgtctcaggcgagctggccgaccagcccgtggctcccagggacgccgcgcggctgcaggctccgcagcattccgtgctcggcgggacg

SEQ ID NO: 39278 - DNA, 307 bp, Zea mays
gaaccggttcgtgtgcgaggtgtgcaacaaggggttccagcgggagcagaacctgcagctgcaccggcgcgggcacaacctgccgtggaagctgaagcagaaggacccgtcgcaggcgcagcggcggcgcgtgtacctgtgcccggagccgacgtgcgcgcaccacgacccctcccgcgcgctcggcgaccatgaggggatcaagaagcacttctgccgcaagcacggcgagaagaagtggaagtgcgacaagtgctccaagcgctacgccgtgcagtcggactggaaggcgcactccaaggtctgc

SEQ ID NO: 39279 - DNA, 210 bp, Zea mays
ctccccgtcaaggccttttgagagtccgtgagtttactttagcggaaattgagcactttgtggacccagaggacaaatcccatccaaagtttggtgatgtttctgatctagagttctggatgtatccgagagaggatcaaatggcaggaaggtcagccacaagacttaaactcggaaattctatatctgagggaactgtgaacaatgaga

SEQ ID NO: 39280 - DNA, 245 bp, Zea mays
ctaacacacccgagcatatcacagtgacagacacgatggtgagcgccagaattgttgtcctcctcgccaccctcctatgcgctgccgccgcagtcgcgtcgtcctgggaggacgacaaccaccaccaccacgggggccacaagtccgggcaatgcgtgcggcggtgcgaggaccggccctggcaccagcgcccccggtgcctggagcagtgcagggatgaggagcgggagaagctgcaagagcgg

SEQ ID NO: 39281 - DNA, 293 bp, Zea mays
caggtgttttggatttgtcaattttgaaaatgcagatgctgctgctcaggctgttcaagagttgaatggcaagatattcaatgataaggaactgtatgttggaagagcacagaagaagtctgaaagagagatggagttgaaggagaaatttgaaaagaatgttcaagaggtagctgagaagttccaaaacacaaacttgtatttgaagaacttagaggagaacattgatgatgagaaattgcgtgaactctttgctgagtatggcaatattacttcctgcaaggttatgcggg

SEQ ID NO: 39282 - DNA, 236 bp, Zea mays
gcgcggcggcccctccttccttcctcccacttctctcgcgcggcgctcgcttacatcgcctcgcattccgttcgagcaggggagcggcagtgagaagggagggaattaaggcaagatgttcatcgagagcttccgcgtcgagagcccccacgtgcggtacggcccgacggagatcgagtcggagtaccggtacgacacgacggagctggtgcacgaagccaaggacggcgcctccc

SEQ ID NO: 39283 - DNA, 299 bp, Zea mays
gagaaatatggtgttgggtcttgtggtccacgtggcttttatggaacaattgatgtccatcttgactgtgagtcagaaatagctaaattcctggggactccagactccattctgtattcatatgggatttctacaatattcagtgtgatacctgccttttgtaagaaaggagatatcatagtcgctgatgagggtgttcactgggcagtgcaaaatggtctccatttatcaagaagcactgtggtgtacttcaagcacaatgatatggcttcacttgcaagcactttggaaaaacttac

SEQ ID NO: 39284 - DNA, 295 bp, Zea mays
ggcaacttcaagggcgtgaccaagcacctggacaagaatcccaacccggtgtggcgccagaccttcgccttctcccgggagcacctgcagtccaacctgctggaggtggccatcaaggacaaggacatgatcaaggacgacttcgtcggccgcgtcctcttcgacatgaccgacatcccgcagcgcgtgccccccgacagcccgctcgcgccgcagtggtaccgcctcgccgaccgctccggcgagaagctgcggcacggcgagatcatgctggcggtgtggatcggcacgcaag

SEQ ID NO: 39285 - DNA, 282 bp, Zea mays
agtcagtcttaatgcgacaacagatgaggttaggaactggataatgcccataaacagaaagtacaatcttaacttgcttcttggcactttaagggaggaacttaacctcagacaaaaacaaatagtgctatttgaatatgtcatgctttctggagtgaacgacagtatggatgatgccaagaggcctatagagctagtccaagggatcccatgcaagataaacctcatctctttcaatccccacggcggttcccaattcaagcccacaccagacgataagat

SEQ ID NO: 39286 - DNA, 290 bp, Zea mays
tgcaagggagtgcagtatctcaatgaaatcaaggattctgttgtggctggtttccagtgggcatcaaaggagggtgcactggatgaggagaacatgcgtggaatttgctttgaggtctgtgatgtcgttcttcatgctgatgctatccacaggggtggtggtcaggtcattcccactgccaggagggtcatctatgcctctcagctcacggccaagccaaggctgctggagccagtctacctggtggagatccaggccccagaaaatgcacttggtggtatctacggtgt

SEQ ID NO: 39287 - DNA, 203 bp, Zea mays
gtttgccgaccccaaaggctttggtatcggccccgatggtaagtacaggtgcgaggatcccaagttcacccaaggcaccgcccaagtttaaggaggttaatctgcgctctgtaccactgtacttgggttctctagttttgtcgatccagtgtcatgttaaggatactgtatgcataaggtggtccatttttttggacaagtta

SEQ ID NO: 39288 - DNA, 291 bp, Zea mays
gccgaagaggccttcagacaagcccctgcgtctccccctacaggatgtgtacaagattggtggtattggaactgttcctgttgggcgtgttgagactggtatcatcaagcctggtatggttgttacctttggtcctagtggccttactactgaggtgaagtctgttgaaatgcaccatgaggctctccaggaggcccttcctggtgacaatgttggcttcaatgttaagaatgttgctgtgaaggatctgaagcgtgggtatgtggcctccaactccaaggatgaccctgc

SEQ ID NO: 39289 - DNA, 294 bp, Zea mays
agcgacgcgcggccggtcgacgacaaggacaccgacgccatgccgtacctccaggccttcgagaaggagcagctccggaagcacccgcccacgtacatctcgctcacccacgccgctgtgcagccgggatgcaagctcgccggctacgacgtgcccgtggacgcgaaccaggacatcttcctcccgaccatctccgaggacccaaagctgtgggaccggccgacggagttcgacccggacaggttcgtgtccggcggcgagacggcggacatgacggggtcggcggggatccgg

SEQ ID NO: 39290 - DNA, 286 bp, Zea mays
atcatgaaccaccctgggcagattggcaacggctatgcccctgtgctggactgccacacctcccacatcgctgtcaagtttgctgagctcattaccaagatcgacaggcgctctggcaaggagcttgagaaggagccaaagttcctgaagaacggtgatgctggtatggtgaagatgatacccaccaagcccatggtggtggagacattctcagcgtatcctccccttggtaggtttgctgtccgtgacatgaggcagacggttgctgttggagtaatcaagagtg

SEQ ID NO: 39291 - DNA, 287 bp, Zea mays
aaaaggctttcagtgtcataaattcgttggagatttggaagcttttgaggaacagagagcatgttcttgagatgttggagcttaagatcaaggaggaagctcttagaacctatctcttttcatactcgtcttcgtacgaatccttaagccttaaccagctcactaccatgtttgatctcagcgagcagcatgcccacagcattgttagcaagatgatgatgcatgaagagcttcatgctagctgggaccagccaacaaagtgcatcgtattccatagtgtgaaccaa

SEQ ID NO: 39292 - DNA, 284 bp, Zea mays
gggctggcctgcaaggagatccacatcggcggacaccgcggctggcgcctgcgcgtgctggaggccttcgtcatcatcctcgccttcacgcagctcctctacgtgctcatgctccacacgggcctcttcggcggcagcagtggctaccgggaccacgactacggcgtcggcggcgcggccggcgagcccaagggggtcaccagggtctgaggattctgatcgatgcagctcgtacatgtgtcatcatatcaggcgctgctggagtgtgatgacgtaataagtag

SEQ ID NO: 39293 - DNA, 290 bp, Zea mays
ggcggcggttatggcctctgctgctgcgacggctacgatggggacggggaaggtggtttgcgtcaccggcgcatcagggtacatcgcgtcctggattgtcaggctcctactcgaccgcggctacaccgtccgcgccaccgtgcgagacaccgctgacccaaagaaaacattgcacctgactgcgttggatggtgctaaggataggctgcacttatttaaagctagcctgctagaagagggttctttcgatgctgcagttcatggatgcgacactgtatttcatactgcct

SEQ ID NO: 39294 - DNA, 283 bp, Zea mays
  unsure (1)..(283): unsure at all n locations
gggaggcgcccaagcgggactcgagtgaggggcagtaaagccggctttatgtgcctagaaactagtagctagtgtttgctgctgtcgaatgacactatgcaatgtgatctggaacctggtttcttgggtgcgacgcttgtagccgtgttatgactgtcgtccgtaaaatttgggggctccccgtaaggcatgctgcctggcaaggcctcggtgtcccacctcgtctgtggcgtggggcgctggagcccggtctggttgggttgggaagcctttanactgttgt

SEQ ID NO: 39295 - DNA, 282 bp, Zea mays
aaacttcagacactctacatatatcctctgcgcgtgtatctcgtcgtacagagccgaaagctggagcttccaatggcgggagacaacgacctgaaggtgctcggcgtgtggacgagcccgttcgtgatccgggtccgcatcgtgctcaacctgaagggcctggcgtacgagtacgtggaggaggacctcagcaacaagagcgcgctcctcctggggtccaacccggtgcacaagagcgtgccggtgcttctccacgccgggcgcgccataaactattcccag

SEQ ID NO: 39296 - DNA, 284 bp, Zea mays
caacaccacctcgcctgcgatcttcgtagcctccgtcgcgtcgagcatcgatcatgtcggcctactgcggaaagtacaaggatgagctcatcaagaatgctgcctacattggcacccccggcaagggtatccttgctgctgatgagtccactggcaccattggcaagcgcctttccagcatcaatgtcgagaacgttgaggagaaccgccgtgccctccgtgagctcctattctgctgccctggtgctctccagtacatcagcggtgtgatcctcttcgaggag

SEQ ID NO: 39297 - DNA, 284 bp, Zea mays
ctctctccatctccctgctcctccgcctccttcttgatccagccaagccagggatcgccatgtcggactcggaggagcaccacttcgaatcgaaggccgacgccggagcgtccaagacctacccgcagcaggctggcaccgtccgtaagaacggcttcatcgtcatcaagaaccgcccctgcaaggttgtggaggtttctacctcaaagactggtaagcatggccatgccaaatgccactttgttgccatagacatattcaacgggaaaaagcttgaagatatt

SEQ ID NO: 39298 - DNA, 290 bp, Zea mays
gatgcccagaatgattaccaagatagaaggccgtggtaatggtatcaagacaaatgttgtgaacatggttgacatagcaaaagcacttgccaggccagcttcctacacaaccaagtactttggatgtgagcttggtgcacagtccaaatttgatgagaagacagggatttccttggttaacggggctcatgatactgcaaagctggctggtctccttgaggtattcatcaagaagtatgtccaatgttatgggtgtggaaatcctgagacagagattctcatctcaaaga

SEQ ID NO: 39299 - DNA, 273 bp, Zea mays
cgcagttccccgaccacaccgttcctccgagcccaggagcagccccgcgccaggaggaagtttgttcttttaacaatatgtcgagggaggagaatgtttacatggccaagttggctgagcaggctgaaaggtatgaggagatggttgagtatatggagaaggtggctaagactgtagatgtggaagagctcactgttgaggagcgtaaccttctgtctgttgcatacaagaatgtgattggggctcgccgcgcttcatggcgcattgtttctt

SEQ ID NO: 39300 - DNA, 285 bp, Zea mays
gcagactctctcacccgactcgtcagacgtcagccagcagttcgaaaccaaggattgatccaggagcttccggaaggcgaggcgcgcgcgcagcatcgaggtgctggtgccggtgccgcccatggatcgggctcgcggatccgcgttcctgctcggcgtcctgctcgcaggatccttgttcgcgttttcagttgccaaagaggagaccaagaagctcgggaccgtgatcggtatcgatctcggtaccaccatatactgtgtcggtgtgtacaagaacggtcatgt

SEQ ID NO: 39301 - DNA, 279 bp, Zea mays
ctcgagccgcacgacctccgtgtgcaacgcgtcgccgccatggcggcccccctgcacaccagatccggccacaacgccgccgcatgcggtgtctcaagaccatcgaggagatgtaccagaagaaaacgcagctggagcacatcctgctgcgccctgacacctacatcggctccgtggagaagcacacccaggcgctttggatatacgaggacggtgccatggtgaaccgctcggtcacctacgtccctggactctacaagatcttcgacgagatcctcg

SEQ ID NO: 39302 - DNA, 90 bp, Zea mays
gcagactctctcacccgactcgtcagacgtcagccagcagttcgaaaccaaggactgatccaggagcttccggaaggcgaggcgcgcgcg

SEQ ID NO: 39303 - DNA, 271 bp, Zea mays
actcgccgcgatctccgtagcctccgtcgcgtcgagcatcgatcactgtcggcctactgcggaaagtacaaggatgagctcatcaagaatgctgcctacattggcacccctggcaagggtatccttgctgctgatgagtccactggcaccattggcaagcgcctttccagcatcaatgtcgagaacgttgaggagaaccgccgtgccctccgtgagctcctattctgctgccctggtgctctccagtacatcagcggtgtgatcctcttcg

SEQ ID NO: 39304 - DNA, 145 bp, Zea mays
ctccggcgccgttactttgaagaaattagagtgctcaaagcaagccatcgctctggatacattagcatgggataacatcataggattccggtcctattgtgttggccttcgggatcggagtaatgattaatagggacagtcgggg

SEQ ID NO: 39305 - DNA, 126 bp, Zea mays
agaggaaggccagcctcattgaaaggctcaaccaactcaactcctccggtggtgctgatgacgacgatgaggacgacgagtaaagttaattgccatcgaagtagtgctatctcaatccagcgatca

SEQ ID NO: 39306 - DNA, 128 bp, Zea mays
gcgaacaaagcaatcggaattctctgcgatttctctagatctcgactaccccccactagttttggttcctcctttcgttcgagagagcgattctggtggcaatggcgaagagcgagggtccggcgatc

SEQ ID NO: 39307 - DNA, 227 bp, Zea mays
attttctgctggtgatgacaaacaagtaaaatgttgggatcttgaacaaaacaaggttattaggtcctaccatgggcatctgagtggtgtttactgcctagctctccatccaacaattgatatcttactgactggtggccgggattcagtttgcagggtgtgggacatcagaacaaaagcacatgtttctgctttaacagggcatgacaacactgtctgttcagtgt

SEQ ID NO: 39308 - DNA, 227 bp, Zea mays
gcgccctctcgcagtcgccgcaatggagagcaccttcatcatgatcaagcctgacggcgtccagaggggcctcattggtgagatcatcagccgttttgagaagaagggcttctacctcaaggccttgaagcttgtcaacgtggagaggtcgtttgccgagaagcactacgccgatctcgcctccaagcccttcttccagggcctcgttgactacatcatctctggcc

SEQ ID NO: 39309 - DNA, 198 bp, Zea mays
tggatttctccttggacatttgcaatctctgggttttgatttccctaaaagcatcagtgtgattgatgtatgccccaagggaatgggcccatcagtcagaagactttatgttcagggcaaagagatcaatggtgctggtatcaatgctagctttgctgttcaccaggatgttgatggaagggcaacagatgtagctct

SEQ ID NO: 39310 - DNA, 186 bp, Zea mays
ccgtcactcaacacagcacaggcagctcgagagagagagagagagaaagatgtcgtggttcgggcaccaccaccacaaccagccggctcccccggcgtcgggccccaaccaggtgttcaagatcttctgccgcgccaacgagaactactgcctggccgtccgcgacggcgccgtcgtgctggcccc

SEQ ID NO: 39311 - DNA, 249 bp, Zea mays
gtcctgtcccctcgcaaaaccctagctccagccaccatgaagggcaaggctgacacctccaagaaggacgagggcaggctccgggcgggcggcgccgccggaaagcgcaagaaggccgccgcgagctgcaagcccaagcgcccgccctccgccttcttcgtcttcatgtctgaattcaggcaggagtatcaggcgctgcaccctggcaacaagagcgttgcgaccgtgagcaatgcagcaggggaaaat

SEQ ID NO: 39312 - DNA, 301 bp, Zea mays
caagcgccgagccaccggtggaaagcagaaggcctggaggaagaagcgaaagtatgagcttggtcgccagccagccaacaccaagttgtcaagcaataagacggtgaggagggtccgtgttcggggaggtaatgtgaaatggagggctcttcgccttgatactggtaactactcatggggaagtgaagctgttacccgcaagacccgtatcctcgacgtggtctacaatgcatcaaacaatgagcttgtgaggacacaaacccttgtgaagagtgccattgtgcaagttgatgctgcccca

SEQ ID NO: 39313 - DNA, 146 bp, Zea mays
gcaagaacaagcagccacatgtgtccatctgtgcagatgttaagcttgctttgcagggcatgaatactcttctggaaggaagcacatcaaagaagagctttgacttcggctcatggcatgatgaattggatcagcaaaagagggag

SEQ ID NO: 39314 - DNA, 142 bp, Zea mays
cgccggagctcgacaaggacgaccgacgacgcacgcggagatccggcgtactgcaaattttgaaaactgaactgtaagatggcatcagcagagctttcccgtgaggaaaatgtgtacatggcgaactcgctgagcaggcgga

SEQ ID NO: 39315 - DNA, 228 bp, Zea mays
cccgtcgcatcccatcccactaccacccatctcgtcgtccgccgattcgatccggttcttccaacccaggggctgtgatggcgacgaagaggagcgtgggcaccctcggcgaggcggatctgaaggggaagaaggtgttcgtgcgcgccgacctcaacgtccctctcgacgacgcccagaagatcaccgacgacacccgcatccgcgcctccgtccccaccatcaagt

SEQ ID NO: 39316 - DNA, 293 bp, Zea mays
cttgcagctggcatggccatcggcattgttggtgatgctggagtcagggcgaatgcacaacagccgaagctttttgtgggcatgatcctcatcctcattttcgcagaagcgcttgctctgtacggtctcattgttggaattatcctttcatcccgtgctggtcaatcccgggcagattaagtgcactaccattctgcaattaccgtactgtttattatgctattctaagagaattgaaaccctatgcccttgtctagtttattcttgttaccatgtattaatgaaacaatttg

SEQ ID NO: 39317 - DNA, 308 bp, Zea mays
atcgttcctgtcgagcttcagcaagagcatccagagagctgcatacaagacctcgagcgaccgtctggagaagctgttcgggaggcatgggcaggacaaggggatcatcgtgcgcgccacggaggagcagacccgcgagctgcggcgccacgcctcggagggcggccacggcccgcactggcccctgccgccgttcggcgagtcgcgcggcccctacagcctcctggaccagcggcccagcatcgccaaccagcacgggcagctctacgaagccgacgcgcgcagcttccacgacctcgccgagcacg

SEQ ID NO: 39318 - DNA, 303 bp, Zea mays
ctctctgccttcctgcctgcttccctccctccgtgagatccccgctcgggttgccatggcggaccagctcaccgacgaacagatcgccgagttcaaggaggccttcagcctcttcgacaaggacggcgacggctgcatcaccaccaaggaacttggcactgtgatgcgctcattggggcagaaccctactgaggctgagcttcaggacatgatcaatgaggttgatgctgatggcaatggaaccatcgactttcctgagtttctcaacctgatggcgcgcaagatgaaggacaccgactccga

SEQ ID NO: 39319 - DNA, 303 bp, Zea mays
cgcgtcgcatccgctccacaggatcctctgcgccaccgcaaccgtgtgaccgcccgtgccgccggcgatcccgatccgccgacccgtcccagccccgctcgcagccatgtcgccgtcggagccgacgcgggaggagagcgtgtacatggccaagcttgcggagcaggcggagcggtacgaggagatggtcgagttcatggagcgcgtcgcgcgctacgccggggtagcccggcggcgggacgagctctcggtggaggagcgcaacctgctgtccgtcgcctacaagaacgtcatcggcgcccg

SEQ ID NO: 39320 - DNA, 167 bp, Zea mays
ctccggggttcggtttcgtcggtcggcggatcgagatcgcggcgacggatgttgagtaccgctgcttcgtcggcggcctcgccagggccacggacgaccaccccctccacaacgccttcagcacctacggcgaggacctcgaatccaagatcatcctcgatcgggag

SEQ ID NO: 39321 - DNA, 293 bp, Zea mays
atcgattcccccgcatccgatctcttcggtgctagagaaatataggccgccgcctcctcctcattcggtgaaaggtgggcggttagggttgggagatctcttgactcacgacacgagcagcagaattcgtcgagggccgctggttgctgcgagaggtccgggccttcgtgggatcttgaaaattgaatgttctaatggagtccaagggtggcaagaagaagtctagcagtagtcgttcctccctgatgtacgaagctccccttggctacagcatcgaggatatccgccctgca

SEQ ID NO: 39322 - DNA, 297 bp, Zea mays
ctgaatttttgttcggtctagccgacccgacgatggcgtccagcgacgggaaaccactgccaaccccggcctctgtgggcggcggcggcggcagcagcaccgcgccgcccgggcagccgaccacggtagcgtccaaggtgctggacatgggcgcggcggcgatgcagtcgttgcgccccgtgaagcatgcgaacagcacatgtgcacgttcgcgctgtacgcgcacgacccgaagcgggcagtggagacgcaccactacgtctcccgcctcaaccaggacttcctccagtgcgccgt

SEQ ID NO: 39323 - DNA, 299 bp, Zea mays
gctccccttcctctccagcgcgctgagcaacgcaagtaagatggccggcaagcgccgccatcctgccatcgggatcgatctgggcacgacctactcctgcattggggtgtggcagaacgaccgcgtggagatcatcgccaacgaccaaggcaaccgaaccaccccatcctacgtcgccttcaccggctccaggcgcctcatcggggatgctgccaagaaccaggccgaaatgaaccccagcaacacaatcttcgattccaagcggctcattggtagaagatttagcgatgcatctgtac

SEQ ID NO: 39324 - DNA, 236 bp, Zea mays
agtcatgtacaaatacatcgatccggaagaccttcctgtagagtttggagggaagagcaatgtggtgtacaaccacgaggagtacaccgagttaatgagacaagatgacatcaaaacagcaagcttttgggcggttgatgcgaaaacaaaccatgctaaccctgccatcaatgggaccttggttcctgaggttgcgccacagtcgtcgcaggcagctaaagctagttgaagagtat

SEQ ID NO: 39325 - DNA, 300 bp, Zea mays
gccgcctccgttctatctgccgccgcagcagcagccgcagccatggcaataccccactcaaccaccgcagctaagcccgtgccagcagttcggatcctgcggcgtcggcagcgtcggcagcccgttcctgggccagtgcgtcgagttcctgaggcaccagtgcagcccggcggcgacgccctacggctcgccacagtgccaggcgctgcagcagcagtgctgccaccagatcaggcaggtggagccgctgcaccggtaccaggcgacatacggtgtggtcctgcagtccttcctgcagca

SEQ ID NO: 39326 - DNA, 297 bp, Zea mays
aggactttgaggggagatgggtcgtctccaagaaggatgaataccaaggtgtgtggaggcatgccaagagtgatggtcatgaggactatggcctccttgttagtgagaaggcaaggaaatacgccataatcaaggagcttgatgagccagttaccttgaaggatgggacagtggtcctgcagtttgaagtgagacttcagaatggccttgaatgcggaggtgcctacattaagtacatccgccctcaggatgctggatgggatgccaaggagtttgataatgagactccatacacta

SEQ ID NO: 39327 - DNA, 191 bp, Zea mays
gttcgcctacgccgacacgcagcgctacaggctgggtcccaactacctgatgctgcccgtcaacgcgccgcgctgcggcaccacaacaaccactacgacggcgccatgaacttcatgcaccgcgacgaggaggtggactactacccgtccaggcacgcgccgctgcggcaggcggcgccgcccacgccgct

SEQ ID NO: 39328 - DNA, 285 bp, Zea mays
attggagattgggttgccttcttgaaaaatgctccagagggtacatatgatgcagtaattgtggattcttctgatccgataggtcctgctcaggagctttttgagaagcctttcttccagtcggtggccagagctttgcgtccaggtggagttgtatgcacccaggcagagagcatatggctacatatgcacatcattgaagatattttcgtcaattgccgccaagttttcaaaggctcagttaactatgcttggacaacagtacctacataccctagcggagtt

SEQ ID NO: 39329 - DNA, 296 bp, Zea mays
caataattgacaaaaatgctcgcattggagaaaatgtgaagataatcaattttgataatgtccaagaagcagtaatggagacagaaggatattttatcaaaagtggaattgtcacggtgattaaagatgctttaattcctagtggaacaatcatataaagtcagccaacaccatgtatataaggttgggttgcatcatatggtgatcgccaatgcgcatcaagttctctcatcccttgcgagaccatgcttatttccattgcaaaatcatcaagctctgcatcaacttgttgtgga

SEQ ID NO: 39330 - DNA, 296 bp, Zea mays
gccgcgcgcgcctcgccgtccgacgtcgaatggaagagcggcaaagcgggaccaggcgtcacgtcaagggcgtctcccagttcgccgtgtacgcggtcgaggccaggacgctgcagctgctgcgccccgacgagggcgtcgacctcacgctgcagcccttcacctacgagctcttcgtcgtcgcccccgtgcgcgtcatctcgcacgagcgggccatcaagttcgcgcccatcggactcgccaacatgctcaacaccgccggcgccgtgcaagcgttcgagagccagaaagatgct

SEQ ID NO: 39331 - DNA, 290 bp, Zea mays
gggacgcagcttcttctctgtttcctactcgccgcctccgcgccgctaatcgtcgccacggccaagaaatccggggacgtgtcggagctccagatcggcgtcaagtacaagccggaatcatgcagcattcaagctcacaaaggtgacaaggttaaagttcactaccgtggaaaacttactgatggaacggtttttgattcaagctatgaaagaggtgacccgattgaatttgaattgggcactggacaagtgatcaaaggatgggatcagggtctcctgggaatgtgcgt

SEQ ID NO: 39332 - DNA, 288 bp, Zea mays
atctccacctctcctccggctagggtgttcacgcctgccgcggcgaacttactgccctccccggcgtcgcgctctggtcgtcgtcggccgggaagatggctggcggcttcagggtacttcatctggtcaggccctttctggctttcttgccagaggtgcagagcgcggataggaagataccattcagagaaaaagttatctacactgttatttctctcttcatttttctggtgtgcagccagctcccactctatggcattcattcaacgactggagctgatcctttct

SEQ ID NO: 39333 - DNA, 287 bp, Zea mays
gtggttacccattcagcctgcgcgaagaggttgagtgcatgctctcgtgtggtttgtggcttcataatgctgactacgacccgatgactcatgttgtgaagagaaatcaacggaacacaacatatgtggatgctgtgatgacggttccgcttggtgccatgctgcctgtgagcgggataaatgttgcattcaaccgcgatgtgctggggcctgctatgttcccaggcctgcgtctacgaaacgaagggaagcacagatgggatacccttgaagacatatggaatggc

SEQ ID NO: 39334 - DNA, 298 bp, Zea mays
ctaacacacccgagcatatcacagtgacagacacgatggtgagctccagaattgttgtcctcctcgccaccctcctatgcgctgccgccgcagtcgcgtcgtcctgggaggacgacaaccaccaccaccacgggggccacaagtccgggcaatgcgtgcggcggtgcgaggaccggccctggcaccagcgcccccggtgcctggagcagtgcagggaggaggagcgggagaagcggcaagagcggagcaggcacgatgccgacgaccgcagcggcgagggctcgtcggaggatgagcg

SEQ ID NO: 39335 - DNA, 201 bp, Zea mays
ccagtactttcatttgaaggcggtacaaggagaaacatacccaagttcgagattggtacattaatatatgctcgagtggtgaaagcaaatagtatcatgaatcgcgagctctcatgcatggatgctactgggaaagctgccgaatttggacagctcaaagatggttatatgttcgacacatcaactggcatgtcacgaatg

SEQ ID NO: 39336 - DNA, 270 bp, Zea mays
  unsure (1)..(270): unsure at all n locations
tctagcccatctgctctctcagcgaggacgaaggcacaaacccctcacctccctcaaaccctagccctcgctctcccgcttgttcccgtcaccgccatcatgggctcagatgcggacatggaggactacgggttcgagtactctgacgaagagccggaggagcaggatgtcgacattgagaaccagtattacaactccanaggtttggtcgagacagacccagagggtgcacttgctggttttgatcaagtggtcagtaatggagctgaa

SEQ ID NO: 39337 - DNA, 244 bp, Zea mays
cacaaagctaggcacaagcgaaccaaacccatagcgtccgacagcagcggcgtggtgacggtgtacggcagcaacggcgcggagctgctggagccgtccaagcagcccaagtcggcgactttctccgtcaaggtggggctggcgcagatactccggggcggggtcatcatggacgtggtgacaccggagcaggcgcgcctcgcggaggaggccggcgcgtgcgccgtgatggcgctggagcggg

SEQ ID NO: 39338 - DNA, 277 bp, Zea mays
gtactgtgccacacaagggaactggcttatcagatatgccacgaatttgagaggttcagcaaatatcttactgaagttaaagttgctgtcttctatggaggtgttcacatcaggaagcataaagatttgttgaagaatgaatgccctcatattgtggttggcacgcctggtaggatacttgctcttgccagggataaggatctctccttgaagaatgtgaggcacttcattcttgatgaatgtgacaaaatgctggaatcacttgacatgcggagag

SEQ ID NO: 39339 - DNA, 303 bp, Zea mays
cctgcaccaggtggtcctgctaagggagcatatgttcctccaaccatgagaggaggtgctgataggactggagactcgatgcgccgcaggaacgacgagaattccgtccgtgtgaccaacctctcggaggacacccgcgagcctgacctccttgagctcttccgtgcctttggccctgtcagccgtgtctacgtcgcggtggatcagaagactgggtcgagcagggggtttgggtttgtcaactttgttcacagagaggacgccgagaaggccatcaacaagctcaacgggtatggttatgac

SEQ ID NO: 39340 - DNA, 157 bp, Zea mays
gcttcgcccactcgctccagccgcttcaccgcgccgccaccgccaccgcgaggatgccgttcaagaggttcgtggagatcgggcgcgtggccctggtgaactacggggaggactatggccgtctcgttgtcatcgtcgatgtggtcgaccagaacag

SEQ ID NO: 39341 - DNA, 316 bp, Zea mays
  unsure (1)..(316): unsure at all n locations
aaggactgcaagtcgaacctatctgaatttgatgatcttgcgggccaccctggattcgacaaacaggggacacgcttcaagcgtctcattaaggaccagaataatcacaaggacctcgaggagggaatcaaccgcctagttctttgctctggaaaggtgtactatgaactggatgaagaaagaaggaagtcggagcgcactgatgttgctatatgtagagttgagcagctctgcccgttcccctatgacctcatccagcgcgagttgaagagatatccanatgccgagatcgtgtggtgccaagaggagccgatga

SEQ ID NO: 39342 - DNA, 178 bp, Zea mays
gtccgccgtcgtgcgctcgctacacctctccctcgaggcctttgccggcgaagagcgcccagtcgcccaccaggatgaagtttgttgctgactacctgcttgctgtcctcgctgggaactccagcccctctgccgaggacttgacagccattctggagtcagttggctgtgaagttga

SEQ ID NO: 39343 - DNA, 308 bp, Zea mays
ggcaacactgggctggatccgtcccagacctctttcttccaggtgcttaacatccccaccaagattaacaagggtaccgtggaaattatcacccctgtggagctgatcaagaagggtgaaaaggtgggctcgtccgagtctgccctgctcgccaagctgggtatccgccccttctcgtacggcctccaggtcaccagtgtctacgaggatgggtccgtgttcagccctgaggtgcttgacctttccgaggaggacctgattgagaagtttgccactggtgtctccatggttgcctccctgtcactggc

SEQ ID NO: 39344 - DNA, 296 bp, Zea mays
cagcgatctaggccgccgcctctcctactgcatctccctcgctctcgtcgcctcgttcgcatcgcctccagcaccgcccgccccgagcagagcgcagcctatccggagctgggatggcggacgcgaagcagcagcagcagcagcagcagcagccacagcaggcggaagcggacacaacgcgcgtgtgaagacggtcaagcccttcgttaacggcgggagctctgggatgctcgcgacctgcgtcatccagcctatcgacatggtcaaggtgaggatccagttgggtgaaggctctg

SEQ ID NO: 39345 - DNA, 267 bp, Zea mays
agcgagaagaccagaaggtgagaagagagagagagagtgtgtgtgatcggtacaaggatcaccgctgtgcctgcgcgtgctgcttcaccgaatcgagtcagatcctgtccgaatccgagctaagggatggcaaccggtagtgaagcctcgaaggcagctgacgctgtggttgactggcataaacacgacagcaagaggatgctccatgcggtttaccgtgttggggatctggaccgcacaatcaagtactacacggaatgctttggg

SEQ ID NO: 39346 - DNA, 264 bp, Zea mays
atcccgtcgcatcccatcccactaccacccatctcgtcgtccgccgattcgatccggttcttccaacccaggggcagtgatggcgacgaagaggagcgtgggcaccctcggcgaggcggatctgaaggggaagaaggtgttcgtgcgcgccgacctcaacgtcccgctcgacgatgcccagaagatcaccgacgacacccgcatccgcgcctccgtccccaccatcaagttcctcctcgagaagggcgccaaggtcatcctcgc

SEQ ID NO: 39347 - DNA, 139 bp, Zea mays
cttgtgaccctccctcagccgcgtcgcgtcgcatcctacgatccaaagctctctctgctcgcagccatggcgaagaactacccgaccgtgagcgccgagtacagcgaggctgtggagaaggccaggcgcaagctccgag

SEQ ID NO: 39348 - DNA, 320 bp, Zea mays
cttgcggattacaacatccagaaggagagcaccctccacctggagctccgcctcaggggtggcatgcagatctttgtgaagacattgactggcaagaccatcaccttggaggtggagtcgtctgacacaatcgataatgtcaaagccaagatccaggacaaggagggcattccaccggaccagcagcgcctgatctttgctggcaagcagctggaggatggccgtaccctcgccgactacaacatccagaaggagagcaccctccacctggtgctccgcttgcgaggtggtatgcagatctttgtgaagaccttgactgg

SEQ ID NO: 39349 - DNA, 318 bp, Zea mays
cttccttcctctgcaagaagccaaatacaatttagaagcgcccctcctcctctcccccatccgtacccaatctaatcgacacccggccgagatgggccgcaagttcttcgttggtggcaactggaaatgcaatggaaccgcagatcaggttgagaagattgtcaaaaccctgaatgaaggaaatgttccctcttcagatgttgttgaggtcgttgtcagtcctccttatgtgttcctcccggtggtcaagagccagctgcgccaagagttccaagttgctgctcagaactgctgggtgaagaagggaggtgcattcac

SEQ ID NO: 39350 - DNA, 315 bp, Zea mays
tcttaaggagcagccactgtatccgtgttagagttgaatgtgccctcctgtcagaagcgtttatgtattataggaggtactgctctaaggtgaaagagcaatgctcagcagatatgacacatgctgaggatgcattcaaaagctcttggattttatcatgctgaggtgatgatggctgagttttgtactatctgcattgaaaagaatttaattgataaaatgattgatctgccctgggattccgaggaagataaacatcttcacaagtccctcttcgactctgctcgagaagtgcccatgaaaccaaatgatagt

SEQ ID NO: 39351 - DNA, 315 bp, Zea mays
gtgatgtgtggttcccacagccagcaccaaaggatcacccctggcgctacatgccaaaccatgccatgacccctcacatctctgggactacaattgatgcgcactgcggtatgcggatggtgtgagggacatgctgaataggtatttcaagggcgaggacttccccgtgcagaactacatcgtcaaggaaggccagcttgccagtcagtaccagtgaccgcgcgagatgttgctgtgccgtgtaggcttttctggtgagaagctgcgaggaagaaactcctgttgcgtacttgcgttactgtatgagtagctctg

SEQ ID NO: 39352 - DNA, 263 bp, Zea mays
ccacaactggactgggaatagagtaacttgccgtgattggttccagctaaccctgaaagaaggactgaccgttttcagggatcaggagttctcttcagatcttggctgtcgtacggtaaaacgtattgctgatgtctccaaacttagaatctatcaattcccacaggacgccgggcctatggcacatcctatccgtccccattcttatatcaagatggacaacttctatactgttacggtttacgagacaggtgctgaagttg

SEQ ID NO: 39353 - DNA, 288 bp, Zea mays
gttggcttctcctccccctccggttcgggttcgggttcgtgaggttctccggggttcggtttcgtgggtgagcggatcgagattgcggcgtcggatgttgagtaccgctgcttcgtcggcggcctcgcctgggccacggacgaccacaccctccacaacgccttctgcacctacggcgaggtcctcgagtccaagatcatcctcgatcgggagacgcagaggtcccgcggcttcggcttcgtcaccttctccacggaggaagcgatgcggaacttcatcgagggcatg

SEQ ID NO: 39354 - DNA, 294 bp, Zea mays
aaagctcctcctcgatccatcgatcaccgcaccggccggcggcaccgcgctcgcagtggctagccaacgagactgcagcaattgcggaccgtgaccgcagcggcatctacggcggcgcccacaccacctacgggcagcagcagcagcagggaggaggcgggcgcccgattggtgagcaggtgaagggcatgctccacgacaaggggccgacggcgtcgcaggcgctgacggtggcgacgctgttcccgctgggcgggctgctgctggtgctgtcggggctggcgctgacggcct

SEQ ID NO: 39355 - DNA, 311 bp, Zea mays
aacaccgtctttgatgccaagcgtctcattggcaggaggtttagtgatgcctctgtccagagtgatattaagctgtggcccttcaaggtcattccagggcccggtgagaagccaatgatagttgttcagcacaagggggaggagaaacagtttgcagccgaagagatctcctctatggttctcatcaagatgcgtgagatcgctgaagcttaccttggcagcacgatcaagaatgctgttgtcacggtccctgcctatttcaacgactcgcagaggcaggccacaaaggatgctggggtgattgctggcct

SEQ ID NO: 39356 - DNA, 311 bp, Zea mays
gattatttataggcttattgagaatgatgcaactgacattgcagacagagttcttgcattctattcttccttgcttgccttccacccgctaagatttacatttgtacgtgatattcttgcgtatttctatggtcatcttccaatcaaactaattggtaggatcctcaacctgctgggtgttagcactaaggtaacattgttgcccttctgcattccttttttagcaatcttccacaagagtggctggaatctactcatactgtcatcaaacaccttcggccagtcaattcagttgccatgttaagaatcgc

SEQ ID NO: 39357 - DNA, 300 bp, Zea mays
caagaagacaggagaagggagttgtagtgagttttaagaatggcgagtgcacaggcagtggggcaaggagaacgaggccacttcgttctgaagagcggacacaccattccggccgttggtctaggcacttggagggccggctcagataccgctcactctgttcggaccgccatcgccgaggctggatataggcacgtggacacagctgcccaatacggagtagagaaagaggtcggtagaggacttaaagctgcgatggagggcgggatcaacaggaaagatttgtttgtgacgtcgaag

SEQ ID NO: 39358 - DNA, 305 bp, Zea mays
ggcgctcaaggccgcgacggccgcgaccttcggcgggtcgatgctggtgctgtccgggctgatcctggccggcaccgtgatcgcgctcacggtggccaaccccgtgctggtgatcttcagcccggtgctggtgccggccgccatcgcgctggcgctcatggcggccgggttcgtcacctccggcggcctcggcgtcgctgcgctgtccgtgttctcctggatgtacaagtacctgacgggcaatcacccgccgggcaccgaccagctggaccacgccaaggcgaggctggcgtccaaggcccgcg

SEQ ID NO: 39359 - DNA, 300 bp, Zea mays
cggacgctcagatggaatacgtggacctgtacatggtgcactggcccgtgaccatgaaggccgggaggttcacggcccccttcacgcccgaggactacgagccgttcgacatgcgggccgtgtgggaggccatggaggagtgccaccgcctgggcctggccaaggccatcggcgtgtgcaacttctcctgcaagaagctcgagaccctgctctccttcgccaccatccctccggtggtcaatcaggttgagatcaacccggtgtggcagcagcggaagctgagggagttctgcagggcga

SEQ ID NO: 39360 - DNA, 126 bp, Zea mays
gtttgcaaagctcctcctcgatccatcgatcactgcaccggccggcggcaccgcgctcgcattggctagccaacgagacggcagcaattgcggaccgtgaccgcagcggcatctactgcggcgccc

SEQ ID NO: 39361 - DNA, 306 bp, Zea mays
tctaggcgagggagtggtgacgacgatcgagaacggcgagaggcggtcatacaccatcaagcaaggccacgtcttcgtggcgccggccggggcggtcacctacctggccaacaccgacggccggaagaaactggtcatcgccaagatcctccataccatctccgtgcctggcgagttccagttcttcttcggccccggcgggaggaacccggaatcgttcctgtcgagcttcagcaagagcatccagagagctgcatacaaggtacaacacacgtgctacgtgtgctgctgctgctgctgcaacgt

SEQ ID NO: 39362 - DNA, 306 bp, Zea mays
gttcgggaggcatgggcaggacaaggggatcatcgtgcgcgccacggaggagcagacccgcgagctgcggcgccacgcctcggagggcggccacggcccgcactggcccctgccgccgttcggcgagtcgcgcggcccctacagcctcctggaccagcggcccagcatcgccaaccagcacgggcagctctacgaggccgacgcgcgcagcttccacgacctcgccgagcacgacgtcagcgtctccttcgccaacatcaccgcggggtccatgagcgcgccattgttcaacacccgttcgttcaa

SEQ ID NO: 39363 - DNA, 306 bp, Zea mays
ccgtcgtccgccgccgccgaaggacggaaggagaagagggtacggccgtctcctcgcccccatggcccacgagaagaagctgtccaacccgatgcgggagatcaaggtgcagaagctcgtcctcaatatctccgtcggggagagcggcgaccgtctcacccgcgccgcaaaggtgctcgagcagctcagcggccagacccccgtcttctccaaggcgaggtacacggtgcggtcgttcggcatccggcgtaacgagaagatcgcctgctacgtcacggtgaggggcgagaaggccatgcagctgct

SEQ ID NO: 39364 - DNA, 304 bp, Zea mays
gtcggctgccgcagactggtagtagccggcgcgccgtcaccgtatcctcagatcagaggcgagcagaaaccacaccactctactgacgcccgacgagcagtgtaacattttccttcagccatgggtaaggagaagactcacatcaacattgtggtcattggccatgtcgactctggcaagtcgaccaccactggccacctgatctacaagcttggaggtattgacaagcgagtgattgagaggttcgagaaagaggctgccgagatgaacaagcggtcattcaagtatgcgtgggtgcttgaca

SEQ ID NO: 39365 - DNA, 303 bp, Zea mays
cgagcatatcacagtgacagacacgatggtgagcgccagaattgttgtcctcctcgccaccctcctatgcgctgccgccgcagtcgcgtcgtcctgggaggacgacaaccaccaccaccacgggggccacaagtccgggcaatgcgtgcggcggtgcgaggaccggccctggcaccagcgcccccggtgcctggagcagtgcagggaggaggagcgggagaagcggcaagagcggagcaggcacgatgccgacgaccgcagcggcgagggctcgtcggaggatgagcgagaccaggagaagga

SEQ ID NO: 39366 - DNA, 240 bp, Zea mays
gtcgccgaaggagctggccaggaactgattccccggactgacgatcagaagcgggagcaggacgagtccggcaacaccgtcttcctcgacgtaggaccctggctgaagtccgagctgggcagatggtggaagagggaacatcccgacgagctgttcactgtgaagtacattgaccctacgtacatgatccgagcggtccctgcgaacgccagcgacaacttgtacagcactttgctggcg

SEQ ID NO: 39367 - DNA, 311 bp, Zea mays
  unsure (1)..(311): unsure at all n locations
cgggagagattggagggaggcccctgcccaaggcaagagaaaccgcggcgcgggagcgggangaagggcagacgcagacgggcgaacaagatgagggagatcatcagcatccacatcggccaggccgggatccaggtcggcaacgcctgctgggagctctactgcctcgagcacggcatcgagcacgatggcaccatgcccagtgattcctcggttggcgtcgcacatgatgccttcaacacgttcttcagcgagactggttccggcaagcatgtgcccagggacatcttcgtcgaccttgagccactgtc

SEQ ID NO: 39368 - DNA, 309 bp, Zea mays
ctcccggtctcgcagttcctccccgtcgtcttccaccgcaaatcgccgaagcaagcaggcgagctcgggaccagatccactgcgggcagctggagcggaagggccatggggacgccgccgcctttccaggagtccggccactgcgacgtctgccgctgcaccttcaacaccttccgccgccgtcatcactgccgcagctgcggacggacgctctgtcacgagcattcttcgtactacatggctctcccgcagtatgggatatatacagacgtcagagtctgctacggttgcttcaacaaatcctccagc

SEQ ID NO: 39369 - DNA, 315 bp, Zea mays
gccggctttaaaaacgcacacaagcgctaaaaccctctccaccgtccacctcagctcccatatccgctcccctacctctccagcatcctcccgtctccgtcgtctcgtctccgctcctcacctcgccagccatgggcaagatcaagatcggaatcaacggtttcggaaggatcggcaggctcgtggccagggtcgccctgcagagcgaggatgtcgagctcgtcgccgtcaacgaccccttcatcaccacggattacatgacgtacatgttcaagtacgacaccgtgcacggccaatggaagcacagcgacatcg

SEQ ID NO: 39370 - DNA, 310 bp, Zea mays
ggcgataaggccactagccaagttcataagctttaaggccatcgtgtttgccacttggtggcagggagtcggcattgcgatcatctgccaaactggactcctgcccaaagaggggaaagtgcagaacgcgctacaggacttcctcatctgcatcgagatggctatcgcagcggtagcgcatgcctacgtcttcaccgtggagccgtaccagcacgtccctgctgtacctcctgatcacggggaagtcatgtgtcaggaaagcaaaatggaggtggaggtggatgtcgtcgacgacgatacagggggtaca

SEQ ID NO: 39371 - DNA, 314 bp, Zea mays
ctaataaggtaataaggggcgacgaaaatggctccaacgaccgccaccaaggacgacagtgcgtacggcgacgagcgccggcgcgagctgcaggcgttcgacgacacgaagctgggggtgaaaggcctggtggactccggcgtcaagtccatcccgtccatcttccaccacccgccggaagccctgagcgacataatttctccggcgcctctgccgccgtcgtcgtcgccctccgccgccgccatcccggtggtggacctctcggtgacgcgccgcgaggacctagtcgagcaggtgaggcacgcggccgggac

SEQ ID NO: 39372 - DNA, 315 bp, Zea mays
gcgcactcgatcgacctcgccgccgaggccatcggggtcatcgccgagccggaggtcaagagcgtcgagatcactccatcgcacctcttcttcgttgtcgccagcgatggcgtgttcgagttcctctccagccaggaagttgttgacagggttgccacgtatcaagatcctcgagatgcctgctcagcaatcgctgcagagtcatacaaactatggctggagcacgaaaataggacagatgatataacgataatcattgtgcatatccgagacatggaaagtgccctgcagggagtgacaaagcggactacggta

SEQ ID NO: 39373 - DNA, 314 bp, Zea mays
cgagagtcaccagctgggctatcactcctctgcgctgtcgccggcccggccgccgcgcagaactgcggctgccagccaaacgtatgctgcagcaagtttggctactgcggcacgaccgacgagtactgcggcgacgggtgccagtcgggcccgtgccgctcgggcggcggcgagcagcagtggcggcggtggtgcgaacgtggctagcgtcgtcaccggctccatcttcaacggcatcaagagccaggccgggagcgggtgcgagggcaagaactctctacaccggagcgcgttcctgagcgccgtcaaggcgt

SEQ ID NO: 39374 - DNA, 308 bp, Zea mays
agcttgcagaactcattcctataaaacctggaaaaaagcccagattgaagatagaatctgatgctattgatgcttcagatgggctggacacgcttgcaaaccttgcaattcttggcgaaggtgaagcgctcccttcgcagccaacaacaaaacatccccgccaccgtcccggctgctcatgcatcgtctgcatccaaccaccaagtgggaagggtccaaagcacaagcagacatgcacctgtaacgtttgtatgacggttcgccgccgttttaggacactcatgcttcgacgcgagaagaaggtgaca

SEQ ID NO: 39375 - DNA, 307 bp, Zea mays
gtatgtcaagagtgtccagcgtactgttatctggatgggaaagaagcaagagtcggttgaggatgttccgtgtggtaacactgttgctatggttggtctggatcagttcatcacgaagaatgctacactcactaatgagaaggagactgacgcttgcccaatcagagcaatgaagttctccgtctctcctgttgtgcgtgttgctgttcagtgcaaggttgcctctgaccttcccaagctagtcgaaggtttgaagcgtctagcaaagtccgatcctatggttctctgtacaatggaagaatctggt

SEQ ID NO: 39376 - DNA, 309 bp, Zea mays
ctcgagccgcgcctcttctcctccctcctgccgggtccttaataaagagcagcagcgcaaaaggttggtagagcgagcgagaagaaggcaatggcggcggagagcttcctgttcacctcggagtccgtgaacgaggggcacccagacaagctgtgcgaccaggtgtcggacgcggtgctggacgcctgcctggcgcaggaccccgacagcaaggtggcctgcgagacctgcaccaagacgaacatggtgatggtgttcggcgagatcaccaccaaggcgagcgtggactacgagaagatcgtgcgcgac

SEQ ID NO: 39377 - DNA, 131 bp, Zea mays
gcttctcctccccctcttatcaagtcctcctcgggttagggttccttagggttttgtggaggagcgatggcggcggctgatgtggagtaccgttgcttcgtcggcggacttgcctggaccaccagcaacga

SEQ ID NO: 39378 - DNA, 274 bp, Zea mays
gttttctcaagcacgcgattgtcttctcccaatgggcctcacatctgagaatgttgcacaccgttttggcataacacgactggagcaagatcaagctgctgttgagtcacatagaaaggctgctgccgcagcagctgctggtaaattcaaagaggaaattgtgccagttcatacaaagattgttgatccaaaaactggtgaggaaaagaagatcgtagtctctgcagatgatggaatccgagtggatacttctcttgcagtcctgtcaaaactc

SEQ ID NO: 39379 - DNA, 279 bp, Zea mays
ggcgggcgccgatgggtgagcaggtgaaaaagggcatgctccacgacaaggggccgacggcgtcgcaggcgctgacggtggcgacgctgttcccgctgggcgggctgctgctggtgctgtcggggctggcgctgacggcctccgtggtggggctggccgtggccacgccggtgttcctgatcttcagccccgtgctggtccccgccgcgctgctcatcgggacggccgtcatggggttcctcacgtcgggcgcgctggggctcggtggcctgtcctcgc

SEQ ID NO: 39380 - DNA, 308 bp, Zea mays
attgtcaaggcactcatagagagggatccaggaattgttccgatcaaggataggaagggaccaactgccattcacatggctgtgaaaggcaagaacacagatgtagtggaagagttactgatggctgatgtttccattctcaatgtgcgggatcagaacggaaatactgctttgcacatagctacatggaaatgggagaattttgggattatgaaacaccgcagacgtggcttcgacgaaacggaggcgtaggcgagggattcgacattatgaaaaaccagagaagatactacactctaaaatggaca

SEQ ID NO: 39381 - DNA, 273 bp, Zea mays
ccaaaatacacggagacttcagcgggtcagtgatgacgtgagggctgaggtgtttatgcactgtccaaaggctccaagattagcattcccagaggaaaataatggcagtttgaagaagattccgaatctttcagaccctgcagaatattcaagacttggactagtgccaagaagagctgacctggacatgaaccaacatgtcaataatgttacttacataggttgggtcctcgaaagtatacctcaagatataattgatacacacgagttaca

SEQ ID NO: 39382 - DNA, 298 bp, Zea mays
atgggcgccgcttccatcctactgatgatggtttcgctggagaccctgcttctcgccgccggcgccggcgccggcgggaccatccgtctgtccagcgatgtcggaggcgttgctgcagaccttgtcacggcgatggcgagggcgagggcaagggcaaagcatcagcttcgcgacgaggagaggccgtacggggaatactgcgacttggccgtatgcgtcaagacgtacccgctaacttgctcgtgcttcgatcgggttgagcgctgctccgacgcctgtacagagtgcgtggaaacgg

SEQ ID NO: 39383 - DNA, 298 bp, Zea mays
ctatgcattcagaatatgcgttcatgattttgtttttgaggaattggatgatgtgctgtttactatcctcggggctacatggtgtggactgtgaaggccggccgatgtacatagagaggccacggaaggtgtcccagagtttgagagagcatttagggagaggttctctgcctgcacattaactgctaagaggcatattgactccactaccatcttcgacatccaaggggctcacatggatcatccccgagcgcaagcaaactttgagatcgcgccgaaagcatgccatccctggaat

SEQ ID NO: 39384 - DNA, 295 bp, Zea mays
gaagagctctctatgtacattacaccaatgttgggaaaagataaaacacctgaagagagaaggatagctatctgtatttttgatgatgttgcagagcaatgccgtgaatcagctctgaagtattatgacacataccttcctttccttttggaggcatcaaacgatgaaaattcagatgttcggcaggctgctgtctatggtgtgggtgtatgtgccgagtttggtggtcatgtttttcgccctctagtaggagaggccttatcaaaattaaacaatgttataaggcatcctgatg

SEQ ID NO: 39385 - DNA, 301 bp, Zea mays
caggactgccgtcttctgggcaagttcgacctcaatggcattccgtcagctccgaggggcacaccccagatcgaggtgaccttcgaggtggacgccaacggtatcctgaacgtgaaggcggaggacaagggcacgggcaagtcggagaagatcacgatcacgaacgagaaggggcggctgagccaggaggagatcgaccgcatggtgcgggatgcggaggagttcgcggaggaggacaagaaggtgaaggagcggatcgacgcccgcaaccagctggagacgtacgtgtacaacatgaaga

SEQ ID NO: 39386 - DNA, 302 bp, Zea mays
ctctctcttcattcgttcccggcctcaccccgagccagtcgtctcgctagggtttcgccgccgccgccatgcctcgccgcagctcaggaaggtctgccccacgcccagctccccgtgctgcttcactgaggaacccgccacagccagcacgccaggctcctcctccagctcctgttcgagatggtggtggctccatgtttggaggaattgggtccaccattgctcaaggtatggcgtttggcacgggtagtgccatggcacacagggctgttgactctgtattaggtccccggaccatccag

SEQ ID NO: 39387 - DNA, 302 bp, Zea mays
cgcacgtacaccacactagttaccacagacgacgggcgccatgaaaatcccggtgcttctcctcctggtctccctgtgcttctcgctcgcgctcgcgtggcaaacggacacggaatcgggctcaggcaggccgtaccactacggcgaggagagtttccggcactggacgcgctcccggcagggccggttcagggtgctggaacggttcacccacgagctgctggaggacgccgtcggcaactaccgcgtcgccgagctggaagccgcgccgcgcacgttcctgcagcccagccactacgacg

SEQ ID NO: 39388 - DNA, 300 bp, Zea mays
ctcctccggcatcgacgaggcgagcccagcgcccgagtccctctccctgcccccacgacccatggcggcggatatggcgtacgcgccgccgatgaaggcgggcaaggccgggttcgaggccggcatgatggatccgcagcacaggatccgcatcacgctctcctccaagagcgtcaagaacctcgagaaagtctgcggggatctggtgaagggcgccaagggtaaggagctcaaggtcaagggccccgtgcggatgcctaccaaggtgctccacatcaccaccaggaagtctccctgtgg

SEQ ID NO: 39389 - DNA, 238 bp, Zea mays
ggctctcaaaggatttgccaagttcttcaaggaatccagcgacgaggagagggagcacgctgaaaagctcatggagtaccagaacaaacgtggaggcagggtgaggctccaatcgattgtgacgcctttaaccgagtatgaccactctgagaaaggagatgctctgtacgctaatggagctggctctggccctggaaaagctggtcaaatgaaagctgcacaacctgcatggtgtaag

SEQ ID NO: 39390 - DNA, 232 bp, Zea mays
gttagcagctgggcatgcattaacttctcacggaatgtgcaagatggtgctgccgggagtttctgtcatgaattggctttgatgtgccgagtatcaggaatggattttgtacttgaacctgtgctgtcaccttgctatgcaaggcctgaacttgttgaaagagcactaaagggacgctatcaagatgcgatcgacatactcgggcctcagggccgagaactcgacttgctga

SEQ ID NO: 39391 - DNA, 313 bp, Zea mays
cgccgttcccacgtcgtcttccggccgccgtgccacttctcctcctcctcggcgccgcagtggccagcgccggcgcggaggacaccgatggcggcaacacccgccggcggcactcccgcttgctgttcgcgttcggcaactcgctcaccgacacgggaaacggggccatcttcccggtgactgcaggcgggccattcacccggccgccgtacggggagaccatcttcggtcgtcccagcggccgggcttgcaacggcaggctcgtcctcgacttcctcgtggaggagctgaacgtgtcagaaccgacgccgta

SEQ ID NO: 39392 - DNA, 303 bp, Zea mays
atcaaagaccagaaagctcaaaccaagaccggcgtgcgcggacgaagcacagatccatcggagtgacagcgagcgagcgagagcgagagcgagagagacagagagattatccgcgcgtcaccgactcccggcgaagacgatggggaaggggttcgcatcctacctggcgatgaagacggggccggagggcggcgacgcggcggcggcgcacaggctctgatcgacgcggaccagcgggagctcggcgtcgccgcgcggaagctcgccaaccacgcattcgtcctcggcggcgggcaggggttc

SEQ ID NO: 39393 - DNA, 313 bp, Zea mays
gcataatcaagaagaagtacggtcaggatgcgacaaacgttggggatgaaggtggttttgcacctaacattcaggaaaacaaagaaggccttgaactattgaaggcagccatagaaaaggctggctacactggaaaggtggtcattggaatggatgttgctgcttctgaattcttcggtgagaaagacaagacttatgatcttaatttcaaggaggagaacaacgatggctcaaacaaaatttcaggcgacagctgaaagacctgtacaagtcctttgtttctgagtaccctatcgagtcgatcgaagaccca

SEQ ID NO: 39394 - DNA, 302 bp, Zea mays
gaaatcgattcccccgcatccgatctcttcggtgctagagaaatataggccgccgcctcctcctcattcggtgaaaggtgggcggttagggttgggagatctcttgactcacgacacgagcagcagaattcgtcgagggccgctggttgctgcgagaggtccgggccttcgtgggatcttgaaaattgaatgttctaatggagtccaagggtggcaagaagaagtctagcagtagtcgttcctccctgatgtacgaagctccccttggctacagcatcgaggatatccgccctgcaggcggc

SEQ ID NO: 39395 - DNA, 287 bp, Zea mays
gtgatctgaaggttactggaatccttcctctgaaggaaggcaaccctccgaagttttcccagcgggctcgtttgctcacagctaactatcaagttgtttaatggttgtaccgttgtccgagtgttgatccacttaaatatattcgaatagcatatttttgtgacatggtatgctactggcatgaacttttgcaagtcatgggatggaagatcattttgggttttgaaaatctttactatgtgcttctcattgttagcatgttgcacaaatgttctgatgtgttgcta

SEQ ID NO: 39396 - DNA, 297 bp, Zea mays
ggagcttgagaaggagcccaagttcctgaagaacggtgatgctggtatggtgaagatgattcccaccaagcccatggtggtggagacattctcgcagtatcctccccttggtaggtttgctgtccgcgacatgaggcagacagttgctgttggagtcatcaagagtgtggagaagaaggacccgaccggcgccaaggttaccaaggcagctgccaaaaagaaatgatgcaacctgtcgttaatcctgtatctgcttttgcaatacctgacttgtcactccatcccgaagttttgtat

SEQ ID NO: 39397 - DNA, 297 bp, Zea mays
attccgtgggtctgaacttcagaactacttcacacgcatattggaagataacttgaaggcaatcatcaaaccgcagtatgttgaccacatcccaaaggctgttcaagggaatgtaggacaagtgcttgaacagaaggacgagagggatatgaaagctgaactgtgtgttgatcttgaattaaaccaagttattgaccgaaatgtaggagatctttctggcggtgagctccagagatttgcaatagcagttgttgcagtgcaaaatgcggaaatctacatgttcgatgagccacaagt

SEQ ID NO: 39398 - DNA, 241 bp, Zea mays
tggagaaacagaaggaccggcggccgtacgtgttcgaccggcgcactattcgtcgcgtggtccggagcgagcaggggtccctgagggtgctcaggcccttcgacgaggtgtccaggctcctccgcggcatccgggactaccgcgtggcggtcctggaggcgaacccgcgctcgttcgtggtgcacagcacaccgacgcgcactggatctgctacgtggacgaagcgagggagtgtgacgac

SEQ ID NO: 39399 - DNA, 238 bp, Zea mays
aagagatggggagagagagacgcgaggaaggagggagagagcacgggggcttgatcgaagatggatgccggagcaaaggtggtgaagaaggccgcggcggggcgtcgcggcgggggcggccccaagaagaagccggtctctcgctccgtgaacgccggcctcaagttccccgtaggccgtatcggccgctacttcaagcagggtcgctactaccagcgtgtcggcacggcggccccgt

SEQ ID NO: 39400 - DNA, 310 bp, Zea mays
actggctctggcaagacccttattgctagagctgtagctaatgagacaggtgctttcttctttttgatcaatggaccagaaatcatgtcaaagctagcaggagaaagtgaaagcaatctcagaaaggcatttgaagaagctgagaaaaatgcaccttcaatcatttttattgatgagatagattccatagcacctaagagagagaagacccatggagaagttgaaaggcgcattgtttcacagctcttgactcttatggaagggctcaagtctcgtgcacatgttattgttatgggtgcaaaaaccgtcc

SEQ ID NO: 39401 - DNA, 303 bp, Zea mays
gcaggcagaggcagcatagcagcagccagctccatccatcctctttcccctcctcgcttcgcttcctcggcggattcctcctccctcgaccgtccccgtccccgtccccttccggcgcgcaagctcgcacgagatggcaaacgcgagatcgggtgtcgctgtgaatgacgagtgcatgctcaagttcggcgagctgcagtcgaagaggctgcaccgcttcctaactttcaagatggacgacaagttcaaggagatcgttgtggaccaggtcggggatcgcgctaccagctacgaggacttcac

SEQ ID NO: 39402 - DNA, 308 bp, Zea mays
cccggtcccggcgccgccactatgtcgtcgatgatgaacgcgctgtcaaactggctggtgaacccgcgccgcaacccgctcgcgcgcctccacatgcacaccgtctcctcgcgcctcaggaaatacgggctgaggtacgatgacctgtacgacccctacttcgacctggacatcaaggaggcgctcgggaggctgcctagggaggtggtcgacgcccgcatccagcgcctcaagcgcgccatggacctctccatgaagcatcagtacctccccgaggacctccaggcacagcaggtcccattcagagg

SEQ ID NO: 39403 - DNA, 302 bp, Zea mays
tgctcaaatactgatctcactgatccagtatggctatggcaaaggcaggcgcgccgagggtctcggcggcccagctggtgactctcgggctatcactcctctgcgctgtcgccggcccggccgccgcgcagaactgcggctgccagccaaacgtatgctgcagcaagtttggctactgcggcacgaccgacgagtactgcggcgacgggtgccagtcgggcccgtgccgctcgggcggcggcggcagcagtggcggcggtggtgcgaacgtggctagcgtcgtcaccggctccttcttcaac

SEQ ID NO: 39404 - DNA, 295 bp, Zea mays
caagaaggcgagcagctctggcgagaagaacgtgctcatctttgaccttggtggtggcacgtttgatgtgtccctcctcaccatcgaggagggcatcttcgaggtgaaggccaccgcgggtgatactcaccttggaggcgaggatttcgacaatcgaatggtgaacacattcgtccaggagttcaagcgcaagcataagaaggacatcagcggcaactctcgtgcacagcgccggctgcgcacggcgtgcgagctcgccaacgcacgctgtcatcgaccgccagacgacattgag

SEQ ID NO: 39405 - DNA, 304 bp, Zea mays
caagattgcccttgagctcaagaagctgcttgtcgacaacagcctgcttgatgtatcccagagtgatctagaggctaatctgttcaagcttatggaaaaacggggatacggagaggagtatataaatcgctataaaatgatgacaaggttccatcatcaacgggttccactagtaattttggtgtgtggaactgcctgtactggaaaatcaacaatcgctacacaacttgctcagaggctcaatttgcctaatgttttgcagacggacatggtgtatgagctgctgcggacatcaacagatgcg

SEQ ID NO: 39406 - DNA, 202 bp, Zea mays
gaattctagggttttgcagctctccgacaccgagctccgaacgccgcagcatcaggcgcgcaccccctcgcgtgtgaccgagatggcgctgccgaatcaggggaccgttgattaccccagcttcaagctcgtcatcgtcggcgatggtggaacaggtaaaactacatttgtgaagaggcatctcactggagagtttgagaag

SEQ ID NO: 39407 - DNA, 291 bp, Zea mays
tccgcttccaagatgtcgaagcgagggcgtggaggttcggctggtaacaagttccggatgtcactgggtctaccagtggcagctactgtgaactgtgccgataacactggagccaagaacctgtacatcatttctgtgaagggaatcaagggtcgccttaacaggcttccttctgcctgtgttggtgacatagttatggcaaccgtgaagaagggaaagcctgaccttagaaagaaggtgatgccagctgttattgtgaggcagcgcaaccatggcgccgaaaagatggtg

SEQ ID NO: 39408 - DNA, 295 bp, Zea mays
cagctcgagctaagttctagatcgtcgagcagccggagtacaacctcttctccaggcacaaggttgagtctgagtttttgccactttacagcacctatggcatcggattgactacatggagtcctctagcttcaggagtactaactggaaaatataccaaagggaacatacctgctgatagcaggtttgcactagacaattacaagaacctggcaaataggtccctggttgacgacacgcttcgaaaagtgaatgggctaaaacctatcgccgctgaactcggcgtttcgttagc

SEQ ID NO: 39409 - DNA, 295 bp, Zea mays
tgcctcgtgtggccgtcgtctcccgttcggaacgccaagcccccctccggcgaaatggcccccaagcgaggtggcagggcgccggtgccggccaagaagaagacggataaagtgacgaaccctctgtttgagaagaggccgaagcagttcggcatcggcggcgcgttgccgcccaagaaggacctgcaccggttcgtcaagtggcccaaggtcgtgcgtatccagcgccactgccgcatcctcaagcagcgcctcaaggtaccaccggcgctcaaccagttcacccgcacactcg

SEQ ID NO: 39410 - DNA, 263 bp, Zea mays
cggcgagcatcccgatcatgttgttgtcatcaagtacgtgccgtacgtgggagacagtaagacggctatggacgagtacacatcagagatcttcatgggcggcaagagcaccatcgtgctgcacaacacctgcgaggactcggtcctcgccgcgcctatcatccttgatcaggtgctcctggctgagctcagcaccaggatccagctaaaacctgagggaacggacaagttccactcctttcacccggtggcgcacatcctaa

SEQ ID NO: 39411 - DNA, 293 bp, Zea mays
gtagcacagagcagattcaccacttggctcacaataagtcagatatagagaggagagtacatgctatgattgataaatttgcagagcgtggacttagatcacatgctgtagcatatcaggaagtacctgaagggaggaaagaaagtactggaggtccatggcacatcgttggtctcatgccactttttgacccaccaagacatgacagtactgaaacaattagaagggcactcaaccttggtgttaatgttaagatgatcacaggggatcagttggcaatcggaaaggaaaca

SEQ ID NO: 39412 - DNA, 299 bp, Zea mays
gagtttctcaaatttggctgatgtttggactaaggaaatagaagcaaactcaacaaacaaagactgcataaaaatgcttgttggaaacaaagttgacaaggatgatgaaagaatggtcacagaagaagaaggtcttgcttttgctgaagaatctggttgtctgtttcttgagagcagtgcaaaaacacgagaaaatgttgagaaatgttttgaagaacttgcattgaagatccttgaggtccctagtctcctggaggaagggtcttcttcggttgtcaagagcgacatcctgaaacaga

SEQ ID NO: 39413 - DNA, 297 bp, Zea mays
gtggttcgttaggaaaggaaatcgattcccccgcatccgatctcttcggtgctagagaaatataggccgccgcctcctcctcattcggtgaaaggtgggcggttagggttgggagatctcttgactcacgacacgagcagcagaattcgtcgagggccgctggttgctgcgagaggtccgggccttcgtgggatcttgaaaattgaatgttctaatggagtccaagggtggcaagaagaagtctagcagtagtcgttcctccctgatgtacgaagctccccttggctacagcatcga

SEQ ID NO: 39414 - DNA, 287 bp, Zea mays
ggcagtcgccgtcatcgatcgatcgccggaaaactaacccctaacgatgtctggagccggcgaggaggacaagaagcccgcggagggcggcgcccacatcaaccttaaggtcaagggacaggatggcaatgaggtgttctttcgcataaagaggtccacccagctgaagaagctgatgaacgcttattgtgaccgccagtctgtggacatgaatgccattgcgttcctgtttgatggccgcagcttcgcggcgagcagacccctgatgagctggagatggaggacgg

SEQ ID NO: 39415 - DNA, 287 bp, Zea mays
caacactcaccgatagcaagtagcgccgccgacgtttcgagagcagagtatccaagctagccaagcgcgcacatcggtgacctagctagctacctagctagttcaggcgacgatatggcgtctggtcaggagagcaggaaggagctggaccgcaaggatcgcgagggcgagaccgtcgtccccggcgggaccggcggcaagagcgtcgaggcccaggagcacatcgccgaagggcgcagccgcggaggccagactcgcagggagcagctggggcagcaggggtacag

SEQ ID NO: 39416 - DNA, 282 bp, Zea mays
tgtttgcaaagctcctcatcgatccatcgatcactgcaccggccggcggcaccgcgctcgcagtggctagccaacgagactgcagcaattgcggaccgtgaccgcagcggcatctactgcggcgcccactccacctacgggcagcagcagcagcagggaggaggcgggcgcccgattggtgagcaggtgaagtgcatgctccacgacaagtggccgactgcgtcgcaggcgctgacggttgcgacgctgttcccgctgggcgggctgctgctggtgctgtcg

SEQ ID NO: 39417 - DNA, 278 bp, Zea mays
gtcgatctcgagctcccacaagggaagctgtccaggatgggatacaaccgccacaggcgtggccggggatcatcctcatcgtcttcgcgccgcaccaagcaagaagcctcgtgtgatgatgaccttgggacatcacttccaaggcaagaaggcacagaagacgaactcaaaggttcaagaattcagcttgcaatgtgggactttggtcagtgtgatgttaaaagatgcactggtcgtaaactttcaagatttgggcttttgaaggagttgagagtgac

SEQ ID NO: 39418 - DNA, 286 bp, Zea mays
gtggcggcaagaggtggctgctgctgctgccgctgtcgcggtgggttctcctcctcggcagcctccagctcccggcggccggctgccacgtcgtcacgcgcatgcgcgggttcgacgggccacttccgttctaactcgaaaccgggtacgtggacgtggacgagcagcaaggtgtgcagctcttctactacttcgtgagctcggagcgcgacccctacgaggacccgctgctgctgtggctgtccggcggcccaggatgctccggcatctccggccttgcctacga

SEQ ID NO: 39419 - DNA, 287 bp, Zea mays
aatttactcagaaaatccagtgaagagaaacaactgccagggttcagggtcctgaattggcacttctttttcacggcaatgctgtacacttatgggcgctttcttagtcgtcagctggtgaatacagtgacttcagatcacttgctttataaggtcgtcagtggcctaattaagtatcagatgtttatctgctatttcctttatattgcagggtttgtatggtttattttgactctcaagaaaaagacataccagtatcagttcaaacagtatgcctggacacacat

SEQ ID NO: 39420 - DNA, 291 bp, Zea mays
aagggggcctcctatgaggatatcaagaaagctattaaggctgcttccgagggtccactcaagggtatcatgggttatgtggaagaggatctggtttctaccgacttccttggtgacagcaggtcgagcatcttcgacgccaaggccgggatcgctctgaacgaccacttcgtcaagctcgtctcgtggtacgacaacgagtggggctacagcaaccgcgtcgtcgacctgatccgccacatgttcaagacccagtaggggtttttcccccctgcttctcatggatggttg

SEQ ID NO: 39421 - DNA, 255 bp, Zea mays
cttctcctcgcctcgccttggtgttcacaccgtcgctagcgcctgcagcggcgaacttctgtcctccccggcgccgggctcgggtcgtcgtcggccaggaagatggctggcggcttcagggtactgcatctggtcaggccctttctggctttcttgccagaggtgcagagcgccgataggaagataccgttcagagaaaaagttatatacactgttatttccctcttcattttcctggtctgcagccagctccca

SEQ ID NO: 39422 - DNA, 309 bp, Zea mays
gtgccctacaaccccggctaccaggacgagtcggtgctgtggacggagagccgcgacgtcggccacggcttccgctgcgtccgcatggtcaacaacatctacctcaacttcgacgccttccacggcgacaaggaccacggcggcgtgcgcgacggcaccaacatcgtgctctggaagtagtgcgagggcgacaaccagcgctggaagatcgtcccctggtaaatgtgctgttctgtggctgcactggtcatcaccatgatctggagctttgaaggcatagccacctgtggtcagcagctgctgccgtgt

SEQ ID NO: 39423 - DNA, 313 bp, Zea mays
tgcacagcaccgcatcgaccaggcgcaggggtcttgagagaagaaccacactcgagcggaccgcgcgcgcgacctccttgaaccactgccggcgcggcggcatatggcccttaaaggcggtggctgctgctacgtacgctgccgtagagtctcggtcgccgcgatagctctagctagtcgtttatgtgttgtgctttgtgtgtgcatgcttgtgtctgggggcatgcagtgcagtgcagtactatatgctgtatgcgtctctctttgatcggagaggcggatgtacagcatgctcgatatgtctagtttggat

SEQ ID NO: 39424 - DNA, 311 bp, Zea mays
gtcagcctagcaattagctcatcgactccagattggagaactcgacaccatgaaggtgctgatcgttgcccttgctctcctggcgctcgctgcgagcgccgcctccagtacaagcggcggctgtggctgccagacaccaccgtttcatctaccgcctccgttctatatgccgcctccgttctatctgccgccgcagcagcagccgcagccatggcactaccccactcaaccaccgcagctaagcccgtgccagcagttcggatcctgcggcgtcggcagcgtcggcagcccgttcctgggccagtgcgtcg

SEQ ID NO: 39425 - DNA, 240 bp, Zea mays
gtcgagcttcagcaagagcatccagagagcagcatacaagacctcgagcgaccgtctggagaggctgttcgggaggcatgggcaggacaaggggatcatcgtgcgcgccacggaggagcagacccgcgagcagcggcgccacgcctcggagggcggccacggcccgcactggcccctgccgccgttcggcgagtcgcgcggcccctacagcctcctggaccagcggcccagcatcgccaa

SEQ ID NO: 39426 - DNA, 304 bp, Zea mays
tacggtttcatgttgctggtcttcgtcatccttctaatagtcaccatctgcgtcaccattgtgggtacttatttcttgctgaacgccgagaactatcactggcaatggacgtcgttttcctctgcggcgtcaaccgctttgtatgtgtatctgtactccatctactactaccatgtgaagacaaagatgtcaggcttcttccagacaagtttctactttggttacacactgatgttctgccttggtctaggcatactttgtggtgctattgggtatctagggtcaaccctttttgtaaggagaa

SEQ ID NO: 39427 - DNA, 307 bp, Zea mays
gagggagagattggagggaggcccctgcccaaggcaagagaaaccgcggcgcgcggagtgggaggaagggcagacgcagacgcagacgggcgaacaagatgagggagatcatcagcatccacatcggccaggccgggatccaggtcggcaacgcctgctgggagctctactgcctcgagcacggcatcgagcacgatggcaccatgcccagtgattcctcggttggcgtcgcacatgatgccttcaacacgttcttcagcgagactggttccggcaagcatgtgcccagggccatcttcgtcgacct

SEQ ID NO: 39428 - DNA, 205 bp, Zea mays
ccgccgccgaaacagcacatcgctctctcgatctcagccatggcggaggtggagcagcaccaggacgcggtgaagctcttcaaccgctggaccatcgacgatgtccaggtgaacgatatctcgctgaacgactaccaggctgtgacagcggcgaacacgcgacattcctgccgcacaccgcggggcgctacaccaagaagcggtt

SEQ ID NO: 39429 - DNA, 293 bp, Zea mays
agagtatcgaagctgtcaggatgtccaagcgcgccggatggggagtgatggcaagccacaggagtagcgagacagaggacaccttcattgctgacctctcagttggcctgtctacaggccaaatcaagacgggagccccttgccggtctgagcgcctggccaaatacaaccagctgctcaggatcgaggaagagctcggtgatgccgcggtctacaccggagcaaagttcagggcaccagtggagccctactaagaaaggaagaggatgaggatgttttcttgtggagctata

SEQ ID NO: 39430 - DNA, 235 bp, Zea mays
cgacgagcgtgcagtgttcttgctgccacactgtgaacctggctatggaagcaaatcaagtcgcgcatgtgaactgcgggaactgccgcatgctgctcatgtaccagtacggggctcggtccgtgaagtgcgcggtctgcagttttgtgacatcggttggaacctcacctggtgcagagcagaagcccagcagctgagctgatagtgtccctgaaagtgctgtgagaccacctat

SEQ ID NO: 39431 - DNA, 321 bp, Zea mays
agccgccagacactccgtagtctgtaccccaagcaccggcgcggcggcggcggctaccatggcagtcgggaagaacaagaggatctccaatggaaagaacggtggtaagaaaaagaccgtcgatcccttctctaagaaggactggtatgacatcaaggccccatcggtcttcagtgtgcgcaacattgggaagactctcgtgtccaggacacagggtaccaggattgcctctgatggtctgaagcacagagtctttgaggtttgtctagctgatcttcagggtgacgaggatcaggcttacaggaaaatcaggctccgtgc

SEQ ID NO: 39432 - DNA, 315 bp, Zea mays
gtgagatccgtcccggccaggatgtgactgttactaccgacaatgggaaatctttcacttgcatcgttcgctttgacactgaggtggagctggcgtacttcaaccatggaggcatcctcccttatgtcatccgcaacttggcagctgcgcataactgaggcaagatcacacaccgtttgacccacaatggcagtggcaggctccatgttcccagggctagcgacctggttctcaatgtagtgacatttgtgatggatctaggggtctctttgtcgattcagcccataaataaagtgtgaaataaaagccgcagtg

SEQ ID NO: 39433 - DNA, 300 bp, Zea mays
ggcttctcctccccctccggttcgggttcgggttcgtgaggttctccggggttcggtttcgtgggtgagcggatcgagatggcggcgtcggatgttgagtaccgctgcttcgtcggcggcctcgcctgggccacggacgaccacaccctccacaacgccttcagcacctacggcgaggtcctcgagtccaaggtccgttcccgtcccagatccgtccatggcttcgtccagatctgacctgtcctgacacaccctcgcccggatctgtccctccttcccttctcccctgcagatcatcct

SEQ ID NO: 39434 - DNA, 297 bp, Zea mays
gactgaccatcagccaattaaggagtctgctctggggaacatccccaccattgccttctgtgatactgactctcccatgcggtatgtcgatatcggcatcccagcgaacaacaaggggaggaacagcattggatgcctgttctggcttttggccaggatggttctgcagatgaggggcactatcctccctgggcacaagtgggaggtcatggtggatttgttcttctacagggacccagaggaagcaaaggagcaggaggaggaagctgctgttgcccctgagtttgccgcaatcac

SEQ ID NO: 39435 - DNA, 303 bp, Zea mays
gttcagttcatccgtgttcttgtttgcgaggtcgagagagactgagagaggatgtcgtgctgcggaggcaactgcgggtgcggctccggctgcaagtgcggcaacggctgcggagggtgcagcaagatgtacccggacatggccgagcaggtgaccaccaccaccacccaggctctcatcatgggtgtcgcaccatccaaggggcacgccgagggcgggttcgaggcggccgccggagctgagaacggcgggtgcaagtgcggcggcaactgccagtgcgacccctgcaactgcggcaagtga

SEQ ID NO: 39436 - DNA, 299 bp, Zea mays
tgacgctcatcccacatcagtagtcgaccaagcacaagcagcagagccggccggaatatgtggacgatcaggaaggtggcgacgccgcaggtggccgtcctcctgctgctcctcatcgtcgttgcgcaggaggcggcgccgttggcggaggcgcgcgtgtgccggcgccggagcgcgggcttcaacggggtctgcatgtccgaccacaactgcgcgcaggtgtgcttgcaggagggctacggcggcggcaactgcgacggcatcatgcgccagtgcaagtgcatcagggagtgctagct

SEQ ID NO: 39437 - DNA, 293 bp, Zea mays
agaaggtcacaattacaagcaaaagagatcctgcagagattccatggggtaactttggggctgaatatgttgttgaatcttctggtgtcttcacgacgactgataaagcatcagcacacttaaagggtggtgcaaagaaagtggtgatatctgcaccatcagctgatgctcccatgtttggaattggaagtaaatgagaatacctatgatcccaaagatgaatgttgtttctaatgcaagttgcactaccaactgccttgctccacttgccaaggttgtccatgaggaatttg

SEQ ID NO: 39438 - DNA, 296 bp, Zea mays
gaagcgcctccctcgatccagatccaggagatatgcctcgcaatgatgatcgctatgggaatacacgcttgtatgttggaagattgtctccccgcacccgttctcgtgacctagaataccttttcagcaaatatgggagaattcgagaagtggagttgaagcgtgactatgcattcattgaattcagtgacccccgtgatgctgatgatgcacagtacaacctagatggcagggacgtcgatggaagccgcattattgttgaatttgctaaaggggttcctcgtggttctggtggt

SEQ ID NO: 39439 - DNA, 296 bp, Zea mays
gtgagccaccggaagcggagacgtgagtagtcgaccaaccccgtcgatccggctgcggcgcggcgtgctagatcgctaccgaccatggtggtggaggagatcgccgagggggtgaagaacctcaccgttaccggagatgcggcggcttcaggcggagaggggcagaggaggggcggcggcggcagcagcaaccgcatccaggtgtccaacaccaagaagcccctcttcttctacgtcaacctcgccaagaggtatatgcaacagcacgacgatgtagagctatccgctcttgggat

SEQ ID NO: 39440 - DNA, 206 bp, Zea mays
gttcgggttcgggttcgtgaggttctccggggttcggtttcgtgggtgagcggatcgagatggcggcgtcggatgttgagtaccgctgcttcgtcggcggcctcgcctgggccacggacgaccacaccctccacaacgccttcagcacctacggcgaggtcctcgagtccaagatcatcctcgatcgggagacgcagaggtcccgc

SEQ ID NO: 39441 - DNA, 298 bp, Zea mays
gaagctcaaatactgatctcactgatccagtatggctatggcaaaggcaggcgcgccgagggtctcggcggcccagctggtgactctcgggctatcactcctctgcgctgtcgccggcccggccgccgcgcagaactgcggctgccagccaaacgtatgctgcagcaagtttggctactgacgcgcacgaccgacgagtactgcggcgacgggtgccagtcgggcccgtgccgctcgggcggcggcggcagcagtggcggcggtggtgcgaacgtggctagcgtcgtcaccggctcct

SEQ ID NO: 39442 - DNA, 290 bp, Zea mays
gtaaaatcttgatgacgtgtagatctgatctactatctactgagaggaacggggaaacacacctttattgttgttgctatcttcataccgtcgccctgcagagaagcagcaggcatcgggatccgagccgctgtaggttgtcgcgtttctaaacactccgacgtctaggcgatggggcctctgaggactagggttttggggcgaggtactagcgttagtttttcctgcgaccccttagtcctatatatagcgtcgtgtgtctgggggctccaaccgaggttagtgtgggc

SEQ ID NO: 39443 - DNA, 290 bp, Zea mays
cgagaggcggtcatacaccatcaagcaaggccacgtcttcgtggcgccggccggggcggtcaccgacctggccaacaccgacggccggaagaaacaggtcatcgccaagatcctccataccatctccgtgcctggcgagttccagttcttcttcggccccggcgggaggaacccggaatcgttcctgtcgagcttcagcaagagcatccagagagctgcatacaagacctcgagcgaccgtctggagaggctgttcgggaggcatgggcaggacaaggggatcatcgtgc

SEQ ID NO: 39444 - DNA, 291 bp, Zea mays
  unsure (1)..(291): unsure at all n locations
cagacaccaccgccacctccancctcgaatcgttccccaccatggcgtcgcagggatcctccgtcttcgccgcactcgagcaggccccggaggaccccatcctcggagtgaccgttgcctacaacaaggatcccagccccgtgaaggtcaacctcggggtcggcgcctaccggaccgaggaagggaagcccctagtgctgaacgtagtcaggcgcgccgagcaaatgttgatcaataatccgtcacgtgtcaaggagtacctaccaatcaccggtctggctgaattcaata

SEQ ID NO: 39445 - DNA, 295 bp, Zea mays
gggagttgtagtgagttttaagaatggcgagtgcacaggcagtggggcaaggagaacgaggccacttcgttctgaagagcggacacaccattccggccgttggtctaggcacttggagggccggctcagataccgctcactctgttcggaccgccatcgccgaggctggatataggcacgtggacacagctgcccaatacggagtagagaaagaggtcggtagaggacttaaagctgcgatggagggcgggatcaacaggaaagatttgtttgtgacgtcgaagctatggtgcac

SEQ ID NO: 39446 - DNA, 318 bp, Zea mays
tcttcttcggccccggcgggaggaacccggaatcgttcctgtcgagcttcagcaagagcatccagagagctgcatacaagacctcgagcgaccgtctggagaggctgttcgggaggcatgggcaggacaaggggatcatcgtgcgcgccacggaggagcagacccgcgagctgcggcgccacgcctcggagggcggccacggcccgcactggcccctgccgccgttcggcgagtcgcgcggcccctacagcctcctggaccagcggcccagcatcgccaaccagcacgggcagctctacgaggccgacgcgcgcagtt

SEQ ID NO: 39447 - DNA, 261 bp, Zea mays
gttagcagcaatgctaatgttgcatgtactttcaaatttgttgtcgaagcggtggctctcttcaagtcctacttcggtggagcttttgatgaagacgctatcaggaataactttgttttgatatatgaacttcttgatgagatcatggattttggttatcctcaaaacctgtcacctgaaattttgaagttgtatataactcaagaaggtgttcggtcaccattttcctcaaagccctcagagaagcctgttccaaatgcg

SEQ ID NO: 39448 - DNA, 316 bp, Zea mays
ctccgcgccgctcgcgccgccctcatcttcccagccccaacgcgacgcaccacgaagggccctcgccatgtcgaagaaagtaggacgagcgaagaaagcagcgggcggcggcgagctgtcccgcttcctggagtcgcatctccagaccattagcgacaccttccagatgatggcggagtcggctccgggggccttggagcggacggagtggtctgaggtcgttaagctcggcgaccaggtctccaggcaggccaccgtcgctggaatgctctggagcggtgacttgcctgatgtagagaccctcaaaagagacatc

SEQ ID NO: 39449 - DNA, 212 bp, Zea mays
gttgcatgtagagcacagtcacagaggaatgatgaccctaaaacagcatccaggccttgggacaaggatcgtgatggttttgtcataggtgaaggagctggagtcctggtcatggagagcctagagcatgcaattaaacgtgatgcaccaataattgcggagtatttaggaggtgctgtgaacagtgatgcttaccatatgactgacccgag

SEQ ID NO: 39450 - DNA, 245 bp, Zea mays
ctgagattgacggcggggcagcgcgcgggcccttcccttcggagcactcagcgtgagagatggggaggcagccgcccaaagacaaggttggcgtgaagaagggcccgtggacggcggaggaggaccagaagctcgtcggcttcctcctcacccacggtcacagctgctggcgcgtcgtccccaagctcgcagggttgctgaggtgcgggaagagctgcaagctgcggtggaccaactaactgagg

SEQ ID NO: 39451 - DNA, 305 bp, Zea mays
gtgctgggaactttacagcctcgagcacggcatccagcctgatggccaagtgcctggagataagaccgcgggacatcacgatgatgccttcagcaccttcttcagccagactggtgctgggaagcacgttccccgtgcaatcttcgttgatctagaacccactgtgatcgatgaggtgcgcacaggcacgtaccgccagctcttccaccctgagcagctcatcagtggcaaggaggatgcagctaacaatttcgcccgtgagcattacacaattggcaaggagattgttgatctgtgccttgacc

SEQ ID NO: 39452 - DNA, 149 bp, Zea mays
cccagacaacactcaccgatagcaagtagcgccgccgacgtttcgagagcagagtatccaagctagccaagcgcgcacgtcggtgacctagctagctacctagctagttcaggcgacgatatggcgtctggtcaggagagcagcaagga

SEQ ID NO: 39453 - DNA, 302 bp, Zea mays
gccttctgcgcctccatttcggcctctgtccctcgcaagttcaatctcacctccaaccatgggtaaagacaagtcccacatcaacattgtggttattggtcatgtcgactctggcaagtcgaccaccacaggacaccttatctacaagcttggaggcattgacaagcgtgtgatcgagaggttcgagaaggaggctgctgaaatgaacaagcggtccttcaagtacgcgtgggtgctcgacaagctcaaggctgagcgtgagagatgtatcaccattgatatcgctctgtggaagtttgaga

SEQ ID NO: 39454 - DNA, 301 bp, Zea mays
gaggcagtacgtgcgcagcagcctgcagggcaagaacaggcgaccaagaagatgagcacgctggacacgcggacgctcaaggacgagctgacgagcatggacaggaagtaactcgtggaccttggccacccgctgctcaaccgcgtcgccgacagcttcatccgcgccgccggggtcggggcggccaggaccgtctccagggaggcctacgtcgtcaccgtcgaagggctttcaggagactcgtccgggctggacgacgacgagcgcaagcgtgaccatttctccagcatcagaggtgacg

SEQ ID NO: 39455 - DNA, 296 bp, Zea mays
agcagaagcaagaaggatagagcaaggccacacacacacacacaccactaggctacgttagccttttaatcgtcgtcgagaagcaagaagggcgcgcacgcaagcaggcaagcaagaagagagccgatcgaccgagagctagcacgcgatggcgaggtcttccaagatgatggtggcgagagcacagctggccttggcccaggccgtgtcgaccgccgaggcgaggaacatcaagaccacgacgacggagaagaaggacgacgcggtggtgcagccgcagaccatcccgcccttcg

SEQ ID NO: 39456 - DNA, 303 bp, Zea mays
ggcgccgcttctccaacatcgtctgcaagaaggccgacatcgacatgaacaagagggccggcgagctgacgcctgatgagctggagcgcctgatgacggtcgtggccaaccctaggcagttcaaggtgccggactggttcctcaacaggaagaaggattacaaggacggcaggttctcgcaggtcgtctccaacgcccttgatatgaagctcagggacgaccttgagaggctcaagaagatcaggaaccaccgtggtctgcgtcactactggggcctccgcgtccgtgagcagcacaccaaga

SEQ ID NO: 39457 - DNA, 234 bp, Zea mays
  unsure (1)..(234): unsure at all n locations
cacacncaaatttgtagccttgaagcggcggccggcgggagagagcagctctagagagaacagagagcgcataactagcggcggcggcgatgaggatagaggaggtgcaatcgacctcgaagaagcagcgcatcgccacccacactcacatcaagggcctcggcctcgacgccaatggaatgtcgatgccgttggcggcggggttcgtgggccaggcggcggcgcgcgaagcgg

SEQ ID NO: 39458 - DNA, 311 bp, Zea mays
acccgacgtaccgcgagccggcgatggcgacggtggcgatggacatctcgaagcccacgccggcagcgtcaggtgacgaggcagcagcggcggcgaatgggaggagcggcggcgggggcgaggggctgcggcagtactacctgcagcacatccatgacctgcagctccagatccggcagaagacccataacctcaaccgcctcgaggcccagcgcaacgacctcaactcccgagttagaatgctcagggaagagttgcagttgcttcaagagcctggctcatatgttggtgaggtggtgaaagtcatgggg

SEQ ID NO: 39459 - DNA, 310 bp, Zea mays
cagaaaggttatagcttgggatcaggcatttctctgttcattgctaccaatatatgcgagaatatcatctggaaggcatttagccccacaaccatcaacagtggtcgtggtgctgaatttgaaggagctgtcattgcactgtttcatctgttgattacgagaaccgataaattccgtgctctctcgaaggcttccaaccgccagaaccttccaaatgtgaccaatttgcttgccacagtctaggtcttcctcatagttatctatttccaaggcttccgtgttgtgcttccagtgagatcaaagaatgctc

SEQ ID NO: 39460 - DNA, 196 bp, Zea mays
acttaaagtttctctggaagatctttacaatagcacctcaaagaagctctctctttcgcgcaatgtcatctgctccaagtgcaagggcaagggctcgaagtctggtgcctcaatgaggtgccctggttgccaggggtcaggcatgaaagtcactattcgtcagctgggcccttccatgatacagcagatgcagcag

SEQ ID NO: 39461 - DNA, 228 bp, Zea mays
tgtgaatatactttgctaggggaataagtcataagtctgtctccctcgagtgtgtgttacgtatgtcctggtgttcgtcgtgtgtgtgcatcgccgctccagttgaattccggtgtgtgttcatcgccgctccaggtcggagatgtgaatatactttgctaggggaataagtcataagtctgtctggaagggtaaagtttgagctttgctagtgtagctgggcactct

SEQ ID NO: 39462 - DNA, 222 bp, Zea mays
acacctttaggaccaagttcatccttgggttctcagttttcataggcctttctgttcctcaatacatcaatgagtacacatctattgctggttatagtcctgttcacacacattcaagatggttcaacgatatagtgaatgtgatattctcgtccaaggcgtttgtagctggcttcgtggcatatttgctggacaacactattgacaggcatgaagcttcag

SEQ ID NO: 39463 - DNA, 309 bp, Zea mays
atgggacgctgggtgatatatgggagactgtatcaaacagtgatcttgttttgctactgatatctgattctgctcaggctgataactacgagaaaattttctcgcacatgaaaccaaacagtattcttggtttgtcacatggatttctccttggacatttgcaatctctgggttttgatttccctaaaagcatcagtgtgattgctgtatgccccaagggaatgggcccatcagtcagaagactttatgttcagggcaaagagatcaatggtgctggtatcaatgctagctttgctgttcaccaggatg

SEQ ID NO: 39464 - DNA, 304 bp, Zea mays
tgcggattggacagctgaagcactagcggaacaggtaaccccggagcatattgagaaaggcctgatctacccgcccttctccatcatcaggaagatttcagctaacatagctgcccatgtcgccgcaaaagcttatgatctcggtattttttattttttatttttttgggggtacatttttactagaaatcttatgtaagtcagtacattttttggtgcaggaattgctacccagctccctcggccaaaagacctggtgaagtacgctgagagctgcatgtacagccccgtctaccgatcgtac

SEQ ID NO: 39465 - DNA, 262 bp, Zea mays
ggagcggctcaaggccgtgctcaaggaggtggaagacgccgaggggaaggtcattctcttcatcgacgagatacacctcgtcctgggcgcgggcaggacggagggttccatggacgcggccaacctgttcaagccaatgctggcgaggggacagctcaggtgcatcggcgccaccacgctggaggagtaccgccagtacgtggagaaggacgcagcgttcgagccgcggttccagcaggtgttcgtcgcggaccgagcgtac

SEQ ID NO: 39466 - DNA, 327 bp, Zea mays
tcgcgacgactccgccaccgccgccgctctacacgagacgcccaggtcttcgccaacgacgagcatccgggttagagaggaagaaattgcaaccgaaacaatggcggcagattccggcgctcgcagacaaccaagcttcaccaaggtcgaccagctgcgccctggaacccacggccacaacctcatcctcaaggttgttgacaccaagatggtcgtccagagaggccgcgagggagggccccagggaagacagatgaggattgcggagtgcttggttggtgatgaaaccggcatcattgtcttcactgcaagaaacgatcaagtgga

SEQ ID NO: 39467 - DNA, 322 bp, Zea mays
gacggatcgctataggcttcttcctgatacaagggaaaggatagtagcaacagaagtaacagcttggtggaggtatccctttgaacatgtttcgcagctcccatcgaagaagccattctgcttcacgcagagataccaggacgtaaagaaagtccttgcagagacgttctttggtcctccggatgttggtgtgtatagtccatccgtacaaaatacgctatacctcatggccaaggaagtccttacaaggttcccagatatagcgtcagtccagcttagaatgccgaacctgtcatttctgcctgtcaacttggggagcaaa

SEQ ID NO: 39468 - DNA, 257 bp, Zea mays
aaaattccctggtaaggggatatccaatttatttcccaacgtatgccaatcggccagacagcgcttttcctccaactgtgttgatctgtgctggatttcactactcgtgtggaagctctacatgtgcaaggttcgtcttgtaactgagaaagatacaagtaaacctagaggatatgcattcattgagtatgtgcacacacgagacatgaaaaatgcctacaagcaagcagatgggagaaaagtggacaacaggaggg

SEQ ID NO: 39469 - DNA, 243 bp, Zea mays
cccggccacctcccgcgccgccgccactcagcgccgcgcttgcgtttccatctcaccgcttccaagatgtcgaagcgagggcgtggaggttcggctggtaacaagttccggatgtcacagggtctaccagtggcagctactgtgaactgtgccgataacactggagccaagaacctgtacatcatttctgtgaagggaatcaagggtcgccttaacaggcttccttctgcctgtgttggtgac

SEQ ID NO: 39470 - DNA, 309 bp, Zea mays
ggcaaccaaaccttctccgatggccgcgcccgtgtcgcagccgccggtgtccgccagggcgtccacacggtttctcccccgcgggataggcgcgctcccggagtccgctcccacgtccctccggttatccgtcggccgccgtcgccgggccgccagcctagaggtgaaggcatcgggaaatgtgttcgggaactacttccaggttgcaacctatggcgaatcccatggagggggtgttggttgcgttatcagtggctgcccacccagaattcctctcactgaggcagacatgcaagtagaactcgatag

SEQ ID NO: 39471 - DNA, 315 bp, Zea mays
acgaggtgcccgccgcgcccagccggcctcgccgaccgggcccgccggcccctatataggcaggcgccacttcctcctcgcaaccaccagacgccagtccaccaccgcttcccgtgcagcgccctccctatacgttcccccatttcctgtgttggcggcgaaggcgcggcacttcgtgctcaacaccggcgccaagatcccctccgtggggctcggcacctggcagtctgaccccggcgtcgttggcaacgctgtctacggcgccgtcaaggcgggttaccgacatatcgattgtgccagagtttacggcaacga

SEQ ID NO: 39472 - DNA, 308 bp, Zea mays
agctactagcgcgagtcccactgtgccgcagctgcctgctcgccattaccgcaagctgtgttcaatcaaagcttaattaggctccctctacatctgatccagctaagtagctagccagcactacagaagggcgtggcaagaatcaggagagagatagcaggggggctagctagctgagctcgtgcgacgaagaatggccggaattggcaggaacatggtggcgccgctcctggtgctcaacctcatcatgtacatcatcgtcatcggcttcgcgagctggaacctgaaccactatcatcacaggcaga

SEQ ID NO: 39473 - DNA, 260 bp, Zea mays
  unsure (1)..(260): unsure at all n locations
caaacgcgtcgcatccgctccacaggatcctctgcgncaccgcaaccgtgtgaccgcccgtcccgccggcgatcccgatccgccgacccgtcccagccccgctcgcagccatgtcgccgtcggagccgacgcgggaggagagcgtgtacatggccaagcttgcggagcaggcggagcggtacgaggagatggtcgagttcatggagcgcgtcgcgcgctacgccgggggcgccggcggcggggacgagctctcggtggag

SEQ ID NO: 39474 - DNA, 312 bp, Zea mays
  unsure (1)..(312): unsure at all n locations
ccgcttaatccagaccccttcagaggtgcttttggttctgacggggagaaatacgccagagatgttcaggaaatcatcgaatttggaactacagggagagttggtgggttcatttcggaagccatacaggtattccaatatcaaagcgtcggttaggcatctccatcactcttaaacaaaaaccaaatttctcccctgaacatgcgctgttcttttccgaagcgggttggtggaatagtggaagtggcaccaggatacttgcccgtggcatacagtatggtaagganagctggtgggctctgcatcgccgac

SEQ ID NO: 39475 - DNA, 250 bp, Zea mays
caagaaagctttgagaacactctagcaaagggttatgaaaaatttaagaaagctgcagacgctgttaaggataatggtggaactatacttagtggacaggatgcatttattctttgggacacttatggttatccaattgatttgactgacgtcatggcaatcgactataggctaactgttgataagaaggggtttaatgcttctatggaagaagcgaggcaaaaagctagaaatgctcgtaacaagtctg

SEQ ID NO: 39476 - DNA, 287 bp, Zea mays
gcgccatgaaagtcccggtgcttctcctcctggtctccctgtgcttctcgctcgcgctcgcgtcgcaaacggacacggaatcgggctcacgcaggccgtaccactaccgcgaggagagtttccggcactggacgcgctcccggcagggccggttcagggtgctggaacggttcacccacgagctgctggaggacgccgtcggcaactaccgcgtcgccgagctggaagccgcgccgcgcacgttcctgcagcccaggcactacgacgccgacgaggtgatgttcgtg

SEQ ID NO: 39477 - DNA, 291 bp, Zea mays
gcactattggtgtctgccacagagatattaagccacaaaaccttctggtgaacccacacacccaccagcttaaactatgtgactttggcagtagcaaagttctggtcaagggggaaccaaacatatcgtacatctgctcccgatactatagggctccagagctcatatttggtgccactgagtataccacagcgattgacatttggtctgctggatgtgttcttgctgagcttatactcgggcagcctttgtttccgggtgaaagtcgtgtggaccacttgttgaaatcat

SEQ ID NO: 39478 - DNA, 296 bp, Zea mays
  unsure (1)..(296): unsure at all n locations
cgcccgtcaaatttgccatacctgtctcggttccctcttcccggcgcaccagcctacctcgccgacgccaggccgccaggcgccggagacatgaaccagcccgtgcagaagaacaccctctacgtcggtgggctggcggaggaggtggacgagaaaatcctgcacgccgcgttcgtgcccttcggtgaggtcaaggacgtcaagacgccgctcgaccagtccacgcagaagcaccgctccttcggtttcgtcnacttcctggagcgcgaggacgacgccgctgccatggacaacat

SEQ ID NO: 39479 - DNA, 198 bp, Zea mays
caagaaagctttgagaacactctagcaaagggttatgaaaaatttaagaaagctgcagacgctgttaaggataatggtggaactatacttagtggacaggatgcatttattctttgggacacttatggttatccaattgatttgactgacgtcatggcaatcgactattggctaactgttgataagaaggggtttaat

SEQ ID NO: 39480 - DNA, 300 bp, Zea mays
ccacaagttctcctatgaaaattacaagggatcaactccaacactgtacatttggaatgatatgaatgagccatccgtcttcaatagccccgaggtcaccatgcccagggatgcaatgcattatggagatgttgaacaccgagaattgcataatgcatataggtactcatttcatatggctaccgcagatggacttctcaagcgaggcgaggggaaagatagaccctttgttttgtcaagggccttctttgctggaagtcaacggtatggtgcagtctggacaggcgacaacttcgcaga

SEQ ID NO: 39481 - DNA, 159 bp, Zea mays
gttgctcagcttccttcttctgcatacctatcgcctgcagcttctatctttcatggttggtgctcctgctcttttgctcctccgccagcttcatggtggacgacatgcccatcagggacttccgcaaccaggagagcaaggaggtggcgttccccaaga

SEQ ID NO: 39482 - DNA, 135 bp, Zea mays
cgcatcatggtggacgtctggtggggcatcgccgaggccgacgggcccgggcagtacaacttcaacgggtacatggagctcatggagattgccaggaagaccgggctcaaggtccaggccgtcatgtccttccac

SEQ ID NO: 39483 - DNA, 152 bp, Zea mays
cgatggtgagcggcagaattgttgtcctcctcgccactctcctatgcgctgccgccgcagtcgcgtcgtcctgggaggacgacaaccaccaccaccacgggggccacaagtccgggcaatgcgtgcggcggtgcgaggaccggccctggcac

SEQ ID NO: 39484 - DNA, 266 bp, Zea mays
  unsure (1)..(266): unsure at all n locations
caatctcggcgtcaccggcccaaatctagcaaacggaaatcccatctcgccgccgccgcgatgtctcgccgctatgacagtcgcacgacgatcttctcgccggaggggcgtctctaccaggtggagtacgcgatggaggcgatcggcaacgccgngtcagccctcgggatcctggcggccgacggcgtagtcctggtcggcgagaagaaggtgacctccaagctcctccagacctcccgctccgccgagaagatgtacaagatcga

SEQ ID NO: 39485 - DNA, 190 bp, Zea mays
gcgaaaaccctagcagctccgtagtccctctcctctggaggtattcgcagtcgaccgtgtcctcggagcacgatgaaggttgttgctgcctacctgcttgctgtcctcgctgggaatgccagcccctccgctgaggatttgactggcattctggagtcagttggctgtgaagttgacaatgaaaggatgg

SEQ ID NO: 39486 - DNA, 235 bp, Zea mays
tgaagcggaaaaggctggatttgagatcctgaaatctactatggtagagaagctccccaatgatctggaaggaatggagtcatcgatggggaagctttacattcttatcgatgagatctacaaatacgtcgatgatgttgtggaaggacgcgtggcacccgacaacagaattggaaggttcatctctgattcttttgcttcggtgccgaaattgtccccggctgctttcgataag

SEQ ID NO: 39487 - DNA, 310 bp, Zea mays
cgatgcacaagcgccgagccaccggtggaaagcagaaggcctggaggaagaagcgaaagtatgagcatgatcgccagccagccaacaccaagttgtcaagcaataagacggtgaggagggtccgtgttcggggaggtaatgtgaaatggagggctcttcgccttgatactggtaactactcatggggaagtgaagctgttacccgcaagacccgtatcctcgacgtggtctacaatgcatcaaacaatgagttgtgaggacacaaaccttgtgaagatgccattgtgcaagtgatgctgccccattcaag

SEQ ID NO: 39488 - DNA, 309 bp, Zea mays
acacgatggtgagcgccagaattgttgtcctcctcgccaccctcctatgcgctgccgccgcagtcgcgtcgtcctgggaggacgacaaccaccaccaccacgggggccacaagtccgggcaatgcgtgcggcggtgcgaggaccggccctggcaccagcgcccccggtgcctggagcagtgcagggaggaggagcgggagaagcggcaagagcggagcaggcacgatgccgacgaccgcagcggcgagggctcgtcggaggatgagcgagagcaggagaaggagaagccagaagaccggcggccgtacg

SEQ ID NO: 39489 - DNA, 269 bp, Zea mays
  unsure (1)..(269): unsure at all n locations
ggactgttcatattttctccctgagagtcagagttgctggagtggattcaagcaatgagcaacgcactcttgaaggtacacggatggatcaccagaactcttccagttctattgatcctcttattcaagcgaacactggatccaacgctagttcatcactgtcttttatgagagggatcctgccgaagtatttcagttcagagtggtcatttgctcagttccatttaccagaagtcaatcgntacataggtagcctttggtgcccagaa

SEQ ID NO: 39490 - DNA, 233 bp, Zea mays
acctaatcaggacaatcaacatgaggcatcatctcagaagacggcttataataagcatggaaaaagcatggattcttgtgttgaagtagtcgaggttgagtcagctctacgacataaagcaaaattggaaaggcaccaacgcacagctgagcgagcggcgaaagccttgctgaaaagaatatgcgggatatgctggtgcagagggagcatgctgagaaacatagaccggctga

SEQ ID NO: 39491 - DNA, 300 bp, Zea mays
aagcaatgtttactttgcaaagacactggatgaaaggctcataatcaaacaagtcacgagaacagagctggagtcttttgtagagtttgctcctcagtacttcaagtatttaatggaatccttggcttctggtagcccaacctgcctggccaaaatagtagggttatatcaggttggcgtcaagagcttgaaaactgggaaggaagtgaggatggatctgatggtgatggaaaatgttttctttgaaaggaagatatctcgggtgtatgacctaaagggttcattgcgctcacgctacac

SEQ ID NO: 39492 - DNA, 102 bp, Zea mays
gcgcctgagacgggcgtccttcgtcaccacgtggatggagcccgagtgcgacaagctcatcatggacgccatcaacaagaacgacgtcgacatggacgagta

SEQ ID NO: 39493 - DNA, 225 bp, Zea mays
cacaggctcaccccaccaacagcaagcgaaaatcacccgatccccactagtcaccgcggcgaagatatcggggcgcggcaagggcgggaagggcctgggcaagggcggagcgaacagccaccggaaggtcctccgcgacaacatccaggggatcacgaagccggcgatccggcggctggcgcgcaggggcggcgtgaagcgcatcaccgggctcatctacgagga

SEQ ID NO: 39494 - DNA, 289 bp, Zea mays
aaactacgaggtgccaatagcacggaattcgatccagctacaacatcaccctgtgtcatcttcatgccagagggctcaaaaacccagatgggagctacaatgaggcttggatcgaggagaacctatttccatgtcagtggctgcaaatctgcaaagctgtatgccaatgccagctctgtagatgaaagacatcgccacagatacgaggtgaaccctgatatggtcccagacttcgagagggccgggcttcaattcgtgggcaaagatgaaagtggaaaacgcatgggga

SEQ ID NO: 39495 - DNA, 295 bp, Zea mays
gaaacttacaatataagccacaagataaataagctgtcctttggggaagagttcccaggtgtagtcaatcctcttgatggagttgagtggatacaggataactccaatggattaacggggatgtaccagtattttgtaaaggttgttccaacaatctacacagatatcagggggcgcaagattcactcaaatcagttttctgtgacagagcacttcagagaggcaattggctatcctaggcctccacctggtgtatatttcttctacgaattttcaccaatcaaggttgatttta

SEQ ID NO: 39496 - DNA, 294 bp, Zea mays
cgattggtacaatgatcgctggatgggatgagaagggtcctggcttgtactatgttgacagtcagggtgcgcggctcatcagggaacaggttctctgttggctctggttcactttaccgcttcagcatgtcagttgaggaagccgccgaattagcgcgacgggctatttatggggcaacattccgtgatgcagcaagtggtggttgtgttagtgtttaccacgttggccctgatggttggacgaagctttctggggatgatgtcggggagctgcactaccactactacccggtt

SEQ ID NO: 39497 - DNA, 239 bp, Zea mays
tgtgaactagaaaggactgggcaacctgtgtgtatatatgagatctatagtggagaacgggcatggccatttttacaccatggatctttgtatcgtggtgttacactttcgaaaggaggaaggcgaccaagatcagatgatgttgatgctgttaccaggctttcagttctagacaacccatactatcgagatcttctttgtgaatttggtgctatatttgccattgcaaatagagtcga

SEQ ID NO: 39498 - DNA, 328 bp, Zea mays
gcgtcactcagtggaacctcgatttcatggatcacaacgagcaaggtgataggtaccgtgaataggcccatagggtggatgatgctcttgggttcatgactgcatcggggcttacagtcgaccacccgataatgacgactactgacttctggacctcgcacgagtgccttctcttaccctacgagcaggctcttacccgtgaggattccaccagtggccttttctatgattgttcggcccacatgttgtgggttggtgagcgcactcgacaactcgatggagctcatgttgaattcctccgtggtgttgccaaccctctgggcataaa

SEQ ID NO: 39499 - DNA, 328 bp, Zea mays
ggaggcgtaggtagcggcggtgtgacttgtgatctcaatctcaaccccaggcgagctcggctccggtcacccgtcgatccacgcaaccatgtcgaggaggaagaccagggagcccaaggaggagaacgttacccttggacccactgtccgtgaaggagagtttgtctttggtgttgctcacatctttgcatccttcaatgacaccttcattcatgtcactgatttgtctgggagggaaactttggttcggatcacaggtggcatgaaggttaaggctgatcgtgatgagtcgtctccttatgctgctatgcttgctgcccaagatgtt

SEQ ID NO: 39500 - DNA, 240 bp, Zea mays
cgtcgaaccagtacgagacaacgtcgctggtgcagatcgagggggtgaacaccaaggaggacgtcgcgtggtacagcgggaagcggacggcctacatctacaaggccaagaccaagagcagcggcacccacaaccgctgcatctggggcaaggtcgcccgcccgcatggcaacaccggcgtcgtccgcgccaagttcaggtccaaccagccgccggaatccatgggccgtaagtcagggt

SEQ ID NO: 39501 - DNA, 247 bp, Zea mays
gagctttgcgtccaggtggagttgtatacacccaggcagagagcatatagctacatatgcacatcattgaagatattttcgtcaatagccgccaagttttcaaaggctcagttaactatacttggacaacagtacctacataccctagcggagttattgggttcatgctttgctccaccgaagggcctgctgttgatttccagcacactgttttcaacatcgaggaggatgaacattctacgaaatc

SEQ ID NO: 39502 - DNA, 322 bp, Zea mays
caccatagccgccgagtggcgcccaccgcccgcccgccctccgccgcgcgtcggacggtgccgagggaagaggcaccatgaggttggagaagtgctggttctgctcctctaccatctaccccggccatggaatccagttcgtccgcaacgacgccaaggtcttccgcttttgccggtcaaagtgccataaaaacttcaagatgaagaggaaccctcgtaaggttaagtggacaaaagcatacaggcatttgcatggcaaggacatgacccaggatacaacctttgagtttgagaggaagaggaacaggccggagcgctacga

SEQ ID NO: 39503 - DNA, 223 bp, Zea mays
cgacacccgaccccgccgtcgcgatgaggccggcgctgctcaagtccacggccgagcaccaccgccgcagccgcggctacatctcctcggccaacccggagcggaaggtggccatcctgggcgctgcgggcggcatcgggcagccgctctcccacctcatgaagctcaacccgctcgtctccaccctcaccctctatgatatcaccgggacccccggcgtcgc

SEQ ID NO: 39504 - DNA, 311 bp, Zea mays
acgcgccgcagccatccgcttgttcacatcggttcagttctcgagtttccaggatgaaggtaatagctgcctatctagttgctgttctgggtggaaacacatccccgactgctgatgatgttaagagcattctggaatcagttggtgctgaagctgatgaagaaaaactagagtacctgctcacagaactcaaagacaaggacataacagaagtgattgcagctggaagggaaaggttatcctctgtgccttcaggtggtggtgcaattgacatgggagctccagcagctgtagctggcggtggcgcacac

SEQ ID NO: 39505 - DNA, 313 bp, Zea mays
cactgttccagatgaccttgaaggtgtttccaatatattgaggtggctcagctatgttcctgcaaacattggtggacctcttcctattaccaaacctctggaccctccagacagacctgttgcttacatccctgagaacacatgcgatccacgtgcagctatctgtggtgtagatgacagccaagggaaatggttgggtggtatgtttgacaaagacagctttgtggagacatttgaaggatgggcaaaaacagtggttactggcagagcaaagcttggaggaattcctgtgggcgtcatagctgtggagaca

SEQ ID NO: 39506 - DNA, 315 bp, Zea mays
tgacagacacgatggtgagcgccagaattgttgtccacctcgccacccgcctatgcgctgccgccgcagtcgcgtcgtcctgggaggacgacaaccaccaccaccacgggggccacaagtccgggcaatgcgtgcggcggtgcgaggaccggccctggcaccagcgcccccggtgcctggagcagtgcagggacgaggagcgggagaagcggcaagagcggagcaggcacgaggccgacgaccgcagcggcgagggctcgtcggaggatgagcgagagcaggagaaggagaaacagaatgaccggcggccgtacg

SEQ ID NO: 39507 - DNA, 295 bp, Zea mays
  unsure (1)..(295): unsure at all n locations
ctcgctttggatcgattggtttcgtaactggtgagggactgagggtctcggagtggattgatttgggattctgttcgaagatttgctgangggggcaatggcgaccgcggggaatgtgatcaagtgcaaagctgcggtggcatgggacgccggcaagccactgtcgatcgaagaggtggaggtagcgcctccgcagccatggaggtgcgcgtcaagatcctcttcacctcgctctgccacaccgacgtctacttctgggaggccaaggggcagactcacgtgttcactcggatct

SEQ ID NO: 39508 - DNA, 311 bp, Zea mays
cgctgcctccgcctctcgagtctcgtccacccgtcgtcctcctagctcctctactcgccagtcgccatgggcaagattaagatcggaatcaacggcttcggaaggatcggcaggctcgtggccagggtcgccctccagagcgaggatgtcgagctcgtcgccgtcaacgaccccttcatcaccacggactacatgacctacatgttcaagtacgacaccgtccacggccactggaagcacagcgacatcacactcaaggactccaagacccttctcttcggtgacaagccggtcaccgtctttggcatcag

SEQ ID NO: 39509 - DNA, 312 bp, Zea mays
gcttgttgacaccaacggcgcaggtgacgctttcgtcggaggctttctctctcggctggtccagggcaagagcatcgaggactgcgtgacggctggttgctacgccgccaatgttatcatccagcgcccaggttgtacctacccagagaagcctgacttcaactagtgcaatactcaggcacgttacgagcggttcggcgtgtacactcccctgtatcctttccggtccggccaattttttgtcgccgtgatatttgttcagcaactatggacgacgtcgcctctgttctgtacgaggcatggtttgccatc

SEQ ID NO: 39510 - DNA, 313 bp, Zea mays
ggagactcccacaaatccatttctcagatgcattgatattgaacatgtatcaaatatgtgccatagcaagggagcgttgctttgtatcgacagtacttttgcctcccctatcaatcagaaggcactgactttaggcgctgacctagttattcattctgcaacaaagtacattgctggacacaacgatgttattggaggatgcgtcagtggcagagatgagttggtttccaaagtccgtatttatcaccatgtggttggtggtgttctaaacccgaataacactgctcttcggatggcccagtttttagaggaa

SEQ ID NO: 39511 - DNA, 312 bp, Zea mays
aaaatcccctaaacctagcgccgccgccgccatgcttcgccgtctcaacgtcgtcgcccagcggaccttctcctcctcttccccgcacgcaccgccgctggctgcgtcgggctacacaccgcgccgcgagtacggcctggtgcccatggtgatcgagcatacctcccgcggggagcgcgcctacgacatcttctcgcgcttgctcaaggagcgcatcgtatgcatccatggccccatcactgacgatacggcgtccctcgtcgtcgcccagctgctcttccttgaatccgagaacaccgccaagcccgtcca

SEQ ID NO: 39512 - DNA, 307 bp, Zea mays
cgccgacaggaacgagaaggtgttcctggccggcgccgacaacgtgctgcagaagctcgaccgggtcgccaaggcgctgtcattcgcctccaaggcggaggaggtggacgaggtgctcggctcgcggcgcagaaggggttccttcctggccccaaggagagcggcggccacgaggagcgggagcaagatgaggaggaggaacgcgaagaacgccacggcggccgtagggagagggaacgccacggacgtgaggagcgggagaaagaggaggaggaacgcgaaggacgccacggccgctggcgccgcg

SEQ ID NO: 39513 - DNA, 190 bp, Zea mays
agacaaagctctggtgaagcggctctcatcatgtgaaacaatgggatcagctactacaatatgcagtgataagacaggaacccttacattgaataagatgacggtcgtggaagcatattttgctggaacaaagttggatccatgtgatgatgttagccagatgtcagacagtgcagcgtcacttattatt

SEQ ID NO: 39514 - DNA, 153 bp, Zea mays
cacacgagcatatgacagtggcagacacgatggtgagcgccagaattgttgtcatcctcgccaaactcctatgcgctgccaacacagtcgcgtcgtcctagggaggacgcagccagcaccagcgcgggggccacaagtccgagcagtgcgtgc

SEQ ID NO: 39515 - DNA, 305 bp, Zea mays
catcaaggcaccaccttccattgaagtccctgaattatcatttgaagaattgaaagaaaagaccgacaattttggttcaaaggctttgattggtgaggggtcatatggaagagtatattatgctattctggacagcggaaaacatgttgctgttaaaaagcttgacgcttcaacagaccctgaacttgataatgagtttttgacacaggtatccattgcctcaaaactacaacatgataattttgtggagatgcttggatattgtgtggaaggagatcagcgtctagtggtctatgaatttgcga

SEQ ID NO: 39516 - DNA, 306 bp, Zea mays
cggctgcagcggacacggaggcgaaggaggaggagcagcagcagcaggcggcgccgaggagcggcatcccactcagtgcttgcaaccatggctaggggattgaagaagcacttgaagaggctcaatgcgcccaagcattggatgctcgacaagcttggcggagcttttgctcccaagccatcttctggacctcacaagtccagggagtgccttcctctgatcctcatcatcaggaacaggctcaagtatgctctgaactaccgtgaggtcatttctatcctgatgcaacgccatgtacttgttgat

SEQ ID NO: 39517 - DNA, 307 bp, Zea mays
cgaccgcgagagctctcagaaggccctagcacgcaaaaaccccacgagagagacgaatcttccgaatctctcggtggcgatggcgctctccgaccgctcccgcgagtcgctcctcccgagcttcctctacagctcctcggcgcgctctttcgctgccacaggagccgccgcgcgcctccctgtctcctccccggcgcctgcagcggctggagcaggaggcggcgtgccgttctcgatccaggcgcccaaggagaagatcgagatgtactcgccggccttctatacaccctgcacagccggaggaatc

SEQ ID NO: 39518 - DNA, 305 bp, Zea mays
tgtcaagcctaaggatgcggcgaggtggtgatgctatggattcacgaccttatttctgcctgggagatctttgggaatcattcagggaatggagtgcttatagggccggtgttccacttgtgctaaatggcagtgactctgtgattcagtattatgtgccatatctttctgctatccaactatttgcagatccatcaagacctgcttcaagaaacaggcgtcctggggatgaaagtgatggggactctatggatactagcagtgagagcagcattgagaatgacgttgagcggctaagagtctca

SEQ ID NO: 39519 - DNA, 310 bp, Zea mays
ctcgcacgtacaccacactagttaccacagacgacgggcgccatgaaagtcccggtgcttctcctcctggtctccctgtgcttctcgctcgcgctcgcgtggcaaacggacacggaatcgggctcaggcaggccgtaccactacggcgaggagagtttccggcactggacgcgctcccggcagggccggttcagggtgctggaacggttcacccacgagctgctggaggacgccgtcggcaactaccgcgtcgccgagctggaagccgcgccgcgcacgttcctgcagcccagccacatagacgccgacg

SEQ ID NO: 39520 - DNA, 303 bp, Zea mays
cccaagtgctcccttgggtgcgctcgtcgccggtggcagtgagccagtgatgcaccttcatctccggcttccttactaggatcagcccgtcgatcgatcatggcgtcgtcgagctcggctgctactaccagtggcgacagtcagggcctcaaggctcgagatgcctgcatcgtcggcgtcgcccgcacgcccatcggcgcacttctcgggtcgctgtcgtccctccccgccaccaagctcggctccatcgccatccagggtgctctcaagagggcgaaggtcgacccggcgctcgtgcaggag

SEQ ID NO: 39521 - DNA, 298 bp, Zea mays
cttgagatcacattctctgaggcacctgtctttgtggacccccatggcagcggtttgcgtgccctctccaggtcccagattgactctgttctggatcttgcacggtgcacgatcgtgtccgagctctccaacaaggattttgactactatgttctctccgagtcaagcttgttcatctatcctctgaagattgtcatcaagacctgtggcactaccaagctcctgctcacaattccaaggatcctagagcttgctgaagagctgtctatgcctcttgctgctgtgaagtactcccgcg

SEQ ID NO: 39522 - DNA, 298 bp, Zea mays
gacgggcgccatgaaagtcccggtgcttctcctcctggtctccctgtgcttctcgctcgcgctcgcgtggcaaacggacacggaatcgggctcaggcaggccgtaccactacggcgaggagagtttccggcactggacgcgctcccggcagggccggttcagggtgctggaacggttcacccacgagctgctggaggacgccgtcggcaactaccgcgtcgccgagctggaagccgcgccgcgcacgttcctgcagcccagccactacgacgccgacgaggtgatgttcgtgaaggaa

SEQ ID NO: 39523 - DNA, 297 bp, Zea mays
caacacagcacaggcagctcgagagagagagagagagaaagatgtcgtggttcgggcaccaccaccacaaccagccggctcccccggcgtcgggccccaaccaggtgttcaagatcttctgccgcgccaacgagaactactgcctggccgtccgcgacgcgccgtcgtgctggccccggtcaaccccaaggacgaccaccagcactggtacaaggacatgcgcttcagcacccgggtcaaggacgaggaaggcatgccggcgttcgcgctcgtcaacaaggccacggggctcgccat

SEQ ID NO: 39524 - DNA, 276 bp, Zea mays
gagaagaagaagtgtccgggaacacgtgacaccctgtcgccgatcctcaacgacgcgcgcgcgggccgccatcgttcacatggctgcgatgccaccggccttcacgggcaacctgaagaaagcacttgcaggtctgagaagaatcaatttagatgggcttcgatggcgcgtatttgatgctaagggtcaggtgctgggacgattggcttcccaaatagccgttgtgcttcaaggcaaggataaaccgacctatgcgccacatgtggaaaatggaga

SEQ ID NO: 39525 - DNA, 297 bp, Zea mays
aaaccggaaggttttcaaggacacaaggaatggctgacagaggttgattaccttggccaacttcaccacaagaatcttgttaagctcattggttattgctcagatggtgacaaccggcttctggtgtatgaatttatgcccaagggaagtttggagaaccatctgtttagaagaggtgctgatcctttgtcatgggcaataaggctcaaagttgccattggagctgctaggggcttgtcatttttacatgatgctgaaaaccaagtcatatatcgtgatttcaaggcatcaaacatt

SEQ ID NO: 39526 - DNA, 299 bp, Zea mays
gaaccaaatcgggtctgtgaccgagagtatcgaagctgtcaggatgtccaagcgcgccggatggggagtgatggcaagccacaggagtggcgagacagaggacaccttcattgctgacctctcagttggcctgtctacgggccaaatcaagacgggagccccttgccggtctgagcgcctggccaaatacaaccagctgctcaggatcgaggaagagctcggtgatgccgcggtctacgccggagcaaagttcagggcaccagtggagccctactaagaaaggaagaggatgaggatgt

SEQ ID NO: 39527 - DNA, 296 bp, Zea mays
cgccatagagatttgaaactagacaacactctcctggatgatagtatagcacatcggctaaagatatgtgattttggttacaccaagtcctctgtgttgcacactcaaccaaaatcaactgtcgggacaccagcttacattgctcctgaggtccttgctagaaaggaatatgatggaaaggtcgccgatgtttggtcatgtggagttactctgtatgtgatgcttgttggtgcctatccctttgaggaccccgacgaaccgaagaatttccgcaagacgcttactcggattatcag

SEQ ID NO: 39528 - DNA, 292 bp, Zea mays
gccaggattggctgttgtctgaactgagggacaaacgtccattgtttggttcagatcttcctcagactgaagagactgctgatgttttaggcacatttcatgtccttgcagagcttcctgcagattgctttggcgcgtatatcatctctatggcaactgccccatccgatgtgcttgcggtcgagcttttgcagcgtgagtgccatgtaaaacatccactgagagttgttccactttttgagaaacttgcagatcttgaagcagctccagcagctgtagcacggctcttttc

SEQ ID NO: 39529 - DNA, 292 bp, Zea mays
tttggatcgattggtttcgtaactggtgagggactgagggtctcggagtggattgatttgggattctgttcgaagatttgcggaggggggcaatggcgaccgcggggaaggtgatcaagtgcaaagctgcggtagcatgggaggccggcaagccactgtcgatcgaggaggtggaggtagcgcctccgcaggccatggaggtgcgcgtcaagatcctcttcacctcgctctgccacaccgacgtctacttctgggaggccaaggggcagactcccgtgttccctcggatctt

SEQ ID NO: 39530 - DNA, 306 bp, Zea mays
acacggctcgagctgagagtcctttgtcacgtcaagaccttgtgagttggaaaatggccctggataagagacaactgcctgaagttgacagaaattgtttgttcaaactatctggctacatagacatcgataagataaacacagctgcctggccagctttggctgcagacttggatgctggagaccagagcattacagctcttgccttcggtttcacaagacttttccaaccgaacaaacctgtgacaaagggacaagctgccctagcattttcagctggtgattctggcgaagtggttctggaag

SEQ ID NO: 39531 - DNA, 287 bp, Zea mays
tgagaacaagcctgtcacaaacagccgtgacactcaggagatacgcctcgaacaaggccttcagatgctcaagatattcaaggatcatgtcagcaaaacttccatcctcgacgactttgccttctatgagagccgccagaagttgatgcaggataagaggtccaaacagcagcagctccaaaagcaggtctgggacactaggacccccgtttctgtcaccggtgaacgaccacaggaacctgctaatgggaagcccaatccgtccgtaccagatggtgtcacggcag

SEQ ID NO: 39532 - DNA, 287 bp, Zea mays
gggaacgccacggacgtgaggtgcgggagatagaggaggaggaacgcgaaggacgccacggccgcgggcgccgcgaggaggtggcggagacgctcatgaggatggttaccgccaggatgtgaggccgccgcgctcgccaaaacgagcaagaagcaacaagagggtggcgcgcgaccgacgtgcgtacgtagcatgagcctgagtggagacgttggacgtgtatgtatatacctctctgcgtgttaactatgtacgtaagcggcaggcagtgcaataagtgtggctct

SEQ ID NO: 39533 - DNA, 147 bp, Zea mays
ctcgagcgcacgcatacaagcagcggctgcggctgccagccaccgccgcaggttcatctaccgccgccggtgcatcaaagacatccggttcacctgccacctccggtgaatctaccaccgccggtccacctgacgccgccggtccac

SEQ ID NO: 39534 - DNA, 147 bp, Zea mays
ctcggttctttgatagagaacttgagatattgggaagtgttaaacatcgctatttggtcaatcttcgtggttattgcaactctccttcatcaaaacttttgatatatgattatcttcaaggtggaagcctggatgaagtgcttcatg

SEQ ID NO: 39535 - DNA, 286 bp, Zea mays
acgtcagagaagaagacggaatcgagtgacgccttccctgacagcagcggcgacatggtgctcgaagcgacgatgatcagcatagacaactcggagtggatgcggaacagcgactacagcccgtcgcggttccaggcgcaggccgatgccgtcaacctcatatgcggtgccaagacccagtcgaacccggagaacacagtaggcgtgatgacgatagccgggaaaggcgtccgcgtgcttgtcacacccaacagcgacctcgggaagattctcgcctgtatgcacg

SEQ ID NO: 39536 - DNA, 111 bp, Zea mays
ccgcgaccatcggcaggtcgatacaggtactgtccgggctgatccaggccggcaccgtgatcgcgctcacagtgaccacacccgtactggtgatcatcagcccggtgcagg

SEQ ID NO: 39537 - DNA, 291 bp, Zea mays
  unsure (1)..(291): unsure at all n locations
cgactccgtgctcgacgtcgtgcgcaaggaggccgagaacagcgacagnctccaagggttccaggtctgccactcgctgggaggaggtacaggttcaggaataggcaccctgctcatctccaagatcagggaggagtacccggaccggatgatgttgacattctctgtcttcccgtcgcccaaggtgtctgatactgttgtggagccctacaacgccacgctctccgttcaccagctcgttgagaacgcagacgagtgcatggtgctcgacaacgaggctctctatgacat

SEQ ID NO: 39538 - DNA, 138 bp, Zea mays
gacagacacgatggtgagcgccagaattgttgtccacctcgccacacacctatgcgatgccgccgcagtcgcgtcgtcctgggaagacgacaaccaccaccaccacgggggccacaagtccgggcaatgcgtgcagcg

SEQ ID NO: 39539 - DNA, 303 bp, Zea mays
gccggagctcgacaaggacgaccgacgacgcacgcggagatccggcgtactgcaaattttgaaaactgaactgtaagatggcatcagcagagctttcccgtgaggtaaatgtgtacatggcgaactcgctgagcaggcggagaggtacgaggagatggttgagttcatggagaaggtagccaagactgttgactcggaggagctcactgtggaagagcgaaacctcttgtctgttgcatacaagaacgtcattggagcccgccgcgcctcatggcgcatcatctcctccatcgagcagaagga

SEQ ID NO: 39540 - DNA, 139 bp, Zea mays
ataagagcagcggcgcaggcggacaaggagcaggcggaggaggagttgtgccaagccacaatgggtatctcgcgtgactcgatgcacaagcgccgagccaccggtggaaagcagaaggcctggaggaagaagcgaaagt

SEQ ID NO: 39541 - DNA, 131 bp, Zea mays
gagactgagaatattgaggagattgctttgaagatctctcaacttcctttggcttcaggcaagcaaaagaggattgctgtgattactcaaggtgctgatccagtggttgttgctgaggatgggaaggtgaa

SEQ ID NO: 39542 - DNA, 309 bp, Zea mays
  unsure (1)..(309): unsure at all n locations
cgccggcagcttatcgacgatcttcgacgtcggtggcgtgttgggaggagtcctcgccggccacatctccgaccgtctaaacgcgcgggcgatcacagctgacagcttcatgtactgcgcgatacccgccctcttcctgtaccgcgcgtacgggagcacgtcgatggcgtggaacgtctgcctcatgttcgtcaccggaatgttcgtgaacgggccgtacgccctgatcacgactgcggtgtcggccgacctcggcacccacagctccttgaacggcaactcncgggcgctggccaccgtgacggccat

SEQ ID NO: 39543 - DNA, 132 bp, Zea mays
tcgagttcctgaggcaccagtgcagcccggctgcgacgcctacggctcgccacagtgccaggcgctgcagcagcagtgctgccaccagatacaggcaggtggagccgctgcaccggtaccaggcgacatacg

SEQ ID NO: 39544 - DNA, 125 bp, Zea mays
tggacacggtgctcaagatcatcgagacgttcccgccggtggtgttcgccggagaagcgcgtcacctcgaggagcgcatggccgaagccgccattggccgcgccttcatcctccatgacggcgac

SEQ ID NO: 39545 - DNA, 127 bp, Zea mays
  unsure (1)..(127): unsure at all n locations
gatgncgagcagaagaagcttaacctccccatccttcccaccactacaatcggttcgttcccataaaccgttgagctcaggagggtccgccgtgagtacaaggcataaaagatctctgaggaggaat

SEQ ID NO: 39546 - DNA, 124 bp, Zea mays
gccaccgcacgagactgagatggggggttttgtcaagacccacaagaccaatgcgtacttcaagcgtttccaggtgaagttcaagagaaggcgcgctggcaagacagactacagggccaggata

SEQ ID NO: 39547 - DNA, 126 bp, Zea mays
cgcatccacgactacgtcggcgacggctacgccatcatcttctcccacccagccgacttcacgcccgtgtgcacaacggagatggcggcgatggcggggtacgccaaggagttcgagaagcgtggc

SEQ ID NO: 39548 - DNA, 235 bp, Zea mays
agcccatgaatgaaggcgaggcagcagtatccattgctcatgccaagttgcttgttgagagtagcgttaatgcttctgatattggaataattacgccttacgctgcacaggtaaccagcttgaagatgatgagaaacaaagatgccaagttgaaagatttagagatatctacagttgatgggtttcaaggccgggagaaagaagccatcatcatttctatggtccggtctaactc

SEQ ID NO: 39549 - DNA, 229 bp, Zea mays
aggccacacgctcgagactgtgccgtgggagtaggaggttcctcaggtgctgagcagtcgccggagtgaccgccggtgtcggagatgaaggagagaagcggctccagggcggcggtggacgagcgctacgcgcagtggaagtcgctcatccccgtcctctacgactggtttgccaaacacaacctcgtctggccatccctctcctgccggtgggggccacagtttgaga

SEQ ID NO: 39550 - DNA, 203 bp, Zea mays
ggaaaagaaagttactattgattttgagccattcaagcctatcaatgtgtcacactacctttgtgacaacaagttccacactgaggctttaaatgagctcttggaatctgatgacaagtttgggttcattgttatagatggtaatggtactctttttggcacactaagtggcaatacccgtgaagtgcttcacaaattcactg

SEQ ID NO: 39551 - DNA, 269 bp, Zea mays
gtgccctacaaccccggctaccaggacgagtcggtgctgtggacggagagccgcgacgtcggccacggcttccgctgcgtccgcatggtcaacaacatctacctcaacttcgacgccttccacggcgacaaggaccacggcggcgtgcgcaactgcaccaacatcgtgctctggaagtagtgcgagggcgacaaccagcgctggaagatcgtccccaggtaaatgtgctgttctgtggctgcactggtcatcaccatgatctggagctt

SEQ ID NO: 39552 - DNA, 122 bp, Zea mays
cgagctcaaccgccgccagctgctgtacatcctccagatgcccgtcatgaacctgtacgtacctgggcttgacaaggggaaagctctccatttcctggtcgtcaagtcggagaccaagacac

SEQ ID NO: 39553 - DNA, 237 bp, Zea mays
gactctctcacccgactcgtcagacgtcagccagcagttcgaaaccaaggattgatccaggagcttccggaaggcgaggcgcgcgcgcacgtcgaggtgctggtgccggtgccgcccatggatcgggctcgcggatccgcgttcctgctcggcgtcctgctcgcaggatccttgttcgcgttttcagttgccaaagaggagaccaagaagctcgggaccgtgatcggtatcgatctc

SEQ ID NO: 39554 - DNA, 225 bp, Zea mays
ataacgtcatgtaatcacacaaaggatgagcttctgcatgaagtagaagatttcaccaagagaaaatttggcaaggagaacgtggatgaaggtgcacgagatgcgtctgagatcttccggtacatagaccatgtccgaacatatcctaccataatgtttggaggaattgagggctctcaagtctgcactgtggcctttcagcgggtgtgactgaaagctgaggca

SEQ ID NO: 39555 - DNA, 197 bp, Zea mays
gcagctcccatcctctcgatcgccaggagaagcagacgccgttgcagctgccgcgtccacagaatggggggtttcgtgaagactactaagaccaatgcgtatttcaaacgtttccaagtgaaattcaagagaaggcgggctggcaagacagactacagggccaggataaggctgattaaccaagacaaaaacaagta

SEQ ID NO: 39556 - DNA, 120 bp, Zea mays
caagaaaccaaggcgtccttatgagaaggagcgtcttgatgctgaactgaagctggtcggtgagtataggctgaggtgcaagcgtgagccttggagggtccagtatgcactgagcaggat

SEQ ID NO: 39557 - DNA, 319 bp, Zea mays
ctcaacagctgctgacaatcagacccaagtgggtatccgtgtgatgcaaggtgagcgtgaaatggcagcagacaacaagcttcttggtgaatttgacctcgtgggcattccacctgctccaagaggcttgcctcagattgaggttacattcgacatcgatgccaatggaatcgtgactgttgctgccaaagacaaggctactgggaaggagcagaacatcaccatccgatcctcaggtgggctgtctgaggctgacatccagaagatggtgcaagaagccgagctgcatgcccagaaggatcaggaacggaaagcgctc

SEQ ID NO: 39558 - DNA, 294 bp, Zea mays
cagatgaataccatttacaaacattggaaacattattgaatgcatttccccagcttcagccaagtgttgatatcaaaacagtactctctcaacttatggacagattgtctaactatgctgcctcaagtcctgaagtgttaccagagttcttgcaagttgaagcttttgctaagttcagtaatgctattggaaaggtgatagaagcccaacctgacatgccagttgttggaagcgtaactctatatgtatcgcttctgacttttactctccgtgtacatcctgaccggcttgatt

SEQ ID NO: 39559 - DNA, 319 bp, Zea mays
caatattcgatgtgagcagtgcttttgagcttcctgcctctcgggtgattcacactgttggccctatatatgatttggacaagcatcctgaggtgtcattaaagaaggcctatgaaaatagcttgaagcttgctaaagataatggcattcagtacatcgcattccctgctatatcttgtggtgtttatcggtatgttccaagttttagtttttgctcacgtacctttggtgcactcagctcttttttttcccatttcggggtttaatttgtagtgtaacttgacttggatcttgtacagctatcctccaaggaagcatc

SEQ ID NO: 39560 - DNA, 278 bp, Zea mays
  unsure (1)..(278): unsure at all n locations
tgttgatgaaataaatctattggatgatggcataagcaatctacttctgnatgtcgtgacggagggagttaacattgtggaaagagaggggattagctttcgccatccctgcaaaccacttctaattgctacttacaatccagaggaaggatctgtacgtgaacactctgctgatcgtattgcattaattaagtgctgatcagcaatgagtttgatgacgcgttgaacatggatatcacaccggttcagagctacaagaatttcaatcgtggagaaaa

SEQ ID NO: 39561 - DNA, 255 bp, Zea mays
  unsure (1)..(255): unsure at all n locations
cccgagcatatcacagtgacagacacgatggtgagcgccagaattgttgtcctcctcgncacctactatgcgctgccgccgcagtcgcgtcgtcctgggaggacgacaaccaccaccaccacgggggccacaagtccgggcaatgcgtgcggcggtgcgaggaccggccctggcaccagcgcccccggtgcctggagcagtgcagggaggaggagcgggagaagcggcnagagcggagcaggcactatgccgacg

SEQ ID NO: 39562 - DNA, 183 bp, Zea mays
cctcagtccctcacacactcactatacaccgctctgctgcagcaagaaggaagaagctagcggctcctcagtctcgttgtcagcaatggccaccaccgccgcgtccagcctcctcaagtcgtccttcgcgggctcccggctcccttcggccacgcgcaccaccaacccgtcgtccgtagccgt

SEQ ID NO: 39563 - DNA, 317 bp, Zea mays
caccccccgagctcagcttagctccacaccagctccaatcacagtcgtgaccagagcgcgagagctagctagagggccgtgaaaatgccgatcaataggatcgccctggggagccaccaggaggtgtaccacccgggcgccctcaaggcggcgttcgctgagttcatctccaccctcatcttcgtcttcgccggccagggctccggcatggccttcagcaagctgaccggcggcggcccgacgacaccggcgggcctgatcgcagcggcggtcgcgcacgcgttcgcgctgttcgtagcggtgtctgtaggcgcgaa

SEQ ID NO: 39564 - DNA, 316 bp, Zea mays
tggaaaggccaaatgtaaaggtgcattgcagaaggagctgggtttacctataaggcctgatgttcctctgattggctttattggaagattggattatcagaaaggcattgatctcattcaacttatcataccagatctcatgcgggaagatgttcaatttgtcatgcttggatctggtgacccagagcttgaagattggatgagatctacagagtcgatcttcaaggataaatttcgtggatgggttggatttagtgttccagtttcccaccgaataactgccggctgcgatatattgttaatgccatccagattc

SEQ ID NO: 39565 - DNA, 295 bp, Zea mays
ccctacttgaggctctggacttgatcaatgagccaaagaggccttcagacaagcccctgcgtctccccctatcaggatgtgtacaagattggtggtattggaactgtccctgttggacgtgttgagactggtgtcattaagcctggtatggttgttacttttgggcctactggtcttactactgaggttaagtccgttgagatgcaccatgaggctctccaggaggcccttcccggtgacaatgttggcttcaacgtgaagaatgttgctgtgaaggatctgaagcgtgggtatg

SEQ ID NO: 39566 - DNA, 272 bp, Zea mays
tcaagatcgcctacgtgccgaacggcaagggctacgccgagatcgtgtgcccgcaccgccagtcgcagggcggcgagagcgagcgcgacgcgacaagggcaggaggagcgaagaagaagaagaagaatcgtctgaggagcaggaggaggccgggcaggggtaccacaccatccgggcgcggctgtcaccgggcacggcgttcgtggtgcccgcgggccacccgttcgtcgcggtggcgtcccgggacagcaacctccagatcgtgtgcttcg

SEQ ID NO: 39567 - DNA, 312 bp, Zea mays
ctgttacttgttggttttaaatgttagtaattactacgaagtacaataatttgtatggagcatatccagttttagcaactattccatattttaatctatcttttttataagttttagttcatgtgacttattttagaaacttgaactcacaaactttctcttatttggtctctatatagtggaattatgtcattctataatctctgttcgtttattcagtcgttgtgaacactcttctaattgctccctgtcatggttgtgctgtactaatacatattggatgaagtaaacagccatatcagttaagtcaat

SEQ ID NO: 39568 - DNA, 308 bp, Zea mays
  unsure (1)..(308): unsure at all n locations
cagtcaccggcacgcagacactcagcaagaaccaacaggacatcgtcgctcagcaagaaacatagagggccataatagcggagtaccagggcgagtatggacacccgtacccgcgcgtcgaccagtacgggaacaccgtgccgccggtggaccagtacggcaacccgctcccgagggaaccggcgtccggtttcggcgccatcgctcccccctacagcgctggcgacacgaccgggggcacgtagcggcgcctgtcgagtacggtaccgacgccaagtatccgcacgatggcacngaggacggtggcg

SEQ ID NO: 39569 - DNA, 260 bp, Zea mays
ggaacacacggagtttgtgttctttcagcaaatagctccatatcaaatgtaacgcttcgtcagacagctcactcaggcagaactgtaacatacgagggtcaattcgagatactgtcgctgtcggggtcattcttcctggctgaggatggtgtccagcgcaccgaaacggaagcctcagcgtgtcgctggcaggtcctgatggccgtctgttgggtggtggggtcgcaggacttctagtagcggcttcaccggttcagata

SEQ ID NO: 39570 - DNA, 304 bp, Zea mays
agccactccaaacacttgcgccgccgctgcctcacaggtaaggccgccatggtctccggttcgggcgtgtgcgcgaagcatcgtggtcgacgcgcgccaccacatgctgggccgtctctcctcgatcatagccaaggagctgctcaatgggcagaaggtggtcgtcgtccgctgcgaggagatctgcatgtacgggcggcctcgtccgtcagaagatgaagtacctccgcttcctccgcaagcggatgaacaccaagccgtcccacgggcccatccacttccgcgcccccgccaagatcctgtg

SEQ ID NO: 39571 - DNA, 115 bp, Zea mays
ctccaattgaagagtgccgcaagaagatttggttggtggaatcaaagggtttgattgttgactctcgtaaaaactccgttcagtcattcaaaaaaccttgggcacatgagcatga

SEQ ID NO: 39572 - DNA, 231 bp, Zea mays
aaacagcattcataaaatatttcaagtcattttgggttcccaaattggagatgtggatcgactccatccgaaatctgccattagcaagtcaggagtcatgcggtgccattgaaggttaccatctgaagctgaaggtaaaagcatatgatgacgtgcagctggatgctcttcaacgtgtggacaggctagtgcataagctcacaacagagctgcattcgagctactggatca

SEQ ID NO: 39573 - DNA, 232 bp, Zea mays
gtaagcttcgagttcttttttccttttggcttattgcgcaagaagggtaacgagaggacggctgcgatggcgaagaggctgctcccgtctctgaaccgggtgctggtcgagaagctggtgcagcacaagaagaccgccggcagcatcctacttccggaaacatccaagcagctgaatactgctaaagtagtggctgtaggccctggtgagcgcgacaaggcaggcaatctga

SEQ ID NO: 39574 - DNA, 227 bp, Zea mays
caccgcgctgtagcaggtgcaggtatccttgctgggtacgacaagctccaggaggttgtcttcggcaagaagtacaggtctggtggtggctaaggatgtataatgatgatgacgacaaacaacaaacatgatgttttaggtacctcctttaagtaaacatacgtacagaccctcgacaccattttaagttcgctctcgcagaggctggtgagtctgtagcgtagctg

SEQ ID NO: 39575 - DNA, 302 bp, Zea mays
gcaatgagatctgcaagtacctcttcaaggagggcgtgctgtatgccaagaaggactacaacctggcgaacacccgcagatcgatgtgcccaacctccaggtgatcaagctcatgcagagctttaagtccaaggagtatgttagggagaccttctcctggcagtactactactggtatctcaccaacgatggcattgagcacctacgcaactacctgaacctcccgtctgagatcgtgcctgccacgctcaagaagtctgccaagccacctggccgcccatttggctctggccctcctggtg

SEQ ID NO: 39576 - DNA, 297 bp, Zea mays
caagaagacaggagaagggagttgtagtgagttttaagaatggcgagtgcacaggcagtggggcaaggagaacgaggccacttcgttctgaagagcggacacaccattccggccgttggtctaggcacttggagggccggctcagataccgctcactctgttcggaccgccatcgccgaggctggatataggcacgtggacacagctgcccaatacggagtagagaaagaggtcggtagaggacttaaagctgcgatggagggcgggatcaacaggaaagatttgtttgtgacgtcg

SEQ ID NO: 39577 - DNA, 204 bp, Zea mays
gcaacagccaacacctaaactaaagaacagtagtagtccctgtgtacgtctagcaacgatccgcaccgagctcgccagtcttgctcgttagtttggggacagcgatggcgtccggtcaggaaagcagggaggagctggcgcgcatagccgaggaggggcagaccgtcgtccccggcggcaccggcggcaagaccctcgaggcgc

SEQ ID NO: 39578 - DNA, 306 bp, Zea mays
ctcaccgcttcccgcaccgatcgaccagctcccaccccaccacacgagcccatggcggaccagctcaccgacgaccagatcgccgagttcaaggaggccttcagcctcttcgacaaggacggggatggttgcatcacgaccaaggagctgggcactgtcatgcgctcgctggggcaaaatcctacagaggctgagctccaggacatgatcaacgaggtcgatgctgatggcaacggcaccatcgatttcccagagtttctcaaccttatggctcgctagacgaaggacaccgactctgaggaagag

SEQ ID NO: 39579 - DNA, 303 bp, Zea mays
ctggcgaggcaaaagcgcaaacacgaccacagacagagcgcgcttcaaggccttttttttttgagataacaaggaggagaggaggagatggcggtcacgatcacctgggtgaaggcgaggcagatcttcgacagccgcggcaaccccaccgtcgaggtggacgtgggcctcagcgacggcagctacgcgaggagggccgtacccagcggcgcatccactggaatatatgaggccttggagttgagggatggaggatctgattatcttggcaagggtgttcttaaggctgtcagcaacgtaaac

SEQ ID NO: 39580 - DNA, 294 bp, Zea mays
ccggctccgctgccaccgccgcgactccacctctgtcgccaccatggtcaagtccaaggccatcagggtccacgagctgggcggccccgaggtgctgcggtgggaggaggtggaggtcggggagcccggtgaaggggagatccgcatcaggaccaccgccgtcggcgtcaacttcatcgacatctactttcggaagggggtctacgccgcgcccaccatgcccttcaccccaggaatggaagccgttggcgtcgtcaccgctgttgggcctggcctcactggcaggaaggtggg

SEQ ID NO: 39581 - DNA, 296 bp, Zea mays
gctgcacaatccccttcgccgccgccaagatggtgaacgttcctaagaccaagaagacgtacagcaagaacaaagagtgcaagaagcacacactccacaaggtgactcagtataagaagggcaaggatagcctgtctgcccagggaaagcgccgttatgaccgcaagcagtcaggatatggtggtcagaccaagcctgtcttccacaagaaggccaagaccaccaagaagattgttctgaagctgcagtgccagagctgcaagcactactcacagcacgccatcaagagatgcaag

SEQ ID NO: 39582 - DNA, 192 bp, Zea mays
ttttataacagcaacagcagatagtcccaagcatatagagacaacacttaccagggctaaatttgaagagctatactcagatcaccttgacaggctgaggacacctgtggacaatacccttagagatgcaaagttgcaattcaaagatatagatgaggttattcttgtaggtagctcaacaagaataccagc

SEQ ID NO: 39583 - DNA, 318 bp, Zea mays
ccattctggagaagacctggaagcccaagtatgatgttgagaaggaaaaggagaaggctgaggaggaggctgctgctggtgcagatggtctttctgagttccagaagaagatttttgacgtcctgtacaagattgctgatgttccgttcttggcaccctacaaaaccaagatcattgatgttatcgagaagggagagaagcagcccaacatcactattggcattctggtctccgttgtcgtcgtgttcgttaccgttctcttcaagatcctgtttggaggcaagaagccggtggcacctgtgaaacctgcagctgagg

SEQ ID NO: 39584 - DNA, 315 bp, Zea mays
accacaccacacctcctcgcttgcacaccgctcgtctgacatctcgtcccgtcctttcgtttcgaagcctcgcgagcaccgacgatagccaccaccgcggtgtcggtcgacgagaagctcgataagcttcgcgccgaggtcgccaagctcgaccagatcagcgagaacgagaagaccgggttcatcagcctcgtgtcacggtacctcagtacggaggcggagcagatcgagtagagcaagatccagactcctacggatgaggtggtggtaccctacgatacagtcgcgtcgcctcccgaagatctcgaggagacg

SEQ ID NO: 39585 - DNA, 205 bp, Zea mays
ctaccagcgaccaggataccatcgacacaccggcctccatggcgtcctcgaagaaggttgtgacccgtgacgagtaggagctgaagcaccgcgacgtcaagatccgcaaggaggacatgaaccgcctcgtcatgaacatcctcgtcaccgagggcttcgtcgacaccgccgacaagtttcgcatcgagtccggcacccagccgga

SEQ ID NO: 39586 - DNA, 293 bp, Zea mays
gttccagcatctttggattacactcgtgcagtattgacgatggtgctaactggttgcagattcgcagactcggtgtttgttatcttcttttcatgaccaagtgttgaacaggttttcaggtgaacccagacgacattgtgttcggaggctgggacattagcaacatgaaccaggccgactccatgaccagggccaaggtgctggatattgacctgcagaagcagctcaggccctacatggagtccatggtgccacatcccggtatctatgatccggacttcatcgcggctaac

SEQ ID NO: 39587 - DNA, 309 bp, Zea mays
gacggggaaggtggtttgcgtcaccggcgcatcagggtacatcgcgtcctggattgtcaggctcctactcgaccgcggctacaccgtccgcgccaccgtgcgagacaccgctgacccaaagaaaacattgcacctgactgcgttggatggtgctaaggataggctgcacttatttaaagctagcctgctagaagagggttctttcgatgctgcagttcatggatgcgacactgtatttcatacagcctctcccttttatcacaatgtcaaggatgctaaggcagagttacttgacccagcagttaaggg

SEQ ID NO: 39588 - DNA, 308 bp, Zea mays
gtttcgtcgctccgccgccgccgaaacagcacatcgctctctcgatctcagccatggcggaggtggagcagccccaggacgcggtgaagctcttcaaccgctggaccttcgacgatgtccaggtgaacgatatctcgctgaacgactacctggctgtgacaacggcgaacacgcgacattcctgccgcactccgcggggcgctactccaagaagcggttccgcaaggcgcagtgcgccatcgtcgagcgcctcaccaactcgctcatgatgcacgggcgcaacaacggcaagaaggtcatggccgtcc

SEQ ID NO: 39589 - DNA, 297 bp, Zea mays
cgcctcttctcctccctcctgccgggtccttaataaagagcagcagcgcaaggtgagccgccagcttgccccaggttggtagagcgagcgagaagaaggcaatggcggcggagagcttcctgttcacatcggagtccgtgaacgaggggcacccagacaagctgtgcgaccaggtgtcggacgcggtgctggacgcctgcctggcgcaggaccccgacagcaaggtggcctgcgagaccagcaccaagacgaacatggtgatggtgttcggcgagatcaccaccaaggcgagcgtgg

SEQ ID NO: 39590 - DNA, 301 bp, Zea mays
aagccgtccgccttgcccatcacgaaggcttggtccaccaccttgtatcaccacgccccacttcacagatccgttccaccagctagggttagcgtacctcagcagcgatggcgatcaagcggactaaggcggagaagaagatcgcgtacgacaagaagctgtgcagcctgctcgatgagtacaccaaggtgctcatcgcccaggccgacaacgtacgttccaagcagctccaggacatccgccggggcctcaggggcgactcggtggtgctcatagggaagaacacgctcatcaggcgttg

SEQ ID NO: 39591 - DNA, 254 bp, Zea mays
cttgtaggcacaggtatgggtggcctcacggtgttttcggatggtgtccagaatctcattgagaagggatacagaaagataactcctttcttcatcccatatgctatcacaaacatgggttctgccctgcttggaatggacattggtttcatgggtccaaattactccatctcaactgcctgtgctacctcgaactactgtttctatgctgcagcaaaccatatccgtagaggcgaactgatataatgatagct

SEQ ID NO: 39592 - DNA, 255 bp, Zea mays
cgcaaaccctcatttttctctcaccagcgccgcgacgtccctcgccttcgccgccgaatccaagtcaccgatctcgggttcaccgcagcgcacagagcagccccgactcccggcccgatccgcgctcacctcaccgtcgcttcagtcatggcaggaatggcacctgagggttctcagttcgatgctaagcacaatgattctaagatgcaggagctgctgagcaccggtgagactgaggagttcttcacttcatat

SEQ ID NO: 39593 - DNA, 293 bp, Zea mays
taaaaatgcaaagagggattttaccaagactgaagacgacttgaaatctctgcagagcgtggggcaaataattggagaggttcaccgacctcttgataatgaacgctttattgtgaaggccagcagtggtccccgatatgtggtcggttgccgaagtaaagtagacaaggagaagttgacatctggaactcgtgttgtacttgacatgacgaccttgacaataatgcgcactcttccacgggaggtggatccagtggtatataacatgcttcatgaagatccaggaaatgtca

SEQ ID NO: 39594 - DNA, 314 bp, Zea mays
atgctgatgcagctcaagctccggagctttttacaatcactccagcacttgcaataccataggctatcgtacatgctgtattagagtcatcccgtgttgatttctatgagattaatgaagccttttcggctgttgcgcttgcaaatcaaaaatcttcttggaattccatcagaaaagattaatgttcatggaggagctgtatccttaggacatcctctcgggtgcagtggtgctcgcattttggttacccttattggtgttctcagggcgaagagtggcaagatcggagttgctggtgtctgcaacggtggagg

SEQ ID NO: 39595 - DNA, 310 bp, Zea mays
cgccattgttcaacacccgttcgttcaagatcgcctacgtgccgaacggcaagggctacgccgagatcgtgtgcccgcaccgccagtcgcagggcggcgagagcgagcgcgagcgcgatcaagggcaggaggagcgaagaagaagaagaagaatcgtctgaggagcaggaggaggccgggcaggggtaccacaccatccgggcgcggctgtcaccgggcacggcgttcgtggtgcccgcgggccacccgttcgtcgcggtggcgtcccgggacagcaacctccagatcgtgtgcttcgaggtccacgccg

SEQ ID NO: 39596 - DNA, 145 bp, Zea mays
acaacccaccggttcgggttcgggttcgtgaggatctccggggatcggtttcgtgggtgagcggatcgagattgcggcgtcggatgttgagtaccgctgcttcgtcggcagcctcgcctggaccacggacgaccacaccctccac

SEQ ID NO: 39597 - DNA, 145 bp, Zea mays
ggttgatgtcccatcatgttttgttgggctggtattggagaacagccaacttccacatccaaaccatggccatgttatcttggccaatccttctccaatcttattttacccaattagcagcacagaggtgcgctgtttggatgat

SEQ ID NO: 39598 - DNA, 143 bp, Zea mays
gggacagtaggataattcctggtgctgctgcaacagaaatagagctggcaaagagattgaaggagttctctttgaaggaaacagggttggaccagtatgctgttgcgaaatttgctgaaagctttgaaatggttccaagaacc

SEQ ID NO: 39599 - DNA, 145 bp, Zea mays
agagcaattacaactttgagaagcccttcctttacctcgcaaggaagcaggcaggggatcagaaccatcactttgtcgaagccgttgctctgaagccaccggaagtgcagattgatatggccatgcagcagcagcatgaagctga

SEQ ID NO: 39600 - DNA, 290 bp, Zea mays
tgccaaggacccatcaggcaaggatatcaatgctcttgagcagcacatcaagaacctcctcagcccgtccacaccgttcttcttcaacaccctgtacgacccctaccgtgatggtgctgactttgtgcgtggataccccttcagcctcagggagggtgcccacactgctgtctcccacggcctgtggctgaacatccctgactatgatgcacccacccagctaatcttgcctaaggagaggaacgaaaggtacgttgatgctgtcatgacaatccccaagggaaccttgt

SEQ ID NO: 39601 - DNA, 115 bp, Zea mays
tgttcgggttcgtgaggttcttcggggttcggtttcgtgggtaagcggatcgagatggcggcgtcggatgttgagtaccgctgcttcgtcggcagcctcgcctggaacacggacg

SEQ ID NO: 39602 - DNA, 274 bp, Zea mays
ctaagcttgaagatattgttccttcatcacacaactgtgacataccgcatgtgaaccgtactgagtatcagctgattgatatttctgaggatggatttgtgagccttcttacttcagatggcaacactaaggatgatcttagacgcccaactgatgagactcttgtggcccagattaaggaagggttcgaaagcgggaaggatcttgttgtgccagtccagtctgcgatgggggaggagcagatcagcgcgttgaaggatgttggccccaagta

SEQ ID NO: 39603 - DNA, 283 bp, Zea mays
cgagacgagtcaccatctcatcccaaccccggaacgaacaagttaccatctcatcccaactccgcctcgaccggatctcgtcggactcggatccgcccgaccaccccgcgccgccgcagatcaaagaagatggcagctgtcgacacattcctcttcacctcggagtctgtgaacgagggacaccctgacaagctctgtgaacaggtctcagatgccgttcttgacgcttgccttgctgaggaccctgacagcaaggttgcttgtgagacctgcaccaagacca

SEQ ID NO: 39604 - DNA, 78 bp, Zea mays
ctagacgagagaagaatgagcaaggtttttgttcgcatctattgttgtccaatgatattgatatattgttcccctgtc

SEQ ID NO: 39605 - DNA, 276 bp, Zea mays
cttgttaaccttcttgggatgtggaaggagtctgaatacactggccattctgttcctgttggtggtcttgcttactctgtaacacccccatcaagtttggctgatgtccttgcaaatccattccatgcactgttttatgtggtcttcatgctgtcagcttgcgctctgttctcaaaaacgtggattgaagtctcaggttcatcagcaaaggatgttgctaagcagctcaaggaacaacaaatggtgatgccaggacatcgtgagtcaaacttgcag

SEQ ID NO: 39606 - DNA, 259 bp, Zea mays
atccaatctagaagcacaccacaccctctctctctcttcgccgtccgaagcaccgcacaccaatctaatcgacacatcaccgagatgggccgcaagttcatcgtcggtagcaacaggaaatgcaatggaaccacagatcaggtcgagaagattgtcaaaacactgaatgaaggacaggttcccccatcagatgttgtggaggacgttgtcagcccaccttatgtcttccttcctgtggtcaagagccagcagcgccaag

SEQ ID NO: 39607 - DNA, 149 bp, Zea mays
atcagctgcagtttgaagctgaacttggacagactacttgcgagaatgtcggaggagatcggcctagtgagggtgtatactaagccacacggccagcagcctgatttcacagaccccgttgttctttccaccgacagacgtggctgcac

SEQ ID NO: 39608 - DNA, 245 bp, Zea mays
aaacgcgtcgcatccgctccacaggatcctctgcgccaccgcaaccgtgtgaccgcccgtggcgccggcgatcccgatccgccgacccgtcccagccccgctcgcagccatgtcgccgtcggagccgacgcgggaggagagcgtgtacatggccaagcttgcggagcaggcggagcagtacgaggagatggtcgagttcatggagcgcgtcgcgcgctacgccgggggcgccggcggcggggacg

SEQ ID NO: 39609 - DNA, 175 bp, Zea mays
ctagggatggggccaatctcaccatatcgtttgccggtgaacagcttgagaaggctgaggagctcatcaggatgggcttgcatccaagtgagatcatcattggctacactaaagccatcaacaagacaattgagatctctggaggatcttgttgagaaaggctcagagaacatgg

SEQ ID NO: 39610 - DNA, 138 bp, Zea mays
cgattttaggcaggaggacaaagaacaacccctgcttaattggagagcctggtgttggaaagactgctattagtgagggagctgctcaacgtatttccaatggtgatgttcccgaaacaattgaaggaaagaaggtta

SEQ ID NO: 39611 - DNA, 140 bp, Zea mays
cttttaatttgcttgcaaaatatagcaagagccatcttgttttcaatgatgacatccagggcacagcatcagtggtccttgcaggtttgttagcagcactcaaggtggttggtgggaccttggcagagcacacttattta

SEQ ID NO: 39612 - DNA, 123 bp, Zea mays
ttctggacagattgtcacatggattacagatcgtatgcatggaaacaccatcaaggccccttgtggcctgaagacgcgtccatttgactccattctggctgaagtgcgtgcctgcttcgatgt

SEQ ID NO: 39613 - DNA, 139 bp, Zea mays
gcaaaagttcgtggaataagtaggggtgagaagaagcgcctctcacttgcatgtgagtagatagctagcccttcagtcatctttgcagacgaaccaacaacaggccttgatgccttccaagctgagaaggtcatggaga

SEQ ID NO: 39614 - DNA, 167 bp, Zea mays
cggagagcagcgacgtaggcaagggcttccgctgcatccgcatggtgaacaacatccgcctcaacatcgacagcttccacagcgacaagggccacggcggcgtgcacaacggcaccaccgtggtgctgtgggagtaggccaagggagacaaccagagctggaagatc

SEQ ID NO: 39615 - DNA, 191 bp, Zea mays
  unsure (1)..(191): unsure at all n locations
ctcttctccctcttgccggtcccgaataaagagcagcagcgcaagaggtcggtagagcgagaagaaggcaatggcggccgagagcttccttttcacgtcggagtccgtgaacgaggggcaccccgacaagctgtgcgaccaggtgtcggacgccgtgcttgacgcatgcctcgcgcangaccccgacagca

SEQ ID NO: 39616 - DNA, 318 bp, Zea mays
  unsure (1)..(318): unsure at all n locations
ggcgacccgaccaagaccatcaaggtgcccgaaggcttcgactacgagctctacaaccgcaacgacatcaaccgcatcctcgggcccaaggcctcctgcatctcattcaaggactccgcctgcagctagttcggctacatggtctccaagaagaagtacatctacaccatcgacgacgactgcttcgttgccaaggacccatctggcaaggatatcaatgctcttgagcagcacatcaagaacctcgctcagccatccacaccgttcttcttcaacaccctgtacgaccgctgacgtgnaggtgctgactttgtgcgt

SEQ ID NO: 39617 - DNA, 195 bp, Zea mays
gaacacgatcgagcacacaagcacgaagacgcgtttaggagaaaccacaaaccaccaagccgtgcaagcatcatggagtacggtcagcaggggcagcgcggccacggcgccacgggccatgtcgaccagtacggcaacccagtcggcggcgtcgagcacggcaccggcggcatgaggcacggcacgggaaccacc

SEQ ID NO: 39618 - DNA, 224 bp, Zea mays
  unsure (1)..(224): unsure at all n locations
ctactccacgccctcttatcaagtcctcctcgggttagggtaccttagggttttgtggaggagcgatggcggcggctgatgtggagtaccgttgcttcgtcggcggacttgcctgggccaccagcaacgagtcgctggataatgccttcgcctcctacggcgagatcctcgacaccaangtcatcaccgaccgggagacggggangtcccgcagcttcggcttc

SEQ ID NO: 39619 - DNA, 271 bp, Zea mays
  unsure (1)..(271): unsure at all n locations
ggaatgagcagcgaaggttactgaagaaaacatcgcaacactatttataaattgcggacaggttgtggactgtcgcatgtgtggggacccaaattcagtccttaggtttgctttcatagagttcacagatgaggtctgacgatgaacgtgaaatgtgtgcaaggactatctactgcacaaacattgacaagaaggtttggtacctgcactcatgctactaccactaggtattcattctgtcatggttctgttttaatacacgcangtcact

SEQ ID NO: 39620 - DNA, 197 bp, Zea mays
gttcaatctcacctccaaccatgggtaaagagaagtcccacatcaacattgtggttataggccatgtcgactctggcaagtcgaccaccacaggacaccttatctacaagcttggaggcattgacaagcgtgtgatcgagaggttcgagaaggaggctgctgaaatgaacaagcggtccttcaagtacgcgtgggtg

SEQ ID NO: 39621 - DNA, 297 bp, Zea mays
cacacccgagcatatcacagtgacagacacgatggtgagcgccagaattgttgtcctcctcgccacgcgcctatgcgctgccgccgcagtcgcgtcgtcctgggaggacgacaaccaccaccaccacgggggccacaagtccgggcaatgcgtgcggcggtgcgaggaccggccctggcaccagcgcccccggtgcctggagcagtgcagggacgaggagcgggagaagcggcaagagcggagcaggcacgaggccgacgaccgcagcggcgagggctcgtcggaggatgagcgaga

SEQ ID NO: 39622 - DNA, 285 bp, Zea mays
ctagaacgaggccgcgtgcaggcggcgagcgaccgtctggacaggctgtacgggaggcatgggcaggacaaggggatcatcgtgcgcgccacggaggagcagacccgcgagcggcggcgccacgcctcggagggcggccacggcccgcacgggcccctgccgccgttcggcgagtcgcgcggcccctacagcctcctggaccagcggcccagcatcgccaaccagcacgggcagctctacgaggccgacgcgcgcactttccacgacctcgccgagcacgacgtc

SEQ ID NO: 39623 - DNA, 282 bp, Zea mays
tcaagctctatgtgcgacgtgtcttcatcatggacaactgtgaggagctgatcccagagtgagtgagctttgtcaagggtattgttgactctgaggatcttcccctcaacatctctcgtgagactctccagcagaacaagatcctcaaggtcatccgcaagaatcttgtcaagaagtgcgttgagctgttttttgagattgcggagaacaaggaggactacaacaagttctatgaggccttctccaagaacctcaagcttggcatccacgaggactccacga

SEQ ID NO: 39624 - DNA, 156 bp, Zea mays
  unsure (1)..(156): unsure at all n locations
ttcagaagatataggatgctgtaccaaaacaccatgcccataaagaaactccacttagcgaatttttcgatgtacaagttgtggcnatgtccagttatgcagtcaaagaagagttgttcaaacagcaggtttctgatttaagagataggtttcagt

SEQ ID NO: 39625 - DNA, 199 bp, Zea mays
gaaattcagctgcagcttgagaagatgaagaaatatgcttctgttatccgtgtcatagctcatacccagattaggaagatgaagggtttgaaacagaagaaggctcacctgatggagattcaggtcaatggtggtaccattgctgacaaggtggactacggctacaaattttttgagaaagaggtccctgttgatgctg

SEQ ID NO: 39626 - DNA, 198 bp, Zea mays
agcgcacacacacacaaccagatcgcccccaaatccacccgtcggcacctccgcttcaagatgcagatctttgtgaaaacactgacatggaagactatcaccctcgaggtggagtcgtctgacaccattgacaacgttaaggccaagatccaggacaaggagggcatccccccagaccagcagcggctcatctttgct

SEQ ID NO: 39627 - DNA, 322 bp, Zea mays
cgcactcgcacgtacaccacactagttaccacagacgacgggcgccatgaaagtcccggtgcttctcctcctggtctccctgtgcttctcgctcgcgctcgcgtggcaaacggacacggaatcgggctcaggcaggccgtaccactacggcgaggagagtttccggcactggacgcgctcccggcagggccggttcagggtgctggaacggttcacccacgagctgctggaggacgccgtcggcaactaccgcgtcgccgagctggaagccgcgccgcgcacgttcctgcagcccagccactacgacgccgacgaggtgatg

SEQ ID NO: 39628 - DNA, 301 bp, Zea mays
cggacgaggtgctcgggacagcaacctccagatcgtgtgcttcgaggtccacgccgacaggaacgagaaggtgttcctggccggcgccgacaacgtgctgcagaagctcgaccgggtcgccaaggcgctgtcattcgcctccaaggcggaggaggtggacgaggtgctcggctcgcggcgcgagaaggggttccttcctggccccaaggagagcggcggccacgaggagcgggagcaagaggaggaggaggaacgcgaagaacgccacggcggccgtggggagagggaagccacggacgtg

SEQ ID NO: 39629 - DNA, 325 bp, Zea mays
gccgcttcctccaaagccacaccaaacccccgcttccagaaccttctcgaaactctccgcctcctcctctactcgctccgatggcgaaggaaccgatgcgcgtgctcgtcactggcgccgcaggcaaattggatatgctcttgttcccatgattgctaggggagttatgcttggtgcagaccagcctgttattctgcacatgcttgatattccgccagcagctgaagcccttaatggtgttaagatggagttggttgatgctgcatttcctcttctgacaggagtcgttgcgacaactgatgttgtggaagcgtgcacaggcgtg

SEQ ID NO: 39630 - DNA, 147 bp, Zea mays
  unsure (1)..(147): unsure at all n locations
tcgaaattgtgtcgtcaggaaaggtgctccaacaacaacactgatcactantgcaatgacaanaatagtggctagtgtattggagaagaacaacttgccaggcgcaatttttacatctttttgtgggggcactgaaattggtcaagc

SEQ ID NO: 39631 - DNA, 318 bp, Zea mays
ttggcattgctgaacagatgggtcggacacttcaaagaacttcaatttccactaacataaaggaaaggctagacttctcttgtgctctctttggtccagatggtggcctgttgcaaatgcacctcatgtccctgtgcatctaggagccatgtctagtactgtttgttggcagcttaacttttggggtgagaacctcaatgagggtgatgttcttgtaacaaatcatccatgctctggggggagccatcttccagacataacagttgtcacgccagtctttgatcacggtaagcttgtcttttttgttgctagtcgagg

SEQ ID NO: 39632 - DNA, 183 bp, Zea mays
ctcgagccgagtcgctatgaacacttggctgccacaagccagtcatccctgtggtaactactctgacacatctagcttcaaactccgaacgtctaaaggatcgataggccacgctttcacggttcgtattcgtactcgaaatcagaatcaaacgagcttttacccttttgtaccacacgagat

SEQ ID NO: 39633 - DNA, 313 bp, Zea mays
agtagatgcctttcttgagctagttgtgaggatttctgaactgaggcatcctaacatacttggtcttgttggatactgtgcggagtttgagcagcgattacttgtctatgagtactgtagcaagatgaccctacatgatgaacttcgtcatgtggatgactcaagcaagccattatcgtggaatgctcgcctccaagttgcttcagaggcagcaaaagcattgcaacatcttcatgacggttgccaaccaccagttgtacatcagaattttgaaccctcggttgttctgctcaacagcaccttagttgtgcat

SEQ ID NO: 39634 - DNA, 303 bp, Zea mays
  unsure (1)..(303): unsure at all n locations
cttcatcaacgggcagaccaacgaccccggcgtggccggcaacggcgcgacgttctacgtcctggtgttcgccatcctggccggcgtggtgggcgcggcgtccaagctggcgggcgtgcaccacgtgcgcgcctggcgccacgacagcctggccaccaacgccgcgtcgtcgctcatcgcctgggccatcacggcgctcgccttcgggctggcctgcacagagatccacatcggcggacaccgcggctggcgcctgcgcgtgctggaggccttcgtcatcatcatcgncttcacgcagctcct

SEQ ID NO: 39635 - DNA, 285 bp, Zea mays
caaaatgacggccaccatcaagaagactacgagggtgatcggatggtaccactcgcacccacatatcactgttctgccgtcccatgtagatgttcgtacccaagcgatgtttcagttgctggatacaggctttgtgggccttatattttcttgttttagtgaagatgctcaaaaggttggaaaaatccaagtgtatgcctttcagtcagagggtggacaacagcatgcctttctcttgccaatgctgcagttattgaccttgattcatcgctgagttcatcagat

SEQ ID NO: 39636 - DNA, 295 bp, Zea mays
cagaagctcaaatactgatctcactgatccagtatggctatggcaaaggcaggcgcgccgagggtctcggcggcccagctggtgacgctcgggctatcacgcctctgcgctgtcgccggcccggccgccgcgcagaaccgcggctgccagccaaacgtatgctgcagcaagtttggctaccgcggcacgaccgacgagtaccgcggcgacgggtgccagtcgggcccgtaccgctcgggcggcggcggcaacagtggcggcggtggtgcgaacgtggctagcgacgtcaacggct

SEQ ID NO: 39637 - DNA, 184 bp, Zea mays
ataaagggttatgatggtgcaaaggctgacatatggtcttgtggggtcatcctatttgtgctattggctggttatcttccgttccatgataagaacttgatggacatgtataagaagattgagaaagctgacttcaaatgtccaagttggttttctaccgatgttcggaggcttttgcaaagga

SEQ ID NO: 39638 - DNA, 305 bp, Zea mays
  unsure (1)..(305): unsure at all n locations
gctttttaccagaaacagcaaccttatctgcattgaccacaataacaaaagctttataggaggcactccggaaggcctggagggatgaaagaagaaacttttgaccaacttcagaaaagaattccagagagaatcattgaacatgcggttcgtggcatgctccccaagggaaggctgggaagaagattatttacccacctcaaggtatacaaagggacagaacatccgcacgaggctcaaaaacctgtcccactcccgatcnnaggataaagaatacnaaaaactggatagangatcatcgactg

SEQ ID NO: 39639 - DNA, 183 bp, Zea mays
ctcatcgaagagtcgaacgttcaaccggtgaatagccctgtgacggtttgcggtgacatccatgggcagttccatgacctgatgaagctcttcgcgacggggggctacgtcccagagacgaactatcttttcatgggtgattttgtggaccgtggcttcaacagtctggaggttttcaccatc

SEQ ID NO: 39640 - DNA, 168 bp, Zea mays
  unsure (1)..(168): unsure at all n locations
cccgagcatatcacagtgacagacacgatggtgagcggcagaattgttgtccgcctcgncacccgcctatgcgctgccgccgcagtcgcgtcgtcctgggaggacgacaaccaccaccaccacgggggccacaagtccgggcaatgcgtgcgtgcgtgcgaggaccgg

SEQ ID NO: 39641 - DNA, 309 bp, Zea mays
agtactagatcgcgagcagccgcccgcgatctacgactagccgcccggtcgccagtactcctccatgggccacggctgacgggtgcacgcacccgtatgcatcccttgctgctctaattcccgacgctctagctcgtgtaccagatgtgcagactgtcgcctagccctgctccggcgtgaaggacttctgcttctgcccctgcgcataacgcccttggtcgcgcacatcggcatgttcctcggcccgacggctactgtcttgaggcatacggtggccgcccacttcgtacccagtcaccagatctcaag

SEQ ID NO: 39642 - DNA, 273 bp, Zea mays
  unsure (1)..(273): unsure at all n locations
caccacancacacccaggcgccgcacaggtacatcgccggcggcgatgacgacgcgcttcaagaagaaccgcaagaagcgcggcaacgtgtccgccgggcacagccgcatcggcaagcaccggaagcatcccggaagtcgcggtaacaccggtagcatgcaccaccaccgcatcctcttcgacaagtactctcacggctacatcggtaaggtcggcatgcgctacatccacaagctccgctacatattctagagncccgcggtcaacatcgag

SEQ ID NO: 39643 - DNA, 240 bp, Zea mays
aaagagactttatcaagatgccatgagcatactcaggcctcaggaccgagagcttgactagtctgtggtaatacagcctgacaataatagctctctttacagggatcttaaaaggatacgtgagactgatcttggataggtctcccaatgctgtctgactaaacatgttttcaaggcgaacaagcatcagtatcttgcaaataatgccctgaaaataaatgttaaggttggcggaaggaa

SEQ ID NO: 39644 - DNA, 231 bp, Zea mays
  unsure (1)..(231): unsure at all n locations
gacagtacgaaaacgaccataccatcatcgctccaacgccgccgctatggctaagtacacgcaggaancgggcaacacaaccnnntcaggcangaccatgggaanganccagaggatccacatcaagaacacaaggaagacagcttttacgcatcgcaagcagcctttgaccaaagctaagcgatacaatgaggatgttataactcacaagcaggcaatacccaaccggag

SEQ ID NO: 39645 - DNA, 275 bp, Zea mays
  unsure (1)..(275): unsure at all n locations
cccgtaccatatcaccatctcccagatccaattcgcgagtacacccaactcagncgccatggcgctctctgtggagaagaccacgtctggacgggagtacaaggtcaaggatcactcgcaggcggacatcggccgcctcgagattgagcaggccgaggtcgaaatgaccggcctcatggcgtgccgcgccgagttcggcccgtccaagcccttcgccggcgctaggatcacggggtctctacacatgaccatccagaccgccgtcctcatcgaga

SEQ ID NO: 39646 - DNA, 198 bp, Zea mays
agcttccaggaagttcttcgtgggtggcaactggaaatgcaacggtactggcgaggacgtgaagaagatcgtcaccgtgctcaaccaagccgaggtgccctctgaagacgtcgtcgaggtggtggtgagtccgcctttcgtttttctgcagcaggtcaaggggctgctgcggctggacttcgccgtcgcagcgcagaa

SEQ ID NO: 39647 - DNA, 262 bp, Zea mays
  unsure (1)..(262): unsure at all n locations
cgcgcctgcagaggatcggaggaaccagtagcggaggcctcgattttcggcgggcgcaataaatttcccgcatagctcggacggccgcgtcctcgctcgtcacccgcagcctccaggcgagggcccctgccggcgcgccgcccgcagccccctctgcgcagcgcaggacagtacctgcagatgggatgcacaggctgttgccaggtgtccttcagaggttcagcacagcnacagcagtagaggagcccatcacaccgtcagt

SEQ ID NO: 39648 - DNA, 54 bp, Zea mays
  unsure (1)..(54): unsure at all n locations
cnccncnaagaccggcagggattcacaggacgcccttncnccgcaggttgatgt

SEQ ID NO: 39649 - DNA, 238 bp, Zea mays
gattcatactcatccttcacaaacatgctttctatcatcgatcgacttgcatactcaatacacttaccaggttatgttaccagaggctgttgcaattgtggtcgcacccacagatccaaccaggagttacggaatattcaggctgactgaacctggagggatggatgttcttagggagtgtgacgaaagcaggttccacactcaccgagagacaaccaacggcagcccaatctatgaa

SEQ ID NO: 39650 - DNA, 294 bp, Zea mays
cgataccatctcaagtactccaactggtgttgaaacacctgatgttatcgaccttcggaagctgcagaggaaggagactgacaagcaggcagaacggccgctgtaccaggttcttgaacaaaaggaagaaaggatcgcccctgggactctatatgggtcaagccatacgtatgtgttgggaacacaagataaatcatcagctccgaaaagggtggatcagcttaagaatcaaaagtcagacaaggtggacgtcaccatccaacccgaggaactggaagccatggatgatgttct

SEQ ID NO: 39651 - DNA, 303 bp, Zea mays
tctagttctagatcgcgagcagccgcccgcgatcaagaacaaggactctttgatgcaattatacctcattgatgcaattgatgaaaacagacaaataacgactgttggacgagttatagcagagcttcctcttgagccgtctctttcaaggactttgattgaagcaaatgaattgggatacctatctcaggcgttaacagttgcatcgattttgtcagcagaaataacatagcgatcagttagcaaggacgtggtggatggaaagaggaaaaggcaggagctccctgatgggtctggctgggg

SEQ ID NO: 39652 - DNA, 160 bp, Zea mays
cgcgacttttttttcaagaagacaggagaagggagtcgtagtgagtcttaagaatcgcgagtccacaggcagtggggcaaggagaacgaggccacttcgttctgaagagcggacacaccattccggccgttggtctaggcacttggagggccggctcaga

SEQ ID NO: 39653 - DNA, 145 bp, Zea mays
gtccctgacgggcaagcacccgccgggcgccgaccagctggaccacgccaaggcgaggctggcgtccaaggcccgcgacatcaaggatgcagcacagcaccgcatcgaccaggcgcaggggtcttgagagaagaaccacactcga

SEQ ID NO: 39654 - DNA, 311 bp, Zea mays
gagagagcaggaagcaggggctagacgcggatcggcgagcatgaagagcggcggcggcggcgggatgatggcacatgaagagagggtgggccatgcggagatcccgaccagtttcggtcccgagctgcgcgcctgcctccgatgccgcctcgtcaagacctacgaccagttcagggagaccggctgcgaaaacagcccgtttctagagatggacagagagcacgacaacgtcgtcaacagcaccacacccaacttcactggagatatcactctgatggaccccagtaggagctgggcagcccgttggttga

SEQ ID NO: 39655 - DNA, 316 bp, Zea mays
gcagtgttcaagaagagtgccatgagactagcgctcttggtggcaagggcagcgagtcccacaaggctgcggttacaggcgacacggttggagacccattcaaagacactgctggaccgtcgctgcatgttcttatcaagatgctcgccacaatcacgctggtcatggctccgatattcttgtgattaaccaaccactcatcaagcttgctattaaccctgcggagatgtacctatgcgaccaggtagatgaagtgtgtgtgtgtgtgtgatactgcatgtgatgatgtaacggtccaatcggtttgtgtcacgac

SEQ ID NO: 39656 - DNA, 188 bp, Zea mays
tgtagctgttaggattgaaagtcaactcaaacttgtcatcaggcctatgtattcaaacccacctcatcatggtgcctctatcgtagctaccatactcagcgacagcgagatgttcaacgaatggacactggaacagaaggccatggctgataggatcattaacatgaggcaacaactatttaatgcgc

SEQ ID NO: 39657 - DNA, 257 bp, Zea mays
gttggcttctcctccccctccggttcgggttcgggttcgtgaggtcctccggggttcggtttcgtgggtaggcggatcgagatggcggcgtcggatgttgagtaccgctgcttcgtcggcggcctcgcctgggccacggacgaccacaccctccacaacgccttcagcacctacggcgaggtcctcgagtccaagatcatcctcgatcgggagacgcagaggtcccgcggcttcggcttcgtcaccttctccacgga

SEQ ID NO: 39658 - DNA, 227 bp, Zea mays
atttgatcgtggttatatatctccgtactttgtaacagacagtgagaaaatatctgccgagtatgggaacagcaagctacttttggttgacaaaaagatcaccaacgcaagggatcttatcaatgttttggaagaagccatcagaggtggatacccaatcctgataattgctgaggatattgagcaggaggctcttgctacacttgttgtcaacaagctcagaggat

SEQ ID NO: 39659 - DNA, 242 bp, Zea mays
tctcttccgcacagcttctcgcaccggattccggataccctcagctctttccctaacgaaggtagccatggcggagagaggtaaggcgatcagctcaggcgccgccaagaaggccacgtccaggagctccaaggctggcctccagttccccgtgggaaggatcgccaggatcctcaaggccggcaagtatgccgagagaatcggcgccggcgcccctgtctacatcgctgccgtgctcgagt

SEQ ID NO: 39660 - DNA, 303 bp, Zea mays
  unsure (1)..(303): unsure at all n locations
acaatgtgccttacaatgtgctcatttctgactgtggcaagagggttttcctgttcccccagtgctacgcagagaagcaggctctgggtgaagtgagccaggagctgctggacactcaggtgaacccagctgtgtgggagatcagtggacacatggtgctgaaacggaggatggactatgaggacgcatctgaaacctacgcgtgganactacctcgcagagtctctctctccgaggagcgcttcagagaagtgaaagcgtacatcttcagcgctgctaggctagttcagtatgatcgagaag

SEQ ID NO: 39661 - DNA, 323 bp, Zea mays
  unsure (1)..(323): unsure at all n locations
cgccggattaagcacattgagagcgctagatacgtgtcatatcacataaacaatggtgaacgctcgtgctgtagttggtagcagcgatggtatcaagggcaccatctttttcacacaagtaggagaatagcctaccacagtcaccggaagtatctcaagcctcaagcctggcctccatgggtttcatgtgcatgcacttggtgacaccaccaatagctgcatgtcaacaggaccacactacaatcctgcgagctaggaacatggagcaccagaagatgagaaaagccatgacggtgatcttgganatgtgacagcaggagcag

SEQ ID NO: 39662 - DNA, 307 bp, Zea mays
gtttgtccattcgcataggtctgaatacagtagctacaagcgcgagtaccactgtgccgcagctgcctgctcgccattacagcaagctgtgttcaatcaaagcttaattaggctccctctacatctgatccagctaagtagctagccagcactacagaagggcgtggcaagaatcaggagagagatagcaggggggctagctagctgagctcgtgcgacgaagaatggccggaattggcaggaacatggtggcgccgctcctggtgctcaacctcatcatgtacatcatcgtcatcggcttcgcgag

SEQ ID NO: 39663 - DNA, 305 bp, Zea mays
cgcactcgcacgtacaccacactagttaccacagacgacgggcgccatgaaagtcccggtgcttctcctcctggtctccctgtgcttctcgctcgcgctcgcgtggcaaacggacacggaatcgggctcaggcaggccgtaccactacggcgaggagagtttccggcactggacgcgctcccggcagggccggttcagggtgctggaacggttcacccacgagctgctggaggacgccgtcggcaactaccgcgtcgccgagctggaagccgcgccgcgcacgttcctgcagcccagccactacg

SEQ ID NO: 39664 - DNA, 302 bp, Zea mays
cccgtgcaatcatcgttgatcaagaacccacagtgatcgatgaggagcgcacaggcacgtaccgccagctcttccacactgagcagctcatcagtagcaaggaggatgcagctaacaatttcgcccgtagccattacacaattggcaaggagattgttgatctgtgccttgaccgtatccgcaagcttgctgacaacagcaccggcctccagggattcctggtcttcaataccgttggtggtggcaccggctctggccttggttctctcctccttgagcgcctgtctgtggagtacggcaag

SEQ ID NO: 39665 - DNA, 126 bp, Zea mays
gtacggcggcgagcgagcagcaggaagggcgtcaacatcgacgagtccaagttcaccaagtagtcctatagacatgtgcagttgcgtacgcagcgttcgtagctgtctgcgtagtgtaccttggcc

SEQ ID NO: 39666 - DNA, 325 bp, Zea mays
cgtcctgtccttcccttacccggcggcttaaaccctagttctcactcccatcgccgcttcagctccgccgcagcagatggagttctggggtctcgaggtcaagctggttccatgtaagtgtgagcctggataaggctgtgtgacctttccaggctgctcttggggaatcgaagaagagtgataatgccttgatgtatgtcaaaattgatgatcagaaacttgccattggaaccctctctgttgacaagaacccacacatacaatttgatctggttttcgataaagagtttgagctgtcgcacacatcaaaaactaccagcgtctt

SEQ ID NO: 39667 - DNA, 329 bp, Zea mays
  unsure (1)..(329): unsure at all n locations
cggaagatggtcaccatcgtggatcctcatatcaagcgtgacagttcatttcacctccaccaggangcaacagacaaggggtactatgtgaaagatgcaaatgggaatgactatgatgggtggtgctggcctggatcatcttcctatcctgacatgctgaatcctgagatacgcgagtagtgggctgacaagttctcctatgaaaatcaaagggataactccgacatctaatttggaacgatatgaatgagcatctgtcttcaagagcctgaggtcacctacgccaggatgcgatgcattatggagatgttgaacaccgagaattgcac

SEQ ID NO: 39668 - DNA, 347 bp, Zea mays
  unsure (1)..(347): unsure at all n locations
gtccattcgcattggtctgaatactcgtagctactagcgcgagtggcactgtgccgcagctgcctgctcgccattactgcaagctgtgttcaatcaaagcttaattaagctccctctacatctgatccagctaagtagctagccagcactacagaanggcgtggcaagaatctatggagagtagactagcagggtgggctcagctagctcgagctcgtgcgacgaagaatggccggaattggcaggaacatggtggcgccgctcctggtgctcaacctcatcatgtacatcatcgtcatcggcttcgcgagctggaacctgaaccgattcatcaacgggcagaccaa

SEQ ID NO: 39669 - DNA, 341 bp, Zea mays
agctgaccatatggaggtggataccagcggtgatgacatgggtcacaagtcaagaagtgaaaggtctatccagcggcaggagttgccaatcactgagtacatctgttgtgcaatgagcaagcaggaactgccggaagctcaggagcaagagcaccaattcggcttaatgcagggagtaaactctatgcgaacgtgacagaaggagcaggaagaatgcattagaatcttatgtatatgacacccgtaacaagctttctgagaggtaccggagctttgctactgattcagaaagggaacaaatctcatttaatttacaacagactgaagattggctttatgaa

SEQ ID NO: 39670 - DNA, 340 bp, Zea mays
agctggcttgacaactgaaaatgtgcactttgttgaggttgtcggatctggttctcgtgttccagccataatcaagataatcactgatttttttgggaaggagccgagacgaaccatgaatgcaagcgagtgtgttgcgcggggctgtgctctccagtgtgctattgctcatgccccactgttcaaagtgtcgggaattccaggttaatgatgggtttcctttctcaattgcattgtcatggaaacaagactcgcagaacagtgcaccccaacagacccttgtatttccaaaggggaatgtaattcccagcattaaagctctaaccttctataaatccag

SEQ ID NO: 39671 - DNA, 312 bp, Zea mays
atcatgggttatgtggaagaggatctggtttctaccgacttccttggtgacagcaggtcgagcatcttcgacgccaaggccgggatcgctctgaacgactattcgtcactcgctcgtggtagaaagatgaggtaacaccggtcgtcgacctgatccgccacatgttcaagacccagtaggggtttttcccccctgcttctcatggatggttgcagcttgtgtatgccgagaataaatgtggatggcgcgtgcctctgggtcgccaggtacatgctgagtctggacatgttttgcacttttgtttcccttcct

SEQ ID NO: 39672 - DNA, 264 bp, Zea mays
cgcagagtcgcagtcgcagcacacactgaattctctttagctagctaagagagggtagccacaccaagacaggatgcagacagcgaaggtgaaggcgaaggacatggtgagctcggcgaaggagaacgtcaaggatgggtcggcaaagatgcagggcaatgatcggtgcgagcgcgacgtgcggccacgcacgtgcgagaaggagatggccaaggaggcggccgcgccaagaaggaccaggccaacgccgacaagcaccaggag

SEQ ID NO: 39673 - DNA, 290 bp, Zea mays
acacacccgagcatatcacagtgacagacacgatggtgagcgccagaattgttgtcctcctcgccacgctcctatgcgctgccgccgcagtcgcgtcgtcctgggaggacacaaccaccaccaccacgggggccacaagtccgggcaatgcgtgcggcgtgtgcgagcgaccggccctggcaccagcgcccccggtgcctggagcagtcagggatgagagcgggagaaccggcaaacggacaggcacgaggccacgaccgagcggcgagggctcgtcggaggatgagcga

SEQ ID NO: 39674 - DNA, 322 bp, Zea mays
ctcggtgcggcgcgtcgttcggacacggagatacagcggcgattccggcgatggagtacgtgaaccccctcaccggcttccgcgtcgactgccgccggcccaacgagatgcggcaactcaagggcgaggtcggcgtcgttgtgcgcgcagacgggtcggcgctgtttgagatgggcaacaccagagtcatcgccgccgtctactgccgcgagatttcagaacaaaggtcagcaagtaaacagcaaggaggctttggttcgttgtgagtacaggatggcagagtttagtacaggagatcggaggagaaaaccgaagggtgaca

SEQ ID NO: 39675 - DNA, 305 bp, Zea mays
gtttgtccattcgcattggtctgaatactgtagctactagcgcgagtgccactgtgccgcagctgcctgctcgccattagtgcaagctgtgttcaatcaaagcttaattaagctccctctacatctgatccagctaagtactaccacactgccaaaggcgtggcaagaatcaggagagagatagcaggggggctagctagctgagctcgtgcgacgaagaatggccgaatggcaggaacatggtggcgccctcctggtgctcaacgacacatgtacatcatcgtcatcggcttcgcgagctggaa

SEQ ID NO: 39676 - DNA, 272 bp, Zea mays
acgccggagagcggtgaagaagcatggagatggagcagctctagtcgctgctccgcgacctcgacgcgctcaagcagcatcccgacgacctcacttccaccatcgatcggatgcgggagcggctagtgaacgatgatgaacccgacagccggtgccgcttctcgatccaagattaaggacatgagttcagaagtggtggacaacaatccctacagcagacttatggcgttgcaacggatgggcgtagtggagaattatgagcgcatcaggga

SEQ ID NO: 39677 - DNA, 192 bp, Zea mays
caagacggcctgctccacacgacttgtggcacgcctgcttatgttgccccagaggtgattaacagaaagggttatgatggtgcaaaggctgacatatggtcttgtggggtcatcctatttgtgctattggctggttatcttccgttccatgataagaacttgatggacatgtataagaagattgagaaagct

SEQ ID NO: 39678 - DNA, 220 bp, Zea mays
cagccccagacaacactcaccgatagcaagtagcgccgccgacgtttcgagagcagagtatccaagctagccaagcgcgcacctcggtgacctagctagctacctagctagttcaggcgacgatatggcgtctggtcaggagagcaggaaggagctggaccgcaatgctcgcgagggcgagaccgtcgtccccggcgggaccggcggcaagagcgtcgag

SEQ ID NO: 39679 - DNA, 313 bp, Zea mays
gtgccacagccttcatgtccatgtcctacccttgttcagattctacaggggagcacagggacgactctgtagcttcagttgtacaaacacaactattaagaagttcagggatgcactcgcgaacacaagccagatagatgtagccttggcccaaccagggggctagaggaatctgagttattagccttggcggcaaacaaggacctgcagttcacctacgcgaaggaggaaccagaactgatccccaggggagatgctcctggggaggtcgttgctcctgagcctgcaaagcttcctgcggctccaaagcctt

SEQ ID NO: 39680 - DNA, 313 bp, Zea mays
ggaacgtgacgaggtgcgcaacggcgctggaggaggctggctccgactacgagatcgtgcccatcaacttcgccaccgccgagcacaagagccccgagcacctcgtccgcaacccgtttggtcaggttccagctctgcaggatggtgacttgtacctcttcgaatcacgcgcaatctgcaagtacgctgctcgcaaaaacaagccagagctgttgagggaaggaaacctcgaggaggcagcaatggtggatgtttggatcgaggtggaggctaaccagtacaccgctgcactgaatcccatcctcttccaggt

SEQ ID NO: 39681 - DNA, 314 bp, Zea mays
atccgatctgccacctcgccgtctcgcacgttcctttccccaactccccagcgcctctccgcgccgcgatccagatccaggttgttcagcatgggtctggtgaaggaaggcgtcgacatggaggagggaaccctagagatcggcatggagtacaggactgtatctggtgtggccgggcctctggttatcttggataaagtaaagggcccaaagtaccaagaaattgtaaacatccgacttggagatggcaccactcgccgtggtcaagtccttgaagttgatggagaaaaagctgttgtgcaggtttttgaagg

SEQ ID NO: 39682 - DNA, 305 bp, Zea mays
ccgaggtgcccgccgcgcccagccggcctcgccgaccgggcccgccggcccctatataggcaggcgccacttcctcctcgcaaccaccagacgccagtccaccaccgcttcccgtgcagcgccctccctatacgttcccccatttcctgtatcggcggcgatggcgcggcacttcgtgctcaacaccggcgccaagatcccctccgtggggctcggcacctggcagtctgaccccggcgtcgttggcaacgctgtctacggcgccgtcaaggcgggttaccgacatatcgattgttgcagagttt

SEQ ID NO: 39683 - DNA, 163 bp, Zea mays
caaacttctactggcttggtttgcttacccatctacaatctacatctgtaccaagaaaggatgtatcatgcatcaaggaattgacgacattatatgaaaatgcaacgattgatgatctgtatattgcatatgagcacctgaaagttgacgattcttctttgtt

SEQ ID NO: 39684 - DNA, 314 bp, Zea mays
gcgcctgaacctggcgtccttcgtcaccacgtggatggagcccgagtgcgacaagctcatcatggactccatcaacaagaactacgtcgacatggacgagtaccccgtcaccactgagctccagaaccgctgcgtaaacatgatagctcacctgttcaacgcgccgatcaaggaggacgagacagctattggggtcggaacagtgggatcctcggaagcgatcatgcttgcaggtctggcgttcaagaggaaatggcagaacaagaggaaggagcaggggaaaccgtgtgacagacccacatcgtcacggtgca

SEQ ID NO: 39685 - DNA, 266 bp, Zea mays
ggatagcttaccccccatcgacggtcggtgagccgttggtgagtcgcgagacagcgggtgcgctgggcaagaacaggcgacgaagaagatgagcacgctggacacgcggacgctcaactacgagctgacgagcatggacaggaagcgcctcgtggacctcggccacccgctgctcaaccgcgtcgccgacagcttcatccgcgccgctggggtcggggcggccaggggcgtctccagggaggcctacgtcgtcaccgtcgaagggc

SEQ ID NO: 39686 - DNA, 294 bp, Zea mays
ctccgcgccgccacagccgggcgcgcctctcgatcgagatccaggagatatccctcgttatgatgatcgccatgggaatacacgcttgtatctcggaagattggcccctcgcacccgttcccgcgacctagaatatcttttcagcaaatatggaagaatacgtgaagtggagttgaagcgtgactatgcattcattgaattcagtgacccccgtgatgctgatgatgcgcagtacaacctagatggcagggaagtcgatggaagccgtattattgttgaatttgctaaaggagt

SEQ ID NO: 39687 - DNA, 87 bp, Zea mays
cccgactcgtcagacgtcagccagcagtccgaaaccaaggatcgatccaggagcttccggaaggctaggcgcgcgcgcagatccgag

SEQ ID NO: 39688 - DNA, 257 bp, Zea mays
gcgcacacgagcagacccccgcagacagccaggcacactcgcgcgaccatgtaccgggcggcggctgtcatctcgaggtcctcatcagcactgcggaggcagctcgcgcggggcgtggccggggagctgccgcgtctgttggcgcgagggtatgcggccacggcgaaggaggtgtccttcggcgttggcgcccgcgccgccatgctgcagggcgtcaacgacctcgccgacgccgtcaaggtcaccatgggccccaa

SEQ ID NO: 39689 - DNA, 299 bp, Zea mays
catttggaggctatggccaatctcaatataccaaaagatctagcaagtgatgaagcgaatcgttacttgatagaagcatgtgctaaatatgatgtgaaatgtccacctccccaaacgacgtcacggttgcttgacaagttagttgggcatttcttggaggagacatcgtgtgaatccaacatttatcatcaatcatccagagataatgagtccattggcaaagtggcataggtctcgacctggattgactgagaggtttgagctatttgttaacaaacatgaggtgtgcaatgcataca

SEQ ID NO: 39690 - DNA, 98 bp, Zea mays
tcggcaatccttcgccaatcctattttacccaattagcagcacagaggtgcgctgtttggttgatgtccctggtcagaaggtgccttccatagctagc

SEQ ID NO: 39691 - DNA, 133 bp, Zea mays
cgccacatcgagaacacgatcgagcacacacaagcacgaagactcgtttaggagaaaccaccaaccacccaatcggtgcaagcatcatggagtacggtcagcaggggcagcgcggccacggcgccactcgcca

SEQ ID NO: 39692 - DNA, 310 bp, Zea mays
ctttgttccattttctaattattcacctccgtcttccttatctgctgcattccaatcccatttaaattttaaccttcaacaatttcgtcttctcggtttctgacttattccggagcattttttttttcttgtttcgagcctgtgagtctgattccattttgacccatggcggcgactgcggttcatgagccggaggtgatccgcgacaaggcggcgattcgcgcattgtcgcgccgccgccgcgctgagggaaatgccgtcgctttagtccccacgatgggcttcctccacgatggacacctctcgctca

SEQ ID NO: 39693 - DNA, 304 bp, Zea mays
cgaggccatcaagcacacccagggcgagggccacccggtcaagctggtgccctacaaccccggctaaccaggacgagtcggtgctgtggacggagagccgcgacgtcggccacggcttccgctgcgtccgcatggtcaacaacatctacctcaacttcgacgccttccacggcgacaaggaccacggcggcgtgcgcgacggcaccaacatcgtgctctggaagtagtgcgagggcgacaaccagcgctggaagatcgtccctaggtaaatgtgctgttctgtggctgcactggtcatcaccat

SEQ ID NO: 39694 - DNA, 253 bp, Zea mays
ccggcttctcctccccctccggatcgggttcgggttcgtgaggctctccggggttcggtttcgtgggtgggcggatcgagatggcggcgtcggatgttgagtaccgctgcttcgtcggcggcctcgcctgggccacggacgaccactccctccacaacgccttcagcacctacggcgaggtcctcgagtccaagatcatcctcgatcgggagacgcagaggtcccgcggcttcggcttcgtcaccttctccac

SEQ ID NO: 39695 - DNA, 246 bp, Zea mays
cgcgtcggggcgcccgtacccgcgcttcgcctgccacttcgacccctacggcccgatctacggcgaccgggagcgcgcccagatcttcgtctcggacgccggcgtcgcggccgtggcgttcgggctgtacaagctggcggcggcgttcgggctctggtgggtggtgcgcgtgtacgccgtgccgctgctgatcgtcaacgcgtggctggtgctcatcacgtacctgcagcacacccacccggcgct

SEQ ID NO: 39696 - DNA, 188 bp, Zea mays
agggatgctctcatgctttctaattttgctttggagcagcagctacacacagcaagacaagaacttagtcatgcactctaccagcatgacgctgcctgccgtgttatagccaggttgaagaaggaaagagatgaggctagagcacttttggctcaagctgagagacagattccagcatcagttgcagg

SEQ ID NO: 39697 - DNA, 299 bp, Zea mays
ggttattgaagtggataagcttaaacaagagatgctgaagaagaatgatgaagtagctttgctgcattcagagatcgagtccaaggaacaagagcttcttgtagctaatcaggccattgcacgtcaagaagcaacaattagggagcttcgaagtgaaactaaaagaaaggaaactgaggttgagagattaaatgaattggcgaaagctaatgaagacaaactgaaatttgcagaacaggaacttgagaagcagaattcaggatggattgcagcacagcaagagttaaaggaattggcac

SEQ ID NO: 39698 - DNA, 293 bp, Zea mays
cgccgatatccgctgtatgattttgattttctcacccgggagaatgtgcagaaaagcaagattttcctcattccctggcccccgtcgacatcccgcatccgtgccaagatgctttaccccacctcgaaggaccgcatcaagtatgagctcgacgggttccaccacgagctccaggcgaccgacccatccgaggcggacattgaggttctgcgggagccggctcactgaagccggttcgccttcgaagaagaagggacctgtggagggctgtgaaccttttggtcagatgcaaa

SEQ ID NO: 39699 - DNA, 302 bp, Zea mays
agcaaaccctaccagccttttgcaaactcagagagggacccgatggcacccaaggcggagaagaagccggcggcgaagaagcccgcagaggaggagcccgcggccccggcggagaaggcccccgctgggaagaagccgaagcgcagaagcggctcccggcgggaaaatccgccggcaaggaaggcggtgttgacaagaaggggcggaagaaggccaagaagagcgtggagacgtacaagatctacatcttcaaggtgctgaagcaggtgcacccggacatcggcatctcctccaaggccatg

SEQ ID NO: 39700 - DNA, 299 bp, Zea mays
gtacaaccctgataagattgcctttgttcccatttctggttttgagggcgacaacatgattgagaggtccaccaaccttgactggtacaaaggcccaaccctgcttgaggctcttgaccagatcaccgagcccaagaggccttcggacaagcccctgcgtctgcccctccaggatgtgcacaagattggtggtattggaactgtaccggttggtcgtgtggagactggtgtcatcaagcctggtatggtagtcacctttggtccaaccggcctgactcccgaggtgaagtctgttgaga

SEQ ID NO: 39701 - DNA, 300 bp, Zea mays
agaacgtcagcacagaggctggaatgtttgcacttcgtgagacaagggcgcacgtcacccaggaggacttcgagatggcagtagccaaggtgatgaagaaagacacggagaagaacatgtccctgcgcaagctcctggaagtaaggctcgtacccacctttcacagcctccccgaagctagtagcagtaccttcatatccatatcttttaccaaagcagtggaatggtgtaacggcatgctctggacaatgttatctcaagttgcgccgcgcatggttatgtgtaaaattttccttataa

SEQ ID NO: 39702 - DNA, 297 bp, Zea mays
  unsure (1)..(297): unsure at all n locations
cccagcagtccagcactcggagctcgcgcgcccgacggcccaccatgatcatccccaagaagaaccgcaatgagatccgcaagtacctcttcaaggagggcgtgctgtatgccaagaaggactacaacccggcgaacacccacagattgatgtgcccaacctccaggtgatcaagctcatgcagagcttcaagtccaaggagtatgtcagagagaccttctcctggcagtaccaccactggtacctcaccaacgatggcattgagcacctacgcaaccanctgacactcncgtctga

SEQ ID NO: 39703 - DNA, 281 bp, Zea mays
ctcaaccgcaaaaaggagaacctgtcgagggttacgagtcgagacttccagctttctccggcaatgaatggagggtgcgtcaaattggctgccacaaatgtacgagacgacctgtagttttcactcagggcttgtttgggagcaagtcgaatgaagggtattgataggactataatcccttgctatctaaaattgaatagcggaggattatatcccctccaattcaccccattacctttacccccaaacaagccctcaatggtaatgatgatgcttttgtg

SEQ ID NO: 39704 - DNA, 288 bp, Zea mays
cgcaggctcaggcgcaacgcaacaacacaaggcggcggttatcgcctctgctgctgcgacggctacgatggggacggggcaggtgctttgcgtcaccggcgcatcagggtacatcgcgtcctggattgtcaggctcctactcgaccgcggctacaccgtccgcgccaccgtgcgagacaccgctgacccaaagaaaacattgcacctgactgcgttggatggcgctaaggataggctgcacttatttaaagctagcctgctagaagagggttctttcgatgctgcagt

SEQ ID NO: 39705 - DNA, 302 bp, Zea mays
cacagacgacgggcgccatgaaagtcccggtgcttctcctcctggtctccctgtgcttctcgctcgcgctcgcgtggcaaacggacacggaatcgggctcaggcaggccgtaccactacggcgaggagagtttccggcactggacgcgctcccggcaggaccggttcagggtgctggaacggttcacccacgagctgctggaggacgccgtcggcaactaccgcgtcgccgagctggaagccgcgccgcgcacgttcctgcagcccagccagtacgacgccgacgaggtgatgttcgtgaag

SEQ ID NO: 39706 - DNA, 190 bp, Zea mays
cgtgtccccaaaattcgatatgctgggatgcttcagtatgatgctgagttgaagcttccaagtcgctaccttgtttccccaccagagatagatagaacatctggggagtacttggtgaagaatggcatccgcacctttgcttgcagtgagacagtgaaatttggccatgtcacatttttctggaacggca

SEQ ID NO: 39707 - DNA, 176 bp, Zea mays
cacgcccgagcatatcacagtgacagacacgatggtgagcgccagaattgttgtcctcctcgccacgctcctacgcgctgccgccgcagtcgcgtcgtcctgggaggacgacaaccactactactacgggggccacaagtccgggcaatgcgtgcggcggtgcgaggaccggccct

SEQ ID NO: 39708 - DNA, 299 bp, Zea mays
caagaagctcagaagtcagatcagaagccgccgaggggaggcgccgacaccgagtttttgctccatcccgcatccaccgccagaatgtttctcacgaggacggagtacgaccgcggggttaacaccttctcgccggaggggcggctgttccaggtcgagtacgccatcgaggccatcaagttgggatccactgcgatcgggttgaaaacaaaggatggtgttgtccttgctgttgagaaacgtgtgacctcgccactactggaaccaagcagtgtggaaaaaatcatggaaattgatga

SEQ ID NO: 39709 - DNA, 297 bp, Zea mays
  unsure (1)..(297): unsure at all n locations
acgatacaccgtatatgtacatgcatcaagagatagaccaattcatgcaagtacagtattctctggcagggatattcgaagtgaaaaggtgatctggggcacaatttctatggttgatgctgaaaagcggctcttggcccatgccctacaagaccctgaaaaccagcattttgtcttgctttctgagagctgtgtgccacttcataactttgattatatatatagttatctcatggagacaaacgtcagtattgttgactgtcttgatgatccagngtcacatggagcaggtagata

SEQ ID NO: 39710 - DNA, 317 bp, Zea mays
agcttgcggttgcgggagggaagctgcgcgcgctaggctgccatggcggtggagaagacgctgcccggcgcgagtacggggaggaccgtgctggtcacgggcggggcgggctacatcggtagccacgccgtgctgcagctcctcctcgcgggcttccgcgccgtcgtcatcgacaacctctctttccacaagattgatcttcgtgacaagggagcacaggaaatggttcttgcttctacaagatttgaagctgtcattaacttcgctggattgaaagctgtgggtgaaagcgtacagaagccattactttattatga

SEQ ID NO: 39711 - DNA, 219 bp, Zea mays
ggcaggacaaggggatcatcgtgcgcgccacggaggagcagacccgcgagcggcggcgccacgcctcggagggcggccactggccgcacgggcccctgccgccgttcggcgagtcgcgcggcccctacagcctcctggaccagcggcccagcatctgcaaccagcacgggcagctctacgaggccgacgcgcgcacttccacgacctcgccgagcacga

SEQ ID NO: 39712 - DNA, 298 bp, Zea mays
  unsure (1)..(298): unsure at all n locations
gcaccagacaacactcaccgatagcaagtagcgccgccgacgtttcgagagcagagtatccaagctagccaagcgcgcacctcggtgacctagctagctacctagctagttcaggcgacgatatggcgtctggtcaggagagcaggaaggagctggaccgcaaggctcgcgagggcgagaccgtcgtccccggcgggaccggcggcaagagcgtcgaggcccaggagcacctcgccgaatggcgcagctgcggangccagactcgcagggagcagctggggcagcnagggtacagcga

SEQ ID NO: 39713 - DNA, 116 bp, Zea mays
tacatgttcaagtacgacaccgtccacagccactggaagcacagcgacatcacactcaaggactccaagacccttctcttcggtgacaagccggtcaccgtctttggcatcaggaa

SEQ ID NO: 39714 - DNA, 274 bp, Zea mays
cgccggagctcgacaaggacgaccgacgacgcacgcggagatccggcgtactgcaaattttgaaaactgaactgtaagatggcatcagcagagctttcccgtgaggaaaatgtgtacatagcgaactcgctgagcaggcggagaggtacgaggagatggttgagttcatggagaaggtagccaagactgttgactcggaggagctcactgtggaggagcgaaacctcttgtctgttgcatacaagaacgtcattggagcacgccgcgcctcatg

SEQ ID NO: 39715 - DNA, 314 bp, Zea mays
gagcattcagaaacacaccaagcgaacacattagcaacaacctaacaacaatggctaccaagatattatccctccttgcgcttcttgcgctttttgcgagcgcaacaaatgcgttcattattccacaatgctcacttgctccaagttccattattacacagttcctcccaccagttacttcaatgggcttcgaacacccagctgtgcaagcctataggctacaacaagcaattgcggcgagcgtcttacaacaaccaatttcccagttgcaacaacaatccttggcacatctaacaatacaaaccatcgcaacg

SEQ ID NO: 39716 - DNA, 313 bp, Zea mays
atccgcctctaaaccctagctcttccattcttccccctccggcgccgcctcccccagacacttcgccgcctggaagatgggccgcgtgattcgcgctcagcgcaagggtgcggggtccgtgttcaagtcccatacccatcaccgcaacggccctgcccggttccggtccctcgacttcggcgagcgcaacgggtacctgaacggcgtggtcaccgacgtcatccacgacccgggccgcggcgcgccgctggccaacgtcaccttccgccatccattccggtacaagcactagaacgagctgttcgttgctgct

SEQ ID NO: 39717 - DNA, 118 bp, Zea mays
caacatcatcgccctatacaagaagatttcagaagctcagtttagctgcgcctcttggttttcagctgggagcaagaacatgattaccagaattcttgatcccaatcctacaactaga

SEQ ID NO: 39718 - DNA, 202 bp, Zea mays
gtttggcccaacatatttgagacatctccccatgttataaatgctgttatggaggcaattgagggtatgagggttgcgctaggtgcagctttgattttgaattattgcctgcaaggtctcttccatccagcaaggaaagtacgtgaagtttattggaagatatacaactctctgtacattggtgcacaggattcacttgttg

SEQ ID NO: 39719 - DNA, 188 bp, Zea mays
ggcaagtatttggcaagcagatgggcttgagcgatcaggacattgttgccctctctggtggccacaccttgggaaggtgccacaaagagcggtctggtttcgagggggcctggactacaaaccctttggtctttgacaactcttacttcaaggaacttctgagtggtgataaggagggccttcttcag

SEQ ID NO: 39720 - DNA, 313 bp, Zea mays
gtcttgacacgcagaacacagctccggcgccgatgcccggcacgcaaggagggcaggcggtggcgttccgcatctccggcgacaaggccttcttcttcggctgcgggttctacggcgcgcaggacacgctgtgcgacgacgccggccgccactacttccgcgactgctacatcgagggctccatcgacttcgtcttcggcaacgcccgctccctctacaacgactccgagctgcactcgacggcgcacggttcggctcggtggctgcgcacgggcggcgcgacccgtgcgtacgcaccggcttcgccttcgtc

SEQ ID NO: 39721 - DNA, 165 bp, Zea mays
ctaaaccaggcactgaatctggagaatttgtttgaagcaaaggaggagtataaaagagagacaagattcacctcacagtgccccccaaaagagataatcacaaagatcgaagaagctgcaaagccgcttggctttgatgttcagaagaaaaaatacaagatgcgg

SEQ ID NO: 39722 - DNA, 282 bp, Zea mays
  unsure (1)..(282): unsure at all n locations
agcagcacgcatcctctcgctcgccacgagaagcagccgccgttgcagcagccgcagtcacagaatgggagggttcgtgaagacccataagaccaatgcgtatttcaaacggttccaagtgaaattcaagagaaggcgagcaggcaagacagactacagggccacgataacgctgattaaccaagacaanaacaagtacaacacacccanatacagatttgttgtgcgatttaccaacaaggacatcacagcagcaatcatatctgctagtatagcgggtga

SEQ ID NO: 39723 - DNA, 314 bp, Zea mays
aggaccatacccccgccgtccacctgctgctacaaggttcgggccgtccgtccttgctcttgatcagcattatttaattcggaccatacccccgccgtcctcccgcccgcctgccggagatggagatggagaacgggcacgccaagtaccgggtggccgtcattggcagcggcaactggggcagcgtcgcctcccgcctcatcgcctccaacaccgccaagctgccctccttctatgatgaagtaaggatgtaggtgtttgaggaaatacaggctacaggcaggaagctatctgagtccattaacgaacagaat

SEQ ID NO: 39724 - DNA, 275 bp, Zea mays
cgcgagacggggaagaagggcggtctgagcaccacggacgagtccggcggcgactgtccgcagggagggcgtcacatcgacgagtacaagttcaccaagtagtcctatcgcgtgcgtgcgtacgcagcgttcgtagctgtctgcgtactgtacctaggccgtagctagtgctactctctactttggagtagctgaatgataataatgtagctagcagcatgcatgtaggcgatcatacatacgtacgtacacaggtacgtgtgtgtgatcatgta

SEQ ID NO: 39725 - DNA, 302 bp, Zea mays
taccttcctcatgccattcttcgtttggatcttgctggtcgggacctcacagactccctcatgaaaattctcactgagaggggttactccttcacaacctcagccgagcgagaaattgtaagggacatcaaggagaagctagcatatatagcccttgactatgagcaagagttggaaactgccaagaacagctcttcagttgaaaagagctatgagctacctgatggacaagtaatcaccattggtgcagagagattcaggtgccctgaggtcctcttccagccgtcgatgattggtatgga

SEQ ID NO: 39726 - DNA, 222 bp, Zea mays
cgcacaccaatcgcccacaagcgctcgcaggagaggtcgaaaccctagcttttgcagcgacggcggcggcggcgagagaagatgatctacgacgtgaacccccccctcttccgttccttcctcagccagaagggcggcgccgacaagaggaaaatggaggagcataaaccaaaggagcagaggcccaaggcccacgagaacaagcctgtgatgaacgaatga

SEQ ID NO: 39727 - DNA, 295 bp, Zea mays
cgcggatcgggcggcggaacggctggagagcgagtacgacctcggcgaggagatcgggcacggcaagttcgggtccgtccgcgtctgccgccccaaggtccggacccggggcgaggaggagttcgcctgcaaggcctagccgaagaacggcggtgacacggcccaccgcgaggtcgagatcatgcagcacctctcgggccacccgggcgtcgtcacgctcagggccgtctatgaagacaccgacgccttctacctcgtcatggagctctagcaaggcggacggctcctcgatgag

SEQ ID NO: 39728 - DNA, 294 bp, Zea mays
aagcaacatagaaagtggaatccagtagcaacaatagagcaacaatggcgaccaagatactttccctccttatgctccttgctctttctgcatgtgttgctaacgcgacaattttccctcaatgctcacaagctcctatagcttcccttcttcccccataccttccatcaatgatagcttcagtatgtgaaaacccagctcttcaaccctataggctccaacaagcaatcgcagcaagcaacatacctttatcacccttgtttcaacaatcgccagcactatctttggtgcagt

SEQ ID NO: 39729 - DNA, 204 bp, Zea mays
acgctgtcgagcttcagcaagagcatccagagagctgcatacaagacctcgagcgaccgtctggagatgctgttcgggaggcatgggcaggacaaggggatcatcgtgcgcgccacggaggagcagacccgcgagctgcggcgccactcctcgaagggcggcaacggcccgaactggcccctgccgccgttcggcgattcgcgc

SEQ ID NO: 39730 - DNA, 328 bp, Zea mays
acgatgcagcgtagtaagctcggcgagacgagcgcgacgcgacaagggcaggaggagcgaagaagaagaagaagaatcgtctgacgagcaggaggaggccgggcaggggtaccacaccatccgggcgcggctgtcaccgggcacggcgttcgtggtgcccgcgggccacccgttcgtcgcggtggcgtcccgggacagcaacctccagatcgtgtgcttcgaggtccacgccgacaggaacgagaaggtgttcctggccggcgccgacaacgtgctgcagaagctcgaccgggtcgccaaggcgctgtcattcgcctccaaggcggag

SEQ ID NO: 39731 - DNA, 295 bp, Zea mays
agagtctcgctcgctagctagggtttccaccaatggcggcgcccaccacctcccgccgcggccccggcggcgcgcgcaacatggacgacgagaacctaaccttcgagacctccccgggggtcgaggtcgtcagcagcttcgaccagatgggcatcaaggacgaacctcctccgcggcatctacggctacggtttcgagaagccctccgccatccagcagcgcgccgtgctccccatcatcaacggccgcgacgtcatcgcgcaggcccagtccggtaccggcaagacgtccatga

SEQ ID NO: 39732 - DNA, 289 bp, Zea mays
cgtcactcaacacagcacaggcagctcgagagagagagagagagaaagatgtcgtggttcgggcaccaccaccacaaccagccggctcccccggcgtcgggccccaaccaggtgttcaagatcttctgccgcgccaacgagaactactgcctggccgtccgcgacggcgccgtcgtgctggccccggtcaaccccaaggacgaccaccagcactggtacaaggacatgcgcttcagcacccgggtcaaggacgaggaaggaatgccgtcgttcgcgctcgtcaacaagg

SEQ ID NO: 39733 - DNA, 271 bp, Zea mays
ctcacctcaactaacgctcgctagctacctagctagcacgtactatagataattgcgacatattttgatttgatgtatatacacacgtggcaggggtccatgagcgcaccattgttcaacacccgttcgttcaagatcgcctacgtgccgaacggcaagggctacgccgagatcgtgtgcccgcaccgccagtcgcagggcggcgagagcgatcgcgactcgacaagggcaggaggatcgaagaagaagaagaagaatcgtctgatgagca

SEQ ID NO: 39734 - DNA, 188 bp, Zea mays
cacagggcacacaccccgagctcagcttagctccactccagctccaatcacagtcgtgaccagagcgcgagatgtagctagagggcactgaaaattccgatcaataggatcgccctggggagccaccaggaggtgtaccacccgggcgccctcaaggcggcgttcgctgagttcatctccaccctcat

SEQ ID NO: 39735 - DNA, 278 bp, Zea mays
cttagatgatctagacgttataaaagtgatcgggaaaggtaacagcggaaatgtgcaattggtccgccataaatttactggccagtattttgctctgaaggtatttctgacgcaatcattctttgatgctgcttatttatggttctttacagtcaagactttagaacgatctctgcattgtactccctccattcgacaaatattcgacaacggaggtagtactacctccggtctcgaatatttgtcgtccgctagtttatttttgaactaaatgcgac

SEQ ID NO: 39736 - DNA, 299 bp, Zea mays
cgagaagtggagttgaagcgcgactatgcatttattgagttcagtgaacatcgtgatgccgatgaagctcggtaccaactagatggcagggatgtcgatggaagtcgcattgttgttgagtttgctaaaggggtcccacgtggtccaggtggctcacgtgaatatatgggaagagagcctccaccaggcacaggtcgttgtttcaactgtggaatggatggtcactgggcaagagactgtaaggctggtgactggaaaaataaatgctaccgttgtggagaaagagggcatatagaaag

SEQ ID NO: 39737 - DNA, 302 bp, Zea mays
ggggaagtccatggttgcaacattcaagcagtgtgcacggtatctcagcccgctgtttgagttctgcagaaagaaggtacttcctgatgatatccgtcgagcgttgcttgttattgtcgagtgttgcatgaagcgagattatttagcagcaatggaccaatatatcaagttggcaatcgggaatgcaccatggcccattggagtgactatggttggcatccacgagcgttctgcccgagagaagatctacacaaacagcgtcgcccacatcatgaatgacgagaccactcgcaagtaccttc

SEQ ID NO: 39738 - DNA, 188 bp, Zea mays
gccgtctacacctccaatttggcctctctcccttgcaagtttaagcttcaccttcaaccatgggtaaggagaagtcccacatcaacattgtggtcattggccacgtcgactctggcaagtcgaccaccaccggccacctgatctacaagcttggaggcattgacaagcgtgtaatagagaggtttgag

SEQ ID NO: 39739 - DNA, 295 bp, Zea mays
  unsure (1)..(295): unsure at all n locations
gaaatgagtgtccatgtgcttacaacaggctattggcctacatatccgccaatggacgtgaaactcccacacgaactgaatgtgtatcaggatatatttaaagagttctatttaagcaagtacagtggaaggcgtttaatgtggcagaattctttgggacactgtgtcttgaaagcagactttcccaaaggcaaaaaggaacttgcagtatcattgttccagagcgtggttttgatgttgttcaatgacgcacaaaagttaagcttcattgacatcanagattccactggtatcg

SEQ ID NO: 39740 - DNA, 278 bp, Zea mays
agcgcgctcagggtcagggaggcgaagatgatcgaggtggtgctgaacgaccgcctggggaagaaggtgcgggtgaagtgcaacgaggacgacaccatcggcgacctcaagaagctggtggcggcgcagacggggacgcgccccgagaagatccgcatccagaagtggtacaacatctacaaggaccacatcacgctcaaggactacgagatccacgacgggatggggctcgagctctactacaactaggcgccctgaccccaaccgtggcctgatgt

SEQ ID NO: 39741 - DNA, 259 bp, Zea mays
acactccctctcgtcgccgtcctctcccgttcgcaacgccacgctccccaccgccgaaatggccccgaagcgaggtggcagggcaccggtgccggccaagaagaagacggataaagtgacgaaccctctgttcgagaaaaggccgaagcagttcggcatcggcggcgcgttgcctcccaagaaggacctgcaccgattcgtcaagtggcccaaggtcgtgcgcatccagcgccaggatcgcatcctcaagcagcgcctc

SEQ ID NO: 39742 - DNA, 206 bp, Zea mays
atcaatctcgttcaaatcaacaaaagctcatgcagtttgtcagtcccacaggggatgaagacccgctaaagcaaggactagaattaaatgatcgcttacagagtgtcctcacaagacatgatgctattgcttctggttctccattaccagttgagacaccgattagagaaccacagagagaggatccaaatcctgagccatctaca

SEQ ID NO: 39743 - DNA, 151 bp, Zea mays
agcgcgatcacggcgtcacccgaaagggaatcgggttaagatttcccgagccgggacgtggcggcagacggcgacgttaggaagtcccgccggcgccaacacgtgcgctggtacgcgcgactgctccgtcgagcggccggtgcagggcgag

SEQ ID NO: 39744 - DNA, 187 bp, Zea mays
ccaggattaggccaggattcattccaacttatcaaaacttatataaattagagaaacaatccggccaggaaccgttccaggccttcaatccgtgaaaaacgaacaggccctgatcgatcgttcgacggaacttctgcacccccttccttttcgcagtccgggcgtcgtctccatcgatcgcatcttt

SEQ ID NO: 39745 - DNA, 300 bp, Zea mays
attcccgtgggatcccagtcgccgccgcaagaagaagagctcagggacttccaggtctcgcgagaagatgccgaagcagatccacgagatcaaggatttccttctcaccgcgaggaggaaggatgcccggtcagtgaagatcaagaggagcaaggatgttgtcaagttcaaggtccgctgctccaagtacttgtacaccctctgcgtattcgatgctgagaaggcaaacaagttgaagcaatctctccccccaggcttgagcatccaggaggtttgattggatacatgacaacgtcgggt

SEQ ID NO: 39746 - DNA, 169 bp, Zea mays
ccacaccccccgagctcagcttagctccaccccagctccaatcacagtcgtgaccagagcgcgagagctagctagagggccgtgaaaatgccgatcaataggatcgccctggggagccaccaggaggtgtaccacccgggcgccctcaaggcggcgttcgctgagttca

SEQ ID NO: 39747 - DNA, 168 bp, Zea mays
cattgcagtcgtcttggtacacagcgtgtcagtaaccacttgactgtatgtacggcacaagcatcgacattgccaatgctcaaatagagagctgagaccagctaagagcacagcatacactttccggaaggataacatgaagatccagcctgatatggaggacttgaa

SEQ ID NO: 39748 - DNA, 167 bp, Zea mays
cagggtacaagcagattcgcgaagaggataagagcaaattggttggcaacgtgttcagcagtgtggcttccagctacgacctcatgaacgatctcatgagtgtcggcctgcataggctgtggaaggacaggcttatttccaagctgaacccctttccggcaatgaag

SEQ ID NO: 39749 - DNA, 168 bp, Zea mays
aaactcgggcagtggtaaaaagaccagctaaaagttctgaggcaagcatcaaattgcccagatactcactgagggtggtgctctgtgcttacatgatactggctcatcccagtgctgttttaagtgggcaaggtgagcgggagaaacagcttatcgagtcggcagcaa

SEQ ID NO: 39750 - DNA, 306 bp, Zea mays
acgcattccccgaccacaccgttcctccgagcccaggagcagccccgcgccaggaggaagtttgttcttttaacaatatgtcgagggaggagaatgtttacatggccaagttggctgagcaggctgaaaggtatgaggagatggttgagtatatggagaaggtggctaagactgtagatgtggaagagctcactgttgaggagcgtaaccttctgtctgttgcatacaagaatgtgatttgggctcgccgcgcttcatggcgcattgtttcttccattgaacaaaaggaggagtcccgtaagaacg

SEQ ID NO: 39751 - DNA, 308 bp, Zea mays
ggagcagctgcagcgcgagctcgcacgcccgcggcctcacagtcgcctccatccccggcaagggaaggggtctcatcgctacttgcaccttcttcccaggggatgtcattctcaatcaggaaccttacgcttctacacctaacaagattttagttggatcgagctgtgaccactgtttcacctctggcaacctgaggaagtgctctatgtgtcgagttatgtggtactgcagcagcaactgtcagaaagaagaatggaaactacatcagcttgagtgtagagcaatggcagcacttacagaggataga

SEQ ID NO: 39752 - DNA, 293 bp, Zea mays
  unsure (1)..(293): unsure at all n locations
gagcgcggcggcccctccttccttcctcccacttctctcgcgcggcgctcgcttacctcgcctcgcattccgttcgagcaggggagcggcagtgagaagggagggaattaaggcaagatgttcatcgagagcttccgcgtcgagagcccccacgtgcggtacggcccgacggagatcgagtcggagtaccggtacgacacgacggagctggtgcacgaggccaaggacggcgcctcccgctgggtcgtccgccccaagtccgtcaagtacaacttccggancagcaccgcggt

SEQ ID NO: 39753 - DNA, 300 bp, Zea mays
caacactcaccgatagcaagtagcgccgccgacgtttcgagagcagagtatccaagctagccaagcgcgcacctcggtgacctagctagctacctagctagttcaggcgacgatatggcgtctggtcaggagagcaggaaggagctggaccgcaaggctcgcgagggcgagaccgtcgtccccggcgggaccggcggcaagagcgtcgaggcccaggagcacctcgccgaaggtatatatagccgactgcggctaaccatctgcatatgttaattcactgttgttgtggctttaattaca

SEQ ID NO: 39754 - DNA, 245 bp, Zea mays
cccacactccccgagctcagcttagctccactccagctccaatcacagtcgtgaccagagcgcgagagctagctagagggccgtgaaaattccgatcaataggatcgccctggggagccaccaggaggtgtaccacccgggcgccctcaaggcggcgttcgctgagttcatctccaccctcatcttcgtcttcgccggccagggctccggcatggccttcagcaagctgaccggcggcggcccga

SEQ ID NO: 39755 - DNA, 299 bp, Zea mays
gttggtttcagcttgtattcccactctgtcgcacagcgtcgcccgtcgccgctgagatcctaggaagaaattgagctctctcgcaagctcttcactgccgtcctcctcgtcattctgctgctgctgtccgcagaggtcgggccggtggcggttgcggaggcgcggacgttccagtcgcagatccacaggttccggtgcccctgcctccgccggtccaactgcgccaacttctgcaggaccgatgggttccccggcggcaggttccgcggcttccgccgccgctgcttctgcactacgca

SEQ ID NO: 39756 - DNA, 229 bp, Zea mays
  unsure (1)..(229): unsure at all n locations
atcctaccatcagcagtagccacagccagaacaccagcagacagcagcatcagcagggaggaacacgatgagcggcgccggtccggatctgcagctgccaccggggttccggttccacccgacggacgaggagctggtgatgcaccacctctgccgccgctgcgccggcctgcacatcgccgtccccatcatcgccgagatcgacctctacaangtcgaccaatggcag

SEQ ID NO: 39757 - DNA, 176 bp, Zea mays
agagccttgcagaagagtttggaccagagtagtgaatgcagcatataatccctcaggtgctggagaagatcaacaacccacactatttataccgcatgacgattctgcaggcaatctccttgctagctcctgtcatgggtgcagagatcacctgtcaaaagctgcttccagtcgtc

SEQ ID NO: 39758 - DNA, 273 bp, Zea mays
ccggtgcttctcctcctggtctccctgtgcttctcgctcgcgctcgcgtggcaaacggacacggaatcgggctcaggcaggccgtaccactacggcgaggagagtttccggcactggacgcgctcccggcagggccggttcagggtgctggaacggttcacccacgagctgctggaggacgccgtcggcaactaccgcgtcgccgagctggaagccgcgccgcgcacgttcctgcagcccagccactacgacgccgacgaggtgatgttcgtg

SEQ ID NO: 39759 - DNA, 276 bp, Zea mays
gttaccacagacgacgggcgccatgaaagtcccggtgcttctcctcctggtctccctgtgcttctcgctcgcgctcgcgtggcaaacggacacggaatcgggctcaggcaggccgtaccactacggcgaggagagtttccggcactggacgcgctcccggcagggccggttcagggtgctggaacggttcacccacgagctgctggaggacgccgtcggcaactaccgcgtcgccgagctggaagccgcgccgcgcacgttcctgcagcccagcca

SEQ ID NO: 39760 - DNA, 275 bp, Zea mays
aacccccccgcctcgtttccatcgccgccactctcttgctcccccgtaccatccctcgccaccgccaccgccgtcgctatgcagagcctcctcgtgcccactgctgcatcggccccggtggcggctccgcgggctcggcggaatctccctatgcgcctctccgtccgcgcctccgcgacggcggcagcggcaccgcggcgggagacggatcccaagaagcgggtggtgatcactgggatgaggttggtctccgtgttcgggaacgacgtagacgc

SEQ ID NO: 39761 - DNA, 188 bp, Zea mays
  unsure (1)..(188): unsure at all n locations
actccgttcaccccgtccatttgatttgcgttcaccgcgntgcggttccttggaggggattgttctcaactctcctttggattggaggtccctccttcttctcctctctctctcagaggaaggcctgaggatccaggaagaggacagcaattggggaaggtgcaggtgaccgtgtcctgagccgcctc

SEQ ID NO: 39762 - DNA, 280 bp, Zea mays
  unsure (1)..(280): unsure at all n locations
agccggaccagcccggccaagggcaccgaccgccggacgccgctggacgtgcgcacgcccgacgcgttcgacaacaagtactacgtcaacctggtgaaccgtgaagggctcttcacctccgaccaggacctcttcagcaaccccggcaccaggcccctcgtcgagaagttcgcgcgcaccagagagacttcttcgaccagttcgccttctccgtggtgaagatggggcagatcaaggtgctcacgggcgaccnagggcagatccgcagaactgctccgcc

SEQ ID NO: 39763 - DNA, 200 bp, Zea mays
ctctgaagaccctttgatgggtctattcgagaagcgcagagcaaggaacttcttcatttatgtccaagattacaatgaagctgatccaaggacacatcaaggattagaccttactagggtgacaactagagaacttatagcaaaatatggtttaagtgatgatacagtggatttcattggacatgcacttgctcttcata

SEQ ID NO: 39764 - DNA, 311 bp, Zea mays
gccaggagggcaccatcttctgcggcatcttcgacggccacggcccgtgggagcactacgtggccaaggcggtgcgcgactcgctgccgccgtcgctgctgtgccactggcaggaggcgctcgctctcgcgtcactcatcgacgacggcgagaagaagctcggcgactgccagttcgatctctggaaacggtcctacgtggccgcatgcgccgccgtggacgatgagctgcggcgcaccgcagcttggacgcggtccaaagtggctgcaccgcgctatccatcatcaagcagggggacctcatgatcgtcg

SEQ ID NO: 39765 - DNA, 282 bp, Zea mays
  unsure (1)..(282): unsure at all n locations
gatcgagcacacacaagcacgaagacccgnttaggagaaaccacaaaccaccaatcggagcacagcatcatggagtacggtcagcaggggcagcgcggccacggcgccaccggccatgtcgaccagtacggcaacccagtcggcggcgtcgagcacggcaccggcggcatgaggcacggcacgggaaccgccggcggcatgggccagcagggtgagcactgcggcgctggcatgggnggcgggcagttccagcctgcgagggaggagcacaagaccggcggc

SEQ ID NO: 39766 - DNA, 294 bp, Zea mays
  unsure (1)..(294): unsure at all n locations
ctcccgtctccgtcgtctcgtctctgctcctcacctcgtcgccagccatgggcaagatccagatccgaatcaacgcgttccgaaggatcggcangctcgtgagcagggtcgccctgcagagcgaggatgtcgagctcgtcgccgtcaacgaccccttcatcaccacggattacatgacctacatgttcaagtacgacaccgtgcacggccaatggaagcacagcgacatcaccctcaaggactccaacacgcttctcttcggcgagaagccggtcaccgtctttggcatcagga

SEQ ID NO: 39767 - DNA, 305 bp, Zea mays
agcggcgagggtggcgactcgggttcttcttcttcttccaagtgggagatcaaaccgtccagcctcacggacaagaagccgacccattccaacagccacggcaggcactacgagatcaccggcgacgagtgcccgcacctccggctgctcgacatggacgtcggcctggcaaacatcgcccgcggttctatgatggcgccgagctacaacacccgtgccaacaagatagctatcgtcctcaagggccagggctacttcgagatggcgtgtccgcacgtctccggcggccggtcgtcgccgcgccg

SEQ ID NO: 39768 - DNA, 290 bp, Zea mays
aacgaacggaggctgcagagcagagcagagcagagcaagaagctttacagtgaacgagtgagtatgtgcggcatacttgctgtgctcgggtgcgccgacgaggccaagggcagcagcaagaggtcccgggtgctggagctgtcgcggcggctgaagcaccggggccccgactggagcagcctccggcaggagggcgactgctacctctctcaccagcgcctcgccatcatcgacccggcctctggcgaccagcccctctacaacgaggaccagtcggtggtcgtcgccgt

SEQ ID NO: 39769 - DNA, 265 bp, Zea mays
gctcgcatcgggtcaaaccctaagcagggagttgatttatccgctgcagccatgagtaagtagcagaatgagtctgtcaaggatgccatctaccagattgttggggatgccaaggagaagaataggaagttcactgagactgtggaacttcagattggtctgaagaattatgatccacagaaggacaagcgtttcagtggctctgttaagttgccccatatccctcgtcccaagatcgaagtgtgcatgcttggtgatgcccagc

SEQ ID NO: 39770 - DNA, 175 bp, Zea mays
atttcttctctctctgctactccggctccgcctccgcctgatccatccaagacagggatcgccatgtcggactcggaggtagcacacatcgaatcgaaggccgacgctggggcgtccaagacctacccgcagcaggctggcaccgtccgtaagaacgcgctcatcgtcatcaaga

SEQ ID NO: 39771 - DNA, 185 bp, Zea mays
gtggcgcgcgaccgacgtgcgtacgtagcatgagcctgagtggagacgttggacgtgtatgtatatacctctctgcgtgttaactatgtacgtaagcagcaggcagtgcaataagtgtggctctgtagtatgtacgtgcggatacgatgctgtatgctactgaggcaagtcccataaataaataa

SEQ ID NO: 39772 - DNA, 179 bp, Zea mays
ctagcggaggtgtaatgcccaacatccataacctgctgctcccgaagaaggccggcggcggcagcgccaaggctgcggctggtgacgaggactaagtccttgactacggctctggtggcacttccaggatgctgccgtatcaacatgtgtctgtgtagtacgttaggttttcgctgtag

SEQ ID NO: 39773 - DNA, 295 bp, Zea mays
gtgacagacacgatggtgagctccagaattgttgtcctcctcgccactctcctatgcagtgccgccgcagtcgcgtcgtcctgggaggacgacaaccaccaccaccactggggccacaagtccgggcaattcgtgcggcggtgcgatgaccggccctggcaccagcgcccccggtgcctggagcagtgcagtgaggaggagcgggagaagcggcaagagcggagcaggcacgatgccgacgaccgcagcggcgatggctcgtcggaggatgagcgagagcaggagaaggagaaac

SEQ ID NO: 39774 - DNA, 299 bp, Zea mays
ctgcgaaggccttccacgagcagctgtctgtggcggagatcaccagcagcgcgttcgagccggcttccatgatggtcaagtgcgacccacggcacggcaagtacatggcttgctgcctgatgtaccgcggcgacgtggtgcccaaggacgtgaacttcgcggtggccaccatcaagacgaagcgcaccatccagttcgtggactggtgcccgacggggttcaagtgcggcatcaactaccaggcgccgacagtggtgccgggtgccgacctcgctcaagtgcagcgcgcggtgtgcatg

SEQ ID NO: 39775 - DNA, 296 bp, Zea mays
gcggagtgctgtttggtcacagcagtgagggacgggatgaacctgatcccatacgagtacgtaattgctcgacaagggaatgagaagatagatagtattctaggccttggtccggcttcaaggaagaagagcatgcttgtcgtgtcagagttcatcggctgctcgccctccctgagcggtgctatccgtgtgaacccttggaacatcgattcagtagccgacgcaatggactacgcgctggagattccggaaggggagaaggtgttgagacatgagaagcaccacagatacttgag

SEQ ID NO: 39776 - DNA, 265 bp, Zea mays
catctcaccttttgctcggaacgcacacaccgcccgtacccgaaaaccgatcccctcgtcgatacaaagatgcagatcatcgtcaagaccctcactggaaagactatcaccctcgaggtggagtcttctgacaccattgacaacgtcaaggccaagatccaggacaaggagggcatacccccggaccagcagcggctcatctttgctggcaagcagctcgaggacgggcgcacacttgccgactacaacatccagaaagagagca

SEQ ID NO: 39777 - DNA, 213 bp, Zea mays
gcgtgccctcgccgcagccatcttccatggcggaccagctcacggacgagcagatcgcggagttccaaggaggccttcagcctcttcgataaggatggcgacggctgcatcacaaccaaggagcttggaactgtgatgcgctcccttggccagaaccccactgaagcagagctgcaggacatgatcaacgaggttgatgctgatggcaatggg

SEQ ID NO: 39778 - DNA, 294 bp, Zea mays
agcaccggcgccaccatatcgttttcctcacactcaccaccagctcagggtccggcggcgaaaggaaaggcaagatgtacacacgcgagaagaagatccagaaggagaagggtcttgagcccaccgagttcgaggacaccgttgcccaggctttctttgatcaggagaacgggaaccaggagctcaagagcgacctcaaggacctgtacatcaacaatgctatccagatggatgttaccgggagtaggaaggctgttgtcattcacgatccataccgcctgcgcaaggccttca

SEQ ID NO: 39779 - DNA, 315 bp, Zea mays
acgtcctgccgctccgcgggatccccgagggtgccgtcgtctgcaacgtcgagcaccacgttggtgaccgcggtgtcttcgccaagcgcctctggggactacgccatcgtgatcagccacaaccctgacaacggaacctcgaggatcaagctgccatctggtgccaagaaaattgtccccagcagctgccgtgccatgattgggcaggttgccggtggtggcaggactgataagccgatgctgaaggctggcaacgcctaccacaagtaccgtgtgaagaggaacagctggcccacagtccgtggtgtggccatg

SEQ ID NO: 39780 - DNA, 303 bp, Zea mays
  unsure (1)..(303): unsure at all n locations
actttctggtggatgttgatgcaggttctggaaaatggtctccttgttgatccccatgatcagcatgcaattgcagatgcctctataagatgctttctgaaaagcagtgttggtcaagatgtcgagaaaatggattgaaaaatatacaccaattttcttggcctgaacattgcaagaattacttgtcaaggatatcaagtcttggtccaagacatcctagtttcgcatgcanagaagaccacaaggtgcctgtgaagtgcaggaagcatatatctatcattgctgtagactctgttaacaagg

SEQ ID NO: 39781 - DNA, 306 bp, Zea mays
  unsure (1)..(306): unsure at all n locations
gcgcggcggcccctcattccttcctcccacttctctcgcgctgcgctcgcttacatcgcttcggattccgntcgagcaggggagcggccgtgagaagggaanggagggaattaaggcaagatgttcatcgagagcttccgcgtcgagagcccccacgtgcggtacggcccgacggagatcgagtcggagtaccggtacgacacgacggagctggtgcacgaggccaaggacggcgcctcccgctaggtcgtccgccccaagtccgtcaagtacaacttccggaccagcaccgccgtccccaagctc

SEQ ID NO: 39782 - DNA, 283 bp, Zea mays
cacacccgagcatatcacagtgacagacacgatggtgagcgccagaattgttgtcctcctcgccaacctcccaatgggctgccgccgcagtcgcgtcgtcctgggaggacgacaaccactactaccactggggccacaagtccgggcaatgcgtgcggcggtgcgatgaccggccctggcaccagcgcccccggtgcctggagcagtgcagggaggaggagcgggagatactgcaagagcggagtatgcacgatgccgacaaccgcagcggcgatggctcgtc

SEQ ID NO: 39783 - DNA, 252 bp, Zea mays
tggagaagccgccgcaccagcaatcacagcagcccggagaacacccaggaccaacaagatgcagatcatcgttgaagacgctgacagggaagaccatcaccctcgaggtcgagagcatcgacaccatcgacaatgtcaaggccaagatccaggacaaggaagggataccggcggaccagcagcggctgatctttgccgggaagcagctggaggatggccgcacccttgcggactataacatccaaaaggagt

SEQ ID NO: 39784 - DNA, 290 bp, Zea mays
  unsure (1)..(290): unsure at all n locations
agattgtttgacaaggagggcaaccgaccaattgtcgatggagaacttgcatcggaacttggacttgggcctttcgacctcatttcatgtagttctcaaagattggatcagacattcagatggacacccaggaagttgagtagccccttgaccaggaggaatccacctaccgtctggacgaaaaacgatcccatccatggggcagcgccaggtgtaccgaatctttggcacagcgatcagggatctatttcgcaaatgaacggaaagatagcacaattcttnttcttttt

SEQ ID NO: 39785 - DNA, 299 bp, Zea mays
cgctctcccatctcatcatctcggcggctgcaataaaataaatctcgtgcaggggggagggcgtacgacgacgtggacgcaccgtcaaaggcaccaggctgagcaacccctctctctctccctcttatccccaaggcgaggagcggagcggagaggagggcccttctgcttgtttctccgctttgcaagatgtcgtccccgagcaagcgccgcgagatggaccttatgaagctgatgatgagcgactacaaggtggagatggtgaacgacgggatgcaggaattcttcgtcgaattcaa

SEQ ID NO: 39786 - DNA, 324 bp, Zea mays
cgcaccgccgccgccgaaacagcacatcgctctctcgatctcagccatggcggaggtggagcagccccaggacgcggtgaagctcttcaaccgctggaccctcgacgatgaccaggagaacgatatctcgctgaacgaccacccggctgtgactgcggcgaacacgcgacattcctgccgcactccgcggggcgctactccaagaagcggttccgcaaggcgcagtgcgccatcgtcgagcgcctcaccaactcgctcatgatgcacgggcgcaacaacggcaagaaggtcatggccgtccgcatcatgaagcacacctggaga

SEQ ID NO: 39787 - DNA, 322 bp, Zea mays
atccgcctcccgcttacttctctgactctgtcctctttgagtttctttcctgtcggcgacggctggggtgctgcgccgctctcaccttcaccgccgacgagcattcacaagtagtggtctcttactggtggcggcgtagaggtgacgaaaaaaccttgacaatgagcagcataggcacaggttatgatctgtctgtcaccaccttctctcccgatggccgcgtcttccaggtcgagtatgccacgaaggctgtcgacaacagcgggaccgttgttgggatcaagtgcaaagatggcattgttctgggtgtcgagaagctggt

SEQ ID NO: 39788 - DNA, 326 bp, Zea mays
aggacatcaccatcactggtgctagtacgttacctaaggatgaggttgagagaatggtagaagaagccgataagtttgccaaggaggacaaagagaagagagatgcaattgacacaaaaaatcaggccgattctgtggtctaccagactgagaagcaactgaaggagcttggcgataaagtccccgctcccgtgaaagagaaggtggatgtgaagctccaggagctcaaagaggcaatatctggtggatcaacacagagtatgaaggatgccatgtctgctttgaaccaggaggtgatgcagattggccaggcaatgtataaccag

SEQ ID NO: 39789 - DNA, 281 bp, Zea mays
aggaggcgaaggaggaggagcagcagcagcaggcggcgccgaggagcggcatcccactcagtgcttgcaaccatggctaggggattgaagaagcacttgaagaggctcaatgcgcccaagcattggatgctcgacaagcttggcggagcttttgctcccaagccatcttctggacctcacaagtccagggagtgccttcctctgatcctcatcatcaggaacaggctcaagtatgctctgaactaccgtgaggtcatttctatcctgatgcaacgccatgt

SEQ ID NO: 39790 - DNA, 322 bp, Zea mays
attagtatctatcgccgaaccccttctgtctgacattcccagtgtatctggaacaacaaggccaaaatcacactacatcggtggagaatacagaagaagtgcagattcatcgaacacagacgttgcattggcattcgaggtcccaagtagttggctcaaagaaaaagattgtatcaccgtatcagtacttcaggcacttctgggtggtggtggcaagttttcttggggaaggcaaggaaaggggttacattcacgtctaaaacgcctcgtaaatgaatttgatcagatcaagtcaatctctgctttcaaggatgttcacagt

SEQ ID NO: 39791 - DNA, 318 bp, Zea mays
acctgtatccgcgcgcgagatcaacgccccgggtcggctctagatcccgatggcctcgcgccgccgcaacctgctcaaggtcatcatcctcggcgacacagggttgggaagacgtctttgatgaaccaatatgtgaacaagaagttcagcaaccagtacaaggctacgattggagcggatttcctcaccaaggaggtgcagttcgaggacaggctcttcactctgcaaatatgggacactgctggtcaggaaaggtttcagagtcttggcgttgcattctcccggggagcagattgttgtgtcctagtctatgatgtt

SEQ ID NO: 39792 - DNA, 311 bp, Zea mays
agagtctggagagacaggacctcatggtcaatgaagaagatatccagcacatagtatcttcatggactggcatccctgtggagaaggtttccagcgatgaatctgataagcttcttaagatggaagagactttgcacaagcgtgtcattggccaagatgaggctgtggtagcaattagtcgctccatccgccgtgctcgtgtgggtctcaagaaccccaacaggccaattgcaagctttatttttgctggtcccaccggcgttgggaactctgagcttgcaaaggctcttgcagcctattactttggctct

SEQ ID NO: 39793 - DNA, 304 bp, Zea mays
agtgagcgcgacgtagaggccatagcaccgcagagactgagatggggggttttgtcaagacccacaagaccaatgcgtacctcaagcgtttccaggtgaagttcaagagaaggcgcgctggcaagacagactacagggccaggataaggctgattaaccaagacaaaaacaagtacaatacacccaaatacagatttgttgtgcgatttaccaacaaggacatcacagcacaaatcatctctgctagtatagcaggtgatatggttcttgcttctgcttactcgcatgagtcgccacgatatgg

SEQ ID NO: 39794 - DNA, 284 bp, Zea mays
accgcaccacgccctcgtacgtcgccttcaccgactccgagcgcctcatcggagatgcggccaagaaccaggtcgccatgaaccccatcaacaccgtctttgatgccaagcgtctcatcggcaggaggttcagtgatgcgtctgtccagagtgatatcaagttgtggcccttcaaggtcatttctgggcctggtgagaagccaatgattgttgtccagcacaagggtgaggagaagcagtttgcagctgaagagatctcctctatggttcttatcaagatgcgt

SEQ ID NO: 39795 - DNA, 266 bp, Zea mays
actgcagcgccgccagacacaccgtagtctgtacaccaagcaccggcgcggcggcggcggctaccatggcagtcgggaagaacaagaggatctccaagggaaagaagggtggtaagaaaaagaccgtcgatcccttctctaagaaggactggtatgacatcaaggccccatcggtcttcagtgtgcgcaacattgggaagactctcgtgtccaggacacagggtaccaggattgcctctgatggtctgaagcacagagtctttgag

SEQ ID NO: 39796 - DNA, 263 bp, Zea mays
gcacgatgaattcaagagatcaatcgaagacatgggagcaaattcattacgctgtgatgcttttgcatactgttcctttgacattgaaaagatcccaatggaagacataacaagctgggagttgcctgaggatgacctgactctgcttggcatcataggaataaaggacccctgtcgcccaggtgtaagggatgctgtacgcctgtgcactacagctggtgttaaggtgcgcatggttacaggagataatattgaaacagcta

SEQ ID NO: 39797 - DNA, 260 bp, Zea mays
gtgacagacacgatggtgagcgccacaattgttgtcctcctcgccactctcctatgcgctgccgccgcagtcgcgtcgtcctgggaggacgacaaccaccaccaccacgggggccacaagtccgggcaatgcgtgcggcggtgcgaggaccggccctggcaccagcgcccccggtgcctggagcagtgcagggacgaggagcggcagaagcggcaacagcggagcaggcacgatgccgacgaccgcagcggcgatggctc

SEQ ID NO: 39798 - DNA, 263 bp, Zea mays
ctcttctccctcttgccggtcccgaataaagagcagcagcgcaagaggtcggtagagcgagaagaaggcaatggcggccgagagcttccttttcacctcggagtccgtgaaagaggggcaccccgacaagctgtgcgaccaggtgtcggacgccgtgcttgacgcatgcctcgcgcaggaccccgacagcaaggtggcctgcgagacctgcaccaagaccaacatggtgatggtgttcggcgagatcacgaccaaggcgaccg

SEQ ID NO: 39799 - DNA, 260 bp, Zea mays
gtaccctgaattgacagagatgcaagcacgggccatttttgaagctgctatagcaatgaccaaccagggtgttcaagtgttcccagagataatggttcctcttgttggaacaccacaggaactggggcatcaagtgactcttatccgccaagttgctgagaaagtgttcgccaatgtgggcaagactatcgggtacaaagttggaacaatgattgagatccccagggcagctctggtggctgatgagatagcggacaggc

SEQ ID NO: 39800 - DNA, 252 bp, Zea mays
gtccaggagaaatggcacaacggggaggttaaggtcatctgcgctaccatagccttcggcatggggatcgacaaacctgacgtgcgtattgttatccacaacacattgtccaagtcaatagaaagctactaccaggagtccgggagggcagggcgagatgagcttccggcacactgtatcgtcttgtaccagaagaaagacttcagccgtatcgtgtgcatgttgaggaacggtgagaacttcaggagcgag

SEQ ID NO: 39801 - DNA, 252 bp, Zea mays
gtttagtcgcgccgccgccgccgccgaaacagcacatcgctctctcgatctcagccatggcggaggtggagcagccccaggacgcggtgaagctcttcaaccgctggaccttcgacgatgtccaggtgaacgatatctcgctgaacgactacctggctgtgactgcggcgaacacgcgacattcctgccgcactccgcggggcgctactccaagaagcggttccgcaaggcgcagtgcgccatcgtcgagcg

SEQ ID NO: 39802 - DNA, 248 bp, Zea mays
cagccacctctctccctcgctacagcaaaaaccttgccacgaatcgccgacactccaacccggaagaggcaacgaggtgactccgcgcctcggtcatgggtgacagccaatactccttctcgcttaccactttcagcccgtcgggaaagcttgtgcagatagagcacgcgctcacggctgtcggatccgggcagacctccctagggatcaaagctgccaacggggtagtgattgccaccgagaagaaa

SEQ ID NO: 39803 - DNA, 97 bp, Zea mays
gtcttttaattattatgattttgatgtacttgtatggtggcgtatgcagcagctatgtgtagattttgaatacccagtgtgatgagcatgcatggcg

SEQ ID NO: 39804 - DNA, 254 bp, Zea mays
agtacttcaacttgaaactgcagctggtgcagctattcgtttctttgacaaagcgattggaattaatgttccccgctcaagatttctcccggtgaaggctacatctgatttattgcttgtgcagtctgatctttacaccttggttgatggctttgtcatccgcaatccatccagagcgaatccagctaacccttcgattgagcttggacctgagttcaagaaggttgccaatttccttgctcggttcaagtcca

SEQ ID NO: 39805 - DNA, 251 bp, Zea mays
accccccaagtgattaacctgaaagcacgctgcacgctaggtgatatagcacttttaataccttctggtgtctctcttatgcaggacaaattccacaccttccacccggtggccaccatcctgagctacctcaccaaggcacccctggttccccctggcacaccggtggtgaacgctctggccaagcagagggcgatgctggagaacatcatgagggcctgcgttgggctggccccagagaacaacatgat

SEQ ID NO: 39806 - DNA, 251 bp, Zea mays
gtgatcatgctcgtcaaggccggcgcgccagtagaccagaccatcgcgacgctcgcagctcacttggagcagggcgactgcatcatcgatggggggaacgagtggtacgagaacacggagaggagggagaaggccatggaggagcgcggcctcttgtatcttggcatgggtgtctcttgaggagaagaaggtgcccgcaacggcccgtccttgatgcccgggagctcgttcgacgcttacaagtacgtcga

SEQ ID NO: 39807 - DNA, 144 bp, Zea mays
cggagatcgccggtgtggtggtgacgttcgacccgaagccgatcccgggcgactggaacggcgccggcgcgcacaccaactacagcacggagtcgatgacgaaggacggcgggtacgacgtgatcaaggcggacatcgagaagc

SEQ ID NO: 39808 - DNA, 272 bp, Zea mays
agggattcagcacgtccaattctgcctgaaccacttctcgtccgacgtgtatgtcgggccacccaagggcaatgactggtttgagaagcagacggcaggcacgctcgacatcctgtgctctccttggatggattggttccacggtggcctgcagttccagattgagcaccatctgtttccccgcctacctaggtgccacctccgtaaggttgcgcctgccgtccgcgagctttgcaagaagcatggcctcacttattctgcagccacgttct

SEQ ID NO: 39809 - DNA, 168 bp, Zea mays
agaggcccatagcattagtgctgtaggacagtctggccgcggtgtttgtaaacaccttggggttgacccagctgatgtagatataatgataggtactttcaccaagtcttttggatcatgtcgtggatatattgccgcatcaaaggagataattaagcacctcaagca

SEQ ID NO: 39810 - DNA, 267 bp, Zea mays
ctgaactcaactgtggccagtggagcagcaaattcaggattcaagctgcttgttacaaaaggggctcatgtgcagaaggcggtcgggatatggctctttggttgtgctgcctgggtgttcagcttggtcatactgggagggattactcggctcacacgttctgggctgtcaatgactgactggaagttcacaggggaaatacctccaatgacagacgaagcatggcagctggaatttgagaaatacaagcagtcacctgagtacaaa

SEQ ID NO: 39811 - DNA, 271 bp, Zea mays
ctaacacacccgagcatatcacagtgacagacacgatggtgcgcgccagaattgttgtcctcctcgccactctcctatgcgctgccgccgcagtcgcgtcgtcctgggaggacgacaaccaccaccaccacgggggccacaagtccgggcaatgcgtgcggcggtgcgaggaccggccctggcaccagcgcccccggtgcctggagcagtgcagggaggaggagcgggagatacggcaagagcggacaggcacgatgccgacgaccgcagc

SEQ ID NO: 39812 - DNA, 269 bp, Zea mays
ctggactgggcggacatgctcttcctcatcgtgcagccgagggaggccagggacacgcgcttctggccgacgcgccccgcatccttcggggactccgtggactcctactccctggaagcttcgaggctagcgtaccgcctgctggagctcatggccaggggcgtcggggccgacccggcgtcgctaagacgcgtgttcgaggggcagacgcagggcatgcgggtgaactactacccgccgtgccggcgagcggcggaccgggtgctggg

SEQ ID NO: 39813 - DNA, 279 bp, Zea mays
aattcctttctgctgagctcaggaaatcccctctggtctccccgtcccccattccacccgccgccgccgacgcgccgcgcctgtacaagatgaatgtggagaagctcaagaagatggcgggtgctgtgcgcactggaggaaagggcagcatgcgcaggaagaagaaggcagtccacaagaccgcaaccaccgatgacaagcggcttcaaagcacgttgaaaagaattggagtgaacactattcctggtattgaggaggtcaacatcttcaaggatgata

SEQ ID NO: 39814 - DNA, 261 bp, Zea mays
ctcgagcgagaagaagaagaagaatcgtctgaggagcaggaggaggccgggcagaggtaccacaccatccgggcgcggctgtcaccgggcacggcgttcgtggtgcccgcgggccacccgttcgtcgcggtggcgtcccgggacagcaacctccagatcgtgtgcttcgaggtccacgccgacaggaacgagaaggtgttcctggccggcgccgacaacgtgctgcagaagctcgaccgggtcgccaaggcgctgtcattc

SEQ ID NO: 39815 - DNA, 265 bp, Zea mays
aataacttagtctcctaccatgagcttgttcgcgccacacaaagatttagcgataacaacctgctggggactgggagctttggcaaagtattcaagggtcaactagacaacggtttggtggtcgcaataaaagtgctagacatgcatcacgaaaaagccattggaagctttgacgccgagtgtcgtgtgcttcgcatggctcgccaccggaacctgataaggatactgaacacctgctccagccttgattttcgagccctggtgc

SEQ ID NO: 39816 - DNA, 267 bp, Zea mays
atggaccaaactaggcttcaggggctactcttccagatggcagataagctctcggtcctggtggagatcaatgagagggcatacgaggcaagaactggtggtactctcgagggggtacctcccaggcgcaggggcgagggtcaggataatatgggaaagtggcaggataactttgtctcgtcacaggggcggcagggtggtggcaacaggtttggatactccggcagaggtgcaatatctgtcaaagtggtgatggacaccagaggg

SEQ ID NO: 39817 - DNA, 263 bp, Zea mays
atgatttccagattctgcgagtactcatgacaatcattgacacatcaagtgacaccaccgctcttgccgtggcctgctacgacctctcacaattccttcagtaccatccatctggccgaatcgtggtggcagacctcaaggctaaggaccgagtcatgaaactcatgaatcatgagaacactgaagtgaggaaaaatgcattgatctgtgtgcagaggctcttccttggcgcaaagtatgccagtatcctgcaggcttgagaa

SEQ ID NO: 39818 - DNA, 258 bp, Zea mays
ccccctgtcccgctaggatccccccgaaaccctcccccaaaaccccagagcggagaagagcgcaagatgttcggcttcgggcaccacggccaccacggccagaacccgccggcgcacggcggcgtgcaccagcccaccttcaagatcttctgcaaggccgacgaggggtactgcctcaccgtccgcgacggcaacgtggtgctggcccccgccaacccgcgcgacgagcaccagcactggtacaaggacatgcgcttc

SEQ ID NO: 39819 - DNA, 255 bp, Zea mays
tacaccttgggatgacctttgcacaaggtgcctttgggaagctctacaggggaacatataatgggatggatgttgctattaagcttttagagcgacctgaggctgaccctgagaaagctcaactgttagagcagcagtttgtccaagaagttatgatgcttgcaacactgaggcacccgaatattgtcaagttcattggtgcatgcaggaagccattggtttggtgtattgtgacagagtatgcaaagggtggat

SEQ ID NO: 39820 - DNA, 255 bp, Zea mays
cacacacaccacaccacacctcctcgcttccactccgctcgtctgacatctcgtcccgtcctttcgtttcgaagcctcgcgagccccgacgatggccaccgccgcggtgtcggtcgacgagaagctcgacaagcttcgcgccgaggtcgccaagctcgaccagatcagcgagaacgagaagtccgggttcatcagcctcgtgtcacgctacctcagtggggaagcggacagatcgagtggagcaagatccagacc

SEQ ID NO: 39821 - DNA, 256 bp, Zea mays
accaaagatgtccttgttgagttctatgccccatggtgtggtcactgcaagagtcttgcaccgacgtatgagaaggtggcttctgttttcaagttggatgaaggagttgttattgctaaccttgacgctgacaaacacagggatttggctgagaagtatggagttagtggatttcctaccttgaagtttttcccaaagggaaacaaagctggtgaagattatgatggtgatagggacttggttgactttgtcaagt

SEQ ID NO: 39822 - DNA, 260 bp, Zea mays
agcgacacatctgtcgacacagcaacagacaatcttatccaaaagatcatccgcagtgaattcaaggactgcacagtctgtaccattgctcaccgtattcccaccgttattgacagtgaccttgttctggtccttagtgatggtaaaatcgcagagttcgacacgccccagaggcttttagaggacaagtcatctatgttcatacagctagtatcggaatactccactcggtcgagctgtatatagagaggcttagctta

SEQ ID NO: 39823 - DNA, 264 bp, Zea mays
tgcgagagcaggagaaggagaaacagaaggaccggcggccgtacgtgttcgaccggcgcacttctcgtcgcgtggtccggagcgagcaggggtccctgagggtgctccggcccttcgacgaggtgtccaggctcctccgcggcatccgggactaccgcgtggcggtcctggaggcgaacccgcgctcgttcgtggtgcccagccacaccgacgcgcactgcatctgctacgtggcggaaggcgagggagttgtgacgacgatcg

SEQ ID NO: 39824 - DNA, 268 bp, Zea mays
agtattgatgcatcaatagccaatgctttccggagaatcctcatttcagaggttccaactatggcaattgagaaagtcttcatggctgacaacaactcagttatagcagatgaggttctttcacatagactaggacttattccacttgatgcagatccaagactctttgaatatatctcagaaaacgatgtcccaaatgaaaggagtactattgtttataaacagcacgtttcttgtccgaagagatctcaacgaattacagtggaat

SEQ ID NO: 39825 - DNA, 278 bp, Zea mays
cagcgctaaaaccctctccaccgtccacatcagctcccatatccgctcccctacctctccagcatcctcccgtctccgtcgtctcgtctccgctcctcacatcgccagccatgggcaacatcaagatcggaatcaacggtttcggaacgatcggcaggctcgtggccagggatcccctgcagagcgaggatgtcgagctcgtcgccgtcaacgaccccttcatcaccacggattacatgacgtacatgttcaagtacgacaccgtgcacggccaatgg

SEQ ID NO: 39826 - DNA, 109 bp, Zea mays
atatgctgttcgggatgcatgggcaggacaaggggatcatcgtgcgctccacggaggagcagacccgcgagctgcggcgccactactcggatggcggccactgcccgca

SEQ ID NO: 39827 - DNA, 179 bp, Zea mays
gcggctcatcatcgcaggcaagcagctcgaggacaggcgcacacatgccgactacaacatccagaaggagagcacacaccaccttgatcaccgcctcaggggaggcatgcagatcttcgtcaagaccctcactggaaagactatcaccctcgaggtggagtcttctgacaccatcgaca

SEQ ID NO: 39828 - DNA, 270 bp, Zea mays
ctcgccgatcgatcgagtctcaccggattccacagaagcccaacatccgaagccatcgatcgccgccacataatcgagcagaatagttgagaatagctgacgaggatatccaacctatcgtatgtgacaatggcactggaatggtcaaggccggtttcgctggtgatgatgcgccaagagctgtcttccccagcattgtgggaagaccacgccacaccggtgtcatggtcggcatgggccaaaaggatgcctacgtaggtgatgaggctc

SEQ ID NO: 39829 - DNA, 272 bp, Zea mays
agccgtactgccggaagcacgacaacttcgcgctcgcccacgtcaaggagtggtccctgaagccgctcccctccggcgcggcgccgcagtgcacggtcaacagctcggccaccgcgttcgtgctgtccacgggcgggttcaccggcaacccgttccacgactacacggacgtgctcatcccggccttcatcacggcgcacccgctccgcggcgaggtccagttcctggtgagcagctacaagtcgtggtggatgaaccgctacatccagatc

SEQ ID NO: 39830 - DNA, 265 bp, Zea mays
  unsure (1)..(265): unsure at all n locations
aaggcataagttctctgaatgtgctgcttggagctttttgctatatctagttttatttttatctgcaaggatatagagctaccttcccaagacgttttatcatcatgttttgttgcttttggttcttgaacagcgtttgcagctagctgtaatgctttaattcgactttctatatattgttgaaccgtgttgtcgacaccatgccagcatgttttgcatctatgtttttgcttgagccanaaaaaaaaaaaaaaggggcggccgc

SEQ ID NO: 39831 - DNA, 173 bp, Zea mays
caaggatgcagcacagcaccgcatcgaccaggcgcaggggtcttgagagaagaaccacactcgagcggaccgcgcgcgcgaccgccttgaaccaatgccggcgcggcggcatatggcccttaaaggcggtggctgctgctacgtacgctgccgtagagtctcggtcgccgcga

SEQ ID NO: 39832 - DNA, 161 bp, Zea mays
cccatccgcacctctctccatctccctgctcctccgcctccttcttgatccagccaagccagggatcgccatgtcggactcggaggagcaccacatcgaatcgaaggccgacgccggagcgtccaagacctacccgcagcaggctggcaccgtccgtaaga

SEQ ID NO: 39833 - DNA, 166 bp, Zea mays
cacacactcactatacaccgctctgctgcagcaagaaggaagaagctagcgcctccctagctctcgttgtcagcaatggccaccaccgccgcgtccagcctcctcaagtcgtccttcgcgggctcccggctcccttcggccacgcgcaccaccaccccgtcgtccg

SEQ ID NO: 39834 - DNA, 160 bp, Zea mays
  unsure (1)..(160): unsure at all n locations
gggaagtgaaacagtcatagacaaaagcaaatccatcaaaactaggctgatgcagatttttgaggaaagtcataacacagncattgaaggtgttgacaacagcaatgcatgtaatggtgggacagcagcactactgaattgtgtgaatagggtcgaaagt

SEQ ID NO: 39835 - DNA, 168 bp, Zea mays
  unsure (1)..(168): unsure at all n locations
cgaacaacggagctcgacaaggacgaccgacgacgcacgcggagatccggcgtacagcaaattttgaaaacagnacagtaagatggcatcagcagagctttcccgtgaggaaaatgtgtacatagcgaactcgctgagcaggcggagaggtacgaggagatggttgag

SEQ ID NO: 39836 - DNA, 166 bp, Zea mays
tgaacctgtctgcccctcaaacattcaggtccaaggagatcaccaagagcaacgtggtggatgacatggtctcgagcaatgccatcctctatgagcccggcgagcatcccgatcatgtcgttgtcatcaagtatgtaccgtacgtgggagacagcaagagggctat

SEQ ID NO: 39837 - DNA, 195 bp, Zea mays
gtttaactacagcagtggacagccagcaccggagacgattacagatcaaatttatggaaacacactatcaatttctgaaataaaaacagcagacattcctgatactagtttgtcctctgtaggagtagtaagctatggtgatttcgccatagaagtgatagatcctgtttcagattaccttgaacaaatggagaa

SEQ ID NO: 39838 - DNA, 135 bp, Zea mays
atcagctacaccatcagcacatccaccgactgctccagggtgaactgaaccctaaacgacgacgacgggcgacggcggccacctgaagacgatccatatctataccgccgtacgtaggcgcccgcggatcggacc

SEQ ID NO: 39839 - DNA, 308 bp, Zea mays
ggaggagagagaaagtcagatccgtgttccgtgtccgcgtccagtgtgtccgctacaccgctccccctcagtcctcagttcctcacctagcggtagcgtgcgcgcgggagacgtagatgagcggttcggaggcggcagcggcggcggcaacaccggtgacgccgacagaggggacggtgatcgcgatccacagcctggaggagtggagcatccagatcgaggaggccaacagcgccaagaagctggtggtgattgacttcactgcaacatggtgtcctccgtgccgcgccatggctccaatttttgct

SEQ ID NO: 39840 - DNA, 303 bp, Zea mays
ctggttttcaggtgaacccagacgaccttgtgtttggaggctgggacatcagcagcatgaaccaggcagatgccatgaccagggccaaggtgctggacattgacctgcagaagcagctcaggccctacatggagtccatggtgccacttcccggtgtctatgatccggacttcatcgccgctaaccagggctctcgtgccaacaatgtcatcaagggcaccaagaaagaacaggtggagcagatcatcaaagatatcagggagtttaaggagaagaacaaagtggacaaggtagttgtgctgt

SEQ ID NO: 39841 - DNA, 179 bp, Zea mays
cggaaccacacttgccgactacaacatccagaaggagagcacactccaccttgttctccgcctcaggggaggcatgcagatcttcgtcaagaccctcactggaaagactatcaccctcgaggtggagtcttctgacaccatcgacaacgtcaaggccaagatccaggacaaggagggca

SEQ ID NO: 39842 - DNA, 173 bp, Zea mays
atagggtcatttattggattgtatgtgtagaaggcagtaggttactacaatgctggaacagtggagtctattgtggacactctttctggagagttctacttcatggagatgaatactcgactccaggttgaacacccagtgacagagatgattgtaggtcaagatcttgtgga

SEQ ID NO: 39843 - DNA, 192 bp, Zea mays
gctttggatcgattggattcgtaactggtgacggactgagggtctcggagtggattgatttgggattctgttcgaagatttgctgaggggggcaatggcgaccgcggggaaggtgatcaagtgcaaagctgcggtggcatgggacgccggcaagccactgtcgatcgacgaggtggaggtagcgcctccgca

SEQ ID NO: 39844 - DNA, 183 bp, Zea mays
gaaaaatatccccaaaccctagctcccgatctcgatggcgaaccctcgcgtcttcttcgacatgaccgtcggcggcgcaccggcgggccggatcgtgatggagctgtacgccaacgaggtgcccaagaccgcggagaacttccgcgcgctgtgcacgggcgagaagggcgtgggcaagtccgg

SEQ ID NO: 39845 - DNA, 296 bp, Zea mays
ggaaagcgcgattgaagagcgtgctagggattacaatgcaaactggatgactgcagttgagatgcttgatgatgaagtctacgttggggcggagaatagctataacctattcacggtgcgcaagaacagcgatgcggcgacagatgacgaaagggccaggcttgaggtggtgggagagtaccaccttggggagtttgtgaacagattccgccacggttcactggtgatgcgccttccagactcggatatagggcagatccctacggtcatctttggcacaataaacggggtgattg

SEQ ID NO: 39846 - DNA, 178 bp, Zea mays
gagattatatcgatcgtggtcagcatagtctggagacaatcagtcttcaccttgcacagaaggttgaatatcctcacaatgtacacttaatccgagggaatcatgaagcagcggatatcaatgctctatttgggttccgaatcgagtgcatagaaagaatgggtgagcgggatggaat

SEQ ID NO: 39847 - DNA, 306 bp, Zea mays
ggaggtgagccaccggaagcggagacgtgagcagtcgaccaaccccgtcgatccggctgcggcccggcgtgctagatcgctaccgatcatggtggtggaggagatcgccgagggggtgaagaacctcaccgttaccggagacgcggcggcttcaggcggagaggggcagaggaggggcggcggcggcagcagcaaccgcatccaggtgtccaacaccaagaaacccctcttcttctacgtcaacctcgccaagaggtatatgcaacagcacgaagatgtagagctatccgctcttggaatggccat

SEQ ID NO: 39848 - DNA, 305 bp, Zea mays
cgtggttcgttaggaaaggaaatcgattccccccgcatctgatctcttcggtgctagagaaatataggccgccgccgcctcctccttgttcggtgaaaggtgggcagttagggttgggagatctcttgactcacgacacgagcagcagaattcgtcgagggccgctggttgctgcgagaggtccgggccttcgtgggatcttgaaaattgaatgttctaatggagtccaagggtggcaagaagaagtctagcagtagtcgttcctccctgatgtacgaactccccttggctacagcatcgaggat

SEQ ID NO: 39849 - DNA, 302 bp, Zea mays
cccaactcgatctcgcacctagggtttcgtctcgccgctctcgtcctccgcgaagatgccgaagaacaagggtaagggaggcaagaaccggaagcgaggaaagaacgaggctgacgacgacaagcgcgagctcgtcttcaaggaagacgggcaggagtacgcgcaggtgacccggatgctcggcaacgggcggtgcgaggccatctgcgtcgatggcacgcgccgcctctgccatatccggggtaagatgcacaagaaggtctggatcgcggctggggacatcgtcctcgtcggcctccgcg

SEQ ID NO: 39850 - DNA, 299 bp, Zea mays
caatccttcaagcgcaacagcctcctcctcgtcgtccggtcgtgagaagggatggcgggccgtggcaaggctatcggcgctggcgcgcgaagaaggcaacgtcgaggagctccaaggccggactccagttccccgtcggcaggattgctaggttcctcaaggcgggcaagtacgctgagcgcgtcggcgccggcgcccccgtgtacatcgccgccgtcctcgagtacctcgcggctgaggtttgtgccccgcttcgttttctttcccctctccttgttgcgattcgcttcgggtccgcg

SEQ ID NO: 39851 - DNA, 304 bp, Zea mays
gactctgaggatcttcccctcaacatctctcgtgagactctccagcagaacaagatcctcaaggtcatccgcaagaatcttgtcaagaagtgcgttgagctgttttttgagattgcggagaacaaggaggactacaacaagttctatgaggccttctccaagaacctcaagcttggcatccacgaggactccacgaacaggaccaagattgctgagctcctgaggtaccactcgaccaagagcggggatgagctgaccagcctcaaggattatgtgaccaggatgaaggagggccagaacgaca

SEQ ID NO: 39852 - DNA, 300 bp, Zea mays
cccacaccgggcacaccccccgagctcagcttagctccactccagctccaatcacagtcgtgaccagagcgcgagagctagctagagggccgtgaaaatgccgatcaataggatcgccctggggagccaccaggaggtgtaccacccgggcgccctcaaggcggcgttcgctgagttcatctccaccctcatcttcgtcttcgccggccagggctccggcatggccttcagcaagctgaccggcggcggcccgacgaccccggcgggcctgatcgcagcgcacgcagctagcatccagcg

SEQ ID NO: 39853 - DNA, 297 bp, Zea mays
  unsure (1)..(297): unsure at all n locations
tagatgaaggaaaagcagactgggatgcattgtttgagccatatccattttttgaatcatataaaaattatctagaagttaatatcacagcgagaaatgaagatgacctcaggaattggaaaggatgggtggaatctcgccttcgcactcttgtattaaagattgagcgttattcacatgagatgatccttgcacacccatatcccaaagatttctcagataaatccaggcccttacatatcttttacttncagggtctttggagaaaacaaactacccaagctcaagaaactgagc

SEQ ID NO: 39854 - DNA, 298 bp, Zea mays
cttgctcagctttacttagagttccttgacaagtttgagaggaagtttgtgacacaaggagcatacgacacacggaacatcttccagtcactagatcttgcatggacatatgttcggatcttccctcgcgaacttctccaccgtatcccggcgaagaccttggaccagtactatagcagagatgcctcccactgaatcactgatcgttgatcagtgttccaatagtttggcaagtgttgaataaattgaacagattggcttcatggccttttccctgtatttatgtgtagtcaggtcc

SEQ ID NO: 39855 - DNA, 300 bp, Zea mays
gtacaccacactagttaccacagacgacgggcgccatgaaagtcccggtgcttctcctcctggtctccctgtgcttctcgctcgcgctcgcgtggcaaacggacacggaatcgggctcaggcaggccgtaccactacggcgaggagagtttccggcactggacgcgctcccggcagggccggttcagggtgctggaacggttcacccacgagctgctggaggacgccgtcggcaactaccgcgtcgccgagctggaagccgcgccgcgcacgttcctgcagcccagccactacgacgccg

SEQ ID NO: 39856 - DNA, 293 bp, Zea mays
catgcacggcgaggcgcacagcagcagaagcagggcgccaagatgacggcgctcaaggccgcgacggccgcgaccttcggcgggtcgatgctggtgctgtccgggctgatcctggccggcaccgtgatcgcgctcacggtggccacccccgtgctggtgatcttcagcccggtgctggtgccggccgccatcgcgctggcgctcatagcggccgggttcgtcacctccggcggcctcggcgtcgctgcgctgtccgtgttctcctggatgtacaagtacctgacgggcaagca

SEQ ID NO: 39857 - DNA, 182 bp, Zea mays
cggaaaagcgtggacgagcctgggagagccgccgggcgtggtcctaagcgcaccacatcggtgtgggtgcccgtggctccggagaagctcttcaacttcctccgtgacgagcagctgcgtgcggagtgggacatcctcagcaacggaggcccgatgcaggagatggccaacatcgccaaggg

SEQ ID NO: 39858 - DNA, 184 bp, Zea mays
ctggtgcccatgtgggagtgcatcgtgtcggaccatctcacccccgtgctcgcctaccgctgcctcgtccccgaggacaacgtcgacgcccccagcttcctcttcgagtccgtcgagcaggggccccagggcaccaccaacgtcggccgctacagcatggtgggagcccacccagtgatggaga

SEQ ID NO: 39859 - DNA, 177 bp, Zea mays
gcatatcacagtgacagacacgatggtgagcgccagaattgttgtccacatcgccacacacctatgcgctgccgccgcagtcgcgtcgtcctgggaggacgacaaccaccaccaccacgggggccacaagtccgggcaatacgtgcggcggtgcgaggaccggcccaggcaccagcg

SEQ ID NO: 39860 - DNA, 292 bp, Zea mays
ccagaagctacctaaacttccagccgtctcctccgcacgcgaaaaccctagcagctccgtagtccctctcctctggaggtattcgcagtcgaccgtgtcctcggagcacgatgaaggttgttgctgcctacctgcttgctgtcctcgctgggaatgccagcccctccgctgaggatttgactggcattctggagtcagttggctgtgaagttgacaatgaaaggatggaactgctgctgtcccaactgagcggtaaggacatcaccgagctcattgccgcgggcagagagaa

SEQ ID NO: 39861 - DNA, 290 bp, Zea mays
ggagtggtgacgacgatcgagaacagcgagaggcggtcatacaccatcaagcaaggccacgtcttcgtggcgccggccggggcggtcacctacctggccaacaccgacggccggaagaaactggtcatcgccaagatcctccataccatctccgtgcctggcgagttccagttcttcttcggccccggcgggaggaacccggaatcgttcctgtcgagcttcagcaagagcatccagagagctgcatacaagacctcgagcgaccgtctggagaagctgttcgggaggca

SEQ ID NO: 39862 - DNA, 293 bp, Zea mays
ctcttctcctccctcctgccgggtccttaataaagagcagcagcgcaaggtgagccgccagcttgccccaggttggtagagcgagcgagaagaaggcaatggcggcggagagcttcctgttcacctcggagtccgtgaacgaggggcacccagacaagctgtgcgaccaggtgtcggacgcggtgctggacgcctgcctggcgcaggaccccgacagcaaggtggcctgcgagacctgcaccaagacgaacatggtgatggtgttcggcgagatcaccaccaaggcgagcgtg

SEQ ID NO: 39863 - DNA, 295 bp, Zea mays
gggctcgccatcaagcactccctcggccagtcccacccggtcaagctcgcgcctttcaacccggaccaggaggacgcgtcggtgctgtggacggagagcaaggacgtgggcaagggcttccgctgcatccgcatggtcaacaacacccgcctcaacttcgacgccttccacggcgacaaggaccacggcggcgtgcacgacggcaccgccgtcgtgctctcgggagtggtgcaagggcgacaaccagagctggaagatcctgccgtggggtcccgaggccaactcctccgcggcc

SEQ ID NO: 39864 - DNA, 288 bp, Zea mays
gagaactcgtcgcgccgcctccgcctccgcctccggtggttagttcctctctcctcgtcagctcaccgcccgccccacagaactctgccccgtgctttgccaccggtgactgcagaagcagctagccatggcggcggcggcggcggcggcggccttcgatgcctacaccgacaagaacgccatcttccgccgcctcaaggccaagcccgagaacaagatgtgcttcgactgcaacgccaagaaccccacctgggcctccgtcacctacggcatcttcctctgcctcga

SEQ ID NO: 39865 - DNA, 290 bp, Zea mays
ggaatgcttgttgacggtgaagcttgtactttgccacagcttgagcttctcgaagtaaccgctcgagcagtccatcttattattgaatggggagatccaggtttatcagttgctgatggcctttctaatctgctaaagtgccgtctttcaaccaccatccgctgcctttctcacccaagcgcgcacgtgcgccgctcagcatgtccgtcctccgtgacatcctgaaccacggatccgtgagccccaacaagatcagccgaggggaacagcagcggaatggcatccagagc

SEQ ID NO: 39866 - DNA, 177 bp, Zea mays
ggcaagaatcaggagagagatagcaggggggctagctagctgagctcgtgcgacgaagaatggccggaattggcaggaacatggtggcgccgctcctggtgctcaacctcatcatgtacatcatcgtcatcggcttcgcgagctggaacctgaaccacttcatcaacgggcagacca

SEQ ID NO: 39867 - DNA, 171 bp, Zea mays
agccgccgccgctgctcatctcacatccctcgagaagacgcctgctcctcgccgatcgatacgatggccgtcttctccgacctccacaccgccgacggcctcaagtccctcgaggctcacctcgccggcaaaacctatgtgtctggtgactacattactaaggatgacatt

SEQ ID NO: 39868 - DNA, 174 bp, Zea mays
tgagccgttcgtgagtcgcgaggcagtgcgtgcgctgcagcctgcagggcaagaacaggcgatgaagaagatgagcacgctggacacgcggaccctcaaggacgagctgacgagcatggacaggaagtgcctcgtggaccttggccacccgctgctcaaccgcgtcgccgacag

SEQ ID NO: 39869 - DNA, 265 bp, Zea mays
caagaagacaggagaagggagtcgtagtgagtcttaagaatggcgagtgcacaggcagtcgggcaaggagaacgaggccacttcgttctgaagagcggacacaccattccggccgttggtctaggcacttggagggccggctcagataccgctcactctgttcggaccgccatcgccgaggctggatataggcacgtggacacagctgcccaatacggagtagagaaagaggtcggtagaggacttaaagctgcgatggagggcg

SEQ ID NO: 39870 - DNA, 273 bp, Zea mays
caaatccccaaagcctccgacccccttcctctctccctccgccgccgctgcgcacgcagggaacaagcgacatgggcgtctacacctttgtgtgccgcaacaacggcggcgagtggaccgccaagcagcacaccggcgagatcgaggcttccgccgctaccccatacgagctgcagcgccgcctcgtcgctgccgcctccgcggccgactctgcctacagcgtccagtcgtccttctccatggtcacccccagctccgccgtgttccaggtga

SEQ ID NO: 39871 - DNA, 272 bp, Zea mays
ctcaaacccaagccgcctccagcaagtatcagagctcaggaatcagcgccatggcgagtgagacggagaccatcgcatttcaggctgagatcaaccagctgctctcactcatcatcaacaccatctacaccaacaaggagatcatcctccgcgagcatatcgccaactcttccgatgcgctggacaagatcaggttcgagagtatcactgacaagagcaagctcgatgcgcacctgagcttttcatccaccttgtcccagacaaggccacga

SEQ ID NO: 39872 - DNA, 165 bp, Zea mays
cctttgctgaggacctcttggttcctgtcttcaaggctttggtagacaagacgaagctggacccaagtgaagttggcgacattgttgttggtactgtcttagctcctggttcccagagggcaatcgaatgcagaatggctgcactgtatgctggtttccctgaca

SEQ ID NO: 39873 - DNA, 268 bp, Zea mays
ggtcataatgatgataaagttcttgttcttgctgccacgaatacgccatatgctctggaccaggctgtgcggcgaagatttgacaagcgtatctacattccgctacctgacacgaaagcaaggcagcatatgtttaaggtccatctcggggatacaccacacagcttaactgaaagcgatttcgagagcttggcccgtcgaacagatggattttctggttctgatgttgctgtttgtgttaaggatgtcttatttgaacctgtgcgca

SEQ ID NO: 39874 - DNA, 264 bp, Zea mays
gtcggtagagcgagaagaaggcaatggcggccgagagcttccttttcacctcggagtccgtgaacgaggggcacgccgacaagctgtgcgaccaggtgtcggacgccgtgcttgacgcatgcctcgcgcaggaccccgacagcaaggtggcctgcgagacctgcaccaagaccaacatggtgatggtgttcggcgagatcacgaccaaggcgaccgtggactgagagaagatcgtgcgcgacacctgccgcgagatcgggttca

SEQ ID NO: 39875 - DNA, 264 bp, Zea mays
gtccaaacattggaggctggtcaagaaatagtggaacaactcataaggtcccctatggatcttattagaagaaaatgcacctgcaagaagtcaggctgccttaagaagtactgtgactgctaccagggaggggcaggatgctctatcaactgtaagtgcgatgattgtagaaacccatttgggagaaaagtcggcgttattttggatggtaaaagcagcggtcttcccgcgcccgtacatgtgcatgaaagaaacgggactgaa

SEQ ID NO: 39876 - DNA, 263 bp, Zea mays
cacagtgacagacacgatggtgagcgccagaattgttgtccgcctcgccacgcgcctatgcgctgccgccgcagtcgcgtcgtcctgggaggacgacaaccaccaccaccacgggggccacaagtccgggcaatgcgtgcggcggtgcgaggaccggccctggcaccagcgcccccggtgcctggagcagtgcacggaggaggagcgggagaagcggcaagagcggagcaggcacgaggccgacgaccgcagcggcgagggct

SEQ ID NO: 39877 - DNA, 270 bp, Zea mays
gaaaactatgtgttttagggtggaagagagggttaccaaactcttctgaacactgatcttaagagagaacttgaccattcggctaactttcttcaagcagctgttgacaacaagaagaagattggatacaacggaacactgttgatagagcctaaaccacaggaacctacaaaacaccagtatgactgggatgttgcaactacgtttgcttttctacagaagtatggtcttaccggagagttcaagattaatgttgagtgcaaccatgct

SEQ ID NO: 39878 - DNA, 273 bp, Zea mays
gacaagagcgagtttcacctcagctccaaccccgtgctcaagaaggtgcccgtgctcatccaccacggcaagcccgtctgcgagtcccagatcatcgtgcagtacgtcgacgaggctttccccgccgccgcacctaatttccttccatccgacccctacgaccgcgccattgctcgcttctgggcctcctacgtcgacgacaagttctacagcgcgtggatacccgtgttcaggggcaggacggcggaggagatggcggaggcggcgaggcag

SEQ ID NO: 39879 - DNA, 180 bp, Zea mays
ggccaatggaagcacagcgacatcgccctcaaggacaccaagacgcttctcttcggcgagaagccggtcaccgtctttggcatcaggaacaccgaggagatcccgtggggtgaggctggtgctgagtatgtcgtggagtccaccggtgtcttcactgacaaggacaaggctgctgcacat

SEQ ID NO: 39880 - DNA, 97 bp, Zea mays
  unsure (1)..(97): unsure at all n locations
cctcgccactctcctatgcgctgccgccgcagtcgcgtcgtcctgnggaggacgacaactactacgaccacgggggccacaagtccgggcaatgcgt

SEQ ID NO: 39881 - DNA, 290 bp, Zea mays
gaagaagatcgtttctttgagaaaaattcggaacttgttgacaagaatactgcttcatatttctataattttgcagcgactgaatagctgattcaacacctggaaacaatgagtgctgcagttctttctttttctgccttcatcatggctctcctccctgcaggaacttttagctctggctttataggaatagcgttgtcttatggtctgtccctgaacaattcctttgttttctctatccaaaaccagtgccagctatcaaaccagataatctctgtggaaagggtgaa

SEQ ID NO: 39882 - DNA, 176 bp, Zea mays
gtaaggaagacgaggagggcaggatgtcgcaccgtaagtacgagcacacgaggcacggctccctcggcttccttcccaggaagcgctcctcccgccaccgcggcaaggtgaagtcatttcccagggatgaccccaagaagccttgccatctcactgccttccttggctacaaggct

SEQ ID NO: 39883 - DNA, 209 bp, Zea mays
cttatttattttgccttgatatcaggtggataacattagcaaagctcttcataaatgtaattatcaaatgcgtggatttgagaccatgtacaatggtcacaccggaagaaaactgacagcaatgattttcctgggacccacgtattaccaaagactcaagcacatggtggatgacaagatacattccagaggacgtggtcctgttcaga

SEQ ID NO: 39884 - DNA, 199 bp, Zea mays
aggtagcgaccgtcgtctcgggctgcgggaggctgaagaaggtcctcgtggaggagtggaaggtgagcgagacgacccggcggatggcagggcccgtcctgtcgttcctctgcaccggactctagtaagtagggttgccaagaaagggcaatgaatctgggcagcgtcagacttgctctttggatgaacagagcttgta

SEQ ID NO: 39885 - DNA, 303 bp, Zea mays
acttcctgcacgctgttgggcaatgttagaacaacgcaggcctcccagacagcggtgaagagcccttcgtctctaagcttcttcagccaagttacgaaggttccaagcctgaagacctccaagaaactggatgtctccgccatggctgtatacaaggtgaagcttgtcgggcctgaaggtgaagagcacgagtttgatgctccagacgacgcctacatccttgacgcagccgagactgccggtgtggagttgccatactcgtgccgtgctggggcttgctccacctgtgccggcaaaatcgag

SEQ ID NO: 39886 - DNA, 298 bp, Zea mays
cgaggagcacagatctggcgcgagcctaggtggcgccggacatctaccacaccgacggcaccgcggccgacgagcacagccaccaccacatgagcgtgttgcagcagcacgtcgccttcttcgaccgcgacgacaacggcatcatctacccttgggagacgtactccggatgccgtgcgcttgggttcaacatgatcctgtctctcttgatcgctcttgtcgtgaacgggaccatgagctatgccacgctgcctgggtggctgccgtcccctctgttcccgatctacgtccacaacat

SEQ ID NO: 39887 - DNA, 292 bp, Zea mays
accattttcacagactgttgcacacgtgggagagagtagcagtagcaagtcaacggtgatctctttgctggaacggttctacaaccctgactctggcaacatctcactggatgaagtcgagatcaagagcctgaaagtcaattggttgaaggaccagatgggtctggtggggcaagagccaatcctcttcaacgacacgatccgtgccaacatagcctacgggaagcatggggaggtaaccgaggaggagcttgtcaaggtcgcaaggacggccaacgcgcacgagttcata

SEQ ID NO: 39888 - DNA, 196 bp, Zea mays
acagccgcacgaaaccctaacgctgccgccgcttcacaggtaagccgccgccatggtgtccggttccggcgtatgcgcgaagcagtcgtggtggacgcgcgccaccacatgctgggccgcctgtcgtcgattatcgccaaggaactgctcaatgggcagaaggtggtcgtcgtccgctgcgaggagatctgtatgt

SEQ ID NO: 39889 - DNA, 281 bp, Zea mays
ctcaacacagcacaggcagctcgagacacagagagagagaaagatgtcgtggttcgggcaccaccaccacaaccagccggatcccccggcgtcgggccccaaccaggtgttcaagatcttctgccgcgccaacgagaactactgcctggccgtccgcgacggcgccgtcgtgctggccccggtcaaccccaaggacgaccaccagcactggtacaaggacatgcgcttcagcacccgggtcaaggacgaggaaggcatgcaggcgttcgcgctcgtcaaca

SEQ ID NO: 39890 - DNA, 235 bp, Zea mays
cttcaagagacaagagtggagcgcgccgaagagcagcgcaggggggagatgaacagcggcgtggacacgcaggcgcgggcgttcgcggacgaggtgcgcggtagtttggagacgaaggactggatgctggacctcggccacccgctcctgaaccgcgtcgccgagagcttcgccaaggccgcggggatcggcgcagtgcaggcggtcgccagggaatcgtacttcatagcgactg

SEQ ID NO: 39891 - DNA, 213 bp, Zea mays
ccggtaccgcgtcggcgacgtgctccaggtgaccggcttccacaactcggcgccgcagttccggttcgtgcgccgcaagaacgtgctgctgtccatcgagtcggacaagacggacgaggccgagctgcagcgcgccgtggagcgcgcgtccgcgtcgctccgcccgcacggcgccgccgtggtggagtacaccagccaggcctacaccaagag

SEQ ID NO: 39892 - DNA, 310 bp, Zea mays
ctcgctcgtgctgcgctcgctacctcgcttcgcattccattcgaggagagcggtgagaagggaggaaaggcaagatgttcatcgagagcttccgcgtcgagagcccccacgtgcggtacggcccgacggagatcgagtcggagtaccggtacgacacgacggagctggtacacgagggcaaggacggcgcctcacgctgggtcgtccgccccaagtccgtcaagtacaacttccggaccagaaccgccgtccccaagctcggggtgatgcttgtagggtggggaggcaacaacgggtccacgctgacggc

SEQ ID NO: 39893 - DNA, 312 bp, Zea mays
  unsure (1)..(312): unsure at all n locations
gcaagtttgtccattcgcattggtctgaatactgtagctactagcgcgagtgccactgtgccgcagctgcctgctcgccattattggcaagctgtgttcaatcaaagcttaattaggctccctctacatctgatccagctaagtagctagccagcactacagaagggcgtggcaagaatcaggagagagatagcaggggggctagctagctgagctcgtgcgacgaagaatggccggaattggcangaacatggtggcgccgctcctggtgctcaacctcatcatgtacatcatcgtcatcgtgttcgcgag

SEQ ID NO: 39894 - DNA, 210 bp, Zea mays
gtttaccattcctccccaaaacacatcctgcgatcctcgaagcctccgccgagcatcgatcatgtcggcctactgcgagaagtacgcggatgagctcatcaagaatgctgcctacatcggcacccctggcaagggtatccttgctgctgatgagtcaactggcaccattggcaagcgcctttccagcatcaatgtcgagaacgtggagga

SEQ ID NO: 39895 - DNA, 206 bp, Zea mays
gctgaaattggtggagcatttggtggagaaaaagcaactggtggtggacgagaagcagggagtgattcctggaagcaatacatgaggagggcgacttgtacaatcaactatgggagcgagctacctctagcccagggaatcaattttggttaatcctgcagaaatgttgcgcgtggatctcggtgttttctgcagacgtggatgcc

SEQ ID NO: 39896 - DNA, 128 bp, Zea mays
gacaacactcaccgatagcaagtagcgccgccgacgtttcgagagcagagtatccaagctagccaagcgcgcacctcggtgacctagctagctacctagctagttcaggcgacgatatggcgtctggt

SEQ ID NO: 39897 - DNA, 297 bp, Zea mays
gttggaatataagatcctgaaggagaagatcaaggagtacaacaagaaggacgccaaattctacagcaacatgttcgccaagatgacaaagtagcttttggggtggaggatgttgtggtgacgcgaagggattaaaaacaccgatttctgctgccgaaggacttcgcccgttgcttaacttctcgcttttcgcatactttgtagtcaattagtgtgcacggatgcttggatatgtgaaactgaggaacatgtacttcgaggattattattggttctgaatttttatgttttctggtt

SEQ ID NO: 39898 - DNA, 197 bp, Zea mays
tgccagttatgaaaaggtttatggagaacccatttctgtgaaggaattggctgatcgtgtggcaagttatgttcatctttgcacgctgtactggtggctcaggccttttggttgcggtgttattctaggaggttatgatagggatgggccacagctctacatgatagaaccctcaggagtttcctacaaatacttcg

SEQ ID NO: 39899 - DNA, 200 bp, Zea mays
cgttcacctctacccagctgcttgccatggtgctgtccaatttgaagggcattgctgagggtaacctgaatgctgcagttgttgattgttgcattggtattccagtctactttacggatctgcagcgcagggctgttcttgatgctgctactattgcgggtctccagccattgcgattgttccatgagacaacagccact

SEQ ID NO: 39900 - DNA, 202 bp, Zea mays
gccaccaccgtcccgaagccccctcccagcgccatcgacttcatctcggattgaagcaatgtcgtcggacgatgaggtcagggaggagaaggagctcgacctactctccaacgacgttgtcaccaagtacaaggctgccgccgaaatcctcaacaacgctctgaagattgttgtgtctcagtgcaagccaaaagtcaagatt

SEQ ID NO: 39901 - DNA, 318 bp, Zea mays
agagaggcggcgcgggcggacaaggagcaggcggaggaggagttgtgccaagccacaatgggtatctcgcgtgactcgatgcacaagcgccgagccaccggtggaaagcagaaggcctggaggaagaagcgaaagtatgagcttggtcgccagccagccaacaccaagttgtcaagcaataagacagtgaggagggtccgtgttcgtggaggtaatgtgaaatggagggctcttcgccttgatactggtaactactcatggggaagtgaagctgttacccgcaagacccgtatcctcgacgtggtctacaatgcatca

SEQ ID NO: 39902 - DNA, 149 bp, Zea mays
tacagagctctttcacagaggaacagtgccccaacaaaagcatctcggccttaggacatgggacgtgatggttttgttaaaagggaacgggctggtgtcctcgtattggaagaacttgagcatgccaaggaaagacgtgcaacaatata

SEQ ID NO: 39903 - DNA, 319 bp, Zea mays
ctgacgctcatcccacatcagtagtcgaccaagcacaagcagcagagccggccggaatatgtggacgatcaggaaggtggcgacgccgcaggtggccgtcctcctgctgctcctcatcgtcgttgcgcaggaggcggcgccgttggcggaggcgcgcgtgtgccggcgccggagcgcgggcttcaagggggtctgcatgtccgaccacaactgcgcgcaggtgtgcttgcaggaaggctacggcggcggcaactgcgacggcatcatgcgccagtgcaagtgcatcagggagtgctagctagctagcagctataccggc

SEQ ID NO: 39904 - DNA, 318 bp, Zea mays
gctccattctcagccgccgccaatcccttcccgtgctccgcaaccgctgagtgagaagaagagatggccggcaagggcgatggcccggctatcggcatcgatctcggcacgacgtactcttgcgtcggcgtgtggcagcacgaccgcgtcgagatcattgccaacgaccagggtaaccgcaccacgccctcgtacgtcgccttcaccgactccgagcgcctcatcggagatgcggccaagaaccaggtcgccatgaaccccatcaacaccgtctttgatgccaagcgtctcatcggcaggaggttcagtgatgcgtct

SEQ ID NO: 39905 - DNA, 195 bp, Zea mays
  unsure (1)..(195): unsure at all n locations
cgccatcctcaggggcaagaagaggactttcctcatcgcctccaactgccacccgcagaccatcgacgtgtgccgcacccgctccgacggcttcggcatccgngtcgtcgtcgccgacggcaaggacctggactacggcggcggcgacgtctgcagcgtgctcgtgcaataccccggcatcgagggcgaggtgct

SEQ ID NO: 39906 - DNA, 145 bp, Zea mays
cagacacgatggtgagcgccagaattgttgtcctcctcgccacgcgcctatgcgctgccgccgcagtcgcgtcgtcctgggaggacgacaaccaccaccaccacgggggccacaagtccgggcaatgcgtgctgctgttcgatga

SEQ ID NO: 39907 - DNA, 200 bp, Zea mays
  unsure (1)..(200): unsure at all n locations
ggagcgcgcggggctgctgtacccgcacgagcagtgcgacccaaagatcatccaccgcgacgtcaantgccgcaacgtgctgctgaacgagcaccacgaggccgtcgtgggcgaactgggcctggccaagctgctggaccacggcgactcgcacgtcaccacggcggtgcgcggcaccgtgggccacatcgcgcccgagt

SEQ ID NO: 39908 - DNA, 313 bp, Zea mays
gcctgccgcagaagcttgccataccaaggaaaaacgacagcgatcttgatcagtatggctgtctcaagacctataacagagctgcagttgcgttcaacgcagcgctgggcagcctctgcgacgagctgagtgcgcagatgaaagacgcgacgcttgtgtacacggacctgttccccatcaagtatggtcttgtcgccaaccacactaaatatggttttgacaagccgctgatgacatgctgtgggtacggagggcctccctacaactacgacttcagcaagggttgccagtctaaggatgtggcggcctgcga

SEQ ID NO: 39909 - DNA, 303 bp, Zea mays
ctcccaacaccacctcgcctgcgatcttcgtagcctccgtcgcgtcgagcatcgatcatgtcggcctactgcggaaagtacaaggatgagctcatcaagaatgctgcctacattggcacccccggcaagggtatccttgctgctgatgagtccactggcaccattggcaagcgcctttccagcatcaatgtcgagaacgttgaggagaaccgccgtgccctccgtgagctcctattctgctgccctggtgctctccagtacatcagcggtgtgatcctcttcgaggagacctgtaccagaaga

SEQ ID NO: 39910 - DNA, 304 bp, Zea mays
  unsure (1)..(304): unsure at all n locations
gacaatgttggcttcaacgtgaagaacgttgctgtcaaggatctcaagcgtgggtttgtggcctccaactccaaggatgaccctgccaangaggctgccagcttcacctcccaggtcatcatcatgaaccaccctgggcagattggcaacggctatgccccagtgctggactgccacacctcccacattgctgtcaagtttgctgagctcattaccaagatcgacaggcggtctggcaaggagcttgagaaggagccaaagttcctgaagaacggtgatgctggtatggtgaagatgataccga

SEQ ID NO: 39911 - DNA, 150 bp, Zea mays
tttcgaagcctcgcgagcaccgacgatagccaccaacgcggtgtcggtcgacgagaagctcgataagcttcgcgccgaggtcgccaagctcgaccagatcagcgagaacgagaatttcgggttcatcagcctcgtgtcacggtacctcag

SEQ ID NO: 39912 - DNA, 325 bp, Zea mays
aagctcgaactcggcgagacaacacacaccgatagcaagtagcgccgccgacgtttagagagcagagtatccaagctagccaagcgcgcacatcggtgaccaagctagctacctagctagttcaggcgacgatatggcgtctggtcaggagagcaggaaggagctggaccgcaaggatcgcgaggacgagaccgtcgtccccggcgggaccggcggcaagagcgtcgaggcccaggagcacatcgccgaagggcgcagcagcggaggacagactcgcagggaccagctggggcagcaggggtacagcgagatggggaagaagggc

SEQ ID NO: 39913 - DNA, 310 bp, Zea mays
atccaatctagaagctcccctctccctccctccctctctctctctctcttcgccgtccgaagctccgcacccaatctaatcgacacatcaccgagatgggccgcaagttcttcgtcggtggcaactggaaatgcaatggaaccacagatcaggtcgagaagattgtcaaaaccctgaatgaaggacaggttcccccttcagatgttgtcgaggtcgttgtcagccctccttatgtcttccttcctgtggtcaagagccagctgcgccaagagttccatgttgctgctcagaactgctgggtgaagaaggg

SEQ ID NO: 39914 - DNA, 306 bp, Zea mays
cgacaaaggtggtgaagaaggccgcggcggggcgtcgcggctgggggcggccccaagaagaagccggtctctcgctccgtgaacgccggcctccagttccccgtagagcgtatcggccgctacctcaagcagggtcgctactcccagcgtgtcggcaccggcgcccccgtctacctcgctgccgtcctcgagtacttcgccgccgagctcctcgagttggcggggaacgcagcgcgggacaacaagaagaaccggatcatcgcgcgacacgtactgctggcgatccgcaacgatgaggagctcggg

SEQ ID NO: 39915 - DNA, 307 bp, Zea mays
accacacaacctcgcttccacaccgctcgtctgacatatcgtcccgtcctttcgtttcgaagcctcgcgagcaccgacgatagccaccgccgcggtgtcggtcgacgagaagctcgacaagcttcgcgccgaggtcgccaagctcgaccagatcagcgagaacgagaagaccgggttcatcagcctcgtgtcacgctacctcagtagggaagcggagcagatcgagtggagcaagatccagacacctacggatgaggtggtggtgccctacgataccgtcgcgtcgcctcccgaagatctcgaggag

SEQ ID NO: 39916 - DNA, 300 bp, Zea mays
  unsure (1)..(300): unsure at all n locations
tggncgccctttttttttttttttgaatcaaacattatcttaacaggttcctcatcaatagataaaacccatctcgaagctgtttctagattattaatatgacatttgttttgcatagtctcgtatctttgaaatcacgagcagttgattcaaatgcaaatgtagaaatggattagcagggaaacaggagtatcagaactcaagggttacatgagactgctgacaatcagctgatgtccacataattccggtaccgggccagacggcagaaaccgctacgaagaataagggctgaagcaa

SEQ ID NO: 39917 - DNA, 94 bp, Zea mays
ccaggtcagtcgggactacccgctgagtttaagcatataaataagcggaggagaagaaacttacgaggattaccctagtaacggcgagcgaacc

SEQ ID NO: 39918 - DNA, 296 bp, Zea mays
ctcgctttggatcgattggattcgtaacaagtgagggaatgagggtctcggagtggattgatttgggattctgttcgaagatttgcagaggggggcaatggcgaccgcggggaaggtgatcaagtgcaaagctgcggtggcatgggaggccggcaagccactgtcgatcgaggaggtggaggtagcgcctccgcaggccatggaggtgcgcgtcaagatcctcttcacctcgctctgccacaccgacgtctacttctgggaggccaaggggcagactcccgtgttccctcggatct

SEQ ID NO: 39919 - DNA, 183 bp, Zea mays
agagagagatagaggggagacccattaccaatgccaagaaccagaaaccagagaggacagccgcgaatacaatccgaatcccctaccaaaacccaccataccgtctcccccatctgcaagaacaagatcaggagagcatcctagggggaagaaacaggagggggaaaaagaagcccagaaaga

SEQ ID NO: 39920 - DNA, 278 bp, Zea mays
caagaagagcttgacattgatgtgcttgtgcatggcgagcctgagagaaacgatatggttgagtacttcggtgagcagctctccggttttgcgttcactgccaatggctgggtgcagtcttatgggtcaaggtgcgtcaagcctccgatcatctacggtgacgtgagccgccccaaccccatgaccgttttctggtcgaagagagcgcagagcatgacgtctcgcccaatgaaggggatgctgactggcccagtcacaatcctcaactggtccttcgt

SEQ ID NO: 39921 - DNA, 281 bp, Zea mays
cttgtgtaccatacctccccaaaacacatcctgcgatcctcgaagcctccgccgagcatcgatcatgtcggcctacagcggcaagtacgcggatgagctcatcaagaatgctgcctacatcggcacccctggcaagggtatccttgctgctgatgagtcaacaggcaccattggcaagcgcctttccagcatcaatgtcgagaacgtggaggagaaccggcgggctctccgtgagcacctgttctgctgccctggtgccctccagtacatcagcggtgtga

SEQ ID NO: 39922 - DNA, 171 bp, Zea mays
gtacgccttgcccttcacgaaggcttggtccacctccttgtatcaccacaccccccttcacagatccgttcctccagctagggttagcgtacctctgcagcgatggcgatcaagcggaccaaggcggagaagaagatcgcgtacgacaagaagctgtgcagcctgctcgat

SEQ ID NO: 39923 - DNA, 261 bp, Zea mays
gcggcgctgctgcactgttggcgcgctctgctgcccgccggatgtcgcgagcgcgcctgcgccttgtgtacaggttaccgtacatgacagtcagtctcaagcagttatttttgttgataactctggtgctgaaattatcttgggtatattaccatttgcgagggagttgctccgacgtggcacaaaggtgatacttgcagctaatgatatgccttcgatcaacgatgtcacgtatccagagcttgttgagattataaacaa

SEQ ID NO: 39924 - DNA, 319 bp, Zea mays
gccccagacaacactcaccgatagcaagtagcgccgccgacgtttcgagagcagagtatccaagctagccaagcgcgcacctcggtgacctagctagctacctagctagttcaggcgacgatatggcgtctggtcaggagagcaggaaggagctggaccgcaaggctcgcgagggcgagaccgtcgtccccggcgggaccggcggcaagagcgtcgaggcccaggagcacctcgccgaaggcgcagcgcggaggccagactcgcagggagcagctggggcagcaggggtacagcgagatggggaagaagggcggtctga

SEQ ID NO: 39925 - DNA, 235 bp, Zea mays
tccaaactcgtgagcactttctcctcgtccccgacaagccactcgaagccgagatacggccatggactccaccggcaccggagcagcggggaagggaaagaagggagcggccgggcgcaaggtcggcgggccaaggaagaagtcggtgtcgaggtccgtgaaggctgggctccagttccccgtcggccgcatcgggcgctacttgaagaagggccgctacgcgcagtagtcggca

SEQ ID NO: 39926 - DNA, 96 bp, Zea mays
cagataccgaaaatgtgttccatgacacattctgggatggtttggatgttgtcatcaataaccttgataatgtgaatactaggatgtatatggaca

SEQ ID NO: 39927 - DNA, 128 bp, Zea mays
cgaaagaaatggccattgtatcctagcactcacaacactattttgaagaaatatgatggctccaggacattttccaggaggtgtatgaacccggttggaaaaccaaatttgaagccgccggcatatgg

SEQ ID NO: 39928 - DNA, 280 bp, Zea mays
cgcccacacgctccagccgcttcaccgcgccgccaccgccaccgcgaggatgccgttcaaaaggttcgtggagatcgggcgcgtagccctggtgaactacggggaggactatggccgtctcgttgtcatcgtcgatgtggtcgaccagaacagggcacttgtggatgcccctgatatggtcaggtgccaggtgaacttcaagcggctctcacttactgacatcaagattgacatcaaacgtgtccccaagaagacagccctgatcaaggcgatggaggaa

SEQ ID NO: 39929 - DNA, 276 bp, Zea mays
cgggaggcaacaacgggtccacgctgacggctggggtcattgccgacagggaggggatctcatgggcgaccaaggacaaggtgcagcaagccaactactacggctccctcacccaggcctccaccatcagagtcggcagctacaacggggaggagatctatgcgccgttcaagagcctccttcccatagtgaacccagacgacattgtgttcggaggctgggacattagcaacatgaaccaggccgactccatgaccagggccaaggtgctggata

SEQ ID NO: 39930 - DNA, 271 bp, Zea mays
agcgtggttcgttaggaaaggaaatcgattccccccgcatctgatctcttcggtgctagagaaatataggccgccgccgcctcctccttgttcggtgaaaggtgggcagttagggttgggagatctcttgactcacgacacgagcagcagaattcgtcgagggccgctggttgctgcgagaggtccgggccttcgtgggatcttgaaaattgaatgttctaatggagtacaagggtggcaagaagaagtctagcagtagtcgttcctccct

SEQ ID NO: 39931 - DNA, 141 bp, Zea mays
gtacgtgtacaacatgaagaacacggtgggcgacaaggacaagctcgcggacaagctggaggcggaggagaaggagaaggtggaggaggccctcaaggaggcgctcgagtagctggacgacaaccagtccgccgagaagga

SEQ ID NO: 39932 - DNA, 262 bp, Zea mays
cagaccattagctttatctacaccagagcgcagaagaacccgatcgacaccatgagggtgttgctcgttgccctcgctctccaggctctcgctgcgagcgccaccaccacgcatacaagcggcggctgcggctgccagccaccgccgccggttcatctaccgccgccggtgcatcagccacctccggttcaccagccacctccggtgcatctcccaccgccggtccaccagccgccgccggtccacctgccaccgccggtcc

SEQ ID NO: 39933 - DNA, 299 bp, Zea mays
gtgcaagctccttcgcctcgaaccctctcgcgcttggcttgctttcactctccagggccccactcccacctcgccgccgcagccatggcgatcacagcgccaactcccgacatcctcggcgagcgccagttcggccaggacgtccgcacgcagaacgtgatggcttgcagggcggtggccaacatcgtcaaatcctcgctcggccccgttggtctcgacaagatgctagtagacgatattggtgatgttacaatcactaatgatggagcaaccatacttaagatgttggaagttgagca

SEQ ID NO: 39934 - DNA, 300 bp, Zea mays
cgcacgcagacctgcacccaaagcttccggagaattcctcccttgccccgccgtcgcatcctcttcgaagttcgaatcgaatcgcgccggatcacccacctcatggcggacaaggagcctgtcgtggagcggccagaggcgggtgaggaggaggaggacgcctcagccgccgccgccgcgggtggaggaggaggacacgggcgcccaggtggctcccatcgtgcggcttgaggaggtagccgtcaccaccggcgaggaggacgaggacgtcctgctcgacatgaaggcgaagctgtaccg

SEQ ID NO: 39935 - DNA, 300 bp, Zea mays
gttaaagttagcaggtgcatctacctccaatgtttctgtcaactatgacaaccacaatggatctggtcctcatgaagaatgggtgccattgcgacaagagggggataagccgcctcagatacgtcttgcgcaccctgctaccctctcaaaattcaaaactcaggaaacgactcagggaaacagcaggaagttgtttatgggttatcggagatcatgtagacgcttgggtcaacaatagctgttggcgagagggagttatttctcagaattatgagactgatgagacgaaatatgatgtac

SEQ ID NO: 39936 - DNA, 294 bp, Zea mays
gtttgtccattcgcattggtctgaatactgtagctactagcgcgagtaccactgtgccgcagctgcctgctcgccattactccaagctgtgttcaatcaaagcttaattaggctccctctacatctgatccagctaagtagctagccagcactacagaagggcgtggcaagaatcaggagagagatagcaggggggctagctagctgagctcgtgcgacgaagaatggccggaattggcaggaacatggtggcgccgctcctggtgctcaacctcatcatgtacatcatcgtca

SEQ ID NO: 39937 - DNA, 221 bp, Zea mays
cgcacacacagcccggtccccgatcaccgatcacctcgtcgatccaagatgcagatcatcgtcaagaccctcacaggaaagactatcaccctcgaggtggagtcttctgacaccattgacaacatcaaggccaagatccaggacaaggagggcatacccccggaccagcagcggctcatcttcgctggcaagcagctcgaggacaggcgcacacttgccga

SEQ ID NO: 39938 - DNA, 297 bp, Zea mays
agtcgaatatagtcaacaacagagaaagggagaagatttttgtagccagccaggagaaattccacgccaacgcagacaagcagtactggaaatcgatctcggatctcatcccgcatgaaatagccaccattgagaagcggggaaagaaagacaaggacaagaagccatccgtcacagttattcagggccccaagcctggcaagcccaccgacctctcccggatgcgccatatcttagtgaagctgaagcacgctccaccgccacatatgttgcaacctccaccagcacctgctgcta

SEQ ID NO: 39939 - DNA, 295 bp, Zea mays
gaagaccgagccgtgcgggcggctcgggacgggaacgggacaggaccccaaaatctcagatacttcctgcccgcccgcccgtacccgtcgacgcgtcgttcttgccggccgcgcctcacctccgccctctcctcctccagggggatcggatacaccacaggctgcgcgatggtgctgtgggtcttcggctacggctccctcatctggaaccccggcttcgacttcgacgacaaaatcctcggcttcatcaagggctacaagcgcacctttaatctcgcttgcattgaccacagag

SEQ ID NO: 39940 - DNA, 295 bp, Zea mays
  unsure (1)..(295): unsure at all n locations
cgcgacgaccctcgccttcgccgccgaatccaangcaccgatcacgggttcaccgcagcgcacagagcagccccgacaaacggcccgatccgcgctcacctcaccgtcgcttcagtcatggcaggaatagcacctgagggttctcagttcgatgctaagcactatgattctaagatgcaggagctgctgagcaccggtgagactgaggagttcttcacttcatatgatgaagtttttgagagtcttgatgatataggcctccaagagaatcttctgagaggcatttatgcttatg

SEQ ID NO: 39941 - DNA, 261 bp, Zea mays
caccaatccacagcgagacacgcccgagcgagtgatccccgacccagccgccgccatgaggccgtcgcagctgaagtccacggccgagcaccaccgccgcagccgcggctacacgtccacagccaatccggagcggaaggtggccatcctgggcgcggcgggcggcatcgggcagccgctctcgcacctcatgaagctcaacccgctcgtatccaccctctccctctacgatatcaccggcacacccggcgtcgcggccga

SEQ ID NO: 39942 - DNA, 288 bp, Zea mays
aaaaacacaccaagcgaagccacgaagcaacgacctaacaccaatggctaccaagatattagccctccttgcgcttcttgcccttttagtgagcgcaacaaatgcgttcattattccacagtgctcacttgctcctagtgccagtattccacagttcctcccaccagttacttcaatgggcttcgaacatccagccgtgcaagcctacaggctacaactagcgcttgcggcgagcgccttacaacaaccaattgcccaattgcaacaacaatccttggcacatctaac

SEQ ID NO: 39943 - DNA, 288 bp, Zea mays
tgcgcctccatttcggcctctgtcccttgcaagttcaatctcacctccaaccatgggtaaagagaagtcccacatcaacattgtggttattggccatgtcgactctggcaagtcgaccaccacaggacaccttatctacaagcttggaggcattgacaagcgtgtgatcgagaggtttgagaaggaggctgctgaaatgaataagcggtccttcaagtacgcgtgggtgctcgacaagctcaaggctgagcgtgagagaggtatcaccattgatattgctctgtggaa

SEQ ID NO: 39944 - DNA, 289 bp, Zea mays
tctctcttgctcgcacacgcggagatcgaagagaagcgcaggaagccccagcactagcgccgccccgccgccgcatcagacatggcgctggccgctcgcctcgtctcgcgctcccgtcagctatattcggttcaagccactttggggaatggaggtgtcactcaagttcgctcctttgccaaggatgcagctccagctgaccgtcctcctgtcagtagggatgatctcctgaagggcatattctttgaggtaaagaagaagtttgagacagctcttggtgttcttaaaa

SEQ ID NO: 39945 - DNA, 184 bp, Zea mays
ggaaccaccgagctactcgtccgactagggcgtccaatattactttcaaaggaatggcgtgcaaattggacagatggcgcactcaatttggctttacatcgtcccatcgggcatgtatggagtcgtgaacaacctaaaggataagtaccataatccaatcatcatcatatcggaaaacggaatg

SEQ ID NO: 39946 - DNA, 269 bp, Zea mays
ggcggctgcagcggacacggaggcgaaggaggaggagcagcagcagcaggcggcgccgaggagcggcatcccactcagtgcttgcaaccatggctaggggattgaagaagcacttgaagaggctcaatgcgcccaagcattggatgctcgacaagcttggcggagcttttgctcccaagccatcttctggacctcacaagtccagggagtgccttcctctgatcctcatcatcaggaacaggctcaagtatgctctgaactaccgtgag

SEQ ID NO: 39947 - DNA, 113 bp, Zea mays
cgctctcatgaaggcccctctattaattggctgtgatgtcagaaacatgacttctgaaacaatggaaatactgagcaacaaagaagtaattcaagtaaaccaagatcctcttg

SEQ ID NO: 39948 - DNA, 301 bp, Zea mays
gttcgaacgcgccgccgtcaccgtcgtcgctcgcgctctacgcccgtgagtctcgcgtcgatccagtggaaccagcgccccgctctggatctaaccggcttcgtgccgtcgcagggatcggagcgagagtaggggcgtgtcggcggtgaaagcgactgcgtcaccatggcggacgaggagcattcggagaggagagaggaggcctccgagcttgcccccttcgacccgaccaagaagaagaaaaagaagaaggttgtcatccaagaaccttctgatgaagtggacaagcttgcagagaaga

SEQ ID NO: 39949 - DNA, 300 bp, Zea mays
tgcagacgcaaccagcgaagatctgttctcaggttggcctgtgcacttttgatggcactcacggtgttaggtgaagactgcaaaccatctctatagttagttacacactgtttgatgatgctgtgacatagcttgtcctgtgcccccatgataacgataaccatctgggcgtcctgtcattatggggtcattgtacctatttcttactttgttatatgtttatgcaaacacagcactggaattcgtagcgtagtggatgacaaagctgggaaatcaaatggtggtctcaagagtgatcca

SEQ ID NO: 39950 - DNA, 297 bp, Zea mays
aggcgtgaacagctgggcatctcgtgcgacgacgtggagtcgacaggcagtggaccaaggacgtggaggcgtacggcgggaagcagcagcagcagcaagcgacgacgacgaaggtgacgttcccgatccaggcggacccggcgcgggacgccatccggcagctgaacatggtggaccccgacgagaaggacgcggcggggcggacatgccgtcccgcgcgcaccacgtcgtcgggcccgacaaggccgtcaagctgagcttcctgtacccggccaccacggggcggaacatggacga

SEQ ID NO: 39951 - DNA, 295 bp, Zea mays
ctcgcgccggtgaccataacaaagaggaagccgcggtacactggtagcggcacagtaagggggagatgtcgtcggcgttcagcggcgatgagaccgcccctttcttcggcttccttggcgcctccgctgcgctcgtcttctcatgcatggaggcggcgtacgggacagccaagagtggcgtcggcgtggcgtccatgggtgtcatgcgcccagagctcgtcatgaagtccatcgtgcccgtggtcatggctggtgtgctcggtatctacggcctcatcatcgccgtcatcatcag

SEQ ID NO: 39952 - DNA, 245 bp, Zea mays
tagatctattctacagaagggtataggttaacataccgtcgttgtaattcctagccatcatagcagcggcgtcttgcagcgaagacccgcctccaccttcttgtcgatcacccagctggtgtcgaggagattggttcccgtcgttgatcagcggtggatcagctcctccaatgttgcctgcacggggaatctcagatcccgatgggataacagggatctgagacatagtcacagcgattccagtc

SEQ ID NO: 39953 - DNA, 294 bp, Zea mays
agacctctttataatgcaatgagaacagagagcgctttgaagtttgggtggttttttctattttacatgattcatataatcttctgtgtctaggcagctgtagctcctccatttcctttcaaaggaaaatctttggctgggattttgccagcaattgatgtcataggcaagaatgctattgtagggatattttacatcgttggattcggcttgttcagccttgaatcacttatgagtatcggtgtcattcagcaagtatacatgtatttccgtggaagtagaaaagctgcagag

SEQ ID NO: 39954 - DNA, 296 bp, Zea mays
cgggcatcggggtcggaggatctcactgttttcttcctgctgcctgctgcatttttcgcagggtgtgggagctgagttgggaggaggactgctgcagccatgaaggccctcattctcgtcggaggcttcggcacccgcctgcgcccgctcacgctcagcgtgcccaagccgctcgtggatttcggcaacaagcccatgatcctgcaccagatcgaggctctgaaggaagttggtgttacagaggttgtcctggccatcaattaccagcctgaggtcatgctcaactttctcaagga

SEQ ID NO: 39955 - DNA, 293 bp, Zea mays
cgcggaggacgcgaccgaagcgccacttgcttgagtagcgaacgcgagagcaatggcgtcgctgtcgtgcgcctccacgctgccctggacccccgcctcctccccgcggccctcggcggaccgcgcctcacggcctctcgccgggctccgtcgctggtcatcgtcgcccaggggaaggtgaagaaacaccctcaggtcatattgacagatgacatagaagaggtggggaagaaaggggatacaatgaaggtgcgagctggattctaccgcaactccttgcttcccaagggcaa

SEQ ID NO: 39956 - DNA, 294 bp, Zea mays
tcggtgcaccattgtgtccgagctctcaaacgaggacttcgactcttatgtcttatctgagtcgagcctgtttgtctacccatacaagattacgatcaagacctgtggaactacaaagcttctgctcgctattccgaggatccttgaacttgctgaagagctcctgttgccactcgctgcagttaaatactcccgtggaacgttcatattccctgaagcacagccttccccacacaagaacttcgctgacgaggttgccttcctgaatcgcttcttcggtggcctcaagtccgg

SEQ ID NO: 39957 - DNA, 289 bp, Zea mays
tgcagcacagcaccgcatcgaccaggcgcaggggtcttgagagaagaaccacactcgagcggaccgcgcgcgcgacctccttgaaccactgccggcgcggcggcatatggcccttaaaggcggtggctgctgctacgtacgctgccgtagagtctcggtcgccgcgatagctctagctagtcgtttatgtgttgtgctttgtgtgtgcatgcttgtgtctgggggcatgcagtgcagtgcagtactatatgctgtatgcgtctctctttgatcggagaggcggatgtac

SEQ ID NO: 39958 - DNA, 287 bp, Zea mays
agaaaaacatgcttcaaatagctatgccaaaatggttatatatattgaagcatgtgaaagtggcagtatatttgagggattaatgccagaagaccttaatatttatgtcacgactgcatccaatgcagaagaaagtagctggggtacatactgtccaggaatggaaccaccgcctccttctgagtacattacctgcctaggtgatctatatagtgtctcttggatggaagacagtgagactaacaatctgaaggaggaaacaataaaggaacaatatgaagtggtga

SEQ ID NO: 39959 - DNA, 274 bp, Zea mays
ggcttctcctccccctcttatcaagtcctcctcgggttagggttccttagggttttgtggaggggcgatggcggcggctgatgtggagtaccgttgcttcgtcggcggacttgcctgggccaccagcaacgagtcgctggagaatgccttcgcctcctacggcgagatcctcgactccaaggtcatcaccgaccgggagacggggaggtcccgcggcttcggcttcgttaccttctcctccgagaactccatgctcgacgctatcgagaacatg

SEQ ID NO: 39960 - DNA, 288 bp, Zea mays
cagagagctgggatttagggatatcttcaagaaggtcaaggatgaggagaatgccaaggctatgtcactttttgagggagttattaagcggaatgacgaaattgaggatgacggcaaaagaattgagaacttggtccgtggaattttagctggaaacatttttgatctaggatcagcacagcttgcagaagtttttgctaaagatggcatgtcatttttggcaagttgccagaatcttgtatctcgaccatgggttattgatgaccttgatgcttttaagagtaaatg

SEQ ID NO: 39961 - DNA, 244 bp, Zea mays
tactgaatttgaagaaaatgaagtatatgcaatcgatattgtcaccagcactggggaggggaagcccaagttattggatgagaaacagaccaccatctacaaaagggccgtagacaagaattatcacttgaagatgaaagcgtcaaggtttattttcagtgagatcagccagaagttcccaatcatgccttttactgctagggcattagaagagaagcgtgcgcgtgtaggcttggtggaatgc

SEQ ID NO: 39962 - DNA, 297 bp, Zea mays
agcggcggaaggctgtacatcaggacattgccatcgtcacaggtgctgagttcctagcaaaagatcttggtttgttggttgaaaatgctacagaggaacaacttggcacagcaaggaaagtcacgatacatcagactacaacaaccctcatagcagatgcagccagtaaagatgagatccaggcgagaattgcacaactgaagaaggagcttgctgagactgattcagtttatgatactgagaaattggccgagagaattgctaagcttgccggtggtgttgctgttatcaaggttg

SEQ ID NO: 39963 - DNA, 175 bp, Zea mays
agctcaactggctatatacggatgtaactcagaaacaggaagccaaggacttctcgacgctgcaggaagctcatgcatgcacagctggtttgaaagctgtgacaacatcagtaacagctgatgcaattgaagaatgccgaaagctctgtggtggacatggttacttgaacagcag

SEQ ID NO: 39964 - DNA, 178 bp, Zea mays
catagccaaggctctttcttctgcatatataccaattgcagcaattctcgttagcccagaaataacggatgtaatctattctcagagcaataaacttggttcttttgctcatagctttacatactcgggacatcctgtttcttgtgacgttgctgtagaaaccttgaagatatataag

SEQ ID NO: 39965 - DNA, 284 bp, Zea mays
ctcagcgcatcgcccgccgcgacctcatcgatcaccttcagctttcaatcatggcggacgtcgatgtcgaaccggagttgccgccggagctcccaagaagaggacgttccgcaagtacagctaccgcggcgtcgacctagatgcgcttctcgacatgtccacggacgaccttgtccagcttttccccgcgcgcgccaggagaaggttccagaggggtctgaagaggaagcccatggcgctcatcaagaagctgcgcaaggcgaaaaaggatgctcctgctggtg

SEQ ID NO: 39966 - DNA, 217 bp, Zea mays
cgcaaaaccgcatcctctcatcagcttccttccacattcgtctcgagatcacgccccgtcgccatggacgcgatcgacagcgtggtggatccccaccgcgacttcgccaaggacagcgtccgcctcgtcaagcgctgccacaagcccgaccgcaaggagttcaccaaggtggcggcgcggacagcgatcgggttcgtcgtcatgggcttcgtcggct

SEQ ID NO: 39967 - DNA, 283 bp, Zea mays
gccgagcgcgccaagagagccctcagcaaccagcaccaggtccgtgttgagatcgagtccctctttgacgggaccgatttctcggagccgctgacccgtgccaggtttgaggagctgaacaacgacctcttccgcaagaccatgggccctgtcaagaaggccatggaggatgctggccttgagaagagccagatccatgagatcgtcctggttggtggaagcaccaggattcccaaggtccagcagctcctgcgggactacttcgacggcaaggagcccaaca

SEQ ID NO: 39968 - DNA, 144 bp, Zea mays
accgtcactcaacacagcacaggcaactccagagagagagagagagaaagatgtcgtggttcgggcaccaacaacacaaccaaccggctcccccggcgtcgggccccaaccaggtgttcaagatcttctgccgcgccaacgaga

SEQ ID NO: 39969 - DNA, 169 bp, Zea mays
cgcacaggcagctcgagagagagagagagagaaagatgtcgtggttcgggcaccaccaccaacaccagccggctcccccggcgtcgggccccaaccaggtgttcaagatcttctgccgcgccaacgagaactactgcctggccgtccgcgacgcgccgtcgtgctggcc

SEQ ID NO: 39970 - DNA, 306 bp, Zea mays
cacactcgcactcgcacgtacaccacactagttaccacagacgacgggcgccatgaaagtcccggtgcttctcctcctggtctccctgtgcttctcgctcgcgctcgcgtggcaaacggacacggaatcgggctcaggcaggccgtaccactacggcgaggagagtttccggcactggacgcgctcccggcagggccggttcagggtgctggaacggttcacccacgagctgctggaggacgccgtcggcaactaccgcgtcgccgagctggaagccgcgccgcgcacgttcctgcagcccagcca

SEQ ID NO: 39971 - DNA, 309 bp, Zea mays
cgtcaaaccctaagcagggagttgatttatccgctgcagccatgagtaagttgcagtctgagtctgtcaaggatgccatctcccagattgttggggatgccaaggagaagaataggaagttcactgagactgtggaacttcagattggtctgaagaattatgatccacagaaggacaagcgtttcagtggctctgttaagttgccccatatccctcgtcccaagatgaaggtgtgcatgcttggtgatgcccagcatgttgaggaggccgagaagatgggacttgactacatggatgttgaggctctca

SEQ ID NO: 39972 - DNA, 309 bp, Zea mays
cgcaagtttgtccattcgcattggtctgaatactgtagctactagcgcgagtgccactgtgccgcagctgcctgctcgccattactgcaagctgtgttcaatcaaagcttaattaggctccctctacatctgatccagctaagtagctagccagcactacagaagggcgtggcaagaatcaggagagagatagcaggggggctagctagctgagctcgtgcgacgaagaatggccggaattggcaggaacatggtggcgccgctcctggtgctcaacctcatcatgtacatcatcgtcatcggcttcgc

SEQ ID NO: 39973 - DNA, 299 bp, Zea mays
cttcaatctttggcgatggtggtccccttggcgccggtgatctgcatgtgcctgtgatctactgctggctgcatcacctcaatagtctacctgggggcgtatgacagcgaggaggcagctgctcgtgcctatgacctcgcagctctcaagtactggggtcctgagactctgctcaacttccctgcatcaccacaacgggaggtgggaggcacggattgggcgagtctttgggaacaagtacctctacttgggaacatttgacactcaagaagaggcagccaaggcctatgaccttgcgg

SEQ ID NO: 39974 - DNA, 314 bp, Zea mays
caccttcttccctccgtctcccagctcgcgcaggcaggcgacacagcgacgctaaaaaccctagagcgaggaggcgtgccaggccagcggtttgcgatgacggcaccggcggacaaggggaagaaggccaagaccgatgccgacggcggcgaggagaacgagcaaatcgacggcgcccttgtcttctccatcgagaagctccaggagattcaggacgagctcgagaaggttaatgaggaagcaagtgacaaggttatggaggtggagcagaaatacagtgagattcgcagacctgtctatctcaagaggggtga

SEQ ID NO: 39975 - DNA, 233 bp, Zea mays
cgatagtgctgtgctatttccaactgtgcagtgaggactacctgtggtggtggaggtcctttctgacctcaggatcatcagcaatctacctcttcctgtacgccgggttctacttcttcactaagctacagatcactaaggttgtgtcaggcatgctgtactttggctacatgcttcttgcctcgtttgctttctgtgtgctcaccggtacgatcggcttctacgcctgcttc

SEQ ID NO: 39976 - DNA, 302 bp, Zea mays
ctccattccatctcaaaggatagaataatgggcggtctctccaccaagcttttcgtggtcctcctcctgctcgtttgttacaccggtacgccatgatatataaatatacatgcagaaagagaacattgtgtagattcatactactactgctacgacagaaccattacacatgtttgtttgcgttttgcagggacgcaaggcgggccggtgactatggtgtcggcgaggaagtgcgagtcgcagagcttccgcttcaagggaccttgctcgagggacgccaactgcgcaaacgtctgcctgac

SEQ ID NO: 39977 - DNA, 278 bp, Zea mays
gttgtgtaaaccgggtataggtttgttttatgaaaaaaggacttgtaatggtgagagcatcatctgcagtgctgaattcatcattcaagtatggtacctctgtcaggtacatggttttgggaaggaaataataatatgagaccagacgttgagcaggaaaggtcgcctgtctgtgtcgattaaggaccgtaccgaaagtaggcttgctgatctaggaccctttaactggccacatgcctcgtcatgggtaagcttagcctcggtcggaccaataccag

SEQ ID NO: 39978 - DNA, 307 bp, Zea mays
cgcaaccgatatattccccagcacccccagtccagccgtccaaccgagacaccgcgtgcgaaccaagcagaccacagcaagaagcgtagtcgtcgccggaaggaaaggcgcggacaagatgtcgtggcaggcgtacgtcgatgagcacctgatgtgcgagatcgaaggacaacatctcagcgccgccgccatcgtcggtcacgaggcagcgcttgggcgcagtccgagagcttccccgagttaaagcctgaggaggttgctggtatcataaaggactttgatgaacctggtactcttgcaccaactg

SEQ ID NO: 39979 - DNA, 301 bp, Zea mays
atcgagaacacgatcgagcacacacaagcacgaagactcgtttaggagaaaccacaaaccaccaatcggtgcaagcatcatggagtacggtcagcaggggcagcgcggccacggcgccactggccatgtcgaccagtacggcaacccagtcggcggcgtcgagcacggcaccggcggcatgaggcacggcacgggaaccgccggcggcatgggccagctgggtgagcacggcggcgctggcatcggtggcgggcagttccagcctgcgagggaggagcacaagaccggcggcatcctgcat

SEQ ID NO: 39980 - DNA, 291 bp, Zea mays
ctctcggccaggtctccctctccccggctctccgccttcctcttccagtccccgcgcgcgagatcaccgccccgtgtgggccctagatcccgatggcctcgcgccgccgcaccctgctcaaggtcatcatcctcggcgatagtagggttgggaaaacttccttgatgaaccaatatgtgaacaagaagttcagcaatcagtacaaggctacgatcggcgcggatttcctcaccaaggaggtgcagttcgaggacaggctcttcactctgcaaatatgggacactcgctggc

SEQ ID NO: 39981 - DNA, 228 bp, Zea mays
cgatgtcggaggcgttgctgcagaccttgtcacggcgatggcgagggcgagggcaagggcaaagcatcagcttcgcgacgaggagaggccgtggggggaatgctgcgacttggccgtatgcgtcaagacgtacccgctaacttgctcgtgcttcgatcgggttgagcgctgctccgacgcctgtacagagtgcgtggaaacggaggactcgcgccacgtctgcgtcga

SEQ ID NO: 39982 - DNA, 295 bp, Zea mays
  unsure (1)..(295): unsure at all n locations
ctcttcctaccattagcagtagccacagccagaacaccagcagacagcagcatcagcagggaggaacacgatgagcggcgccggtccggatctgcagctgccaccggggttccggttccacccgacggacgatgagctggtgattcactacctctgccgccgctgcgccggcctgcccatcgccgtccccatcatcgccgagatcgacctctacaagttcgacccattgcagctcncaaggactgcgctgtactgcgagaaggagtggtacttcttctcnccgcgggaccgcaag

SEQ ID NO: 39983 - DNA, 298 bp, Zea mays
cagtgatgctgatatccgcaagtaccaggcctgtttattattggagctacaaacaggcctgacatcattgaccctgctctgctgaggccagggcgtcttgaccagctgatctacattccactgcctgatgagcagtctaggctccagatcttcaaggcctgccttaggaagtcccctgtggcgaaggatgtggacttgaatgctcttgctaagtacacgcaagggttcagtggagcagatatcacagaaatttgccagcgtgcgtgcaaatatgcaatcagagagaacattgagaagg

SEQ ID NO: 39984 - DNA, 198 bp, Zea mays
gtgaccaatttgcttgccacagtcttggtcttcctcatagttatctatttccaaggcttccgtgttgtgcttccagtgagatcaaagaatgctcgtagccagcaaggctcatatccaattaagctattctacacttcaaacatgcccatcattctgcactctgcactgattaccaacctctatttcatatcccagctt

SEQ ID NO: 39985 - DNA, 296 bp, Zea mays
gagatagcaggagggctagctagctgagctcgtgcgacgaagaatagccggaattggcaggaacatggtggcgccgctccaggtgctcaacctcatcatgtacatcatcgtcatcggcttcgcgagctggaacctgaaccacatcatcaacaggcagaccaactacaccggcgtagccggcaacggcgcgacgttctacatcctggtgttcgccatcctggccggcgtggtgggcgcggcgtccaagctggcgggcgtgcaccacgtgcgcgcctggcgccacgacagcctggcca

SEQ ID NO: 39986 - DNA, 299 bp, Zea mays
gaagaagagtttatgtttaaaaacattcctgagaggccagttccttctttgttaaggggatatagtgctcctgtccgtctagattctgatctgagtgagggtgacctatttttcttgcttgccagtgactcggatgaatttaacagatgggaagctggccaagttttggcacgtaagttgatgctcagtctcgtagctgatttccagcaacagaaaacactggttctaaatccgaaatttgttgatgggattagatcaattctgcgcaacacaagcttggataaggaattcattgcgaa

SEQ ID NO: 39987 - DNA, 285 bp, Zea mays
ggaagagatcgcggagatagagaagatgcatgaactcatcaagacccacaacttgttcgggcagttccgctggatctctgcccagacaaacagggcccgtaacggcgagctctatcgctacatcgctgatacccatggtgctttcgtacagccggccttctatgaagcgttcggtctcaccgtcgttgaagccatgacctgtggacttcctactttcgcgacgctccatggagggccagctgagatcatagagcatggcgtctcgggcttccacattgacccgta

SEQ ID NO: 39988 - DNA, 293 bp, Zea mays
gccacaaagaagtggaccaccaagaacacaggttctcctacctgcaagagaggatttgttcagttctgctatgagccaatcaagcaaatcatcaagacctgcatgaatgaccagaaggagaaattgtggcccatgctgcaaaagctcaatgttaccatgaaggctgatgagaaggagttgattggcaaagctttgatgaagcgtgttatgcaaacgtggcttccagctagcactgctctgcttgagatgatgatattaccacttccttccccagcaaaggctcaaaagtatcg

SEQ ID NO: 39989 - DNA, 294 bp, Zea mays
agcctcttatctacgttaagctctacatgtatcagcttttcagaggcctagcctatattcataatgtaccaggagtctgccatagggatgtaaagccacaaaacgttttggttgatcctctcacccaccaggtcaagctctgtgactttggtagcgcaaaagtcctggttcctggtgaaccgaacatatcttacatatgctctcgttattatcgtgctccagagctcatatttggagcgacagagtatacaacttcaatagacatatggtcagctggttgtgttctagctgagt

SEQ ID NO: 39990 - DNA, 294 bp, Zea mays
aattatttggcctccgtcagagaggggagaaagacccgttcgaggcggcggcgatgtcggggcgcggcaagggcggcaagggtctgggcaagggtggagccaagcgccaccggaaggtgctccgcgacaacatccagggcatcaccaagccggcgatccggaggctggctcggaggggcggcgtgaagcgcatctcggggctcatctacgaggagacccgcggcgtgctcaagatcttcctcgagaacgtcatccgcgacgccgtcacctacaccgagcacgcgcgccgcaaga

SEQ ID NO: 39991 - DNA, 290 bp, Zea mays
gccaggagaagcagccgccgttgctgctgccgcgtccacagaatggggggtttcgtgaagactcataagaccaatgcgtatttcaaacgtttccaagtgaaattcaagagaaggcgggctggcaagacagactacagggccaggataaggctgattaaccaagacaaaaacaagtacaacacacccaaatacagatttgttgtgcgatttaccaacaaggacatcactgcccaaatcatatctgctagtatagcgggtgatatggttcttgcttctgcctactcgcatga

SEQ ID NO: 39992 - DNA, 289 bp, Zea mays
agagctgaacacaaacacccgcatcaatccaagccgagcctcccctcggggacagcctacgcgagcgagatccaacccaagtcccgacgccgcgggcgagggcgaccagatccacctcctcagtcgtctcggatggcggcagcatcgacgtcggtacgggtgctccccgacggcggtgctgacgacgaggagcgctggctcgccgagggcatcgccggcgtccagcaaaacgctttctacatgcaccgtgccctcgattccaacaacctcaaggacgcactcaagtact

SEQ ID NO: 39993 - DNA, 242 bp, Zea mays
ctgggagagcgctgctcgtatgatcgccgatgtctccaagtcacccaagatcgttgtcgagaagtccaccgtccctgtcaagaccgctgaggctattgagaagatcttgacccacaacagcaagggcatcaactaccagatcctttccaacccggagttccttgcagagggcactgctattgaggacctgttcaagcctgacagagtgctcatcggtggccgggagaccccgagggcaggaa

SEQ ID NO: 39994 - DNA, 81 bp, Zea mays
gagaagttcgagaagtttggcatgtatccatccaaaggagttttgttcaatggtcaacctggttgtggtaagaccttgttg

SEQ ID NO: 39995 - DNA, 303 bp, Zea mays
ctgaagcagctagaatgttcagcgagaacaagcgtgagtacaaccgcaaagttcgtgaggttgtggagcagagctggacagccgactgaaactttatccgctccgccaggcggtgtaaataaagcatctgtctttcctacttggccggtatgttttaccgttagaaatcctcagctatcgttgtgttcttgtggttcagtcccttgttgtagtgatgcctgcgggttttcctaatgtagtgctgaacggttactgaaactcggatattggtgcatatgtacaaaaaaaaaaaaagggcggccg

SEQ ID NO: 39996 - DNA, 308 bp, Zea mays
ctcgcactcgcacgtacaccacactagttaccacagacgacgggcgccatgaaagtcccggtgcttctcctcctggtctccctgtgcttctcgctcgcgctcgcgtggcaaacggacacggaatcgggctcaggcaggccgtaccactacggcgaggagagtttccggcactggacgcgctcccggcagggccggttcagggtgctggaacggttcacccacgagctgctggaggacgccgtcggcaactaccgcgtcgccgagctggaagccgcgccgcgcacgttcctgcagcccagccactacga

SEQ ID NO: 39997 - DNA, 306 bp, Zea mays
gtgatggccaatgattgcattggtgaagaagttgagaagttggctgccgctttgccagaaggtggagttctgctcctagagaatgttagattctacaaggaggaagagaagaacgaacctgagtttgctaagaagctagcatctgttgctgacctttatgtcaatgatgcttttggcacggcacacagagctcatgcttcaaccgaaggagttaccaagtatttgaagcctgctgttgccggcttcctcatgcagaaggaacttgactaccttgttggagctgttgccaacccaaagaagccattt

SEQ ID NO: 39998 - DNA, 308 bp, Zea mays
cgtcgaaagatagattggccctgcaaaggcttcgtgaagctgctgagaaggcaaaggttgaactttcgtcgacttctcagacagaaatcaatctgccattcataacagctgatgcttcaggggcaaaacatttgaacatcacactgacaaggtcaaaatttgaatctcttgtacacaatctgattgagagaactagagatccatgcaagaactgtttgaaggatgccggaatatctactaaagaggtggatgaagtacttcttgttggtggaatgactagggttccaaaggtgcaggaggtagtctct

SEQ ID NO: 39999 - DNA, 307 bp, Zea mays
acactcactatacacagctctgctgcagcaagaaggaagaagctagcgcctccctagctctcgttgtcagcaatggccaccaccgccgcgtccagcctcctcaagtcctccttcgcgggctcccggctcccttcggccacgcgcaccaccacaccgtcgtccgtggccgtggccacaccgcgcgccggcggcagccccatccgcgcgtccatctcctcctcccccacaccgccctacgacctgacgtccttccggttcagccccatcaaggagtccatcgtgtcccgcgagatgacccggcgctacg

SEQ ID NO: 40000 - DNA, 193 bp, Zea mays
gctcgacaagctcaaggctgagcgtgagagaggtatcaccattgatattgctctgtggaagtttgagaccaccaagtactactgcacggtcattgatgcacctggacaccgtgacttcatcaagaacatgatcactggtacctcccaggctgactgtgctgtccttatcattgactccaccactggtggtttt

SEQ ID NO: 40001 - DNA, 129 bp, Zea mays
gagaaagtcagctgctaagccacctcctaagaagcggatggacaagcttgacactgtcttttcctgcacattctgcaaccacgggagtagtgttgagtgccgaattgacatgaagaatctgattggcga

SEQ ID NO: 40002 - DNA, 303 bp, Zea mays
gtcatgtcgaagcgaggtaggggaggttcggctgggaacaagttccgcatgtcactgggtctaccggtggcggccacggtgaactgcgcggacaacacgggcgccaagaacctctacatcatctccgtcaagggcatcaagggccgcctcaaccgcctcccgtccgcctgtgtcggcgacatggtcatggccaccgtaaagaagggaaagcccgacctcaggaagaaagtgatgcccgccgtcatcgtccgccagcgcaagccgtggcgtcgcaaggacggtgtctacatgtacttcgaagat

SEQ ID NO: 40003 - DNA, 303 bp, Zea mays
cctagctgaagatctcgagtgcaacgcaacgttggcgcttggcggccagtagtagcagctaatttagcgtcgctccttcctactagacgagagatcgagaaaccatggccaagctccaagtcactcctggcgccgcgttcaccgagtgcaatgaactcaacttccagggcctgtacatgtaccacacgcccctgggtcccaaggccaaccaagctgcgatcctagagagcaaggccaagatcggcatcggtgtcaccgtggttaacaactgggcagtgtatgacgggccagggtcaggcgcta

SEQ ID NO: 40004 - DNA, 299 bp, Zea mays
gaggaagccgggtatggtgacgcctggacctcctaggaggtttccgctgaggtccaggcgcctcaggcgcgcagggcggttatggaggggcttatctgcccacgcagccagtggttgccactgtcgtggactctgaagaagctgtcatgctgccagtagtcgttgcggaggtcgagcccgacgacggcgtggctcctgttgccgcaactcacgccacgccactggcagcagtcgtggccgcgccacgagcgcaccaggcacgccgggtcgctggttatgctcgccttgaaggacagcag

SEQ ID NO: 40005 - DNA, 305 bp, Zea mays
atttgcttcacctcttctggacgagctgcaaggctcattgctaagtacaggcccagcatgcctgttctatctgttgtcattcctcgtctaaagacaaaccaactgaagtggagtttcacaggtgcttttgaggcaagacaatcactcatagttagaggcctcttccctatgcttgctgatccacgacacccagctgaatctaccagtgctacaaatgagtctgtgttgaaggttgctcttgaccatggcaaagcctcgggcgtgatcaagtcccacgaccgcgtcgtcgtttgccagaaagtggg

SEQ ID NO: 40006 - DNA, 301 bp, Zea mays
ctctcccttgcaagtttaagcttcatcttcagccatgggtaaggagaagtcccacatcaacattgtggtcattggccacgtcgactctggcaagtcgaccaccaccggccacctgatctacaagcttggaggcattgacaagcgtgtaatagagaggtttgagaaggaggctgctgagatgaacaagcggtccatcaagtatgcttgggtgctcgacaagctcaaggctgagcgtgagaggggtatcaccattgatattgctctgtggaagtttgagaccaccaagtattactgcaccgtc

SEQ ID NO: 40007 - DNA, 297 bp, Zea mays
gtcggttgtagtatgtggtggttcagcgcattgatgagaggttatctgcccttggcaattgcatagcctgcaatgaccatgttgcacttacgcaccctgaccttgacaaggagactgaggagttcattgcagatgtgcttggggtcgaggtgtttaggcagactattgctggaaatatccttgtggggagttactgcgccttctctaacaggggtggtttggttcatccccatacatccgttgaagaccttgacgagctctccacgctcctccaagttcctcttgtcgcaggaactg

SEQ ID NO: 40008 - DNA, 296 bp, Zea mays
gctctatacactgctcttggaggagttcgtccatcagcttgtttgcctatcacaatcgatgttggcacaaataatgagaaactagttaatgatgagttttacattggactccggcaaaaacgtgcaactggcgaggagtatcatgagcttatggaagagttcatggctgctgttaagcaaatctatggcgagaaagtcctcattcagtttgaggacttcgcgaatcataatgcttttaatttgcttgcaaaatatagcaagagccatcttgttttcaatgatgacatccagggcac

SEQ ID NO: 40009 - DNA, 298 bp, Zea mays
atggcgctcactacacggggcggcgccggcggcaggggatcccgcgaaggcgccgtccgcctccgaccccagcctcggcttcctcaccaagcgcgataccgaggtcaagctaccccgcgcaacgcgggtacaagaacaagacccccgcgccgatccagattacagccgagcagatcctccgggaggccagggagaggcaggagcctgagatccgcccgcccaaacagaagatcacagacccccacgagctctccgattaccgcctccgtaagcggaaggagttcgaggacgtcatccg

SEQ ID NO: 40010 - DNA, 297 bp, Zea mays
ccgagctctcgaaaccctaggtgcgtgccgaccggcggcggcggcgaagtgatggcgatggaccggacgcggtggcgaaagccttcgtggagcactactaccggacgttcgacaccaaccgcgcggcgctggtggggctgtatcaggagacctccatgctcaccttcgagggccagaagttccagggcccatccgccattgccggcaagctcggatctcttcccttccaggcctgcgagcaccagatcgtcaccgtcgacagccagccgtcggggccccagggaggcatgctcgtct

SEQ ID NO: 40011 - DNA, 291 bp, Zea mays
ctctccctgtgcgacaacccagccctcatggacagagatgaagctcgtgccttattcagcccttgtagcataagaagggccaggaggatcctaaactcgatccccagcaaagacactggtggatatactgattgccggggaatcaaatgcctgcgtcaagtagtagcagatgggattaccgcaagagacggttttccatcgacagcggacgatatctttctgacagatggagccacctcagcggtaagactctgcatttcagaacctacatctacatgacgcagcacagat

SEQ ID NO: 40012 - DNA, 286 bp, Zea mays
ctctcccccacctcccggtccggcagcagagagcgggggtgcagagagatcgagatccggaggccgcgagtgggagcgccaccaccagcgactgcggcaatggcgggcacggtgacggtcccggggtcgtcgacccctccacgccgctgctcaaggacgagctcgacatcgtgatcccgacgatccgcaacctcgacttcctggagatgtggcggcccttcttccagccctaccacctcatcatcgtgcaggacggcgacccgaccaagaccatcaaggtgcccga

SEQ ID NO: 40013 - DNA, 297 bp, Zea mays
cagatatccagctagctgtgcgatctgtcttgttcgctgctgttggtacagcaggacaacgctgcactacatgtcgtaggctgattcttcatgagaacatatatcaaaccttccttgatcagcttgttgaggtatacaaacaagtccgaattggggatccgttggagaaaggcaccttactgggaccactgcacactcctgcttcaaaagagaactttttgaaaggcattcagactatcaaatctcagggagggaaaatcctttttggaggatctgccattgaatcagaaggaaact

SEQ ID NO: 40014 - DNA, 287 bp, Zea mays
cgcgagatgtgaggaattccatatttgtgtggcgaggcaagccgtgcgacaagtgccagatgtacgatgaaatgattgaatcggagagcgtcaccgtttgtgtggattatcaagtcaggcaaataacggtcacttggtcgtggaagggcttcttattgcagtcatagtgttccagctctccaggaagagttacaaaccaccaaagaagccactcactgaaaagtgccgctggaccacatacgattgttgatggtaaagaagttgtgaactttgcatcagcaaactac

SEQ ID NO: 40015 - DNA, 286 bp, Zea mays
cattgagaccaactagcaacatagaaagcacaatagtgtaccaacaatggcagctaaaatattttgcctccttatgctccttggtctttctgcaagtgctgctacggcgaccattttcccacaatgctcacaagctcctatagcttcccttcttcccccgtacctctcaccaacggtgtcttcggtatgtgaaaacccaattcttcaaccctacaggatccaacaggcaatcgcagctggcatcttacctttatcaaccatgttcctccaacaatcatcagcccta

SEQ ID NO: 40016 - DNA, 289 bp, Zea mays
aacataacacctacaaatgcaactgttcactcagttgcagatctacagatggcaacagatagctttagcttcgacaaccttgttggagagggtacttttggaagagtttacagggcacaattcaatgatggaaaggttctggcgatcaagaaattagatactactgtgatgccatttcaatcatctgatgactttgctgaactggtctcgaacatttcaaaattgcaccatccgaatctgaatgagcttgtgggctattgcatggaacatggccagcacttgcttgtgt

SEQ ID NO: 40017 - DNA, 291 bp, Zea mays
agtctgagctcatctccgcgcgctgccgccgccgccgccgccgctcgacgcccaccgcgcaccatggcggaacagaccgagaaggcttttctcaagcagcctaaggtgttcctcagctcaaagaaatctggcaagggtaagaagccaggcaagggtggcaatcgattttggaagagcattggccttggtttcaagactcccagggaagcaattgaagggacctacattgacaagaaatgtccattcactggaaccgtttctatcagaggcaggattattgctggaacatgc

SEQ ID NO: 40018 - DNA, 155 bp, Zea mays
cagcgatgaagaagattgaagataacaacactctggtcttcattgttgacctcaaggcagacaagaagaagatcaaggctgccgtcaagaagatgtatgacatccaggcaaagaaggtcaacaccttgatcaggcctgatgggaagaagaaggct

SEQ ID NO: 40019 - DNA, 173 bp, Zea mays
gatcaagcttacaggaaaatcaggctccgtgctgaagatgtgcagggcaggaatgtgctcacaaacttttggggcatggattttaccactgataaactcagatccctagtgaagaagtggcagacattaatcgaagcccatgttgatgtcaagacaaccgacaactacatgtt

SEQ ID NO: 40020 - DNA, 282 bp, Zea mays
gaaggttctcaaggcggccggcgaggtcggcgcctacgtcgactgcgttctcaccacccatcaccactgggatcatgctggtggcaatgagaagatgaggctgcaggtgccagggataaaggtatttggaggatccctggacaatgtgaaaggctgcactgatcaggtggagaatggaatgaagttgtcacttgggaaggacattgagatactatgcctacacacgccttgccacactaaaggtcatatcagctactatgttactagtaaggagggtgaaga

SEQ ID NO: 40021 - DNA, 299 bp, Zea mays
tcaagatcgcctacgtgccgaacgtagaagtgctacgccgagatcgtgtgcccgcaccgccagtcgcagggcggcgagagcgagcgcgagcgcgacaagggcaggaggagcgaagaagaagaagaagaatcgtctgaggagcaggaggaggccgggcaggggtaccacaccatccgggcgcggctgtcaccgggcacggcgttcgtggtgcccgcgggccacccgttcgtcgcggtggcgtcccgggacagcaacctccagatcgtgtgcttcgaggtccacgccgacaggaacgagaa

SEQ ID NO: 40022 - DNA, 291 bp, Zea mays
cgcacgtacaccacactagttaccacagacgacgggcgccatgaaagtcccggtgcttctcctcctggtctccctgtgcttctcgctcgcgctcgcgtggcaaacggacacggaatcgggctcaggcaggccgtaccactacggcgaggagagtttccggcactggacgcgctcccggcagggccggttcagggtgctggaacggttcacccacgagctgctggaggacgccgtcggcaactaccgcgtcgccgagctggaagccgcgccgcgcacgttcctgcagcccag

SEQ ID NO: 40023 - DNA, 156 bp, Zea mays
ctagggttttgcagctcaccgacaccgagcaccgaaggacgcagcatcaggcgcgagccccctcgcgagtaaccgagatggcgctgccgaatcaggggaccgttgattacaccagcttcaagctcgtcatcgtcggcgatggtggaactggtaaaa

SEQ ID NO: 40024 - DNA, 292 bp, Zea mays
ggcggacacggaggcgaaggaggaggagcagcagcagcaggcggcgccgaggagcggcatcccactcagtgcttgcaaccatggctaggggattgaagaagcacttgaagaggctcaatgcgcccaagcattggatgctcgacaagcttggcggagcttttgctcccaagccatcttctggacctcacaagtccagggagtgccttcctctgatcctcatcatcaggaacaggctcaagtatgctctgaactaccgtgcagtcatttctatcctgatgcaacgccatgtact

SEQ ID NO: 40025 - DNA, 262 bp, Zea mays
atcccgtcgcatcccatcccactaccacccatctcgtcgtccgccgattcgatccggttcttccaacccaggggctgtgatggcgacgaagaggagcgtgggcaccctcggcgaggcggatctgatggggaagaaggtgttcgtgcgcgccgacctcaacgtccctctcgacgacgcccagaagatcaccgacgacacccgcatccgcgcctccgtccccaccatcaagttcctcctcgagaagggcgccaaggtcatcctc

SEQ ID NO: 40026 - DNA, 298 bp, Zea mays
ccgtgttccgtgtccgcgtccagtgtgtccgctactccgctccccctcagtcctcagttcctcacctagcggtagcgtgcgcgcgggagacgtagatggcggcttcggaggcggcagccgcggcggcaacaccggtgacgccgacagaggggacggtgatcgcgatccacagcctggaggagtggagcatccagatcgaggaggccaacagcgccaagaagctggtggtgattgacttcactgcaacatggtgtcctccgtgccgcgccatggctccaatttttgctgatatggccaa

SEQ ID NO: 40027 - DNA, 292 bp, Zea mays
cacctgcaacacaagatcagtgctgaccattgctttccagttctcatatgaaaatcacctacgagagagcgtcgcagccatggccaggcaatacgtcaggaccgtggtggcatcggtgcagagggtagccatggcaatagctccttcgcgcattggtggacagcttgaaatgaagcaaactccaggatctcctgaggcacacacgctggcaaggtggatcggcaggagctacaggttccacactggagccgaactcctccgcacggacacccaatgcacggatgcttccttg

SEQ ID NO: 40028 - DNA, 286 bp, Zea mays
agtagatctattctactgaagggtataggttaacataccgtcgttgttgttcctagccatcatagcggcggcgtcttgcagcgaagacccgcctcctccttcttgtcgatcaccctgctggtgtcgaggagattggttcccgtcgttgatcagcggtggatcagctcctccaatgttgcctgcagggggaatctcagatcccgatgggataacggggatctgagacatagtcacagcgattccagtcacaccgagcgcctaggggatcggttcctctcaaagtgtc

SEQ ID NO: 40029 - DNA, 287 bp, Zea mays
ctcgagcgaacgtgaattgttctcaaattttggcaaaattacttcatgcaaggagatgcgtgatcaaaatggtcttagcaaaggctctggatttgttgctttctcaactcgtgaggaagcatctcaggctttaactgaaatgaatggcaaaatgatatctggaaaaccattgtatgttgcatttgcgcacgcaaagaagatagaaaagcgatgttgcaggcacagttttctcagatgcgccctgctgtaccaatgacacccactctagccccgcgccttccaatgta

SEQ ID NO: 40030 - DNA, 286 bp, Zea mays
ctcaactccagataaggttgttgaggcacctgaagtaacaccaatggtaataggcccctcgggtaaccagttatttttcacaaccagttcaccatgatttagcttgtagctgatcctgtttcctggtccaatcctttgttcactgtcaatccagtatgatggaattccactgagttctccaatttcttgcagatgagaggtgttacttgaattccatcctccaacaacaagaataaggtcaactttctctttcaccagctgatacatagcatcttgtctttcctga

SEQ ID NO: 40031 - DNA, 279 bp, Zea mays
  unsure (1)..(279): unsure at all n locations
acctcgtcgaccacgtcctcatcgtcaccgtcgacgccggctccttcagcggctgcaaggccgtgcacccgcactgctacctcctcgaggtcaagtccatggacatgaacagggccaagacgttcgggaccccggagtacgtggagatgatctggctcaagctctccatccagcagcgcgtcctggagctcggctacaacttcctcttcacggacgccgacatactgtggcttcgcaacccgttccagcgcatctccgtctacgncgacatgagctgct

SEQ ID NO: 40032 - DNA, 276 bp, Zea mays
caagaagacaggagaagggagttgtagtgagttttaagaatggcgagtgcacaggcagtggggcaaggagaacgaggccacttcgttctgaagagcggacacaccattccggccgttggtctaggcacttggagggccggctcagataccgctcactctgttcggaccgccatcgccgaggctggatataggcacgtggacacagctgcccaatacggagtagagaaagaggtcggtagaggacttaaagctgcgatggagggcgggatcaacagg

SEQ ID NO: 40033 - DNA, 289 bp, Zea mays
ctctaccgtccgataccccaagcaccagcgcggcggcggcgaccatggctgtcggaaagaacaagaggatctccaagggaaagaagggtggcaagaaaaagaccgtcgaccctttctctaagaaggattggtatgacatcaaggcaccgtcggtgttcagtgtgcgcaacatcgggaagactctcgtatccaggacacagggtaccaggattgcttctgagggtctgaagcacagagtctttgaggtttgcctagctgatcttcagggcgacgaggatcaagcttacag

SEQ ID NO: 40034 - DNA, 280 bp, Zea mays
gggggccacaagtccgggcaatgcgtgcggcggtgcgaggaccggccctggcaccagcgcccccggtgcctggagcagtgcagggaggaggagcgggagaagcggcaagagcggagcaggcacgatgccgacgaccgcagcggcgatggctcgtcggaggatgaacgagagcaggagaaggagaaacagaaggaccggcggccgtacgtgttcgaccggcgcactttcgtcgcgtggtccggagctagcaggggtccctgagggtgctccggcccttcga

SEQ ID NO: 40035 - DNA, 282 bp, Zea mays
  unsure (1)..(282): unsure at all n locations
cgaaaccctaacgccgccgccgcttcacaggtaagccgccgtcatggtctccggttccggcgtatgcgcgaacatncgtaggtggacgcgcgccaccacatgctgggccgcctgtcgtcgattatcgccaaggaactgctcaatgggcagaaggtggtcgtcgtccgctgcgaggagatctgtatgtcgggtggactcgtacgccagaagatgaagtacctccgctttctccgcaagcggatgaacaccaagccatcccatgggcccatccacttccgcgcc

SEQ ID NO: 40036 - DNA, 284 bp, Zea mays
cgtccgtgcacgactacgaggagggcatgcgcgcctgcttcgacgccgccaagacatgaatggcgattcctgctccaaagcgaggagagatcgttaggcaaatcggtgatgcactgagagcaaagctccatcaccttggcaggcttgtgtcacttgagatggggaaaattcttcctgaagggatcggtgaggttcaggaaatcatcgacatgtgtgattatgctgtggggctaagtcgccaactaaatggatccattataccatctgaacgaccaaaccatatg

SEQ ID NO: 40037 - DNA, 270 bp, Zea mays
cattcctagcagcaccggtgctgccaaggctgttggtaaagtacttcctgatctgaatggcaagctcactggtatgtccttccgtgatcctactgtggatgtctcggttgttgacctcaccgtcagaatcgagaagggggcctcctatgaggatatcaagaaagctattaaggctgcttccgagggtccactcaagggtatcatgggttatgtggaagaggatctggtttctaccgacttccttggtgacagcaggtcgagcatcttcga

SEQ ID NO: 40038 - DNA, 315 bp, Zea mays
ggagttcttggcttgaatcccgagaccaggaagtttatctctgaaaatgttgaggagcaaactgagcaggttatgaaaaacatgggcgagatattgaaagctagtggtgctagctattcttcagttgtgaagacaacgatcatgttggctgatctgcaggatttcaataaagtaaacgagatctatggcaaatatttcccggcgccagcacctgcacgatcaacctaccaagtggcggcgctgccactgaatgcccggattgagattgagtgcatcgctgctctctaatcagatcatccaaccactcattaaatc

SEQ ID NO: 40039 - DNA, 197 bp, Zea mays
cgacgtgctgtccttctccatcggcgcctactcgggcacgcagttcaactacgaccccatcgccatcgcggcgttcaaggccacggagcgcggcatcttcgtcagctgcgccgcgggcaacgcggggccagagcccggcacggtcggcaacggcgcgccgtggatgctcaccgtcgcggcgggcaccatggaccgcg

SEQ ID NO: 40040 - DNA, 308 bp, Zea mays
gggagcctgagggatgctgcaatgagccttggtgtttgtccaacgacattgaaacgaatatgcagacaacatggaatttcccgatggccatctcgaaagataaacaaggtcaatcgttcattgaagaagatagagaaggtcattaaatcagttcacggtgtggatagatccttgcagtacgatcctgctactgggtctcttgttcctgcaacctctcttccggaaaagatgccattctctgcttgcgatacattgcctacttcatctcttgggagagcagtggaggaaacatgtagcccaaatcagac

SEQ ID NO: 40041 - DNA, 308 bp, Zea mays
gcgaggacgtggaggttctgctggtaacaagttccggatgtcactgggtctaccagtggcagccactgtgaactgtgctgataacactggagccaagaacctttacatcatttctgtgaagggaatcaaggggcgccttaacaggcttccttcagcctgtgttggtgacatggttatggcaactgtgaagaatggaaagcctgaccttaggaagaaggtgatgccagctgtcattgtgatgcagcgcaagccatggcgccgaaaggatggtgtctacatgtactttgaagacaatgctggagtgattg

SEQ ID NO: 40042 - DNA, 190 bp, Zea mays
cagcctgcttttgtgtacattcctatagctgtagagttcgtggaggagcttgggttgtggtcgatagcaaaataaatccagaccgcattgagtgttatgctgaaaggactgccaaaggtaatgttctcgaacctcaagggttaattgaaatcaagttcaggtcagaggaactccaagactgtatgggtag

SEQ ID NO: 40043 - DNA, 302 bp, Zea mays
cggctcgagctcgcactcgcacgtacaccacactagttaccacagacgacgggcgccatgaaagtcccggtgcttctcctcctggtctccctgtgcttctcgctcgcgctcgcgtggcaaacggacacggaatcgggctcaggcaggccgtaccactacggcgaggagagtttccggcactggacgcgctcccggcagggccggttcagggtgctggaacggttcacccacgagctgctggaggacgccgtcggcaactaccgcgtcgccgagctggaagccgcgccgcgcacgttcctgca

SEQ ID NO: 40044 - DNA, 310 bp, Zea mays
aaacaccctgtcccgctaggattcccccgaaaccctcccccaaaaccccagagcggagaagagcgcaagatgttcggcttcgggcaccacggccaccacggccagaacccgccggcgcacggcggcgtgcaccagcccaccttcaagatcttctgcaaggccgacgaggggtactgcctcaccgtccgcgacggcaacgtggtgctggcccccgccaacccgcgcgacgagcaccagcactggtacaaggacatgcgcttcagcacccaggtcaaggacgacgaaggcaaccctgcgttcgccctcgtca

SEQ ID NO: 40045 - DNA, 292 bp, Zea mays
cacaaatcagacatcaaaatggaatgcgacggagaaaacctttgtctttgtttcgcagcggatatccagctggcgcacacgcaaggagaggtaaccagcaatctgctgccctatgcaccagggcaggaagtggcaaccaggctccaggacctcgctgaatttgccaaaattttctttgatggctacagttgactgatcaacctgaactaacccaaaatctgacccatgtcttatctgcgcacaataagacggacgtctgtcatgtatgctaccagcggtccagtaatgcttc

SEQ ID NO: 40046 - DNA, 186 bp, Zea mays
cccgctaggatacccccgaaaccctcccccaaaaccccagagcggagaagagcgcaagatgttcggcttcgggcaccacggccaccacggccagaacccgccggcgcacggcggcgtgcaccagcccaccttcaagatcttctgcaaggccgacgaggggtactgcctcaccgtccgcgacggcaa

SEQ ID NO: 40047 - DNA, 303 bp, Zea mays
caccaaccctagcccaaaaccccgcttccacttcacagcctctccgcctccgctcctcgcgccgccgccgcgtctcctcctgtacaggtaagaaggagaggaagagggcgaaatggtgaagcacaacaacgtcatccccaacgggcacttcaagaagcactggcagaactatgtcaagacatggttcaaccagcccgcccgcaagcagagacgccgcattgctcgtcaaaagaaggctgtgaagatattcccccgcccgactgctggtcctctacgccccattgttcaatgccagactttaaa

SEQ ID NO: 40048 - DNA, 161 bp, Zea mays
gcttgcagcaaggtcaatatgggcttttggacctgacaagcagggtcctaacattcttttggatgacacactttcaattgaggttgacaagaacttgctcaatgcagtgaaagattcaattgttcaagggttccagtggggtgctagagaaggtcctttgt

SEQ ID NO: 40049 - DNA, 161 bp, Zea mays
gatcgatctggtagccaacaagatcatagacttcatcaagtttgacgtcgacaatgtggtcatagtgaccggcgggaggaacaccgggcgtgtaggagtcatcaagaacagggagaagcacaagggcagcttcgagaccatccacgtgctgcttggagctt

SEQ ID NO: 40050 - DNA, 160 bp, Zea mays
ctcccatatccgctcccctacctctccagcatctcccgtctccgacgtctcgtctctgctcctcacctcgccgccagccatgggcaagatcaagatcggaatcaacggtttcggaaggatcggcaggctcgtggccagggtcgccctgcagagcgaggat

SEQ ID NO: 40051 - DNA, 295 bp, Zea mays
ccagctcaaaaccctagcgtccaactcatatacctgctgctcgccccgacgcgcatcaactcccgccgccgccccttcctctccgtcgctcgcctcgcgcctacgccaccacctctgccatggccccgaagaaggataaggccccgccgccgtcgtccaagccggccaagtccggaggcgggaagcagaagaagaagaagtggagcaagggtaagcaaaaggagaaggtcaacaacgctgtgctcttcgaccaggccacctatgacaagttgctctccgaggtgcccaagtacaa

SEQ ID NO: 40052 - DNA, 259 bp, Zea mays
ggtgctccggcccttcgacgaggtgtccaggctcctccgcggcatccgggataccgcgtggcgtcctggaggcgaacccgcgctcgttcgtggtgcccagccacaccgacgcgcactgcatcagctacgtggcggaaggcgagggagtggtgacgacgctcgagaacggcgagaggcggtcatacaccatcaagcaaggccacgtcttcgtggcgccggccggggcggtcacctgcctggccaacaccgacggccggaa

SEQ ID NO: 40053 - DNA, 292 bp, Zea mays
gccattgttcaacacccgttcgttcaagatcgcctacgtgccgaacggcaagggctacgccgagatcgtgtgcccgcaccgccagtcgcagggcggcgagagcgagcgcgacgcgacaagggcaggaggagcgaagaagaagaagaagaatcgtctgaggagcaggaggaggccgggcaggggtaccacaccatccgggcgcggctgtcaccgggcacggcgttcgtggtgcccgcgggccacccgttcgtcgcggtggcgtcccgggacagcaacctccagatcgtgtgct

SEQ ID NO: 40054 - DNA, 293 bp, Zea mays
gcagagcctgccaaaaggctagagaaaaaaaaatccgccttctcctcccagtcgcaggccaggctcagcctcccctctcccctcctcggcatcttcgccgccggcgatctatctctctcacaatggcggcgcccatgtcagccatcgactcagcgtggcagctcctgatcgccaacttcaccgagttccagctcgccaccgtcgtcaccttcctgctccacgagaccgtcttcttcctctccggcctcccctccctcctcttcgagcgcttcggactcttcgccaagtacaag

SEQ ID NO: 40055 - DNA, 288 bp, Zea mays
ctcctggcttccaccacgcctgtcacctcttcccgcgccgacgcagccgccatggaccccgtctccacatgggggctaaccccgctcgcgggcgccgacccggagatcgacgacctcctggagcgcgagaagcggcgccagcgtcgcggcatcgagctcatcgcctccgagaacttcaccgccttcgccgtcatggaggcgctcggctccgcgctcactaacaagtactccgagggcatgcacggcgcccgctactacggcggcaacgacgtcatcgacgagatcgag

SEQ ID NO: 40056 - DNA, 293 bp, Zea mays
ctcttagtcttatcctggctctgcttctttttaaacctgcaccactttacatattggacgaggttgatgctgctcttgatctgagccacactcaaaacattggtagaatgatcaaggctcattttccgcactctcagttcatagttgtctctttaaaagagggtatgttcaacaacgccaatgtgatatttcgaacaaaatttgttgatggtgtgtccaccgtgacacgaacagtgccttcgaaacagagatgaccagtttacacatcatgcatcttctgaaccaaaactagg

SEQ ID NO: 40057 - DNA, 288 bp, Zea mays
agcgaacaagtaccgcgagggaaagatgaaaaggactttgaaaagagagtcaaagagtgcttgaacatgcggggagggcgacgggggtgctgctggagacagtgcagatgatggggatgccaaggggagcggcgatgatgctgacacagacaaggactccaagaggatgaggaccaagtttgaggagctttgcaatgaagacaagattttggtgttctttaagaagctgcttaatgagtggaaccaggaattggatgagatgactgagctagagaagcggacagcaaa

SEQ ID NO: 40058 - DNA, 271 bp, Zea mays
  unsure (1)..(271): unsure at all n locations
aaaaacacgggtccatctggacgacgtcgaagcaggtgcggacgtcataatctcggcgtcctaccaggccacgatcgaggggttccagtcgaggggcttctcgcgggacgagagcgangagctgctgcggcgtacgtgcacgtcgcgcaggaggcgcgcagggtcttcgcggcggagggcgacaggtcatcgcgccgcagacgcccgccggcgctggtggcgncctcggtcgggagctacggggcgtaccgagcagacggctccgagtaca

SEQ ID NO: 40059 - DNA, 190 bp, Zea mays
ccgacgagcaactgctggcgtacgctgagctgcccagacatggccgctacatggcggaggtgttcgccgtgcgcatcctcgccaccgccggaggagacccgccgccccatggcaccatcactttctacggcggccactgctgcagcgatttcatttacagctggagtccactggcagagggagaagacac

SEQ ID NO: 40060 - DNA, 280 bp, Zea mays
gatccgtgcgccctcatctgacacccggatgttcatgcgctgcgatgtgaattttgaccagtccaaccacggacggagcctgaacaccatgattggcagggcagctcacattgagttccttgagaccgacatctacgccaagttcatcatgtggtccttccctgacctgttccgatgacgacgacaacgcataccaaacctaccaaaccgatagcgcacactgattagtactgaccaggcaaggaaaagtaggcttgcataaaggctcccccagaatcca

SEQ ID NO: 40061 - DNA, 280 bp, Zea mays
ggaaattacaccttctgcaccagttcttggttgcacaaagtttcctttttggaggatctgccattgaatcagaaggatactttgtgcaaccaacaattgtggaaattacaccttctgcaccagttgtgaaagaagaactctttggtcctgtcctttatgctatgaaatttcagaccttgaaggaagcaattgaaatcaataactctgttcctcaaggattgagcagttctatatttacaaagaggccagatattatttttaagtggctcgggccccatgg

SEQ ID NO: 40062 - DNA, 283 bp, Zea mays
ccttttgctcggaacgcacacaccgcccgtccccgatctccgatcccctcgtcgatccaaagatgcagatcttcgtcaagaccctcactggaaagactatcaccctcgaggtggagtcttctgacaccattgacaacgtcaaggccaagatccaggacaaggagggcatccccccggaccagcagcggctcatctttgctggcaagcagctcgaggacgggcgcacacttgccgactacaacatccagaaggagagcaccctccaccttgttctccgcctcag

SEQ ID NO: 40063 - DNA, 276 bp, Zea mays
ctgtaccagtacatactggaatccaccgtcttcccacgcgagccggactgcctgcgggagctccgcgtcgccaccgccacccacaccatggcgggcatggctgcgtcgccggacgaggtgcagctgctgcagctcctgatcgagattcttggcgccaagaacgccatcgaggttggcgtcttcaccgggtactcgctgctcgccaccgccctcgccctccccgacgacggcaagattgtggccatcgacgttacccgcgagagctacgaccagata

SEQ ID NO: 40064 - DNA, 284 bp, Zea mays
ctcgaactgcgcgaggaagccatcctgatatctctgtcgtcatccccatcctagtagcgtagaaacctcctgcattttcattttgatctccctaatctctccggctagctgctttccagtgaccaaaagatatcagagaccacctcccgtggctgtctgccatctggctctgaaacgatggcagtcctacaagctgctgcccctccccctgtctctgtgattggattcgagggatttgagaagcgccttgagatcagcttctctgaggcacctgtcttggctga

SEQ ID NO: 40065 - DNA, 275 bp, Zea mays
gtgaagaagcgggtcaagcagttcaagaggccccacatcgaccgctacaagtgccttaagccaagctggcgcaggccaaagggtattgacacccgagtcaggaggaagttcaagggatgcaccttgatgtccaacattggttatggttctgacaagtcgaccaggcactacctccccaacaagttcaagaagtttgtggtccacaacgtttctgagctggagttgctcatgatgcacaacaggacctactgcgctgaaattgctcacaacgtgtc

SEQ ID NO: 40066 - DNA, 307 bp, Zea mays
atcgagccgaatcggctcgagcggctcgaggaaaaggttcttgagtataggtttgtccgaaatggtgacttgtcaagtgcactgcacaacaagtcaagggaggaagatgaaggcttgcaatctttggactggataaagaggttgaagattgcaacgggagtagctgaggctctttgctatctgcatcatgagtgttctccaccgatggttcatagggatgtgcaagccagcagcatccttcttgatgataaatttgatgtacgccttggtagcttgaacgaggtgtgtcctcaagaaggggaaggtc

SEQ ID NO: 40067 - DNA, 310 bp, Zea mays
atgagccagtcattgggttacgaggaaacccatatatttgtgtcaatgataagcatctggaactttcttggacgtattggtggagggtatttctcagagattattgtcaaagattacgcatatccaagggcgatcgcattagcgatagctcaagtcctgatggcgatcgggcacttcaacttcgcgatggcttggcccgggacaatgtacatcggcacgctgctcgtcggagtaggctacggcgcgcactgggccatcgtgccagccgcggcctcggagctgttcggggtgaagaattcggagcgctgta

SEQ ID NO: 40068 - DNA, 306 bp, Zea mays
caacaagctcccgggcgcccagctgctgctgtcgcgcctgcgcatgttcctcaaccccggctacccgtacgaggagtcgctagccggctaccacaacgccaccagcctcaacatgtgcatgtacttcccgcgcttcgccgccttcaacttcaccaagggcgggatggcgctcttcaaccacggcagggggcagccgctgcagtacgtcgtcgccaactccttcatcgccgcgctctacgccgactacatggaggccgtcaacgtccccggctggtactgcggcccaaacttcatgaccaccaacga

SEQ ID NO: 40069 - DNA, 315 bp, Zea mays
caagtttgtccattcgcattggtctgaatactgtagctactagcgcgagtgccactgtgccgcagctgcctgctcgccattactgcaagctgtgttcaatcaaagcttaattaggctccctctacatctgatccagctaagtagctagccagcactacagaagggcgtggcaagaatcaggagagagatagcaggggggctagctagctgagctcgtgcgacgaagaattgccggaattggcaggaacatggtggcgccgctcctggtgctcaacctcatcatgtacatcatcgtcatcggcttcgcgagctgga

SEQ ID NO: 40070 - DNA, 310 bp, Zea mays
ggatagcttacctcccatcgacggtcggtgagccgttggtgagtggcgagacagcgggtgcgctgggcaagaacaggcgacgaagaagatgagcacgctggacacgcggacgctcaaggacgagctgacgagcatggacaggaagtgcctcgtggacctcggccacccgctgctcaaccgcgtcgccgacagcttcatccgcgccgctggggtcggggcggccagggccgtctccagggaggcctacgtcgtcaccgtcgaagggctttcaggagactcgtccgggctaaacgccgacggggcaagcgga

SEQ ID NO: 40071 - DNA, 314 bp, Zea mays
gccgtccgccttgcccttcacgaaggcttggtcctcctccttgtatctccactccccccttcacagatccgttcctccagctagggttagcgttcctctgcagcgatggcgatcaagcggactaaggcggagaagaagatcgcgtacgacaagaagctgtgcagcctgctcgatgagtacaccaaggtgctcatcgccctggccgacaacgtcggttccaagcagctccaggacatccgccggggcctcaggggcgactcggtggtgctcatgagggagaacacgctcatcaagcgtttgcatcaagtgtacgc

SEQ ID NO: 40072 - DNA, 194 bp, Zea mays
gtttgtcctaccaccaccgctcaccgcggtttggctttctcccctcttctgcaccacttctcgctccggattccggattccctctgctctttccctaacgaaggtagccatggcggggagaggtaaggcgatcggctcaggcgccgccaagaaggccacgtccaggagctccaaggctggcctccagttccccg

SEQ ID NO: 40073 - DNA, 303 bp, Zea mays
ccaaaccctaggttatctcggcgcggcggcgatggcggcggcgggcctgaggaaggggaatgcgcgcctcccgccggaggtgaaccgggtgctctacgtgcggaacctgccgttcaacatctcgagcgaggagatgtacgacatcttcggcaagtacggcgcgatccggcagatccgtttgggcaacgccaaggacacgcgcgggaccgcttacgttgtctacgaggacatctacgacgccaagaacgccgtcgaccatctctccggcttcaacgtcgccaaccgctacctcatcgtgctcta

SEQ ID NO: 40074 - DNA, 303 bp, Zea mays
agcagtacgcctccgaaatcctcgcgatactcctgcagaacagccccgccaatcagaagcgcctcggccagatcaacggagtcgacgccctgcttcaggcggttgccatgtacaaatcaagggacccaaagacgtctgacgaggaggagatgctcgagaacctcttcgactgtctctgctgcgtgctcatgcccctggagaacaaggagaggtttgtcaaggctgaaggtgttgagctcatgatcatcattatgaaacagaagaagctggcatacagctctgcgacccgaaccatcgattttg

SEQ ID NO: 40075 - DNA, 296 bp, Zea mays
ctcgttcgatctgtgcagcagatctgaggtcccgggcgaccgtgaagcagcttcaatcgtcggcatggcgctcgtattgcatagtggggctggaaacaagaatgccttcaaagcacttattgctgcagaatacagtgggatcaaggttgagttgaccaaggattttgagatgggtgtctccaacaagacccctgagtttcttaagatgaacccccttgggaaggttcctgttctggagactcctgatggccctgtttttgagagtaatgctatcgcacgctatgttgctcgcttga

SEQ ID NO: 40076 - DNA, 293 bp, Zea mays
catcaaaacaatcaagaccaatgtggttgggactctgaacatgcttggattggcaaagaggatcaatgctaggttcctcctcaccagtaccagtgaggtctatggtgatcccctccagcacccgcaagtggagacttactggggcaatgtcaatcccatcggtgtcaggagctgttacgatgagggcaagcgtacagccgaaacgttgaccatggattaccaccgtggtgccaaccttgaggttaggatcgcacgtatcttcaacacatatggccctcgcatgtgcattgacg

SEQ ID NO: 40077 - DNA, 299 bp, Zea mays
cggacaagttccactccttccacccggtggccaccatccttagctggatcctggctgagctcagcaccaggatccagctaaaacctgagggaacggacaagttccactccttccacccggtggccaccatccttagctacctcaccaaggcaccactggttccgcccggcacaccggtgacgaatgctctggcaaagcagagggcgatgctggagaacatcatgagggcctgcgttggcctggccccagagaacaacatgatcctggagtacaagtgagccaagcggcgtggcctgcag

SEQ ID NO: 40078 - DNA, 296 bp, Zea mays
gtcattgccaacaaggaggggatctcatgggcgaccaaggacaaggtgcagcaagccaactactacggctccctcacccaggcttccaccatcagagtaggcagctacaacggggaggagatatatgcgccgttcaagagcctcctacccatggtgaacccagacgaccttgtgtttggaggctgggacatcagcagcatgaacctggcagatgccatgaccagggccaaggtgctggacattgacctgcagaagcagctcaggccctacatggagtccatggtgccacttcccgg

SEQ ID NO: 40079 - DNA, 288 bp, Zea mays
ggagcgcacacacacgcaaccagatctcccccaaatccagccgtcggcacctccgcttcaagatgcagatctttgtgaaaacactgactggcaagactatcaccctcgaggtggagtcgtctgacaccattgacaacgttaaggccaagatccaggacaaggagggcatccccccagaccagcagcggctcatcttcgctggcaaacagcttgaggacgggcgcacgcttgctgactacaacatccagaaggagagcacactccaccttgtgctccgcctcaggggag

SEQ ID NO: 40080 - DNA, 301 bp, Zea mays
  unsure (1)..(301): unsure at all n locations
ctcgagccgcatgcgtaacaagctctacgacaggtacaacgaatttgtgacacctgaggagaatgaagggttgattggaaagcttcaggaggttgaagattggctatatgaagatggtgaggatgagacaaagggagtctatatttctaaactggaagatcttaagaagattggtgacccaattgaggcacggtacaaggagtcgacagaaaggggttcctctgtagatcaactggtctactgcatcaacagtttcagagaggctgctttgtccagtgaccanaagtttggccatatcgac

SEQ ID NO: 40081 - DNA, 300 bp, Zea mays
cgcctctcgagtctcgtccacccgtcgtcctcctagctcctctactcgccagtcgccatgggcaagattaagatcggaatcaacggcttcggaaggatcggcaggctcgtggccagggtcgccctccagagcgaggatgtcgagctcgtcgccgtcaacgaccccttcatcaccacggactacatgacctacatgttcaagtacgacaccgtccacggccactggaagcacagcgacatcacactcaaggactccaagacccttctcttcggtgacaagccggtcaccgtctttggcatc

SEQ ID NO: 40082 - DNA, 299 bp, Zea mays
cacttcttgcaagagctgtagcaaatcggactgatgcttgtttcatccgtgtaattggaagtgagttagttcagaagtatgtcggcgaaggtgctcggatggtcagggaacttttccagatggcccgctcaaagaaagcgtgcattgtattcttcgatgaagttgatgctattggtggtgctcgttttgatgatggggtgggtggcgacaatgaggtgcagcgtacaatgttggaaatagtaaaccagcttgatgggtttgatgcaagacggaacatcaaagttctcatggccactaat

SEQ ID NO: 40083 - DNA, 304 bp, Zea mays
cacaattatctgaggcagcaacatatgcaagacagaaaaatgttatcctgaaagtgatttacctattggtgttgataggaatagtgtcgatacttgggtatacccaaccttgtttcgcatgaataccgctactggagcgcctcctgattattttgacaagaatggacaaaattggggttttcctacatataactgggaggagatgtcaaaggataattatgggtggtggcgagctcgtctgacacagatggcaaagtacttcacagcatacaggatagaccacatcttgggtttctttaggata

SEQ ID NO: 40084 - DNA, 305 bp, Zea mays
tgcgcgtgtacgccgtgccgctgctgatcgtcaacgcgtggctggtgctcatcacgtacctgcagcacacccacccggcgctgccccactacgactcgggcgagtgggactggctgcgcggcgcgtcgccaccgtcgaccgagactcaggcgtcctcaaccgcgtgttccaccacatcacggacacgcacgtcgcgcaccaactcttctccaccatgccgcactaccacgccgtggaggccaccagggcgatcaggcccgtcctcggcgagtactgcacattcgacccgacccctgtcgccaagg

SEQ ID NO: 40085 - DNA, 159 bp, Zea mays
cgcaggcagaggcagcatagcagcagccagctccatccatcctctttcccctcctcgcttcgcttcctcggcggattcctcctccctcgaccgtccccgtccccgtccccttccggcgcgcaactcgcccgagatggcaaacgcgagatcgggtgtcgc

SEQ ID NO: 40086 - DNA, 304 bp, Zea mays
ctcgagacacagagagagagacagatgtcgtggttcgggcaccaccaccacaaccagccggctcccccggcgtcgggccccaaccaggtgttcaagatcttctgccgcgccaacgagaactactgcctggccgtccgcgacgcgccgtcgtgctggccccggtcaaccccaaggacgaccaccagcactggtacaaggacatgcgcttcagcacccgggtcaaggacgaggaaggcatgccggcgttcgcgctcgtcaacaaggccacggggctcgcaatcaagcactctctcggccagtccca

SEQ ID NO: 40087 - DNA, 304 bp, Zea mays
gctctctctgctcgcagccatggcgaagaattacccaaccgtgagcgccgagtacagcgaggccgtcgagaaggccaggcgcaactaccgcgccctcatcgccgagaagagctgcgcgcccctcatgctccgcctcgcgtggcactccgcggggacgttcgacgtgtcgtcgaggaccggcggtcccttcggtactatgaagtgcccggcggaactggctcacggcgccaacgcggggctggacatcgcggtgcggctgctcgagcccatcaaggaggagttccccaccctctcctatgccgat

SEQ ID NO: 40088 - DNA, 303 bp, Zea mays
ctctctctctctcttcttcttcttcaatcctccctccccgcgccggagttggaggagggagaggggacaacctttccggcgccgacgccgacgcggacccggcgccgacacgatccggtggatcaagtgcatcacacctttacggaggccccttggacagcagtttgtgctgcaaattctatatagctctgtcgcagcatggcctcggtgggcgtggcacgctcttctttgggatttcagaatggcacaagttctagcagtgtaccagatcgtcttcccaacgagttgggcagtatgagcata

SEQ ID NO: 40089 - DNA, 207 bp, Zea mays
gttcaaaaggtcacaactacatcactctagctggagtgatatgaaacattagtgatgtagttgtgggcttttgaactgcttcaagctggagtgatgtcactgtggtacttttgtgattgatcatatgtggagcttttgtgaatgatctagctagctatctgtaaatgatctagttgtgaatgatattataattgtgatgcttttgtg

SEQ ID NO: 40090 - DNA, 291 bp, Zea mays
tttcgctctcgccggcgtcgagcgcctagggttcgaggaacgtccgtccgtccgtccggggaaggagcggtagggccgcggagatgatcgaggtggtgctcaacgaccgcctggggaagaaggtgcgggtcaagtgcaacgaggacgacaccatcggcgacctcaagaagctggtggcggcgcagagagggacgcgccccgagaagatccgcatccagaagtggtacaacatctacaaggaccacatcaccctcaatgactcagaagtccacgacggcatgggactcgagc

SEQ ID NO: 40091 - DNA, 295 bp, Zea mays
gtaagatgttcctgcggaggatcctgaccggcgggggcggcctggcggccctgagggcggcgcggcgtgaaggagacgacggggatcgtgggccttgaggtggtgcctaacgcgcgagacgttctggtagggctctacgagcgcacgctcaaagagatcaaggccgtccccgaagacgagggttaccgcaaggccgttgaatccttcaccggtcaccgcctccagatctgccaggaggaggaggactggaagcgcatcgaggaccgaatcggatgccggcaggtcgaggagctca

SEQ ID NO: 40092 - DNA, 181 bp, Zea mays
cgcgccacctctcctccggcatcgacgaggcgaaaccctagcgcccgagtccctctccctgcccccacaacccaaggcggcggatatagcgtacgcgccgccgatgaaggctggcaaggccgggttcgaggctggcatgatggatccacagcacaggatccgcatcacgctctcctccaag

SEQ ID NO: 40093 - DNA, 205 bp, Zea mays
caaaaaaccactcatcaggcgagacgcgagaagatcaatgcgaggatggagctgctcaaggagctggtccccggctgcagtaaggtatcaggaacagcgttggtgctagatgagatcatcaatcatgttcagtctctccaaaggcaagttgagtacttgtcaatgaggcttgcaactgtaaacccgaggggcgattttggtgggc

SEQ ID NO: 40094 - DNA, 302 bp, Zea mays
gcgggcgactacgagtacgccatcgcgttccaggagcgcgtcaagatccccgacgacaagatggtgtactacgaggagcgcgcggagatgtacgtcggcgacgacgtctctcccgacttctacggctgggtgttccccaagtgcgaccacgtcgccgtcggcaccggcaccgtcacgcacaaggccgacatcaagaagtttcaggccgccacgcgcctccgcgccaaggacaagattgagggcggcaagatcatccgcgtcgaggcgcaccccatccccgagcaccccaggcctaagagggt

SEQ ID NO: 40095 - DNA, 290 bp, Zea mays
gctatacagtgccttctacttgggcaatgacagatcctacaacattcttaatccggggagagacttatttgcacgatcgtataaagatcaaggcaaatagtaccctgatgcaaatggtaggtgctgactggataaaatctgataagcgtgaggatgatctagctggtcgccctggggggctagtccagaaatgtgcagcacaagggggcacccgattcttcttcattgtaaacattcaggttcctggttcaaccacatacagcttagctttgtattatatgatggataca

SEQ ID NO: 40096 - DNA, 293 bp, Zea mays
ctcgcccatcccgccactgctgctctccagagtccaggcgacccaggctgcgcggtcgctcggtgttgttagtcccgaccgccgccggccatggcatccaacggcatcgccccaagagatgtatgtgttgttggcgttgcacgcacccctttgggtggtttccttggtgccttgtcttccttgcccgcaacaaagcttggttctatagcaattgaagctgctctgaaaagagcaaatgtggatccggccctcgtgcaggaggtctttttcggaaacgtcttgagtgctaattt

SEQ ID NO: 40097 - DNA, 292 bp, Zea mays
atccgtgtcaccttatgacaaaaaatatggtgcatttgagacagagaatgagaaagagcgcaacatgcgtctgtccaaccttgttaacttttcgcttgataacaagcgtgaaaacagggaaattccttcaagaccatatcttctatcagagttggcctccaaaggagtcctttcatgtgcttcccaagaagtgcgagatttgtacaaccttttggaacatgagtttctacctctggatcttgcatcaaaagtgcagccacttcttttgaagatttccaagattggagggaag

SEQ ID NO: 40098 - DNA, 189 bp, Zea mays
ttcgaaaccaaggatccatccagaaggcgaggaggaagagggagaagggcgcgcgcgcgcgcagcgttcaagtggtgctggtgtcggccatggatcgggttcgcggatccgcgttcctgctcggcgtcctgctcgcaggatccctgttcgcgttttcagttgctaaggaggagaccaagaagctcggca

SEQ ID NO: 40099 - DNA, 313 bp, Zea mays
  unsure (1)..(313): unsure at all n locations
aatctagaagctcccctctccctccctccctctctctctctctcttcgccgtccgaagctccgcacccaatctaatcgacacctcaccgagatgggccgcaagttcttcgtcggtggcaactggaaatgcaatggaaccacagatcaggtcgagaagattgtcaaaaccctgaatgaaggacaggttcccccttcagatgttgtcgaggtcgttgtcagccctccttatgtcttccttcctgtggtcaagagccagctgcgccaagagttccatgttgctgctcagaactgctgggtgaagaagggangtgct

SEQ ID NO: 40100 - DNA, 177 bp, Zea mays
cttacagagaggggtggcatgacttcccacgctgctgtggtcgacacgtgggtgggggaaatgctgcgtctcgggatgctcaggcattcgcgtaaacgatgcggagaagctcgtgacgatcggaggccatgtactgcgcgaaggtgagttgctgtcgctgaatgggtcgactggtga

SEQ ID NO: 40101 - DNA, 322 bp, Zea mays
cactcaccgatagcaagtagcgccgccgacgtttcgagagcagagtatccaagctagccaagcgcgcacctcggtgacctagctagctacctagctagttcaggcgacgatatggcgtctggtcaggagagcaggaaggagctggaccgcaaggctcgcgagggcgagaccgtcgtccccggcgggaccggcggcaagagcgtcgaggcccaggagcacctcgccgaatggcgcagcgcgtgaggccagactcgcagggaccagctggggcagccagggtacagcgagatggggaagaagggcggtctgagcaccacggacg

SEQ ID NO: 40102 - DNA, 199 bp, Zea mays
ggcgaacgtcttcaaacatgttgcagtgaaccatgagaaccaacgcgttggagttttctactgcggtgagcctgtccttgtgccacagctacggcagtggtcagcagacttcacccacaagacgaacacaaagtttgagttccacaaggagaacttctaatggcataactggagaagctctggacgtggtcctctaatg

SEQ ID NO: 40103 - DNA, 220 bp, Zea mays
ctcgagccgcagagagcttgtagatggcattgttatggtcagtcgagacgctatttgtgactcgataaaggatatgtttgaggagaaaagaagtatccttgaacccgccggtgcccttgcattggctggggctgaagcctactgcaaatactataacttgaaaggagatactgtggttgcaataactagtggggcaaatatgaactttgaccgacttaga

SEQ ID NO: 40104 - DNA, 313 bp, Zea mays
gaatcattctctgctttcaatagcgtctataacaattcgggcctttttggaatttatgcagtcaccagcccagacttttcatcgaaggctgtggatttggcagcaggggaactcctggagattgcgacacctggaaaagttacacaagaacaacttgatcgtgctaaagaggcaaccaaatctgcagttctgatgaacttggaatcaaggtctatagcatctgaagatattggaagacaggttcttacttatggggaaaggaagcccatcgagtatttcctgaaaacagttgaggagatcactttgaatgaca

SEQ ID NO: 40105 - DNA, 305 bp, Zea mays
ggaacctagccgcgcgcggatctcggcttttccccttcctccacgccagccatggacgaggacttcgagatgcctcccgccggcgccgatgagatgatgggcgacgacgagatgggcgacttcggcggcgacgagggcccggtgatgaaggtgggcgaggagaaggaggtcggcaaggaggggctcaagaagaagctgctcaaggagggcgagggctgggagactcccgaggtcggcgacgaggttgaagtgcattacacgggcacgctccttgatgggacaaaattcgactcaagccgtgatcg

SEQ ID NO: 40106 - DNA, 295 bp, Zea mays
ttaatgatgggtttcctttctcaattgcattgtcatggaaacaagactcgcagaacagtgcaccccaacagacccttgtatttccaaaggggaatgtaattcccagcattaaagctctaaccttctataaatccagtacatttgaagttgatgttttgtatgtggacacatgcgactcgcaaattccacagaagataagcacttacacaattggacctttccaaccctccaaaggtgagagggccaaactgaaagttaaagtgcgtctcaacattcacgggattgtcacagttga

SEQ ID NO: 40107 - DNA, 186 bp, Zea mays
gctcagcttagctccacgccagctccaatcacagtcgtgaccagagcgcgagagctagctagagggccgtgaaaatgccgatcaataggatcgccctggggagccaccaggaggtgtaccacccgggcgccctcaaggcggcgttcgctgagttcatctccaccctcatcttcgtcttcgccggcc

SEQ ID NO: 40108 - DNA, 283 bp, Zea mays
ggcggcccagttcttaatttagatgaacattgcaatcaaagaaactgagaagagctacaatgctttcatgttcagagacgccctgaagtctgggttctatgacctccaattggctagagatgagtacaggctctcttgtggtgcagcaggcatgaaccgtgatctgttgtggcgatttatggatgtccagaccaggcttatcacccccatttgcccacattatgccgagcacgtgtggcagaagatcatgaagaaagaaggctttgcaataaaagctggctgg

SEQ ID NO: 40109 - DNA, 162 bp, Zea mays
gtcaactcaaacttgtcatcaggcctatgtattcaaaccctcctcttcatggtgcctctatcgttgctaccatactcagggacagcgagatgttcaacgaatggactctggaactgaaggccatggctgataggatcattaacatgaggcaacaactattta

SEQ ID NO: 40110 - DNA, 186 bp, Zea mays
cgtcacactgcaattttgaaaactgaactgtaagatggcatcagcagagctttcccgtgaggaaaatgtgtacatggtcaactcgccgagcaggcagagaggtacgaggaaatggttgagttcatggagaaggtagcgaaaactgttgactcggaggagctcactgtggaggagcgcaacctcctg

SEQ ID NO: 40111 - DNA, 298 bp, Zea mays
gaaaatctggcatcacactttctacaacgagcttcgtgttgccccagaggagcaccctgtgttgctcactgaggctccattgaacccaaaggccaacagggagaagatgacccagattatgttcgagactttcaatgttcctgccatgtacgttgcaattcaagcagtgctgtcactctatgccagtggacgtactactggtattgttctcgactctggtgatggtgtgagtcacactgtgcccatttatgaaggatatgcccttccccatgccattcttcgtctggatcttgctggt

SEQ ID NO: 40112 - DNA, 293 bp, Zea mays
gttgaacctgggctggtgtgatggcatcactgacaagggggtgaccagcctggcttcggtctttcctcgattcagttctgactaattatgccgcagagatcttataacatatgataacgcggttacgctggcgaacagctgccttcacctgcgctccctgggtctctactactgccagaacatcacggaccgcgccatgtactccctggccgccaacagccgcgtgaggagtcggggccggggctgggacgcgacacgaagagcggcggcggtggcaaggaccgggagcggga

SEQ ID NO: 40113 - DNA, 188 bp, Zea mays
cacagagacagacacgatggtgagcaccagaattgttgtccacatcgccacacacctatgcgcagccgccgcagtcgcgtcgtccagggaggacgcaaccaccaccaccacgggggccacaagtccgggcaatgcgtgcagcggtgcgaggaccggccctggcaccagcgcccccggtgcctagagca

SEQ ID NO: 40114 - DNA, 302 bp, Zea mays
  unsure (1)..(302): unsure at all n locations
ggagctcttcagcttccgcatcgacgcgcccgccagccccgtcgagttcgccatcggggacgcgctcgccgtcgtcaccaccgacaacttcatggaccacgtccccaccgtccaggtncagcgcatcgccgaggacatcgacgaccagacggaggagtctgcactcgtcatcaccggcatcaagggaaggatcaacagggccgtttggcggccgctcaacaggaccatcatcactgccggagaggatgccaccgttcgcatttgggattcagagactggacaacttctgaaagagtctgaca

SEQ ID NO: 40115 - DNA, 297 bp, Zea mays
cggcgctggccttcgtgacgctcaagcacgacggggagcgcgagttcatgttctacaggaacccgagcgcggacatgctgctgacggaggcggagctggacctgggcctggtgcggcgcgccagggtgttccactacggctccatctcgctcatctccgagccgtgccgctcggcgcacatagccgccatgcgcgcagccaaggccgcgggcgtgctctgctcctacgaccccaacgtgcgcctcgcgctctggccgtcgcccgacgccgcacgcgagggcatcctcagcatctgga

SEQ ID NO: 40116 - DNA, 231 bp, Zea mays
actgcgtggccgtcggcagctcgccgcgcttcagggtctacgacgtcgacttcggcttcggacggcccgagcgcgtccgcagcggcgggaacaacaagttcgacggcatggtgtacctgtaccccggccgcggcggtgacggcggcatcgacgtcgagctggcgcagcagccggagcccatgcagaggctggagaaggacgacgacttcttcctgcgccaggcggcagcta

SEQ ID NO: 40117 - DNA, 286 bp, Zea mays
ccgcagttccccgaccacaccgttcctccgagcccaggagcagccccgcgccaggaggaagtttgttcttttaacaatatgtcgagggaggagaatgtttacatggccaagttggctgagcacgccgaaaggtatgaggagatggttgagtatatggagaaggtggctaagactgtagatgtggaagagctcactgttgaggagcgtaaccttctgtctgttgcatacaagaatgtgattggggctcgccgcgcttcatggcgcattgtttcttccattgaacaaa

SEQ ID NO: 40118 - DNA, 290 bp, Zea mays
caactccagagtctcttctgaaagaagctattcatgtcatcagctgtggctatgaggacaaaactgactggggaactgagattgagtggatatatggttctgttacagaagacattctcaccggattcaagatgcatgctcgaggctggcgatcaatctactgcatgcctaagcgaccagctttcaagggatctgctcctatcaacctttcggatcgtttgaatcaagtgcttcggtgggctcttggttccattgaaattcttttcagcaggcattgtcccatatggtat

SEQ ID NO: 40119 - DNA, 184 bp, Zea mays
catatcacagtgacagacacgatggtgagcgccagaattgttgtcctcctcgccaccctcctatgcgctgccgccgcagtcgcgtcgtcctgggaggacacaaccaccaccaccacgggggccacaagtccgggcaatgcgtgcggcggtgcgaggaccggccctggcaccagcgcccccggtg

SEQ ID NO: 40120 - DNA, 293 bp, Zea mays
  unsure (1)..(293): unsure at all n locations
caaacacttgcgccgccgctgcctcacaggtaaggccgccatggtctccggttcgggcgtgtgcgcgaacatncgtgagtcgacgcgcgccaccacatgctgggccgtctctcctcgatcatagccaaggagctgctcaatgggcagaaggtagtcgtcgtccgctgcgaggagatctgcatgtcgggcggcctcgtccgtcagaagatgaagtacctccgcttcctccgcaagcggatgaacaccaagccgtcccacgggcccatccacttccgcgcccccgccaagatcct

SEQ ID NO: 40121 - DNA, 296 bp, Zea mays
cggatctcctggacattctgatataccgtctgttgctgctgttgttagttctcgtgaatggcctcttatctcgaaatacagagcatctgtccgcacccaatcaccaaaaatggaaatgattgactcgctgtttaagccacgggaaactgatgacgatggtctgattcgggaatgtctgattgacttctacaccagttcagggaagagaaagcctgaccaagtcatcatcttcagggacggtgttagtgaaagtcagtttaatcaggtgctgaacattgagttgcaacaaatcattg

SEQ ID NO: 40122 - DNA, 183 bp, Zea mays
ctgatccgttggtgcttgaccgatccattgacacccatatcggatccgtgaactgggcggcgtcgaaccagacggttggctgcccggcgtcggcgccggggttcccgatggcgtccactccggcgcagccgcggcgaccctgtcggcgggggaagcgtcgctggggcgccacctcgcgcgtcg

SEQ ID NO: 40123 - DNA, 286 bp, Zea mays
ccctcttgccggtcccgaataaagagcagcagcgcaagaggtcggtagagcgagaagaaggcaatggcggccgagagcttccttttcacctcggaatccgtgaacgaggggcaccccgacaagctgtgcgaccaggtgtcggacgccgtgcttgacgcatgcctcgcgcaggaccccgacagcaaggtggcctgcgagacctgcaccaagaccaacatggtgatggtgttcggcgagatcacgaccaaggcgaccgtggactacgagaagatcgtgcgcgacacct

SEQ ID NO: 40124 - DNA, 227 bp, Zea mays
cgcagagccgcagccaagcaagctgcgcccctggacttggcctcaccggtgaagcggactcgaggataggcggtgctcgggaataccaagcggtcggccgaggccacgtcggcggagatgacggacggtcaccacttcaacaacatcctcctcggagggcgcggcggcacaaaccctggtcagtttaaagtgcattctggtggacttgcatggaagagacaaggtgg

SEQ ID NO: 40125 - DNA, 308 bp, Zea mays
cttttctcgtttagaacctctaaaatttcccccactcgacagtcgcagcagcacctgtagcagccatggacgccagcggagccggtagcaaggggaagaagggggcggccgggcgcaaggcaggcggccccaggaagaagtcggtgacgcggtccgtcaaggccgggctgcagttccccgtcggccggatcgggcgctacctcaagaagggccggtacgcgcagccgatgggcactggcgcccccgtctaccacgccgccgtcctggagtacctcgccgccgaggttctggagttggcagggaacgcg

SEQ ID NO: 40126 - DNA, 188 bp, Zea mays
  unsure (1)..(188): unsure at all n locations
caaacccctgtcncgctaggatacccccgaaaccctcccccaaaaccccagagcggagaagagcgcaagatgttcggcatcgggcaccacggccaccacggccagaacccgccggcgcacggcggcgtgcaccagcccaccttcaagatcttctgcaaggccgacgaggggtactgcctcaccgtccg

SEQ ID NO: 40127 - DNA, 165 bp, Zea mays
actggagaatagtagatttcttctctcaccacccagagaacctacacatgttcaccttcctctttgacgatgttggcatcgcactcaactacaggcacatggagggctttggtgtcaatacctacaccttgatcaacagggatggaaagcctcaccttgtgaaat

SEQ ID NO: 40128 - DNA, 186 bp, Zea mays
agcagcggcgcgggcggacaaggagcaggcggaggaggagctgtgccaagccacaatgggtatctcgcgtgactcgatgcacaagcgccgggccaccggtggaaagcagaaggcctggaggaagaagcgaaagtatgagcatggtcgccagccagccaacaccaagttgtcaagcaataagacagt

SEQ ID NO: 40129 - DNA, 289 bp, Zea mays
cggcacaggacgcgctcccggcaggccggttcagggtgctggaacggttcacccacgagctgctggaggacgccgtcggcaactaccgcgtcgccgagctggaagccgcgccgcgcacgttcctgcagcccagccactacgacgccgacgaggtgatgttcgtgaaggaaggcgagggcgtcatcgtgctgctccgcggcgggaagagggagtcgttctgcgtcagggagggcgacgtcatggtcatccccgcgggcgccgacgtgtactcggccaacacgcaccagtc

SEQ ID NO: 40130 - DNA, 300 bp, Zea mays
ctcccatatccgctcccctacctctccagcatcctcccgtcaccgtcgtctcgtctccgctcctcacctcgccagccatgggcaagatcaagatcggaatcaacggtttcggaaggatcggcaggctcgtggccagggtcgccctgcagagcgaggatgtcgagctcgtcgccgtcaacgaccccttcatcaccacggattacatgacgtacatgttcaagtacgacaccgtgcacggccaatggaagcacagcgacatcgccctcaaggactccaagacgcttctcttcggcgagaagc

SEQ ID NO: 40131 - DNA, 290 bp, Zea mays
ctcggcgacgccactactcctgcctcacgccgccgctcaaaccgcagaagagagaagagaagcacgcccaaaaattccgaggttttcacctcttggagcgcaccaacaccacccggagaccggagcgactcgccaccggcgcggaaaaggagggcggaggctcgatggcggatgagaatcaggctggaaagaaagaggaggaggaatttagcacaggccctctgtcagtcctaatgatgagtgttaagaacaacacccaggtcctcatcaattgccgcaacaacaagaag

SEQ ID NO: 40132 - DNA, 212 bp, Zea mays
ctgaacgaaaggaacctgaaggggaccttctttggcaactacaagccacgcactgatctgccaaatgtggtggagctgtacatgaaaaaggagctggaggtggagaagttcatcacgcacagcgtcccgttcgccgagatcaacaaggcgttcgacctgatggccaagggggagggcatccgctgcatcatccgcatggagaactagatttc

SEQ ID NO: 40133 - DNA, 282 bp, Zea mays
cgcctcgtcagatcgaccgggaagaagggagcagaagccaaccggctcgtccgcccgttgcctgtcgactctatggccgccgtggaggtgtgcgtgaaggccgccgcggggaaccccgacacgctcggcgattgcccgttctcgcagagggtgctgctcacgctggaggagaagaaggtcccgtacgaggtgaagctcgtcgacctcggcaacaagcccgaatggtttctgaacatcagcccagagggtaaggtgcctgtgttcaacggtggagatggcaaa

SEQ ID NO: 40134 - DNA, 279 bp, Zea mays
catggaggaagccaagaagaacatgtacgcattcagcacgaccacctacaccgggttccagtgcaccgtggacgaggagacgtcggagaagttcaagggtaaataaagcatcctcacctgactaaagtctgcctggggtgctgtgggtgctccctgattcctacatcgacgtgaagaacaaggactacggaggtgacaagtacgtgaacggcgagataatcccctgcacgtacccgacgtaccagccgaaggagcggaggacgtccaagtacgagagca

SEQ ID NO: 40135 - DNA, 191 bp, Zea mays
tccgccctgcaggcggcatcaagaagttctccgctgcttactcgaactgcgcgaggcagccatcctgatatctctgtcgtcatccccatcctagtagcgtagaaacctcctgcattttcattttgatctccctaatctctccggctagctgctttccagtgaccaaaagatatcagagaccacctcccgtg

SEQ ID NO: 40136 - DNA, 243 bp, Zea mays
caccgcgtgcgaaccaagcagaccacagcaagaagcgtagtcgtcgccggacggaaaggcgcggacaagatgtcgtggcaggcgtacgtcgatgagcacctgatgtgcgagatcgaaggacaacatctcagcgccgccgccatcgtcggtcacgacggcagcgcttgggcgcagtccgagagcttccccgagttaaagcctgaggaggttgctggtatcataaaggactttgatgaacctggt

SEQ ID NO: 40137 - DNA, 277 bp, Zea mays
cgtctgctcgcatttcctcccaatccatcccgcctccaaacccgaactccaagtcgccccgcatcgatggcgcccaaggccgagaagaagcccgcggcgaagaagccggcggaggaggagcccgctgccgagaaggcgccggccgggaagaagcccaaggcggagaagcgtgtcccagcaggcaagtccgccggcaaggagggcggcgagggaaagaggggccggaagaagggcaagaagagcgtggagacctacaagatctacatcttcaaggtgc

SEQ ID NO: 40138 - DNA, 234 bp, Zea mays
cccctcagcgcgacgaaggtaagatgttcctgcggaggatcctgaccggcgggggcggcctggcggccctgagggcggcgcgcgccgtgaaggagacgacggggatcgtgggccttgaggtggtgcctaacgcgcgagaggttctggtagggctctacgagcgcacgctcaaagagatcaaggccgtccccgaagacgagggttaccgcaaggccgttgaatccttcaccggtc

SEQ ID NO: 40139 - DNA, 223 bp, Zea mays
atccgcacctctctccatctccctgctcctccgccttcttcttgatccagccaagccagggatcgccatgtcggactcggaggagcaccacttcgaatcgaaggccgacgccggagcgtccaagacctacccgcagcaggctggcaccgtccgtaagaacggcttcatcgtcatcaagaaccgcccctgcatagttgtggaggtttctacctcaaagactggt

SEQ ID NO: 40140 - DNA, 183 bp, Zea mays
cgccccctgtcccgctaggatccccccgaaaccctcccccaaaaccccagagcggagaagagcgcaagatgttcggcttcgggcaccacggccaccacggccagaacccgccggcgcacggcggcgtgcaccagcccaccttcaagatcttctgcaaggccgacgaggggtactgcctcaccg

SEQ ID NO: 40141 - DNA, 276 bp, Zea mays
gtcgtgtgcaccctttaactcgggctaactatcttgcttcaccacctcttgttgttgcttatgcacttgccggaactgttgatattgattttgagaaagagcccattggatttggaaaggatggcaaggaagtctacttcagggatatatggccctcaacagaagaaattgcgcaggttgtccaatccagtgtgctgcctgacatgttcaagggcacctatgaggctatcacaaaaggcaacccaatgtggaaccagctaactgtcccagaagcgt

SEQ ID NO: 40142 - DNA, 234 bp, Zea mays
ccagccgccaccaggtgcagagtctttcgtcatctcttctccggcgaagaacccccagtcgcccaccagatcacttgttaaactttgttgaggggtgatggcggtttctttcgcaaacctcaactccgaggcagggcttaaaaagcttgatgagtaccttctcactcgcagctacatcactggctaccaagcttccaaggatgacttggctgtctacacttcgttttcggctgc

SEQ ID NO: 40143 - DNA, 303 bp, Zea mays
gtctctgtcaccaagattggggtatggggtggaggtggagggtcggcgcaggacatcacgacgacggagccaccacagcgtctgcacagcctctccgttcgaactggttttgccgtcgactccatcgagttcacgtatactgatagaggtggccagaggcgcactgctgggcgatggggtggacttggcggcaaccttcgaacggtgagcagagcagcaagtccctacgaccctacctacctttgattcatgcagcatgtatatcttcctcatgcacatgcgtgcagatcgatcttggcgacg

SEQ ID NO: 40144 - DNA, 201 bp, Zea mays
ctgccgggtccttaataaagagcagcagcgcaaggtgagccgccagcttgccccaggttggtagagcgagcgagaagaaggcaatggcggcggagagcttcctgttcacctcggagtccgtgaacgaggggcacccagacaagctgtgcgaccaggtgtcggacgcggtgctggacgcctgcctggcgcaggaccccgaca

SEQ ID NO: 40145 - DNA, 203 bp, Zea mays
  unsure (1)..(203): unsure at all n locations
ggccgagctgcagcgcgccgtggagcgcggtccggctgctccgcccgcacggcgcggccgtggtnggagtacaccagccaggcctacaccaagagcatcccgggccactacgtcgtctactgggagctcctgcaggccaaggggggcgccgcggtggacggggagacgctggaagggtgctgcctcgagatggaggaggcgct

SEQ ID NO: 40146 - DNA, 251 bp, Zea mays
ggctcgagctcccaaggtcccttttttttactcgatctggaagcgccgcagtagcagccatggacatgagcgagacaggcggtaaggcgaagaagggcgcggcggggcgcaaggccggcgggccgacgaagaagtcggtgtcgcggtcctccagggccgggctgcagttccccgtcagccgcgtcgggcggtacctcaaaaagggccggtacgcgcagtcgtaggcacgggtgcccccgtctacctcgccg

SEQ ID NO: 40147 - DNA, 223 bp, Zea mays
cttcggcttcattgtcacaaggttcgagttcgtcaccgtctaatacgactgtgcgatggaggaagaggcgaggagaagatgcagatcttcgtgaagaccctgacggggaagaccatcaccctcgaggtggagagcagcgactccgtcgacaacgtcaaggccaaaatccaggacaaggaagggattcccccagatcaacagcgactgatattcgctggcaagc

SEQ ID NO: 40148 - DNA, 297 bp, Zea mays
gtcaaatttgcccttcctgtctcggactctcggttccctcttcccggcgcaccagcctacctcgccgacgccaggccgccacgccgccggagacatgaaccagcccgtgcagaagaacaccctctacgtcggtgggctggcggaggaggtggacgagaaaatcctgcacgccgcgttcgtgcccttcggtgaggtcaaggacgtcaagacgccgctcgaccagtccacgcagaagcaccgctccttcggcttcgtcaccttcctggagcgcgaggacgccgccgctgccatggacaa

SEQ ID NO: 40149 - DNA, 294 bp, Zea mays
ggctcatgcagggcaagttgagggcgacgccatcatcgttatggacgcattcgcgctccccgttgagggcaccgagaccagggtcaatgcccaggccgatgcctacgagtacatggttgactactcaaccatcaacaagcaggctggaaggttggagaatgtggttggctggtatcactcacaccctggctatggatgctggctgtcaggaatcgacgtgtcaactcagatgctcaatcaacaattcacagaaccattcttggctgttgtgatagaccccacaaggaccgtttc

SEQ ID NO: 40150 - DNA, 193 bp, Zea mays
cccgagctcagcttagctccactccagctccaatcacagtcgtgaccagagcgcgagagctagctagagggccgtgaaaatgccgatcaataggatcgccctggggagccaccaggaggtgtaccacccgggcgccctcaaggcggcgttcgctgagttcatctccaccctcatcttcgtcttcgccggccag

SEQ ID NO: 40151 - DNA, 180 bp, Zea mays
aaacctcttgtctgttgcatacaagaacgtcattggagcccgccgcgcctcatggcgcatcatctcctccatcgagcagaaggaggagggccgaggcaatgaggaccgagtaacactcatcaaggattatcgtggcaagattgagactgagctgaccaagatctgtgatggcatcctcaa

SEQ ID NO: 40152 - DNA, 215 bp, Zea mays
cacagcccgaagccccctcctcgctgacttggctcctccgtcgtggccggagcgaaggggaccaacgacgcattagctgggtgaactctttcaaaaggggcaggtgcgctagtttgaatggctgctacaaagcttcaggcctattggaaccaccctgctggccccaaaaccattcatttctgggcgccaacattcaaatggggtatcagcattgc

SEQ ID NO: 40153 - DNA, 207 bp, Zea mays
gcgaacaagcaatccgaattctctgcgatttctctagatctcgaccacccctactagttttggttcctcctttcgttcgagagagcgtttctagtggcaatggcgaagagcgagggtccggcgatcgggatcgacctcggcaccacctactcgtgcgtcggcgtgtggcagcacgaccgggtggagatcatcgccaacgaccagggg

SEQ ID NO: 40154 - DNA, 103 bp, Zea mays
cgggactacccgctgagtttaagcatataaataagcggaggagaagaaacttacgaggattcccctagtaacggcgagcgaaccgggagcagcccagcttgag

SEQ ID NO: 40155 - DNA, 210 bp, Zea mays
ggaacctcaggctctttcactttgctgttcaattcggaaaatgtggagatctcaccaagcagcaatgaaagttataccattgaaggttccatcaggccagcgtcatgtgtattttgtgtcagatgatgataaaaaggaatcccacagtttatctaggcctttgctaagctcgggaggaacctctactgatgttgagcaacagttcataaa

SEQ ID NO: 40156 - DNA, 179 bp, Zea mays
ctggcgaggcaaaagcgcaaacgcgaccacagacagagcgcgcttacaaggccttttttttttttgagataacaaggaggagaggaggagatggcggtcacgatcacctgggtgaaggcgaggcagatcttcgacagccgcggcaaccccaccgtcgaggtggacgtgggcctcagcga

SEQ ID NO: 40157 - DNA, 98 bp, Zea mays
cttctctccttttgctcggaacgcacacacagcccggtccccgatatccgatcccctcgtcgatccaagatgcagatcttcgtcaagaccctcactgg

SEQ ID NO: 40158 - DNA, 308 bp, Zea mays
ggcaaacgcggctgcgagcggggcgcccctctcccacaccccagcagccgccagcccgcacacacctccctcgcgcgctcagggtttcggaatggaagccgaggcggcggccaagaggacgcgggacagcggggaggacgccgccgcggcggggatctccgccgtcatcccgggatggttctccgagatcagccccatgtggcccggtgaggcgcactctttgaaggtggacaaggtgctgttccaagggaagtcagactaccaaagcgttatggtctttcagtcctctacgtacgggaaggtgctcg

SEQ ID NO: 40159 - DNA, 306 bp, Zea mays
cctaaagctgctggtgatattggatctgtgctacctgaagaagcttcacttgttgcatatcttattgatgcagtcactggacgcatacttcatcgtgtaactcatcatggtgcacaaggccctgtacatgcagtcttgagcgagaactgggttgtttatcattattttaatctgcgagctcacagatttgaaatagcggtgattgagatatatgatcaatctagggcggacaataaagatgtcatgaagctcatacttgggaagcataatctttcagcaccaattacatcatacgcccgccctgag

SEQ ID NO: 40160 - DNA, 303 bp, Zea mays
cgactcttctcctcccacctgccgggtccttaataaagagcagcagcgcaagaggttggtagagcgagcgagaagaaaggcatgggcggcggagagcttcctgttcacatcggagtccgtgaacgaggggcacccagacaagctgtgcgaccaggtgtcggacgcggtgctggacgcctgcctggcgcaggaccccgacagcaaggtggcctgcgagacctgcaccaagacgaacatggtgatggtgttcggcgagatcaccaccaaggcgagcgtggactacgagaagatcgtgcgcgacac

SEQ ID NO: 40161 - DNA, 298 bp, Zea mays
ctaaggtgcgctcccagatcctctctcaagagtttgggtgggacaaggatcttgccaagaagatttggtgcttcggacctgagacaaccggcccaaacatggttgttgatatgtgcaagggagtgcagtatctcaatgaaatcaaggattctgttgtagctggtttccagtgggcatcgaaggagggtgcactggctgaagagaacatgcgcgggatttgcttcgaggtctgtgatgtcgttcttcatgccgatgctatccacaggggtggtggccaggtcattccaactgccaggag

SEQ ID NO: 40162 - DNA, 296 bp, Zea mays
tgatcgtccacctgtacccgttcctcaagggtctggtggggaggcagaacaggacgccgacgatcgtcatcgtctggtccatcctgctggcctcgatcttctcgactctgtgggtccgcgtcgacccgttcctcgccaagagcaacggcccgctcctggaggagtgtggcctggactgcaactgaagtgggggccccctgtcactcgaagttctgtcacgggcgaattacgcctgatttttttgttgttgttgttggaattctttcctgtagatagaaaccacatgtccccggcat

SEQ ID NO: 40163 - DNA, 294 bp, Zea mays
atcaatatcagtgaggatatatatgcaggattcaactcaactctgcgtcaaggatgcataactcatcatgaatatattcaggttggcaaaggtagggatgttggacttaatcagattgcactatttgaaggaaaagttgctggtggaaatggtgaacaagttcttagccgagacatatatagactcggacaactttttgactttttcaggatgttatctttctacgtgacaactgttggattctacttctgtactatgctaaccgtgctgaccgtgtacatatttctctatggg

SEQ ID NO: 40164 - DNA, 297 bp, Zea mays
ggacatgatcacccacgccgacaccgacgtggtgatcgtgggcaccgggtccgcgggcctgtcctgcgcgtacgagctgtccaaggaccccaccgtgagcgacgccatcgtggagcagtccgtgtccccgggcggcggcgcgtggctgggcgggcagctgttctcggccatggtggtgcgcaggccggcgcacctgttcctggacgagctgggcgtgggctacgacgaggccgaggactacgtggtggtcaagcacgcggcgctgttcacgtccaccgtgatgagccggctcctggc

SEQ ID NO: 40165 - DNA, 297 bp, Zea mays
ctcagatcctgtccgaatccgagctaagggatggcaaccggtagtgaagcctcgaaggcagctgaggctgtggttgactggcataaacacgacagcaagaggatgctccatgcggtttaccgtgttggggatctggaccgcacaatcaagtactacacggaatgctttgggatgaaactgctgaggaaaagggatgttcctgatgagaagtacaccaatgccttccttggctttgggccagagaacaccaactttgcagttgaattgacatacaactatggcgttgacaagtatgac

SEQ ID NO: 40166 - DNA, 299 bp, Zea mays
cgccgtcggcaactaccgcgtcgccgagctggaagccgcgccgcgcacgttcctgtgcttctcgctcgcgctcgcgtgagcaaacggacacggaatcgggctcaggcaggccgtaccactacggcgaggagagtttccggcactggacgcgctcccggcagggccggttcagggtgctggaacggttcacccacgagctgctggaggtgatgttcgtgaaggaaggcgagggcgtcatcgtgctgctccgcggcgggaagacggagtcgttctgcgtcagggagggcgacgtcatggtc

SEQ ID NO: 40167 - DNA, 278 bp, Zea mays
aagagccttgcgatcggcacgacgtcagcgcggaggatgcacggccaccagcagcagccgtacccatacgggctgcggcaagacccgctgcggcggatgcgaggtctggacgtgaaatcggcgctccaggccagcccgcgcacgtccacggtggccacggccgcactcgtcgtcccgctgggtaccgcgctgctgtgcgcgtcggggatcgcgctggcggcgaccgtgaccggtctcgcgctcgccacaccgcccctcgtgattttcagcccggtgct

SEQ ID NO: 40168 - DNA, 289 bp, Zea mays
  unsure (1)..(289): unsure at all n locations
agccgaagcgcgtgaccttcgtgacgggcaacgccaagaagctggaggaggtccgcgaccatcctcgggtcttccgtcncattccagtcgctcaagctcgaccgcagtgcctgaactacgaagggagccagagtacatatccaaagagaaagcacgaatcgctgcatctcaggtgaatgggcctgtactggtggaggacacctgcctatgttttaatgcgctcaaaggcctaccagaaagtggtttcttgagaagattgggcatgaaggtttaaataatctgttaaaag

SEQ ID NO: 40169 - DNA, 295 bp, Zea mays
ggagcagcagcagcaggcggcgccgaggagcggcatcccactcagtgcttgcaaccatggctaggggattgaagaagcacttgaagaggctcaatgcgcccaagcattggatgctcgacaagcttggcggagcttttgctcccaagccatcttctggacctcacaagtccagggagtgccttcctctgatcctcatcatcaggaacaggctcaagtatgctctgaactaccgtgaggtcatttctatcctgatgcaacgccatgtacttgttgatggcaaggtcaggactgacaa

SEQ ID NO: 40170 - DNA, 279 bp, Zea mays
cgaccttctaggtggcttgaaatggacttggggagtgtggattggggattgtatctgaatacactattttggaacctcaactattgggattcaatcagcacattggctggtgaagtcgagaatccaaagagaaccctaccaagagcgctttcttatgctctagttctagtggtgggaggatacctctacccattaatcacttgcacagcagcagttccaatcgttagggagcactggtcagatgggtatttttcagacatcgcaagaattctcggtggc

SEQ ID NO: 40171 - DNA, 287 bp, Zea mays
ctcacaacccagtcgctcaaaaccctagagctctcgcctgctcgcctccgccgccggagcgagctccccatcttcatccgtcaaccatggcgacccagatcagcaagaagaagaagttcgtcagcgacggtgttttctacgccgagctcaatgagatgctgacgcgggagctggcggaggatggctactctggcgtggaggtgcgcgtcacgccgatgcgcacggagatcatcatccgcgccacgcgcacgcagaacgtgctcggcgagaagggccgcaggatcagg

SEQ ID NO: 40172 - DNA, 284 bp, Zea mays
caattagctcatcgactccagattggagaactcgacaccatgaaggtgctgatcgttcgccttgctctcctggcgctcgctgcgagcggcgcctccagtacaagcggcggctgtggctgccagacaccaccgtttcatctaccgcctccgttctatatgccgcctccgttctatctgccgccgcagcagcagccgcagccatggcaataccccactactccaccgcagctaagcccgtgccagcagttcggatcctgcggcgtcggcagcgtcggcagcccgtt

SEQ ID NO: 40173 - DNA, 283 bp, Zea mays
  unsure (1)..(283): unsure at all n locations
tgcgcgagctgtccctcgcgctgctgtgcgtgtggctcgcggcctgcgcgctggcccccggccccgcggacttcagcaagatggtcggggtgtacgagctcaggaatgggngtttctccgtcaggctcaccaacttgtgcgccagggtgatgtccgtcgtcctcccagatcgcaaagggaattttgctgatttcgtccttggcagagacaccgtcgctgaatacttcaacgatacctcttacttcgggccgataactgggcgcatagcacagcgagttgcccg

SEQ ID NO: 40174 - DNA, 264 bp, Zea mays
gtgtttttagggtgagcccgtccaagatggccatgcgtccccgcgcacctcgccagctgatgtcgtactaggctaggggattgaagaagcacttgaagaggctcaatgcgcccaagcattggatgctcgacaagcttggcggacttttgtaagtcaaaaatattttctagctttggtacctacaatcttctgtacttccccatttgtctaatgcttcaggttgttcttttttctgtagatctgtgtaccttatccttgctatac

SEQ ID NO: 40175 - DNA, 256 bp, Zea mays
tcggggctggcgctgacggcctccgtggtggggctggccgtggccacgccggtgttcctgatcttcagccccgtgctggtccccgccgcgctgctcatcgggacggccgtcatggggttcctcacgtcgggcgctctggggctcgggggcctgtcctcgctcacgtgcctcgccaacacggcgcggcaggcgttccagcgcactccggactacgtggaggaggcgcgccgcaggatgccggcgccggggtgagtgc

SEQ ID NO: 40176 - DNA, 215 bp, Zea mays
ctcacttctgcgccgccacccactacaggtaaggaagacgaggacggcaggatgtcgcaccgtaagttcgagcacccgaggcacggctccctcggcttccttcccaggaagcgctcctcccgccaccgcggcaaggtgaagtcatttcccagggatgaccccaagaagccttgccatctcactgccttccttggctacaaggctggcatgactca

SEQ ID NO: 40177 - DNA, 266 bp, Zea mays
cggtgggctggcttctcctccccctcttaccaagtcctcctcgggttagggttccttagggttttgtggaggggcgatggcggcggctgatgtggagtaccgttgcttcgtcggcgggcttgcctgggccaccagcaacgagtcgctggagaatggcttcgcctcctacggcgagatcctcgactccaaggtcatcaccgaccgggagactgggaggtctcgcagcttcggcttcgttaccttctcctccgagaactgcatgctcg

SEQ ID NO: 40178 - DNA, 270 bp, Zea mays
cacgctttgttaacaaagaattccctcatagccgccgccgccgccgccgccgccgctcatctcgccgagaggtgacgggaccgaggaactcgccgagttctaagatagagaatcgcttttcacagcctggggtctgctgcgtagggtggtgttgaaggggagaagtttaagatctgttccacagatcacgcgtgcgcgctcgcgaatcgggggttccacacatagcttcgtcggtttgaatttgatgtactaatggagtctaagggtggc

SEQ ID NO: 40179 - DNA, 264 bp, Zea mays
tcatccccgacccccgcaccgcagcgtaaaccctagtccccggcggcgaccttgcggcctccgctgcgctctgactggtgcgcgtttagacgaggagctgcggcggccaagaccaatcgaccatggctacccgtatccagtttgagaacaactgtgaaattggtgttttctccaagctgacaaatgcttactgtctggtagcgattggagggtcagagaacttctacagtgcctttgaggctgagcttgcagatgccatccctg

SEQ ID NO: 40180 - DNA, 255 bp, Zea mays
gtaggaataggagcttatcttgctcgacttggtatacggtgcatacagcgtcttgaccagcctattattttaacagggttttctgccctgaacaagctccttgggcgggaagtgtacagctcccacatgcagcttggtggtcctaagatcatggcgaccaatggtgttgtccacctcactgttccagatgaccttgaaggtgtttccaatatattgaggtggctcagctatgttcctgcaaacattggtggacct

SEQ ID NO: 40181 - DNA, 253 bp, Zea mays
ggcgaggcaaaagcgcaaacgcgaccacagacagagcgcgcttcaaggccttttttttttgagataacaaggaggagaggaggagatggcggtcacgatcacctgggtgaaggcgaggcagatcttcgacagccgcggcaaccccaccgtcgaggtggacgtgggcctcagcgacggcagctacgcgaggggggccgtacccagcggcgcatccactggaatatatgaggccttggagttgagggatggagga

SEQ ID NO: 40182 - DNA, 252 bp, Zea mays
ggcaaggcaacccggaggcaggccatggacaagtggggtggcaagccggacgtattggttgcctgcgtcggcggcggatcaaacgccatgggcttattccatgagtttgttgaggatcaagatgtgaggctggttggagtggaggcagctggccatggcgtagacaccgacaagcatgcggcgactttgacacagggccaagtcggagttctccatggatccatgagctatttgctgcaggatgatgacgga

SEQ ID NO: 40183 - DNA, 248 bp, Zea mays
ggcccttccatgatacagcagatgcagcagccttgcaatgagtgcaaggggactggagagagcatcaatgagaaggaccgctgcccagggtgcaagggtgagaaggtcgttcaagagaagaaggttcttgaggttcatgttgagaaggggatgcaacacaaccagaagatcaccttccctggtgaagctgatgaagcgcctgatactgtcactggagacattgtattcgtcctccagcagaaggatca

SEQ ID NO: 40184 - DNA, 248 bp, Zea mays
atcttttctcgtttagaacctctaaaatttcccccactcgccagtcgcagcagcacctgtagcagccatggacgccagcggagccggtagcaaggggaagaagggggcggccgggcgcaaggcaggcggccccaggaagaagtcggtgacgcggtccgtcaaggccgggctgcagttccccgtcggccggatcgggcgctacctcaagaagggccggtacgcgcagccgtgggcactggcgcccccgt

SEQ ID NO: 40185 - DNA, 249 bp, Zea mays
acacgcgtcgcatccgctccacaggatcctctgcgccaccgcaaccgtgtgaccgcccgtggcgccggcgatcccgatccgccgacccgtcccagccccgctcgcagccatgtcgccgtcggagccgacgcgggaggagagcgtgtacatggccaagcttgcggagcaggcggagcggtacgaggagatggtcgagttcatggagcgcgtcgccgctacgccgggggcgccggcggcggggacgagctc

SEQ ID NO: 40186 - DNA, 252 bp, Zea mays
cgagcatcaatattggcatgcggctggactcctctacacattgctgccaaggaaaggaacaagaaggctgtgagattcctgattgagaatggagcattccttcctcctgagatgaatgaccataggttcaatccccccctccattactgctctgggttagaatgggcgtatgagatgaagcgcatgcaggatgaaagcgattcgcctggcgaaacttcgttgagctcggataactagagagaaagcagcagg

SEQ ID NO: 40187 - DNA, 253 bp, Zea mays
gtaactgtcgaggttcagaaatacatgtctggaaatggtatcgaaataagagagtatgaaactgttcaatcagatgcaagtttgcttgcatctggcaagctacaaagttctgtacatgtggaaaagtatatggatgaggtggagagttcaaaaatttggattgattctggctcatgttgccttgcactctactcaaaattgagtccacatcaagttttgacgcttcaatcaccaattgcccttccaaaggctg

SEQ ID NO: 40188 - DNA, 232 bp, Zea mays
atctccctgtgcgacaacccagccctcatggacagagatgaaactcgtgccttattcagcccttgtagcataagaagggccaggaggatcctaaactcgatccccagcaaagacactggtggatatactgattgccggggaatcaaatgcctgcgtcaagtagtagcagatgggattaccgcaagagacggttttccatcgacagcggacgatatctttctgacagatggag

SEQ ID NO: 40189 - DNA, 305 bp, Zea mays
acggtgggaaaagcatatatggacgcactttcaaagatgagaacttcaaattggttcacactggacctggagtggtcagcatggctaatgctggaccgaacaccaacggcagccagtttttcatttgcattgtcaagacgccttggttggatggaaggcatgtcgtgtttggccaggtcgtggaagggatggatattgtaaggctgatcgagtcacaggagactgacagaggtgaccgtccgaagaagaaagtagtcatcagcgagtgcggggagcttccagtggtctaagcgttactcatctgt

SEQ ID NO: 40190 - DNA, 300 bp, Zea mays
gtcattgccaccggcaagttctcaaatatcctgaaattctttgttaaggaggttgatccatccacgggtgaagctgaagatgatggtgtcgaggatgagtaccagcttgaagatcttgaaatcgtttctgctgattatatgttgaaggtgggagtatctaacttccgaaatgcctgggaaaacatggatccagagactgagcgagttgacgagtatgggcttggagtaagggagagtttggctgaggctgtaagtgctgttataagcatccttggcatgcagccttgtgagggaactgac

SEQ ID NO: 40191 - DNA, 300 bp, Zea mays
atcaaatttaaaggattccatgaagattatcatatctggaaaaaacaatgggatgaataatgagctacacaacagcatcagctcagcaattcttcatactcgcagaattcttggcatcttggaagccgttttctccctgaagccatcatcagttggtacctcatggagctatagctcaaatgaaatagttgcagcagctatggttgctgctcatgtttctgagttatttcgtcggtccaggccatgccttaatgcactctctgcactaatgagatgcaagtgggatgctgagatttcgac

SEQ ID NO: 40192 - DNA, 228 bp, Zea mays
ggaaatagaaccaaggtttccattgtttggtgggtggcaaacaaccttcactgttggttatggtttaccacttgaagactttgttttctattctgatggaaagagatttctcaatatcacattaggttctccattggaggaaattctcattgaaaagcttatcgtaaaggttgttctacctgaagggtcaaaggatatcgaagtttcagctccctttccaacacagca

SEQ ID NO: 40193 - DNA, 223 bp, Zea mays
aaattggatgctttatctgaaataactttttccaaatgtcagaggcacaccctgatgcgatacaaggcgagggaggtgctacattggaagcatatagcaatgatcttgcgtacttgaagagaaaggttgatgctggtgctgaccttattgttacacaacttttctatgataccgacatctttctcaagtttgtgaatgactgccgccaaattggtattacttg

SEQ ID NO: 40194 - DNA, 221 bp, Zea mays
cacacactcactatacactgctctgctgcagcaagaaggaagaagctagcgcctccctagctctcgttgtcagcaatggccaccaccgccgcgtccagcctcctcaagtcctccttcgcgggctcccggctcccttcggccacgcgcaccacctccccgtcgtccgtggccgtgtgcaccccgcgcgccggctgctgccccatccgcgcgtccatctcctc

SEQ ID NO: 40195 - DNA, 221 bp, Zea mays
gctgaagccgaacttcctcggcacaaagttcacgatattcgacagccagccgcctcccgacgctgttgcgctaccaaacaacagaccgagcaaaaggcagtcgaagcaagtgtcaccgagactgccactaggcaactacaacgtcgccacggtcacgtatgagctcaccgtcctgcgcaacagggggccaaggagaatgcagtgcaccatgcactcgatac

SEQ ID NO: 40196 - DNA, 218 bp, Zea mays
gatgactacatcggctttaaggttaagacgacgagcccgaagaagtactgtgtccggcccaacagcggcatcgtgccacctcggtccaccagcgatgtcattgtgacaatgcaagcacaaaaggaggcgccaccagacatgcagtgcaaggacaagtttcttgtgcaaagtgtcgttgtggcggaagggaccttagtcaaggacatcactggcgatat

SEQ ID NO: 40197 - DNA, 232 bp, Zea mays
cgaaggcgaccctccctccttcgctccttccgcgccgcctcccggccgtcgccgccatggtgaagtactcgcaggagccgggcaaccctaccaagtcggctaaggccatgggcagggatctgagggtccacttcaagaacacaagggagacagcctttgcgcttcgcaagttgtctttgaccaaggctaagcgataccttgaggatgttattgctcacaagcaggcaattcc

SEQ ID NO: 40198 - DNA, 177 bp, Zea mays
tgttggcttctcctccccctccggttcgggttcgggttcgtgaggttctccggggttcggtttcgtgggtgggcggatctagatggcggcgtcggatgttgagtaccgctgcttcgtctgctgcctctcctgggccacggacgaccactccctccacaacgccttcagcacctacgg

SEQ ID NO: 40199 - DNA, 284 bp, Zea mays
atgacctacatgttcaagtacgacaccgtccacggccactggaagcacagcgacatcacactcaaggactccaagacccttctcttcggtgacaagccggtcaccgtctttggcatcaggaaccctgaggaaatcccgtggggtgaggctggcgctgagtatgtcgtggagtccaccggcgtcttcactgacaaggacaaggctgctgcacatctcaagggtggtgccaagaaggttgttatctctgccccaagcaaagatgcacccatgtttgttagtggtgt

SEQ ID NO: 40200 - DNA, 226 bp, Zea mays
cgaagcgccgcccgctcgctcgcctccgctccggcagcgagctctatcccccgcgacgagcagcagctgccaacgaagcacgcagaccggggaataaatattggtattggtagtgtgatatctataagaagtcaagcccttggtgagaggattaggccagttctcacggtgaacaagatggacaggtgcttccttgagcttcaggttgagggtgaggaagcttatc

SEQ ID NO: 40201 - DNA, 231 bp, Zea mays
caaatactgtggaatttgattttagtggaaactatcttgccattggtggttcagatataagggtctaccaagtagctaatgttaaggccgaatggaatctcatcaagacattaccagatttatctggaacagggaaagtaacttcggtaaagttcggagcagatgctaagtacatagccgtaggttctatggaccgcaatctacggatatttggcctccctggagacgacc

SEQ ID NO: 40202 - DNA, 230 bp, Zea mays
gctgagaggaaggaatctgctgagagcacaatggtggcctataaggctgctcaggacattgctctggctgagctggcacctacccatccgataaggctgggacttgctcttaatttttcagtgttctattatgagattctgaactccccagacaaagcttgcaacctggcaaagcaggcgtttgatgaagctatctctgagttagacagccttggtgaggagtcatacaa

SEQ ID NO: 40203 - DNA, 223 bp, Zea mays
cacccgagcatatcacagtgacagacacgatggtgagcgccagaattgttgtcctcctcgccaccctcctatgcgctgccgccgcagtcgcgtcgtcctgggaggacgacaaccaccaccaccacgggggccacaagtccgggcaatgcgtgcggcggtgcgaggaccggccctggcaccagcgcccccggtgcctggagcagtgcagggatgaggagcggga

SEQ ID NO: 40204 - DNA, 222 bp, Zea mays
cgatgtcatttccatccctaagacaatggagaactacaggctgctttatgacaccaagggccgcttccgtcttcacccaatcagggatgaggatgccaagttcaagctctgcaaggtgaggtccgttcagtttggccagaacggcatcccctacctgaacacctacgacggccgtaccatccgctaccccgacccgctcatcaaggccaacgacaccatcaa

SEQ ID NO: 40205 - DNA, 222 bp, Zea mays
ccttcaccgtgagggcctttatattggggtggctacgcagggccatggattgatgcagcagcaaggagctgtgttggtctcgaggagttgcgcatgaagcggatggttgtgtttgatgagaaccttgagctgctagctcggtcattcctgagattcaaagtccttgtccttatcagctgcgaggggtttagcaccgatggtctagctgctattgcgagtcac

SEQ ID NO: 40206 - DNA, 220 bp, Zea mays
ctttgtttgcaaagctcctcctcgatccatcgatcactgcaccggccggcggcaccgcgctcgcaggggctagccaacgagacggcagcaatggcggaccgtgaccgcagcggcatctacggcggcgcccacgccacctacgggcagcagcagcagcagggaggaggcgggcgcccgatgggtgagcaggtgaagggcatgctccacgacaatgggccga

SEQ ID NO: 40207 - DNA, 220 bp, Zea mays
gcccggtccccgatctccgatcccctcgtcgatccaagatgcagatcttcgtcaagaccctcactggaaagactatcaccctcgaggtggagtcttctgacaccattgacaacgtcaaggccaagatccaggacaaggagggcattcccccggaccagcagcggctcatcttcgctggcaagcagctcgaggacgggcgcacacttgccgactacaacat

SEQ ID NO: 40208 - DNA, 213 bp, Zea mays
cgcctccttcagtccatcccctcaaccccggctgccaaaagccggcacaccgaagcggcggccatggcggactaaagcggctgtcagagagccgggacctgacgcggatcgagcgcatcggcgcgcactcccacatccgggggctagggctggactcctccatggaggcgcgcgacgcctcggagggcatggtcggtcagctgcccgcgcgcc

SEQ ID NO: 40209 - DNA, 140 bp, Zea mays
gcgacgccaccaccacacgttcacggtagcgagagcatatcgtcgtcggcggcgaagatggtgtcgctgaagctgcagaagcggctcgccgcgagcgtcctcaagtgtgggaaaggcaaagtctggcttgaccccaatga

SEQ ID NO: 40210 - DNA, 233 bp, Zea mays
taataaataaggcgcccgcggtgcccatcaattcgtgtcaccgcgtcccgagagcgcaaatcattccgcgcgacgcaaaaaccctagcccagccaccgacccctctcatggcaaccaccaccacccaggcgagcctcctcctccagaagcagctaagagatctcgcgaagacccggtggatgggttctctgctgggctggtcgacgacagcaatgtcttcgagtggcaggtca

SEQ ID NO: 40211 - DNA, 135 bp, Zea mays
cgggttcgtgaggatctccggggttcggtttcgtgggtgggcggatcgagatggcggcgtcggatgttgagtaccgctgcttcgtcggcagcctcgcctggaccacggacgaccactccctccacaacgccttca

SEQ ID NO: 40212 - DNA, 209 bp, Zea mays
gctttgcagtgaacgagtgagcatgtgcggcatacttgctgtgctcgggtgcgccgacgaggccaagcagggcagcagcaagaggtcccgggtgctggagctgtcgcggcggctgaagcaccggggccccgactggagcggcctccggcaggtgggcgactgctacctctcccaccagcgcctcgccatcatcgacccggcttctggcg

SEQ ID NO: 40213 - DNA, 137 bp, Zea mays
atgggcttcaacccgggctctttctcttatggtgacctggttaagagggtgctgaggtgctttggtccaactgagttctctgtcaccgtgaccatcttcggtgatcgggacaatgcgaagacctgggggacgaaact

SEQ ID NO: 40214 - DNA, 149 bp, Zea mays
ctagccaagcgcgcacctcggtgacctagctagctacctagctagttcaggcgacgatatggcgtctggtcaggagagcaggaaggagctggaccgcaatgctcgcgagggcgagaccgtcatccccggcgggaccggcggcaagagcg

SEQ ID NO: 40215 - DNA, 186 bp, Zea mays
atagacgcgtgacatagtcatctgaattcggcactagattcctcccaacaccacctcgcctgcgatcttcgtagcctccgtcgcgtcgagcatcgatcatgtcggcctactgcggaaagtacaaggatgagctcatcaagaatgctgcctacattggcacccccggcaagggtatccttgctgctg

SEQ ID NO: 40216 - DNA, 144 bp, Zea mays
gtgcaggaaacgggattgcagctaaagcagattaacaactggttcatcaaccaacgcaaacggaactggcacagcaacccaacatcctcgggtgaaaagactaagaagaaaaggtgatattgatccagagcaatcttgacgatg

SEQ ID NO: 40217 - DNA, 142 bp, Zea mays
gcgaacaagcaatccgaattctctgcgatttctctagatctcgaccacccctactagttttggttcctcctttcgttcgagagagcgtttctagtggcaatggcgaagagcgagggtccggcgatcgggatcgacctcggca

SEQ ID NO: 40218 - DNA, 141 bp, Zea mays
gtgaggttctccggggttcggtttcgtgggtgagcggatcgagatggcggcgtcggatgttgagtaccgctgcttcgtcggcagcctcgcctgggtcacggacgaccactccctccacaacgccttcagcacctacggcga

SEQ ID NO: 40219 - DNA, 144 bp, Zea mays
gcctatccaataagaagaagaagctggaacgcaggatgaagattgcagacctcaaacagatatgcaacagacctgacgtcgtggaggtctgggatgcaactgctgcagatccaaaattgcttgtatatctcaaggcgtaccgaa

SEQ ID NO: 40220 - DNA, 128 bp, Zea mays
gcagatcgcgcaccgtcgccggatcaagctaaagcggggagacttcgccgacgaggcctccgcaccgacggagtcggacatcgaggagacgctcaagcgcctcgtctcgcagctcggcaagtcgcggg

SEQ ID NO: 40221 - DNA, 137 bp, Zea mays
caacgagaagagcggcggcgcgggcggacaaggagcaggcggaggaggagctgtgccaagccacaatgggtatctcacgcgactcgatgcacaagcgccgtgccaccggtggaaagcagaaggcctggaggaagaag

SEQ ID NO: 40222 - DNA, 141 bp, Zea mays
ccttctcagcgtaaggaggggagccggagatgttttactcgcagttcattttggccaaaaagggtcccctcgggaccatatggattgccgcgcacttggagcggaagctgcgcaagaaccaggtcgcggacacggacatcg

SEQ ID NO: 40223 - DNA, 139 bp, Zea mays
cgcagttccccgaccacaccgttcctccgagcccaggagcagccccgcgccaggaggaagtttgttcttttaacaatatgtcgagggaggagaatgtttacatggccaagttggctgagcaggctgaaaggtatgagga

SEQ ID NO: 40224 - DNA, 138 bp, Zea mays
gcagccaaaccctacataggcgccgccgcatgctccccccgcatcgtcgccaaagatgcagatctttgtgaagactctgacggggaagaccatcactttggaggtggagtcatcggacaccatcgacaatgtgaaggc

SEQ ID NO: 40225 - DNA, 139 bp, Zea mays
accctccctacatgattgcactggcctgcatatacatagcgagtgttttgaaagataaggacaccacagcatggtttgaagagctccgtgttgacatgaacatagttaagaatatctctatggaaatattagacttcta

SEQ ID NO: 40226 - DNA, 305 bp, Zea mays
cgggaagagggagtcgttctgcgtcagggagggcgacgtcatggtcatccccgcgggcgccgacgtgtactcggccaacacgcaccagtcggaatggttccgcgtcgtcatgctcctcagccccgtcgtctccacgtctggacgcttcgaggagttcttccccatcggaggcgagagccccgagtccttcctcagcgtcttcagcgacgacgttatccaggcgtcgttcaacactcgccgggaggagtgggagaaagtgttcgagaagcagagcaagggggagatcacgacggcgtccgaggaac

SEQ ID NO: 40227 - DNA, 306 bp, Zea mays
ccgtcggcgtcgagcagcggcggcgatgacgacgagcctgaagaagaaccggaagaagcgcgggcacgtgtcggcggggcacggccgcatcggcaagcaccggaagcacccgggaggccgcggcaacgccggcggcatgcaccaccaccgcatcctcttcgacaagtaccacccgggctacttcggcaaggtgggcatgcgctacttccacaggctccgcaacaagttccactgcccgtcggtcaacgtggagaggctctggtcgatggttcccgccggcaaggccgcggaggcggtcggcgcgga

SEQ ID NO: 40228 - DNA, 234 bp, Zea mays
ctttgtttgcaaagctcctcctcgatcgatccatcgatcactgcaccggccgggggcaccgcgctcgcaggggctagccaacgagacggcagcaatggcggaccgtgaccgcagcggcatctacggcggcgcccacgccacctacgggcagcagcagcagcagggaggaggcgggcgcccgatcggtgatcaggtgaaaaagggcatgctccacgacaaggggccgacgcgtcc

SEQ ID NO: 40229 - DNA, 234 bp, Zea mays
ctctcaccagcatccctcctcgcggactcaatgaaatcggtggaaagcatgggattgggcgtatcgacatggtggaaaacaggctggtcggcatgaagtcacgtggggtctatgagacccccggtggcaccatcatggcagccgcggtacgcgagttggagtccctgaccctggacagggagaccatgcagtggaaggacatcattgccctcaagtacgccgagctggtctatg

SEQ ID NO: 40230 - DNA, 235 bp, Zea mays
gaagctcaaatactgatctcactgatccagtatggctatggcaaaggcaggcgcgccgagggtctcggcggcccagctggtgactctcgggctatcactcctctgcgctgtcgccggcccggccgccgcgcagaactgcggctgccagccaaacgtatgctgcagcaagtttggctactgcggcacgaccgacgagtactgcggcgacgggtgccagtcgggcccgtaccgctcg

SEQ ID NO: 40231 - DNA, 239 bp, Zea mays
cacagcacaggcagctcgagagagagagagagagaaagatgtcgtggttcgggcaccaccaccacaaccagccgactcccccggcgtcgggccccaaccaggtgttcaagatcttctgccgcgccaacgagaactactgcctggccgtccgcgacggcgccgtcgtgctggccccggtcaaccccaaggacgaccaccagcactggtacaaggacatgcgcttcagcacccgggtcaag

SEQ ID NO: 40232 - DNA, 238 bp, Zea mays
gaagctaccgttctccagtgctcctcaggacgataggaaccttcctgatgtgcacttgggactctatgatgatgttctagtcttcgataatgttgagaaggtactattcaagaatttctgttctcgttcgtaactaactcatgatgttctctgtgtttcagagtattgtcctacagttgcagttatgattaagtattaatcactttgccttggagcaccaattttttggaggctgaat

SEQ ID NO: 40233 - DNA, 235 bp, Zea mays
gtagacatgtctacgaactcaagggacctcatagatcgagagttagctgcatttagccatagcttggataatagcttgtgcaggatgccagcaacccctcaggcccttttggaggctgtgggttctaacggcgtgacaggatcagaagcacttgcagctgctgagaaacatgcagctttgttgactgcaagagctggtgccagagatccatctgctgtgccgtctatacgccgca

SEQ ID NO: 40234 - DNA, 241 bp, Zea mays
ctccgcctctcgagtctcgtccacccgtcatcctcctagctcctctactcgccagtcgccatgggcaagattaagatcggaatcaacggcttcggaaggatcggcaggctcgtggccagggtcgccctccagagcgaggatgtcgagctcgtcgccgtcaacgaccccttcatcaccacggactacatgacctacatgttcaagtacgacaccgtccacggccactggaagcacagcgaca

SEQ ID NO: 40235 - DNA, 230 bp, Zea mays
cacggttgtccctcctgggaaggacttcattgacataatcctgtcccgcacccaaaggcagacaccgacagttgtccacaagggatatgctatctcccgcattcgtcagttttatatgcgcaaggttaggtattcccagcagaacttctatgaaaagctctcgaccatcatagatgagtttcctcgactggatgacatccaccctttctatggtgatctcctccatgtgc

SEQ ID NO: 40236 - DNA, 234 bp, Zea mays
atccccaaagcctccgacccccttcctctctccctccgccgccgctgcgcacgcagggaacaagcgacatgggcgtctacacctttgtgtgccgcaacaacggcggcgagtggaccgccaagcagcactccggcgagatcgaggcttccgccgctaccccatacgagctgcagcgccgcctcgtcgctgccgcctccgcggccgactctgcctacggcgtccagtcgtccttct

SEQ ID NO: 40237 - DNA, 233 bp, Zea mays
atctaatcattttgtgatagtcttgttgtgccttgattcaaatgcatagctacattattgagggcagagtatgttatctgactatgtgtgaccgctcttatccgaagaaacttgcattccagtacctagaagatctgaaaaatgaatttgagagggtcaatggcaaccaaattgaaactgctgcaaggccatatgcttttatcaagtttgatacattcatccagaagactagg

SEQ ID NO: 40238 - DNA, 149 bp, Zea mays
cattgatattaggacaaaagcacgtgaggtgttgcagagggaggacgatctaaatgaaattgtgcagcttgttggtaaagatgcgctggcagaatctgacaagattacactggagacagcaaagctactgagagaagattatttggcac

SEQ ID NO: 40239 - DNA, 208 bp, Zea mays
gacaagacctaccctgctgggttcatggatgtcatttccatccccaagaccaatgagaactacaggctgctgtacgataccaagggccgcttccgccttcacccaatcagggatgaggatgctaagttcaagctttgcaaggttaggtctgttcagtttgggcagaagggcatcccttatctgaacacgtatgacggccgcaccatcc

SEQ ID NO: 40240 - DNA, 227 bp, Zea mays
gcgataagtgcacccagggaagaactcctctgactacagatgcagatgctcaaccagttcgagtttgtgacagatgcatggctgaagtaacgcaaagacttaacaatgcaagggaagtggctaatcgacctattgttcacagccacgaggatcttgccaaaaaacttcaggaagccatggatataaataaaaggtcgtcttcaggaacaaggtcttcagatgtttct

SEQ ID NO: 40241 - DNA, 140 bp, Zea mays
accaattcctcgcaactgggctcccccgcctccacgacactgccccccgcctcaagtccgccgcctccattcttcagctcatgtatcctccgtagtctgcctgtacctattggctgaagaagagctgacccccactttat

SEQ ID NO: 40242 - DNA, 221 bp, Zea mays
ctcaaaccctagccgcctcctgcaagtttcagagctcaggaatctgcgccatggcgagtgagacggagaccttcgcatttcaggctgagatcaaccagctgctctcactcatcatcaacaccttctactccaacaaggagatcttcctccgcgagcttatctccaactcttccgatgcgctggacaagatcaggttcgagagtctcactgacaagagcaag

SEQ ID NO: 40243 - DNA, 221 bp, Zea mays
atgaagctaaggattcagatggccgtccggatgaagaggttgcagatgagtattggggcaaccatttagctcgaaatgactctatcatagttgatatctgccaggttagttttgaatgaatggtcagtacaagtcaacattagtttgccccatctgcaagaaagtttctgtaacatttgacccgtttatgtatttgtctttgcccctgccttcaacaacaa

SEQ ID NO: 40244 - DNA, 166 bp, Zea mays
ccgcggaggagatcggaggggaggcggcggatgatttcatgttcgctgaagacacgttcccctccctcccggacttcccttgcacttcgtcgccgtccagctccaccttctcgtccaactcctcgtcaaactcctccagcgcctacaccaacacggcaggaagagc

SEQ ID NO: 40245 - DNA, 314 bp, Zea mays
tcaccaccgccgcgtccagcctcctcaagtcgtccttcgcgggctcccggctcccttcggccacgcgcaccacctccccgtcgtccgtggccgtggccaccccgcgcgccggcagctgccccatccgcgcgtccatctcctcctctcccaccccgccctacgacctgacgtccttccggttcagccccatcaaggagtccatcgtgtcccgcgagaagacccggcgctacatgacggacatgatcacccacgccgacaccgacgtggtgatcgtgggcgccgggtccgcaggcctgtactgcgcgtacgagctg

SEQ ID NO: 40246 - DNA, 216 bp, Zea mays
tggcttctcctccccctccggttcgggttcgggctcgtgaggttctccgggggtcggtttcgcgggtgggcggatccagatggctgcgtcggatgttgattaccgctgcgtcgtcggctgcctcgcctgggccactgacgaccactccctccacaacgccttcagcacctacggcgaggtcctcgagtccaagatcatcctcgatcgggagatgca

SEQ ID NO: 40247 - DNA, 306 bp, Zea mays
agcagccacagcagcctccttcctggcttcctcctctcactctcgctcgtgctgcgctcgctacctcgcttcgcattccattcgaggagagcggtgagaggggaggaaaggcaagatgttcatcgagagcttccgcgtcgagagcccccacgtgcggtacggcccgacggagatcgagtcggagtatcggtacgacacgacggagctggtacacgagggcaaggacggcgcctcacgctgggtcgtccgccccaagtccgtcaagtacaacttccggaccagaaccgccgtccccaagctcggggt

SEQ ID NO: 40248 - DNA, 308 bp, Zea mays
agaaggcaaacgcggctgcgagcgcggcgcccctctcccactccccagcagccgccagcccgcacacccctccctcgcgcgctcagggtttcggaatggaagccgaggcggcggccaagaggacgcgggacagcggggaggacgccgccgcggcggggatctccgccgtcatcccgggatggttctccgagatcagccccatgtggcccggtgaggcgcactctttgaaggtggacaaggtgctgttccaagggaagtcagactaccaaagcgttatggtctttcagatcctctacgtacgggaaggt

SEQ ID NO: 40249 - DNA, 312 bp, Zea mays
  unsure (1)..(312): unsure at all n locations
cgatccgccattgctcaccgcacaagtgcacgctcagctcacacacgcagctaagtagctaacgccgtatgangcaacaagaaaaggctcgacatggccgaggagaagaagcagggcctgcagctgctggacttctgggtgagcccattcgggcagcgctgccgcatcgcgctggacgagaagggcctggcctacgagtacctggagcaggacctggggaaaaagagcgagctgctcctccgcgccaacccggtgcacaagaagatccccgtgctgctgcacgacggccgccccgtctgcgagtccctcgtc

SEQ ID NO: 40250 - DNA, 249 bp, Zea mays
gaacattctaacttggctcttgctgtggcatgctttcttgatcctcgatacaagaaaaaagttatagagtattacatgaagaaattccacggtgatgggtaccatgtggaacttgaaaaaattgttaatgtggtaagagggctctattgtttttattctagctctacacctgcaccagcaaagagtacatcaccggaaccagctaatagtgcatcagatattttaatggcaagtgtatctgatgaactg

SEQ ID NO: 40251 - DNA, 303 bp, Zea mays
cgctcccctacctctccagcatcctcccgtctccgtcgtctcgtctccgctcctcacctcgccagccatgggcaagatcaagatcggaatcaacggtttcggaaggatcggcaggctcgtggccagggtcgccctgcagagcgaggatgtcgagctcgtcgccgtcaacgaccccttcatcaccacggattacatgacgtacatgttcaagtacgacaccgtgcacggccaatggaagcacagcgacatcgccctcaaggactccaagacgcttctcttcggcgagaagccggtcaccgtctt

SEQ ID NO: 40252 - DNA, 302 bp, Zea mays
cgctaggatacacccgaaaccctcccccaaaaccccagagcggagaagagcgcaagatgttcggcttcgggcaccacggccaccacggccagaacccgccggcgcacggcggcgtgcaccagcccaccttcaagatcttctgcaaggccgacgaggggtactgcctcaccgtccgcgacggcaacgtggtgctggcccccgccaacccgcgcgacgagcaccagcactggtacaaggacatgcgcttcagcacccaggtcaaggacgaggagggcaaccctgcgttcgccctcgtcaacaag

SEQ ID NO: 40253 - DNA, 299 bp, Zea mays
cccacctcccggtccggcagcagagagcgggggtgcagagagatcgagatccggaggccgcgagtgggagcgccaccaccagcgactgcggcaatggcgggcacggtgacggtcccggggtcgtcgaccccctccacgccgctgctcaaggacgagctcgacatcgtgatcccgacgatccgcaacctcgacttcctggagatgtggcggcccttcttccagccctaccacctcatcatcgtgcaggacggcgacccgaccaagaccatcaaggtgcccgagggcttcgactacgagct

SEQ ID NO: 40254 - DNA, 305 bp, Zea mays
acacaacacaactcgtaggcagcgagcgtctctcctcttcctctcccacgcaccgcgccaaggaaggcagagagagatcgccgctcctcttctctccgtcggtggtgcggttgaccgccctcctcgagcgagatctcgctgcagtccctcgagatctggtcacagatctatccgacaagatggtgaagatctgctgcatcggtgctggctatgtcggtggcccaaccatggctgtcattgccctaaagtgcccagacattgaggttgtcgttgttgacatctccaagccccgcattgaggcatgg

SEQ ID NO: 40255 - DNA, 292 bp, Zea mays
aagacccttctcttcggtgacaagccggtcaccgtctttggcatcaggaaccctgaggaaatcccgtggggtgaggctggcgctgagtatgtcgtggagtccaccggcgtcttcactgacaaggacaaggctgctgcacatctcaagggtggtgccaagaaggttgttatctctgccccaagcaaagacgcacccatgtttgttgttggtgtcaatgaggacaagtacacctcggatgttaacattgtttccaatgctagctgcaccacaaactgccttgctccccttgcta

SEQ ID NO: 40256 - DNA, 292 bp, Zea mays
attgggaagacatctcctattccacaagatgacgctcaagggcaagcttctagatactcaaagcgtgaccatagtactgctctgcgtcacagtgaaagtggcatggtagatcaggttctgttaacaacaaatgcggatggtctaagatttgtcaaggttaggatgcgatctgttcgcataccacaaattggcgacaagtttagcagcaggcatggacaaaaaggaactgttgggatgacttacactcaagaggatatgccatggacaatcgaaggcattacacctgatatta

SEQ ID NO: 40257 - DNA, 294 bp, Zea mays
gaaaggagtacttccaacaaactgctccgctttcagcacctgcccagcggaggaagagtgcggattgcggcggcgccggcggacgaaacaatggcgtcggcgagggacgagcatcttgatgggattcgcgcgctgatggcggcccactcgccgcagctccacgggctggtcgtcccctccgaggatgcccaccagagcgagtacgtgtcggagcaggataaacggcgggagttcatctccgggttcacagggagcgctggcttggctcttatcaccatgaaagaggcattgttg

SEQ ID NO: 40258 - DNA, 294 bp, Zea mays
ggaccgacgatgccgaagagtgcggcggggcggcggacgaagaggagttccgcgccgaggtggaggagcgcctcatcaacgaggagtacaagatctggaagaagaacacacccttcctctacgacctcgtcatcacccacgcgctcgaatggccctcccttaccgtgcagtggctccccgaccgcaccgagccgccggggaaggaccactccgtccagaagatgatcctcggcacgcacacctctgacaacgagcccaactacctcatgctcgcgcaggtccagctgcccctcg

SEQ ID NO: 40259 - DNA, 294 bp, Zea mays
cgagagagacgaatcttccgaatctctcggtggcgatggcgctctccgaccgctcccgcgagtcgctcctcccgagcttcctctacgcctcctcggcgcgctctttcgctgccacaggagccgccgcgcgcctccctgtctcctccccagcgcctgccacggctggagcaggaggcggcgtgccgttctcgatccaggcgcccaaggagaagatcgagatgtactcgccggccttctatgccgcctgcactgccggaggaatcgccagctgcggagctcaccacatggccgtca

SEQ ID NO: 40260 - DNA, 293 bp, Zea mays
cccgagcatatcacagtgacagacacgatggtgagcgccagaattgttgtcctcctcgccaccctcctatgcgctgccgccgcagtcgcgtcgtcctgggaggacgacaaccaccaccaccacgggggccacaagtccgggcaatgcgtgcggcggtgcgaggaccggccctggcaccagcgcccccggtgcctggagcagtgcagggatgatgagcgggagaagcggcaagagcggagcaggcacgatgccgacgaccgcagcggcgagggctcgtcggacgatgagcgaga

SEQ ID NO: 40261 - DNA, 306 bp, Zea mays
actcgcactcgcacgtacaccacactagttaccacagacgacgggcgccatgaaagtcccggtgcttctcctcctggtctccctgtgcttctcgctcgcgctcgcgtggcaaacggacacggaatcgggctcaggcaggccgtaccactacggcgaggagagtttccggcactggacgcgctcccggcagggccggttcagggtgctggaacggttcacccacgagctgctggaggacgccgtcggcaactaccgcgtcgccgagctggaagccgcgccgcgcacgttcctgcagcccagccacta

SEQ ID NO: 40262 - DNA, 311 bp, Zea mays
agcctcgatctccccgttcctcgtgttccgacggagggtggcgggcgactaatggggacgggggcggggagcgcgcgggctctggccgtggcgttcgccgtctcgcttctcgcctgctctggcgccgtcgctgtcgccagggcgcaggacaccgagcggatcgaaggaagtgctggtgatgtgctcgaagacgatcccgttgggaggctcaaggtgtatgtctacgagttgccgaccaagtacaacaagaagatggtggctaaagactctaggtgtctcagccacatgtttgccgcggagatcttcatgca

SEQ ID NO: 40263 - DNA, 307 bp, Zea mays
gtggagctggctgtgacggccatggaggagctggttcggatggcgcactaggacgagccgctgtggaacgcgccggcagcgggcacgacgggtctgctgagacgctgaacgaggaggagtacgcgcgcatgttcgtccctgctggagggctcgggctaaaaaagcagtacgggttcaagtcggaggcgtcgcgcgacagctccgtcgtcatcatgacccatgccagcctcgtcgagatcctcatggacgtgaatcagtatgcgacggtgttctcgagcatcgtgtcgagagctgcgacgctggaggt

SEQ ID NO: 40264 - DNA, 168 bp, Zea mays
gcgcaccatccgcgggatgattccgcacaagaccaagaggggggaggcggctctggcgaggctcaagacgtacgagggcgtaccgccgccgtacgacaagactaagcgcctggtcatccctgacgctcttaaggttctgaggctgcaaccaggacacaagtactgcct

SEQ ID NO: 40265 - DNA, 269 bp, Zea mays
ggaacgcacacaccgcccgtccccgatctccgatcccctcgtcgatccaaagatgcagatcttcgtcaagaccctcactggaaagactatcaccctcgaggtggagtcttctgacaccattgacaacgtcaaggccaagatccaggacaaggagggcatccccccggaccagcagcggctcatctttgctggcaagcagctcgaggacgggcgcacacttgccgactacaacatccagaaggagagcaccctccaccttgttctccgcc

SEQ ID NO: 40266 - DNA, 306 bp, Zea mays
gacctctaaaacctagcagaggcccgcgccgccgccgccaaccgcgacgaggaaggaagcaggaacgcgatgccgaagtcgaagcgcaaccgcccagtgaccttatcgaagaccaagaagaagccaggtttagagcgcaagggcaaagtagtcgccgagataaaagatgctgtcgacaaatacagcagcgcctatgtttttacctacgataacatgaggaatcagaagctcaaggacctcagggagcagctcaagtcttctagcaggatttttctcgctggaaagaaggttatgcagatagcgctg

SEQ ID NO: 40267 - DNA, 309 bp, Zea mays
tccacgcggaagcagcgcctcgcaacgctcctacccaatggcgccgacgtcgaagctgtcgatgggcatcaagcgcgcgtcgcggtcgcacgcgtaccaccgccgtgggctctgggccatcaaggccaagaacggcggcgtcttccccaaggccgagaagcccgccgccgccgcggaacccaagttctaccccgccgacgacgtcaagcctcgcgttcccagcacccgcaagcctaatcccaccaagctcaggtcgatcatcacgcctgggacggtgctgatcctcctcgcggggcgcttcatggggaa

SEQ ID NO: 40268 - DNA, 220 bp, Zea mays
cagaacttggagtgctgcctttttgttctctttccttacttttcgtacatgttagcagaaggacttggcttgtcagggattgtttctatattattcacagggatggttatgaagcattacacatattccaatctttcagacaactcacagcgctttgtttctgccttttttcatttactatcatctttagctgaaacatttgtgttcatctatatgggtt

SEQ ID NO: 40269 - DNA, 299 bp, Zea mays
gctcttgacattgataagtggaggacatcaaaggaaagcttcaagacatccatcggtatctttggcatcctcatattgctcatactactgggacgagtggcatttgttttccctatatccattttgtcaaatatcatgagtggaagttctgaaagaaccccgatcacattcaagcaccaggttgttatttggtgggctgggctcatgagaggtgctgtttccattgcactagcatacaatcagttcacattctcaggtgtaacatcggatccagttcatgccaccatcatcaccagcac

SEQ ID NO: 40270 - DNA, 298 bp, Zea mays
gacaggctctccgcaattattcagaagcatctccataggcaggtcattgataatggccttcttccaatacttgtgaagatagtgaagaaaaagacggatttaccagttcgagaaaaaatatttcttctgttagatgcaacacaaacatcccttggtggagctaaagcaaggttccctcagtactatgaggcatactatgagttggtgtctgctggtgtgcaattttcaaatcggccaaatgttcttgtcacacgagcagaagtgccagtcccagaaacgagaacagaaccaaataatg

SEQ ID NO: 40271 - DNA, 184 bp, Zea mays
atcgtgaacccgccgccgacgcagcagcaggagacgcgccaaggagagcccgcaaggaggcgactatgagggccaagtggaagaagaagcgcatgaggaggctgaagaggaagcgccgaaagatgaggcagagatccaagtaggctgatggggattgtggatggtggtgtcggcatagttgtgt

SEQ ID NO: 40272 - DNA, 297 bp, Zea mays
gctgaaagggcaactcttgttacccaggagaaacttcagattggaagcaacagaatgaagatgatgaggctttctgatgtgtggatacgacctgcatttggtggtcgtgggaggaagctcacaggaaatcttgaggctcatttcaatggtttcagatattctacttcaaggtctgatgagcgtgtggacatcatgtttggaaatataaagcatgcctttttccagcctgcagagaaagaaatgattactctccttcacttccatttgcacaaccatatcatggttggaaacaagaag

SEQ ID NO: 40273 - DNA, 206 bp, Zea mays
cgcgctggcatcggagaaggcagcggcggtggtggtcgcggagaaagcgggcggcgaaggtggaggaggagatggcgagggtccgtatgatgcgatcgtggtcgggtcagggatcgggggcctggtggcggcgacgcagctcgcggccaagggcgcgcgggtgctggtcctcgagaagtacctcatccctgggggaagctccgggt

SEQ ID NO: 40274 - DNA, 296 bp, Zea mays
gcattcaggctgatggtcagatgcccggtgacaagaccattgggggaggtgatgatgctttcaacaccttcttcagtgagactggcgctgggaagcacgtcccccgtgctgtttttgttgaccttgagcccactgtcatcgatgaggtgaggactggcacctatcgccagctcttccatcctgagcagctcatcagtggcaaggaggatgcagccaacaacttcgctcgtggtcactacaccattggcaaggagattgttgacctgtgccttgaccgcatcaggaagcttgcagat

SEQ ID NO: 40275 - DNA, 298 bp, Zea mays
tggcgaggcaaaagcgcaaacgcgaccacagacagagcgcgcttcaaggccttttttttttgagataacaaggaggagaggaggagatggcggtcacgatcacctgggtgaaggcgaggcagatcttcgacagccgcggcaaccccaccgtcgaggtggacgtgggcctcagcgacggcagctacgcgaggggggccgtacccagcggcgcatccactggaatatatgaggccttggagttgagggatggaggatctgattatcttggcaagggtgttcttaaggctgtcagcaacgt

SEQ ID NO: 40276 - DNA, 296 bp, Zea mays
cgacatcgtctcttcgtccccacgagcaaccgataatccgccggcgctgagatgttggtttatcaagacctcctatctggcgacgagctcctgtcggattcattcacctacaaggagctcgagaacggcgtcctgtgggaggtcgagggaaagtgggtcacccaaggtcctgttgatgtagacattggtgccaatccatccgccgagggtggtgaggatgaaagcgttgatgacacagccgtgaaggtggttgatattgttgacacattccgtctacaggagcaacctccttttga

SEQ ID NO: 40277 - DNA, 195 bp, Zea mays
cttacccaaatgttgctgatgccattcttgctaatggtatgttcagtcattacgaccgccctcgtattgctcagctatgtgaaaaggccggtttgtacttgcgagccctccagcattactcagagttgcctgatatcaagcgtgccattgtaaatactcatgccattgagccacaggcacttgttgagttctttg

SEQ ID NO: 40278 - DNA, 298 bp, Zea mays
gaaatcgattcccccgcatccgatctcttcggtgctagagaaatataggccgccgcctcctcctcattcggtgaaaggtgggcggttagggttgggagatctcttgactcacgacacgagcagcagaattcgtcgagggccgctggttgctgcgagaggtccgggccttcgtgggatcttgaaaattgaatgttctaatggagtccaagggtggcaagaagaagtctagcagtagtcgttcctccctgatgtacgaagctccccttggctacagcatcgaggatatccgccctgcagg

SEQ ID NO: 40279 - DNA, 301 bp, Zea mays
gccatcaagaagctgcaggccggcggcgggcagggcgaccgcgagttccgcgccgaggtggagatcatcagccgcgtgcaccacaagaacctcgtctccctcgtcggctactgcctctacggcgagcagcggctgctcgtgtacgagtacgtgcccaacaagaccctcgagttccatctccacgggacagggagtggcaggccgacgctggactggccgaggcggtggaggatcgcggttggctccgcgaagggcctcgcgtacctgcacgaagactgttatccaaagatcatccatcgtg

SEQ ID NO: 40280 - DNA, 289 bp, Zea mays
cgcggcgccgccagcccgccatcacataacttcggcttctatcccttcgtaaacccttctctcttcttcccgcggcctgctcgttctatctgtccagcagacttgaggttccgagcggccggaaaccagcggcaaccgtcggcatggcgctcgtattgcattctggggctggaaacaaaaatgccttcaaggcacttattgctgcagaatacagtggggtcaaggttgagttgaccaaggattttgagatgggtgtctcgaacaagacccctgagtttctaaagatgaa

SEQ ID NO: 40281 - DNA, 291 bp, Zea mays
ctcctgagcactttctcctcgtccccgacaagccaatcgaagccgagatacggccatggactccaccggcaccggagcagggggtatggggaagaagggagcggccgggcgcaaggtcggcgggccaaggaagaagtcggtgtcgaggtccgtgaaggccgggctccagttccccgtcggccgcatcgggcgctacttgaagaagggccgctacgcgcagctgtcggcaccggcgcccccgtctacctcgccgctgtcctcgaatacctcgccgctgaggtactgcaattt

SEQ ID NO: 40282 - DNA, 295 bp, Zea mays
ctcctccacccatccggccatcccccttctcacgcggctcgctcagggctcgagcgtctccccatcggaaccctaatcctctctttccctactcgcggaagccaactccaccggcaggggaagcggaagggaagcacctcggccccggcaagatggtgctcgcacagctgggcgggagcatctcccgcgccctggcgcagatgagcaacgccacggtgatcgatgagaaggtgctcaacgagtgcctcaacgagatctcgcgcgcgctcctacaggccgatgtccagttcaagat

SEQ ID NO: 40283 - DNA, 146 bp, Zea mays
cccgagcatatcacagtgacagacacgatggtgagcgccagaattgttgtcctcctctccaccctcctatgcgctgccgccgcagtcgcgtcgtcctgggaggacgacaaccaccaccaccacgggggccacaagtccgggcaatg

SEQ ID NO: 40284 - DNA, 294 bp, Zea mays
caacaatccttggcacatctaaccatacaaaccatcgcaacgcaacagcaacaacaatttctaccagcactgagccaactagctgtggtgaaccctgtcgcctacttgcaacagcagttgcttgcatccaacccacttgctctggcaaacatagttgcataccaacaacaacaacaattgcaacagtttctaccagcgctcagtcaactagccatggtgaaccctgccgcctacctacaacagcaacaactgatttcatctagccctctcgctgtggttaatgcacctacatac

SEQ ID NO: 40285 - DNA, 289 bp, Zea mays
gtttgctctagggtttttgccacgccgccgccgctctgccccttccaccccaccgatataccaagatgacggcgcaggctgcggaggagctcgccgcccagatcgagcagcagaagctcgaggagcagaagaccgaggcagaagaggttgtggtggaggaggatgacgaggatgatgaggatgacgatgatgatgacaaggatgatgatgaactggatggacaagaaggggatgggagtggcaagtcgaagcaaagcaggagtgagaagaagagccgcaagccatgctg

SEQ ID NO: 40286 - DNA, 285 bp, Zea mays
attcggtaatttttttggaagcccaagtccagagcgggtccagcccagttcatcctccacctgctccgccggctgctcttcttctcccctctcgctatatccccggggacctcacagccacatctctccactgctccgtccagcgcgtccacctcccaaacccctactcccccaggaagcaatggcttcccccacccagggccaggtcatcacctgcaaagcggcggtggcgtacgagccgaacaagccgctcgtgatcgaggacgtgcaggtggcgccgcgcag

SEQ ID NO: 40287 - DNA, 254 bp, Zea mays
ctcgatctcgcacctagggtttcgtctcgccgctctcgtcctccgcgaagatgccgaagaacaagggtaagggaggcaagaaccggaagcgaggaaagaacgaggctgacgacgacaagcgcgagctcgtcttcaaggaagacgggcaggagtacgcgcaggtgacccggatgctcggcaacgggcggtgcgaggccatctgcgtcgatggcacgcgccgcctctgccatatccggggtaagatgcacaagaag

SEQ ID NO: 40288 - DNA, 271 bp, Zea mays
gtgtacgtgacggtagccgacgcccggttctgcaagccgctggacacggcgctgatccgggagctcgccgccgagcacgaggtgctgatcaccgccgaggagggatccatcggcgggttcggctcccacgtcgcacactacctcagcctgaccggcctcctggacgggcccctcaaactgagatccatgttcctgccggaccggtacatcgaccatggcgcaccgcaggaccagatcgaggattcagggctgacgccgcggcacatcgccg

SEQ ID NO: 40289 - DNA, 279 bp, Zea mays
gtcggagtcatcaagagtgtggagaagaaggatccaactggagccaaggtgaccaaggctgccgcaaagaagaaatgatgtgtctggctggttctgtgtttgcttgagggatacctagtggaaacgtaaaatatctcgtcttgttcacgtcattgtctgaactatgctcgcaacgtttgcctggtcgatttagaactgttattttcgttaaaaccagagtgttatttaagacttatccgaacatctggtgagccatatatggttactagttttgttact

SEQ ID NO: 40290 - DNA, 307 bp, Zea mays
ggtggatacatcgaaatgacaaatcttcctccaaagacagtagatgagatctacaaggttgcatcaatagtactgagtccgaatgttcccgggcaaatctttatgggagtgatggttaaccctcctaaacctggagatatctcatacccgaagttcactgccgaaagcaagtccatcctcgaatctttgaggaggagagcgcgcatgatgacagacggtttcaacagctgccgaaatgtggtgtgcaatttcacagaaggagctatgtactctttcccccaaatacagctgccagcaagagccatcg

SEQ ID NO: 40291 - DNA, 151 bp, Zea mays
ggaggcggacggaaggcgaaagagtagcagcagcaggcggcgccgagtagcggctccccacctcgagcttgccaccatggctagaggattgaagaagcatttgaagaggctcaatgcgcccaagcattggatgctggacaagcttggcgga

SEQ ID NO: 40292 - DNA, 179 bp, Zea mays
gctgtggagacacagaccatgatgcagatcatccctgctgatccaggtcagcttgattcccatgagcgatctgtccctcgtgctggacaagtgtggttcccagattctgcaaccaagaccgctcaggcattattagacttcaaccgtgaaggattgcctctgttcatcctggctaattg

SEQ ID NO: 40293 - DNA, 292 bp, Zea mays
atggattaatgatcctgctatacctatagtcactggctttcttggcaagggatggagatctggtgcaataactagcttgggcaggggtggtagcgacttgacagctacaaccattggcaaagccttgggattaagagaaattcaggtttggaaagatgttgatggtgttttaacatgtgacccaaatatccatcctaaggcaaaacctgtgccatacttgacatttgatgaggcagctgaacttgcctattttggagcgcagttttgcatccaaatcaatgctgcagctaga

SEQ ID NO: 40294 - DNA, 169 bp, Zea mays
ccaggggcagtgatggcgacgaagaggagcgtgggcaccctcggcgaggcggatctgaaggggaagaaggtgttcgagcgcgccgacctcaacgtcccgctcgacgatgcccagaagatcaccgacgacacccgcatccgcgcctccgtccccaccatcaagttcctcc

SEQ ID NO: 40295 - DNA, 251 bp, Zea mays
agaagatagaaaagcgatgttgcaggcacagttttctcagatgcgccctgctgtaccaatgacacccactctagccccgcgccttccaatgtaccctcctatggctcctcagcaactcttctatggacaagcgccacctgctatgataccccctcagccaggatttggtttccagcaacaacttgttccaggcatgaggcctgggggtcctcatatgccaaattattttgttccagttgtccaacaccaac

SEQ ID NO: 40296 - DNA, 235 bp, Zea mays
gtcataatctcggcgtcctaccaggccacgatcgaggggttccagtcgaggggcttctcgcgggacgagagcgaggagctgctgcggcgtacgtgcacgtcgcgcaggaggcgcgcagggtcttcgcggcggagggcgacaggtcatcgcgccgcggacgcccgccggcgctggtggcggcctcggtcgggagctacggggcgtaccgggcagacggctccgagtacagcgggga

SEQ ID NO: 40297 - DNA, 264 bp, Zea mays
gtgagctttttcttgcaggttatgaaagctctaattgatatggaagctctccagccaacaggagatctctcaccggttaggaggtccatacaatttttcttggataatctgttgagccagacaccggatcagcaacagactctggctgcaattggagaggacttatttgctatagcacaagatcaaccttttcggtttccatccacatttacatttgttataagggcattctctactcttgaaggaattggatacatattagat

SEQ ID NO: 40298 - DNA, 99 bp, Zea mays
cgcacacaccgcccgtacccgatctccgatcccctcgtcgatccaaagatgcagatcttcgtcaagaccctcactggaaagactatcaccctcgaggtg

SEQ ID NO: 40299 - DNA, 308 bp, Zea mays
aaaaccttgggcacatgagcatgagcccttgacaaccttgtacgatgctgttcagtccatcaaacctacagttctgattgggacgtctggagttggaagaacattcacaaaagaagttgttgaggccatggcttccttcaatgagaggcctatcatcttttcactgtcaaatccaacctctcattctgaatgtactgctgaagaagcatataactggactcagggtcgtgcaatatttgccagtggcagtccatttgaccctgtggagtacgatgggaaggtttttgtacctggacagtcgaacaacg

SEQ ID NO: 40300 - DNA, 297 bp, Zea mays
gctgcgccgcgctacgctggtccagacgtttgggcagaagaaccatgtctgcctcagggaaggctccatcaccatcccgccatacgctccgcctcacaagataagagctcatatcgtcccgccagagacgcctcggtcgatcttcgtctacttccgcggcctgttctacgacaccgcgaacgaccccgagggtggttactatgcaaggggcgcccgtgcgtcggtgtgggagaacttcaagaacaacgcgctgttcgacatctcgacggagcacccgccgacgtactacgaggacat

SEQ ID NO: 40301 - DNA, 92 bp, Zea mays
cgacggacggagcaacggaggaagcaactacgcggcagccatggtgaacgttccgaaaaccaagaagacctactgtaagaacaaggaatgca

SEQ ID NO: 40302 - DNA, 300 bp, Zea mays
gtcaggtaatcgagcttggagagcttattaggacaaagcaaataacatcacgtgaacttacagatatatttctgaggagattaaagaggtacaatcctgttctagaagctgttattacatatactgaagatttagcatacaaacaagccaaggaggcagatgacttgctggcacaaggaaaatatcttggtaaatatattgctaaccaggctgatcctctaaggcattatcgccactattggcagcacttgcaccttttccctcagcttcatttagaattatgtctggtatacatagctt

SEQ ID NO: 40303 - DNA, 290 bp, Zea mays
gcgaggatgatctccctctagtatcatttcagtctgtctccaaaggatactatggagagtgtggtaaaagaggaggttacatggagattactggcttcagtgctccggtaagagagcagatctacaaggtagcttcagtgaacctgtgctccaatatcactggtcaaatccttgcgagcctcgtcatgaatccaccaaaggttggggacgaatcatatgcttcctacaaggcagagaaagatggaatccttcagtctttagctcgccgtgcaaaggcactggaagatgca

SEQ ID NO: 40304 - DNA, 287 bp, Zea mays
tcactgatgagattggacagaaagtgcagattgtaggagatgatcttctcgttaccaaccccaccagggtcgccaaggccatcaatgagaagacctgcaatgctctcctcttgaaggtgaaccaaatcgggtctgtgaccgagagtatcgaagctgtcaggatgtccaagcgcgccggatggggagtgatggcaagccacaagagtggcgagacagaggacaccttcattgctgacctctcagttggcctgtctacgggccaaatcaagacgggagccccttgccgg

SEQ ID NO: 40305 - DNA, 132 bp, Zea mays
gtcggatcgaacagctagggtttccaagatgttcgggcgcgcgccgaagaagagcgacaacacacggtactacgagatcctcggggtctccaaggacgcgtcccaggatgacctcaagaaggcctaccgcaa

SEQ ID NO: 40306 - DNA, 104 bp, Zea mays
gaataacatcgcgagacatcgtgaaataataataataagagcgcctgatatgtgatcagtggtgtactcgccattaagcacctgtggcaaccgaccattcgttt

SEQ ID NO: 40307 - DNA, 274 bp, Zea mays
agccgccgtcgtcgaaaccggccaagtccggtggtggcaagcaaaagaagaagaagtggagcaagggaaagctaaaggagaaggtaaacaacgcggtgctgttcgaccaggctacctacgacaagctgctctcggaggtgcccaagtacaagcaaatcaccccttccatcctctccgagcgtctgaggatcaacggctcccttgctcggagggccatcaaggacttgatggcgcgtagcctcattcggatggtctcggtccactcaagccagca

SEQ ID NO: 40308 - DNA, 250 bp, Zea mays
aggcacacacaccacaccacacctcctcgcttccacaccgctcgtctgacatctcgtcccgtcctttcgtttcgaagcctcgcgagccccgacgatggccaccgccgcggtgtcggtcgacgagaagctcgacaagcttcgcgccgaggtcgccaagctcgaccagatcagcgagaacgagaagtccgggttcatcagcctcgtgtcacgctacctcagtggggaagcggacagatcgagtggagaagat

SEQ ID NO: 40309 - DNA, 181 bp, Zea mays
gagaaaggcaggcggaggcggacaggccacccccgcacctcattccacaattatttgcgcccgtcccatgtcagtcggctttaaaaggacacgagcgcttaaacccccaccccatatccgcatccgctgcctccgcctctcgagtctcgtccacccgtcatcctcctagctcctctactcg

SEQ ID NO: 40310 - DNA, 244 bp, Zea mays
cacgtcagcacgcatatccacccaatccatcccgccaccaaacacgaaccccaagtcgccccgcatcgatggcgcccaaggccgagaagaagcccgcggcgaagaagccggcggaggaggagcccgcagccgagaaggcgccggccgggaagaagcccaaggcggagaagcgtgtcccagcaggcaagtacgccggcaaggagggcggcgagggaaagaagggccggaagaagggcaagaagag

SEQ ID NO: 40311 - DNA, 93 bp, Zea mays
ggatggcgctgagtatatcgtggagaccaccggcgtcttcactgacaaggacaaggctgctgcacatctcaagggtggtgccaagaaggttgt

SEQ ID NO: 40312 - DNA, 298 bp, Zea mays
tccagagcgaagatcgcgatcagagcaggagcaggcaacgcgcaccgaaatcttccaatccacaagactcgctacttcgcagttggcagactcgcccgcagcgagccgctagcaaccaagcagaaatgtcgctggtgaggcgcggcacgtgttcgacccattctccgtggacctcttcgaccccttcgacagcgtgttccgctccatcgtgccgtcgtcgtcgtcggcagcggcggcctccgagaccgccgccttcgccagcgcccgcatcgactaggaagagacgtccgatgcgcac

SEQ ID NO: 40313 - DNA, 109 bp, Zea mays
gcggcggagcacggaggcgaaggaggaggagcagcagcagcaggcggcgccgaggagcggcatcccactcagtgcttgcaaccatggctaggggattgaagaagcactt

SEQ ID NO: 40314 - DNA, 197 bp, Zea mays
gctctccttgctttcacgcttggagtgaagcagatgatttgctgttgcaacaagatggatgccaccacacccaagtactccaaggcccgttatgatgagattatgaaggaagtctcttcctacctgaagaaggttggatacaaccctgacaagatccactttgttcacatctctggtttcgaaggtgacaacatgat

SEQ ID NO: 40315 - DNA, 288 bp, Zea mays
gtcagttgttgacctcactgtcagaatcgagaagggggcctcttacgaggaaatcaagaaagctattaaggctgcttctgagggcccactcaagggtattatgggctacgtggaggaggatctggtttccaccgacttcaccggtgacagcaggtcgagcatcttcgacgccaaggccgggattgccctgaacgaccacttcatcaagctcgtctcttggtacgacaacgagtggggctacagcaaccgcgtcgtcgacctgatccgccacatgttcaagacccagta

SEQ ID NO: 40316 - DNA, 288 bp, Zea mays
gttgccgcttccaccaaagccacaccaaacccccgcttccagaaccttctcgaaactctccgcctcctcctctactcgctccgatggcgaaggaaccgatgcgcgtgctcgtcactagcgccgcagggcaaattggatatgctcttgttcccatgattgctaggggagttatgcttggtgcagaccagcctgttattctgcacatgcttgatattccgccagcagctgaagcccttaatggtgttaagatggagttggttgatgctgcatttcctcttctgaagggag

SEQ ID NO: 40317 - DNA, 125 bp, Zea mays
caaataaccaaagcctccgacacccttcctctcacccaccgccgccgcagcgcacgcagggaacaagcgacatgggcgtctacacctttgtgtgccgcaacaacgagggcgagtagaccgccaag

SEQ ID NO: 40318 - DNA, 93 bp, Zea mays
attttctgctggtgatgacaaacaagtaaaatgttgggatcttgaacaaaacaaggttattaggtcctaccatgggcatctgagtggtgttta

SEQ ID NO: 40319 - DNA, 177 bp, Zea mays
ctcgagcgtggaaacagtaacacagtctgaagctataaggaagcgctatcggtttttgagtcacttctcattaacaactacatttcagttctgtgaaattgacttgagtgatgtagtgtctcctaactcactggctccattcttggatgaaatcaagaagcgtgagaaacaaagaaa

SEQ ID NO: 40320 - DNA, 299 bp, Zea mays
gactgccacacctcccacattgctgtcaagtttgctgagctcattaccaagatcgacaggcggtctggcaaggagcttgagaaggagccaaagttcctgaagaacggtgatgctggtatggtgaagatgataccgaccaagcccatggtggtggagacattctcagcgtatcctccccttggtaggtttgctgtccgtgacatgagacagacggttgctgttggagttatcaagagtgtggagaagaaggacacgaccggcgccaaggtgaccaaggcggctgccaagaagaaatgatg

SEQ ID NO: 40321 - DNA, 239 bp, Zea mays
atcgatcacatcacaccaccagccgcagcgcacgaacgtacgactcatggcagatcgcgaccgcagcggcatctacggcgctgcactcggcgctgctggtgccctacttctcgtggaagtacagccaccggcgccaccactccaacacggggtccctggagcgcgacgaggtgttcgtgccgaggaccaaggaggcgctgccgtggtacgccccgtacgtgcacggcagccccgcgggc

SEQ ID NO: 40322 - DNA, 293 bp, Zea mays
ctaaaatgctaggccttgaaggacaagatattcatcaaagcaaccttggctggtcacctgtgtatgttgagtccaaccttggtgtgatgtcgattggtttcatgctgcctaatccagacgatgctgtcatatggaggggtccccgcaagaatggactgatcaagcagttcttaaaggatgtcgattggggggagattgactatcttgttgtggacgctcctccaggaacatctgatgagcacatctcgatcgtgcaataccttcaagccacaggaatcgatggcgcgataatc

SEQ ID NO: 40323 - DNA, 183 bp, Zea mays
accggcaggcggcggccctcgggcattgtcccagcgggagcaggacatccagatgatgctcgccgccgatgtccacatcggcaccaagaacagcgacttccaggtggagcgctacgtgtacaagcgccgcactgatggtatctacattattaaccttggaaagacctgggacaagcttcagtt

SEQ ID NO: 40324 - DNA, 285 bp, Zea mays
gaagaagatgataacactcaaaagctccgatggcgaggagttcgaggtggaagaagcggtggcgatggagtcgcagaccatccgccacatgatcgaggatgactgcgccgacaacggcatccctcttcctaacgtcaactccaagatcctatccaaggtaatcgagtactgcaacaagcacgtacataacgccgcagccgcagccgccgcctcgaaggccggttccgacgacgtgggttacgactccgccaacagcaccgccgcctccggtgaggacctcaagaa

SEQ ID NO: 40325 - DNA, 232 bp, Zea mays
aaacaactaaaccttgctagatctgctggaccacctgaattacgagattggacagatatggctgagtcgtatgacaacctcaataactctgttaaagttgctttggttgggaagtatactaatctgacagattcttacctatcagtggtgaaggctctcctacatgccagtgttgcctgttcgttaaagccatctatccagtggattgcagcttcggatcttgaagatgcaa

SEQ ID NO: 40326 - DNA, 281 bp, Zea mays
ttccactcggccactccctagcacatcaaaccctagctccgcccagccaccaaccatgtcggacatgatgcaaccgcagatcatcctgctcaaggagggcacggacacgtcgcaggggcgcgctcaggtggtgagcaatatcaacgcgtgcactgcggtgggcgacaccgtgcggaccacgctagggcctcgggggatggacaagctcatccacgacgacaagggcggagtcaccatctccaacgacggcgtccacatcatgcgcctcctcgacatcgtgc

SEQ ID NO: 40327 - DNA, 106 bp, Zea mays
ttcttctcctcgcctcatctccctagcctccacgacgcaagggagagtgacggaaagcgacgcggcgcgagcgatggagggccaaggggaagaggggaagcaccgc

SEQ ID NO: 40328 - DNA, 112 bp, Zea mays
tagaagagctgcggcgctggcggacaacgagcaggcggacgaggagttgttccaagccacaattgggtatctcgcgtgactcgatgcacaagctccgagccaccggtggaaa

SEQ ID NO: 40329 - DNA, 245 bp, Zea mays
tgccagaattgttgtcctcctcgccaccctcctatgcgctgccgccgcagtcgcgtcgtcctgggaggacgacaaccaccaccaccacgggggccacaagtccgggcaatgcgtgcggcggtgcgaggaccggccctggcaccagcgcccccggtgcctggagcagtgcagggaggacgagcgggagaagcggcaagagcggagcaggcacgatgccgacgaccgcagcggcgacggctcgtcgg

SEQ ID NO: 40330 - DNA, 307 bp, Zea mays
taggcattgctgaacacatgggtcggacacttcaaacaacttcaatttccactaacataaacgaaacgctagacttctcttgtgctctctttggtccagatggtggccttgttgcaaatgcacctcatgtccctgtgcatctaggagccatgtctagtactgtttgttggcagcttaacttttggggtgagaacctcaatgagggtgatgttcttgtaacaaatcatccatgctctggggggagccatcttccagacataacagttgtcacgctagtgtttgatcacggtaagcttgtcttttttgt

SEQ ID NO: 40331 - DNA, 206 bp, Zea mays
cgcaccggcagcaccagctccagctcgtcggaggacgacggcatgggcggaaggaggaagaagggaatcaaggagaagatcaacgagaagcagaccggaggccacaaggacgaccagcacgccacggcgacgaccggcggcgcctacgggcagcagggacacaccggcagcgcctacgggcagcagggacacaccggcggctccta

SEQ ID NO: 40332 - DNA, 180 bp, Zea mays
atggcacccaaggcggacaagaagccggcggcgaagaagcctgcagaggaggagcccgcgacagagaaggcggagaaggctccggcggggaagaagcccaaggccgagaagcgcctcccggcgggcaagtccgccggtaaggagggcggcgagggcaagaaggggaaaaagaaagcgaag

SEQ ID NO: 40333 - DNA, 303 bp, Zea mays
ctttcgccgccccatcagcccagcagttcttcgctgttcgttgcagttggttccatcggttgatcgaccggcctggagcagagagacagagagagatgggcaagtcctgggcgctcatcagccacctccacaccgtcgccgggtagttccgctgctccctcgcagttcgtttccgattcctcctagtccatctcttgggcacgctcgttgcctgacgtgtgcgtttgctgcttctttgtcttgtctgtccctccctcccgtttcgcaggccgagcatcaccctgctgtaccctctgtacgcgt

SEQ ID NO: 40334 - DNA, 278 bp, Zea mays
gcagtacccccgcgcccgagacgcaacaccgcgccacgagtaagtttgttcttttatcgatattatcgatatggcgacggacgagaatgtctacatggccaagctggctgagcaggccgaaaggtatgaagagatggttgagtatatgcgacaaggtggctaagactgtagatgtggaacacctcactgttgaggagcgtaacctcttgtcggtcgcatacaagaatgtgattagggctcgccgtgcttcatggcgcattgtctcttctattgaacag

SEQ ID NO: 40335 - DNA, 298 bp, Zea mays
tgtcaagggctctactaaagagaaggtggtcagagttgttgtgttgtccttccgcaatttgctggcaaagggtgcatttgctgcccagatgatcgatcttggattgccacaaatggtacaaaacttgaaagctcaagcatggactgatgaggatctgttagatgctctgaatcaactagaggtgggactcaaagaaaaccttaagaagttgagttcctttgataagtacaaacagcaagttcttcttggtcatctggactggtctccaatgcacaaagatccaagtttctggcgtgag

SEQ ID NO: 40336 - DNA, 161 bp, Zea mays
agatataatagcagaagatctgggggtaattactgaagatgtcgttcagctaaggaaatccattgggagccctgggatggcagttctccagtttgctttcggaggtggttctgacaaccctcatttgccacacaaccatgaaatggatcaagttgtgtaca

SEQ ID NO: 40337 - DNA, 300 bp, Zea mays
atttggaatggaatatctccatgggaagaatatagtgcattttgacttgaagagtgacaatctagttgtcaacctaagggatcatcaacagcctatatgcaaggatggtgatttgggattatcaaaggtcaaattccagacactaatctctggcggagtaagaggaacacttccttggatggcccctgagttgttgaatggcagcagcagccttgtctcggaaaaggttgacgtcttcacgtttggcattgtgatgtgggagctacttacaggtgaagagccttacaccgagctgcacta

SEQ ID NO: 40338 - DNA, 208 bp, Zea mays
acacacccgagcatatcacagtgacagacacgatggtgagcgccagaattgttgtcctcctcgccactctcctatgcgctgccgccgcagtcgcgtcgtcctgggaggacgacaaccaccaccaccacgggggccacaagtccgggcaatgcgtgcggcggtgcgaggaccggccctggcaccagcgcccccggtgcctggagcagtg

SEQ ID NO: 40339 - DNA, 297 bp, Zea mays
gtttgtccattcgcattggtctgaatactgtagctactagcgcgagtgccactgtgccgcagctgcctgctcgccattactgcaagctgtgttcaatcaaagcttaattaggctccctctacatctgatccagctaagtagctagccagcactacagaagggcgtggcaagaatcaggagagagatagcaggggggctagctagctgagctcgtgcgacgaagaatggccggaattggcaggaacatggtggcgccgctcctggtgctcaacctcatcatgtacatcatcgtcatcg

SEQ ID NO: 40340 - DNA, 262 bp, Zea mays
agcgaacaagcaatccgaattctctgcgatttctctagatctcgaccacacctactagttttggttcctccattcgttcgagagagcgtttctagtggcaatggcgaagagcgagggtccggcgatcgggatcgacctcggcaccacctactcgtgcgtcggcgtgtggcagcacgaccgggtggagatcatcgccaacgaccaggggaaccgcaccacgccgtcctatgtcggcttcaccgacaccgagcggctcatcggc

SEQ ID NO: 40341 - DNA, 292 bp, Zea mays
tcgagaacaaggaccaggtgctgtggtacacgctggggttccaccacatcccgtgccaggaggacttccccatcatgcccaccgtgtcgtcaagcttcgacctcaagccagtgaacttcttcgagaacaacaccatcctcaagcagcgcccgaccaaagaggatgatcagcccatctgtacagcctccaccgccgcgtagctactaggagggccgggggcgaactgattaaccggagacacatcaatcagcttgcatgcattgctgtgtgttgtgctcttgctaagctttat

SEQ ID NO: 40342 - DNA, 296 bp, Zea mays
gcagtatggacgtatagtggaaattgacttgaaaattccaccaaggcctcctggttttgcttttgttgagtttgaggacgcacgtgatgctgaagatgcaatatatggccgtgatggatacaactttgatggccataggtggaattagcccatggtggacgaggcacatcttcttttgatcgatctagcagctatagcagtgctggacaacgcggtgcctcaaaacgttctgattaccgtgttatggttactggattaccttcttcagcatcatggcaagatctcaaggaccatat

SEQ ID NO: 40343 - DNA, 208 bp, Zea mays
agtctacagggctatcttgaagccagacaatgaggtcaaaattttggtagatggggaagaaaagaagaaggcgaactatccttctgctgatgattttgagccagcacttatcccatccaagaccattcctgaccctgatgacaagaagccggacgactgggatgagagagctaaaattcctgatccagatgcagtaaagcctgatgac

SEQ ID NO: 40344 - DNA, 300 bp, Zea mays
gtgcaaatccctggcaaacaggagctgcgacagaaaaaccttttcagtgtcagtgattgtaagatgtattggcaaaacagtggagaatatcttgctgttcaagttgatagatacacaaaaacaaaaaagagcacctacactgggtttgagctgtttagaattaaggagagggatatcccaattgaggtccttgaactcgagaacaagaacgacaagatcattgcatttgcatgggaacctaaaggacatcgctttgctatcatccatggtgatggccctaagcctgatgttagcttctac

SEQ ID NO: 40345 - DNA, 286 bp, Zea mays
ctcctagctgaagatctcgagtgcaacgcaacgttggcgcttggcggccagtagtagcagcaaacttagcgtcgctccttcctactagacgagagatcgagaaaccatggccaagctccaagtcactcctggcgccgcgttcaccgagtgcaatgaactcaacttccagggcctgtacatgtaccacacgcccctgggtcccaaggccaaccaagctgcgatcctagagagcaacgccaagatcggcatcggtgccaccgtggttaacaactgggcagtgtatgac

SEQ ID NO: 40346 - DNA, 300 bp, Zea mays
ctacccatacaagattgtgatcaagacctgtggaactacaaagcttctgctcgctattccgaggatccttgaacttgctgaagagctcctgttgccactcgctgcagttaaatactcccgtggaacgttcatattccctgaagcacagccttccccacacaagaacttcgctgacgaggttgccttcctgaatcgcttcttcggtggcctcaagtccggtggcaatgcttatgtgattggtgactctgcgaacccgggcagaagtggcacgtctactacgccgctgagcaccctgaggag

SEQ ID NO: 40347 - DNA, 289 bp, Zea mays
aggaggcagggacggccatggcatgcagtgggtgcagctgcgaggcggcggtgggggcgatggcgtcggaggcgtacctggagggggcgccggtgcgggaggcgcgggagctggtggcggagtctgtcggcacttctacgcgcagggatgggtcacgggcaccggcggcagcatcaccgtcaaggtcaacgaccccgccgtgccgctcgccgaccgcctcatcgttatgtcaccctccggtgtgcagaaggagaggatggtagcagaggacatgtatgtgatggctgca

SEQ ID NO: 40348 - DNA, 289 bp, Zea mays
acacaccacaccacacctcctcgcttgcactccgctcgtctgacatctcgtcccgtcctttcgtttcgaagcctcgcgagcaccgacgatggccaccaccgcggtgtcggtcgacgagaagctcgataagcttcgcgccgaggtcgccaagctcgaccagatcagcgagaacgacaactccgggttcatcagcctcgtgtcacggtacctcagtggggaggcggacagatcgagtggagcaagatccagacccctaaggatgaggtggtggtgccctacgataccgtcg

SEQ ID NO: 40349 - DNA, 288 bp, Zea mays
gaagagcaaggatgctagtgatgggtcagagaaggcgcttctggatgagctgcaggcactggatgatcatctcaaagctcatggcccctacataaatggggagaacgtgtcagcgactgatcttagcctggggccaaagcttttccacctacagatcgcactggagcatttcaaaggctggaagatcccagaaaacctaaccaatgtccatgcctacaccaaggctcttttcagccgtgaatcttttgtcaagactaagccatccgaggagcacgtgattgcgggatg

SEQ ID NO: 40350 - DNA, 246 bp, Zea mays
agacacgatggtgagcgccagaattgttgtcctcctcgccactctcctatgcgctgccgccgcagtcgcgtcgtcctgggaggacgacaaccaccaccaccactggggccacaagtccgggcaatgcgtgcggcggtgcgaggaccggccctggcaccagcgcccccggtgcctggagcagtgcagggacgacgagcgggacaagcggcaacagcgcgacaggcacgatgccgacgaccgcagcgg

SEQ ID NO: 40351 - DNA, 292 bp, Zea mays
ctcgagccgttcggtttccggatagcttacctcacatcgacggtcggtgagccgttcgtgagtggcgaggcagtgcgtgcgctgcagcctgcagggcaagaacaggcgacgaagaagatgagcacgctggacacgcggacgctcaaggacgagctgacgagcatggacaggaagtgcctcgtggaccttggccacccgctgctcaaccgcgtcgccgacagcttcatccgcgccgccggggtcggggcggccagggccgtctccagggaggcctacgtcgtcaccgtcgaag

SEQ ID NO: 40352 - DNA, 303 bp, Zea mays
atttctgcgactgctgcttccttgccaagtgtcggagctccggatgcagctcctcttaaacccgtcggaggtactgaaagtctagttcaaaacatgctagctggtgctccagtaggggggtcaggtccacatgtagtacaaattgctgatatccctgttaagcaaaccactagctcttcctcacgagagcagtcagatgatgatgacatggaaggcgatgctgagacaaatggaaatggaaaccctgttcaacaaagacaacagagaaggaagcaatccaaccgggaatcagccaggcgttcg

SEQ ID NO: 40353 - DNA, 240 bp, Zea mays
cgaagagcagcgcaggggggagatgaacagcggcgtggacacgcaggcgcgggcgttcgcggacgacgtgcgcggtagtttggagacgaaggactggatgctggacctcggccacccgctcctgaaccgcgtcgccgagagcttcgccaaggccgcggggatcggcgcagtgcaggcggtcgccagggaatcgtacttcatggcgactgaaggcgacggaggatctgtgtccggcgcaag

SEQ ID NO: 40354 - DNA, 297 bp, Zea mays
agaagggagttgtagtgagttttaagaatggcgagtgcacaggcagtggggcaaggagaacgacgccacttcgttctgaagagcggacacaccattccggccgttggtctaggcacttggagggccggctcagataccgctcactctgttcggaccgccatcgccgaggctggatataggcacgtggacacagctgcccaatacggagtagagaaagaggtcggtagaggacttaaagctgcgatggagggcgggatcaacaggagagatttgtttgtgacgtcgaagctatggtgc

SEQ ID NO: 40355 - DNA, 290 bp, Zea mays
ggcaaacgcggctgctagcacggcgcccctctcccactccgactccccagccgccgccagcccgcacacccctccctcgcgcgctcagggtttcggaatggaagccgaggcggcggccaagaggacgcgggagagcggggaggacgccgccgcggcggggatctccgccgtcatcccgggatggttctccgagatcagccccatgtggcccggtgaggcgcactctttgaaggtggagaaggtgctgttccaagggaagtcagactaccaaaacgttatggtctttcagt

SEQ ID NO: 40356 - DNA, 298 bp, Zea mays
  unsure (1)..(298): unsure at all n locations
tgaccctgataagcgcatatcagcacacgatgctctgaagcacaaatggttctctgaagttcctctgcctanatcaaaggacttcatgccaacattccctgctcttaatgaagttgacaggcgttccagaaggtatctgaagagtcctgatcctctggaagagcaacgtttgaaagaactgcaagggaacataggcaaccatggggtttttggctgaactagaagcacttgattgggtctgcaagggaacataggcaaccatgggctttttggctgaactagaagcacttgattgggt

SEQ ID NO: 40357 - DNA, 294 bp, Zea mays
gtcctcatcccagcagcgcttgaggggagtcataaacaaggataatgctaacgacataaaggcaaagtacatcatcgaggctgccaatcaccccacagatccagaggcagacgagatcctgtcaaagaaaggcgtcctcatcctccccgacatactggccaactctggtggcgtcacagtgagctacttcgagtggaacatccaggggttcatgtgggacgaagagaaggtaaacgcggactagcggacgtacatgacgcgcgccttcggggacgtgaagcagatgtgccggag

SEQ ID NO: 40358 - DNA, 290 bp, Zea mays
gtttcggtgctccatctatacgatgtcgtcaacgcacctggtgtcacagccgacatcagccacatgaacactggtgctgtggtacgtggcttcttgggccagccacagttggaaaatgccctggctggaatggatcttgtaataattcctgctggtgtccctcggaaacctgggatgacaagggatgatttgttcaacataaatgctggaatagtccgtaccctgtgtgaacgaattgcaaaatgctgccctaatgcaattgtgaatgtgatcagtaatcctgtcaactc

SEQ ID NO: 40359 - DNA, 292 bp, Zea mays
cccaggtgctgcccaggtaagtcggcggcggcgatgacaacgcgcttcaagaagaaccgcaagaagcgcggcacgtgtccgccgggcacggccgcatcggcaagcacaggaagcacccgggaggtcgcggtaacgccggtggcatgcaccaccaccgtatcctcttcgacaagtaccatccgggctacttcggcaaggttggcatgcgttacttccataagctccgcaacaagttctactgccccgcggtcaacatcgagcgcctctggtcgatggtgcccaccgacaaggc

SEQ ID NO: 40360 - DNA, 292 bp, Zea mays
acgtccgatacaccaagcaccagcgcggcggcggcgaccatggctgtcggaaacaacaagaggatctccaagggaaacaacggtggcaacaaaaagaccgtcgaccctttctctaagaaggattggtatgacatcaaggcaccgtcggtgttcagtgtgcgcaacatcgggaagactctcgtatccaggacacagggtaccaggattgcttctgagggtctgaagcacagagtctttgaggtttgcctagctgatcttcagggcgacgaggatcaagcttacaggaaaatca

SEQ ID NO: 40361 - DNA, 288 bp, Zea mays
catcctccctccattgtttcccggctctccgtcccttgggagttgggccttggcatttccttaagatagaaaaggtggcaaatctggttcctactccccgtccttatcgccagccgaaccgacattgttttctccccccttctcgccttctccttctcccccctagtctacaggcgtttgctccccaatcccttcggcccgcacgctcgacgtgatcccaccggcagccatggatccatacaagcaccgcccgtctagtgggagcaacatcagcttctggaccaccaa

SEQ ID NO: 40362 - DNA, 291 bp, Zea mays
gttttgggtccgaccgcacacccggggttgcccctcaaggtgtttttaggagtacgacggtgtcgacgactgtagcaaaatggttcgtgcggatcgcacgagggacaatggacaagatttacaggttcgggccgcttagaagtgcgtaacaccctacgtcctggtgagtatatgagcgtggttacaagagggctctctggatagagggcgcagagaatttacgtgggtggctaagtaaaacagggtccctccttctgaaggggtgccccctaggccttatatattcgaccg

SEQ ID NO: 40363 - DNA, 229 bp, Zea mays
  unsure (1)..(229): unsure at all n locations
agctcagagaacatggacgtaagaaacaaggaggatgtagtgttgaggatgagatcagctgtacgaagcaagcagtntggccaggaggatatgctgtgccctcttgtggctgatgcctgcattcaagtttgccccaaaaatccagcaaactttaatgtcgacaatgttagagtagctaagctactaggaggaggtttgcacaattcatctgtggaacgtgggatggatc

SEQ ID NO: 40364 - DNA, 145 bp, Zea mays
gtgacagacacgatggtgagcgccagaattgttgtcctcctcgccactctcctatgcgctgccgccgcagtcgcgtcgtcgtgggatgacgacaacaactacaacaactggggcaacaattccgggcaattcgtgcggcggtgca

SEQ ID NO: 40365 - DNA, 283 bp, Zea mays
gcaacaacgggtccacgctgacggctggggtcattgccaacagggaggggatctcatgggcgaccaaggacaacgtgcagcaagccaactactacggctccctcacccaggcttccaccatcagagtaggcagctacaacggggaggagatatatgcgccgttcaagagcctcctacccatggtgaacccagacgaccttgtgtttggaggctgggacatcagcagcatgaacctggcagatgccatgaccagggccaaggtgctggacattgacctgcagaa

SEQ ID NO: 40366 - DNA, 285 bp, Zea mays
ctagcagaagccttccatcctcactcgctcgatggcccgcacgaagcagacggcgaggaagtccaccggcggcaacgcgccgaggaagcagctggcgactaaggcggcccgcaagtctgcccctgcgaccggcggagttaagaagccccaccgcttccgccccggcaccgtcgcgctccgggagatccgcaagtaccagaagagcacggagctgctgatccgcaagctgccgttccagcgcctggtgcgggagatcgcgcaggacttcaagaccgacctacgctt

SEQ ID NO: 40367 - DNA, 169 bp, Zea mays
cgggaatgctatgcagggcactacatcccgcagctcgccgaggccatggtggagttcaacaacaaggaggagaggatcttcaacctcaaaggcgtcgccctgggcaacccggtgctggagttcgcgacggacttcaactcccgcgccgagtacatctggtcgcacggcc

SEQ ID NO: 40368 - DNA, 171 bp, Zea mays
gtgataaggagggccttcttcagctcccaagtgacaaagccctgctgagcgaccctgttttccgccctcttgtcgagaaatatgctgtggatgagaaggctttctttgatgactacaaagaggcccacctcaagctctccgaactggggtttgctgatgcttaaatagacc

SEQ ID NO: 40369 - DNA, 162 bp, Zea mays
cccgagcatatcacagtgacagacacgatggtgagcgccagaattgttgtcctcctcgccaccctcctatgcgctgccgccgcagtcgcgtcgtcctgggaggacgacaaccaccaccaccacgggggccacaagtccgggcaatgcgtgcggcggtgcgag

SEQ ID NO: 40370 - DNA, 164 bp, Zea mays
caagaagaagtctagcagtagtcgttcctccctgatgtacgaagctccccttggctacagcatcgaggatatccgccctgcaggcggcatcaagaagttctccgctgcttactcgaactgcgcgaggaagccatcctgatatctctgtcgtcatccccatccta

SEQ ID NO: 40371 - DNA, 104 bp, Zea mays
gcgcgtcggcggcgtggtcaccaactgggcgctcgtgtccatgaaccacgacacgcagtcgtgcatggaccccaacgtcatggaggccaaggtggtggtcagct

SEQ ID NO: 40372 - DNA, 302 bp, Zea mays
  unsure (1)..(302): unsure at all n locations
tgcccagcttcgcttcacggcgcgccgaccggcttggacgcgccgaccggctcgtgatcagctcggtcggatccgatggtcgctcgctgctgcagcgggcgcttgctgtgcgtcgcgagggctcggccggatcccggagggaggcggagcttccccgggtctcgaagattgcggcgcgccggctatggcccgggccgactacgactacctcatcaagctgctcatcatcggcgataggtgtgttgggaaaaagtgtnctcttttgcgggtctcagatggctctttcaccactagctttatca

SEQ ID NO: 40373 - DNA, 246 bp, Zea mays
ctcccatatccgctcccctacctctccagcatcctcccgtctcagtcgtctcgtctccgctcctcacatcgccagccatgggcaagatcaagatcggaatcaacggtttcggaaggatcggcaggctcgtggccagggtcgccctgcagagcgaggatgtcgagctcgtcgccgtcaacgaccccttcatcaccacgggatacatgacgtacatgttcaagtacgacaccgtgcacggccaatgga

SEQ ID NO: 40374 - DNA, 243 bp, Zea mays
aaccatctcaggcggaatggcggcttctggtgagggcgcgtcgctgccgtctccggcgggcggggaagatgcgcaccgcgcgcgtcactatttctacgagccgtcgatcggagactactactacgggcaaggtcacccgatgaagccccaccgcatccgaatagcgcactcgctggtggtccactatggcctccaccgcctcctcgagctctcccgcccctacccggcctctgaggccgacat

SEQ ID NO: 40375 - DNA, 290 bp, Zea mays
atcagttagaattacagttgctgatggagaagtggatgtcactatcaaggttagcgatgaacgtagcgggataccaagaagcagcctcccaagaatttttcacgtatctgtacagcactgcaaagaatcctcctgagctagatagacctaatactgaaggggtaactatggagtatcacatctgttggagagaatggccttcaagagcacagtgaatcggacccacttacggttagttcgtgaggtagaagcaattggaggaaatgtctctgcatcagcttcccgtgaac

SEQ ID NO: 40376 - DNA, 171 bp, Zea mays
ccgagaaccgcgactgcctgcaagcttccaggtctgccactctctcggcggcggcaccggctccggcatgggcacgctgctcatctccaagatccgcgaggagtacaccgaccgtatgatgctcaccttctccgtgttcccgtcgcccaaggtctccgacaccgtggtgga

SEQ ID NO: 40377 - DNA, 268 bp, Zea mays
  unsure (1)..(268): unsure at all n locations
gcgcaatccatgctgcccgagaaatggctgtaactgaaggaagaccaattttagttgaggtgctcagtagatccatggagtttcattacctgaaacgcacaaaaaaaaacttcagtatataattaatctgagtatcgactaatgagatttcaggcactgacttaccgagtcggccatcactcgacatccgatgattcgaccaagtacaggccagttgatgagattgagcattggcgaacagcganggatccgatttccagatacagaa

SEQ ID NO: 40378 - DNA, 312 bp, Zea mays
ggcccaagtcctagatcagatgcgtgcccccgcttagcatgtagcacgtagcagcaggaatgtagtgtcgtcgtagtagtagggtacagcgagatggggaggaagggcggcctgagcaccatgcaggagtccggcggcgagcgcgccgcccgggagggcatcgagatcgacgagtccaagttcaggaccaagtcctagatcagatgcgtgcacccgcttagcatgtagtacgtagcagcaggaatgtagtgtcgtcgtagtagtagggtagtcgtacgacgtgcggctcctcgtttggcacgtgtgccctga

SEQ ID NO: 40379 - DNA, 306 bp, Zea mays
gccctgattgctcatttccagaactctagtttgatgaatgaggacaaacgctgccgccccatacttttcaactcagatggtcctaatgcaggagatcaggaacctttccccatgggttcaaacatccgagccaggtctgggagatcccggacttcttcgggtgaagaaaatcaccatgacatccagacagtcttgaccaacggtgacacttcttccaatggagctgacaattcaggtcccaccaaggatactgagtagctgaactgcagcttgctgcatcgctaaccacaaaggcccaagttatta

SEQ ID NO: 40380 - DNA, 271 bp, Zea mays
ggtgccaattgttgagcctgagatccttgttgatggccctcatgacattgatcgctcggttacgtcaatgagaccgtccttgctgcctgctacaaggcgctcaacgagcaccatgtcctcctggagggtaccctcctgaagcccaacatggtgactccaggctccgactccaagaaggtgacccctgaggtgattgctgagtacaccgtccgtaccctccagaagaccgtccctgctgctgtgcctgctgttgtcctactctctggtggac

SEQ ID NO: 40381 - DNA, 244 bp, Zea mays
gggtctctgcgccgccgggacgtcgccgccatggtctccgcgccgccggccgtcggcaccagcatgccgtcggtcgacttcgacacctccgtcttcaacaaggagaaggtctccctcgccggccacgacgagtacatcgtgcgcagcgggaggaacctgttcccgctgctttcggaggcgttcaagggggtcaagcagatcggagtcattggatggggctcgcagggtcctgcccaagcccaga

SEQ ID NO: 40382 - DNA, 302 bp, Zea mays
gttctgctcatagtcaatgttgcatctcagtgtggcttaaccaattccaactacacagagctgagccagttgtatgagaagtacaaggaccagggttttgagatccttgcattcccatgcaaccagttcggtgggcaggagcctggcactaatgaggagattgtccagtttgcttgtactcgcttcaaggctgagtatccaattttcgacaaggttgatgtcaatggtgacaatactgcacccatttacaagttcctgaagtccagcaaaggtagtctctttggcgataacataaaatggaa

SEQ ID NO: 40383 - DNA, 307 bp, Zea mays
gcccgacaggtgaagccgccgccgctgcagtgtccatagccaccgcaggagactgagatgggggggtttgtcaagacccacaagaccaatgcgtacttcaagcgtttccaggtgaagttcaagagaaggcgcgctggcaagacagactacagggccaggataaggctgattaaccaagacaaaaacaagtacaatacacccaaatacagatttgttgtgcgatttaccaacaaggacatcacagcacaaatcatctctgctagtatagcaggtgatatggttcttgcttctgcttactcgcatgagt

SEQ ID NO: 40384 - DNA, 296 bp, Zea mays
ctgtcatgaccatatctagctacctacgcatgatcgtcacgacttgcacgtctactactgctacgtgtactactactgaataaaaaccctctccgcgcacgtcgtccttgtgtttgtgtgtgtgttgagagatagaggagacggagagccggccatgtccttttggctgtttggtttatttttgagttcatgcggtctttatttatttccatgtacgctgcttcctcgtatacccactttaaatttgtaccatgcatgcatgttccttaaaaaaaaaaaaaaagggcggccgccga

SEQ ID NO: 40385 - DNA, 294 bp, Zea mays
tctgcggctttaaaccctagttcccattccatcttcgtttccgctccgccggcgtcgatggagttctggggtctcgaggtcaaacctggatccactgtcaagtgtgagcctggacatgggcttatcctgcacgtttcccaggctagccttggggaatcacaagaaagtgacagtgccttaatgtatgtcaaagttgatgacaagaagcttgccattggaacgctctctatcgacaaatacccacagatacaattcgatttgggtttcaataaagagtttgagctgtcacacaca

SEQ ID NO: 40386 - DNA, 296 bp, Zea mays
cgccgccgtcgtcggcgggcgacgacgacaaagcctccacggcctccgattggtccagcgccaccaagatggcgcctcccaccctccgcaagcagtccaccgccttcgccacacccccgtctattctccgcaaccagcacctgcgtccgcccaaagccgcccccacctccgtccccgctccctccgccgttgctgccgaacccgccgcggccacctccttccagcccgcgttcgtcgctgtccagcccaccgtgctggaggagtacgaccctgccaggcccaacgactacgaggac

SEQ ID NO: 40387 - DNA, 298 bp, Zea mays
gaaatcagaagaggcctggtatgagatgcaggatctccatgttactgagacccttcctcaaatgcgtgctctctcagaaacctacatgcaaatatacgagcaacacgaatgagtaatggacagtggtcatcctatggtcagtctgtttgcttaacagagatcagaatatcacaaactaatccttatctttggagcagctttttttggggcagaattttgtagtatcttcacacatgtccagacttaatttcttgacaagcagagatcgagggaatgtacttgggtcatcaagtcaatg

SEQ ID NO: 40388 - DNA, 295 bp, Zea mays
gtcatgccctgccatcgccatgggtgtcgccaatgtggagcttgtcttggccaacctgttacattgctttgattgggagctccctgatgggatggtggaggaggacatcgatatggaagaaacagggcagcttgcttttaggaagatggtgcctctttgtcttgtgcctattaagagagtataaatgtataattgcactggaaggatgatagactatatgtgcattctcttgacatatgttcagttcaaataaactacttcaaatattttcaaaaaaaaaaaaaaagggcggccg

SEQ ID NO: 40389 - DNA, 293 bp, Zea mays
ggaggcgaaggaggaggagcagcagcagcaggcggcgccgaggagcggcatcccactcagtgcttgcaaccatggctaggggattgaagaagcacttgaagaggctcaatgcgcccaagcattggatgctcgacaagcttggcggagcttttgctcccaagccatcttctggacctcacaagtccagggagtgccttcctctgatcctcatcatcaggaacaggctcaagtatgctctgaactaccgtgaggtcatttctatcctgatgcaacgccatgtacttgttgatggc

SEQ ID NO: 40390 - DNA, 304 bp, Zea mays
ccgatccccaattcctccttcggatctcgcattcagcgcagcaggtgtgaaggaacggggacgcggaagaagatggggctcgcgttcgggaagctcttcagccggctcttcgccaagaaggagatgcggatcctcatggtcggcctcgacgccgccggtaaaaccaccatcctctacaagctcaagctcggcgagatcgtcaccaccatccccaccatcggtttcaatgttgaaactgttgagtacaagaacattagcttcactgtctgggatgtcgggggtcaggacaagatcagacctcttt

SEQ ID NO: 40391 - DNA, 202 bp, Zea mays
acgagtctgaggggcccattccggttgaactcggggaataccggacactcgtgagggtgcggctgcagagcaacaggttgtctggcccagtgccaccaagattttggggattgcccaacgtgggcctgcttgagattcgcgagaataagctctcagagtcggttgatcctgctctttctggtgccaagagcctatccaagct

SEQ ID NO: 40392 - DNA, 323 bp, Zea mays
cagttgcacctcccgggagttagtgaatcaatggaatgcaccagcaggattctcagtcaatgttgcttcagctaatgccagccaggttctgttggcaaccggtggtggccatcttgtttacctggaaattagggatgctaaacttgttgaagtgaagcatgctcagctagaacatgagatttcttgtcttgatttgaacccaattggggagaatccacaatatagttccctagctgctgttgggatgtggacagatataagtgttagaatattttcgcttccagatcttgaattgataaggaaggaaaatttgggtggagaaa

SEQ ID NO: 40393 - DNA, 310 bp, Zea mays
ggagcattcgagaagccgaagaaaattcgaagacgaggagcagctacactgcggacggacttcgggcatggagggccagttccaggttggcaaggaggaggtcatccaagcatggtacatggacgacagtgaagaggaccagaggcttcctcatcatcgcgagcccaaagaattcatccctctcgacaaactttccgaactaggaatattaagctaggcgctaaatgctgatgattgggagaatgatgagaacctcaagaaaattcgtgaagccaagggttactcttacatggacatttgtgatgtgtgc

SEQ ID NO: 40394 - DNA, 192 bp, Zea mays
tgactcttatcttagacgaattggacaaacagttctgtcatatgttaatatggtgtgttcgaccttgaggaactccatcccaaaatctattgtttattgtcaagtgcgagaagccaagcgctcgctgctcgatcacttcttcactgaactgggagcaagagagatgaagcagctttccaaacttcttgacga

SEQ ID NO: 40395 - DNA, 185 bp, Zea mays
ggagatgctgttaagaagcttggtctctggggtctcttcactagaggacttcctcttcgtatcgtcatgattggtacccttactggtgctcagtggggaatttacgatgcattcaaagtgatggttggactcccaacaacgggaggtgttacacctgccccagcagcagaggctgaaatgaaagc

SEQ ID NO: 40396 - DNA, 104 bp, Zea mays
tgtttgcaaagctcctcctcgatcgatccatcgatcactgcaccggccggcggcaccgcgctcgcactgggtagccaacgagacggcagcaatggcggaccgtg

SEQ ID NO: 40397 - DNA, 309 bp, Zea mays
aatatcttccctcatgttacatatgatgggatggtggacattgataaaatcactgatccagtgcaacgtcgaagtgtacaaaatcaaatatgttattttggacagacaccatctcaattgctgacagttccacacataagaacgcggtcgttgacacaaatattacaattgcagacaatattccggaacccaagtgaggttagatcctatgtgcttccaagtccagagcactgcaatgttcctgctagcacgatgcttgtatccaatgattgtcttgtagtcatagattctaatgttcccacagcacat

SEQ ID NO: 40398 - DNA, 228 bp, Zea mays
cagccacagcagcctccttcctggcttcctcctctcactctcgctcgtgctgcgctcgctacctcgcttcgcattccattcgaggagagcggtgagaggggaggaaaggcaagatgttcatcgagagcttccgcgtcgagagcccccacgtgcggtacggcccgacggagatcgagtcggagtaccggtacgacatgacggagctggtacacgaggacaaggtgcagc

SEQ ID NO: 40399 - DNA, 303 bp, Zea mays
gcggcgcgggcggacaaggagcaggcggaggaggagctgtgccaagccacaatgggtatctcgcgtgactcgatgcacaagcgccgggccaccggtggaaagcagaaggcctggaggaagaagcgaaagtatgagcttggtcgccagccagccaacaccaagttgtcaagcaataagacagtgaggagggtccgtgttcgtggaggtaatgtgaaatggagggctcttcgccttgatactggtaactactcatggggaagtgaagctgttacccgcaagacccgtatcctcgacgtggtctac

SEQ ID NO: 40400 - DNA, 183 bp, Zea mays
  unsure (1)..(183): unsure at all n locations
gacaagttctagatcgcgagcagccgcccttttttatattttttgacaacaaccaaacaacnactacttgcatacagcgntacnagcgncagcacntacaagctaacaaacacataagcaaacaaacacatgaatacagatacagataccacacaagcgagctagaggtagttggaatttgta

SEQ ID NO: 40401 - DNA, 233 bp, Zea mays
gccttacaacagcgtgctcaccacacactcacagctggagcacacagatgtctccatcctgctcgacaacgaggccatctatgacatctgcaggcgctccctcgacattgagaggcccaactactccaacttgaatcgccttgtgtctcaggtgatctcatcgctgacagcttctctgaggttcgatggtgccctcaatgtggatgtgaacgagttccagaccaacctggttc

SEQ ID NO: 40402 - DNA, 307 bp, Zea mays
cgaccttgcgtacgtacgtcgtagcggatcgtccagctcgctcgccacagccatggacccgtacaagcatcgcccgtcgagcgccttcaacgccccgtactggaccaccaactccggcgcccccgtgtggaacaacgacagctccctcaccgtcggcgcacgaggtcccatcctgctggaggactaccacctggtggagaagctagccaacttcgaccgcgagcgcatcccggagcgcgtggtgcacgcgcgtggcgccacgccaagggcttcttcgaggtgacccacgacatcacccacctgacgt

SEQ ID NO: 40403 - DNA, 293 bp, Zea mays
tcgccatccgcacctctctccatctccctgctcctccgcctccttcttgatccagccaagccagggatcgccatgtcggactcggaggagcaccacttcgaatcgaaggccgacgccggagcgtccaagacctacccgcagcaggctggcaccgtccgtaagaacggcatcatcgtcatcaagaaccgcccctagcaagttgtggaggtttctacctcaaagactggtaagcatggccatgccaaatgccactttgttgccatagacatattcaacgggaaaaagcttgaaga

SEQ ID NO: 40404 - DNA, 306 bp, Zea mays
ccaaaaccctcacggatccctggcatttcgatcgcctcactctgtacaccggacgagttgcagttggatctcagatcggtgatcacataaacaatggtgaaggctgttgctgtgcttggtagcagcgatggtgtcaagggcaccatctttttcacccaagtgggagatggccctaccactgtcaccggaagtgtctctggcctcaagcctggcctccatgggtttcatgtgcatgcgcttggtgacaccaccaatggctgcatgtcaactggaccacactacaatcctgcgagcaaggaacatgga

SEQ ID NO: 40405 - DNA, 234 bp, Zea mays
tgggagttgtagtgagttttaagaatggcgagtgcacaggcagtggggcaaggagaacgaggccacttcgttctgaagagcggacacaccattccggccgttggtctaggcacttggagggccggctcagataccgctcactctgttcggaccgccatcgccgaggctggatataggcacgtggacacagctgcccaatacggagtagagaaagaggtcggtagaggacttaaa

SEQ ID NO: 40406 - DNA, 308 bp, Zea mays
agcagcaacagccaacacctaaactaaagaacagtagtagtccctgtgtacgtctagcaacgatccgcaccgagctcgccagttttgctcgttagtttggggacggcgatggcgtccggtcaggaaagcagggaggagctggcgcgcatggccgaggaggggcagaccgtcgtccccggcggcatcggcggcaagaccctcgaggcgcaggagcacctcgccgaagggcgcagtcacggcgggcagacccggagtgagcagctgggccatgaggggtacagcgagatgggcagcaagggcgggcagac

SEQ ID NO: 40407 - DNA, 226 bp, Zea mays
  unsure (1)..(226): unsure at all n locations
tgggcaactccccgagctcagcttagctccacttcagctccaatcacagtcgtgaccagagcgcgagagctatctagagggccgtgaaaattccgatcaataggatcgccctctggagccaccaggaggtgtaccacccgggcgccctcaaagcggcgttcgctgagttcatctccaccctcatcttcgtcttctccggccnagggttcggcatggccttcagcaa

SEQ ID NO: 40408 - DNA, 298 bp, Zea mays
ccagaggcaatttcgccctcgattcgaccccgattcgtccgcccgcgaccgggattccctccgccaagcgcggatctgaacgctgcgctccgtgtcgccgctcgaatccgccatgaagggggccaaatccaagggcgccgccaaggccgatgccaagctggcggtgaagagcaagggggcggagaagcccgccaagggcaggaaagggaaggccggcaaggaccccaacaagcctaagagggctcccagcgctttcttcgtgttcatggaggaatttcgcaaggagttcaaggagaag

SEQ ID NO: 40409 - DNA, 303 bp, Zea mays
caatgacagaagatgcccagaatgctttgaggcgtaccacagagacttactccaaagtgaccagattcttttttatatgcaactatatcagcaggataatagaaccacttgcatcaagatgtgcaaagtttaggttcaagcctctttcagaagaagtgatgagtagtcgcattatgcatatatgcaatgaagaaggcctcaatcttaatgctcaggcgatgtccacactgagtgtcatttctcaaggtgatcttcgtcgtgctataacctaccttcagagtgcagctcgcttatttggatctt

SEQ ID NO: 40410 - DNA, 295 bp, Zea mays
ccggaagctccagtatattgcagagcttgagagaagagttcagtccttacagacagagggaatagaagtaactgctgaaatggattttctcggtcagcaaaatatcatgttagacttggaaaataaagccttgaagcaacggcttgagagtctatctcaggagcatctcattaaacgttatcagcaggagatgtttgagagggaaattggccgccttagaacattgttccagcagcagcaacagcaacaacatgtgccgcagcagcaggctcctacccatagccgcagtaacagt

SEQ ID NO: 40411 - DNA, 295 bp, Zea mays
ctcgaggaatggcgtcggtgcaggtctccggcgcgggggtcggtgccgcggccttctctgtgaaggggaaggcctccaccggtgcgctccggcttcgctctacgttgaccttcggcgaggtctgcccggcgcggcgggcgttccgcggcctcgtcgtcagggccgctaccgtcgtcacccccaagtatacaacacttaagcccttggctgatagagtgcttgtaaagattaactcttccgaggagaagacaactggtggaatcttgctccctacgactgctcagtccagacctca

SEQ ID NO: 40412 - DNA, 301 bp, Zea mays
gacaacactcaccgatagcaagtagcgccgccgacgtttcgagagcagagtatccaagctagccaagcgcgcacatcggtgacctagctagctacctagctagttcaggcgacgatatggcgtctggtcaggagagcaggaaggagctggaccgcaaggctcgcgagggcgagaccgtcgtccccggcgggaccggcggcaagagcgtcgaggcccaggagcacctcgccgaagggcgcatgcgcggaggccagactcgcagggaccagctggggcagcaggggtacagcgagatggggaa

SEQ ID NO: 40413 - DNA, 187 bp, Zea mays
cttccccaccgagcctcagttcgcatccacgcgcaacgccgccatctcgccggtcgacgctcaccgagcagcatggcggaacagactgagaaggctttcctcaagcagccaaaggttttcctcagctcaaagaaatctggcaagggtaagaagcctggcaagggcggcaaccgattctggaagagca

SEQ ID NO: 40414 - DNA, 189 bp, Zea mays
cgcccgtgtgcacaacggagatggcggcgatggcggggtacgccaaggagttcgagaagcgtggcgtgaagctgctgggcatctcgtgcgacgacgtggagtcgcacaggcagtggaccaaggacgtggaggcgtacggcgggaagcagcagcagcagcaggcgacgacgacgaaggtgacgttcccga

SEQ ID NO: 40415 - DNA, 192 bp, Zea mays
ctggcgttggctactcatacactgccgacgctgcctaccaccaaggcgtggatgacaagatgacagccatggacaacatggtgttcctgcaaaagtggctccaaaagttcccacagtacaggggcagggacctgtacatcgccggagaaagctacgcagggcactacatcccgcagctcgccgaggccatgg

SEQ ID NO: 40416 - DNA, 186 bp, Zea mays
ccccgggcggcggcgcgtggctgggcgggcagctgttctcggccatggtggtgcgcaggccggcgcacctgttcctggacgagctgggcgtaggctacgacgaggccgaggactacgtggtggtcaagcacgcggcgctgttcacgtccaccgtgatgagccggctcctgtagcggcccaacgtga

SEQ ID NO: 40417 - DNA, 186 bp, Zea mays
gtccagagttggaacccaagcgcacgcagcaccgtcgtcgaactcttcccttttcggcggcattggagatggcggcgaatctagaggacgtgccgtctctggatctgatgcacgaaccgctccgtcggatgaagtgcagctccaagcccgacaagcacctcatcctcatcggcccacctggctctg

SEQ ID NO: 40418 - DNA, 185 bp, Zea mays
ggccttatgacaactgttcatgcaacaacagctacccagaagaccgtcgatggtccttcgatgaaggattggagaggaggacgtggtgctgcccaaaacataattcccagctccactggtgcagcaaaggctgttggaaaagtcctgcctgagctgaatggaaaactcactggtatggccttccg

SEQ ID NO: 40419 - DNA, 311 bp, Zea mays
cagccagctccaccacgagaacctcgtcgacatcattggctaccgcgctgacggagaccagcggctgctggtgtacgagtccgtgcccgccggcaccttagaagaccacctgttcgatctgccggcggacaagaagccgatggactggtgcacgaggatgaaggtggcgcacggcgccgcgcaggggctggagtacctgcacgagacagcgaacccgccggtggtgtacggggaattcaaggcctcccacatacttctcgacgagaagctcacgcccaagctctccgacttcgggctcgcgcactcggcca

SEQ ID NO: 40420 - DNA, 184 bp, Zea mays
cgtgacttgctcaacagattgaggaggagactgtgaaatttgcaacctatctaggccttaaagttgtctcaattgttggtggccagtcaattgaggagcagggtttcaagattaggcagggctgtgagattgtaattgccacacctggtcggcttcttgattgcttggaaaggaggtatgctgt

SEQ ID NO: 40421 - DNA, 304 bp, Zea mays
  unsure (1)..(304): unsure at all n locations
gtatgcttggaaaaattggatatggaactgcanatgaagctttggcctgcaagctaccattagtgtttgttcgcagagattacatcaacgaagagccatttttgcgaaatttgcttgagcacgaccaaaacagcattgagatggtcagaagtgatttccttgctggacactggaaaccgtaccatattcgtgctctcacacttcaaccatgctacaatggcccaataaatggtggtgaggtggtttcccagattctacaggacactgctattcggaacaaatgtatttctgataaagctagtgg

SEQ ID NO: 40422 - DNA, 132 bp, Zea mays
  unsure (1)..(132): unsure at all n locations
tgtttgcaaagctcctcctcgatcgatccatcgatcacggcancggccggcggcaccgcgctcgcaggggctagccaacgagacggcagcaattgcggaccgtgaccgcagcggcatctacggcggcgccca

SEQ ID NO: 40423 - DNA, 236 bp, Zea mays
gtcttggaaggttgtggagaatgcagggggtcatggccgcaacctaatggcatcctcgaccttctgtgaagggaacgcttccctagacttgttgagtacgccggagtgatgggcccagcctacatcttcgaccactatgtcgtcacccccgatgcagtagatcgagacgatagagaattcaacaacaaggtagagcgggtgaaacaagagtgggatttcttcagatgcgaggcttg

SEQ ID NO: 40424 - DNA, 320 bp, Zea mays
attgtgaagaagataaagctcacaggcacaccatgcaagatatttaagaagactgcactaatcaagggaatgttcacatccgatttagaggttgctaggtttgaaggtgctgccattcggactgtaagtggaatccgaggacaggttaaaaaggcagcaaagattgagccaggagatatgttgaagagaaaaggggaaaatacagaaggaatcgcaagatgtacatttgaggacagaattcttatgagtgacattgttttcctgcgtgcctgggtcaacgttgaagttcctacgtactctaaccctgtgaccactgctct

SEQ ID NO: 40425 - DNA, 312 bp, Zea mays
caagaagacaggagaagggagttgtagtgagttttaagaatggcgagtgcacaggcagtggggcaaggagaacgaggccacttcgttctgaagagcggacacaccattccggccgttggtctaggcacttggagggccggctcagataccgctcactctgttcggaccgccatcgccgaggctggatataggcacgtggacacagctgcccaatacggagtagagaaagaggtcggtagaggacttaaagctgcgatggagggcgggatcaacaggaaagatttgtttgtgacgtcgaagctatggtgcacg

SEQ ID NO: 40426 - DNA, 319 bp, Zea mays
acacacccgagcatatcacagtgacagacacgatggtgagcgccagaattgttgtcctcctcgccaccctcctatgcgctagcgccgcagtcgcgtcgtcctgggaggacgacaaccaccaccaccacgggggccacaagtccgggcaatgcgtgcggcggtgcgaggaccggccctggcaccagcgcccccggtgcctggagcagtgcagggaggaggagcgggagaagcggcaagagcggagcaggcacgatgccgacgaccgcagcggcgagggctcgtcggaggatgagcgagagcaggagaaggagaaacagaa

SEQ ID NO: 40427 - DNA, 330 bp, Zea mays
gagcaccaaggaccttcggcgcccgttcaggatccacatcttcccgagcgagtacttggttgacctcttcccccttcggaccacctccaaggctcttggtgtagcttgccacactcaccaatcaagttttcatgtctgatctcgacattcagatcccaactgccttcgatcccttcgctgaggccaatgctggggactacggtgcggcagcagggtcaaaggactacgttcacgtgcgcatccagcagcgtaatggtcgcaagagcctgactcacgtccagggattgaagaaggagttcagctacagcaagatcgctcaagatctcaaga

SEQ ID NO: 40428 - DNA, 226 bp, Zea mays
gaagacgggaagtggtctttgatatcttttggtcactggaacgatggcagtcgctgcaagttgctgctgctgcccctccccctgtctctgtgattgggttcgagggatttgagaagcgccttgagatcagcttctctgaggcacctgtcttggctgaccccagcggaaggggactgcgtgcgctctcgcgtgcccagatcgactctgtccttgaccttgctcggtg

SEQ ID NO: 40429 - DNA, 229 bp, Zea mays
caggtcctcacacccacaccaaccaaccaacctcctctgcctgacgcttcacctgctgcgggcggtcacagctgcaagtactagaggaggacatccgcttccattacagcgcctgcggaggatcggaggaaccagtagcggaggcttcgattttcggcgggcgcaataaatttcccgcatagctcggaggaccgcgtcctcgctcgtctcccgcagcatccaggcgagg

SEQ ID NO: 40430 - DNA, 313 bp, Zea mays
ccagaggccaagcttctgtttgtggttcgcatccgtggtatcaatgccatgcaccccaagacccgcaagatcttgcagctcctgcgattgaggcagatcttcaacggtgtcttcctcaaggttaacaaggcaaccattaacatgctgcgcagggtggagccatatgttgcgtacggataccccaacctgaagagcgttagggagttgatctacaagagaggttacgggaagctgaacaagcagaggattccacttagcaacaacagtgtcatcgaggagggcctcgggaagcacaatatcatctgcattgagg

SEQ ID NO: 40431 - DNA, 317 bp, Zea mays
gccgccgccgctgctcatctcacatccctcgagaagacgcctgctcctcgccgatcgatacgatggccgtcttctccgacctccacaccgccgacggcctcaagtccctcgaggctcacctcgccggcaaaacctatgtgtctggtgactccattactaaggatgacattaaggtcttcgccgcggtgccgtcgaagcctggcgctgagtttcctaatgccgcccgctggtacgagaccgtctctgcggctgtagcctcaagattccctggtaaggctgttggtgtaaatctgcctgcgggatcagctcctgcggca

SEQ ID NO: 40432 - DNA, 286 bp, Zea mays
tgaaagaccacgaaagggccttagatggatcaagtgaagattgtccatctggaagtattgaaggccttgatctgtcgagagatgatttggtgaagctagttcgtgagaaggatgaattgttgaagtccaaagatggtgaaatcaaagatatgaaggataaggttttgcgcactatgcagaaatggaaaatatcattgctcggacaaaacgtgaatctgagaacttcaaaaaatatgcagtacagaacttctctaagagcctgctagatgttcgctgacatttggct

SEQ ID NO: 40433 - DNA, 319 bp, Zea mays
ctcgagccgaatcggctcgacgtctcccaccaccgccgagcgacagcccaagcccgatacagccggcggcaggcaccaactcccgccgcccgcggcgtcccgggacgcgccccgccgaatccgccgcacctcgcacagcaacacgcccggaccacggcgcatttgatccgtcccggccgcctacacgatgtccaagtcgggagcactggatcttgcttctggcctcggagggaagatcaacaaggtggaagtcaagtcggccgtcgatgagtatgagaaatatcatggatactcaggagggaaggaggaagcaaggaac

SEQ ID NO: 40434 - DNA, 300 bp, Zea mays
ggctaccaagcttccaaggatgacttggctgtctacacttcgttttcgagtgctccctcgtccaagtatatcaacgtagcaaggtggtttaaccacattgatgcgctcgtgaggctgagcggaattactgcagagggccaaggtgtgaaggttgaatcctcagcagttccttcagccccaactccagatgttgctgaagcacaggccccagttgctgaggaggacgacgacgatgatgttgacctttttggtgaggagaccgaagatgagaagaaggctgctgaagagcgtgctgcagct

SEQ ID NO: 40435 - DNA, 193 bp, Zea mays
gggagacctgccgcaacattggttttgtgtcaaacgatgttgggcttgacgccgaccactgcaaggtgctcgtgaacattgagcagcagtcccctgatattgctcagggtgtgcatggccacttcaccaagcgccccgaggagattggagctggtgaccagggacacatgttcgggtatgcgaccgatgagac

SEQ ID NO: 40436 - DNA, 194 bp, Zea mays
tttctcgtttagaacctctaaaatttcccccactcgccagtcgcagcagcacctgtagcagccatggacgccagcggagccggtagcaaggggaagaagggggcggccgggcgcaaggcaggcggccccaggaagaagtcggtgacgcggtccgtcaaggccgggctgcagttccccgtcggccggatcgggcg

SEQ ID NO: 40437 - DNA, 304 bp, Zea mays
cgctcctccagcgagctccgttctgaagcggcaagaaagatgattaatcttttcaaaataaagggtcaaaagaaagatgaggcagcaagtgctactggaaaggcccctgttaagaaacagtctgctggggagctccgtcttcataaagatattagtgagctcaacctgccgaagaccacatcaatttcttttcccaatggcaaggatgatctgatgaattttgagatcaccatccgacctgatgaaggatattacatgggaggcgctttcgttttcacctttcaagtgtccccatcttatcctc

SEQ ID NO: 40438 - DNA, 287 bp, Zea mays
aaagaaatggcgatggcgatgcagccatcttagcccccctcccctctccctaccctccatggccgtccctcctctgctgctcgtcgccgttgccgtagccgcgctctccatcctcgtcctcgtcgtcttcgccttccggcgatgcaggcggcggcggcaacgccacccgctgcaggccgcggcggtggccccgaccccggtcgctgtccaggatgaggacatagataggcctcttctttctgaaaatcagagcgatcactctagacagaatattagttttcttggaa

SEQ ID NO: 40439 - DNA, 289 bp, Zea mays
tggaaaacgaggcggttatatggagataactggattcagtcctgaagtacgggaacaaatttacaaggtggcatcagtaaacctgtgctccaatgtttcggggcaaattcttgctagccttgtaatgaacccaccaaaggctggggatgaatcctttgaatccttcatgtcagagaaggatggtatcctttcatcgttggctcggcgtgcaaaggctttggaagaagcattcaacagtctagaaggaattcactgcaacaaagccgaaggtgcaatgtatctgttccca

SEQ ID NO: 40440 - DNA, 303 bp, Zea mays
  unsure (1)..(303): unsure at all n locations
ctcgctttggatcgattggcttcgtaactggtgagggactgagggtctcggagtggattgatttgggattctgttcgaagatttgcggangggggcaatggcgaccgcggggaaggtgatcaagtgcaaagctgcggtggcatgggaggccggcaagccactgtcgatcgaggaggtggaggtagcgcctccgcaggccatggaggtgcgcgtcaagatcctcttcacctcgctctgccacaccgacgtctacttctgggaggccaggggcagatcncgtgttccctcggatctttggccacg

SEQ ID NO: 40441 - DNA, 202 bp, Zea mays
  unsure (1)..(202): unsure at all n locations
gggacagcaacctccagatcgtgtgcttcgaggtccacgccgacaggaacgagaccgcccttctgtgngncgcngacaacgtgctgcagaagctcgaccgggtcgccaaggcgctgtcattcgcctccaaggcggaggaggtggacgaggtgctcggctcgcggcgcgagaaggggttccttcctggccccaaggagagcgg

SEQ ID NO: 40442 - DNA, 282 bp, Zea mays
ggttcacccacgagctgctggaggacgccgtcggcaactaccgcgacgccgagctggaagccgcgccggcacgttcctgcagcccagccactacgacgccgacgaggtgatgttcgtgaaggaaggcgagggcgtcatcgtgctgctccgcggcgggaagagggagtcgttctgcgtcagggagggcgacgtcatggtcatccccgcgggcgccgtcgtgtactcggccaacacgcaccagtcggaatggttccgcgtcgtcatgctcctcagccccgtcgt

SEQ ID NO: 40443 - DNA, 239 bp, Zea mays
tagctacctacgcatgatcgtcacgacttgcatgtctactactgctacgtgtactactactgaataaaaaccctctccgcgcacgtcgtccttgtgtttgtgtgtgtgttgagagagagaggagacggagagccggccatgtccttttggctgtttggtttatttttgagttcatgcggtctttatttatttccatgtacgctgcttcctcgtatacccactttaaatttgtaccatgc

SEQ ID NO: 40444 - DNA, 123 bp, Zea mays
atttgcgttcacagcgttgcgtttccttggaggggattgttctcacctctcctttggattggaggaccctccttcttctcctctctctctcagaggaaggcctgaggatccaggaagaggaca

SEQ ID NO: 40445 - DNA, 202 bp, Zea mays
gacaggagaagggagttgtagtgagttttaagaatggcgagtgcacaggcagtggggcaaggagaacgaggccacttcgttctgaagagcggacacaccattccggccgttggtctaggcacttggagggccggctcagataccgctcactctgttcggaccgccatcgccgaggctggatataggcacgtggacacagctg

SEQ ID NO: 40446 - DNA, 278 bp, Zea mays
gttctgggcgacaaggttgagaaggttgtggtgtctgaccgtgttgtggactcaccgtgctgccttgtcacaggtgagtatggctggacagccaacatggagaggatcatgaaggcgcaggccctgagggactctagcatgtcggggtacatgtcgagcaaaaagactatggaaatcaacccggagaacccaatcatggatgagctccgtaagcgcgccgaggctgacaagaatgacaagtcagtcaaggatcttgtgatgttgctgttcgagacagc

SEQ ID NO: 40447 - DNA, 281 bp, Zea mays
cgagtcgcgcggcccctacagcctcctggaccagcggcccagcatcgccaaccagcacgggcagctctacgaggccgacgcgcgcacttccacgacctcgccgagcacgacgtcagcgtctccttcgccaacatcaccgcggggtccatgagcgcgccattgttcaacacccgttcgttcaagatcgcctacgtgccgaacggcaagggctacgccgagatcgtgtgcccgcaccgccagtcgcagggcggcgagagcgagcgcgacgcgacaagggcagg

SEQ ID NO: 40448 - DNA, 198 bp, Zea mays
atctgttcttatcagtttaatatctgatatgtggaccatgtgttcactttgatattaaatttattttttgtgggggagggctcgctacagtggcttgctactggggccctcaagcgtcgctcggccgttgcactataggctgagcctggcgcgccccaaccaatgcaatttcagctttaagtatgtctttagactata

SEQ ID NO: 40449 - DNA, 201 bp, Zea mays
ggttcgaggctgtcattcactttgctgggctcaaggctgtaggggacagcgtgcacaagcccctgctttactacgacaacaacctggtcggcaccatcaccctcctggaggtgatggctgcgaatggctgcaagaagctggtgttctcgtcatctgcaactgtctataggtggcccaaggaagtaccatgcaccgaagaat

SEQ ID NO: 40450 - DNA, 109 bp, Zea mays
gcaagccagcgcacgtcggtaggcacgccaccatgccggggctcaccatcggcgacaccgtccccaacctggagctggactccacccacggcaagatccgcatccacga

SEQ ID NO: 40451 - DNA, 191 bp, Zea mays
ggcgggcagctgttctcggccatggtggtgcgcaggccggcgcacctgttcctggacgagctgggcgtaggctacgacgaggccgaggactacgtggtggtcaagcacgcggcgctgttcacgaccaccgtgatgagccggctcctggcgcggcccaacgtgaagcagttcaacaccgtggcggtggagga

SEQ ID NO: 40452 - DNA, 190 bp, Zea mays
gttgagttgaaagtggaggaaaacttggatggtaatgggaataaggaaaataaaacgtcccagaagagcagtacaagtgatggctttgcttctgctaaagtgagtgatgggacaagtagtttgaggaagaccagtggtagtgtggccatgagtactcgggctgatttcactgagagtgggaagagcagca

SEQ ID NO: 40453 - DNA, 188 bp, Zea mays
gtcaactccacttctcttctccgcgtcacctcctcttcgccgccgccgacgcttcacccggcagccagccatggatgaggagtacgacgtgatcgtactaggcacggggctcaaggagtgcatcctcagcggtctcctctctgtagacagcctcaaggttttgcatatggacagaaatgactactatg

SEQ ID NO: 40454 - DNA, 187 bp, Zea mays
gaggactacaacaagttttacgaggctttctccaagaacctcaagcttggcatccatgaggactcgcagaacaggaccaagatcgccgagcttctgagataccactccaccaagagtggtgatgagctgaccagcctcaaggactacgtgaccaggatgaaggagggacagaatgacatctactata

SEQ ID NO: 40455 - DNA, 298 bp, Zea mays
aataagaacccgaaacagaaggaaccagcaccaggccttgtatttttccacattccactaccagagttcagcagttttacggcatccaatttcacaggagtaaagcaggagggtatcagctcagcatcaattaactctgggttctttgcctccatggtggaggctggagatgtgagagcagcctttgtgggacatgatcacattaatgacttctgtgggaagctcagtggtattcagctctgctatgctggtggatttggttaccatgcctatgggaaagctgggtggtcaagaagag

SEQ ID NO: 40456 - DNA, 290 bp, Zea mays
gggcgccaaggcggacaagaacctgcggatcctgctgcagaaggtgctgaagcagagcgacgtcgggagcctcggccgcatcgtgcaccccaaaaaggaagcggaggttcacctgccggagctgaagacgagggatggcatatccatccccatggaggacatcggaacgtcgcgcgtgtggaacatgcggtacaggttttggcccaacaacaagagcagaatgtatctgctggagaacacaggggaatttgttcgttccaacgagcttcaggagggggatttcatagtga

SEQ ID NO: 40457 - DNA, 298 bp, Zea mays
ttctgaaagaagatgagtcaccctgtatttttggtccaatcgtgaaacaacgatggtcctatgcttgcgcgaacaacttattgagagacttatatttgctgagggtgcagaaaatggccttgaattcacaatcgtgagaccttttaattggattgggccaaggatggatttcattcctggtgtcgatggtcctagtgagggtgtacaccgggtgctggcttgcttcagtaacaatctgctccgccgagagcctttgaagcttgtcgatgggggccagtctcagagaacctttgtatac

SEQ ID NO: 40458 - DNA, 184 bp, Zea mays
cagtgacagacacgatggtgagcgccagaattgttgtcctcctcgccactctcctatgcgctgccgccgcagtcgcgtcgtcctgggaggacgacaaccaccaccaccacgggggccacaagtccgggcaatgcgtgcggcggtgcgaggaccggccctggcaccagcgcccccggtgcctgga

SEQ ID NO: 40459 - DNA, 174 bp, Zea mays
tgtcgggacaacccgctgagtttaagcatataaataagcggaggagaagaaacttacgaggattcacctagtaactgcgagcgaaccgggagcagcccagcttgagaatctggcggcctcgccgccgaattgtagtctggagaagcgtcctcagcgacggaccgggcccaagtt

SEQ ID NO: 40460 - DNA, 176 bp, Zea mays
cacacccgagcatatcacagtgacagacacgatggtgagctccagaattgttgtcctcctcgccactctcctattcgctgccgccgcagtcgcgtcgtcctgggaggacgacaaccaccaccaccactggggccacaagtccgggcaatgcgtgcggcggtgcgaggaccggccct

SEQ ID NO: 40461 - DNA, 183 bp, Zea mays
gcagacacctccgccacatccacactcgaatcgttccccaccatggcgtcgcagggatcctccgtcttcgccgcactcgagcaggccccggaggacaccatcctcggagtgaccgttgcctacaacaaggatcccagccccgtgaacgtcaacctcggggtcggcgcctacaggaccgaggaa

SEQ ID NO: 40462 - DNA, 280 bp, Zea mays
gttcttgctgctgatggggcatggaaactatgcgattttggtagtgtatcgacaaatcataagtgctttgataaacctgacgagatgggcattgaagaagataacatcaggaagcacactactccttcatatagagctcctgagatgtgggacttgtacagtagggaggttatcagtgagaaagtagatatctgggctcttgggtgtctcttgtatagaatttgctacttcaaatcagcatttgatggagattcaaagctccaaatacttaacgggacta

SEQ ID NO: 40463 - DNA, 282 bp, Zea mays
ctgaccgctgccgctacctctcggcgaaaccctaacctaccttagaccccgccgccgccgccgcccaagggagagagagacttgcacatcaaagggcgtccgatggggaagaagaagaagcgcgtcgataaagtcttctgctactactgcgaccgcgagttcgacgacgagaagatcctcgtccagcaccagaaagccaagcacttcaagtgccacgtatgccacaagaagctctcccacgctctggcatggcatacacgtctccccagtcacaagagtcgt

SEQ ID NO: 40464 - DNA, 289 bp, Zea mays
aagctacgtcggccatgaagagggtgggcagctgactgaacaagtgaggaggaggccgtacagcgtgatcctgttcgacgaggtcgagaaggcccatgtcgccgtgttcaacaccctgctccaggtcctcgacgacggcaggctgacggatgggcaaggcaggacggtggacttcaggaacaccgtgatcatcatgacatcgaacctcggcgccgagcacctcctcgctgggatggtgggcaagaactccatgaaggtcgctcgcgatctggtcatgcaggaggtatgc

SEQ ID NO: 40465 - DNA, 173 bp, Zea mays
gctacccggccttcgcgctcgtcaacaaggtcaccggcgaggcgctcaagcactccacggggcagggccaccccgtcaagctcgtgccctacaacccggactaccaggacgagtccgtgctctggaccgagagccgttgccgacgtcggcaacgcttccgctgcgtccgcatg

SEQ ID NO: 40466 - DNA, 281 bp, Zea mays
  unsure (1)..(281): unsure at all n locations
ctttccccttccctccctccctctccccgcgggccgcacactgngaatttcgccctcgattcgaccccgattcgtccgcccgcgaccgggattccctccgccaagcgcggatctgaacgctgcgctccgtgtcgccgctcgaatccgccatgaagggggccaaatccaagggcgcccgcaaggccgatgctaagctggcggtgaagagcaagggggcggagaagcccgccaagggcaggaaagggaacgccggcaaggtacccaacaagcctaagagggct

SEQ ID NO: 40467 - DNA, 284 bp, Zea mays
agtgatgccaccttcatatgagatgggagggatgccaatgagagaagctgccccccaacctgttccaattggggcgctagcactgcacttgctaacgccccaccagatcagcagagacttatgcttggtgagaacctgtatcctcttgttgaacagctggaacgtgagcaggctgccaaggtcactggcatgcttttggagatggatcagacggaggttcttcacctgctggagtcgccagatgctctgaaagccaaggttgctgaagccatggaggtcctccg

SEQ ID NO: 40468 - DNA, 288 bp, Zea mays
cgccgtcatgtcgaagcgaggtaggggaggttcggctgggaacaagttccgcatgtcactgggtctaccggtggcggccacggtgaactgcgcggacaacacgggcgccaagaacctctacatcatctccgtcaagggcatcaagggccgcctcaaccgcctcccgtccgcctgtgtcggcgacatggtcatggccaccgtaaagaagggaaagcccgacctcaggaagaaagtgatgcccgccgtcatcgtccgccagcgcaagccgtggcgtcgcaaggacggtgt

SEQ ID NO: 40469 - DNA, 278 bp, Zea mays
taccattagcagtagccacagccagaacaccagcagacagcagcatcagcagggaggaacacgatgagcggcgccggtccggatctgcagctgccaccggggttccggttccacccgacggacgaggagctggtgatgcactacctctgccgccgctgcgccggcctgcccatcgccgtccccatcatcgccgagatcgacctctacaagttcgacccatggcagctcccaaggatggcgctgtacggcgagaaagagtggtacttcttctccccgcg

SEQ ID NO: 40470 - DNA, 167 bp, Zea mays
ccgtgatcgcgctcacggtggccacccccgtgctggtgatcttcagcccggtgctggtgccggccgccatcgcgctggcgctcatggcggacgggttcgtcacctccggcggcctcggcgtcgctgcgctgtccgtgttctcctggatgtacaagtacctgacgggc

SEQ ID NO: 40471 - DNA, 282 bp, Zea mays
agattacatccatgtggttgaccttgctgacggacatattgctgcattgcagaagctttttgagaactctagcatagggtgtgaagcgtacaaccttggaaccggaagaggtacatctgtgctggagattgttaaagcatttgagaaggcttccgggaagaaaatacctctgatttttggtgaaagacgcccaggtgatgcagagattctgttttcagagactactaaagcagagagggagcttaactggaaagcaaaatacggtattgaagagatgtgccg

SEQ ID NO: 40472 - DNA, 282 bp, Zea mays
atagaaatggaggaattctaaggatacaaaccctcctgatttatatgcaaagtttatgagcgcgctgtacaacttgcttgatggttcctctgacaacaccaaatttgaggatgactgccgagctattattgggactcaatcatatgtcctctttactttagataaactgatttataaagttgtgaagcagcttcaagctatagcaacagatgaaatggacaataagcttctgcaactatatttatatgaaaaatcaagatctcctgggaggttctttgacct

SEQ ID NO: 40473 - DNA, 209 bp, Zea mays
gcttctcctccccctccggttcgggttcgggttcgtgaggttctccggggttcggtttcgtgggtgagcggatcgagatggcggcgtcggatgttgagtaccgctgcttcgtcggcagcctcgcctgggccacggacgaccactccctccacaacgccttcagcacctacggcgaggtcctcgagtccaagatcatcctcgatcgggag

SEQ ID NO: 40474 - DNA, 309 bp, Zea mays
atcaagtcctgctcaggggtgtcgaggaagacgcaggagctgtacatgttggtgttcgtggcgaggtacctggacctcttcacggattatgtctcgctctacaactcggtgatgaaggtggtgttcatcaccagctcggcggccatcgtgtggtgcatgcgccgccacccgcaggtacgaaggacgtacgacaaggagcaggacaccttccgccacacggtgctcgtcgccgccgcattcctgctcgcgctgatattccacgagcggttcaccttccgcgagatatgctgggcattttcaatctatttg

SEQ ID NO: 40475 - DNA, 302 bp, Zea mays
cccaacaccacctcgccgcgatctccgtagcctccgtcgcgtcgagcatcgatcatgtcggcctactgcggaaagtacaaggatgagctcatcaagaatgctgcctacattggcacccctggcaagggtatccttgctgctgatgagtccactggcaccattggcaagcgcctttccagcatcaatgtcgagaacgttgaggagaaccgccgtgccctccgtgagctcctattctgctgccctggtgctctccagtacatcagcggtgtgatcctcttcgtagagaccctgtaccagaagac

SEQ ID NO: 40476 - DNA, 203 bp, Zea mays
cccagatccaattcgcgagttctccctcctctgccgccatggcgctctctgtggagaagacctcgtctggacgggagtacaaggtcaaggatctctcgcaggcggacttcggccgcctcgagattgagctggccgaggtcgaaatgcccggcctcatggcgtgccgcgccgagttcggcccgtccaagcccttcgccggcgct

SEQ ID NO: 40477 - DNA, 307 bp, Zea mays
ctccaacatcagccagctgatcagccagaggctggcgccacgcgcgacgacggtccgctccggcgcggcgccagggccgtcctctacttcgcggaggacaactggaagcgcgtctgggtgatggcgctctggctggccatcaacgccggcctcttcacctggaagttcctcgcgtaccggcgccaccccacgttcgacgtcatgggctactgcgtctgcgtcgccaagagaggcgccgagaccaccaagttcaacatggcgctcatcctgctccccgtgtgccggaacaccatcacgtggctgcggt

SEQ ID NO: 40478 - DNA, 309 bp, Zea mays
atctcatccgccttcctggcgattgcggcgacgaggtgacgatagagctgcccccgcaaggaaaacggacaagagaggcggaggctgatagggagaggagacggaggaccaagagcggcgtcgatctaaaagcgttggcggcggccatggccaccgcggaccggacccggactttcatgaaggacgtcaaacgcgtcatcatcaaggtgggcactgcagtcgtcacgaggggtgatgatgggcgactggctgtgggccggttggggtgtctttgtgagcaggtaaaagagctgaatgtcttaggatacg

SEQ ID NO: 40479 - DNA, 307 bp, Zea mays
agagcggccgccctttttttttttttttttttttttttttgcacaagataaacttcaggtgacaaatcaatactaaaaaaactattacacctttgccagtattaagcagaagagataaattatgatatttgaatgagaatatatggctagctacatacagttttggatagctcactacccatctccatggttcgcaagcacagagaaattatttcagtttgcaacaaaaaactgatgacttcagtatcatcaaccttggatgcaacctactgatccaattgaataaccttggatgcaacctactaat

SEQ ID NO: 40480 - DNA, 211 bp, Zea mays
gtgggggagaggtaccgccacggcggtggcgccgaggagctgccggagagcgtcgactggagggagaagggcgccgttgcgcccgtcaagaaccaggggcagtgcggaagttgctgggctttctctgcagtaagctcagtagaaagcgttaaccaaattgttactggtgagatggtgaccttgtccgagcaggagcttgtagagtgctcga

SEQ ID NO: 40481 - DNA, 308 bp, Zea mays
tgttatccgagatgctgataccatgaactttgctgacattgagaaagggataaacaaccttgcaaagaaggcaaatgagggggcgctctcgattgatgacatggcaggaggaacattcactatctccaatggtggtgtctatggaagcctcctcagcacacctatcatcaaccccccacagtcgtcaattctggggatgcattccattgtgcaacgccctgtggttgtgaatggtgacattctcgcaaggccaatgatgttccttgcgctgacatatgaccacaggctgatcgatggcagagaggctg

SEQ ID NO: 40482 - DNA, 301 bp, Zea mays
gcgaacaagcaatccgaattctctgcgatttctctagatctcgaccacccctactagttttggttcctcctttcgttcgagagagcgtttctagtggcaatggcgaagagcgagggtccggcgatcgggatcgacctcggcaccacctactcgtgcgtcggcgtgtggcagcacgaccgggtggagatcatcgccaacgaccaggggaaccgcaccacgccgtcctatgtcggcttcaccgacaccgagcggctcatcggcgacgctgccaagaaccaggtcgccatgaaccccaccaaca

SEQ ID NO: 40483 - DNA, 297 bp, Zea mays
gcgctgctcaactgtgacctaattggcttccacacttttgattacgccaggcacttcctctcgtgctgcagtaggatgctgggaattgaataccagtcaaagcgtgggtacattgaattggattactttggccgcactgtcgggatcaaaatcatgccagtgggagttcatatgggtcaattggagtcgggtctgcgcttgcctgataaggaatggaggctttctgagcttcaacggcagtttcaggggaaaactgtcttgcttggtgtggatgatatggatatctttaaggggatc

SEQ ID NO: 40484 - DNA, 303 bp, Zea mays
caacaacaaggagcgcggcggcccctccttccttcctcccacttctctcgcgcggcgctcgcttacctcgcctcgcattccgttcgagcaggggagcggcagtgagaagggagggaattaaggcaagatgttcatcgagagcttccgcgtcgagagcccccacgtgcggtacggcccgacggagatcgagtcggagtaccggtacgacacgacggagctggtgcacgaggccaaggacggcgcctcccgctgggtcgtccgccccaagtccgtcaagtacaacttccggaccagcaccgcggt

SEQ ID NO: 40485 - DNA, 298 bp, Zea mays
ccaggacatccgccggggcctcaggggcgactcggtggtgctcatggggaagaacacgctcatcaggcgttgcatcaaggtgtacgccgagaagaccggtaaccacacctttgacccgctcatggacctcctggtcggcaacgtaggcctcatcttcaccaagggagacctcaaggaggtgcgcgaggaggtcgccaagtacaaggtgggggctcctgctcgtgttggtctggttgctccagttgatgttgttgtgccccctggcaacactgggctggatccgtcccagacctctttc

SEQ ID NO: 40486 - DNA, 304 bp, Zea mays
gttaccacagacgacgggcgccatgaaagtcccggtgcttctcctcctggtctccctgtgcttctcgctcgcgctcgcgtggcaaacggacacggaatcgggctcaggcaggccgtaccactacggcgaggagagtttccggcactggacgcgctcccggcaaggccggttcagggtgctggaacggttcacccacgagctgctggaggacgccgtcggcaactaccgcgtcgccgagctggaagccgcgccgcgcacgttcctgcagcccagccactacgacgccgacgaggtgatgttcgtg

SEQ ID NO: 40487 - DNA, 295 bp, Zea mays
gcgatggcgacggtggcgatggacatctcgaagcccactccagtggcgtccggcgacgaggccgcggcggcggcaaggggaggagcggcggagggggcgaggggctgcggcagtactacctgcagcacatccacgacctgcagctccagatccggcagaagacccacaacctcaaccgtctcgaggcccagcgcaatgacctcaactcccgagttagaatgctcagggaagagttgcagttgcttcaagagcctggctcatatgttggtgaggtggtgaaggtcatggggaaatc

SEQ ID NO: 40488 - DNA, 292 bp, Zea mays
gagctctctgtcccctgtctcctctcgccctcgagctctcccaccccgtctcctatcgccctcgagctctcactcccccgtctcttgtcgccctcgagctctcgcaccctccactcccgtcgctggtgaggatctggatccttcagggtgcgtcaaaaggttgtcagtctgcaagttgaatcatggcggagacttggcttcgatctttggtaccgagaaggacagggtcaactgccctttttacttcaagattggggcttgtcgtcatggggatcgctgttctcgtctgcac

SEQ ID NO: 40489 - DNA, 297 bp, Zea mays
cggcaaccgcgtccggccgtccgcttccgtttccttggataaccacgacccccgcccgccccccggcaagcgaaagcgaacactgccaacccagccatggagaaggcgatcgatcggcagcgggtcctcctggcgcacctcctcccctccccctccgccgcctcctcgcagcctcagcttgcggcgtcggcgtgcgcggccggggacagcgccgcctaccagaggtcctcctccttcggggacgatgtcgtcgtcgtcgctgcctacaggacgccgatatgcaaggccaagcgagga

SEQ ID NO: 40490 - DNA, 297 bp, Zea mays
ggcatctcccacttcacctcccacatgggattcctcgacgtcatgcgctccgtcgtcaaccgccacgacgagtggaagtggcagacgatcgtcatgggctccgccttcctcgccatcctcctcctcacgcgccaaatcagcgccaggaacccaaagcttttctgggtatcagcaggtgctcccctggcgtcggtgatcatctccaccatcctctccttcatctggaaatcccccagcatcagtgttgtaagcatcttcagttccattgagacctcaccaatcattattcgtcagttc

SEQ ID NO: 40491 - DNA, 298 bp, Zea mays
catttacgtatatgcccttgtcccggttcctttccccatccccaactccattatttgcttgatccttgagaagagagaggaagacgagagctagaagcgaaggagaaaagcagttcttcagctaggcaggagggcacaggaaggaggagatggcgtcaaagaggattcagaaggagctcaaggatctgcagaaggaccctcccacctcgtgcagtgcaggtcctgttggtgaagacatgttccactggcaggcaacaataatgggtccatctgatagcccatattctggtggagtttt

SEQ ID NO: 40492 - DNA, 299 bp, Zea mays
caagaagcttgtgacgcttgctatggatagaaagagcagagagaaggagatggcctcagtactcctttcttcattgagaatagaattgttttcaactgatgacatcattgagggttttgtaatgctcttgcagtcagcagaagacactgcactcgacattgtggatgctcctagtgaacttgctctcttcctagctagggcagtgattgatgaagtattaattccgctcaatttggatgaaatcagcattaagcttcggccgaacagcagtggcagccaaactgtccagatggcgcgtg

SEQ ID NO: 40493 - DNA, 197 bp, Zea mays
acagggcccagtcgctcaaaaccctagagctctcgcctgctcgcctccgccgccggagcgagctccccatcttcatccgtcaaccatggcgacccagatcagcaagaagaagaagttcgtcagcgacggtgttttctacgccgagctcaatgagatgctgacgcgggagctggcggaagatggctactctggcgtgg

SEQ ID NO: 40494 - DNA, 289 bp, Zea mays
agtcgcatcccatcccactaccacccatctcgtcgtccgccgattcgatccggttcttccaacccaggggcagtgatggcgacgaagaggagcgtgggcaccctcggcgaggcggatctgaaggggaagaaggtgttcgtgcgcgccgacctcaacgtcccgctcgacgatgcccagaagatcaccgacgacacccgcatccgcgcctccgtccccaccatcaagttcctcctcgagaagggcgccaaggtcatcctcgccagccacctgggtcgtccaaaaggtgtca

SEQ ID NO: 40495 - DNA, 283 bp, Zea mays
agtcctacaaggacagcactttgatcatgcagctccttcgtgataacttgaccctatggacctctgacatctcggaggaccctgctgaagagattagggaggcgcccaagcgcgactcgagtgaggggcagtaaagccggctttatgtgcctagaaactagtagctagtgtttgctgctgtcgaatgacactatgcaatgtgatctggaacctggtttcttgggtgcgacgcttgtagccgtgttatgactgtcgtccgtaaaatttgggggctccccgtaag

SEQ ID NO: 40496 - DNA, 282 bp, Zea mays
agagagttgcaaagctatatcaccctaatttggttgctgtaaaaggatgttgctatgatcatggtgaccggtttattgtctatgagtttgtagcgaatggtcctttggatgtgtggctgcatcatattcccagaggagggcggagcttgattgggcaatgagaatgagagctgccacaactcttgctcagggaattgcgttcttgcacgacaaggtaaagccgcagtggtgcaccgtgacatccgtgcaagcaacgtcctactcgacgaggaattcgggtcg

SEQ ID NO: 40497 - DNA, 279 bp, Zea mays
ccaccagcaaatccccaattcctccgagttcgagcgaccatgtcggggcgtggcaagggcgggaagggtctgggcaaaggcggcgccaagcgtcaccgcaaggttctccgcgacaacatccagggcatcacgaagccggcgatccggaggctggcgaggaggggcggcgtgaagcgcatctcggggctcatctacgaggagacccgcggcgtgctcaagatcttcctcgagaacgtcatccgcgacgccgtaacctacacggagcacgcccgccgcaag

SEQ ID NO: 40498 - DNA, 278 bp, Zea mays
gtaacacaaggctgaatttttgttcggtctagccgacccgacgatggcgtccagcgacgggaaaccactgccaaccccggcctctgtgggcggcggcggcggcagcagcaccgcgccgcccgggcagccgaccacggtagcgtccaaggtgctggacatgggcgctgcggcgatgcagtcgttgcgccccgtgaagcaggcgaagagcacatgtgcacgttcgcgctgtacgcgcacgacccgaagcggcaggtggagacgcaccactacgtctcccg

SEQ ID NO: 40499 - DNA, 279 bp, Zea mays
tttgttaacaaagaattccctcatagccgccgccgccgccgccgccgccgctcatctcgccgagaggtgacgggaccgaggaactcgccgagttctaagatagagaatcgcttttcacagcctggggtctgctgcgtagggtggtgttgaaggggagaagtttaagatctgttccacagatcacgcgtgcgcgctcgcgaatcgggggttccacacatagcttcgtcgttttgaatttgatgtactaatggagtctaagggtggcaagaagtctagcag

SEQ ID NO: 40500 - DNA, 283 bp, Zea mays
cagacacgatggtgagcgccagaattgttgtcctcctcgccaccctcctatgcgctgccgccgcagtcgcgtacgtcctgggaggacgacaaccaccaccaccacgggggccacaagtccgggcaatgcgtgcggcggtgcgaggaccggccctggcaccagcgcccccggtgcctggagcagtgcagggaggaggagcgggagaagcggcaagagcggagcaggcacgaggccgacgaccgcagcggcgagggctcgtcggaggatgagcgagagcaggaga

SEQ ID NO: 40501 - DNA, 278 bp, Zea mays
agcgaccctccctccttcgctccttccgcgccgcctcccggccgtcgccgccatggtgaagtactcgcaggagccgggcaaccctaccaagtcggctaaggccatgggcagggatctgagggtccacttcaagaacacaagggagacagcctttgcgcttcgaagttgtctttgaccaaggctaagggataccttgaggatgttattgctcacaagcaggcaattcccttccggagatactgtgggggtgttggtcgcaccgcgcaagctaagtcgcg

SEQ ID NO: 40502 - DNA, 274 bp, Zea mays
ctttgaccgccgcctcccttcccctccactacagctcctcaccaccccactcccccgcaggagcggcggcggcggcggcgaggtcgtaccccacatcggcgagcggcggcggcaccgcggaggcaaaggcaagatgttcgggcgcgcgccgaagaagagcgacaacaccaagtactacgagatcctcggggtgcccaagtcggcgtcccaggacgatctcaagaaggcctaccgcaaggctgctatcaagaaccaccccgacaagggcggtgac

SEQ ID NO: 40503 - DNA, 270 bp, Zea mays
atagaaatggaggaattctaaggatacaaaccctcctgatttatatgcaaagtttatgagcgcgctgtacaacttgcttgatggttcctctgacaacaccaaatttgaggatgactgccgagctattattgggactcaatcatatgtcctctttactttagataaactgatttataaagttgtgaagcagcttcaagctatagcaacagatgaaatggacaataagcttctgcaactatatttatatgaaaaatcaagatctcctgggag

SEQ ID NO: 40504 - DNA, 272 bp, Zea mays
gtcaccatgcatgaaggccatccccggatcattcaccgcgacatcaagtcggccaacattcttctcgacaacaacttccaagccaaggtcgtcgacttcgggctggccaagctgacgtcggacagcaacacgcacgtgtcgacccgtgtgatggggacgttcgggtacctggcgccggagtacgcgtcgagcgggaagctgacggacaagtcggacgtcttctcctacggcgtggtgctgcttgagctcctgacgggtcggcgcccatcgac

SEQ ID NO: 40505 - DNA, 273 bp, Zea mays
gtctgcccctctctccatttcgcggaggaagaaaaaggggaccaaaaaacggaaaaggggataggaggaacggatcagcggtggaagcttccagccctagcgcagcaatggcgggttggtgcgagcaggcggtggcgctgctacagcgccccgcggtggcggagatggccgtcgacgtgctgctctgcgcggtgccgatctgggccgccgtcatgatcggcctcgtcgtcggctggtcctggcgcccgcgctggacgggactgctcttcctcg

SEQ ID NO: 40506 - DNA, 274 bp, Zea mays
acaacccagtcgctcaaaaccctagagctctcgcctgctcgcctccgccgccggagcgagctccccatcttcatccgtcaaccatggcgacccagatcagcaagaagaagaagttcgtcagcgacggtgttttctacgccgagctcaatgagatgctgacgcgggagctggcggaggatggctactctggcgtggaggtgcgcgtcacgccgatgcgcacggagatcatcatccgcgccacgcgcacgcagaacgtgctcggcgagaagggccg

SEQ ID NO: 40507 - DNA, 303 bp, Zea mays
ccagacaacactcaccgatagcaagtagcgccgccgacgtttcgagagcagagtatccaagctagccaagcgcgcacctcggtgacctagctagctacctagctagttcaggcgacgatatggcgtctggtcaggagagcaggaaggagctggaccgcatagctcgcgagggcgagaccgtcgtccccggcgggaccggcggcaagagcgtcgaggcccaggagcacctcgccgaagtggcagcgcggaggccagactcgcagggagcagctggggcagcaggggtacagcgagatggggaag

SEQ ID NO: 40508 - DNA, 305 bp, Zea mays
atagaagccactcactgaaaagtgccgctggaccacatacgattgttgatggtaaagaagttgtgaactttgcatcagcaaactacctcagtttaattggcaacgaaaagattattgattcttgcatcagttcattggagaaatatggtgttggttcttgtggtccatgtggcttttatggaacaactgatgtccatcttgactgtgagtcaaagatagctaaatttttggggactccagactccattctttattcatatgggatttctacaatattcaatgtgatacctgccttctgtaagaaa

SEQ ID NO: 40509 - DNA, 307 bp, Zea mays
gtcttggtgtttcatcttgcatcaagcaaagccttaaagatgctggtgtggcgcctgaggaggtcaactatattaatgctcatgcaacatcaacccttgctggtgatctggcagaggtgaatgccatcaagcaagtcttcaaggacccatctgggattaaaataaatgcaaccaagtccatgataggacattgccttggcgcacaggcggtttggaagccattgctactattaaagcgataactactggatgggtgcatccaagcataaaccaatttaacccagaggaagcagttgaatttgacact

SEQ ID NO: 40510 - DNA, 195 bp, Zea mays
tgacggcccagagatggtgacgcagtgccccatccgccccggcagccgttacacctaccgctacaacgccacggtgcaggatggcacgctgtggtggcacgcgcacagctccatgctccgtgccaccgtccatggcgccattgtcatcaagcccaggaacggcgcccaggggtaccctttccccaaacccgacca

SEQ ID NO: 40511 - DNA, 196 bp, Zea mays
gtttgcaaagctcctcctcgatccatcgatcactgcaccggccggctgcaccgcgctcgcaggggctagccaacgagacggcagcaatggcggaccgtgaccgcagcggcatctactgctgcgcccacgccacctacgggcagcagcagcagcagggaggaggcgggcgcccgatgggtgagcacgtgaagggcat

SEQ ID NO: 40512 - DNA, 305 bp, Zea mays
caagaaaaagccggctgaggaaaaaggcatatgtgcaacagctagagagcagtaagctaaaacttgcaagcctggagcaagaactccagaaagctcgacagcagggaatcttcatttctagttctggagatcaaactcatactatgagtggaaatggagctatgaccttcgatttagaatattctcgatggcaagaggaacaaaataagcagataaatgagctgaggactgcagtaaatgctcatgcaagtgatagtgacctccgtcttatagtcgatgggataatggcacattatgacgagata

SEQ ID NO: 40513 - DNA, 195 bp, Zea mays
acctaacacacccgagcatatcacagtgacagacacgatggtgagcgccagaattgttgtcctcctcgccaccctcctatgcgctgccgccgcagtcgcgtcgtcctgggaggacgacaaccaccaccaccacgggggccacaagtccgggcaatgcgtgcggcggtgcgaggaccggccctggcaccagcgccc

SEQ ID NO: 40514 - DNA, 313 bp, Zea mays
gccgcaacgccgagaagacgcgagatgaagggaggaggtgagccaccggaagcggagacgtgagtagtcgaccaaccccgtcgatccggctgcggcgcggcgtgctagatcgctaccgaccatggtggtggaggagatcgccgagggggtgaagaacctcaccgttaccggagatgcggcggcttcaggcggagaggggcagaggaggggcggcggcggcagcagcaaccgcatccaggtgtccaacaccaagaagcccctcttcttctacgtcaacctcgccaagaggtatatgcaacagcacgacgatgta

SEQ ID NO: 40515 - DNA, 252 bp, Zea mays
cacattttgagacaactgtaacagatgtcctgaacatgtatacaatgatcactggaaagactgtggatcttagtgtggatttgagtgcagctagtgctgctgaagaatactgatttcagtcataatgtttatcaaagatcacatcattggggacagcacatgaccaaacttcaatgagtggctagtatgagtttagtcggttccagattataccatgccgacttctactgtacctcgtgaatcgtgatgtct

SEQ ID NO: 40516 - DNA, 314 bp, Zea mays
cctcactcaaaaccctcaccgtgcctctactgcaccccccccccccgatgtccgccgccgcgtcctcggaggaggccgtcaaggcagcgaaggtgctgatggtcggggcgggaggcatcggctgcgagctgctcaagacgctcgcgctctccggattcagcgacatacacatcacggtgcacccaagtaatccaacatttttctctgcagattgacttggatacaattgaagttagcaatctgaatagacagtttttgtttcggcagagtcatgttggtcagtcaaaagctaatgttgctcgggatgctgtgtt

SEQ ID NO: 40517 - DNA, 284 bp, Zea mays
ctttgaccgccgcctcccttcccctccgctactgctcctccccaccccactcccccgcaggagcggcggcggcggcggcgaggtcgtaccccacatcggcgagcggcggcggcaccgccggaggcaaaggcaagatgttcgggcgcgcgccgaagaagagcgacaacaccaagtactacgagatcctcggggtgcccaagtcggcgtcccaggacgatctcaagaaggcctaccgcaaggctgctatcaagaaccaccccgacaagggcggtgaccccgagaag

SEQ ID NO: 40518 - DNA, 303 bp, Zea mays
catctccctggcatgcctggctcgcccgtccgcgctccacctcgtccatggccgccagtcgagtctctctgtccctgctcggatggcgcacgcccctccctctcggctccttcctcttacttcccatgggcgctttcctcgcggggttcacgcagctcgtcgagtggtggacgaggtgcgccaccgcccaagccgaatcgagctgcagaaaccaccttgccatggcgacacaggccggccgtcgtgtgcccctgtagcacgcccttgtcttctccccatcgtccgaccgtagcccagctcgga

SEQ ID NO: 40519 - DNA, 296 bp, Zea mays
ggcgccgccaaccgcccgtcggcaagcaccagcaccgtctccacctacctccagaacatgcagcggggccgctacatccagcccttcggctgcctgctcgccgtccacccggacaccttcgcgctgctcgcctacagcgagaacgcgccagagatgctcgacctcacgccacacgccgtccccaccatcgaccagcgggatgcgctcggcatcggcgtcgatgtgcgcacgctcttccgctcgcagactccgtcgcgcttcacaaggccgccaccttcggggaggtcaacctactc

SEQ ID NO: 40520 - DNA, 306 bp, Zea mays
gaatgtgccagttccggtggttcctcaaagtgaaaggttccttttccaacgtgtatgctcaaggggctatcacttgttccgctgtatagcgagatacgggtataaagacaagaagcaggagcaccatagcgtatttgagcgtcttctgattgaaggtcttgagaaattcatacaaagagaggcagtagagctatccctacaaagcgaagacgacattgactcggacgaagagcctccaacccctgtgaagatcatcacagcaccaaatggcagcctctactcgctcgacgttcctctcctggcaga

SEQ ID NO: 40521 - DNA, 303 bp, Zea mays
gcctcggagggcggccacggcccgcactggcccctgccgccgttcggcgagtcgcgcggcccctacagcctcctggaccagcggcccagcatcgccaaccagcacgggcagctccacgaggccgacgcgcgcagcttccacgacctcgccgagcacgacgtcagcgtctccttcgccaacatcaccgcggggtccatgagcgcgccattgttcaacacccgttcgttcaagatcgcctacgtgccgaacggcaagggctacgccgagatcgtgtgcccgctacgccagtcgcagggcggcgag

SEQ ID NO: 40522 - DNA, 306 bp, Zea mays
cgacggcgtctggtccgaggacgacgatgaggagacgttgtcgtttgaggatagcgtctccggctccgacggtgagtcccacgaggctgcggtcgcggaagagagcgactcttcggaggatgaggtggcgccaaggaataccgtgggagacgtgcctcttgagtggtacaaggacgaagagcacattgggtatgacatcgatgggaggaagatcaagaaacgtgatagggaggggcgcattgaagcctacctcaggaacgcagatgatgccaagaattggagaaagatctatgatgagtataatga

SEQ ID NO: 40523 - DNA, 309 bp, Zea mays
gtggtacccggcgcattttgattcatccacagtggacaatatgaggaggcttctggagcatgctggtgttcctgggcacatatatccactatcattactgtgctacgaggttatgcctccaccacaacaggtcgagaaagagattggtgaacagagggtgatatccttccatggagtaggcttgtcagcaactgaagaaacaaagtatggggatattacttgtcataccaagaatgctgatgagggaagggagctattcacaaatactttgtacaactcagttgttaatcagtacaatgtcctcaaatc

SEQ ID NO: 40524 - DNA, 239 bp, Zea mays
ccagctttggaggctacatgtttgatagagatgcgcttaccatgtcttttgctccaaaagatgagcatgaagctcaagtacaatttgcattagaaaggggaattccagcaatatcagctgtgatgggcaccaagagacttccgtaccccagcagagtctttgatgtcattcattgcgctcgctgcagggtcccttggcacatcgaaggtggcatgcttttgctggaattgaaccgcttg

SEQ ID NO: 40525 - DNA, 296 bp, Zea mays
gtaaaagaagaggatcaagtctgatacagattctgcacgattttctgctgcatctatgaggaatcaacttgaccaagctgcaagccttaaaggagagcaggttgctgctagggtaaaatcagatgacgaaaaagatgagtggtttgtcgtgaaggtcatacatttcgataaggaaacaaaagagtatgaagtacttgatgaagaaccaggtgatgacgaagagagcactcaaaagaagtaccagttgcctatgtcttacattattccatttccgaagaaaggggatccttcgagtg

SEQ ID NO: 40526 - DNA, 180 bp, Zea mays
cttgacatcgattctggagtcagctggctgtggagttgacaatgaacagatggaactccttctgtcgcagctgagcggtaacgacattaccgagctcattgccgccggcagggacgagtttgcttcagtcccatgtggcggtggcggtgtggctgtcgcggcagctgcgcctgctgctgg

SEQ ID NO: 40527 - DNA, 298 bp, Zea mays
tcgaacgcgagggagaagctgccggcggacaagggggcgacgcgggaggacgccgagagggtggtgtccgccgagatacggaacaagctggacatggcgaccacgccgggcggcgtggcggacgcggtgactacagcggcccggctcaaccaggagcgcccgaggccataggtcgtcgtggcctttatatcccatgtggaacagtggaagcgtgcgatcagaagcctgcgcgcggatgagcgtgcttaatagcacagtagcgcgtgccgttttttttttggacttactaagaaaacta

SEQ ID NO: 40528 - DNA, 305 bp, Zea mays
ggaggctctgggtccggatccggcagcggtggaatccactgagcttgcacttcagtagctagagcctagagccccgcattagtgtcagtccattctgtggttttttgctgtctttgttacgagaattaatcaggaataaagcgtaatgggcttcgtgattgtagttcgagtaggtagcaaagcatgcaactgatatgaatgcatgtaatggctatctacgagtgtgtgcccctagctgtaatctgtttctcatcgatcgttaaggtcgttgcatccggttttatttatcttctgaaaccaaaata

SEQ ID NO: 40529 - DNA, 305 bp, Zea mays
gcggcccctcattccttcctcccacttctctcgcgctgcgctcgcttacctcgcttcgcattccgttcgagcaggggagcggccgtgagaagggaagggagggaattaaggcaagatgttcatcgagagcttccgcgtcgagagcccccacgtgcggtacggcccgacggagatcgagtcggagtaccggtacgacacgacggagctggtgcacgaggccaaggacggcgcctcccgctgggtcgtccgccccaagtccgtcaagtacaacttccggaccagcaccgccgtccccaagctcgggg

SEQ ID NO: 40530 - DNA, 304 bp, Zea mays
gtttgtccattcgcattggtctgaatactgtagctactagcgcgagtgccactgtgccgcagctgcctgctcgccattactgcaagctgtgttcaatcaaagcttaattaggctccctctacatctgatccagctaagtagctagccagcactacagaagggcgtggcaagaatcaggagagagatagcaggggggctagctagctgagctcgtgcgacgaagaatggccggaattggcaggcacatggtggcgccgctcctggtgctcaacctcatcatgtacatcatcgtcatcggcttcgc

SEQ ID NO: 40531 - DNA, 230 bp, Zea mays
tggtgagctcggcgggctccctgctggcgatgctgcaagaaccggcgccggaactcaagctacacgcgctcgccagcctcaattctctcgtccacgccttctggcacgagatctccaccagcgtctcctccattgagagtttgtatgaagacgaggagtttgtccagaggcaacttgcagcactagttgcctctaaggtatttttctacttgggcgagctaaatgatgct

SEQ ID NO: 40532 - DNA, 305 bp, Zea mays
ttctcgtcagccttgcaatggatccaccgaagctaggagatgaatctttcgagtcatttgataaggagaaggaacagatccgttcatccttctgcaagcgagccaagaccctggagaaagctttcagcggcctggagggcgtgacttgcaacaagttagagggtgcgctgtacttgttcccacggctccacctcccctccgctgcgatcagggccgccgatttcgagggagtttcacctgacatattctacgctcaccgcctgcttgatgccaccgggattgccgttgtgccgggctctgggttc

SEQ ID NO: 40533 - DNA, 304 bp, Zea mays
ggcggctgcggcggacacggaggcgaaggaggaggagcagcagcagcaggcggcgccgaggagcggcatcccactcagtgcttgcaaccatggctaggggattgaagaagcacttgaagaggctcaatgcgcccaagcattggatgctcgacaagcttggcggagcttttgctcccaagccatcttctggacctcacaagtccagggagtgccttcctctgatcctcatcatcaggaacaggctcaagtatgctctgaactaccgtgaggtcatttctatcctgatgcaacgccatgtacttgt

SEQ ID NO: 40534 - DNA, 294 bp, Zea mays
cagcctcagcttgcggcgtcggcgtgcgcggccggggacagcgccgcctaccagaggtcctcctccttcggggacgatgtcgtcgtcgtcgctgcctacaggacgccgatatgcaaggccaagcgaggaggcttcaaggacacctacccagaggacctcctcactgttgttctcaaggctgttctggacaacactagaatcaatccagctgacatcggtgacatcgtcgttgggacggtgctcggccctggttcccagcgtgcaaacgagtgcaggatggctgcgttgtttgct

SEQ ID NO: 40535 - DNA, 301 bp, Zea mays
gtcctcccaaccataattggaagcaacgtgacagtgggtcacagtgctgtattacatgcatgtaccattgaggatgaagcttttgttggtatgggtgccactctgcttgatggagtggtagttgaaaagcacagcatggttggtgcaggatctcttgttaagcagaatacaaggattccttctggagaggtctgggtcggtaatcctgccaagttcctaaggaagcttacagaagaggagattgcgttcatcgctcaatcagcaaccaactatatcaacctagcccaggtccatgcagccg

SEQ ID NO: 40536 - DNA, 302 bp, Zea mays
gtgggcggttagggttgggagatctcttgactcacgacacgagcagcagaattcgtcgagggccgctggttgctgcgagaggtccgggccttcgtgggatcttgaaaattgaatgttctaatggagtccaagggtggcaagaagaagtctagcagtagtcgttcctccctgatgtacgaagctccccttggctacagcatcgaggatatccgccctgcaggcggcatcaagaagttctccgctgcttactcgaactgcgcgaggaagccatcctgatatctctgtcgtcatccccatcctag

SEQ ID NO: 40537 - DNA, 303 bp, Zea mays
gacctacctgcggagtttggtgtttccactagttttaatgttgcagatttgaaaccgtatgcgggagaagatgaggagttgccgtcgaggacgacttcagttcaagaaggggaggatgatgcggacatcaacaccaacacgagcacatctacaccagcagcaccttctccagcccaggcgccaccccttccacctgggccagtgactcgggcccgtgcaagagaattgaactacatcatgttgttaaagaacgaaggcccggaagaatagacgaccagcccaattgcggcccataatggacga

SEQ ID NO: 40538 - DNA, 301 bp, Zea mays
tgaagcggcggcggcggacaaacgcaggcgaaggcgagggtgtgagggaaggagcaccagccatggtgcacgtcaacttctaccgcaactatggtaagacgttcaagaaaccaaggcgtccttatgagaaggagcgtcttgatgctgaactgaagctggttggtgagtatgggctgaggtgcaagcgtgagctttggagggtccagtatgcactgagcaggatccgtaatgctgcaaggcacttgctcacccttgacgagaagaaccccgtcgtatctttgagggtgaggcattcttcgcc

SEQ ID NO: 40539 - DNA, 304 bp, Zea mays
cgcactcgcacgtacaccacactagttaccacagacgacgggcgccatgaaagtcccggtgcttctcctcctggtctccctgtgcttctcgctcgcgctcgcgtggcaaacggacacggaatcgggctcaggcaggccgtaccactacggcgaggagagtttccggcactggacgcgctcccggcagggccggttcagggtgctggaacggttcacccacgagctgctggaggacgccgtcggcaactaccgcgtcgccgagctggaagccgcgccgcgcacgttcctgcagcccagccactac

SEQ ID NO: 40540 - DNA, 304 bp, Zea mays
atccgctccacaggatcctctgcgccaccgcaaccgtgtgaccgcccgtgccgccggcgatcccgatccgccgacccgtcccagccccgctcgcagccatgtcgccgtcggagccgacgcgggaggagagcgtgtacatggccaagcttgcggagcaggcggagcggtacgaggagatggtcgagttcatggagcgcgtcgccgctacgccgggagcgccggcggcggggacgagctctcggtggaggagcgcaacctgctgtccgtcgcctacaagaacgtcatcggcgcccgcacgcctcgt

SEQ ID NO: 40541 - DNA, 302 bp, Zea mays
cggaagttctgtgggtagaggactagagactgcagatcgagggtctggcagcgggccgtggcagttgggtgattacgacgaagagagatgggcctcctcgacaagctgtgggacgacaccgtcgcaggcccgcgcccggacaccgggctcggccgcctccgcaagcagcctgtgcgtcccgccgccgtcaagatcagtgatccggccggggacgctgcggcgttcgtgccgccctcgccggcttcgggtagcgaggagacgccggtgaaggtgacgcgcagatcgaggatcaagcgccccgc

SEQ ID NO: 40542 - DNA, 294 bp, Zea mays
cttctctccttttgctcggaacgcacacaccgcccgtccccgatctccgatcccctcgtcgatccaaagatgcagatcttcgtcaagaccctcactggaaagactatcaccctcgaggtggagtcttctgacaccattgacaacgtcaaggccaagatccaggacaaggagggcatccccccggaccagcagcggctcatctttgctggcaagcagctcgaggacgggcgcacacttgccgactacaacatccagaaggagagcaccctccaccttgttctccgcctcagggga

SEQ ID NO: 40543 - DNA, 297 bp, Zea mays
gacgacgggcgccatgaaagtcccggtgcttctcctcctggtctccctgtgcttctcgctcgcgctcgcgtggcaaacggacacggaatcgggctcaggcaggccgtaccactacggcgaggagagtttccggcactggacgcgctcccggcagggccggttcagggtgctggaacggttcacccacgagctgctggaggacgccgtcggcaactaccgcgtcgccgagctggaagccgcgccgcgcacgttcctgcagcccagccactacgacgccgacgaggtgatgttcgtgaa

SEQ ID NO: 40544 - DNA, 316 bp, Zea mays
atgggacagggtaagcttgaacccgactattccatacatgaaaagacaatcgcgcactgtgagtggagagatggcaagagtggcacgtaccctcctggcaaagtaccgcctaaaagcggtggtgtgctctcgggtggcgcggacctgttcacgttgtggaggatttgtgggaacggctgacatatgcaagggttaagtgctacatatgtcgtgtggttagagatcctcagctgagtaaatcgatttggatcgccgttatatccccggagagtggagacttgatctccgacctgcaacctaagtcaggatgtaaaca

SEQ ID NO: 40545 - DNA, 310 bp, Zea mays
gctgcgagcccggcgcccctctcccactccccagcagccgccagcacgcacacccctccctcgcgcgctcagggtttcggaatggaagccgaggcggcggccaagaggacgcgggacagcggggaggacgccgccgcggcggggatctccgccgtcatcccgggatggttctccgagatcagccccatgtggcccggtgaggcgcactctttgaaggtggacaaggtgctgttccaagggaagtcagactaccaaagcgatatggtctttcagtcctctacgtacgggaaggtgctcgtcctcgatggag

SEQ ID NO: 40546 - DNA, 189 bp, Zea mays
cgagcatatcacagtgacagacacgatggtgagcgccagaattgttgtcctcctcgccaccctcctatgcgctgccgccgcagtcgcgtcgtcctgggaggacgacaaccaccaccaccacgggggccacaagtccgggcaatgcgtgcggcggtgcgaggaccggccctggcaccagcgcccccggtg

SEQ ID NO: 40547 - DNA, 313 bp, Zea mays
ccggcggccatggcctgctccttcgccgccgcgaccgtcgtctcttccgcccccaccccggccgccaggcgcctcgccgctgccccgcagtccgtctctgtttcccgctccgcggtcgccaccgccgccagcgcgctccgcctcgtcgcctccagatccgcgcgggccatcagactcgtcgcccgcgccggcggcgtcgatgacttgccgctggtcgggaacaaggcgccagacttcgaagccgaggccgtgttcgaccaagagttcatcaacgtgaagctctctgattacatcgggaagaaatacgtcgttc

SEQ ID NO: 40548 - DNA, 226 bp, Zea mays
ctcctccccctccggttcgggttcgggttcgtgaggttctccggggttcggtttcgtgggtgggcggatcgagatcgcggcgtcggatgttgagtaccgctgcttcgtcggcagcctcgcctgggccacggacgaccactccctccacaacgccttcagcacctacggcgaggtcctcgagtccaagatcatcctcgatcgggagacgcagaggtcccgcggcttc

SEQ ID NO: 40549 - DNA, 312 bp, Zea mays
ctttgttaacaaagaattccctcatagccgccgccgccgccgccgccgccgctcatctcgccgagaggtgacgggaccgaggaactcgccgagttctaagatagagaatcgcttttcacagcctggggtctgctgcgtagggtggtgttgaaggggagaagtttaagatctgttccacagatcacgcgtgcgcgctcgcgaatcgggggttccacacatagcttcgtcgttttgaatttgatgtactaatggagtctaagggtggcaagaagtctagcagtagtcgttccatgatgtatgaagcccccttgg

SEQ ID NO: 40550 - DNA, 329 bp, Zea mays
cgcgtcagcgacgaactcggaatcggctcgaggtagtacggacgaacgggcagcggacggaggtgagcctctcctgcgtcggattgtccccgcccccgcccccgctaggcgccatgaagctgacggtgaagaccctcaagggaacgcacttcgagatccgggtgcagcccaacgacacgattatggctgtgaagaagaatattgaagagatacaagggaaagacagctatccatggggccaacaactgctgattttcaatggaaaggtcttgaaagatgaaagtacattggaagagaataaagtcaatgaggatgggtttctagttgtc

SEQ ID NO: 40551 - DNA, 306 bp, Zea mays
tgagggagacttccatgcagcgctcaacttcgcggctgttatggaggcaccggtgatcttcttctgccgcaacaatggctgggccatcagcactccgactactgaacaattcagaagtgatggagttgtcatccgtggccaggcttatgggatccgtggcatccgagtagatggcaatgatgctcttgctgtgtacagcgcaatccatgctgcccgagaaatggctgtaactgaaggaagaccaattttagttgaggcactgacttaccgagtcggccatcactcgacatccgatgattcgaccaa

SEQ ID NO: 40552 - DNA, 221 bp, Zea mays
gtcattcagtactccatggatctgtatgcgcagtatattttgcaaagcttgaggcagtagattggaagcaactatttatctgggcgtcttggaatgagtgtgattctaataagtcaaaacacttgatattgtgtgcaaatcttggggttgagaacaatgtcactagctgtgatttacttctgtgacttgcattttttttcttgttaaattatgaataagcg

SEQ ID NO: 40553 - DNA, 297 bp, Zea mays
agctcaaatactgatctcactgatccagtatggctatggcaaaggcaggcgcgccgagggtctcggcggcccagctggtgactctcgggctatcactcctctgcgctgtcgccggcccggccgccgcgcagaactgcggctgccagccaaacgtatgctgcagcaagtttggctactgcggcacgaccgacgagtactgcggcgacgggtgccagtcgggcccgtgccgctcgggcggcggcggcagcagtggcggcggtggtgcgaacgtggctagcgtcgtcaccggctccttct

SEQ ID NO: 40554 - DNA, 309 bp, Zea mays
actccctctctctcctccggcccccttttttatcgcccgaactcacacattttggaaggagagagagagaggcagagggagagattggagggaggcccctgcccaaggcaagagaaaccgcggcgcgacggagatggaggaagggcagacgcagacgcagacgggcgaacaagatgagggagatcatcagcatccacatcggccaggccgggatccaggtcggcaacgcctgctgggagctctactgcctcgagcacggcatcgagcacgatggcaccatgcccagtgattcctcggttggcgtcgcac

SEQ ID NO: 40555 - DNA, 314 bp, Zea mays
cacactcgcactcgcacgtacaccacactagttaccacagacgacgggcgccatgaaagtcccggtgcttctcctcctggtctccctgtgcttctcgctcgcgctcgcgtggcaaacggacacggaatcgggctcaggcaggccgtaccactacggcgaggagagtttccggcactggacgcgctcccggcagggccggttcagggtgctggaacggttcacccacgagctgctggaggacgccgtcggcaactaccgcgtcgccgagctggaagccgcgccgcgcacgttcctgcagcccagccactacgacg

SEQ ID NO: 40556 - DNA, 215 bp, Zea mays
gtttgcaaagctcctcctcgatccatcgatcactgcaccggccggatgcaccgcgctcgcaggggctagcacacgagacggcagcaatggcggaccgtgaccgcagcggcgtctacggaggcgcccacgccacctacgggcagcagcagcatcagggacgaggcaggctcccgatgggtgagcaggtgaagggcatgctccacgacaagttgccg

SEQ ID NO: 40557 - DNA, 313 bp, Zea mays
ctcgcactcgcacgtacaccacactagttaccacagacgacgggcgccatgaaagtcccggtgcttctcctcctggtctccctgtgcttctcgctcgcgctcgcgtggcaaacggacacggaatcgggctcaggcaggccgtaccactacggcgaggagagtttccggcactggacgcgctcccggcagggccggttcagggtgctggaacggttcacccacgagctgctggaggacgccgtcggcaactaccgcgtcgccgagctggaagccgcgccgcgcacgttcctgcagcccagccactacgacgccg

SEQ ID NO: 40558 - DNA, 311 bp, Zea mays
acccttggttcctcgcggcgacgactgggcgagcgcctcctcccctccctcactccctccgtgagctcctcgccggcggcgcgcgccgccgcccgtcgccacgtcttctccgctgacgtgggctcaccaggagcggtcttctgggcgatctcgcgggtttggctatgtaacattcgcctcagctgacgatgcaaagaatgttcttgattgcgagcatgttcttgggagccgtacattagaagtgaaggtagctactccaaaggaagaaatgaaatcacaaggatcaaagaaagctacaaggatattcgttg

SEQ ID NO: 40559 - DNA, 315 bp, Zea mays
cccgagcatatcacagtgacagacacgatggtgagcgccagaattgttgtcctcctcgccaccctcctatgcgctgccgccgcagtcgcgtcgtcctgggaggacgacaaccaccaccaccacgggggccacaagtccgggcaatgcgtgcggcggtgcgaggaccggccctggcaccagcgcccccggtgcctggagcagtgcagggaggaggagcgggagaagcggcaagagcggagcaggcacgaggccgacgaccgcagcggcgagggctcgtcggaggatgagcgagagcaggagaaggagaaacagaag

SEQ ID NO: 40560 - DNA, 313 bp, Zea mays
ccaagcggttgatcggcaggaggttctctgacccgtcagtgcagagtgacatgaagctatggccgttcaaggtcatccctggccctggtgacaagcccatgattgtagtctcctacaagggtgaggagaagcagttcgctgctgaagagatctcctccatggtgctcatcaagatgaaggagattgctgaagcctacctcggctctactatcaagaatgcagtggtgacagtgccggcctatttcaacgactcgcagaggcaagccaccaaggacgccggtgtcattgcgggcctcaatgtgatgcgtatcat

SEQ ID NO: 40561 - DNA, 307 bp, Zea mays
atcgtccttcacctccgccgccgaatccgagactctgatctcgggttcaccgcagcgcacagagcacccccgaatcccgtcccgatccgcgctctcctctacgacgcttcagtcatggcaggaatggcacccgagggttctcagtttgatgctaagcactatgattctaaaatgcaggagctgctgagcactggtgagactgaggagttcttcacttcatatgatgaagtttttgaaagttttgatgacatgggccttcaagagaatcttttgagaggcatttatgcatatggttttgagaaaccat

SEQ ID NO: 40562 - DNA, 309 bp, Zea mays
cggagtgtttcttcgtcgcaggaatgggcaaggacggcatccagtacgcatggtggacgccttcacggcggacccgttcaagggcaaccccgccgcggtgtgcctcctcgatgacgccgccaaggccgccgacgagcggtggatgcagtccgtcgccgccgagttcaacatctccgagaccgccttcctcctccgggaaaagtcctccgcggccggcgccgtcccgctgttccagctccgatggttcacccccgtcgctgaggtggagctctgcggccacgccacgctggctttcgcccacttcctctt

SEQ ID NO: 40563 - DNA, 307 bp, Zea mays
gatagcttacctcacatcgacggtcggtgagccgttcgtgagtggcgaggcagtgcgtgcgctgcagcctgcagggcaagaacaggcgacgaagaagatgagcacgctggacacgcggacgctcaaggacgagctgacgagcatggacaggaagtgcctcgtggaccttggccacccgctgctcaaccgcgtcgccgacagcttcatccgcgccgccggggtcggggcggccagggccgtctccagggaggcctacgtcgtcaccgtcgaagggctttcaggagactcgtccgggctggacgccgac

SEQ ID NO: 40564 - DNA, 302 bp, Zea mays
atcgaccggaacacggtctcccttgtgtgcaaggtgtggtatgaggtcgagaggctgagccgacgagcggtgttcgtagggaactgctacgctgtgcgccctgagcgtgtggtgctgcggttccccaatataaaggccctcacggtgaaggggaagcctcactttgcagacttcaaccttgtgccgcctgattggggtggctacgcagggccatggattgatgcagcagcaaggagctgtgttggtctcgaggagttgcgcatgaagcggatggttgtgtttgatgagaacttgagctgcta

SEQ ID NO: 40565 - DNA, 310 bp, Zea mays
agcctctcctcctccagagctcgtcgccaccggccaccgccaccctcgatcacgccgtccgtcgaggtaaggtcagcatggtgagggtcagtgtgctcaacgatgcgctcaagtccatgtacaacgctgagaagattggcaagaggcaggtcatgatcaggccgtcatccaaggtcatcatcaagttcctgacggtcatgcagcgccatggctacattggagagttcgagtacgttgatgaccaccgatcgggcaagattgtggtcgaactcaacgggaggctgaacaagtgcggcgtcatcagccctcg

SEQ ID NO: 40566 - DNA, 313 bp, Zea mays
agcgtcgtcgccccacagccacgcgagccttcgccgatccgcgagcgcagatcgccgaagccaggcggcggagagggaggatgaggcggcggaggaaggcgttcgccacagtcgctgatttccctggggaagagatgggtctctcctttgggaagctgttcagccgcctcttcgccaagaaggagatgaggattctcatggtcgggctcgatgccgccggtaagaccaccatcctctacaagctcaagctcggcgagatcgtcaccaccatccccactatcggattcaatgttgaaactgttgagtataagaa

SEQ ID NO: 40567 - DNA, 303 bp, Zea mays
agacacgatggtgagcgccagaattgttgtcctcctcgccaccctcctatgcgctgccgccgcagtcgcgtcgtcctgggaggacgacaaccaccaccaccacgggggccacaagtccgggcaatgcgtgcggcggtgcgaggaccggccctggcaccagcgcccccggtgcctggagcagtgcagggaggaggagcgggagaagcggcaagagcggagcaggcacgaggccgacgaccgcagcggcgagggctcgtcggaggatgagcgagagcaggagaaggagaaacagaaggaccggcg

SEQ ID NO: 40568 - DNA, 302 bp, Zea mays
ggcgcgggtagacccgtcagcggcgcggatcgggggcttcaggaggaagaacgcgtttcctggcgggaggctaaccctgaggacgaggagatccagggccgcgtcaccggcgcagatgaacatgaaccttgcgcttgggaaatcgatgaggtggtgggagaaggggttgcagcccaacatgcgtgagatcgagtccgcccaagaccttgtcgatgctttgaccaacgccggcgacaggctcgtcgtcgtcgacttcttctctcctggctgcggcggctgccgtgcttttcaccccaagattt

SEQ ID NO: 40569 - DNA, 301 bp, Zea mays
aatccctcgcccacggacccaaccaaatcctcctccacctcctccatctccagccccgtccctacccagctcgtgtaacctcccgatgtccgggggcggaggcggcgcaggcgcgggctcgtcgtccggcggcggcggcggaggtggagggggcggcagggagggcgactgggactgcggcagctgcggcaaccggaactacgccttccgctcgctctgcaaccgttgcaagcagccgcgcctcctcatcgaccctaacaccccgcgcgactccaagtggctaccccgtgccggggactgg

SEQ ID NO: 40570 - DNA, 104 bp, Zea mays
ggaatgcaccaccaaagactcaatttcattgccgcactgaccgttctggattaattggtggcgcaccctggataagagtaccatatccctttcagtggggtgct

SEQ ID NO: 40571 - DNA, 315 bp, Zea mays
tgcagtccaagttttgttggcaggttgtttcatcatgctcttgacgagtcaagaccaaaatctgttctggttcattcattgtcagtgtgtatatctttattggaccccaaaagactagcatcagtctcataccaagcatttagaagcaacttaactcacgggacgctggttacagccagtccagaaacagttgatggtatactggagagtctaggtgacttgctgaagttactggacattacttcttctcaaaatgtttttcctacaacttatggatgtttgtgtccgcctcttggaaaacaccgtttgaagatt

SEQ ID NO: 40572 - DNA, 298 bp, Zea mays
cacatgttgcaaaattctctgcgatggattcaacttacagcttgcctgataatgttgcaatgcttacccttcaggagcttgaagatggaagtgttctccttcggtttgctcatctatatgaggcctgggaggacaaggatctttcatctttagcgagtatcgacctcaagagagtgttcccggagaagaagattggcaaggtcatcgagacaagcttatcggcaaaccaagaacgcgcaccgatggagaagaagcgtttgaaatggaaggcgcaatgttctgcggcggacgagaaggt

SEQ ID NO: 40573 - DNA, 305 bp, Zea mays
gagcgtttcggcaagctcaataaaaaggagtatgtatttagagaaccacgagatgtacgtcttggtgatattatggagaagcttagtcatatatatgaggttaaaatggatgggagtcacactttacatataattccagattctagacaagtcaatgctgatgagttgcagcctggcgtctgctatttacagatcactgctgttgatcctgtaatggaggatgaggacttgggtagcaggagggaaaggattttttctttatctactggtactgtacgtgcacgtgtttttgaccgttttctttc

SEQ ID NO: 40574 - DNA, 300 bp, Zea mays
attttatctcatcctgaaacaaaagatcgagtgcaatcatgttctgatgcttctgatgttcttagatatgcttttactttgacagaagacaccattgatcatcagtacgagggatgtacaggcacagcacttcttatttggtttgaccagaataaagattgttttgcccagtgcgctaatcttggtgactctgcatgcgtcatgagtgtcaacggcaagacgatcgatatgactgaagatcaccgggtaactagcgcgaccgaaagagctaggatagcaagaactgggcagcccctgaga

SEQ ID NO: 40575 - DNA, 295 bp, Zea mays
gatcggtgcatcgatcactgcaccggccggcggcaccgcgctcgcaggggctagccaacgagacggcagcaatggcggaccgtgaccgcagcggcatctacggcggcgcccacgccacctgcgggcagcagcagcagcagggaggaggcgggcgcccgatgtgtgagcatgtgaaaaagggcatgctccacgacaaggggccgacggcgtctcaagcgctgggggtgacgacgctgttcccgctgggcgggctgctgctggtgctgtcggggctggcgctgacggcctccgtggg

SEQ ID NO: 40576 - DNA, 286 bp, Zea mays
ccgtcactcaacacagcacaggcagctcgagagagagagagagagaaagatgtcgtggttcgggcaccaccaccacaaccagccggctcccccggcgtcgggccccaaccaggtgttcaagatcttctgccgcgccaacgagaactactgcctggccgtccgcgacggcgccgtcgtgctggccccggtcaaccccaaggacgaccaccagcactggtacaaggacatgcgcttcagcacccgggtcaaggacgaggaaggcatgccagcgttcgcgctcgtcaac

SEQ ID NO: 40577 - DNA, 294 bp, Zea mays
tgattttagccgccgccgctgctcatctcacatccctcgagaagacgcctgctcctcgccgatcgatacgatggccgtcttctccgacctccacaccgccgacggcctcaagtccctcgaggctcacctcgccggcaaaacctatgtgtctggtgactccattactaaggatgacattaaggtcttcgccgcggtgccgtcgaagcctggcgctgagtttcctaatgccgcccgctggtacgagaccgtctctgcggctgtagcctcaagattccctggtaaagctgttggtgt

SEQ ID NO: 40578 - DNA, 306 bp, Zea mays
cacggctccagatctgctacggcggcggccggtggacgccgcgccgcgcgtgccggaagcggtgacgtgagcggcggatcctgcccggccgtgccatcctggcgacgatgacagcgtaactgggcggcggacgaccgcgcccccccggcccctactcccgaggtcattggcgtgtgctccttggcagaaaatggcgatgatggtggatccccccaatggcatggcaagtcaaggaaagcattactatactatgtggcagacactgtttgagatcgacaccaagtacgtgccgatcaagcccatcgg

SEQ ID NO: 40579 - DNA, 306 bp, Zea mays
caattagcagcggcaccgatataatttatcctcctcccctagcctcaagctcaccgccgtctcctaccgcagtccgcagcacacagcctccgccagtcaccgagctagctagacccacccgccgcgccatgacgtggaacaggtccgcggccgacggcggtggcagcagcgccgggacgaccgccggcgacgacaccggcctggcgcgactgcgggagctcgggtacaagcaggagctgaagcgcgacctctcggtgctgtccaacttcgccttctccatctccatcatctcggtgctgacgggga

SEQ ID NO: 40580 - DNA, 284 bp, Zea mays
ctcgcactcggcttgcctgcacgctccagggcttcaggctcccctcccacctcgccgcggcagccatggcgatcacggcgccaactcccgacatccgcggcgaccgtcagtccggccaggacgtccgcacgcagaacgtgatggcgtgcggcgcgttgtccaacatcgtaaaatcctcgctcggccccgtcggtctcgacaagatgctagtggacgatatcggcgatgttacaatcactaatgatggtgcaaccatacttaagatgttggaagctgagcaccca

SEQ ID NO: 40581 - DNA, 297 bp, Zea mays
gtttgcaaagctcctcctcggtccatcgatcactgcaccggccggcggcaccgcgctcgcaggggctagccaacgagacggcagcaatggcggaccgtgaccgcagcggcatctacggcggcgcccacgccacctacgggcagcagcagcagcagggaggaggcgggcgcccgatgggtgagcaggtgaagggcatgctccacgacaaggggccgacggcgtcgcaggcgctgacggtggcgacgctgttcccgctgggcgggctgctgctggtgctgtcggggctggcgctgacgg

SEQ ID NO: 40582 - DNA, 300 bp, Zea mays
gaagaagtctagcagtagtcgttcctccctgatgtacgaagctccccttggctacagcatcgaggatatccgccctgcaggcggcatcaagaagttctccgctgcttactcgaactgcgcgaggaagccatcctgatatctctgtcgtcatccccatcctagtagcgtagaaacctcctgcattttcattttgatctccctaatctctccggctagctgctttccagtgaccaaaagatatcagagaccacctcccgtggctgtctgccatctggctctgaaacgatggcagtcctacaa

SEQ ID NO: 40583 - DNA, 298 bp, Zea mays
caagtttgtccattcgcattggtctgaatactgtagctactagcgcgagtgccactgtgccgcagctgcctgctcgccattactgcaagctgtgttcaatcaaagcttaattaggctccctctacatctgatccagctaagtagctagccagcactacagaagggcgtggcaagaatcaggagagagatagcaggggggctagctagctgagctcgtgcgacgaagaatggccggaattggcaggaacatggtggcgccgctcctggtgctcaacctcatcatgtacatcatcgtcat

SEQ ID NO: 40584 - DNA, 281 bp, Zea mays
ggctcgagtccttttcctttcataaaccccactccgcgccgcaatcacctcgccccctcgttcgccgactctcctgctcctaccgcagctctccctcaggtttagtgttcgcaatggcggccttcaacaagcttggtggccttctaaggcacagtgctctggtgagcggtatcactggtggctcttctcctgcagtgttcaatgctgcacggctcatgtctaccaagctatttattggtggtcttgactggggtgttgatgacgtgaaactaagagaagca

SEQ ID NO: 40585 - DNA, 288 bp, Zea mays
atcggactaagctttcaatcagtgacgtggaatgtcttcttatgaagagcctctcggttcatcttattgagggaataattgatgaagtggacagtacagttcacgtatcatgggtccagcctagagtgcttggaattccacaggttaaggctttgcgcgaccgcctggatgcctgggttggaaaggtgcataccacattgctttcagttgaggcggaaacacctgatcttgttgctgtgtaatttcacagctgttacacttccgcgagaggcttggtcagcaaggtcc

SEQ ID NO: 40586 - DNA, 287 bp, Zea mays
gtagctttccccttcctgttcctgaagcttccgacatccgaccgcctcctcctcctcgttctactcgccgccccttctagaatcatccagaggcgtgccggtgaagcgcgagatcggtgaggcatggcgatgcagacgggggtcgcgacctccaaggtcctcatcctcgtcggtgcagggatgacgggctcgatcctgctgcggaatggccgcttatctgatgtgttgggagaactccaggagattatgaagggtgtaaatcaaggaacttcttcgggtccctatga

SEQ ID NO: 40587 - DNA, 191 bp, Zea mays
catgccgcaacattggtttcgtgtcgaacgatgtcgggcttgacgctgaccactgcaaggtgcttgtgaacattgagcagcagtcccctgatattgctcagggtgtgcacggccacttcaccaagcgccccgaggagattggagctggtgaccaggggcacatgtttgggtatgcgactgacgagacccct

SEQ ID NO: 40588 - DNA, 293 bp, Zea mays
cttgattccgaagagctctcattgaagattgtcagcaagattgaggctggggagcggttcactgtttatgttgtggtgccaatgtggcctgagggtgttccagtaagtgcttccgttcaggcaatccttgactggcaaaggagaacaatggatatgatgtacactgacatcacacaagctctcgaagccaatggaatccaaacaaaccccaaggactatctcactttcttctgcttaggtaaccgtgaggtgaagcaggagggagaatatcaacctgaggaacacccagaacc

SEQ ID NO: 40589 - DNA, 273 bp, Zea mays
aggcgaccatggctgtcggaaagaacaagaggatctccaagggaaagaagggtggcaagaaaaagaccgtcgaccctttctctaagaaggattggtatgacatcaaggcaccgtcggtgttcagtgtgcgcaacatcgggaagactctcgtatccaggacacagggtaccaggattgcttctgagggtctgaagcacagagtctttgaggtttgcctagctgatcttcagggcgacgaggatcaagcttacaggaaaatcaggctccgtgctg

SEQ ID NO: 40590 - DNA, 294 bp, Zea mays
agcaggctagcagcacagcagcagccagagccatcccctctcctcgctacgcttcgcttcctcggcgccgattcctcctcctcctcctccaccctcgtccgtccccttccggcgcacgagctcgcccgagatggcgaacgcgagatcgggtgtcgctgtgaacgatgagtgcatgctgaagtttggcgagctgcagtcgaagaggctgcaccgcttcataactttcaagatggacgacaagttcaaggagatagttgtggaccaggtcggggatcgcgctaccagctacgatga

SEQ ID NO: 40591 - DNA, 289 bp, Zea mays
acatttatgcatatggttttgagaaaccatctgcaattcagcagagaggaattgttcccttctgcaaggggcttgatgtcattcagcaagcacaatctggtacaggaaagatagcaaccttctgttctgggatcttgcagcagcttgactatggtctggctgaatgccaggccctggttcttgctcccacccgtgagcttgcacagcaaattgagaaagttatgcgcgcacttggcgactaccttggtgttaaagtccatgcatgcgttggaggaacatctgttcgtga

SEQ ID NO: 40592 - DNA, 293 bp, Zea mays
acgaagatctcggcgctagagtcagacatagaagagcgatctcaagaactgaagaataaggatgatgccaacatgaacctggagaaagccattgaagagaagtcaaaggctattacctctatgctggacgagattgcttccctccaggcaaaagggtctgtagctgccgaggagcaggctaacaaggccaatgccaaggttgttgagcttgagaagcaggttgacaagataaaaaaggatattgaagcacaaagtagccagaaagcagcactagagtatagggccaacgatgc

SEQ ID NO: 40593 - DNA, 293 bp, Zea mays
cgcaggcgctggcggcggcggcagggcttcctcgtaagcaagtcatccatgcatggatggatgcgcgcgtgcgtgtctgtcagtatcagcagggtcgtcgaggaatgctgtgttcctgtacgtgtgggtgaccgtcctttggtcgtctttctcccccgagtgtgtgttacgtatgtcctggtgttcgtcgtgtgtgttcatcgccgctccagttgaattccggtgtctgttcatcgccgctccaggtcggagatgtgaatatactttgctaggggaataagtgtctaagtgat

SEQ ID NO: 40594 - DNA, 236 bp, Zea mays
cgtccaccctgccaccgccgacgccgcgccgccgcagcaactgtcaccgtcgctatggcccgtatcaaggtgcacgagctccgggggaagagcaagacggacctgcaggcgcactcaaggagctgaagtctgagctctccctcctccgcgtaccaaggtcaccggcggcgcacccaacaagctctccaagatcaaggtggtgcgcacctctatcgcgcgcgtgctcacagtgatct

SEQ ID NO: 40595 - DNA, 259 bp, Zea mays
cggagagagaggtcggcatggctgccgcagtggtcgacgacgctggtatggacgccgtccagaagcgcctcatgttcgaagacgaatgcattttggtggacgagcaggacaatgttgttggccatgagtcaaagtacaactgccatttgatggaaaagattgattctgagaatctgctacatagggcattcagtgtgttccttttcaactcaaaatatgagctgctacttcagcaaaggtccgcgacaaaggttacctt

SEQ ID NO: 40596 - DNA, 153 bp, Zea mays
tacgacttccacacctactccatcctctggaaccccaagcacgtcatcttcaatgtggacgacatgctcatcagggacttccgcaacctggagagcaaggtggtggcgttccccaagagccagccgatgcggctctactccagcctgtggaac

SEQ ID NO: 40597 - DNA, 284 bp, Zea mays
cttgatgtggctcctctcaccctgggtattgagaccgtcggtggagtcatgaccaagttgatcccgaggaacactgtcatcccgaccaagaagtcgcaggtgttcaccacctaccaggaccagcagaccactgtctccatccaggtctttgagggtgagcgcacatgaccaaggactgccgtcttctgggcaagttcgacctcaatggcattccgtcagctccgaggggcacaccccagatcgaggtgaccttcgaggtggacgccaacggtatcctgaacgtg

SEQ ID NO: 40598 - DNA, 287 bp, Zea mays
aggcgatgccgccggcgagcgtgatgacgcggctcatcctcatcatggtgtggaggaagctgatccggaaccccaacacctactccagcctcatcggcgtcgtctggtccctggtctcctacaggtggggcatcgagatgccagcgatcatcgcccggtcgatttcgatcctgtcggacgcgggtctcgggatggccatgttcagcctaggcctgttcatggcgctgcagccgaggatcatcgcgtgcgggaacaagctggcggccatcgcgatgggcgtccggttc

SEQ ID NO: 40599 - DNA, 287 bp, Zea mays
agttgataagttcaatatcatcatgcgcaaatctttgggcaatcattatggatgcaggaactggcttctcagctcaagtttatgagctatcttcacactttcttcataaggagtggatcatggaacaatgggataaaagtttctacatcagttctgttgctggctccaacaatggaagttctattgtagtgatgtcaaaaggcacaccatatacacagcaatcttataaagtcagtgattcctttccatttaagtggataaacaagaaatggaaagaaggttttcat

SEQ ID NO: 40600 - DNA, 282 bp, Zea mays
atcgagcgctcgcctcgggtcaaaccctaagcagggagtagatttatccgctgcagccatgagtaagttgcagtctgagtctgtcaaggatgccatctcccagattgttggggatgccaaggagaagaataggaagttcactgagactgtggaacttcagattggtctgaagaattatgatccacagaaggacaagcgtttcagtggctctgttaagttgccccatatccctcgtcccaagatgaaggtgtgcatgcttggtgatgcccagcatgttgagga

SEQ ID NO: 40601 - DNA, 288 bp, Zea mays
acgcctccgctcctcgcgccgccgccgcgtctcctcctgtacaggtaagaaggagaggaagagggcgaaatggtgaagcacaacaacgtcatccccaacgggcacttcaagaagcactggcagaactatgtcaagacatggttcaaccagcccgcccgcaagcagagacgccgcattgctcgtcaaaagaaggctgtgaagatattcccccgcccgactgctggtcctctacgccccattgttcaatgccagactttaaagtacaacatgaagtcaagggctgggaga

SEQ ID NO: 40602 - DNA, 289 bp, Zea mays
cggcacacacaccacaccacacctcctcgcttccactccgctcgtctgacatctcgtcccgtcctttcgtttcgaagcctcgcgagccccgacgatggccaccgccgcggtgtcggtcgacgagaagctcgacaagcttcgcgccgaggtcgccaagctcgaccagatcagcgagaacgagaagtccgggttcatcagcctcgtgtcacgctacctcagtggggaagcggacagatcgagtggagcaagatccagacccctacggatgaggtggtggtgcctacgatac

SEQ ID NO: 40603 - DNA, 174 bp, Zea mays
ctaccaaacccctctggtccagcctatacaaatgcaagctgtcgatttattgacgatcaccagaactgcatgatgaatggtagacctgataaggaatatctacattggaagtggaaaccttatggatgtgatcttccaccatttgatgcagtaagatttctagattctatgaga

SEQ ID NO: 40604 - DNA, 285 bp, Zea mays
  unsure (1)..(285): unsure at all n locations
gcgctccctcgccgccccagtcccncaccccctgctcacccacccgtcccctcctgctcgcccaccgctcccatcgctgtcggcgacgccctccccgacggccagctcgggtggttcgacgagaacgaccagctgcagcaggtctccgtccacgcgctcgccgccggcaagaaggtcatcctcttcggcgtccccggcgccttcaccccgacctgcagcaaccagcatgtgccaggcttcatcacacaggcttgagcagctcaaagccaagggtgtagacgagat

SEQ ID NO: 40605 - DNA, 280 bp, Zea mays
ctcgaccgcaagtgcaaggtgaaccaggagacgcgcggtatatacatagtagctgcaagtacattaattcgcactgaagattaccaaaaccaatggctgctcggtgcagcggcggctgcgacgggcgcgaggacagcgccgtggaggcgctggtgcagtggcagaaggtgagcgacttcctgatcggtgcgtcctacatgtccatcccgctggaactgctgcacttcgccacctgctccgacctcgcgccgctgcggtgggtgctcctccagttcggcgc

SEQ ID NO: 40606 - DNA, 282 bp, Zea mays
aaaccctctccaccgtccacctcagctcccatatccgctcccctacctctccagcatctcccgtctccgtcgtctcgtctctgctcctcacctcgccgccagccatgggtaactcctcgctcccggccagccccccgcgtcggggttttccatttactactactcgctgctccctcctgctccgtgctcagactcagatccgaccaaagctgtttcgctgactaaattctccttcgttttttctttttatggacggattcccggacgcaggcaagatcaaga

SEQ ID NO: 40607 - DNA, 280 bp, Zea mays
gcaaggtagctaatcctctgtcgctcgatctttgtccttgaggtgctcgatgagataggcagtggttcaaagctgtgctctgttgcctccccgtgcctgaagtgattcggtcttctgtttgcgattaattttcaatctcacctccaaccatgggtaaagagaagtcccacatcaacattgtggttattggccatgtcgactctggcaagtcgaccaccacaggacaccttatctacaagcttggaggcattgacaagcgtgtgatcgagaggttcgagaa

SEQ ID NO: 40608 - DNA, 275 bp, Zea mays
gatcttcaataggattacgcagaaggatgttgcttcatggaacactatgatcttgggatatgggatgcatggtcaaattgatgttgcatttgaattatttgatttaatgaaggatgatggcatcgaatatgatcatgtatcttatattgcagtattgtcagcatgtagccatggtgggcttgtagacagaggaaataagtacttcagtcaaatgatcgctcaaaatattaagcctcagcaaatgcactatgcttgtatggtagatcttcctgggc

SEQ ID NO: 40609 - DNA, 287 bp, Zea mays
attgatcctaaccctagtagaaggatctcggtggaaaaaatcaaggagaatccatggtttaggaagggtttaggtgcaaagctacttaggtacgatttacagaataagaatgcccctcatgtggacaagaaggcagattttgattcactgagcaccaacgtaacaactgagagcaagcaacatgaagaaaagaagcataccaacatgaatgcatttgatataatatctctatcaactggtttggacctctctggtttatttgaagaatcctaacagaagagagaatc

SEQ ID NO: 40610 - DNA, 301 bp, Zea mays
gccagcaagccagcgcacgtcggtaggcacgccaccatgccggggctcaccatcggcgacaccgtccccaacctggagctggactccacccacggcaagatccgcatccacgactacgtcggcgacggctacgccatcatcttctcccacccaggtacgtccgccgtaccgtacgtcgtccgctcggccatatgcatgcttgcacagttgctcgcgtgcacctgctgatgggagataagatgatatggcagccgacttcacgcccgtgtgcacaacggagatggcggcgatggcggggtac

SEQ ID NO: 40611 - DNA, 296 bp, Zea mays
acgaagacgaggagggcaggatgtcgcaccgtaagttcgagcacccgaggcacggctccctcggcttccttcccaggaagcgctcctcccgtcaccgcggcaaggtgaagtcattccctagggatgaccccaagaagccttgccatctcactgccttccttggctacaaggctggcatgactcacattgtccgtgaggttgagaagccaggatccaaactccataagaaggaaacttgtgaggctgttaccatcattgaaacccctcctcttgtcattgttgggctcgtggcatat

SEQ ID NO: 40612 - DNA, 303 bp, Zea mays
caagccagcgcacgtcggtaggcacgccaccatgccggggctcaccatcggcgacaccgtccccaacctggagctggactccacccacggcaagatccgcatccacgactacgtcggcgacggctacgccatcatcttctcccacccaggtacgtccgccgtaccgtacgtcgtccgctcggccatatgcatgcttgcacagttgctcgcgtgcacctgctgatgggagataagatgatatggcagccgacttcacgcccgtgtgcacaacggagatggcggcgatggcggggtacgccaaga

SEQ ID NO: 40613 - DNA, 306 bp, Zea mays
acgggcaagtcggagaagatcacgatcacgaacgagaaggggcggctgagccaggaggagatcgaccgcatggtgcgggaggcggaggagttcgcggaggaggacaagaaggtgaaggagcggatcgacgcccgcaaccagctggagacgtacgtgtacaacatgaagaacacggtgggcgacaaggacaagctcgcggacaagctggaggcggaggagaaggagaaggtggaggaggccctcaaggaggcgttggagtggctggacgacaaccagtcggccgagaaggaggactacgaggagaag

SEQ ID NO: 40614 - DNA, 308 bp, Zea mays
ggaaaatcaagtgaactccctccccttgatgttccactcccaggcattagcattccctcacctctaccagattttgtagagccatctaagacaaaagtcactactcttccaaatggcgtcaagatcgcctcggagacatcatcgagcccagcagcatctgtgggtctgtacattgactgtggttccatttacgaaacacctgcttcatctggagtatcacatctgttggagagaatggccttcaagagcacagtgaatcggactcacttacggttagttcgtgtagtcagagcattggaggaaatgtc

SEQ ID NO: 40615 - DNA, 319 bp, Zea mays
cgagcatatcacagtgacagacacgatggtgagcgccagaattgttgtcctcctcgccaccctcctatgcgctgccgccgcagtcgcgtcgtcctgggaggacgacaaccaccaccaccacgggggccacaagtccgggcaatgcgtgcggcggtgcgaggaccggccctggcaccagcgcccccggtgcctggagcagtgcagggaggaggagcgggagaagcggcaagagcggagcaagcacgaggccgacgaccgcagcggcgagggctcgtcggaggatgagcgatagcaggagaaggagaaacagaaggaccgg

SEQ ID NO: 40616 - DNA, 309 bp, Zea mays
cgccggcgctggcggcggcggcagggcttcctcgtaagcaagtcatccatgcatggatggatgcgcgcgtgcgtgtctgtcagtatcagcagggtcgtcgaggaatgctgtgttcctgtacgtgtgggtgaccgtcctttggtcgtctttctcccccgagtgtgtgttacgtatgtcctggtgttcgtcgtgtgtgttcatcgccgctccagttgaattccggtgtctgttcatcgccgctccaggtcggagatgtgaatatactttgctaggggaataagtgtctaagtgataagtctgtctggtgga

SEQ ID NO: 40617 - DNA, 313 bp, Zea mays
agccggcgccgccattcgatcaggccgcttcgccggcgacagcctattccaggtcggttggttttggcacttcggaccggcggccatggcttccgacggcatcggccccagagatgtatgtgttgttggggttgcacgcaccccaatgggcggtttccttggtgccttgtctcccttgcctgctacgaaacttggctctatagtaattcaaggtgagatccggatcttctctgcatttacatccgagctctgaacatggtcatggctgggggctgttagctgctctggaaagagcaaacgtggatccagccct

SEQ ID NO: 40618 - DNA, 305 bp, Zea mays
cgagaggaggaggggagttgcgccaccggaagcggaaacctcgggtgtcgtcgaccaacctcgtcgatccggttgcgacgcggtgtgctagaataactaccgaccatggtggaggaggagatcaccgaaggcttgaagaacctcaccgtcaccggagacgcggcggcttcgggcggagaagggcagaggaggggcggcggcatcagcagcaaccgcatccaggtgtccaacaccaagaagcccctcttcttctacgtaaacctcgccaagaggtatatgcagcagcacggcgatgtggagctatc

SEQ ID NO: 40619 - DNA, 308 bp, Zea mays
tcccattcctcgcgcggcgaccacccgattcgaagcgtgcggagagaccgaagaagcgggagagatggctcgtaccaagcagactgctcgcaagtccacgggagggaaggctcccaggaagcagcttgccaccaaggctgcccgtaagtctgcccccaccactggtggagtgaagaagcctcaccgctaccgccctggaactgttgcactccgtgagatccgcaagtaccagaagagcactgagctgctgatcaggaagctgcccttccagaggctcgttagggaaattgcacaggacttcaagactg

SEQ ID NO: 40620 - DNA, 282 bp, Zea mays
ctggcttctcctccccctcttatcaagtcctcctcgggttagggctccttagggttttgtggacgggcgatggcggcggctgatgtggagtaccgttgcttcgtcggcggacttgcctgggccaccagcaacgagtcgctggagaatgccttcgcctcctacggcgagatcctcgactccaaggtcatcaccgaccggaagacggggaggtcccgcggcttcggcttcgttaccttctcctccgagaactccatgctcgacgctatcgagaacatgaacggc

SEQ ID NO: 40621 - DNA, 305 bp, Zea mays
  unsure (1)..(305): unsure at all n locations
agtcnctcacacactcactatacactgctctgctgcagcaagaaggaagaagctagcgcctccctagctctcgttgtcagcaatggccaccaccgccgcgtccagcctcctcaagtcctccttcgcgggctcccggctcccttcggccacgcgcaccaccaccccgtcgtccgtggccgtggccaccccgcgcgccggcggcggccccatccgcgcgtccatctcctcctcccccaccccgccctacgacctgacgtccttccggttcagccccatcaaggagtccatcgtgtcccgcgagatga

SEQ ID NO: 40622 - DNA, 138 bp, Zea mays
atcctcctcgctcgcagtcgcagctagtacgccgccgcacctccgcgcgccaccttcttcccggctccagcgatgtcgggggcgatcgggggcgccgaggtccacggcttccggagcgcacggcgcactcccgcggtc

SEQ ID NO: 40623 - DNA, 300 bp, Zea mays
ggaaagtacttgatgactcattacccgatggcgaaacgcatctcgtaacgagcttccgaaaaaacatgctcgacaaagagaagttcaggaagtttttggaccccaccctggagctcagcgctgaatcttggaacagcctgctggaggtggccgatcttgctcgccattgcacggcgcgggaaccgtaccagcggccagacatgggtcactgcgtgaacaggctttccagcctagtggaccagtggaagccaaccaacattgttgatgatgacgatgaggagggtgggacaagcgagatgg

SEQ ID NO: 40624 - DNA, 293 bp, Zea mays
atgtttcttgcactagataaggatacaaacagtacactgagcaaacaagaactcaaggaatatgcagatggcacattgactgagattttcattgaaagagtttttgatgagcatgtccgccggagcaaagttggaggtggaaacagtcgcgagatggacttcgaaagctttcttgattttgttttggctctagaaaacaaagatacccctgaacgcttgacatatttatttagatgccttgatcttaatggaagggggttccttacaactgcagacatccacactctatttag

SEQ ID NO: 40625 - DNA, 289 bp, Zea mays
agtgaggtcctgacggatctgtcatcaatgcatcggttggttgttgcaaccggaggtggtgcagtgatccgaccaatcaattggagttacatgaagaaagggctgaccgtatggttagatgtcccactggatgcacttgcaagaagaatcgctgctgtaggaaccgcgtctcgaccactcttgcatcaggaatccggtgatccttatgcaaaggcttatgcaaaacttacgtcactttttgagcaaagaatggactcgtatgctaatgctgatgccagagtttcacttg

SEQ ID NO: 40626 - DNA, 300 bp, Zea mays
agcatgctgcctcatgtaccgtggtgatgtggttcccaaggacgtgaacgctgctgtggccacaatcaagaccaagcgcaccatccagttcgtggactggtgcccgactggcttcaagtgcggaatcaactaccagcctcccagcgtcgtccccggcggtgacctggccaaggtgcagcgtgccgtgtgcatgatctccaactccaccagtgttgtggaggtccttctccgcattgaccacaagttcgacctcatgtacgccaagcgcgccttcgtgcactggtacgtcggtgaagggta

SEQ ID NO: 40627 - DNA, 308 bp, Zea mays
agcgagaagaccagaaggtgagaagagagagagagagtgtgtgtgatcggtacaaggatcaccgctgtgcctgcgcgtgctgcttcaccgaatcgagtcagatcctgtccgaatccgagctaagggatggcaaccggtagtgaagcctcgaaggcagctgaggctgtggttgactggcataaacacgacagcaagaggatgctccatgcggtttaccgtgttggggatctggaccgcacaatcaagtactacacggaatgctttgggatgaaactgctgaggaaaagggatgttcctgatgagaagta

SEQ ID NO: 40628 - DNA, 300 bp, Zea mays
ccttaaggcaccggttgctcagcacctgcagccatccagcaatctcggagatggcaacgggctaagtacagcccgtgcccctgttgatctcatcacagttcttgatgtcagtggaagtatggctggtaccaaacttgcattgttgaagagggctatgggatttgtcattcagaatcttggatcctctgaccggctttccgtcatcgccttctcatcatccgcacgtaggctcttcccactccgtaagatgactgagtctggtcggcagcagagcttgctggctgttaattcactgacgtc

SEQ ID NO: 40629 - DNA, 308 bp, Zea mays
ggcaggtattgccaaagactccaaggactccaaatgcatctgtgtcctgtggtgattcagggcttgaatcacttcctcttgatttgctgatcaagatcatgtgttgcttgcaccatgacgaactgaaagttgttttccatgtttcaaaaaggattcgaaaagcagttcaacttgccagggagtttcatttcaactacactactccagacagaagcagacaggacttgctcctgaatagaacccctcttccaacggagcattggcctttcttaagaatcaacggcaaggacgtgcacgtttccacccca

SEQ ID NO: 40630 - DNA, 310 bp, Zea mays
cgaccgccctccgccgcgcgtcggacggtgccgagggaagaggcaccatgaggttggagaagtgctggttctgctcctctaccatctaccccggccatggaatccagttcgtccgcaacgacgccaagatcttccgcttttgccggtcaaagtgccataaaaacttcaagatgaagaggaaccctcgtaaggttaagtggacaaaagcatacaggcatttgcatggcaaggacatgacccaggatacaacctttgagtttgagaggaagaggaacaggcccgagcgctacgaccgcaatttgacggagca

SEQ ID NO: 40631 - DNA, 303 bp, Zea mays
gctggtcgaagcttttgctaagtgcgctaagctgagggagctggtaaaccttgtcgtcgttgccgggtacaatgatgtcaacaagtccaaggacagggaagagatcgcggagatagagaagatgcatgaactcatcaagacccacaacttgttcgggcagttccgctggatctctgcccagacaaacagggcccgtaacggcgagctctatcgctacatcgctgatacccatggtgctttcgtacagccggccttctatgaagcgttcggtctcaccgtcgttgaggccatgacctgtggact

SEQ ID NO: 40632 - DNA, 305 bp, Zea mays
caccttccctcccctccactcccgcaatctcgtctccgccgtccgccgccgcgccgtagcaaggtaacagagatcacaacaagttaaagcctcaaggaatgctgaaagatgtgctttcctagaagatatttctgttgcgacatcaaggaccttgctgctccccgagggctgctgatctgctcaactcttgatgacctgatctgcatcgattctacaacgttcagactgcgccacgaccaagccataagagtactgttcaccgtcatggatcatgacatcggggaggaaggctaactctttgccca

SEQ ID NO: 40633 - DNA, 307 bp, Zea mays
aagaaaagaagaagatcgcgagaagtgttaagtgcctcagccgctgcattggtagcaccacaatggaaggtattcaccagtgaagaacttaggtcgatcacaaagaacttcagcgagggtaaccggcttcccggcaatgcaaagacaggcggaacctatagtggaatcttaccggatggatccaaggtagcaatcaagagacttaagaggtcgagtctgcaaaggaaaaaggacttctactctgagatccggagagttgcaaagctatatcaccctaatttggttgctgtaaaaggatgttgctatg

SEQ ID NO: 40634 - DNA, 307 bp, Zea mays
cgcgtggttcgttaggaaaggaaatcgattccccccgcatctgatctcttcggtgctagagaaatataggccgccgccgcctcctccttgttcggtgaaaggtgggcagttagggttgggagatctcttgactcacgacacgagcagcagaattcgtcgagggccgctggttgctgcgagaggtccgggccttcgtgggatcttgaaaattgaatgttctaatggagtccaagggtggcaagaagaagtctagcagtagtcgttcctccctgatgtacgaagctccccttggctacagcatcgagga

SEQ ID NO: 40635 - DNA, 255 bp, Zea mays
cgagggtgtcaaggccgaggaggagtacgagaagaccggcaagatccccgacccggagtccaccgacaacgctgagttcaagatcgtgctcaccatcatccgcgacgggctcaaggctgaccccaagaagtaccgcaagatgaaggagaggcttgtcggcgtctctgaggagaccaccacgggtgtcaagaggctctaccagatgcaggagaccggcgccctcctcttccctgccattaacgtcaacgattccgt

SEQ ID NO: 40636 - DNA, 298 bp, Zea mays
gttcggtgctgcccagcaggtggagaaccgaggcgcgctgtccaaaaggtcacgtaacgacgtgtctgtaagggagggggactggaattgtcctcagtgtggtaatgtcaacttcagttttagaaatgtttgcaaccgtggagcctgtggtgcaccccgtccatcaccgagtccaagtccaagaatgatgccaggacctcctgcttctggatatgaccggtcacctctattttacggaggaggtggtggcgccccacctccaattccgcttggaactggtagctatggtgctccatat

SEQ ID NO: 40637 - DNA, 299 bp, Zea mays
caactctgcaggctgctcgtcgccctccctccacgccggacgcgccccgatccagatccaggggcgtaacatggcatcaaaacgtatcctcaaggaattaaaggacctgcaaaaggaccctccaacgtcatgcagtgctggtcctgctggtgaggatatgttccactggcaggcaaccatcatgggtcctcctgatagtccatatgctggaggtgttttcttagtgaacattcatttccccccggactaccctttcaagcctccaaaggtatcttttaagacgaaggtcttccatccaa

SEQ ID NO: 40638 - DNA, 301 bp, Zea mays
aggcggaggaagcagtccgatgtgatgcggttcgtgcagcgcgtgcgctagctgggagtacaggcagcagccggccatcgtccgcctcacaaggcccactcgtcctgacaaggcgcgccgcctcggctacaaggccaagcagggttatgttgtttaccgtgtccgtgttaggcgtggtggcaggaagaggcctgtgcctaaaggtattgtctatggcaagccaaagcaccagggtatcacccagctcaagttccagaggaacaagaggtctgttgctgaggagagggctggacaaaagctt

SEQ ID NO: 40639 - DNA, 80 bp, Zea mays
cggccacgaggagcgggacagcaacctccagatcgtgtgcttcgaggtccacgccgacaggaacgagaaggtgttcctgg

SEQ ID NO: 40640 - DNA, 281 bp, Zea mays
tgaaggggaagatcacgctccgcctccagcaccgcgtcctccatggccgcctcctcccgccgcgcgcctcaacttgtggtgtcctctgcctcccgcctcctcctcgggctgggcttctcctcggcatcctccgctggccctcgccggctgtcttcgtcgacaagagcacccgtgtgatctgccatggcatcactgtgaagaacggcaccttccacaccgagcaggccatcgagtacggcaccaacatggttggtggagtgactcccaagaaatgtggaact

SEQ ID NO: 40641 - DNA, 303 bp, Zea mays
  unsure (1)..(303): unsure at all n locations
gaaatgccaggagatgaatatgaatgtcgtttcggctacactgtagnacacagnacctctacgnagaggcccttgtacgtcacatagatataagaaacttcctcggcgagaagaaggtcaggaaggtggacatgcttgatggcgtgaccatcctccggtccgagaaggtcaaggatgagctcatccttgacggaaacgacgtcgagctcgtatctcgctccgccgccctcatcaaccagaaatgccatgtgaagaagaaggatatccgaaagtttttggacggtatctatgtgagcgacaagg

SEQ ID NO: 40642 - DNA, 304 bp, Zea mays
ctccgctgggccaccagctttgaccgccgcctcccttcccctccactacagctcctccccaccccactcccccgcaggagcggcggcggcggcggcgaggtcgtaccccacatcggcgagcggcggcggcaccgccggaggcaaaggcaagatgttcgggcgcgcgccgaagaagagcgacaacaccaagtactacgagatcctcggggtgcccaagtcggcgtcccaggacgatctcaagaaggcctaccgcaaggctgctatcaagaaccaccccgacaagggcggtgaccccgagaagttc

SEQ ID NO: 40643 - DNA, 306 bp, Zea mays
cttagctccactccagctccaatcacagtcgtgaccagagcgcgagagctagctagagggccgtgaaaatgccgatcaataggatcgccctggggagccaccaggaggtgtaccacccgggcgccctcaaggcggcgttcgctgagttcatctccaccctcatcttcgtcttcgccggccagggctccggcatggccttcagcaagctgaccggcggcggcccgacgaccccggcgggcctgatcgctgcagcggtggcgcaccgttcgcgctgttcgtggcggtgtctgtgggcgcgaacatctc

SEQ ID NO: 40644 - DNA, 258 bp, Zea mays
ccgagcatatcacagtgacagacacgatggtgagcgccagaattgttgtcctcctcgccaccctcctatgctgctgccgccgcagtcgcgtcgtcctgggaggacgacaaccaccaccaccacgggggccacaagtccgggcaatgcgtgctgcggtgcgaggaccggccctggcaccagcgcccccggtgcctggagcagtgcagggaggaggagcgggagaagcggcaagagcggagcaggcacgatgccgacgac

SEQ ID NO: 40645 - DNA, 305 bp, Zea mays
ggtattcatcaaaggtacaccagaggaaccaaagtgtgggttcagtgggaagttggtccacatacttaagcaagagaatattcctttctcaagttttgacatcctttcagatgatgaggttagacaggggctgaaggtgctctcaaactggcccagttaccctcaactgtacataaaaggtgagctggttggcggctcagacatagtgatggagatgcacaagagtggtgagctgaagaaggttctgtctgagaaaggggttattccaaaggaaagcctggaggacagattgaagtccctggttt

SEQ ID NO: 40646 - DNA, 305 bp, Zea mays
gcctcttctcctccctcctgccgggtccttaataaagagcagcagcgcaagaggttggtagagcgagcgagaagaaggcaatggcggcggagagcttcctgttcacctcggagtccgtgaacgaggggcacccagacaagctgtgcgaccaggtgtcggacgcggtgctggacgcctgcctggcgcaggaccccgacagcaaggtggcctgcgagacctgcaccaagacgaacatggtgatggtgttcggcgagatcaccaccaaggcgagcgtggactacgagaagatcgtgcgcgacacctgc

SEQ ID NO: 40647 - DNA, 303 bp, Zea mays
  unsure (1)..(303): unsure at all n locations
gagggactgagggtctcggagtggattgatttgggattctgttcgaagatttgcggangggggcaatggcgaccgcggggaaggtgatcaagtgcaaagctgcggtggcatgggaggccggcaagccactgtcgatcgaggaggtggaggtagcgcctccgcaggccatggaggtgcgcgtcaagatcctcttcacctcgctctgccacaccgacgtctacttctgggaggccaaggggcagactcccgtgttccctcggatctttggccacgaggctggaggtatcatagagagtgttggag

SEQ ID NO: 40648 - DNA, 308 bp, Zea mays
cctcatcttctcggtggtcgtgctgttcaccacgatcaggatgctgcgcaacatcctcgaggtcctgatggagagcacgccccgtgagatcgacgccaccaggctggagagggggctctgcgagatggaaggcgtggttgccgtccacgagctgcatatctgggccatcacagtggggaaggtgctactggcttgccatgtgacggtcgccagggaagccgacgcagacgagatccttgacaaggtgattgggtacatcaagacggagtacaacatcagccatgtgtacattcaggtcgagcgtgaat

SEQ ID NO: 40649 - DNA, 312 bp, Zea mays
cgtggaggtgccaagaatggagcagcacaatactttccagaacgacaagggcaacctgtatgtgagtattatttgaagactgggacttgtaaatttggttccaattgcaaatatcaccatcctaagcaagatggatctgtgcaatctgttatattaaacaacaatggattccctctacgcccgggtgagaaagaatgctcctactatatgaagactgggcaatgcaagtttggttctacatgtaaatttcatcatccagaatttggtggtattccgttcctggatcatatatagcaggctcatacactccaa

SEQ ID NO: 40650 - DNA, 295 bp, Zea mays
tgcagtcaccactcccaagccagtacccacagtcctacgagcagtcgcacgcaagttcaagagacaaacggtcgacatggctcgcacgcaatctgccgtagcggtcgccgtggtggccgctgtgctgctgctggcagctgcggcgacgacctcggatgccgccatcacctgctggcaggtgagctccgccatcgcgccctgcctctcctacgcccgctgcacggggtccggcccctccgcgtcctgctgtagcggcgtcaggaacctcaagagctccgccagcaccgccgccgac

SEQ ID NO: 40651 - DNA, 297 bp, Zea mays
cggacccacacacacacaaccagatctcccccaaatccacccgtcggcacctccgcttcaagatgcagatctttgtgaaaaccctgactggcaagactatcaccctcgaggtggagtcgtctgacaccattgacaacgttaaggccaagatccaggacaaggagggcatccccccagaccagcagcggctcatctttgctggcaaacagcttgaggacgggcgcacgcttgctgactacaacatccagaaggagagcaccctccaccttgtgctccgtctcaggggaggcatgcaga

SEQ ID NO: 40652 - DNA, 297 bp, Zea mays
attcggctcgagcaaaaccacgcgcgccacgtggccgtggctggcccctcgccgcagcccggcacgccgcccgcccgcccgcgctagccggccatcaacctcatctgaaagaaggagtccacctgacgccgtccgcctcctcgtcaccccgtttcgcttcgcattccttcccctctctccctttattcctatcggcgctcggccaccttcccgcaccaacccaccagcccccgcattcccgggtgcctcgcttcgctttgcgcgcgattcgatccaggctttggttggaggcatggc

SEQ ID NO: 40653 - DNA, 272 bp, Zea mays
gtcgacaggtaccgtggcgaccccgggcccaggtgccacgacgaggacgggaggagcggcggacccgctgacgacgacgctggtgggcaagcgacgccgacggcagtgatggcagatgacaagaaagcaggcggcggcgacgacgacaagaagaagaggccgtggaaatgctgcgacgtgcccatctgcaccaggtcctggcctccggtgtgccgctgcgcggacacggtggagccgtgcgccagcactggccagcactgcgagcaagtgga

SEQ ID NO: 40654 - DNA, 296 bp, Zea mays
tgggaggaggagcgggagaagcggcaagagcggacaggcacgaggccgacgaccgcagcggcgagggctcgtcggaggatgagcgagagcaggagaaggagaaacagaaggaccggcggccgtacgtgttcgaccggcgcactttcgtcgcgtggtccggagcgagcaggggtccctgagggtgctccggcccttcgacgaggtgtccaggctcctccgcggcatccgggactaccgcgtggcggtcctggaggcgaacccgcgctcgttcgtggtgcccagcaacaccgacgcgc

SEQ ID NO: 40655 - DNA, 315 bp, Zea mays
  unsure (1)..(315): unsure at all n locations
cgcaccaccaccccgtcgtccgtagccgtggccaccccgcgcgccggcagcagccccatccgcgcgtccatctcctcctcacccaccccgccctacgacctgacgtccttcaggttcagccccatcaaggagtccatcgtgtcccgcgagatgacccggcgctacatgacggacatgatcacccacgccgacaccgacgtggtgatcgtgggcgccgggtccgcgggcctgtcctgcgcgtacgagctgtccaaggacnccaccgtgagcgtcgccatcgtggagcagtccgtgtcccgggcggcggcgcgtggc

SEQ ID NO: 40656 - DNA, 272 bp, Zea mays
gttggtctgaccaactatgcagctgcctactgcactggccttctgttggctcgccgtgtgctcaagacccgtggtttagataaggaatatgagggcaatgttgaggccactggtgaggacttctctgttgagccagctgatgagaggaggcctttccgtgctctcttggatgttggccttattaggactacaactgggaaccgtgtctttggtgccctcaaaggagctttggatggtggactggatattcctcacagcgagaagaggtttgc

SEQ ID NO: 40657 - DNA, 289 bp, Zea mays
catccacgacctgcagctccagatccggcagaagacccacaacctcaaccgtctcgaggcccagcgcaatgacctcaactcccgagttagaatgctcagggaagagttgcagttgcttcaagagcctggctcatatgttggtgaggtggtgaaggtcatggggaaatcaaaggttctggtgaaggtacaccccgaaggcaaatatgttgttgatatagataagagcattgatatcacaaagatcacaccttcaacaagagtcgctcttcgtaatgatagctatatgctc

SEQ ID NO: 40658 - DNA, 283 bp, Zea mays
ccttaagatattcaagactaacaacttgtgggtgaaccttaaagctatcaagagactcgtagacgctgaggcacttaagatggcgattattccaaaccccaaggaagttgatggtgtgaaagtccttcaactcgaaaccgcagctggtgcagctattcggttcttcgacaaagcgattggaattaatgttccccgctcaaggtttctcccagtgaaggctacatctgatctgttgcttgtgcagtctgatctttacagcttggttgatggctttgtcatccgc

SEQ ID NO: 40659 - DNA, 287 bp, Zea mays
gtcgaagcgaggcaggggaggttcggcggggaacaagttccgcatgtcgctgggtctgccggttgccgcgacggtgaactgcgcggacaacacgggcgccaagaacctctacatcatctccgtcaagggcatcaagggccgcctcaaccgcctcccgtccgcctgcgttggcgacatggtcatggccaccgtccagaaggggaagcccgacctcaggaagaaggtgatgccgccgtcatcgtccgccagcgcaagcgtggcgccgcaaagacggtgtctacatgtac

SEQ ID NO: 40660 - DNA, 292 bp, Zea mays
tctcgatccgctttgtttgcaaagctcctcctcgatccatcgatcactgcaccggccggcgacaccgcgctcgcagggtgcagccaacgagacggcagcaatggcggaccgtgaccgcagcggcatctactgctgctcccacgccacctacgggcagcagcagcagcagggaggaggcggtcgcccgatgggtgatcaggtgaagggcatgctccacgacaacgggccgactgcgtcgcaggcgctgacagttgcgacgctgttcccgctagtcgggctgctgctggtgctg

SEQ ID NO: 40661 - DNA, 305 bp, Zea mays
cggaatggttccgcgtcgtcatgctcctcagccccgtcgtctccacgtctggacgcttcgaggagttcttccccatcggaggcgagagccccgagtccttcctcagcgtcttcagcgacgacgttatccaggcgtcgttcaacactcgccgggaggagtgggagaaagtgttcgagaagcagagcaagggggagatcacgacggcgtccgaggaacagatccgggagctgagcaggtcctgctcacgtggtggccgcggcagccgcggcgagggtggcgactcgggttcttcttcttcttccaag

SEQ ID NO: 40662 - DNA, 286 bp, Zea mays
ctccgacaccggctggtatggcaccaaccagttctccgaggatgtcatcttcggcaacaggatgaagcagtacgagtgcctgaccaaggactcgtccgttgccgcggcggtgttcgtgccgttctacgctgggttcgatgtggcaaggtatctctggggctataatatcacgacgagggatgcggcgtcgcttgatttggtggagtggctgatgaacaagcccgagtggagcgtgatgggtgggcgggaccatttcctggttgccgggaggatcacctgggatttc

SEQ ID NO: 40663 - DNA, 296 bp, Zea mays
caatttgaaggctgcccaacccttgcgccggtaggcggtggcggtgaggatagagggttacctgaggaggcagtgatggcggccacgattcagtacaaccggagcaacccggcggtgaagcggatcctgcaggaggtcaaggagatgcagtccaacccctcacccgacttcatgtccctccccctcgaggaggacatcttcgagtggcaatttgctatccttggtccgagagacagcgagtttgagggtggaatttatcatggcaggatccagctaccttcggattatccattcaa

SEQ ID NO: 40664 - DNA, 310 bp, Zea mays
  unsure (1)..(310): unsure at all n locations
cgacgacttcaccgagaagagccgcgtgccggacccgcagaggatgatccgcgcctacgcacagtcggtggcgacactcaacctgctccgcgcgttcgccaccggagggtacgctgccatgcacgcgtcactcagtggaacctcgatttcatggatcacaacgagcaaggtgataggtaccgtgaattggcccatagggtggatgatgctcttgggttcatgactgcatcggggcttacagtcgaccacccgataatgacgactactgacttctggacctcgcacgagtgcncttctcttacctacgagc

SEQ ID NO: 40665 - DNA, 239 bp, Zea mays
agtttttgattttagccgccgccgctgctcatctcacatccctcgagaagacgcctgctcctcgccgatcgatacgatggccgtcttctccgacctccacaccgccgacggcctcaagtccctcgaggctcacctcgccggcaaaacctatgtgtctggtgactccattactaaggatgacattaaggtcttcgccgcggtgccgtcgaagcctggcgctgagtttcctaatgccgccc

SEQ ID NO: 40666 - DNA, 297 bp, Zea mays
gcggtctgctcgttcgatctgtgcagcagatctgaggtcccgggcgaccgtgaagcagcttcaatcgtcggcatggcgctcgtattgcatagtggggctggaaacaagaatgccttcaaagcacttattgctgcagaatacagtgggatcaaggttgagttgaccaaggattttgagatgggtgtctccaacaagacccctgagtttcttaagatgaacccccttgggaaggttcctgttctggagactcctgatggccctgtttttgagagtaatgctatcgcacgctatgttgct

SEQ ID NO: 40667 - DNA, 299 bp, Zea mays
actcactatacactgctctgctgcagcaagaaggaagaagctagcgcctccctagctctcgttgtcagcaatggccaccaccgccgcgtccagcctcctcaagtcgtccttcgcgggctcccggctcccttcggccacgcgcaccaccaccccgtcgtccgtggccgtggccaccccgcgcgccggctggagccccatccgcgcgtccatctcctcctctcccaccccgccctacgacctgacgtccttccggttcagccccatcaaggagtccatcgtgtcccgcgagatgacccggc

SEQ ID NO: 40668 - DNA, 296 bp, Zea mays
ctgatgagaggaggcctttccgtgctctcttggatgttggacttattaggactacaactgggaaccgtgtctttggtgccctcaagggagctttggatggtggactggatattcctcacagcgagaagaggtttgctggattcaagaaggatgacaagcagctggatgctgatatccatcgcaagtacatctatggtggccatgttgctgactacatgaggaacctcgctgaagaggagccagagaagtaccagtctcacttcagtgagtacattaagaagggaattgaggctgat

SEQ ID NO: 40669 - DNA, 295 bp, Zea mays
cagaaacagccccagtcacagtctgaattgacagaacaatcagaaccatctagcatgacttctgacgcagcctctgaagttgcctcggaggatggtgcttcaacgacagcaccgtccgagtcagaagaggtgaactcgctgtctgatagcatatcgaatttgacaacggatgatgctacttcaaacgccccatctgctgaaaacggaaatggtgtggcagggtcctgatggttatgattatgcaaaccctgttctttttttccccatacagtgctgttacaggaaatagtgcttt

SEQ ID NO: 40670 - DNA, 293 bp, Zea mays
actcgacattgatgtccaaggagctcgatccgtgagggcttcttctcttgaagcaatattcatctttgtatgccctccatcattcgaggaactagagaagcgccttcgggcacggggtactgaaacagaggagcaaatccagaaacgactcagaaatgctcaggctgaacttgatcagtccaatgaaccaggtctctttgatcatcttttggtcaacgatgaccttgagacatgctatgagaatttgaagaagttgctttctctggatgatgacaagaagattcagatgattt

SEQ ID NO: 40671 - DNA, 227 bp, Zea mays
cctcgatccatcgatcactgcaccggccggcggcaccgcgctcgcaggggctagccaacgagacggcagcaatggcggaccgtgaccgcagcggcatctacggcggcgcccacgccacctacgggcagcagcagcagcagggaggaggcgggcgcccgatgggtgagcaggtgaagggcatgctccacgacaaggggccgacggcgtcgcaggcgctgacggtggcg

SEQ ID NO: 40672 - DNA, 288 bp, Zea mays
cactcaccgatagcaagtagcgccgccgacgtttcgagagcagagtatccaagctagccaagcgcgcacctcggtgacctagctagctacctagctagttcaggcgacgatatggcgtctggtcaggagagcaggaaggagctggaccgcatagctcgcgagggcgagaccgtcgtccccggcgggaccggcggcaagagcgtcgaggcccaggagcacctcgccgaaggcgcagcgcggaggccagactcgcagggagcagctggggcacaggggtacacgagatgg

SEQ ID NO: 40673 - DNA, 230 bp, Zea mays
tagggagacgaagaagggcctggtgctgctggacttctgggtgagcccgttcgggcagcgctgccgcatcgcgctggcggagaagggcatcgcctacgagtactcggagcaggagctgctgggcggcgccaagagcgacatcctcctccgctccaacccggtgcacaagaagatccccgtgctcctccacgacggccgccccgtctgcgagtccctcgtcatcctcgagt

SEQ ID NO: 40674 - DNA, 190 bp, Zea mays
cagaggtgggctggcttctcctccccctcttatcaagtcctcctcgggttagggttccttagggttttgtggaggggcgatggcggcggctgatgtggagtaccgttgcttcgtcggcggacttgcctgggccaccagcaacgagtcgctggagaatgccttcgcctcctacggcgagatcctcgactcc

SEQ ID NO: 40675 - DNA, 300 bp, Zea mays
atttgttaacaaagaattccctcatagccgccgccgccgccgacgccgccgctcatctcgccgagaggtgacgggaccgaggaactcgccgagttctaagatagagaatcgcttttcacagcctggggtctgctgcgtagggtggtgttgaaggggagaagtttaagatctgttccacagatcacgcgtgcgcgctcgcgaatcgggggttccacacatagcttcgtcgttttgaatttgatgtactaatggagtctaagggtggcaagaagtctagcagtagtcgttccatgatgtatg

SEQ ID NO: 40676 - DNA, 232 bp, Zea mays
ggtgggttggcttctcctccccctccggttcgggttcgggttcgtgaggttctccggggttcggtttcgtgggtgggcggatcgagatggcggcgtcggatgttgagtaccgctgcttcgtcggcggcctcgcctgggccacggacgaccactccctccacaacgccttcagcacctacggcgatgtcctcgagtccaagatcatcctcgatcgggagacgcagaggtccct

SEQ ID NO: 40677 - DNA, 322 bp, Zea mays
acaatgtctacaactctgcaagatccgtgaggccaggggtgaatgtgacttggggtttccctgtggcttgtaagaagccggtaccttgtgcgtatgcacttctgtgacattgctagcaaggctctgtatgagctctacttcaatatctacgtcaatggtgatcttgcagtcaaggatttcgatctctccagtgcaactggattcttggcctatccttattacattgactttatcgtcgatgtgaaggatgaggggatactgaaattggcgattggtggcttaaagaagagtcgatctgatgaagtaagtggtatccttaatg

SEQ ID NO: 40678 - DNA, 318 bp, Zea mays
cacgcaaccagatctcccccaaatccagccgtcggcacctccgcttcaagatgcagatccttgtggaaaaccctgactggcaagactatcaccctcgaggtggagtcgtctgacaccattgacaacgttaaggccaagatccaggacaaggagggcatccccccagaccagcagcggctcatcttcgctggcaaacagcttgaggacgggcgcacgcttgctgactacaacatccagaaggagagcaccctccaccttgtgctccgactcaggggaggcatgcagatcttcgtgaagaccctgaccggcaagactatc

SEQ ID NO: 40679 - DNA, 296 bp, Zea mays
gtcctaactgatgcctgttgggctctatcatacctatctgatgggactaatgacaaaatccaagccggtaattgaatctggcgtgttccctcgccttgtggaacttctgatgcatccttcagcctctgtactgattccagctctgcgcacggtgggtaacatcgtaactggggacgacatgcagactcagtgtgtcattgacaatcaagcacttccatgccttttgaacctactgaccaccaaccacaagaaaagcatcaagaaagaagcatgctggacaatctcaaacatcacag

SEQ ID NO: 40680 - DNA, 312 bp, Zea mays
cccggtgcttctcctcctggtctccctgtgcttctcgctcgcgctcgcgtggcaaacggacacggaatccgggctcaggcaggccgtaccactacggcgaggagagtttccggcactggacgcgctcccggcagggccggttcagggtgctggaacggttcacccacgagctgctggaggacgccgtcggcaactaccgcgtcgccgagctggaagccgcgccgcgcacgttcctgcagcccagccactacgacgccgacgaggtgatgttcgtgaaggaaggcgagggcgtcatcgtgactgctccgcggc

SEQ ID NO: 40681 - DNA, 117 bp, Zea mays
tgttactgagagtgtgtgtgagatagaggatgggtggcagcggcagggctgctctgctgctggcccttgttgttgttggccgtaagcctggccgtggagatccaggccgacgccggg

SEQ ID NO: 40682 - DNA, 315 bp, Zea mays
ctaggcatcaccacaacgggaggtgggaggcacggattgggcgagtctttgggaacaagtactctaattggggaccatttgacactcaagaagaggcagccaaggcctatgaccttgcggccattgaataccgtggcgtcaatgctgtaaccaacttcgacatcagctgctacctggaccacccgctgttcctggcacagctccaacaggagccacaggtggtgccggcactcaaccaagaacctcaacctgatcagagcgaaaccggaactacagagcaagagccggagtcaagcgaagccaagacaccggatg

SEQ ID NO: 40683 - DNA, 317 bp, Zea mays
aaatggtagaaatgggatcattgatctgttcttccaggacaggtacttgaatgctatacagaccaatgcaccaccatctaataaggtatctagctactgcagttgttgtcaacaaaaggagaaggaatatgcttgaagagttgattaaggtcattcaacaggagcaccatagctacaaggatcccgtaactgaatttctggaatgcttatatgtaaactatgattttgatggtgctcaacagaaactcatagagtgtgagcaggtaactttgaggttgtttttcctgcaattttcaaggcctcaattttgttattca

SEQ ID NO: 40684 - DNA, 319 bp, Zea mays
aggggatcatcgtgcgcgccacggaggagcagacccgcgagctgcggcgccacgcctcggagggcggccaagggcccgcattggcccctgccgccgttcggcgagtcgcgcggcccctacagcctcctggaccagcggcccagcatcgccaaccagcacgggcagctctacgaggccgacgcgcgcacttccacgacctcgccgagcacgacgtcagcgtctccttcgccaacatcaccgcggggtccatgagcgcgccattgttcaacacccgttcgttcaagatcgcctacgtgccgaacggcaagggctacgccga

SEQ ID NO: 40685 - DNA, 316 bp, Zea mays
cggaactcaagcatcgaggcgtttgcggtctgtgagaactactcacctcctgaagggttcaaggaggaagacctataacaacttgctagagaaagtgggtactccctcaggagctggcgatctagattgcagaagcggatggctggagggaccaaacaaggtgtacatcccgttcctggcctgcggggatctcagcggctacgactcggaccgctcgtacccgctgcccagcagcacggacggtggctcgtaccggagcctggaccccgtgcagcctcccatcgccccgccttacaagaccgccctgcagatgaag

SEQ ID NO: 40686 - DNA, 307 bp, Zea mays
cgcttgccttgctgaggaccctgacagcaaggttgcttgtgagacctgcaccaagaccaacatggtcaagggcctttggtgagatcaccaccaaggccaatgttgactacgagaagattgtcagggagacctgccgcaacattggttttgtgtcaaacgatgttgggcttgacgccgaccactgcaaggtgctcgtgaacattgagcagcagtcccctgatattgctcagggtgtgcatggccacttcaccaagcgccccgaggagattggagctggtgaccagggacacatgttcgggtatgcgac

SEQ ID NO: 40687 - DNA, 309 bp, Zea mays
agtagcgccgccgacgtttcgagagcagagtatccaagctagccaagcgcgcacctcggtgacctagctaagtaactaagctagttcaggcgacgatatggcgtctggtcaggagagcaggaaggagctggaccgcaaggctcgcgagggcgagaccgtcgtccccggcgggaccggcggcaagagcgtcgaggcccaggagcacctcgccgaagggcgcagccgcggaggccagactcgcagggagcagctggggcagcaggggtacagcgagatggggaagaagggcggtctgagcaccacggacga

SEQ ID NO: 40688 - DNA, 311 bp, Zea mays
tgacgagagggggagagagagaggcgaggaaggagggagagagcacgggggcttgatcgaagatggatgccggaagaaaaggtggtgaagaaggccgcggcggggcgtcgcggcgggggcggccccaagaagaagccggtctctcgctccgtgaaggccggcctccagttccccgtaggccgtatcggccgctacctcaagcagggtcgctactcccagcgtgtcggcaccggcgcccccgtctacctcgctgcagtcctcgagtacctcgccgccgagctcctcgagttggcggggaacgcagcgcggga

SEQ ID NO: 40689 - DNA, 307 bp, Zea mays
gaacaaaccacacaccccacctaccccggccggaccggcaggcagcacaacatggacctccgcctcctggagaaaggccctgctgggcctgttcgccgcggctgtggtggccatcgccgtggccaagctgagcggcaagcggtaccgcctcccaccggggcccccgggcgcccccgtggttggaaactggctgcaggtgggcgacgacctgaaccaccgcaacctgatggccatggcgaacggttcggcgacatcttcctgctgcgcatgggcgtgcgcaacctggtggtggtgtcgaccccggagc

SEQ ID NO: 40690 - DNA, 292 bp, Zea mays
gcggacgtaaggcgaaggagtagcagcagcaggcggcgccgagtagcggctccccatctcgagcctggcaacaatggcaagaggattgaagaagcatttgaagaggctcaatgcccccaagcattggatgctggacaagcttggcggagcttttgctcccaagccatcttctggacctcacaagtctagggagtgcctgccactgatcctcatcatcaggaacaggctcaagtatgctcttacataccgtgaggtcatttccatcctgatgcaacgccatgtacttgttgat

SEQ ID NO: 40691 - DNA, 306 bp, Zea mays
agcagatctgcgtacacaaatcgctggattcttatatgggctgagtccacaggacaatcctcaagtccaagaggataaggggaatagccatccctccgcagcatggaacacaccagatggtgactctgccatcaaatcttcctgaacatgagttccttaatgatcttgaacccttgggatggatgcatacacaaccaaatgaagctccacagctatcgccacaggacctgacatcacatgccaagattctggagaacaacaaacaatgggatggtgagaagtgcatcattctgacatgcagcttca

SEQ ID NO: 40692 - DNA, 308 bp, Zea mays
  unsure (1)..(308): unsure at all n locations
agcgcgacggaggaggtgctggccacgtcgcgggtgcccgtcgggctggtcaacatcacgcggctgtccgagtaccgccgggacgcgcacacgcagacctacaagaagcagtgggtggagccgacggccgagcagcgcgccgaccccaggagctacgccgactgcacgcactggtgcctccccggcgtgccggacacgtggaacgagctgctctactggaagctcttcttccccagcaacgatcaggtcctctgatggtgcattggtgcctgcatacatacgcctggannacaactgctaggggctag

SEQ ID NO: 40693 - DNA, 294 bp, Zea mays
cgcgacgccgagtttttgctccatcccgcatccaccgccagaatgtttctcacgaggacggagtacgaccgcggggttaacaccttctcgccggaggggcggctgttccaggtcgagtacgccatcgaggccatcaagttgggatccactgcgatcgggttgaaaacaaaggatggtgttgtccttgctgttgagaaacgtgtgacctcgccactgctggaaccaagcagtgtggaaaaaatcatggaaattgatgagcacataggctgtgccatgagtgggcttattgctgat

SEQ ID NO: 40694 - DNA, 294 bp, Zea mays
tcaccctgttccgggggctcctgtactgggtggcgcactgctggggtccaccgtggcgtgcttcctgctccgcttctcgacgggcgcgcaggccacgggcaccttcgggctgacgggcgtgtcggtgtgggaggcgctggtgctggagatcgtgatgaccttcgggctggtgtacacggtgtacgccacggcggtggacccgaagaagggcagcctgggcaccatcgcccccattgccatcggcttcatcgtgggggccaacatcctggtgggcggcgcttcgacggcgcgtca

SEQ ID NO: 40695 - DNA, 280 bp, Zea mays
cttgttgaagacctacgaggtcatggtaaagaagttccagtcccagatccagaccagagacactgagataacccatctacagcagcaaattgatgaagctaaacttcggaaatcaaagctagagaagaaactgaaacagaggggcctacttaacagggagtcagaggaatctgacgaagaagagaactacttttccattgaattgacaccaagtttgtttacatctgccgtcgataatgcctaccagtcgatacatgacttctcaaagcctttgatcaac

SEQ ID NO: 40696 - DNA, 293 bp, Zea mays
cccatccgcacctctctccatctccctgctcctccgccttcttcttgatccagccaagccagggatcgccatgtcggactcggaggagcaccacttcgaatcgaaggccgacgccggagcgtccaagacctacccgcagcaggctggcaccgtccgtaagaacggcttcatcgtcatcaagaaccgcccctgcacagttgtggaggtttctacctcaaagactggtaagcatggtcatgccaaatgccactttgttgccatagatatattcaacgggaaaaagctcgaagata

SEQ ID NO: 40697 - DNA, 286 bp, Zea mays
cccgagcatatcacagtgacagacacgatgtgtagcgccagaattgttgtcctcctcgccaccctcctatgcgctgccgccgcagtcgcgtcgtcctgggaggacgacaaccaccaccaccacgggggccacaagtccgggcaatgcgtgcggcggtgcgaggaccggccctggcaccagcgcccccggtgcctggagcagtgcagggaggaggagcgggagaagcggcaagagcggagcaggcacgaggccgacgaccgcagcggcgagggctcgtcggaggatg

SEQ ID NO: 40698 - DNA, 281 bp, Zea mays
gggcgtcatcgtgctgctccgcggcgggaagagggagtcgttctgcgtcagggagggcgacgtcatggtcatccccgcgggcgccgacgtgtactcggccaacacgcaccagtcggaatggttccgcgtcgtcatgctcctcagccccgtcgtctccacgtctggacgcttcgaggagttcttccccatcggaggcgagagccccgagtccttcctcagcgtcttcagcgacgacgttatccaggcgtcgttcaacactcgccgggaggagtgggagaaag

SEQ ID NO: 40699 - DNA, 281 bp, Zea mays
actcaacacagcacaggcagctcgagagagagagagagagaaagatgtcgtggttcgggcaccaccaccacaaccagccggctcccccggcgtcgggccccaaccaggtgttcaagatcttctgccgcgccaacgagaactactgcctggccgtccgcgacggcgccgtcgtgctggccccggtcaaccccaaggacgaccaccagcactggtacaaggacatgcgcttcagcacccgggtcaaggacgaggaaggcatgccggcgttcgcgctcgtcaac

SEQ ID NO: 40700 - DNA, 286 bp, Zea mays
aggagttcgagaagcgtggcgtgaagctgctgggcatctcgtgcgacgacgtggagtcgcacaggcagtggaccaaggacgtggaggcgtacggcgggaagcagcagcagcagcaggcgacgacgacgaaggtgacgttcccgatcctggcggacccggcgcgggacgccatccggcagctgaacatggtggaccccgacgagaaggacgcggcggggcggagcatgccgtcccgcgcgctccacgtcgtcgggcccgacaaggccgtcaagctgagcttcctgta

SEQ ID NO: 40701 - DNA, 139 bp, Zea mays
gttcaacctcatctccgacgactggggcgggtctgcgtcgccgtggatccgacagctctcggccactttccactccctcaagaagctccacctgcgcaggatgatagtatccaatgacgacatcaacacgatcgtccgc

SEQ ID NO: 40702 - DNA, 305 bp, Zea mays
acgtgtgggagcggctgaacaaggcgaaagcgcgacgcattcggacctgcggtcgcgtcggggctgatctgcggagacggcatctggaccctgccgcagtccattctggccctcgccaaggtgcagccccccatttgcatgaagtttttgtccagatcgaccaatgccaaggtggacagcttcctcgggttgtcatgattttacacagaatggcaagtagacacgccctcatcctgtaattattggtgcaagatgcaatcaccaggctacagctttgtataagagaagaggttttgctgtggagt

SEQ ID NO: 40703 - DNA, 300 bp, Zea mays
aaaaaagaagaaagaagagcgtaagaagaagcgtactgttcaagaggaggaaagggaacgtggaaaagtgagctccaaagtttatttgtcatacatgggggaagcttacaaaggtacactgataccactaattatcttggctcaaaccatgttccaagttcttcagattgcgagcaactggtggatggcatgggcaaacccacaaacagaaggagatgctcccaagacagatagtgtggtccttctggttgtttatatgtcccttgcctttggaagttcactatttgtgttcatgagaag

SEQ ID NO: 40704 - DNA, 305 bp, Zea mays
caaatgtgttgagattggtctacctcaactcatccttcttgtgatctttacaatgtacctgccacatgctgttcacatgctgaagtctatcttcgatcgatttgctgtcctgttcactatacccatagtgtggctctatgcatatcttctcactgttggaggagcatacaggaatgcaccaccaaagactcaatttcattgccgcactgaccgttctggattaattggtggcgcaccctggataagagtaccatatccctttcagtggggtgctccaacttttgatgcgggtgaagctttcgcga

SEQ ID NO: 40705 - DNA, 299 bp, Zea mays
atcacaaagatcgaagaagctgcaaagccgcttggctttgatgttcagaagaaaaaatacaagatgcggatggagaacccgaaagcaggtagaaagggcaatctgaatgttgcaacagaggtcttccaaatagccccatccctgcatgtagtcgagctaaagaaggcgaagggggacactctggagttccaaaagttctacagaagcctgtcgacccagctgaaggatgttgtgtggaagtgcgacggcgaggtggacggcaacagcgcggcagcatgaaagcgcgctttgaactttcc

SEQ ID NO: 40706 - DNA, 282 bp, Zea mays
ctcaacggcattgcgccactccaaggggcacaccccagatcgaggtgaccttcgaggtggacgccaacggtatcctaaacgtgaaggcggaggacaagggcacgggcaagtcggagaagatcacgatcacgaacgagaaggggcggctgagccaggaggagatcgaccgcatggtgcgggaggcggaggagttcgcggaggaggacaagaaggtgaaggagcggatcgacgcccgcaaccagctggagacgtacgtgtacaacatgaagaacacggtgggcg

SEQ ID NO: 40707 - DNA, 282 bp, Zea mays
gtcatggcccagttagggctgtgtggcttcaaggctggtttgataaatgaagcccatggttgcttgactgagctctactttacagggagggtgaaagaactgcttgcacaaggtgtgcaacaaagcagataccatgaaaaaactcctgaacaggaaagacttgagaggaggaggcaaatgccttaccatatgcatataaacctggagcttttggaagccacacacttgatctgtgcgatgctgattgaagtcccaatatggctgccagcacctatgacaagc

SEQ ID NO: 40708 - DNA, 234 bp, Zea mays
cattcactcgcctgccctccctcgccgccccactcccccaccccctgctcacccacccgtcccctcctgctcgcccatggctcccatcgctgtcggcgacgccctccccgacggccagctcgggtggttcgacgagaacgaccagctgcagcaggtctccgtccacgcgctcgccgccggcaagaaggtcatcctcttcggcgtccccggcgccttcaccccgacctgcagcaa

SEQ ID NO: 40709 - DNA, 158 bp, Zea mays
cggcaccgtgatcgcgctcacggtggccacccccgtgctggtgatcttcagcccggtgctggtgccggccgccatcgcgctggcgctcatggcggccgggttcgtcacctccggcggcctcggcgtcgctgcgctgtccgtgttctcctggatgtaca

SEQ ID NO: 40710 - DNA, 244 bp, Zea mays
accagacctccatttcgatcccatttgacatcaacccatcctcgtttcctccgtctagcagcctctcaccctcatggccaagatcaagatcgggatcaatgggtttggcaggatcggaaggctggtggccagggtggccctgcagagcgacgacgtcgagctcgtcgccgtgaacgaccccttcatcagcaccgattacatgacctacatgttcaagtatgacactgtgcacggacagtggaag

SEQ ID NO: 40711 - DNA, 236 bp, Zea mays
acgcgggaaccgaggaccgcaggaagccgacgagttgagcaggaggatggggtatgtgcagacccatgggtatgtatgggttccgccgaccctttctaaggtttagctgtttgattatcaactgccgtgtaaccacagaatgacagaacgcggggaagatccctttgtaatacgtgggtcgtgtaataagagaaacttctgcttgttgtgagagtgaccctttacggtattggaat

SEQ ID NO: 40712 - DNA, 307 bp, Zea mays
cgcaaagccaaagcaatctcaagtgaatcaaaccgccagacttcgcagtcctcctccactaccagagcatgcgcgttgccgcgacccgaaccgccgccgccgccgccgctcaccctccgagcgccttcctgctcctcctcgtactcctcggttgcgcgtccctcgcgatcggaggagcagccatggccggccacgtcctcggcggcgtgaaggagaacccagccgcggccaacagcgccgagtccgacgggctcggccgcttcgccgtcgacgagcacaacaggcgcgagaacgcgctgctggagtt

SEQ ID NO: 40713 - DNA, 297 bp, Zea mays
ccacccttttggacagggtgatttctgtcgagtacgccttcagggatgatagtgaagtgagtgataggtacggcagcccaagaagaggtggtggctatggtaggcggggtgatagcccagtgtaccggtcacgtcctagtccagactatggtcgcccagcaagtcctgtatatggttcatatgacggtcctggtcctgttcgtgatcgctatcggagatctcctgcttatcgatcaaggtccccacctgcgaaacgaagagcatatgactaatcgagaaccctctgttatgccatat

SEQ ID NO: 40714 - DNA, 296 bp, Zea mays
aggttcctgtgaggtattcgaggaaaagcaagtaggcaatgaaagattcaacatatttagtggctgcccttctggccagacagcgactattgttctccgtggtggtgcagaccagttcattgaggaagctgaacgaagtctccatgatgccatcatgattgtgaggagagcacttaagaactcgacagttgtgccgggtggtggtgctattgatatggaaataagcaagtatctcaggcagcatgcacgaacaattgctgggaagtctcagttctttgtaaattcatttgctaaag

SEQ ID NO: 40715 - DNA, 297 bp, Zea mays
gccttctgcgcctccatttcggcctctgtcccttgcaagttcaatctcacctccaaccatgggtaaagagaagtcccacatcaacattgtggttattggccatgtcgactctggcaagtcgaccaccacaggacaccttatctacaagcttggaggcattgacaagcgtgtgatcgagaggtttgagaaggaggctgctgaaatgaacaagcggtccttcaagtacgcgtgggtgctcgacaagctcaaggctgagcgtgagacaggtatcaccattgatattgctctgtggaagtt

SEQ ID NO: 40716 - DNA, 299 bp, Zea mays
atcagcctccttcctcctctcactctcgctcgcgctgcgctcgctacctcgcttcgcattccattcgaaaagaggggaggaaaggcaagatgttcatcgagagcttccgcgtcgagagcccccacgtgcggtacggcccgatggagatcgagtcggagtaccggtacgacacgacggagctggtacacgagggcaaggacggcgcctcacgctgggtcgtccgccccaagtccgtcaagtacaacttccggaccagaaccgccgtccccaagctcggggtgatgcttgtagggtgggga

SEQ ID NO: 40717 - DNA, 299 bp, Zea mays
ccttttgctcggaacgcacacacagcccggtccccgatctccgatcccctcgtcgatccaagatgcagatcttcgtcaagaccctcactggaaagactatcaccctcgaggtggagtcttctgacaccattgacaacgtcaaggccaagatccaggacaaggagggcattcccccggaccagcagcggctcatcttcgctggcaagcagctcgaggacgggcgcacacttgccgactacaacatccagaaggagagcaccctccaccttgttctccgcctcaggggaggcatgcagatc

SEQ ID NO: 40718 - DNA, 279 bp, Zea mays
gtcccggtgcttctcctcctggtctccctgtgcttctcgctcgcgctcgcgtggcaaacggacacggaatcgggctcaggcaggccgtaccactacggcgaggagagtttccggcactggacgcgctcccggctaggccggttcagggtgctggaacggttcacccacgagctgctggaggacgccgtcggcaactaccgcgtcgccgagctggaagccgcgccgggcacgttcctgcagcccagccactacgacgccgacgaggtgatgttcgtgaag

SEQ ID NO: 40719 - DNA, 289 bp, Zea mays
gccccagacaacactcaccgatagcaagtagcgccgccgacgtttcgagagcagagtatccaagctagccaagcgcgcacctcggtgacctagctagctacctagctagttcaggcgacgatatggcgtctggtcaggagagcaggaaggagctggaccgcaaggctcgcgagggcgagaccgtcgtccccggcgggaccggcggcaagagcgtcgaggcccaggagcacctcgccgaaggcgcagcgcggaggccagactcgcagggagcagctggggcagcaggggt

SEQ ID NO: 40720 - DNA, 303 bp, Zea mays
aatgatggaaatgagaaggcacaagaagttggtgcaatggctcttttcaatcttgcagtcaacaacaacagaaacaaggggctcctgttatctgctggagtcaccgatctacttgagcagatgatatcgaatccacggctatctggtcctgccacagcactctacctgaacatttcctgccttcctgatgcgaaggctgtcatcggttcgagccaggccgtgccgttcctagttgaccgtctgtacagccaagacggcaacgacacgaaagcaagctcctgcaagcacgacgccctgtacacg

SEQ ID NO: 40721 - DNA, 302 bp, Zea mays
acggcgccgcctttcgtcccagcccctaaaccattctccattcctctcctcagtttagcacaatggcactggctaataagcttggtggtctgctcaagaaagccacaagttcaaatccgtctgtctaccaagcaatcagatgcatgtcatccaagctctttgttggagggatttcttatcaaactgatgatcacagtctcagggacgagtttgccaaatatgggcaagtcattgaagctaggattatcattgaccgtgagtctgggaggtctagaggttttggctttgtaacttacacgtct

SEQ ID NO: 40722 - DNA, 299 bp, Zea mays
cgcgcgaccggccgctggcgtcgcgccctcccttataaaccaccacacttcagcacccacagctccctcttgcatcccctcgcccgtcgtctcgccagtcgctacaccccaaaaacctcacgcgcgcgctcgcgacccctcgcgctcgcctcgtcggcacgccggcgagaggggcgcccatccccgtgcctatataaggacgccggattggaggtgcccgtcccttatccgcgcggccagatctacctctgttccacgcctccgtcaccgccgcgtcggggcgatcccaccgaggccac

SEQ ID NO: 40723 - DNA, 302 bp, Zea mays
aagctacgtcggccatgaagagggtgggcagctgactgaacaagtgaggaggaggccgtacagcgtgatcctgttcgacgaggtcgagaaggcccatgtcgccgtgttcaacaccctgctccaggtcctcgacgacggcaggctgacggatgggcaaggcaggacggtggacttcaggaacaccgtgatcatcatgacatcgaacctcggcgccgagcacctcctcgctgggatggtgggcaagaactccatgaaggtcgctcgcgatctggtcatgcaggaggtatgcattgcgataacgt

SEQ ID NO: 40724 - DNA, 304 bp, Zea mays
agcggcggcggcggacaaacgcaggcgaaggcgagggtgtgagggaaggagcaccagccatggtgcacgtcaacttctaccgcaactatggtaagacgttcaagaaaccaaggcgtccttatgagaaggagcgtcttgatgctgaactgaagctggtcggtgagtatgggctgaggtgcaagcgtgagctattggagggtccagtatgcactgagcaggatccgtaatgctgcaaggcacttgctcacccttgacgagaagaacccccgtcgtatctttgagggtgaggcgcttcttcgccgca

SEQ ID NO: 40725 - DNA, 305 bp, Zea mays
gcactctcatctcttacgaaggaagagttcagcttttggagattgcccaagtacccgatgagcatgtgaatgaatttaaatcaatcgagaagtttaagatattcaacactaacaacttgtgggtgaaccttaaagctatcaagagactcgtagaggctgaggcacttaagatggaaattattccaaaccccaaggaagttgatggtgtgaaagtccttcaactcgaaaccgcagctggtgcagctattcggttcttcgacaaagcgattggaattaatgttccccgctcaaggtttctcccagtg

SEQ ID NO: 40726 - DNA, 297 bp, Zea mays
cgcggcctcggcgtcgctgcgctgtccgtgttctcctggatgtacaagtacctgacgggcaagcacccgccgggcgccgaccagctggaccacgccaaggcgaggctggcgtccaaggcccgcgacatcaaggatgcagcacagcaccgcatcgaccaggcgcaggggtcttgagagaagaaccacactcgagcggaccgcgcgcgcgacctccttgaaccactgccggcgcggcggcatatggcccttaaaggcggtggctgctgctacgtacgctgccgtagagtctcggtcgcc

SEQ ID NO: 40727 - DNA, 296 bp, Zea mays
gtgcaaggcatcaccatcctggcgccgaccaactcgcccaacaccgacggcatcaacccagactcctgctctcacgtccgcatcgaggactgctacatcgtgtcgggcgacgactgcgtggccatcaagagcggctgggacgagtacggcatctcgtacgggatgcccagccagcacatcgtcatccgccgcctcacgtgcgtgtccccgaccagcgccgtcatcgcgctgggcagcgagatgtcgggcggcatccaggacgtgcgcgccgaggacatcacggcgatcaacaccga

SEQ ID NO: 40728 - DNA, 275 bp, Zea mays
cttaatgttcttattatgcctgcgacgaatcttccacgactgacgtcctgaatgctatctgattcctttcttccaacagcgtatgccgagaggcggttggttgcagaaaacacaagcctgccaaacatgcataaggaagaacttgagactataataaggaatcagctccggaagccccagttgccaccttcttcatacgacacagcgtgggtttctatggtgccagtgcggggctctcatcagactccccgcttcccacagtgtgttgagtggat

SEQ ID NO: 40729 - DNA, 294 bp, Zea mays
ggatcaacaccgaccgcggtgtgatgattgccgatggcaagtcgcggttttcaatcaatgggaagcctatctaccactttgttgggacttccaccttcagcgagtacaccgtcatgcatgtgggttgtgttgcaaagatcaaccctcaggctccccttgataaagtttgcgtccttagctgtggtatttctaccggtcttggtgcatcaattaatgttgcaaaacctccgaacggttcgacagtggctgttttcggtttaggagccgttggtcttgccgctgcagaaggtgcaa

SEQ ID NO: 40730 - DNA, 295 bp, Zea mays
agcgaattctaagtggctctacatcgccccgacggggatgtacgggtgcgtgaactacctcaaggagaagtatgggaatccaacgatctacataacggagaacggaatggaccagcctggaaacttgacccgagaccagtacctgcgcgacgccacgagggtgcggttctacaggagctacatcggccagctgaagaaggccatagaccagggagcgaacgtggctggctacttcgcctggtctctcctcgacaacttcgagtggctggcagggtactcgtccaagttcggcatc

SEQ ID NO: 40731 - DNA, 295 bp, Zea mays
cgactcgtcagacgtcagccagcagttcgaaaccaaggatcgatccaggagcttccggaaggctaggcgcgcgcgcacgtcgaggtgctggtgccggtgccgcccatggatcgggctcgcggatccgcgttcctgctcggcgtcctgctcgcaggatccttgttcgcgttttcagttgctaaagaggagaccaagaagctcgggaccgtgatcggtatcgatctcggtaccacctactcctgtgtcggtgtgtacaagaacggtcatgtcgagatcatcgccaatgaccagggta

SEQ ID NO: 40732 - DNA, 300 bp, Zea mays
accggataggtagcaccggagcaggtagaacgctgcacaatccccttcgccgccgccaagatggtgaacgttcctaagaccaagaagacgtactgcaagaacaaagagtgcaagaagcacacactccacaaggtgactcagtataagaagggcaaggatagcctgtctgcccagggaaagcgccgttatgaccgcaagcagtcaggatatggtggtcagaccaagcctgtcttccacaagaaggccaagaccaccaagaagattgttctgaagctgcagtgccagagctgcaagcactac

SEQ ID NO: 40733 - DNA, 285 bp, Zea mays
atcaggatcggtggggagatccttggacatcacccggttctctaattatgctgaacttcgagaggaactgggtcagatgttcggcattaagggtcagttggatgaccctgatagatcaggctggcagcttgtatttgtcgacagggagaacgatgtgcttctccttggagacgacccatgggagtcatttgtgaatagagtatggtacatcaaaatactttcacctgaggatgtgcataagatgggaaagccaggaaacgatccacgctacctatcttaaattga

SEQ ID NO: 40734 - DNA, 287 bp, Zea mays
attgttgagaagtattccaactccaacatcgaaattcatactttcaatcagagccagtatcctcgcattgttaccgaggacttcttgccacttcccagcaaagggaaatctgggaaggatggctggtatcctcctggtcatggtgatgtgtttccttctttgaataacagcggaaaacttgacatcttattggctcagggcaaggagtatgtctttgttgcaaactcagacaacttgggtgctatagtcgacatcaagatcctaaaccatctgatcaataaccagaa

SEQ ID NO: 40735 - DNA, 286 bp, Zea mays
caagggcaccatcttcttttcacacgagggggatggtccgaccaccgtgactggaagtatctctggcctcaagccagggctccatgggttccatgtgcacgcgcttggcgacaccaccaacggctgcatgtcgactgggccacacttcaatcctgttggcaaggagcatggcgcaccggaagatgaggaccgccatgccggtgatcttgggaatgtgacagcgggagaagatggtgttgttaatgtcaatattactgacagccagatacctcttgctggaccccac

SEQ ID NO: 40736 - DNA, 290 bp, Zea mays
agcacacttagtaccgtgaaggtgagcaatgtatcactgaaagcagcacagcgtgagataaaggaattcttttccttttctggtgacattgtgcatgttgaaatgcagagtggcgatgaactttctcaagttgcctacattacttttaaagacaaccaaggagctgagacggcaatgcttctcacgggagccacaatagttgatatggctgtaatcgtcacgccagccaatgattatgagctaccagcttctgttttagctgctcttgagcctaaagacacaaaaccttc

SEQ ID NO: 40737 - DNA, 280 bp, Zea mays
ggcgtcccgggacagcaacctccagatcgtgtgcttcgaggtccacgccgacaggaacgagaaggtgttcctggccggcgccgacaacgtgctgcagaagctcgaccgggtcgccaaggcgctgtcattcgcctccaaggcggaggaggtggacgaggtgctcggctcgcggcgcgaaaggggttccttcctggccccaaggagagcggcggccacgaggagcgggagcaagaggaggaggaggaacgcgaagaacgccacggcggccgtggggagaggg

SEQ ID NO: 40738 - DNA, 284 bp, Zea mays
cgaaaacagattaaaacagtaaaaccaccaccaccacctcgacctcgactcctccgccccatcgccgtcgtcccggcccgtctcctccgccttgctgtctgtccgctgctcgcctcccctaaaaggaggcacccccggccattgccgcaccaagctccccttcctcgaatgccccaggcccggacaccacgacgccctgccccgtgctcacatggctagcggcgtcctccaccgttccgcctcccgatgtctccgccctgccgccgcgccaaaccccgactccg

SEQ ID NO: 40739 - DNA, 275 bp, Zea mays
cctgcttctcgccgccggccgggccgcggaccatccgtctgtccagcgatgtcggaggcgttgatgcagaccttgtcacggcgatggcgagggcgagggcaagggcaaagcatcagcttcgcgacgaggagaggccgtggggggaatgctgcgacttggccgtatgcgtcaagacgtacccgctaacttgctcgtgcttcgatcgggttgagcgctgctccgacgcctgtacagagtgcgtggaaacggaggactcgcgccacgtctgcgtcgac

SEQ ID NO: 40740 - DNA, 299 bp, Zea mays
ttcgtaactggtgagggactgagggtctcggagtggattgatttgggattctgttcgaagatttgcggacgggggcaatggcgaccgcggggaaggtgatcaagtgcaaagctgcggtggcatgggaggccggcaagccactgtcgatcgaggaggtggaggtagcgcctccgcaggccatggaggtgcgcgtcaagatcctcttcacctcgctctgccacaccgacgtctacttctgggaggccaaggggcagactcccgtgttccctcggatctttggccacgaggctggaggtatc

SEQ ID NO: 40741 - DNA, 289 bp, Zea mays
agtccctcacacactcactatacactgctctgctgcagcaagaaggaagaagctagcgcctccctagctctcgttgtcagcaatggccaccaccgccgcgtccagcctcctcaagtcctccttcgcgggctcccggctcccttcggccacgcgcaccacctccccgtcgtccgtggccgtggcaccccgcgcgccggcgctgccccatccgcgcgtccatctcctcctctcccaccccgccctacgacctgacgtccttccggttcagccccatcaaggagtccatcgt

SEQ ID NO: 40742 - DNA, 287 bp, Zea mays
cccggataggtagcaccggagcaggtagaacgctgcacaatccccttcgccgccgccaagatggtgaacgttcctaagaccaagaagacgtactgcaagaacaaagagtgcaagaagcacacactccacaaggtgactcagtataagaagggcaaggatagcctgtctgcccagggaaagcgccgttatgaccgcaagcagtcaggatatggtggtcagaccaagcctgtcttccacaagaaggccaagaccaccaagaagattgttctgaagctgcagtgccagag

SEQ ID NO: 40743 - DNA, 281 bp, Zea mays
cttcccaggcaggcaggtcggcgaggagggcaggaagaccgaagaccgagccgtgcgggggctcgggacgggaacgggacaggaccccaaaatctcagatccttcctgcccgcccgcccgtgcccgtcgacgcgtcgttcttgccggccgcgcctcacctccgccctctcctcctccagggggatcggatacgccacaggctgcgcgatggtgctgtgggtcttcggctacggctccctcatctggaaccccggcttcgacttcgacgacaaaatcctcgg

SEQ ID NO: 40744 - DNA, 163 bp, Zea mays
acgcctttcctctgtgtctctgcttgtagaatccttgcttctgttcggttccttctgtacgcatgatggtgttcgtagtgttaggagttgcattttctaatctgcatgttcttgcaccggtgcctctgaagtggcgtttccctctatcgtaatggaaatggaa

SEQ ID NO: 40745 - DNA, 281 bp, Zea mays
gcggctgtcaccgggcacggcgttcgtggtgcccgcgggccacccgttcgtcgcggtggcgtcccgggacagcaacctccagatcgtgtgcttcgaggtccacgccgacaggaacgagaaggtgttcctggccggcgccgacaacgtgctgcagaagctcgaccgggtcgccaaggcgctgtcattcgcctccaaggcggaggaggtggacgaggtgctcggctcgcggcgcgaaaggggttccttcctggccccaaggagagcggcggccacgaggagcg

SEQ ID NO: 40746 - DNA, 285 bp, Zea mays
agcgagactgatgggacggcgtcacagcggcggcggcggcggcggaagaggaagagggcgagggcgtgggcgagatgaggaagaagatcttcctctgcacaaggccgcaaggtctggtgatgcggcagcagtggagtcggtgtgcgagtccaaccctctcgccgtcaattcaagggatcgcctctcacgcacaccactccacctggctgcatgggctgggcatgttgatgttgtgagatgcctttgcaagcacaaagctgatgtgggagctgcagcaatggacga

SEQ ID NO: 40747 - DNA, 285 bp, Zea mays
cgatggagcttcgggagctcctcagtttctacaagttccccggtgatgagattccgatcatccgtgggtctgcgttgtctgctctgcaagggaacaatgatgagataggaaagaatgcaattttgaaattaatggacgcattgatgagtacatccctgatcctgtgaggcagcttgataagcctttcttgatgccgatagaagacgtgttttctattcagggtcgtggaactgttgttactgggcgtgttgaacagggaacaatcaaaactggtgaagatgttga

SEQ ID NO: 40748 - DNA, 292 bp, Zea mays
cgtgaagaacaccgtgacccaggtggccaagaaggtgctgaccatgaacccctcgggcgagctctccagcgcccgcttcagcgagaaggagctgatcagcgccatcgaccgcgaggccgtgttcacgtacgcggaggacgcggccagcgccagcctgccgctgatgcagaagctgcgcgccgtgctggtggaccacgccctcagcagcggcgacgcggagcggagccctccgtgttctccaagatcaccaggttcgaggaggagctccgcgcggtgctgccccaggaggtgg

SEQ ID NO: 40749 - DNA, 276 bp, Zea mays
cttggtgaagaatggcatccgcacctttgcttgcagtgagacagtgaaatttggccatgtcacatttttctggaacggcaaccgctcgggatactttgatgaaactaaggaagagtatgtagaagttcctagtgacagtggtattacattcaatgttgcacccaagatgaaggcgcttcaaattgctgagaaagctagggacgctctcctaagtggaaagttttaccaggtacgtgtcaacctgccaaatggtgacattgttggtcacactgggga

SEQ ID NO: 40750 - DNA, 276 bp, Zea mays
gcagtggacacctgctgactgttggatgcaactttatgatcgctggtcgtctgtggatgatatagggtccctctctgttatatatcaaatgctggagtcagagactgccaaaggagttttgtactttagacaatctttgcttcttctcagattaaactgtcctgaggcggcaatgaggagtttgcagcttgctcgtgagcatgctgcaagtgatcatgaaaggcttgtctatgaaggatggatattgtatgatactggccactgcgaggaaggact

SEQ ID NO: 40751 - DNA, 278 bp, Zea mays
atctcgtcgtccgccgattcgatccggttcttccaacccaggggctgtgatggcgacgaagaggagcgtgggcaccctcggcgaggcggatctgaaggggaagaaggtgttcgtgcgcgccgacctcaacgtccctctcgacgacgcccagaagatcaccgacgacacccgcatccgcgcctccgtccccaccatcaagttcctcctcgagaagggcgccaaggtcatcctcgccagccacctgggtcgtccaaaaggtgtcaccccaaagtacagct

SEQ ID NO: 40752 - DNA, 271 bp, Zea mays
cgcgtgctaataagaggtcgtggcagcatcaaagatccagcacgggaggaaatgatgcgagggaagccaggatatgagcatctgaatgaacctctccatatattggttgaggcagagctacctgttgacatcattgatgctcggctgatgcaagcccgcgagatccttcaagatctgctaaagcctgtggatgaatcccaggacttcttcaagaagcagcagctccgggagctcgcgatgcttaatggcaccctgcgtgaggacaggatgc

SEQ ID NO: 40753 - DNA, 308 bp, Zea mays
cagagagagagagagagagagagagagagagagagagcatggctggcaggagtttcctgattcggtcccccaaggaggacgagtccgacgccgccgtcagagaagctgtactgctgggagcaaagaacgccgcaatagctggtactgtggttgcagttcccacgttggttggctgccgtgtccttccttgggctaaggcgaatctcaactacactgcacaagcactcattatatctgcagcctgtattgctggcttcttcatcactgctgacaaaaccattctacggaacgcacgacaaaacaccatc

SEQ ID NO: 40754 - DNA, 311 bp, Zea mays
ctgcgctcatttctgcatccccctcccgccgcgccgcctcaccgccgccggagaagatgggtcgcgtgatccgcgcgcacgtaagggtgcggggtccgtgttcaagtcccacacccaccaccgcaagggccccgcccgcttccgctccctcgacttcggcgagcgcaacgggtacctcaagggcgtcgtcaccgacgtcatccacgaccccggccgtggcgcgccgctcgccaaggtcactttccgccacccattcaggtacaagcaccagaaggagctctttgtcgcagccgtaggcatgtacacgggcc

SEQ ID NO: 40755 - DNA, 318 bp, Zea mays
agtgaaccggacagaggaagagagagagagaagtagagaacgcccgccacggcgccgccgacgccccacccggccgagccgaaaccgagactgcatcctccttcgcggcgcgccgagatgagcggcatgagcctctcccatcgtctccctcccgccgcggcggcggtgagacccctactacgtgtatgcggcgcacccggacccacagcggcagggcgtgctcacgctcttcgtcgcggggctccccgacgacgtgaagccccgcgagatccacaacctcttctcccaccgccccgccttcgatcactgcctcctcga

SEQ ID NO: 40756 - DNA, 309 bp, Zea mays
gaaacctcagacactctacatatatcctctgcgcgtgtatctcgtcgtacagagccgaaagctggagcttccaatggctggagacaacgacctgaaggtgctcggcgtgtggacgagcccgttcgtgatccgggtccgcatcgtgctcaacctgaagggcctggcgtacgagtacgtggaggatgacctcagcaacaagagcgcgctcctcctggggtccaacccggtgcacaagatcgtgcctgtgcttctccacgccgggcgcgccataaacgagtcccaggtcatcctgcagtacatcgacgaggt

SEQ ID NO: 40757 - DNA, 304 bp, Zea mays
gcttccttctctacccttccctcgcgccgccgccaccgcaagagtatctcaactccgcctcgagacctccccccctcgctggtctcagccatggtgaaatattcgacggagccgtccaaccccaccaagtccgctaaggccatgggccgtgacctacgtgttcacttcaagaacacacgtgagacagcttttgcccttaggaagttgtcactcaccaaggccaaaagttaccttgaggatgtgatcgcccacaagcaggccatcccgttccgcaggtattgtggtggtgttgggcgcactgctc

SEQ ID NO: 40758 - DNA, 310 bp, Zea mays
atcgccgcgaaaaccctagaaactacccaccccgaccacccgccgccatgtcatccacaacgccggccatcgcgtcccccgcctctgagcaagccaaatcgaagaaaaagaagcacagatcgaaggacgacccctccgctgctgccgccgacccaccgtcgctcgctgaggccgaggagaagactgatggctacctcatcaagccgcagtcccttgttccgtccctcgacacctccacctggccgctcctcctcaaaaactacgaccgccttaacgtccgcaccggccactacaccccgctaccctccgg

SEQ ID NO: 40759 - DNA, 286 bp, Zea mays
cgcaccgacgcgccgtcactgactcctcagaccacggctagccgtaatcacgacactctgctgactcccggcgagcagtgtaacattctccttcagccatgggcaaggcgaagactcacatccacattgtggccattggacatgtcgactctggcaagtcgaccatcactggccacctgatctacaagctcggcggtattgacaagcgtgtgattgacaggttcgagaacagaggcgcggacatgaacaagccgtcattcaagtatgcatgggtgcttgacaagct

SEQ ID NO: 40760 - DNA, 295 bp, Zea mays
ctgacgcagatgacctttgggtacagcagggatgatgtggggaagctcattcccgtctatcttgctcagggcatcctccaacatgaccccttcgaggtcctggaccagaggggagtgggcgagctggtgaagtttgctacagagaggggccgcaaagctaggcctaacttgaaggtgggcatttgtggagaacacggtggagagccttcctctgtgcccttcttcgcgaaggctgggctggattacgtttcttgctcccctttcagggttccgattgctaggctagctgcagctc

SEQ ID NO: 40761 - DNA, 301 bp, Zea mays
cgggggcgcggcgagatcgggcggaggagccctaccgcccccctcgccgcaggcgcagcccgcagcggaggcgggtgctcagctccgcggaaggttaaaggtgcagggctgcgtttggaaccggcggtgggcgcgggagatccggccagcggggatgcagcaggaccagcggaacaagacttctgcagaggccgacttcttcacagagtacggggatgcgaaccggtacaagatccaagaggtcatcggcaagggaagctacggggtcgtctgctctgccatcgatctccacactcggcag

SEQ ID NO: 40762 - DNA, 278 bp, Zea mays
ctctgccccgctccactagggttttgccgcagacctctcgctcgcatccggttccgcgaggcaaccgtccgaccggtcggaatggtggatgtggaggagaccgggaacaagttgcaatcgcagatgcgcctccacgcggagccggaggacgacgccgccgacctccccctcacggccctcttcgatagggcgtcgcggctccacgccctggcctccagctccggtctcgaccaggatgggatccgcacggggttgacctgctgcggcgctgcgacgac

SEQ ID NO: 40763 - DNA, 305 bp, Zea mays
  unsure (1)..(305): unsure at all n locations
gtcncctccgccgcctgccgcactctcccgcgacgccaccaccacacgttcacggtagcgagagcttatcgtcgtcggcggcgaagatggtgtcgctgaagctgcagaagcggctcgccgcgagcgtcctcaagtgtgggaaaggcaaagtctggcttgaccccaatgaagtcagcgagatctccatggctaactcccgccagaacatccggaagttggttaaggatgggtttatcatcaggaagcctcagaaggttcactctaggtcccgtgcaagaagggcacatgaggccaagcagaaggga

SEQ ID NO: 40764 - DNA, 301 bp, Zea mays
acctgttcttccctcttcacctattgcaccaggcagtccacttaggcatggtgaccgcaacatgcgctttccaccaggcatgagaaacttcggtaattcctttggttcatggaattcaggcatgagtggaaagatggatgctaatttgatgccctctctcctggaggaattcaagagcaacaaaagtaaatcatatgagctctccgaaatagctggccatgttgttgagtttagtgctgatcaatatggaagccggttcatacaacagaagctagaaacagccagtactgaagaaaaggac

SEQ ID NO: 40765 - DNA, 305 bp, Zea mays
acttggtcagaaaattgaatatgatcttataccagacgtggatatatacaagcatgaaccatgggatttacctgcaaagtgcaatcttccaatcaaggacaacaagtggcatttctttgcctctcgtgacaggaagtaccctactggctctaggtcaaacagggcaacactagctggttactggaaatcaactgggaaggaccgagccataaagctgaacaagctaactctaggaacaaaaaagacgttagtttttcatgaaggccgacctccctctggcagacgcactgagtggattatgcatg

SEQ ID NO: 40766 - DNA, 302 bp, Zea mays
agcgccacagccattgaggaagcaggtggccccaaaattcctatgatctatggaagggttgatgttattgcccccgaacaatgcccaccagaggggaggcttcctgctgctggcccaccttcacctgcggaacatttgcgtgaagtattctacagaatgggcctgaacgacaaggaaatcgttgcactgtcaggagctcatacacttggacgtgcaagaccagagcgtagtggctggggtaaatcagaaacaaagtacactaaagatgggcctggtgcacctgggggacaatcttggacatc

SEQ ID NO: 40767 - DNA, 300 bp, Zea mays
acaacagaggaccgagtaattggcgttattgattgggaactatctactttggggaatcagatgtgtgatgttgcttatagctgcttgccatatattattgatgcagcacccagtgcaaggacttcttatggagggtttcaagatactggcattccagatgggattcctcaactggaagagtacctttctgtatactgctcttttgctgcaagaccctggcctgctgcaaattggaagttctacattgctttttctttgtttcgtggggcatctatctatgcaggagtatatcacagatgg

SEQ ID NO: 40768 - DNA, 298 bp, Zea mays
agtcagtgccagtgccatatgtttcaccagatgagcgataccttgtgggtaggattggacctaaagaatatcggatgtaccgttgcattgttagatatggttacaaagatgtgcagagagatgatgacaattttgagaacatgttagttatgagcatcgcaaagtttattatgatggaagcagaagatgcttcttcagcaagttatgatatcgctaacgaaggaaggatggcggtcataacaaccactgatgcctctggcagcccattggccatgagggatttcgacgggcctagctg

SEQ ID NO: 40769 - DNA, 279 bp, Zea mays
aggacgttcgacctgccggaggcgaagaagttccagtctgctgcttactccaactgcgcaaagaagccatcctgatatcccttttggcttcctcgttctagtagtttaggatttcttttctgacacttcgattcttaccaatccccctggcctgctgctttcctgataatcgaccagttccccagtcttgctccctgcagtcctccctcctccatctccagcgttgtgttctgactcacctgcaccaatggctgttctttctgctgctggtgctccccg

SEQ ID NO: 40770 - DNA, 282 bp, Zea mays
aggcgctcaaggagcccgagagggaccgcaagaaggtcaagaacatcaagcacagcggcaacatcagtctcgacgacgtcatcgagattgccaggaccatgaggcccaggtccatggccaaggaaatgtccggctgcgtcaaggagattctcggcacctgcgtcacgtcggctgcaccgtcgacggcaaggaccccaaggacctccagcaggagattgacgacggcgaggtggatatcccgtccgcttaagaagagggtatcatgagcaaatttctgttgtt

SEQ ID NO: 40771 - DNA, 183 bp, Zea mays
cacctgagtacgtatattgctccagtctccgaaatttgatcgatattttgtctgcttttcaggtgcaccgagctggctcctgatagggttcggccagcactcgagaaaacactcaaggacttgcagctggattacctggatctctaccttatccactggcccttcaggctgaaagacggggcg

SEQ ID NO: 40772 - DNA, 186 bp, Zea mays
cacaccccccgagctcagcttagctccactccagctccaatcacagtcgtgaccagagcgcgagagctagctagagggccgtgaaaatgccgatcaataggatcgccctggggagccaccaggaggtgtaccacccgggcgccctcaaggcggcgttcgctgagttcatctccaccctcatcttcg

SEQ ID NO: 40773 - DNA, 305 bp, Zea mays
tgcagacaccaccgctcgtttttctctccgggacaggagaaaaggggagagagaggtgaggcgcggtgtccgcccgatctgctctgccccgacgcagctgttacgacctcctcagtctcagtcaggagcaagatgggtgccggcggcaggatgaccgagaaggagcgggagaagcaggagcagctcgcccgagctaccggtggcgccgcgatgcagcggtcgccggtggagaagcctccgttcactctgggtcagatcaagaaggccatcccgccacactgcttcgagcgctcggtgctcaagtc

SEQ ID NO: 40774 - DNA, 181 bp, Zea mays
atgagcagttctatatttacaaagaggccagatattatttttaagtggctcgggccccatggtagtgattgtggcatagtgaatgtgaacatacctactaatggtgctgaaattggtggagcatttggtggagaaaaagcaactggtggtggacgagaagcagggagtgattcctggaagc

SEQ ID NO: 40775 - DNA, 176 bp, Zea mays
taggtgacagacacgatggtgagcgccataattgttgtcctcctcgccatcctcctatgcgctgccgccgcagtcgcgatcgtcctgttgatgacgataaccatcatcatcacgggggccacaagtccgggcaatgcgtgcggcggtgctatgaccggccctggcactatcgcccc

SEQ ID NO: 40776 - DNA, 297 bp, Zea mays
agaaagcaaagaaaggcgtgcattctcagaaagaatctcctgtgatgcatataacagatttaacaactgtatctgcaaagaaggccaaagattttcttcccttcttgcagcggaacagaaggcattcggccatcgttgaatatgtttttagtggccatcggttcaaactaacaattcccaaggagacttgtagtatcgccttctcattatctggagtccgtagtcctggtaaaggcgagccatactcagacgaagctattgctttgatgaggagaaggatacttcaacgagatgtgg

SEQ ID NO: 40777 - DNA, 248 bp, Zea mays
ctcctcgcatttcttcccatccgatccccccttcgcaaccaaaaccccaactcgccccgcatcgatggcgcccaaggccgagaagaaacccgcggcgaagaagccggcggaggaggagcccgcggccgagaaggcgcccgccgggaagaagccgaagcgcatgaagcgggtccccgctggcaagtccgctgccaaggaaggcggcgagggcaagaggggcaagaagaagggcaagaagagcgtggaga

SEQ ID NO: 40778 - DNA, 257 bp, Zea mays
cttgctgtgctttcctgtttccctttcttctacgcagatcccggccggagtccagcgcgccacccggcaccaaggcttgccgtgagaagctccggcgagacaggctcaacgaaaggttcaacgagctctgtgccatcttggaacccggcaagccacccaaggccgacaaagtcgctatcctaagcgacgctgcccgtctcctgaaccagctgcagggcgaggcccagaagcttaagcaatcgaacgaatcgctccag

SEQ ID NO: 40779 - DNA, 296 bp, Zea mays
gtttgatggtttctgcaacagggaactaactgtggccgaaatcaaacagatcgctggtagggctgggagatatggatctaagttccctgttggagaagtgacctgtctaaatcctcaagatctcccattgctgcactcgtctctgaaatcagcttcctccattatagagcgtgctggactttttcccacatttgatttattatctttgtattcacgattacatggaactgacttttttcaccctatactggaacgtttcttggagaaggctaaactatcaccagactatttcatta

SEQ ID NO: 40780 - DNA, 212 bp, Zea mays
tgtcatcggcgacggcgtcctcacgcccgccatctccgtcttctccgccgtctcagggctcgagctctccctgtccaaggatcagcatgaatatgccgtcatcccgataacctgcgccatcctggtgttcctgttcgcgctgtagtactacggcacccaccgcgtggggttcctcttcgcgcccatcatcctcgcctggctgctctgcatga

SEQ ID NO: 40781 - DNA, 290 bp, Zea mays
atcctctcgctcgccaggagaagcagccgccgttgctgctgccgcgtccacagaatggggggtttcgtgaagactcataagaccaatgcgtatttcaaacgtttccaagtgaaattcaagagaaggcgggctggcaagacagactacagggccaggataaggctgattaaccaagacaaaaacaagtacaacacacccaaatacagatttgttgtgcgatttaccaacaaggacatcactgcccaaatcatatctgctagtatagcgggtgatatggttcttgcttctgc

SEQ ID NO: 40782 - DNA, 291 bp, Zea mays
accgtcactcaacacagcacaggcagctcgagagagagagagagagaaagatgtcgtggttcgggcaccaccaccacaaccagccggctcccccggcgtcgggccccaaccaggtgttcaagatcttctgccgcgccaacgagaactactgcctggccgtccgcgacggcgccgtcgtgctggccccggtcaaccccaaggacgaccaccagcactggtacaaggacatgcgcttcagcacccgggtcaaggacgaggaaggcatgccggcgttcgcgctcgtcaacaagg

SEQ ID NO: 40783 - DNA, 280 bp, Zea mays
gtttgagcacgtccttctgtacaacctgaaggagaaaatcccggacgaggagtacgtgctctgcttggaggaggccgagatggtgcggcctggggagcacgtgactatactcacatactcgcgcatgaggtaccacgtgatgcaggcagcgaagacgctggtgaacaaagggtacgatcccgaggtcatcgacatcaggtcgttgaagccgtttgatctgcacactattggcaactccatcaagaagacccaccgcgtgctgatcgtggaggagtgcatg

SEQ ID NO: 40784 - DNA, 311 bp, Zea mays
gaatctacttacagccatcccaggtagcattggagcacttccaaaactaatccgcttggacatgcatcagaatagtgagcttgtctatccatgttgtcacatctaaaggagtatccagttggagcctgcaacctcaaattatctttccttgatctatcaaataactcattatctggtctaccagctgaactaggtaaaatgactaccctaagaaagcttctgcttactggaaatcctatgaggacacttaggagttcattggtttctggaccaacaacaacattgctgaagtatctgcgcagcggctttca

SEQ ID NO: 40785 - DNA, 307 bp, Zea mays
cgcccacacgctccagccgcttcaccgcgccgccaccgccaccgcgaggatgccgttcaagaggttcgtagagatcgggcgcgtggccctggtgaactacgggaaggactatggccgtctcgtcgtcatcgtagatgtggtcgaccagaacagggcacttgtggatgcccctgatatggtcaggtgccaggtgaacttcaagcggctctcacttactgacatcaagattgacatcaaacgtgtctccaagaagacaaccctgatcaaggcgatggaggaagctgatgtgaagaccaagtggtgagac

SEQ ID NO: 40786 - DNA, 193 bp, Zea mays
aggtggactaaagttcctggaaaggttttcgtacattaactccatcgtatacccttggacatctatcccgctcttggcctattgcacattgcctgccatctgcttgctgacagggaaatttatcacgccagagcttaacaatgttgccagcctgtggttcatgtcacttttcatctgcatttttgctacgagc

SEQ ID NO: 40787 - DNA, 311 bp, Zea mays
atggagtcgaagaaggagataccgtcagcatgcattatgatccaatgatagccaaacttgtagtatggggtgaaagtcgcacggctgcactagtcaagctaaagaagtgtttatcaacctttcagattgcaggtttgccaaccaatgttgatttcctccaagaactcgcaagccacagtgcctttgaaaaaggcctagttgacactcacttcattgaacgttataaagatgaccttttgagtatttctacaaagtcctcaaaagaatctcatggtgtagctgagcttggtgcaattttggctgctgcatgc

SEQ ID NO: 40788 - DNA, 299 bp, Zea mays
gcaagaacggctacggcgactacctcatcgaggaggaggaggggctcaacgaccacaacgtcgtcgtcaagtgcgccgagatccagaccgctatctccgaagagcaacatcgtttcttttcactgagtaccaatatgttggtatcttcatgtccatctttgctgttgtgatcttcctcttccttggttcggttgagggattcagcacgaagagccagccctgcacctatagcaaggacaagtactgcaagcctgcactgttcactgtactctttagcactgtggtcttcttgcttggag

SEQ ID NO: 40789 - DNA, 302 bp, Zea mays
cagcggaagaggagttgtgccaaggcacaatgggtatctcgcgtgactcgatgcacaagcgccgagccaccggtggaaagcagaaggcctggaggaagaagcgaaagtatgagcttggtcgccagccagccaacaccaagttgtcaagcaataagacagttaggagggtccgtgttcgtggaggtaatgtgaaatggagggctcttcgccttgatactggtaactactcatggggaagtgaagctgttacccgcaagacccgtatcctcgacgtggtctacaatgcgtcaaacaatgagctt

SEQ ID NO: 40790 - DNA, 300 bp, Zea mays
agcaaatgcatttctctaggatgtttgtggcaattagagcatgtgttgatggatttctaactgggtgcaggccttaccttggggttgattctactcacttaactgggaaatataaagggcagttagccacagcaactgcaattgatgggcacaattggatgtatccagttgcatatgggatatttggcaaggagacaaattccaattgggcatggtttatggcacaactaaaaagagcaattggggaatcccctggattaacaatccacactgatgcttgtaaaggactagcctatgctg

SEQ ID NO: 40791 - DNA, 273 bp, Zea mays
gaaatatgcacagagctgcatgtacactcctgtctaccgtaactaccgatagtgctgctgggatcaattctgcagtaataaaatatgtcgacgcagatgatcctgcaatgttgtagtttattgtttcatttgttggccctgctgctgaccacctttgtggctggtagacactgtacttgtctgcatatatgatactggaacatttggcgcgctgtgggcgtccctgtcatgagatcaattgcagaaataaaatgcaatttagatttgagcacc

SEQ ID NO: 40792 - DNA, 296 bp, Zea mays
ccgatccctgcaccactaccgcctcctccgcttcacccctctcgtcgcctcttgcggcgaccggcggcggatcgtccgcagcgcaacgcaaccatggggctcttcaccgtgacgaagaaggccaccacccccttcgaaggccagaagcccggtacctccggcctccgcaagaaggttactgtattccagcagcctcattatctgcagaactttgtccagtcaacattcaatgcccttcctgcagaccaagtaaaaggtgcaactattgttgtctctggtgatggccgctatttctc

SEQ ID NO: 40793 - DNA, 297 bp, Zea mays
gaaggaactggttgttggtggattggaccgtgtttatgaaattggaaagcaattcaggaatgaaggaattgatttaacacacaatcctgaattcacaacttgtgaattttatatggcgtatgcagattataatgatttgatggagcttactgaaaccatgttgtcaggcatggttaaggacctgacaggtggctataagataaaatatcatgcaaatggagttactaaccccccaatagaaattgatttcacgcctcccttcagaaggatagatatgattaaagatttggaggctat

SEQ ID NO: 40794 - DNA, 285 bp, Zea mays
cgcacaccagcacctgccctcctcgccgtcgccgcctccctccgcgcgaccgatctaccctccgccgccaccatgtcgctgatcgccggggaggacttccagcatatcctgcgtttgctgaacaccaacgtggatgggaagcagaagatcatgttcgccatgacctcaatcaagggtgtcgggcgccgcttctccaacatcgtctgcaagaaggccgacatcgacatgaacaagagggccggcgagctgacgcctgatgagctggagcgcctgatgacggtcgtg

SEQ ID NO: 40795 - DNA, 302 bp, Zea mays
cttgtccctaggttggtatatttgacgcaacaaacagcacaagaaagcgaagatatatgctaatgaaaatggctgaaggtaactgtaagattatatttttggagacaatatgtaatgatccaaacataattgaaagaaacatacggctgaagatccaacaaagtccagactatgctgaacagctagattatgaagctggactggaggacttcaaggaacgtttgattaattatgaaaaggtctacgagccagtaggggaaggttcttacatcaaaatgattgacatggtaaaggggcaagat

SEQ ID NO: 40796 - DNA, 301 bp, Zea mays
cttacactgaaagggaagaaccctgtaacacttgaccacctcagcgtgcgaggaaacaacatccgctactacatccttcccgacagcttaaacctggaaaccttgctggtagaggaaacccctagggtgaagcctaagaagccaactacaggaaagcctttggggcgtggtcgcggccgaggtcgtggacgtggtcggggccgggggccacgctgagctttatcgttcccctgctgtcggctcccttgcaagacaagtttcctctacaatgtaaaacatctttcctctgcacgctgtgtga

SEQ ID NO: 40797 - DNA, 300 bp, Zea mays
tgcaagtttgtccattcgcattggtctgaatactgtagctactatctcgatttccattgtgccgcagctgcctgctcgccattactgcaagctgtgttcaatcaaagcttaattaggctccctctacatctgatccagctaagtagctagccagcactacagaaggtcgttgcaagaatcaggagatatatagcagggtggctagctagctgagctcgtgcgacgaataatggccggaattggcaggaacatggtggcgccgctcctggtgctcaacctcatcatgtacatcatcgtcat

SEQ ID NO: 40798 - DNA, 313 bp, Zea mays
cgtaggcgaattcaaagtggctctacatcgccccgacggggatgtacgggtgcgtgaactacctcaaggagaagtatgggaatccaacgatctacataacggagaacggtactcaacggaattccgtgtttcgcatgaacacgccacgccgcataccaagggaatcgtatttacatcgatcttttttttatttcttttctgtgttaccaggaatggaccagcctggaaacttgacccgagaccagtacctgcgcgacgccacgagggtgcggttctacaggagctacatcggccagctgaagaaggccataga

SEQ ID NO: 40799 - DNA, 300 bp, Zea mays
cgcggaagcagatcctctccgctcgccagcctccccctcctgctgctgcctcctcgcttcaagcaacacccgaagcggcaacaaccaccaccaccaccaccaccaccggacctgcctgagcgaccccttggcttcccactccactgaagcagggcgagagagagtaaggaggaggaggagaagccatggcgagcgacggcgacggtaagggccgcgtcgctacggcgccgggggcagggtacgggtacgcggcgtacggcggctaccagggggcggagtagcggaagtggtggccgtggc

SEQ ID NO: 40800 - DNA, 302 bp, Zea mays
actcgctcgcgctcgcgtggcaaacggacacggaatcgggctcaggcaggccgtaccactacggcgaggagagtttccggcactggacgcgctcccggcagggccggttcagggtgctggaacggttcacccacgagctgctggaggacgccgtcggcaactaccgcgtcgccgagctggaagccgcgccgcgcacgttcctgcagcccagccactacgacgccgacgaggtgatgttcgtgaaggaaggcgagggcgtcatcgtgctgctccgcggcgggaagagggagtcgttctgcgtc

SEQ ID NO: 40801 - DNA, 306 bp, Zea mays
cgaggccacttcgttctgaagagcggacacaccattccggccgttggtctaggcacttggagggccggctcagataccgctcactctgttcggaccgccatcgccgaggctggatataggcacgtggacacagctgcccaatacggagtagagaaagaggtcggtagaggacttaaagctgcgatggagggcgggatcaacaggaaagatttgtttgtgacgtcgaagctatggtgcaccgagctggctcctgatacggttcgggcagcactcgagaaaacactcaaggacttgcagctggattac

SEQ ID NO: 40802 - DNA, 298 bp, Zea mays
gctttacagtgaacgagtgagtatgtgcggcatacttgctgtgctcgggtgcgccgacgaggccaagggcagcagcaagaggtcccgggtgctggagctgtcgcggcggctgaagcaccggggccccgactggagcggcctccggcaggtgggcgactgctacctctctcaccagcgcctcgccatcatcgacccggcctctggcgaccagcccctctacaacgaggaccagtcggtggtcgtcgccgtcaacggcgagatctacaaccacctggacctcaggagccgcctcgccggc

SEQ ID NO: 40803 - DNA, 294 bp, Zea mays
cgcagatcgcggaagcccagcggctcagagtccagggggagggagctcgcggcggctgaggaaggcgttcaccaccgtcgcggtgagtgctcccagtcaagcgcctcttccttcgtagtgtcaacaattccgccccgcgcccgcgcggatctgattgtctcgatcgtccaatcgagcggatttcattgaggaagagatggggctctcctttgggaagctgttcagccgcctcttcgccaagaaggagatgaggattctcatggtcgggctcgatgccgcaggtaagaccaccat

SEQ ID NO: 40804 - DNA, 298 bp, Zea mays
cgcaaacgcgaccacagacagagcgcgcttcaaggcctttttttttttgagataacaaggaggagaggaggagatggcggtcacgatcacctgggtgaaggcgaggcagatcttcgacagccgcggcaaccccaccgtcgaggtggacgtgggcctcagcgacggcagctacgcgaggggggccgtacccagcggcgcatccactggaatatatgaggccttggagttgagggatggaggatctgattatcttggcaagggtgttcttaaggctgtcagcaacgtaaacaacattatt

SEQ ID NO: 40805 - DNA, 303 bp, Zea mays
ggttgattgtattgaaggtgtctgtgtgcaaactgaaactgtgcttcgccaagcccttggtgagaggattaggccagttcttaccgtgaacaagatggacaggtgcttccttgagcttcaggttgagggtgaggaagcttatcagactttctcccgtgttattgagaatgccaatgtcatcatggcaacatatgaagataagctccttggtgatgtccaagtatacccagagaaggggacagttgccttttctgctggtctgcatggatggggctttacactcactaactttgcgaagatgta

SEQ ID NO: 40806 - DNA, 299 bp, Zea mays
gtcaaggacgaggaagggtacccggccttcgcgctcgtcaacagggtcaccggcgaggccatcaagcactcccagggcgagggccacccggtcaagctggtgccctacaaccccggctaccaggacgagtcggtgctgtggacggagagccgcgacgtcggccacggcttccgctgcgtccgcatggtcaacaacatctacctcaacttcgacgccttccacggcgacaaggaccacggcggcgtgcgcgacggcaccaacatcgtgctctggaagtggtgcgacggcgacaaccagcg

SEQ ID NO: 40807 - DNA, 293 bp, Zea mays
caatgagctcccacctagccgctgctcttgtccagcgggagaagcagcagcagacaatgagaagtctcagctctcgtgaccttgggcctagtgcggcgcgagcatcggctcttggctcccctctaagctcatcatggtctaagtggggatctccttcggggacaccagattggggcataaatggtgaagaattgggtaagctccggcgctcatcgtccttcgagctgaggtctggtggtgacgaccctgatctctcttgggtgcatacactggtcaaggaatctccaccggag

SEQ ID NO: 40808 - DNA, 291 bp, Zea mays
ggggggacggtggagttgctcgcggtgaaaatggtgagggtaggcaggcagagaggggccgtgggccccgccagccttaccgtggaggtgggcgacgtggtgggtacagcgatgggcaggctgggaatgagttcggacgtcctcgccgggcatatgagcgccacagcggcacaggccgtggctacgggatgaagcgtgaaggggctgggcgtggaaattggggaactgcaactgatgaaggccttgaacaggacactgtggatgctgttaatcctgaggagactactgccg

SEQ ID NO: 40809 - DNA, 291 bp, Zea mays
gctttggaggctccaagagttctcaatttcaacaattctgaatatttctctggaccatatggggaagatgttgtcttcgtagccaatgattggcacactgctattttgccatgttatttgaagagcatgtataagccaaatggaatttataaaaatgctaaggttgctttctgcatacataatattgcctatcaaggtagatttgcccgagcagacttcgatcttcttaatctacctgacagtttcttgccatcatttgattttattgatggacatgttaagcctgttcta

SEQ ID NO: 40810 - DNA, 295 bp, Zea mays
ctcgagccgactagcatcgatccgccattgctcaccgcacaagtgcacgctcacctcacacacgcagctaagtagctaaagccgtaagtagaacaagaaaaggctcgacatggccgaagagaagaagcagggcctgcagctgctggacttctgggtgagcccattcgggcagcgctgccgcatcgcgctggacgagaagggcctggactacgagtacctggagcaggacctgaggaacaagagcgagctgctcctccgcgccaacacggtgcacaagaagatacccgtgctgctg

SEQ ID NO: 40811 - DNA, 269 bp, Zea mays
cagcgcgcgtacgtgagcgcgcggttgggctcgagcgaccttagagctatcaagagagtcgtagagggctgaggcacttgagcatggagattgttccagaccccaagggagttgatggtgtgagagtccttcaactcgaaaccgcagctggtgcagctattcggttcttcgacaaagcgattggaattaatgttccccgctcaaggtttctcccagtgaaggctacatctggtctgttgcttgtgcagtctggtctttacagcttggtt

SEQ ID NO: 40812 - DNA, 288 bp, Zea mays
gagaatcctaccaaacctagctaccaactcgatcgtcgtcatcacgctcgaccgcacaactgcaccaaggggggaggagacctaaaaactactacatcttttatagctacatctctagctaaagatcgagagggtaaataaggacgagcgggcgcgagctagaagagcagctgcaggtactaccatcatcgtcgtcgtcgtcgccaggatgaccgtcgtcgacgccgtcgtctcctccaccgatgccggcgcccctgctgccgccgccaccgcggtaccggcggggaa

SEQ ID NO: 40813 - DNA, 288 bp, Zea mays
agaggattttcccgtgccattctggcattccgttgaagtaaacctcctgatgatcagcgtttagaagtgttgttgatgatccaaataaagttggatcaagtgcaagttcaccaatgccgacagagtcttgtggcaaaggattcccactgctatcaagaatgaacaggttacaacccatggcaggtgtgctgaatgcagacaacgcttgaggttgtagcatcgatccagtaacaaatccaccaccaatctctgtgcctccacagtactcgattactggcttgtaaccag

SEQ ID NO: 40814 - DNA, 281 bp, Zea mays
actcgacattgatgtccaaggagctcgatccgtgagggcttcttctcttgaagcaatattcatctttgtatgccctccatcattcgaggaactagagaagcgccttcgggcacggggtactgaaacagaggagcaaatccagaaacgactcagaaatgctcaggctgaacttgatcagtccaatgaaccaggtctctttgatcatcttttggtcaacgatgaccttgagacatgctatgagaatttgaagaagttgctttctctggatgatgaccaagaag

SEQ ID NO: 40815 - DNA, 142 bp, Zea mays
tgtcgaccacgttccggctggccttgatcaccgtcctccacatgccgtctccgacgaacatcaggttcgtcttctcgctcccgacctccacgttctcgaagtagccgcccgccttgatgtagatcacgaaccgcgtctcgct

SEQ ID NO: 40816 - DNA, 293 bp, Zea mays
gatcggtacaaggatcaccgctgtgcctgcgcgtgctgcttcaccgaatcgagtcagatcctgtccgaatccgagctaagggatggcaaccggtagtgaagcctcgaaggcagctgaggctgtggttgactggcataaacacgacagcaagaggatgctccatgcggtttaccgtgttggggatctggaccgcacaatcaagtactacacggaatgctttgggatgaaactgctgaggaaaagggatgttcctgatgagaagtacaccaatgccttccttggctttgggccag

SEQ ID NO: 40817 - DNA, 291 bp, Zea mays
agaaaaccctagccgccgccaccgaagcggcctcccaggtaagcaggagcgtccaccccgccgccgtcatgaagcgcaatccccgcgtcacgagctcccgccggaagtgccgcaagggcactttacggccccgtcctccgtccgccgcgttctcatgtccgccgggctgtcgacggagctccgccacaagtacaacgtgcgctccatcccgatccgcaaggacgacgacgtgcaggtcgtgcgcggcacctacaagggccgcgacgggaacgtggtgcaggtctaccgccg

SEQ ID NO: 40818 - DNA, 232 bp, Zea mays
acgtgattctatctaggattctagggttcgttcgcctcgtctcgcgatggacaagggcagcgtcgtcgtgcccccagcccctgccgcagccgccgcgaagaaggccaagcgcttcgaaatcaagaagtggaacgccacatcgtggtggacaactgcgccatctgccgcaaccacatcatggacctttgcatcgagtgccaggcgaaccaggcgagcgccaccagcgaggagt

SEQ ID NO: 40819 - DNA, 303 bp, Zea mays
agagatctatgcgccgttcaagaacctccttcccatagtgaacccagacgacattgtgttcggaggctgggacattagcaacatgaacctggccgactccatgaccagggccaaggtgctggatattgacctgcagaagcagctcaggccctacatggagtccatggtgccacttcccggtatctatgatccggacttcatcgcggctaaccagggctctcgcgccaacagtgtcatcaagggcaccaagaaagaacaggtggagcagatcatcaaggatatcagggagtttaaggagaagaa

SEQ ID NO: 40820 - DNA, 301 bp, Zea mays
acgatctcttcggtgctagagaaatataggccgccgcctcctcctcattcggtgaaaggtgggcggttagggttgggagatctcttgactcacgacacgagcagcagaattcgtcgagggccgctggttgctgcgagaggtccgggccttcgtgggatcttgaaaattgaatgttctaatggagtccaagggtggcaagaagaagtctagcagtagtcgttcctccctgatgtacgaagctccccttggctacagcatcgaggatatccgccctgcaggcggcatcaagaagttctccgct

SEQ ID NO: 40821 - DNA, 301 bp, Zea mays
aaagcttcagctggacccaacagtggaggaagttaagaagctttgcaatacttgccgcaaatatgccagatcagagagagttcttttccattataatggccatggcgtaccaaagcctacatctaatggtgagatttgggtgtttaacaagagttacacacagtatattccacttccaattactgatcttgattcatggctgaagacaccttcaatttacgtttttgattgctcagcgtctggaattattgtgaaagcttttctagagcgcctagattggagttctagctcctctgcatct

SEQ ID NO: 40822 - DNA, 294 bp, Zea mays
cagacaacactcaccgatagcaagtagcgccgccgacgtttcgagagcagagtatccaagctagccaagcgcgcacctcggtgacctagctagctacctagctagttcaggcgacgatatggcgtctggtcaggagagcaggaaggagctggaccgcaaggctcgcgagggcgagaccgtcgtccccggcgggaccggcggcaagatcgtcgaggcccaggagcacctcgccgaagagcgcagcgcgtgaggccagactcgcagggagcagcttgggcagcaggggtacagcga

SEQ ID NO: 40823 - DNA, 288 bp, Zea mays
gttggcttctcctccccctccggttcgggttcgggttcgtgaggttctccggggttcggtttcgtgggtgagcggatcgagatggctgcgtcggatgttgagtaccgctgcttcgtcggctgcctcgcctggtccacggacgaccactccctccacaacgccttcagcacctacggcgaggtcctcgagtccaagatcatcctcgatcgggggacgcagaggtcccgctgcttcggcttcggcaccttctccacggatgaagcgatgctgtacgccatcgatggcatg

SEQ ID NO: 40824 - DNA, 299 bp, Zea mays
gagcgggcggcgggcgcggaggccgtgtacgctcacggggaggtatcgcgggacgaggtccgcgccgaggagagggtgcaaaatgctgtggagaacgagggtatcaacgtgaagtacttctggggtagcacgctataccacgtggaagaccttcccttccgcctcgaggacatgccgtccaactatggcggcttcagggaggccgtgaaggggttggaggtcagaaaggtgctggaggctcccgaggaggtcaagtgcgtgcccatgaagaatgtgctcgagcccggtgacatccccac

SEQ ID NO: 40825 - DNA, 301 bp, Zea mays
gcggcgccgcctccaagaccacctccacccggaccccagccccaaccccaagttaacagatgggggacgttgcgaaggacttgacggctgggaccgtgggaggggctgccaacctcatcgtcgggcacccgttcgacaccatcaaggtcaagctccagagccagcccacccctgctcccggacagctccccaagtacgccggcgccatcgatgctgtgaagcagacggtcgcggctgaaggcccgatgggcctatacaaggggatgggggcacctctggccaccgtagcggccttcaacgc

SEQ ID NO: 40826 - DNA, 300 bp, Zea mays
acttggtgggtttggttttgctctttcggttgatcaagcagcagttggtttgagtttgacttcatcacaactatttcattattcggactatgatgtcgaggatacagctttacctcttcaaccatcgttgaactatactgcaccagaattggtccaaagtagagattctaaagttggctctgcttgtgatatgtttagctttggatgtttggcttacaatctggttgctcgtagaccacttctggactgccataacaatgttaaaatgtacatgaatgccttgacatatttaacaagtga

SEQ ID NO: 40827 - DNA, 296 bp, Zea mays
gtgcaccagtgaacagccccgtgacggtttgcggtgatatccatgggcagttccatgacctaatgaagctcttcgcgacgggtggctacgtcccagagacgaactatattttcatgggtgattttgtggaccgtggcttcaatagtctagaggttttcaccatcctattgctactaaaagcgaggtatcctgcacacatcacccttctgcgtggaaatcatgaaagtaggcagttgacacaggtgtatggtttctatgatgagtgtcagagaaagtatggcaacgccaatgcatgg

SEQ ID NO: 40828 - DNA, 293 bp, Zea mays
gccgacttcacgcccgtgtgcacaacggagatggcggcgatggcggggtacgccaaggagttcgagaagcgtggcgtgaagctgctgggcatctcgtgcgacgacgtggagtcgcacaggcagtggaccaaggacgtggaggcgtacggcgggaagcagcagcagcagcaggcgacgacgacgaaggtgacgttcccgatcctggcggacccggcgcgggacgccatccggcagctgaacatggtggaccccgacgagaaggacgcggcggggcggacatgccgtcccgcgcg

SEQ ID NO: 40829 - DNA, 294 bp, Zea mays
acattcctcctccggatttcgcagtcagcggtggtgaaggtagcgggcgcagaggaagatggggctcgcgttcgggaagctcttcaaccggctcttcaccaagaaggagatgcggattcttatggtcggtctcgacgccgccggtaaaaccaccatcctctacaagctcaagctcggcgagatcgtcacaaccatccccaccatcggtttcaatgttgaaactgttgagtacaagaacattagcttcacggtctgggatgtcgggggtcaggacaagatcagacctctctggag

SEQ ID NO: 40830 - DNA, 295 bp, Zea mays
cacccctgctcacccacccgtcccctcctgctcgcccatggctcccatcgctgtcggcgacgccctccccgacggccagctcgggtggttcgacgagaacgaccagctgcagcaggtctccgtccacgcgctcgccgccggcaagaaggtcatcctcttcggcgtccccggcgccttcaccccgacctgcagcaaccagcatgtgccaggcttcatcacacaggctgagcagctcaaagccaagggtgtagacgagatgctgcttatcagcgttaacgaccccttcgtcatgaag

SEQ ID NO: 40831 - DNA, 294 bp, Zea mays
ctttgtttgcaaagctcctcgtcgatcgatccatcggtgactgcaccggccggcagcaccgcgctcgcaggggctagccaacgagacggcagcaatggctgaccgtgaccgcagcggcatctacggcagcgcccacgccacctgcgggcagcagcagcagcagggaggaggcgggcgcccggtgggtgagcaggtgaaaaagggcatgctccacgacaagtggccgacggcgtcgcaggcgctgacggtgtcgacgctgttccctctgggcgggctggtgctggtgctgtcggg

SEQ ID NO: 40832 - DNA, 294 bp, Zea mays
cgctgggccaccagctttgaacgcagcctcccttcccctcaactacagctcctccccaccccactcccccgcaggagcggcggcggcggcggcgaggtcgtaccccacatcggcgagcggcggcggcaccgccggaggcaaaggcaagatgttcgggcgcgcgccgaagaagagcgacaacaccaagtactacgagatcctcggggtgcccaagtcggcgtcccaggacgatctcaagaaggcctaccgcaaggctgctatcaagaaccaccccgacaagggcggtgaccccga

SEQ ID NO: 40833 - DNA, 291 bp, Zea mays
gtcttggcttgcttttgctgcccagaaggttgttgaggttgatgctcttgctaaggcattggctggtcaaaaggatgaggcttacttcgcagcaaatgctgctgctcaggcctcgaggaaatcctcaccccgtgtgaccaatgaagaagtccagaaggctgctgctgctctcaagggctctgaccaccgccgtgggaccaacgttagtgctagattggatgcccagcagaagaagcttaacctccccatccttcccaccactacaatcggttcgttcccacaaaccgttga

SEQ ID NO: 40834 - DNA, 294 bp, Zea mays
atcaccgatagcaagtagcgccgccgacgtttcgagagcagagtatccaagctagccaagcgcgcacctcggtgacctagctagctacctagctagttcaggcgacgatatggcgtctggtcaggagagcaggaaggagctggaccgcaaggctcgcgagggcgagaccgtcgtccccggcgggaccggcggcaagatcgtcgaggcccaggagcacctcgccgaatggcgcagctgcggaggccagactcgcagggaccagctggggcagcaggggtacagcgagatggggaa

SEQ ID NO: 40835 - DNA, 288 bp, Zea mays
acagagacccagtattgagaaagccattgggcttgatttttatctacttagaggacttggctttcttataaataagtatgttgacattgtaaccagcgatgttgttgccctcatcgatgaatttgctcgaagagtttttcaagagcttaattatgttcaggaaggccaaaatgcaagaaggtttaagaaattatatgccgataagcaagatgtattagtgcctgatatattttgggattacacaagtgcaaaggttctaacaatggagtggattgagggtgtaaaatt

SEQ ID NO: 40836 - DNA, 274 bp, Zea mays
caagaagacaggagaagggagttgtagtgagttttaagaatggcgagtgcacaggcagtggggcaaggagaacgaggccacttcgttctgaagagcggacacaccattccggccgttggtctaggcacttggagggccggctcagataccgctcactctgttcggaccgccatcgccgaggctggatataggcacgtggacacagctgcccaatacggagtagagaaagaggtcggtagaggacttaaagctgcgatggagggcgggatcaaca

SEQ ID NO: 40837 - DNA, 282 bp, Zea mays
gcaaagctcctcctcggtcggtccatcggtcactgcaccggccggctgcaccgcgctcgcaggggctagccaacgatacggcagcaatggcggaccgtgaccgcagcggcatctacggcggcgcccacgccacctacgggcagcagcagcagcagggaggaggcgggcgcccgatgggtgagcaggtgaaaaatggcatgctccacgacaaggggccgacggcgtcgcaggctctgacggtggcgacgctgttcccgctgggcgggctgctgctggtgctgt

SEQ ID NO: 40838 - DNA, 282 bp, Zea mays
atctttacaccttggttgatggctttgtcatccgcaatccatccagagcgaatccagctaacccttcgattgagcttggacctgagttcaagaaggttgccaatttccttgctcggttcaagtccatccccagcatcgtcgagcttgacagcttgaaggtttctggtgatgtctggtttggttctggaattacgctcaagggcaaggtgacaatcaccgccaagtctggagtgaagttggaggttccagatggagctgtatatgaaaacaaggatgtcaatg

SEQ ID NO: 40839 - DNA, 284 bp, Zea mays
actattgctgaggggcttgctcaacgtatttccaatggtgatgttcccgaaacaattgaaggaaagaaggttattactcttgacatgggcctccttgttgctggaaccaaataccgtggagagtttgaagagagattaaagaaacttatggaggaaattaagcaaaatgaagatattattctctttattgatgaagtgcacacactgattggagcaggtgcagcagaaggtgcgattgatgctgctaatattttgaagccagctcttgcaagacgtgaactgca

SEQ ID NO: 40840 - DNA, 284 bp, Zea mays
gtctaagggtggcaagaagtctagcagtagtcgttccatgatgtatgaagctccccttggctacagcattgaggacgttcgacctgccggagcgcgaagaagttccagtctgctgcttactccaactgcgcaaagaagccatcctgatatcccttttggcttcctcgttctagtagtttaggatttcttttctgacacttcgattcttaccaatccccctggcctgctgctttcctgacaatcgaccagttccccagtcttgctccctgcagtcctccctcctc

SEQ ID NO: 40841 - DNA, 285 bp, Zea mays
ctcgcactcgcacgtacaccacactagttaccacagacgacgggcgccatgaaagtcccggtgcttctcctcctggtctccctgtgcttctcgctcgcgctcgcgtggcaaacggacacggaatcgggctcaggcaggccgtaccactacggcgaggagagtttccggcactggacgcgctcccggcagggccggttcagggtgctggaacggttcacccacgagctgctggaggacgccgtcggcaactaccgcgtcgccgagctggaagccgcgccgcgcacg

SEQ ID NO: 40842 - DNA, 289 bp, Zea mays
agccgccgcagtcgcgtcgtcctgggaggacgacaaccaccaccaccacgggggccacaagtccgggcaatgcgtgcggcggtgcgaggaccggccctggcaccagcgcccccggtgcctggagcagtgcagggaggaggagcgggagaagcggcaagagcggagcaggcacgaggccgacgaccgcagcggcgagggctcgtcggaggatgagcgagagcaggagaaggagaaacagaaggaccggcggccgtacgtgttcgaacggcccttcgacgaggcatccggg

SEQ ID NO: 40843 - DNA, 288 bp, Zea mays
caaaatctgcaatggccacacctgttcagatgcctgatttgatcgatacaggtgatcaagatggtctggcaacaagttctggacaggaaagcaatggacaaaaaaatactgggaaagcatatgtttcttcagttgatgatttgcttggtggtgaacctattgctgatacaagtgtcactgctgatagcaatggaagcgatccatttgcagatgtatcgttccatgaggtagaggctaaggagactaatgatctcttctcaggattgatagtagaagaaaaatcatcag

SEQ ID NO: 40844 - DNA, 293 bp, Zea mays
cgcggacggaccgagccacggccagtgccaggagcgaaaataaaaaggggtaggagttcctcctccccaacctcacaagtaaatcagcagcagcagaccttcttgacctagcaagcaatggggccgccgttcctcgccgtcgccgtcatcgtcgccttcctggccgccgccgcgcaggccgccgaccccttcgccttcttcgactgggacgtctcctacatcaccgcctcccctctcggcgtcccgcagcaggtcattgcagtcaacaagcagttcccaggccctatcatgaa

SEQ ID NO: 40845 - DNA, 297 bp, Zea mays
ctgcgcctccatttcggcctctgtccctcgcaagttgaatctcacctccaaccatgggtaaagagaagtcccacatcaacattgtggttattggtcatgtcgactctggcaagtcgaccaccacaggacaccttatctacaagcttggaggcattgacaagcgtgtgatcgagaggttcgagaaggaggctgctgaaatgaacaagcggtccttcaagtacgcgtgggtgctcgacaagctcaaggctgagcgtgagagaggtatcaccattgatatcgctctgtggaagtttgaga

SEQ ID NO: 40846 - DNA, 246 bp, Zea mays
ggagaagctgggagtgccgggggccgtcgtcgtcaagaacaaccacgccgccgagttcttcctcgagacaatcaccctcgacgacgtgcccggccgcggcgccgtcaccttcgtcgccaactcctgggtctaccccgcgggcaagtaccgctacaaccgcgtcttcttctccaacgatacgtacctgccaagccagatgccggcggcgctgaagccgtaccgcgacgacgagctccgcaacctccg

SEQ ID NO: 40847 - DNA, 242 bp, Zea mays
ccactaccccactcccaggcgccgcacaggtacgtcgccggcggcgatgacgacgcgcttcaagaagaaccgcaagaagcgcggccacgtgtccgccgggcacgccgcatcggcaagcaccggaagcatcccggaggtcgcggtaacccggtggcatgcaccaccaccgcatcctcttcgacaagtaccatcccggctacttcggtaaggtcggcatgcgctacttccacaagctccgcaac

SEQ ID NO: 40848 - DNA, 282 bp, Zea mays
cagagagggctccgtcatcgtgatcccggcggggcaccgaccgcgctggtcgccggcgaagacaagaacctcgccgtcctctgcttcgaagtgaacgccagcttcgacgataaggtgttcctcgcgggcacgaacagcgcgcttcagaagatggataggccggcgaactgctggcgttcggggcggacgaggagcagcaggtggaccgtgtcatcggagcacagaaggacgccgtcttccttcgcgggccccagagccacagggtctcgtcggtgtaagtgc

SEQ ID NO: 40849 - DNA, 289 bp, Zea mays
gcaatgtacaggaagcagcacaagaaggatatccatgctgaggctgtcaagaagaggcgccgcgccaccaagaagccatactcgaggtccattgtgggtgcttccctagaggtgatccagaagaagagggctgagaagcccgaggtccgcgatgctgctagagaagctgctcttcgcgagatcaaggagcgcatcaagaagaccaaggatgagaagaaggcgaaaaaggctgaggtgaccaagtcccagaaggcacagacgaagggagcggtccagaagggttccaagg

SEQ ID NO: 40850 - DNA, 235 bp, Zea mays
acatttgtgaggagctttcatacatagttaaatttgatggagaaatgatgcactagtgtaatagtagcttactgtcaaagcaccctaagacatgtgcaggtcctccctaagtattgttttttagtcttcaatgggccagtaattcaatataatgttcatgtattggagtgcagattggggcccaaagatcgatgttgttggagtttgcttccttgatcttgcttccaattacgta

SEQ ID NO: 40851 - DNA, 322 bp, Zea mays
gcgcgtgcgcgcgtgcgtgagctcggggttgggctcgggctttgtttgcgagctcctcgtcggtgcgtcggtggctgcaccggccgggggcaccgcgctcgcaggggctggccgacgagacggcagcagtggcggaccgtgaccgcagcggcgtctgcggcggcgcccacgccgcctgcgggcagcagcagcagcacggagcaggcgggcgcccggtgggtgagcaggtgaagggcgtgctccacgacaaggggccgacggcgtcgcaggcgctggcggtggcggcgctgttcccgctgggcgggctgctgctggtgctgtc

SEQ ID NO: 40852 - DNA, 248 bp, Zea mays
cagagggctgtccttgagccagtaatgcaaggaagggacatggttggtcgtgccaaaacggggactggtaaaactttggcatttggaatccacataatggatgcaattattcgtcacaacgagaagtacaagcctggtaagtttccattggctattgtcatggcgccaacaagagaacttgcaaaacaggttgagagggagttccttgattcctcccctttggaaacgctgtgtgtatatggagggac

SEQ ID NO: 40853 - DNA, 279 bp, Zea mays
gcactcgccgcaacgccgagaagacgcgagaagacgggaggaggtgagccaccggaagcggagacgtgagcactcgacaaaccccgtcgatccggctgcggcgcggcgtgctagatcgctaccgaccatggtggtggaggagatcgccgagggggtgaagaacctaaccgtcaccggagatgcggcggcttcaggcggagaggggcagacgaggggcggcggcggcagcagcaaccgcatccaggtgtccaacaccaaaaaacccctcttcttctacgt

SEQ ID NO: 40854 - DNA, 280 bp, Zea mays
aagggctttcaggagactcgtccgggctagacgccgacggcgcaagcggaccatttctccagcatcagaggtgacgacggccagaggtcgctcgacgcatggtatgtcacaaacatagctcagagctgcgattcgttgtgcagattcattaatggtttctctctcaccccctcttgacaatttgcaggtaaaaacggccggcaaggaggccttccagtggggttagtggtgtgattagtctgttcagatctaacagtacgttggaggtccacaagtagta

SEQ ID NO: 40855 - DNA, 281 bp, Zea mays
gaagaagtacggtcaggatgcgacaaacgttggggatgaaggtggttttgcacctaacattcaggaaaacaaagaaggccttgaactattgaaggcagccatagaaaaggctggctacactggaaaggtggtcattggaatggatgttgctgcttctgaattcttcggtgagaaagacaagacttatgatcttaatttcaaggaggagaacaacgatggctcaaacaaaatttcaggcgacagctgaatagacctgtacaagtcctttgtttctgagtacc

SEQ ID NO: 40856 - DNA, 284 bp, Zea mays
tagctagctagctgaatcacaatggatcctaccaagttccgtccgtccagtagccacgacacgacggtgacgacgacgaacgctggcgctcctgtgtggaacgacaacgaggcgctgactgtggggcctcgcggtcccatcctgctggaggactaccacctgatcgagaaggtggcgcacttcgcgcgggagcgcatcccggagcgcgtggtgcacgcgcgcggggcctccgccaagggcttcttcgagtgcacccacgacgtgacgtcgctgacgtgcgccga

SEQ ID NO: 40857 - DNA, 287 bp, Zea mays
aaaggctactaagttaggagagatcttgggtgatgtgtggctgcgagagcatgaacaatacaaggactactatttgtcaatgttcatcagggagagctggggagcactttcgccactactgaaccgggagggattaatactgttctccaagggccaggctacggcaagggacctggtgaagcagcgcctcaaaacattcaattcaagctttgatgagatgcattgcaggcaatcatcatgggttataccagacaaggatttgcgggagaggacatgtaatcatgtgg

SEQ ID NO: 40858 - DNA, 247 bp, Zea mays
aaacgcctagacctagcaaccatggctggccagaaggtttatgagttcaataaccagcaggatgtagcagctgggctggtagtgatgtcaaatgcatatatttcagccggtcagatcgataatgctgccgctgtgcgatcaagcatgaggctgcgtggcatacggaaggatcccgggtgcagctggattgaagtaaaggataccccccatgtgttctatgctggtgcagtatcatgcgctggtgcgt

SEQ ID NO: 40859 - DNA, 231 bp, Zea mays
gaaaaacttggcgccacttcaagaaggctaaatctgtactgatagcaaaggttgactgtgatgagcacaagagtgtatgcagcaagtatggagtttctgggtaccccacaattcaatggtttcccaaaggttccctggagccaaagaagtatgagggtcaacgttctgtggaagcccttgcagaatttgttaacagcgaacagggtaccaatgtcaagatagctgccattc

SEQ ID NO: 40860 - DNA, 303 bp, Zea mays
caagcagcagagccggccggaatatgtggacgatcaggaaggtggcgacgccgcaggtagccgtcctcctgctgctcctcatcgtcgttgcgcaggaggcggcgccgttggcggaggcgcgcgtgtgccggcgccggagcgcgggcttcaagggggtctgcatgtccgaccacaactgcgcgcaggtgtgcttgcaggagggctacggcggaggcaactgcgacggcatcatgcgccagtgcaagtgcatcagggagtgctagctagctaggctctaggatctagcaagctagctatatcggc

SEQ ID NO: 40861 - DNA, 299 bp, Zea mays
tagaagatggaggccacgacgcggtttaataaccggctcttctggtagtcgttgatcttgatcacctgcttccagtagttggccacctcgggcaggccgttgcactcgcagatgtacaccaggttcaggatgtccttctggaagcatgagccaccgaacccaacactggcgttcaggaacttggggccaattctcgtgtccttgcccacggcgtaagcacctcagagacattggctccggttgcctcgcagagagcggagatggcattgacagacgagatcctctgtgccaagaacgca

SEQ ID NO: 40862 - DNA, 301 bp, Zea mays
cgacaagcccacaagcgttttcctctccgagtcctccctggcctctcaaccactcatcatcgccttcgcaggcatcgccctctcgccgggccgtccgattccgccatggcttccgatgagagcaaaaattcaaaaccagagaagccatcttcagcagctggtgcaggcctccccaatccgtttgatttttcttctatgagcaacttgctcaatgacccatcgataagagagatggctgagcaaattgcaagtgaccctgtgttcaaccagatggctgaacagcttcagaaaagtgctcagg

SEQ ID NO: 40863 - DNA, 296 bp, Zea mays
ctctcacccgactcgtcaacgtcagccagcagttcgaaccaaggattgatccaggagcttccggaaggcgaggcgcgcgcgcagtcgaggtgctggtgccggtgccgcccatggatcgggctcgcggatccgcgttcctgctcggcgtcctgctcgcaggatccttgttcgcgttttcagttgccaaagaggagaccaagaagctcgggaccgtgatcggtatcgatctcggtaccacctactcctgtgtcggtgtgtacaagaacggtcatgtcgagatcatcgccaatgaccag

SEQ ID NO: 40864 - DNA, 299 bp, Zea mays
gccagctttaacatcattcctagcagcaccggtgctgccaaggctgttggtaaagttcttcctgatctgaatggcaagctcactggtatgtccttccgtgttcctactgtggatgtctcggttgttgacctcaccgtcagaatcgagaagggggcctcctatgaggatatcaagaaagctattaaggctgcttccgagggtccactcaagggtatcatgggttatgtggaagaggatctggtttctaccgacttccttggtgacagcaggtcgagcatcttcgacgccaaggccgggat

SEQ ID NO: 40865 - DNA, 303 bp, Zea mays
agctgctcccacctctagcccgacaggtgaagccgccgccgctgcagtgtccatagccaccgcagagactgagatggggggttttgtcaagacccacaagagcaatgcatacttcaagcgtttccaggtgaagttcaagagaaggcgcgctggcaagacagactacagggccaggataaggctgattaaccaagacaaaaacaagtacaatacacccaaatacagatttgttgtgcgatttaccaacaaggacatcacagcacaaatcatatctgctagtatagcaggtgatatggttcttgc

SEQ ID NO: 40866 - DNA, 311 bp, Zea mays
aaacgactgccctaacctcgtgcagtcgtgcccgcttgtttcccttgctcgccttcacccctcgccgccgccgccgccgtcgccgtcgcaagcgacgatgctcgacatcaacttgttccgcaccgacaagggcggcaacccagaccttattcgcgagtcccagcgcagtcggttcgcctccgtcgagctcgtcgacgaggtcatcgccctcgacaaggcatggcgcgaaaggcagttcgagctggacaagatccggcaggagctcaacgctaccagcaagaagatcggcaagctcaaagccagcaagcaag

SEQ ID NO: 40867 - DNA, 294 bp, Zea mays
ctccttctcccccctagtctagaggcgtttgctccccaatcccttcagcccgcccgctcgacgtgatcccaccggcagccatggatccatacaagcaccgcccgtctagtgggagcaactccagcttctggaccaccaactccggcgcccccgtctggaacaacaactctgccctcaccgtcggacagcgaggtccaatcctccttgaggattatcatctaatcgaaaagcttgctcagttcgacagagaacgtatccctgaacgtgttgtgcatgcacggggagccagtgcca

SEQ ID NO: 40868 - DNA, 278 bp, Zea mays
ggctcgagggttgccgcttcctccaaagccactccaaacccccgctaccagaaccttctcgaaactcaccgcctcctcctctactcgctccgatggcgaaggaaccgatgcgcgtgctcgtcactggcgccgcaggcaaattggatatgctcttgttcccatgattgctaggggagttatgcttggtgcagaccagcctgttattctgcacatgcttgatattccgccagcagctgaagcccttaatggtgttaagatggagttggttgatgctgcat

SEQ ID NO: 40869 - DNA, 283 bp, Zea mays
tccggcgcctctccgtggagcacattgtcccgtcgtatcggaggacggataaccggctgattctcctggactacgacggcaccgtgatgccggagaactccatcgacaggacgccgagcagtgaggtcatctctgtgttgaatcgtctgtgcgaggaccccaagaacagagtgttcatcgtaagcggacgggggaaggacgagctgagcaggtggttcgccccctgcgagaagttgggcatcgccgcggagcacggttacctcacaaggtggagcagggacgc

SEQ ID NO: 40870 - DNA, 290 bp, Zea mays
atcggcacctcatcccgcgggtccgtcgatgtcaccaactcctaagccgtgccgtttgaggaggatgacaaggatcctaggatctggttccttgaccacaattaccacgagtcaatgttctccatgttcaagaggattaatgccaaggagcatgttgttggctggtacagcactggcccaaaactaagggagaacgacttggatgtccatgcattattcaacagttatgttcctaatccagtcttggtgattattgatgtccaacccaaggagctgggtataccgaccaa

SEQ ID NO: 40871 - DNA, 291 bp, Zea mays
ctagcgtgtctttctccccttcctgctttccctctccagctctcatacacaaacacacggagctagcagcacggatcgagagaacaatggaggaaacaagcaggatccctgggtacttcaagaacaagggcatcctgatcacgggcgcaacaggcttccttggaaagatcctcgtggagaagatactgagggtccagccggacgtaaagaggatctacctccccgtgcgtgcgccggatgctgcatcagccaagaaacgggtggagactgaggtgatcggaaggagctgtt

SEQ ID NO: 40872 - DNA, 288 bp, Zea mays
agagagtacgagaccacgccttccgtgggatcaatcggctagggtttcggagatgttcggccgcgcgccgaagaagagcgacaacacccggtactacgagatcctgggggtttccaaggacgcgtcacaggatgacctcaagaaggcctaccgcaaggccgccatcaagaaccaccccgacaagggcggcgaccccgagaagttcaaggagctagctcaggcttatgaggtcctcagcgaccctgaaaagagagagatctatgaccagtatggcgaggatgccctcaa

SEQ ID NO: 40873 - DNA, 286 bp, Zea mays
gtcatttctgggcctggtgagaagccaatgattgttgtccagcacaagggtgaggagaagcagtttgcagctgaagagatctcctctatggttcttatcaagatgcgtgagattgctgaagcttaccttggtagcacgatcaagaatgctgtggtcacagtccctgcctacttcaatgactcacagaggcaggccacaaaggatgctggggtgattgctggccttaatgtgctgcgtatcatcaacgagccaacagctgcagctatcgcctatggtcttgacaaga

SEQ ID NO: 40874 - DNA, 287 bp, Zea mays
cttggaaccgtttggattgcactgtggcaaagcaaagcacacagctctccagatgatgatccggagctaagtaaagctgaaaagaggcatatactgggtggcagtgccttaaaggagcctgtcacttccataccatggaggctaattctatcaaaggctccagtgtgggctctcataatatcacatttttgccataactggggaacattcattcttctaacatggatgcccacatactacaatcaggttttgaagttcaatctaactgagtcggggcttctctgtgt

SEQ ID NO: 40875 - DNA, 286 bp, Zea mays
cttcctgcaggaatttgtggaggcaagacgaacagctgcacttaataatgttccttcttgtatgtggtctccggtaccacctcttgagttaaaaggagtatctgctgatgcacttaatgcaaatgctggctttgttactttcgttgtttaccctcggcatgttgagggtaaaaagctagatagaacagtttggaatttgttgacatttcatgcttatgtaagctatcatgtaaagtgttctgaaggattcatgcataccaggatgaggcgcaaggttgagtcgctg

SEQ ID NO: 40876 - DNA, 292 bp, Zea mays
aacaagggtggcgaacaaaacccgcaccttggtgagttgttgaggttagaggaagttgccaagcaacagggtgttggtcgttggagcaaggaacctggtgctgctgaagagtcaataagatatcttccaccatctgcaattggtgaagcaagtggttttgatgcgaagggttttgcggttgaaaataaaggcaagagtttggaggccattgttgaacaagccccatcaatggggagacgcccatcggcacctactgtaattgctgaaactgatgatactgctaatgacacga

SEQ ID NO: 40877 - DNA, 296 bp, Zea mays
ggaagatgttctcctggagatggaccgcatcttgaggcccgaacgcgccgtcataatacgggacgacgtagacgtcctgaccaaggtgaacagcctcgctctgggtatgaggtgggacacgaagatggttgatcacgaggatggccccctcgtgcgcgagaagatcttgtatgccgtgaagcaatactgggttggtggtaagcagacggctgtagcttgaagcaagcacgtttcatgaggctctaacatgaggaattctgcaaccaaaccttacccgacaaacaaggattagctta

SEQ ID NO: 40878 - DNA, 239 bp, Zea mays
caaccacttactctcgtgcgctctccgtgggagcgaggactcgcggccggcggcagcggcaggttctcctagatctccgggtaagcggtgaaagaagaggaggtgttggaggaattagttccgaatctttctccattacgattttcgtggcgtcgagcatcatcagtaacaaatggctgacggtgaggacattcagccccttgtttgtgacaatggaactggcatggtcaaggctggtt

SEQ ID NO: 40879 - DNA, 199 bp, Zea mays
cgctcaaaaccctagagctctcgcctgctcgcctccgccgccggagcgagctccccatcttcatccgtcaaccatggcgacccagatcagcaagaagaagaagttcgtcagcgacggtgttttctacgccgagctcaatgagatgctgacgcgggagctggcggaggatggctactctggcgtggaggtgcgcgtcacg

SEQ ID NO: 40880 - DNA, 313 bp, Zea mays
agaattccctcatagccgccgccgccgccgccgccgccgctcatctcgccgagaggtgacgggaccgaggaactcgccgagttctaagatagagaatcgcttttcacagcctggggtctgctgcgtagggtggtgttgaaggggagaagtttaagatctgttccacagatcacgcgtgcgcgctcgcgaatcgggggttccacacatagcttcgtcgttttgaatttgatgtactaatggagtctaagggtggcaagaagtctagcagtagtcgttccatgatgtatgaagctccccttggctacagcattga

SEQ ID NO: 40881 - DNA, 309 bp, Zea mays
gcggcaccggcaggcggcggccctcgggcattgtcccagcgggagcaggacatccagatgatgctcgccgccgatgtccacctcggcaccaagaactgcgacttccaggtggagcgctacgtgtacaagcgccgcactgatggtatctacattattaaccttggaaagacctgggacaagcttcagttggccgccagggtcatcgttgccattgagaatccgcaggacattatcgtgcagtctgctaggccctatggccagagggctgtcctcaagtttgcgcagtacactggtagccatgccattgct

SEQ ID NO: 40882 - DNA, 303 bp, Zea mays
ctggtacacgagggcaaggacggcgcctcacgctgggtcgtccgccccaagtccgtcaagtacaacttccggaccagaaccgccgtccccaagctcggggtgatgcttgtagggtggggaggcaacaacgggtccacgctgacggctggggtcattgccaacagggaggggatctcatgggcgaccaaggacaaggtgcagcaagccaactactacggctccctcacccaggcctccaccatcagagtcggcagctacaacggggaggagatctatgcgccgttcaagagactccttcccata

SEQ ID NO: 40883 - DNA, 308 bp, Zea mays
cgccgccgcaagccgtccgccttgcccttcacgaaggcttggtcctcctccttgtatctccactccccccttcacagatccgttcctccagctagggttagcgttcctctgcagcgatggcgatcaagcggactaaggcggagaagaagatcgcgtacgacaagaagctgtgcagcctgctcgatgagtacaccaaggtgctcatcgccctggccgacaacgtcggttccaagcagctccaggacatccgccggggcctcaggggcgactcggtggtgctcatggggaagatcacgctcatcaggcgt

SEQ ID NO: 40884 - DNA, 311 bp, Zea mays
cccctccctccttcgccgtcgccgtcgccgtcgccgtcgccgtcgcaccagattggccgccgcctctggatcgccgctggactcgcttccctgacccagaagctacgatgaattacatcatcggcgcattcaagccgccctgcgacatcttcgtcacattcgccgatgagagaacccggaagcaggtccagatcaagaaggacaacgggaagactgtcatggtgccggcctttcagacccttgagaccatagccggagaggtgtcgatcgctccagtcccaggtaaaaggcttgaacacacgggtgtgaag

SEQ ID NO: 40885 - DNA, 308 bp, Zea mays
gctgccttgactggggcgaggcgggcggccccgacctcatcgtcgacgacggcggcgacgccacgctgctcatccacgagggtgacaaggccgaggaggagtacgagaagaccggcaagatccccgacccggagtccaccgacaacgctgagttcaagatcgtgctcaccatcatccgcgacgggctcaaggctgaccccaagaagtaccgcaagatgaaggagaggcttgtcggcgtctctgaggagaccaccacgggtgtcaagaggctctaccagatgcaggagaccggcgcactcctcttccct

SEQ ID NO: 40886 - DNA, 296 bp, Zea mays
gagccatctcccctctctccgacccccaaccatggatgaggcgcaagttgtggagtcaaaggatggaaccatctcggttgcttctgcatttgctggttatcaggaagctgtgcaagacagggatcacaaattcttgacaaaagcagtggaagaagcatatcgaggagtcgattgcggtgacggaggtccattcggagcagttgtcgtctgtaatgacgaagtagtagtcagctgccataacatggttctgaagcacactgaccctactgcgcatgctgaagtaactgcaattagag

SEQ ID NO: 40887 - DNA, 306 bp, Zea mays
attcatatcaggtttacgagaagggtgctgaagttgtcagaatgtacaagaccatgtttggagcatcagggttccgaaagggcatggatctttattttaaaaggcatgatgggcaagctgtcacttgtgaagacttctatgcagccatgtgtgatgcaaataatgcacaactgccaaactttttacaatggtactctcaagcaggtacgcctatagtcaaggtggcatcttcatatgatcctagttctcagacattctctttgaaacttagccaagaagtaccacgcactcctggccagccggtta

SEQ ID NO: 40888 - DNA, 303 bp, Zea mays
gcaggggtccctgagggtgctccggcccttcgacgaggtgtccaggctcctccgcggcatccgggactaccgcgtggcggtcctggaggcgaacccgcgctcgttcgtggtgcccagccacaccgacgcgcactgcatctgctacgtggcggaaggcgagggagtggtgacgacgatcgagaacggcgagaggcggtcatacaccatcaagcaaggccacgtcttcgtggcgccggccggggcggtcacctacctggccaacaccgacggccggaagaaactggtcatcgccaagatcctcca

SEQ ID NO: 40889 - DNA, 298 bp, Zea mays
ccttgacaagatagggtctactattcctaatgccttcaagcttctttcgggtgcgacatttgtaggggcaatattctgctttggtgctttttgtttcaagagcctttatgggttcataccctcctttgcagttggggagctttcagtgttcgcaactcaggcacctgtaaattttgtatgccttcacgccgtgaagccacatttgccgccattggcaatggccgtatccactgtttcaatccatatatttggcgatgtgccttcttcacctcttgttgggcttcttcaggacaaaatc

SEQ ID NO: 40890 - DNA, 300 bp, Zea mays
gcatggccgcggtcacgtcaagtacatccggtgctcaaactgcgccaagtgctgccccaaggacaaggcgatcaagaggtttcaggtgaggaacatcgtggaacaggcggccatcagggacgtccaggaagcatgcgtctatgatggctacgtcctcccgaagctgtacgccaaggtgcaccactgcgtctcgtgcgcgatccacgctcacatcgtccgcgtccgatcccgtgagaagcgcagggaccgcaagccgccggagcgcttcaggcgcaaggaggataggcctgctggtggaca

SEQ ID NO: 40891 - DNA, 296 bp, Zea mays
taagtttgttgtattggatactgggaattaccagattgattcaatggatcctgataagatgcttcagtgggaagatattatctgtgtaagatactatagcccttctgaggtacaatgccctatttgcttggaaagaccattgtgcccacagatcacatcatgcggacacatatattgctttccatgcattttacgttatctaatgatgggcaaagatgattatagaggtgagtgttggaagaagtgtcctctgtgtttcatgatgatatcatcaaaggatttgtatacaatacaaa

SEQ ID NO: 40892 - DNA, 304 bp, Zea mays
gcaattgatgggcataattggatgtatcccgtagcttatgggatttttgacaaggagaacgactctaattggatttggtttatgatgcaattgaagatagctattggtacaccacatggattgacaatccacaccgatgcttgcaaaggtttggcaaatgcagtcctcagggtcttccaaggtgcagctgagcatagagagtgttttagacacctcatgaagaatttcagaaaaaagtaccagggtgatgtgttaaagtacatgtggccttgtgcttgggcatgcacacctcgtaggcaccagg

SEQ ID NO: 40893 - DNA, 325 bp, Zea mays
atcctctcgctcgccaggagaagcagccgccgttgctgctgccgcgtccacagaatggggggtttcctgaagactccttaggaccaatgcgtatttcaaacgtttccaagtgaaattcaagagaaggcgggctggcaagacagactacagggccaggataaggctgattaaccaagacaaaaacaagtacaacacacccaaatacagatttgttgtgcgatttaccaacaaggacatcactgcccaaatcatatctgctagtatagcgggtgatatggttcttgcttctgcctactcgcatgagttgccacgatatggtcttgaa

SEQ ID NO: 40894 - DNA, 321 bp, Zea mays
caaaggcagacacaatcaagaaactctggaatgcagacccgaagctcagcaaaatccacagtgactaagggaaaccaccagttatgacccaacgactcccacttcaaatagagagatgcctccagctgcatttcatcaaaggagagaacttctgagctacgagcaactttgttgcctcgatgatgtcaattttgccaatgctgtcatctttggcaacaaaagctttaggcccctgcagtacgaagcttgcagggctgcaatggataaccaagactgtttcgtacttatgccaactggtggtgggaagagttgtgttatcag

SEQ ID NO: 40895 - DNA, 324 bp, Zea mays
gggcactgggctaggtccgttggcaacagccgccacactgctccgctctgctctctggaagcattgcccggctcgaagtggccatgccggcaccggggacgcagctgggtcggctccttgttggcggcctctggctcctggccgcgttgctgcagcgggacgctgcggcggcagtggccgccgtggatgggcggcgcgccatcgcagcgactggggagaacttcgtgtgcgcgacattggactggtggccgccggacaagtgcgactatggcacctgcccctggggccgcgccggcctgctcaacctggatctctccaacaagg

SEQ ID NO: 40896 - DNA, 141 bp, Zea mays
caccaccgccgcgtccagcctcctcaagtcgtccttcgcgggctcccggctcccttcggccacggggaacaacaacccggtcgtccgtgagcctggcaccccgcgcgccggcggcggccccatccgcgcgtccatctcctc

SEQ ID NO: 40897 - DNA, 322 bp, Zea mays
ggcggacaccgcggctggcgcctgcgcgtgctggacgccttcgtcatcatcctcggcttcaagcaacttctttaaggggttcatgctccacacgggcctcttcggcggcagcggtggctaccgggaccacgactacggcgtcggcggcgcggccggcgagcccaagggggtcaccagggtctgaggattctgatcgatgcagctcgtacatgtgtcatcatatcaggcgctgctggagtgtgatgacgtaataagtagtacccatatatatatatggtgtgtgttgacgtaccacgtacactacgtacgtgtgtacctagta

SEQ ID NO: 40898 - DNA, 324 bp, Zea mays
gcaagcaatccgaattctctgcgatttctctagatctcgaccacccctactagttttggttcctcccttcggtccaaaaaaccgttcctagtggcaatggcgaagagcgagggtccggcgatcgggatcgacctcggcaccacctactcgtgcgtcggcgtgtggcagcacgaccgggtggagatcatcgccaacgaccaggggaaccgcaccacgccgtcctatgtcggcttcaccgacaccgagcggctcatgggcgacgctacaaacaagtaggtcgcaatgaaccccaccaacaccgtcttcgatgccaagcggttgatc

SEQ ID NO: 40899 - DNA, 327 bp, Zea mays
cccggacgagttgcagttggatctcagatcggtgatcacataaacaatggtgaaggctgttgctgtgccttgtaaccaccgttggtgtcaagggcaccatctttttcacccaagtgggagatggccctaccactgtcaccggaagtgtctctggcctcaagcctggcctccatgggtttcatgtgcatgcgcttggtgacaccaccaatggctgcatgtcaactggaccacactacaatcctgcgagcaaggaacatggagcaccagaagatgagaaccgccatgccggtgatcttggaaatgtgacagctggagcagatggtgttg

SEQ ID NO: 40900 - DNA, 316 bp, Zea mays
cctcgagccgaatcggctcgaggttccttacccgaggatccacttcatgctctcctcctacgcaccggtgatttcctctgcgaagggctttccacgagcagctgtctgtggcggagatcaccagcagcgcgttcgagccggcttccatgatggtcaagtgcgacccacggcacggcaagtacatggcttgctgcctgatgtaccgcggcgacgtggtgcccaaggacgtgaacgccgcggtggccaccatcaagacgaagcgcaccatccagttcgtggactggtgcccgacggggttcaagtgcggcatcaacta

SEQ ID NO: 40901 - DNA, 313 bp, Zea mays
ctctagagatgtgcatgactgggctggacaagaagaaagcttctgtcttcttcaagaccactgccgatggttaatccgctgtgcgccaaggagatgaccaagctctctggtatctcggacatcatcccagagatggagatctgtgacttcgacttcgagccctgtggctactccatgaatgctgttcatggccctgctttgtcgaccattcatgtgaccccagaggacggcttcagctatgcaagctacgaggtcatgggctttaacccgggctctttctcttatggtgacctggttaagagggtgctgaggt

SEQ ID NO: 40902 - DNA, 315 bp, Zea mays
gcacattctaacttggctcttgctgtggcatgccttcttgatcctcgatacaagaaaaaagttatagcgtaatacattgaggaacttcaacggtgatgggtaccatgtggaacttgacaaaattgttaatgtggtaagagggctctattgtttttattctagctctacacctgcaccagcaaagagtacatcaccggaaccagctaatagtgcatcagatattttaatggcaagtgtatctgatgaactggacagttctctgtatggtacaaatgaacctactctagttcggtctaatgagttggaaaagtacat

SEQ ID NO: 40903 - DNA, 310 bp, Zea mays
gccactgcaactcctcccaaatcctcccacccggtttagccggctccgctgccaacggcgcgaattcaactttggtcgccaccatggtcaagtccaaggccatcagggtccacgagctgggcggccccgaggtgctgcggtgggaggaggtggaggtcggggagcccggtgaaggggagatccgcatcaggaccaccgccgtcggcgtcaacttcatcgacatctactttcggaatggggtctacgccgcgcccaccatacccttcaccccaggaatggaagccgttggcgtcgtcaccgctgttgggcc

SEQ ID NO: 40904 - DNA, 306 bp, Zea mays
gataatatcttgacacatctcaagccagtcgagaagtgttggcagccacaggaattcctccctgaaccaagaacctgaggaattccatgatgaagttaaggagctcagagaacgtgccaaggaaatccctgatgattattttgtttgtttggtgggagacatgattaccgaggaagctctaccaacataccagactatgcttaacaccctcgatggtgtcagagatgagacaggtgcaagccccactgcctgggctgtttggacgagggcatggactgctgaggagaacaggcatggtgatctgct

SEQ ID NO: 40905 - DNA, 313 bp, Zea mays
cggcggcggcgccgttcactagggtttttcctgatctcgcctcctacttcccgagccacacacgctgccggcgttaagcggcggcccacaaggctaagcaccaaccatggccttcggagctctcgtcacgtcgaggctggccaggtccggccgcacccttgcatctgccgttgcccagggtcccgttgcccagcggatagcacctcctctgttctccaggtttggagcagtagctcgtcttctcagcacaaagccagccgcaacagatgtcataggtatcgatctaggcacaacgaattcctgcgtctccgtc

SEQ ID NO: 40906 - DNA, 137 bp, Zea mays
cccgagcatatcacagtgacagacacgatggtgagcgccagaattgttgtcctcctccgcaaccttctaatgggctgcggccgcagtcgcgtcgtcctgggaggacgacaaccaccaccaccacgggggccacaagt

SEQ ID NO: 40907 - DNA, 198 bp, Zea mays
gcgacccgcagcaaaaggaagcttggctcggttcccctcctgcggcctattggcttctggcctcgtataaaaaaaggcgaggacgcgttccaccgccagaatcatcgtcaccccggagcctctccttcccggtctcctccgcccgttgccttcgtcccctccatctccggctgcgtcgccggcgagcccgacaccgcg

SEQ ID NO: 40908 - DNA, 167 bp, Zea mays
cgccgcagccaaaccctctccagcagccgtcgtcgccaccgctgcagcgcggaggcgacccccatcgccgccaagatgcagatcttcgtgaagaccctgacggggaaaaccatcacgttggaggtggagtactcggacaccatcgacaacgtgaaggccaagataca

SEQ ID NO: 40909 - DNA, 299 bp, Zea mays
cccacacccggcacaccccccgagctcagcttagctccaccccagctccaatcacagtcgtgaccagagcgcgagagctagctagagggccgtgaaaatcccgatcaataggatcgccctggggagccaccaggaggtgtaccacccgggcgccctcaaggcggcgttcgctgagttcatctccaccctcatcttcgtcttcgccggccagcgctccggcatggccttcagcaagctgaccggcggcggcccgacgaccccggcgggcctgatcgcggcggcagtcgcgcacgcgttcg

SEQ ID NO: 40910 - DNA, 161 bp, Zea mays
cgaatctaacacaagagtcacctaagcttcttgaagctggcaaaaagttggatatgacttattcagtgaagtgggtgcaaacaaatgtggcatttgcacggcgctttgaggtttacttagactacccgttctttgaacaccagattcattggttctccatc

SEQ ID NO: 40911 - DNA, 298 bp, Zea mays
cgcgggtcgcctggcgcccggccacggtttgcctgtacgctcgcgctcgccgccgccgcactgacgctcgcccaggctaagaaggacctgacggaggttaagcacaaggtctacttcgacatcgagatcgacggcaagcccgcacgccggattgtcatggggctttttgggaagactgttcctaagacggcagagaacttccgagctctttgcacaggagagaaaggggttggcaagagtggcaaagccctccactacaagggaagtaagttccacagaatcatccccagcttcatgc

SEQ ID NO: 40912 - DNA, 121 bp, Zea mays
cagtgacagacacgatggtgagcgccagaattgttgtcctcctcgccaccctcctatgcgctgccgccgcagtcgcgtcgtcctgggaggacgacaatcaccaccaccacgggggccacaa

SEQ ID NO: 40913 - DNA, 124 bp, Zea mays
agccatctatgacatctgccgccgctcccttgacattgagcgcccaacctacaccaacctcaacaggcttgtctcccaggtcatctcatccctgacggcttccctgaggttcgatggtgctctg

SEQ ID NO: 40914 - DNA, 121 bp, Zea mays
ggcacgccaccatgccggggctcaccatcggcgacaccgtccccaacctggagctggactccacccacggcaagatccgcatccacgactacgtcggcgacggctacggcatcatcttctc

SEQ ID NO: 40915 - DNA, 118 bp, Zea mays
ctgaatatactttgctaggggaataagtcataagtctgtctggaagggtaaagtttgagctttgctagtgcggctgggcactctagtcactggatgtgttgtgcatgcatcagctgta

SEQ ID NO: 40916 - DNA, 299 bp, Zea mays
tggcaaatgactaaacgaagaggtgatcaggaagtccacaaagtaactgaggagagacctggctggtgtagcgaccctcacctgccaccatgtgcagcgtttgttgaaattatggcaactgtattctcaagggatgcatggcgctgtgtatggcatatgattcagaacgacttgggtcatggattggggccttacttttgctctaaggaaatgtgtggaaccagcccatgagaaaattggagtggttgactcccagtggattgttcatcaagtcatcccttcgcttggtaaccagggca

SEQ ID NO: 40917 - DNA, 311 bp, Zea mays
agacgcgaggacgctggcgcgtgggtgccgggtggcacgggagacggaggcgacgagtgcggcggcagcgatggcgcgcgtgtggcgacgtcgtggtggacgaagatggttaacagggtcgtcggaggggcggctggcggcggcgtcgcgcggaggcgaacaggaatgccaagaagaatggcggcgcgtcggagccgtacaacctatacgacagcgagcccgggttccagaacgcgtacagctggaccgtctccgtcgacaagcaccagtacgagcccctcgagcactccgacatcggcgtctacctcgtg

SEQ ID NO: 40918 - DNA, 310 bp, Zea mays
agacgatggtcagggtttgctccacaactttgtggaatacatcaagaagcagaagtgtgttcccctagaggacctagctgcagagttcaggatgcgaacccaggactgtatcaatcggattgttactctggaaagcatggataggttatctggggtgatggatgaccgtgggaagttcatctacatctcaactgaagagatgaaggcagttgcagagtacattaggaagcaagggagagtgagcatatcacatctggccaacaactcaaaccagttcatcgatctggagccgaagcccagtacgaggtgg

SEQ ID NO: 40919 - DNA, 310 bp, Zea mays
gcatccatggccgacgatacagagaacggtgaccgggcgaatgctgccaaaggccgccagcccatgcccaccttttgtgccggctccatcttcttcgacccgcacgagcacggctgccatttcatcgaacaagcgccataccggacatggcaaccggatcccctcgccgccgtcctctgccgctcctcctcctgttcctgctcctcttcgccgccaacggcagggccaatgccgcccgccccggcggccccagccccataaagaacgtggtggtgctggcgctggagaaccggtcgttcgacgacatgct

SEQ ID NO: 40920 - DNA, 306 bp, Zea mays
caaatcacaaggaacaaagaaagctacaaggatatttgttgctcgaattccacagtcagtggacgagtcgatgtttcgtaagcattttgaagcttttggagaaactcttgatctttacatgccataggaacatggttcaaaagggcatcgtggaattgggtttatcacgtttcagagtgcagagtctgtggacagcatcatgcaagagtcacatgagcttgatggcacaacagtagttgttgatcgcgcgactccgaagaggaagatgtaagatacccccgagtagaccatctcagggtggctatg

SEQ ID NO: 40921 - DNA, 306 bp, Zea mays
gtccggccgtctccttgccccgatggcgtccgagaagaagcagtccaacccgatgcgggagatcaaggtgcagaagctggtcctcaacatatccgtaagggagagcggcgaccgcctcacccgcgccgccaaggtgctggagcagctcagcggccagacccccgtcttctccaaggcgaggtacacggtgcgctcgttcggcatccggcgtaacgagaagatcgcctgctacgtcacggtcaggggcgacaaggccatgcagctgcttgatgacggcctcaaggtcaaggagtacgagctgctcag

SEQ ID NO: 40922 - DNA, 304 bp, Zea mays
gcaagtttgtccattcgcattggtctgaatactgtagctactagcgcgagtgccactgtgccgcagctgcctgctcgccattactgcaagctgtgttcaatcaaagcttaattaggctccctctacatctgatccagctaagtagctagccagcactacagaagggcgtggcaagaatcaggagagagatagcaggggggctagctagctgagctcgtgcgacgaagaatggccggaattggcaggaacatggtggcgccgctcctggtgctcaacctcatcatgtacatcatcgtcatcggct

SEQ ID NO: 40923 - DNA, 299 bp, Zea mays
gcggacgtaaggcgaaggagtagcagcagcaggcggcgccgagtagcggctccccatctcgagcttgccaccatggctagaggattgaagaagcatttgaagaggctcaatgcccccaagcattggatgctggacaagcttggcggagcttttgctcccaagccatcttctggacctcacaagtctagggagtgcctgccactgatcctcatcatcaggaacaggctcaagtatgctcttacataccgtgaggtcatttccatcctgatgcaacgccatgtacttgttgatggcaaggt

SEQ ID NO: 40924 - DNA, 305 bp, Zea mays
aaaagtttctcactcccaggctaagaacaggctatttattgggaatgtacaccatgactggacacatgatgatttcaaaactgcagtggaagaagttggtcctggagttttaaaagttgaactcatgaaggcgccaggcttagatcgcaataagggttatggctttattgaatactacaaccaggcatgtgcagagtatgctaagcagaagatgtctaccccagaattcaaactagatacgaatgctcctactgtcagctgggcagatcctaagaatgccaatgaagctacatcgtatgcacagg

SEQ ID NO: 40925 - DNA, 300 bp, Zea mays
  unsure (1)..(300): unsure at all n locations
aacaccccgaggcatatggcgacccagccgacgacggtgagccccctgtagttgagcagcgtcacagccgccgtgagtccgagcaccgcgaacgccctcggcgggccgccgcccagggcaggcacggcggacttgaggtagtccaggaagaggacggggtacagggcattgtcgatgacgccactgagccacttcacccacccttgctggaatccccagtaggggccgagcgccgangcgacccacacgacgtacccgccgttctccgggaacatggtgcccagctccgcggtaatcagc

SEQ ID NO: 40926 - DNA, 300 bp, Zea mays
ctttgttaacaaagaattccctcatagccgccgccgccgccgacgccgccgctcatctcgccgagaggtgacgggaccgaggaactcgccgagttctaagatagagaatcgcttttcacagcctggggtctgctgcgtacggtggtgttgaaggggagaagtttaagatctgttccacagatcacgcgtgcgcgctcgcgaatcgggggttccacacatagcttcgtcgttttgaatttgatgtactaatggagtctaagggtggcaagaagtctagcagtagtcgttcgatgatgtatg

SEQ ID NO: 40927 - DNA, 218 bp, Zea mays
ctgctctgctgcagcaagaaggaagaagctagcgcctccctagctctcgttgtcagcaatggccaccaccgccgcgtccagcctcctcaagtcctccttcgcgggctcccggctcccttcggccacgcgcaccaccaccccgtcgtccgtagccgtggccaccccgcgcgccggcggcggccccatccgcgcgtccatctcctcctcccccaccccgc

SEQ ID NO: 40928 - DNA, 189 bp, Zea mays
agttcttccagtttgtttcaaagatgagccgaggtgaacttattatagaagataatcaagtaaaagaaggttcagcatcccaatccagtggctgggctgatgaatttcaaacaccgtacattgctaatgcaaactcatgggcagatcagtttgcacatgaagagctttcacaaggggcggataagtggg

SEQ ID NO: 40929 - DNA, 120 bp, Zea mays
ggcgccatgatgacggcgctcaaggccgcgacggccgcgaccttcggcgggtcgatgctggtgctgtccgggctgatcctggccggcaccgtgatcgcgctcacggtggccacccccgtg

SEQ ID NO: 40930 - DNA, 275 bp, Zea mays
cacagccgctcatcgtctcccactgcctgcactctccctgcgccggccggtgccccgacgcgccatgtcgtacaacaaggccccgtccatcaccgccgagaccataaatcccagggtcaagatcatcagatacgcgccttgcggggagatcgtcaagcacgcagcgcggctggagcaggagatagaggagaaccctgcttctatccctttccaagagataatatactgcaacctcgggaacccccaggtccttggtcagcagccactaactttct

SEQ ID NO: 40931 - DNA, 160 bp, Zea mays
cggctcgagggcagaggaggtggtccaactcatctggccatattatctcagccaccagacacgatacatggatcacttcgtgtaacagttcaaggcgaagttattgagcactcctttggagaggagctcttgtgcttcagaactttgcaacgctacactg

SEQ ID NO: 40932 - DNA, 275 bp, Zea mays
agcctttgctgctaagtaccgtcatgaggtgctcaaggagtctggccctgatgggcttgatgtcacattggcgttctttggcgatggtacctgtaataatggccagttctttgagtgtctgaacatggcacagctttggaagcttcctattgtgtttgttgtggagaataacctgtgggcaattggaatgtcacacattagggctacatcggacccagagatttggaagaagggtgcagcatttggaatgcctggggtgcatgttgatggtatgg

SEQ ID NO: 40933 - DNA, 159 bp, Zea mays
cccacacagaagcggcggcggcggacaaacgcaggcgaaggcgagggtgtgagggaaggagcaccagccatggtgcacgtcaacttctaccgcaactatggtaagacgttcaagaaaccaaggcgtccttatgagaaggagcgtcttgatgctgaactg

SEQ ID NO: 40934 - DNA, 127 bp, Zea mays
gcgacggcaacgtggtgctggcccccgccaacccgcgcgacgagcaccagcactggtacaaggacatgcgcttcagcacccaggtcaaggacgaggagggcaaccctgcgttcgccctcgtcaacaa

SEQ ID NO: 40935 - DNA, 284 bp, Zea mays
acagggccaaggtgctggacattgacctgcagaagcagctcaggacctacatggagtccatggtgccacttcccggtgtctatgatccggacttcatcgccgctaaccagggctctcgtgccaacaatgtcatcaagggcaccaagaaagaacaggtggagcagatcatcaaggatatcagggagtttaaggagaagaacaaagtggacagggttgttgcgctgtggactgcaaacactgaaaggtacagcaatgtatgcgctggtctcaacgacacaatggag

SEQ ID NO: 40936 - DNA, 128 bp, Zea mays
atggctgtcggagtcatcaagagtgtggagaagaaggacccaactggagccaaggtgacgaaggctgctgccaagaagaaatgatctatctgtctggagctgtgcttgcttgttggttacctcgtgga

SEQ ID NO: 40937 - DNA, 140 bp, Zea mays
cggactccagcatatgtagctccagaggtgatcagcaagacaggctatgatggggcaaagtcagacatctggtcctgtggtgttgttctatttgtactagttgctggttatcttcctttccgggccccaaacatgatggg

SEQ ID NO: 40938 - DNA, 272 bp, Zea mays
cgctcgtctgtatgaaacgaaggaggaggtacgcacgccgctactgcaagctagcaagaagaggccgctagcagggggttttgcttgatttctggcggacgacatgagcacggccacgggcgtgcggccggagcggcggttcacggtggggcggacgaggacgccacgcacccggacaccatccgcgccgccatctctgagttcatcgccaccggcatcttagtcttcgccgccgagggatccgtcctctcgctcgggaagatgtaccacga

SEQ ID NO: 40939 - DNA, 152 bp, Zea mays
agaatttgttgttgcccatatccttgggtggtggggcaaagctgtaatgatacgaaatcaacttctactttgggtcttgtcgattggctttgagctaatggagctaacgttcagacatatgctgccaaactttaatgagtgctggtgggata

SEQ ID NO: 40940 - DNA, 274 bp, Zea mays
agcgcgtccacctcccaaacccctactcccccaggaagcaatggcttcccccacccagggccaggtcatcacctgcaaagcggcggtggcgtacgagccgaacaagccactcgtgatcgaggacgtgcaggtggcgccgccgcaggccggcgaggtccgcgtcaagatcctcttcaccgcgctctgccacaccgaccactacacctggagcggcaaggatcctgagggtctttttccttgcattcttgggcacgaagctgctggaattgtggaa

SEQ ID NO: 40941 - DNA, 171 bp, Zea mays
agcggctgccgcgacctcggcgaggcgctccgcagggtgcgcgaaggcgccgccatgatccgcaccaagggggaggccggcacgggcaacgtcgtcgaggccgtgcgccacgtgcgctccgtcatgggcgacgtccgcgcgctccgcagcatggacgacgacgaggtcttc

SEQ ID NO: 40942 - DNA, 314 bp, Zea mays
ccaccctccagcgcctccaccctcctcgccgcctcactccctctgaggtcgcagatccgtccggatagacgaagccgcccgcacccatggcctccggtgagctcgcctgcacctacgccgccctcatcctcagcgacgacggcatcgccatcaccgccgagaagatcgccaccatcgtgaaggcggccaacatcaaggtcgagtcctactggccggcgctcttcgctaagctcctggagaagcgcagtgttgaggatctaatcctctccgttggatctggtggtggcgctgctccagttgctgctgccgcccca

SEQ ID NO: 40943 - DNA, 314 bp, Zea mays
aagccgccaccaggtgcagagtctttcgtcatctcttctccggcgaagaacccccagtcgcccaccagatcacttgttaaactttgttgaggggtgatggcggtttctttcgcaaacctcagctccgaggcagggcttaaaaagcttgatgagtaccttctcactcgcagctacatcactggctaccaagcttccaaggatgacttggctgtctacacttcgttttcgtctgctccctcgtccaagtatatcaacgtagcaaggtggtttaatcacattgatgcgctcgtgtagatgagcggaattactgcaga

SEQ ID NO: 40944 - DNA, 309 bp, Zea mays
ggcaactaccgcgtcgccgagctggaagccgcgccgcgcacgttcctgcagcccagccactacgacgccgacgaggtgatgttcgtgaaggaaggcgagggcgtcatcgtgctgctccgcggcgggaagagggagtcgttctgcgtcagggagggcgacgtcatggtcatccccgcgggcgccgacgtgtactcggccaacacgcaccagtcggaatggttccgcgtcgtcatgctcctcagccccgtcgtctccacgtctggacgcttcgaggagttcttccccatcggaggcgagaccccgagtcct

SEQ ID NO: 40945 - DNA, 317 bp, Zea mays
cacgggcacacctttgcctcgcccaaccgctgcctcgctcgcgtccgccattccccagacctcgagagctaccgtctggtccgatcggacggaccccttcgcgcgccccagagatttcaggtaaggtgctgtaacagaagatgcaagggggaagacgtgggaggcagggcttattcggtttcggggacccttctggtggttccggtggctttggacaaccagggagccttatgcctggtttttttggtggcgcaaatccctttgacgaccctttcttcacaaacccctttggtagcatgatgcagactagtttctca

SEQ ID NO: 40946 - DNA, 259 bp, Zea mays
gagcatatgacagtgacagacacgatggtgagcgccaggattgttgtggtcgtcggcaccctcctatgcgctgccgccgcagtcgcgtcgtcgtgggaggacgacaaccaccaccaccacgggggccacaagtccgggcaatgcgtgcggcggtgcgaggaccggccctggcaccagcgcccccggtgcctggagcagtgcagggaggaggagcgggagaagcggcaagatccgacaggcacgaggccgacgaccgcag

SEQ ID NO: 40947 - DNA, 291 bp, Zea mays
  unsure (1)..(291): unsure at all n locations
gcagctcgcaccagctagtcagcatcgtcttcgaggccgagaggcttaagggctccacgctgctcaccaacggagtgataacggatgggtcagacgagtgggcgatctacggtggcaccggggtgttcgccatggccaccggtgtcatacgaagaaggtttgtcgccggtagcaacgacggcaactctgatgagcttaccagcatcgaagttttctgcccggcgtttggctcggcacaaccacagctanacaagcaggactccgtctctgtcaccaggattggggtatcgg

SEQ ID NO: 40948 - DNA, 303 bp, Zea mays
ctggagtcgaagaaggagataccgtcagcatgcattatgatccaatgatagccaaacttgtagtatggggtgaaagtcgcacggctgcactagtcaagctaaagaagtgtttatcaacctttcagattgcaggtttgccaaccaatgttgatttcctccaagaactcgcaagccacagtgcctttgaaaaaggcctagttgacactcacttcattgaacgttataaagatgaccttttgagtatttctacaaagtcctcaaaagaatctcatggtgtagctgagcttggtgcaattttggctg

SEQ ID NO: 40949 - DNA, 307 bp, Zea mays
attgactccaccactggtggttttgaggctggtatctccaaggatggacagacccgtgagcatgctctccttgctttcacgcttggagtgaagcagatgatttgctgttgcaacaagatggatgccaccacacccaagtactccaaggcccgttatgatgagattgtgaaggaagtctcttcctacctgaagaaggttggatacaaccctgacaagatccacttcgttcccatctctggtttcgaaggtgacaacatgattgagaggtccaccaaccttgactggtacaagggcccaaccctacttg

SEQ ID NO: 40950 - DNA, 307 bp, Zea mays
caacactcaccgatagcaagtagcgccgccgacgtttcgagagcagagtatccaagctagccaagcgcgcacctcggtgacctagctagctacctagctagttcaggcgacgatatggcgtctggtcaggagagcaggaaggagctggaccgcaaggctcgcgagggcgagaccgtcgtccccggcgggaccggcggcaagagcgtcgaggcccaggagcacctcgccgaagccgcggaggccagactcgcagggagcagctggggcagcaggggtacagcgagatggggaagaagggcggtctgag

SEQ ID NO: 40951 - DNA, 297 bp, Zea mays
gaacagcgaccggtgccagaagagatgccagcaccacagcgactggatgaaaaggctgcggtgcatgcaacggtgcgggcgacaggaggagggcggcgcacgcgacgacgctgacgacgaggccagccacggcgaccggtgcgagaagaagtgccagcagcaccaccgcgactacgacaagaagcagcagtgcgtgcgcgactgccgccgcggccgtggctgggaaacggtggccggcgccatccttgaggtggtgtgacgatcgacgacgtgcatggcgtggcgcacagagctagt

SEQ ID NO: 40952 - DNA, 303 bp, Zea mays
caggcagctcgagagagagagagagagaaagatgtcgtggttcgggcaccaccaccacaaccagccggactcccccggcgtcgggccccaaccaggtgttcaagatcttctgccgcgccaacgagaactactgcctggccgtccgcgacggcgccgtcgtgctggccccggtcaaccccaaggacgaccaccagcactggtacaaggacatgcgcttcagcacccgggtcaaggacgaggaaggcatgccggcgttcgcgctcgtcaacaaggccacggggctcgccatcaagcagtccctcg

SEQ ID NO: 40953 - DNA, 312 bp, Zea mays
  unsure (1)..(312): unsure at all n locations
ctctgcaaaaggctataaaactcgtggaatggcatatgccatgcttggcaaatgggaggaagctgctcatgatctgcacacagcatctaacatggattacgacgaggagatcaatgctgtgctcaagaaggtggagcctaatcctcacaagatagtggaacatcgcaggaagtatgagaggttgagaaaagagacggaggaaaagagagcgcacgcngatcggcttcgtcaacgtgcagaagcgcaggctgcttacgacaaggccaagaggaaggagcaatcgtcaagtcgctcatcaagaggtgcatctcc

SEQ ID NO: 40954 - DNA, 302 bp, Zea mays
aacaattttatattgataatgtgcttccaaggatcaaggagaaaaagataatgtctatcaagccatttgttgataggttaggatatgataatgttccaatggagattaaccgactgaagtgccgagttaattatcatgctttgaagtttttacctgacattgaagaaatggctgacaagctagcaacaaggatgaggaatcgaacaggaagtttaaatccatacatggctcttcacttgcgatttgagaaaggaatggtgggcctttcattttgtgattttgctggaacccgggaggagaaa

SEQ ID NO: 40955 - DNA, 294 bp, Zea mays
atctcaactcacccgatcgcgcctgcagtcttgcaaagcaggcttttgacgaggccatctcggaactggacaccctgagcgaggagtcctacaaggacagcactttgatcatgcagctccttcgtgataacttgaccctatggacttctgacatctcggaggaccctgcggaagagatcagggaggcgcccaagcacgactcgatcgaggggcagtaaagccggctttacgtgcctagaagctagtacctagtgtttgctgctgtctaatgacactatgcaatgtgatctggac

SEQ ID NO: 40956 - DNA, 297 bp, Zea mays
agaagatcgtgcgcgacacctgccgcgagatcgggttcacctccgacgacgtgggcctcgacgccgaccgctgcaaggtgctggtgaacatcgagcagcagtcccccgacatcgcgcagggcgtgcacgggcacttcacgaagcggcccgaggagatcggcgcgggcgaccagggccacatgttcgggtacgccaccgacgagacccccgagctgatgccgctgagccacgtgctggccaccaagctgggcgcgcgcctcaccgaggtgcgcaagaacggcacctgcgcctggctga

SEQ ID NO: 40957 - DNA, 299 bp, Zea mays
acggtcgcttcgaccgcagcgcttgggaggcgtacgtgctcgccaacaagttcttcttcgagaaggtcgtcgaggtaatcaacccggaggatgactacgtttgggttcacgactaccatctcatggcgctgcctaccttcctccgccgctgcttcaaccgcctccggatcggattcttcctccacagccccttcccctcgtccgagatctaccgcaccctccctgttcgggaggagatactcaaggacgtgctctactgtgacctaattggcttccacacttttggatacggcaggcac

SEQ ID NO: 40958 - DNA, 305 bp, Zea mays
gtaacacaaggctgaatttttgttcggtctagccgacccgacgatggcgtccagcgacgggaaaccactgccaaccccggcctctgtgggcggcggcggcggcagcagcaccgcgccgcccgggcagccgaccacggtagcgtccaaggtgctggacatgggcgcggcggcgatgcagtcgttgcgccccgtgaagcaggcgaacacgcacatgtgcacgttcgcgctgtacgcgcacgacccgaagcggcaggtggagacgcaccactacgtctctcgcctcaaccaggacttcctccagtgcg

SEQ ID NO: 40959 - DNA, 291 bp, Zea mays
acacaagctatttgtgacttagctctgcgctttggcgaaggtgacgaagagtcaatgtcacggccatttggagtctactctcctaattgctggacacgatgagaatggacctagcctgtactacaccgacccatctggtactttttggcaatgcaacgcgaaggcaattggatctggctctgaaggagctgatagctccttgcaggagcagtacaacaaggagctggcccttgaggaggcggagaccatagccctttctattctgaagcaggttatggaggagaaggtgac

SEQ ID NO: 40960 - DNA, 230 bp, Zea mays
ctcgctgccaccactcctgtcacctcttcccgcgccgacgcagccgccatggaccccgtcgccacatgggggctaaccccgctcgcgggcgccgacccggagatctacgacctcctggagcgcgagaagcggcgccagcgtcgcggcatcgagctcatcgcctccgagaacttcacctccttcgccgtcatggaggcgctcggctccgcgctcactaactcgtactccga

SEQ ID NO: 40961 - DNA, 294 bp, Zea mays
ctcaccagcaatccctagcagaagccttccatcctcactcgctcgatggcccgcacgaagcagacggcgaggaagtccatcggcggcaatgcgccgatgaatcagctggcgactaaggcggtccgcaagtctgcccctgcgaccggccgaattaagaagccccaccgcttccgccccggcaccgtcgcgctccgggagatccgcaagtaccagaatagcacggagctgctgatacgcaagctgccgttccagcgccttgtgcgggagatacacgcagactttcaagacgactac

SEQ ID NO: 40962 - DNA, 222 bp, Zea mays
agactcgatgcgagtgatgctacatgtattatttgccgtgaggatatgactacagcacagaaactgctctgtgggcatctgttccatgtgcattgtctgaggtcatggctagagcgccaacacacttgccccacgtgcagagctccaatcgttcctgcagataatggacgtgctgcatcatcacgacaacatggagcccaagctgggggtcaaccttgtact

SEQ ID NO: 40963 - DNA, 178 bp, Zea mays
aacacacccgagcatatcacagtgacagacacgatggtgagcgccagaattgttgtcctcctcgccaccctcctatgcgctgccgccgcagtcgcgtcgtcctgggaggacgacaaccaccaccaccacgggggccacaagtccgggcaatgcgtgcggcggtgcgaggaccggccct

SEQ ID NO: 40964 - DNA, 274 bp, Zea mays
gacaacactcaccgatagcaagtagcgccgccgacgtttcgagagcagagtatccaagctagccaagcgcgcacctcggtgacctagctagctacctagctagttcaggcgacgatatggcgtctggtcaggagagcaggaaggagctggaccgctaagctcgcgagggcgagaccgtcgtccccggcgggaccggcggcaagagcgtcgaggcccaggagcacctcgccgaagggcagcactgcggaggccagactcgcagggagcagctggg

SEQ ID NO: 40965 - DNA, 291 bp, Zea mays
gtttcgcgtccgcctcagcccgccgcaaggagaggtaagttcaggagacatcttcgagaagctgaaatggctcctaaagctgctcctgccaagaagggtgatgccaagacccaggccttgaaggttgccaaggctgtgaagtctggggcagccaagaagaagaccaagaagatccgcacgtctgtgacatttcaccgccccacgaccctgaagaaggctagggaccccaagtacccacgaatcagcactaccggaaggaacaagcttgatcagtaccaattctcaagtacc

SEQ ID NO: 40966 - DNA, 317 bp, Zea mays
ccgccccgctccttgcctccgatccccaattcctccttcggatctcgcattcagcgcagcaggtgtgaaggaagggggacgcggaggaagatggggctcgcgttcgggaagctcttcagccggctcttcgccaagaaggagatgcggatcctcatggtcggcctcgacgccgccgagatgagctccacaggatgctgaacgaggatgagctacgtgatgctgtgctgcttgtttttgccaacaagcaagatcttcccaatgccatgaatgctgctgagattactgacaagcttggattacactccctgcgccacgac

SEQ ID NO: 40967 - DNA, 172 bp, Zea mays
agattggattcgtaactggtgagggactgaaggtctcggagtggattgatttgggattctgttcgaagatttgcagaggggggcaatggcgaccgcggggaaggtgatcaagtgcaaagctgcggtggcatgggaggccggcaagccactgtcgatcgaggaggtggaggta

SEQ ID NO: 40968 - DNA, 311 bp, Zea mays
aagaattttaacgagggcatcttcagatttgagcattctagacttcgacataccttactccatggcttttgtggcgacgggcggcattgaggttgttaccacagtactggtcatgggtactgtaacttggcaagtcctggttgtagcgatcccagttgctgtcaccatgatatatgttcagaggcactacgtttcctcagctagggagctagtaagactcaacggaacaacaaaggcacctgtaatgaactatgcatcagaatcaattctcggtgtggtgacgatcagggcatttgcagcaactgagaggt

SEQ ID NO: 40969 - DNA, 312 bp, Zea mays
gcgcgtcgcgcgctccgccggcgggccggcggaggcgaggagctatccgtggaggagcgcaacctgctgtccgtcgcctacaagaacgtcatcggcgcaccacgcctcgtggcggatcatctcctccatcgagcagaaggaggacggccgcgggaacgaggcgcacgccgcctccatccgcgcctaccgctccaagatcgagaccgagctcgcgcgcatctgcgatggcatcctcgccctgctcgactcccacctcgtcccatccgccggcggcgccgagtccaaggtcttctacctcaagatgaagggtga

SEQ ID NO: 40970 - DNA, 311 bp, Zea mays
acatggttgatgggtgggttggacatgcatagtccagcagcatggggcctgagtgttggagcatctggttggggtcatcagggtgacacttctacttcactcatgcctggggtgcaaactgctggaccaagttctacgggaggagccgacattcaacctctgcaggttgacgagaatgtgagctttaaagatataggtggactttcggagtacattgatgctctaaaggaaatggttttctttccattattgtatccagatttttttgcaaactatcacatcactcctcgcagaggtggtctgctttgtgg

SEQ ID NO: 40971 - DNA, 301 bp, Zea mays
ctcggctcctcgcagtcgctcactgcgtgcgccaaaagcagcagcagctccagccgtcgccgtctccactctccagtctccagcactgctccgcgcgcgccggatcgagggaaggcaggcggacgaggaggagagatgagtctcttcgggcttggacgaaaccagaagacattccgccccaagaagagcgctccatcaggtagcaagggagcacagctccgaaagcacatagatgccactctcggcagtggaaaccttagggaagctgtgaggttgcctcctggagaggatatcaatgaat

SEQ ID NO: 40972 - DNA, 304 bp, Zea mays
actggcccccgtgaggatgccacccgtattggttccgctggtgttgtgagaaggcaggccgtggatatctcacccctgaggagggtgaaccaggccatctacctcctcaccactggtgccagggagagtgctttccggaacatcaaaaccattgccgagtgccttgcagatgagctgatcaacgctgccaagggctcatccaacagttacgccatcaagaagaaggacgagattgagcgtgttgccaaggccaaccgttgaacggagcttgtatcctggtgcactctgcgctggaaacttttat

SEQ ID NO: 40973 - DNA, 304 bp, Zea mays
tagatctccaggactcacctccccaaccgtttgcctccgtctcgcgtgacttcattcccagcagccggcggcgacctccacgtggtgccattcgccggcaacgagcacccgcccaccaggatccaggtttgtgctgcgagagcgcctatccattcaccatgattaatttcgtgctcctgatcagccgccagggcaaggtgaggctcaccaagtggtattctccttacacccagaaagagaggaccaaggtcattcgcgaactcagtggactcattcttacacgagggcccaaactctgcaattt

SEQ ID NO: 40974 - DNA, 300 bp, Zea mays
ggagaatggagctgcgattggctgccactcctgccagaacaaaaccctggaagagaggcctccggagtactccttccgcaggcactcagggtggccttccagttcatcacatcctcacctcacaagccagtagtcttctacagaacgtgggctccctcgcattttgagaacggcgagtggttcagcggcgggacttgcaacaggacggccccattcaagccaggggaggccggtgacagagaatgggacaatagtatgtggaggattgagagagaagagtttcacaacgcggtgcctatc

SEQ ID NO: 40975 - DNA, 294 bp, Zea mays
aagaccgcgcgggaagccgctaagggtgagaattccagcgtgcaagaagtgccagaaactgatgtcagtcaagacttggagaagcagggcactgttgggtctgatacgtctaatgatgctgagaggttgagggaagagcaagcggccgtgaaggcacaagctgccttccgtggttatctggcacgccgagcattccgtgccctgaacaggatcataagactacaggcactgattcggggacatcttgtaaggaagcaagctgtttcaactctccgtgccacatggttgaatgtg

SEQ ID NO: 40976 - DNA, 215 bp, Zea mays
ctctcgagtctcgtccacccgtcatcctcctagctcctctactcgccagtcgccatgggcaagattaagatcggaatcaacggcttcggaaggatcggcaggctcgtggcaagggtcgccttcaagagcgaggatgtcgagctcgtggcggtcaaggaccccttcatcacaagggactacatgacctaaatgttcaggtaggaaacggtcaaggg

SEQ ID NO: 40977 - DNA, 297 bp, Zea mays
gctgaggaccctgacagcaaggatgcttgcaagacctgcaccaagaccaacatggtcatggtctttggtgagatcaccaccaaggccaatgtcgactacgagaagattgtcagggagacatgccgcaacattggtttcgtgtcgaacgatgtcgggacatgacgctgaccactgcaaggagcttgtgtaaattgagcagcagtcccctgatattgctcagggtgtgcacggccacttcaccaagcgccccgaggagattggagctggtgaccaggggcacatgtttgggtatgcgac

SEQ ID NO: 40978 - DNA, 185 bp, Zea mays
atagacgctcgacgagatggtctccaacggcaccctcagcccggagctcgctatccaggtcctcgtccagttcgacaagtccatgacggatgctctggagaaccaagtgaagagcaaggttactgtcaagggtcacctgcacacctacaggttctgtgacaacgtgtggaccttcatcttgacag

SEQ ID NO: 40979 - DNA, 103 bp, Zea mays
atggagagtccggcttgcaataattgagtacatcccattgctggcgagtcagttaggtgttgggttttttgatgacaagctgggggcactctgcatgcaatgg

SEQ ID NO: 40980 - DNA, 295 bp, Zea mays
attggatcccagctctcctacatactcccaggtgatccacaggctcccggtcacccacatcggcgacgagctgcatcactctggctggaactcctgcagctcctgccacggtgacccatcggccaatcgccgcgtcctgatcctgccttccttgctgtcaggccgtgtgtatgtcgtcgacacagcgacagacccaagggcgccatccttgcataaggtggttgagtctgaggacattgctgagaatactgggcttgggttccctcacacgtctcattgccttgcgtctggcgaa

SEQ ID NO: 40981 - DNA, 293 bp, Zea mays
tggtccggagcgagcaggggtccctgagggtgctccggcccttcgacgaggtgtccaggctcctccgcggcatccgggactaccgcgtggcggtcctggaagcgaacccgcgctcgttcgtggtgcccagccacaccgacgcgcactgcatctgctacgtggcggaaggcgagggagtggtgacgacgatcgagaacggcgagaggcggtcatacaccatcaagcaaggccacgtcttcgtggcgccggccggggcggtcacctacctggccaacaccgacggccggaagaaa

SEQ ID NO: 40982 - DNA, 298 bp, Zea mays
gtcccggtgcttctcctcctggtctccctgtgcttctcgctcgcgctcgcgtggcaaacggacacggaatcgggctcaggcaggccgtaccactacggcgaggagagtttccggcactggacgcgctcccggcagggccggttcagggtgctggaacggttcacccacgagctgctggaggacgccgtcggcaactaccgcgtcgccgagctggaagccgcgccgcgcacgttcctgcagcccagccactacgacgccgacgaggtgatgttcgtgaaggaaggcgagggcgtcatcg

SEQ ID NO: 40983 - DNA, 168 bp, Zea mays
aagaggaggagattgcagggctgaaggaaatgttcatggcaatggatacagataatagcggtgcaattacatatgatgaactgaaggaaggattgagaaagtatggctccacattaaaggatactgaaattcgtgatctcatggaggcggcggatatagacaacagtg

SEQ ID NO: 40984 - DNA, 295 bp, Zea mays
caacaggccaaaacctggtggtgatgttactcttggggagttgctcaagaggaaggccagtgaaggtgtccgggtgcttatgctggtgtgggatgacaggacttctgtcggcctgcttaagaaggatggcttgatggctacccatgatgaggagactgcaaattacttccatggcacggatgtcaactgtgttctgtgccctcgcaaccctgatgattctggcagctttgtccaggatctgcagatatcaactatgttcacgcaccaccagaagatagtagtagtcgaccatgag

SEQ ID NO: 40985 - DNA, 290 bp, Zea mays
gcccgatcccgatccagcgaggcggcgaccctccctcctccccttgcttcgctcgtccagccctgaccacccgcatccccgtcagtcatggcagcggcagcaggcggaggcgcggtgcgtgcgctgtcccagaaggagcaggacatacagatgatgctcgccgccgacgtccaccttggcaccaagaactgcgatttccagatggagcgctatgcctttaagcgccgcaccgacggcatctacatcatcaaccttggcaagacatgggagaaactgcagcttgcagcgag

SEQ ID NO: 40986 - DNA, 93 bp, Zea mays
atacgaagcgcaccatccagttcgtggactggtgcccgaaggggttcaagtgcggcatcaactaccaggcgccgacagtagtgccgggtgccg

SEQ ID NO: 40987 - DNA, 293 bp, Zea mays
  unsure (1)..(293): unsure at all n locations
gtttcatgctacgtttctgatgatggtgctgccatgctgacatttgaagcattgtctgaaacatctgaatttgcaaagaaatgggttcctttctgcaaaagatatagccttgagcctcgtgctccagagtggtacttccaacagaagatagactacctgaaagacaaggtggcgccaaactttgttagagaacggagagcaatgaagagagagtatgaggaattcaaggtcagaatcaatgccttggttgctanagcccaaaaggttcctgaggaaggatggacaatgcagga

SEQ ID NO: 40988 - DNA, 268 bp, Zea mays
catccatctgttctgcagtccacccattccattccactacccacgcgcagaattcacgcgaacgcacacgcacccacacgacacatccagatgatgcttagggtttccccgtccccggccgccgcggtgccaacccagctctccggtgcacccgcgacccgtgctcccgtcgtcagggtggcggcgccgcgcggcgtcgcgtcgccggccgctggcaccgcgtgcagggccgcgggcaaggggaaggaggtgctcagcggggtcgtgt

SEQ ID NO: 40989 - DNA, 289 bp, Zea mays
cgaaaccaaggattgatccaggagcttccggaaggcgaggcgcgcgcgcacgtgcgaggtgctggtgccggtgccgcccatggatcgggctcgcggatccgcgttcctgctcggcgtcctgctcgcaggatccttgttcgcgttttcagttgccaaagaggagaccaagaagctcgggaccgtgatcggtatcgatctcggtaccacctactcctgtgtcggtgtgtacaagaacggtcatgtcgagatcatcgccaatgaccagggtaaccgtatcacagcctcatgg

SEQ ID NO: 40990 - DNA, 319 bp, Zea mays
cacccgactcgtcagacgtcagccagcagttcgaaaccaaggatcgatccaggagcttccggaaggctaggcgcgcgcgcagcgtcgaggtgctggtgccggtgccgcccatggatcgggctcgcggatccgcgttcctgctcggcgtcctgctcgcaggatccttgttcgcgttttcagttgctaaagaggagaccaagaagctcgggaccgtgatcggtatcgatctcggtaccacctactcctgtgtcggtgtgtacaagaacggtcatgtcgagatcatcgccaatgaccagggtaaccgtatcacaccctcatg

SEQ ID NO: 40991 - DNA, 320 bp, Zea mays
acttgctggcggtttcttctcgtccggtcgccatggtgcacgagacgagatcacgggtgcacgcagctgcccaggaagaaggcaagctcgcctcaaaaaagcagaaaccagataatgaaaccaaggaaaggggccagaatgtgccctccaagaacaagaagtctgccgacaacgaagggaaagacggggagccggagggccaacaaagagcaagaagctcaaagctgaggaatctgagccaaatgggagggaagctgctgcaagagagtttgcagagttttgcaaggccataggagaacgcctctccctcgaggacatgc

SEQ ID NO: 40992 - DNA, 320 bp, Zea mays
agaggatgttgatgagaaggaagagaaaaaagatgctgaagaaggaaaggttgaggatgttgatgagaaggaagagaaagaaaagaagaaaaagaagatcaaggaggtttctcatgagtggtcattggtcaacaagcagaagcccatatggatgaggaagccagaagaaatcacaaaagaagaatatgctgccttctataagagcttgacaaatgactgggaggagcatctggctgtgaagcacttctctgtggagggtcaactggagttcaaggctgttctctttgttcctaagagggcccctttgatctctttgacac

SEQ ID NO: 40993 - DNA, 320 bp, Zea mays
gattatagggtttccgctaccgcagccacaccccaacatcaaatccctcccatctcttcccctccgccgccgtctctgctctccaagatcgcgatggcgtcagaaaagaagcagtcgaacccgatgcgggagatcaaggtgcagaagctcgtgctcaatatctccgttggagagagtggagatcgactcacccgcgccgccaaggtgttggagcagttgagtgggcagtctccggttttctccaaggcaaggtatactgtgaggtctttcggtattcgtcgtaatgagaagattgcatgctacgttacggtcaggggtga

SEQ ID NO: 40994 - DNA, 320 bp, Zea mays
gctggttgcaacggtcatggcgacgtcgtctcgtcgggtgcccttgctgctgctgtgcctgggcgtgctggtgtcgtgctgcttcgcggcgggcagcttggaccaggagctggacatcacgtggggcgacgggcggggcaaggtccttgacaacgggcggctgctgacgctgtcgctggaccgcacgtccggctccgggttccagtcccggcacgagtacctgttcggcaagatcgacatgcagctgcggctggtgccgggcaactccgccggcaccgtcaccgcctagtacctgtcgtcgcagggcggcgcgcacgacg

SEQ ID NO: 40995 - DNA, 282 bp, Zea mays
gacctccgcatttccaaacagcccgagctagctggagctagcagagcggcaggcacctccctcctcaaggaacatggcccgcacgcagcagttggcagtagtggcaaccgccgtggtggccttggtgctgctggcggcggcggcgaactcggaggcggccatcagctgcgggcaggtggcgtcggccatcgcggcctgcatgtcatgcgcacgcggcaagggctcggggccatccgcaggctgctgcagcggcgtcaggagcatcaacaacgcagcccgcac

SEQ ID NO: 40996 - DNA, 325 bp, Zea mays
  unsure (1)..(325): unsure at all n locations
cactcgcactcgcacgtacaccacactagttaccacagacgacgggcgccatgaaagtcccggtgcttctcctcctggtctccctgtgcttctcgctcgcgctcgcgtggcaaacggacacggaatcgggctcaggcaggccgtaccactacggcgaggagagtttccggcactggacgcgctcccggcagggccggttcagggtgctggaacggttcacccacgagctgctggaggacgccgtcggcaactaccgcgtcgccgagctggaagccgcgccgcgcacgttcctgcagccnagctactacgacgccgacgaggtgat

SEQ ID NO: 40997 - DNA, 316 bp, Zea mays
  unsure (1)..(316): unsure at all n locations
acgcttcttgcagccgtcgccgcgaacgctccagagaacttccgacaacatggggaagacacgtggtatgggagccgggcgcaactcaagacccaccgcnagaaccagcggtgggctgacaaggcatacaagaagagccatttgggcaatgagtggaagaaacccttcgctgggtcatcccatgccaagggcattgtcctggagaagattggtattgaggccaagcagcccaactccgctatccgtaagtgtgcacgtgttcagcttgttgagaatggcaagaagattgctgccttcgtgccaaatgacggttgtt

SEQ ID NO: 40998 - DNA, 308 bp, Zea mays
atctcgttcatgcagtttgccaacaagaactcgatgaggaacatctatatcatcggactctcgttgttccttggcatctcggtccctcaatacttcaacggatacacttcttcagctggcggccacggacctgcccggacaaatgctggatggttcaacgacattataaacaccgtgtttgctatccgggccgacggtggcgctaattgtcgcttctgtcctggacaacacgctggagttcaggggctacgaggccgaccgggggctctcgtggttccagccgttcctgcgccgccataacggatact

SEQ ID NO: 40999 - DNA, 295 bp, Zea mays
gtgggtgtgccacataaggacgctgagttcaagacccacccgatgaacttcctgaacgaaaggaccctgaaggggaccttctttggcaactacaagccacgcactgatctgccaaatgtggtggagctgtacatgaaaaaggagctggaggtggagaagttcatcacgcacagcgtcccgttcgccgagatcaacaaggcgttcgacctgatggccaagggggagggcaccgctgcatgtccgcaggagaactagattcgctgtctagttgtgatctggctgggcatgggtaata

SEQ ID NO: 41000 - DNA, 310 bp, Zea mays
attatgcgtcccctcttgccaagaggtgcatggctgtctaccagacatacataaactccatgaatgaaaggataaggaaccagtttgcgcaatccaacccgttccatttcaagcacatcgagtccttgaatagcatcgataacttccacgatgtgggtccatcagtggtgatggctagtccaagtggcctccagagtggtctctccaggcagctttttgataagtggtgcacagataagaggaatgcatgtgttattccaggttacgttgtggaggggaccttgcgaagaccattatcaacgaccaagag

SEQ ID NO: 41001 - DNA, 312 bp, Zea mays
  unsure (1)..(312): unsure at all n locations
agcagggcttcctcgtaagcaagtcatccatgcatggatggatgcgcgcgtgcgtgtctgtcagtatcagcagggtcgtcgaggaatgctgtgttcctgtacgtgtgggtgaccgtcctttggtcgtctttctcccccgagtgtgtgttacgtatgtcctggtgttcgtcgtgtgtgttcatcgccgctccagttgaattccggtgtctgttcatcgccgctccaggtcggagatgtgaatatactttgctaggggaataagtgtctaagtgataagtctgtctggtggaaggtanagtttgagctttgcta

SEQ ID NO: 41002 - DNA, 291 bp, Zea mays
ggagaattcctcccttgccccgccgtcgcatcctcttcgaagttcgaatcgaatcgcgccgcgatcacccacctcatggcggacaaggagcctgtcgtggagcggccagaagcgggtgacgaggaggaggacgcctcagccgccgccgccgctggggaggaggaggacacgggcgcccaggtggctcccatcgtgcggcttgaggaggtagccgtcaccaccggcgaggaggacgatgacgtcctgctcgacatgaaggcgaactgtaccgattcgaccaagacggtaacc

SEQ ID NO: 41003 - DNA, 273 bp, Zea mays
attggccttggcttcaagactcccaaggaagcaatcgaagggacctacattgacaagaaatgcccattcactggaactgtttctatcagaggcagaattattgctgggacatgccacagtgctaagatgaacagaactatcattgttcgcaggaactacctccactttgtaaagaaataccagaggtatgagaagaggcactccaacattcctgctcacatctctccatgcttccgtgtgaaggaaggtgacgatgtcatcattggccagtgc

SEQ ID NO: 41004 - DNA, 305 bp, Zea mays
accaaactcggacacctatgtcatattcggcgaggcgaagatcgaggacctcagctcccagctgcagacccaagctgcagagcagttcaaggctcctgacctgagccaaatgatcccgaagcctgagacatctggcctgggcctggaggacaacgaggaggaggaggttgacgaaactggtgtcgaggccaaggatgtcgagctggtgatgactcaggcatctgtttcgaggcccagggcggtcaaggccctcaaagcttctaatggagacatcgtcaccgccattatggagctgactacttagt

SEQ ID NO: 41005 - DNA, 301 bp, Zea mays
cggcggacacggaggcgaaggaggaggagcagcagcagcaggcggcgccgaggagcggcatcccactcagtgcttgcaaccatggctaggggattgaagaagcacttgaagaggctcaatgcgcccaagcattggatgctcgacaagcttggcggagcttttgctcccaagccatcttctggacctcacaagtccagggagtgccttcctctgatcctcatcatcaggaacaggctcaagtatgctctgaactaccgtgtagtcatttctatcctgatgcaacgccatgtacttgttgatg

SEQ ID NO: 41006 - DNA, 305 bp, Zea mays
gtttcgtaactggtgagggactgagggtctcggagtggattgatttgggattctgttcgaagatttgcagaggggggcaatggcgaccgcggggaaggtgatcaagtgcaaagctgcggtggcatgggaggccggcaagccactgtcgatcgaggaggtggaggtagcgcctccgcaggccatggaggtgcgcgtcaagatcctcttcacctcgctctgccacaccgacgtctacttctgggaggccaaggtatctaatcagccatcccatttgtgatctttgtcagtagatatgatacaacaac

SEQ ID NO: 41007 - DNA, 304 bp, Zea mays
tctgtcttcttcaagaccactgctgatggttactcgctgtgcgccaaggagatgaccaagctctctggtatctcggacatcatcccagagatggagatctgtgacttcgacttcgagccctgtggctactccatgaatgctgttcatggccctgctttgtcgaccattcatgtgaccccagaggacggcttcagctatgcaagctacgaggtcatgggctttaacccgggctctttctcttatggtgacctggttaagacggtgctgaggtgctttggtccaactgagttctctgttgccgtga

SEQ ID NO: 41008 - DNA, 305 bp, Zea mays
atcgtgacatgtgctgagatctcgattgtcctatgttacttccagctctgcagcgaagattacctgtggtggtggaggtcgtacttgacttctggttcctctgcactctacctcttcttgtatgcaaccttctacttcttcacaaagcttgagatcaccaagtttgtctcagctgttatgtacttcggttacatgctcattgcctcgtacgccttcttcgccttgaccggcacaatcggattctatgcttgcttcctgttcacaaggctgatttactcatcggtcaagatcgagtaaggtgaagt

SEQ ID NO: 41009 - DNA, 308 bp, Zea mays
cagccatggcgaacgcagcttcttctctgtttcctactcgccgcctccgcgccgctaatcgtcgccacggccaagaaatccggggacgtgtcggagctccagatcggcgtcaagtacaagccggaatcatgcagcattcaagctcacaaaggtgacaaggttaaagttcactaccgtggaaaacttactgatggaacggtttttgattcaagctatgaaagaggtgacccgattgaatttgaattgggcactggacaagtgatcaaaggatgggatcagggtctcctgggaatgtgcgttggtgaaaa

SEQ ID NO: 41010 - DNA, 247 bp, Zea mays
atttttcaagaagacaggagaagggagttgtagtgagttttaagaatggcgagtgcacaggcagtggggcaaggagaacgaggccacttcgttctgaagagcggacacaccattccggccgttggtctaggcacttggagggccggctcagataccgctcactctgttcggaccgccatcgccgaggctggatataggcacgtggacacagctgcccaatacggagtagagaaagacgtcggtagac

SEQ ID NO: 41011 - DNA, 226 bp, Zea mays
atcagctggagttcaaggctgttctctttgttcctaagagggccccatttgatctcttcgacacaaggaagaagcaaaacaacatcaagctctatgtgcgcagggtgtttatcatggacacactgtgaggaactgatccctgagtggctgagttttgttaagggtattgttgactctgaggaccttcccctcaatatctcccgtgagactcttcagcagaacaaga

SEQ ID NO: 41012 - DNA, 327 bp, Zea mays
cccacaccgggcacaccccccgagctcagcttagctccactccagctccaatcacagtcgtgaccagagcgcgagagctagctagagggccgtgaaaatgccgatcaataggatcgccctggggagccaccaggaggtgtaccacccgggcgccctcaaggcggcgttcgctgagttcatctccaccctcatcttcgtcttcgccggccagggctccggcatggccttcagcaagctgaccggcggcggcccgacgacaccggcgggcctgatcgcagcggcggtggcgcacgcgttcgcgctgatcgtggcggtgtcggtgggcgc

SEQ ID NO: 41013 - DNA, 327 bp, Zea mays
cagacaacactcaccgatagcaagtagcgccgccgacgtttcgagagcagagtatccaagctagccaagcgcgcacctcggtgacctagctagctacctagctagttcaggcgacgatatggcgtctggtcaggagagcaggaaggagctggaccgcaaggctcgcgagggcgagaccgtcgtccccggcgggaccggcggcaagagcgtcgaggcccaggagcacctcgccgaatggcgcagcgcgtgaggccagactcgcagggagcagctggggcagcaggggtacagcgagatggggaagaagggcggtctgagcacaacgga

SEQ ID NO: 41014 - DNA, 324 bp, Zea mays
agctgatcacttgtcggctgaagaggttgaggacataaaggagatgttcaaggtgatggatactgataatgatggtatagtttcttatgaagagttaaagagtgggatcgcaaattttggttctcatcttgcagaatcagaagtgcaaatgcttatcgaagctgtggatacaaatggtagaggagcactagattacggtgaatttttggctgtctcgctccatttacaaaggatggcaaatgacgagcaccttcggcgggccttcctatttttcgacaaggatggcaacggtttcatcgagcccgaggagcttcaggaagcctg

SEQ ID NO: 41015 - DNA, 326 bp, Zea mays
acatggcggcggcggcggcggcggcggacaaggcgtggacgccgcgaggaaagaggaggaggaggagcaggtagtgaatccgtgggaggtgtcggcggggaagggcggcatcgactacgacaagctcgtggaccagttcggctgccagcgcatcgacgacgcgctcgtggaccgcatcgcacgcctcaccgcccgaccaccgcactgcttcctccgccgaggcctcttcttcgcccaccgtgatttgaacgagatactggatttgtatgagaacgggcagaagttctacctctacacggggagggggccctcgtcggaggcctgca

SEQ ID NO: 41016 - DNA, 323 bp, Zea mays
gcgtcatcgtgctgctccgcggcgggaagagggagtcgttctgcgtcagggagggcgacgtcatggtcatccccgcgggcgccgtcgtgtactcggccaacacgcaccagtcggaatggttccgcgtcgtcatgctcctcagccccgtcgtctccacgtctggacgcttcgaggagttcttccccatcggaggcgagagccccgagtccttcctcagcgtcttcagcgacgacgttatccaggcgtcgttcaacactcgccgggaggagtgggagaaagtgttcgagaagcagagcaagggggagatcacgacggcgtccgag

SEQ ID NO: 41017 - DNA, 327 bp, Zea mays
  unsure (1)..(327): unsure at all n locations
cgagtacccaacgcgctactagttctattgccgcaccccagatctccaggagggactcgttctttcagctaactacactgcacgcaatggccaccacggcgaccgaagcggcgccggcgcaggagcagcaggccaacggcaacggcgagcagaagacgcggcactccgaggtcggccacaagagcctgctcaagagcgacgacctctaccagtacatcctggacacgagcgtgtacccgcgggagccggagagcatgaaggagctccgcgaggtcaccgccaagcacccatggaacctgatgacgacctcgccgancgagggcagtt

SEQ ID NO: 41018 - DNA, 317 bp, Zea mays
agcgcctagacctagcaaccatggctggccagagggtttatgagttcaataaccagcaggatgtagcagctgggctggtagtgatgtcaaatgcatatatttcagccggtcagatcgataatgctgccgctgtgcgatcaagcatgaggctgcgtggcatacggaaggatcccgggtgcagctggattgaagtaaaggataccccccatgtgttctatgctggtgcagtatcatgcgctggtgcgtgggcagataaagttctgatgttgctagatgaattggagagtaagatgagggagagaggttacacggggaga

SEQ ID NO: 41019 - DNA, 321 bp, Zea mays
atctctaccgtccgataccccaagcaccagcgcggcggcggcgaccatggctgtcggaaagaacaagaggatctccaagggaaagaagggtggcaagaaaaagaccgtcgaccctttctctaagaaggattggtatgacatcaaggcaccgtcggtgttcagtgtgcgcaacatcgggaagactctcgtatccaggacacagggtaccaggattgcttctgagggtctgaagcacagagtctttgaggtttgcctagctgatcttcagggcgacgaggatcaagcttacaggaaaatcaggctccgtgctgaagatgtgca

SEQ ID NO: 41020 - DNA, 322 bp, Zea mays
gccaccgatcgctcctctccactttccacattccagttccactccgcctccgctgccggtcgccgactccgaaactccgacagtccgaccacaagaaggatgagtgaagaggataagactgctgcttctgctgagcagccgaagagggcccctaagctcaatgaaaggatcctctcttctctgtccaggaggtccgtagctgctcatccatggcatgatcttgagatcggtcctgatgctcctgctgttttcaatgttgttgttgagatcacaaagggaagcaaagttaaatatgagcttgacaagaaaactggactgatta

SEQ ID NO: 41021 - DNA, 322 bp, Zea mays
gtcgtcatgctcctcagccccgtcgtctccacgtctggacgcttcgaggagttcttccccatcggaggcgagagccccgagtccttcctcagcgtcttcagcgacgacgttatccaggcgtcgttcaacactcgccgggaggagtgggagaaagtgttcgagaagcagagcaagggggagatcacgacggcgtccgaggaacagatccgggagctgagcaggtcctgctcacgtggtggccgcggcagccgcggcgagggtggcgactcgggttcttcttcttcttccaagtgggagatcaaaccgtccagcctcacggaca

SEQ ID NO: 41022 - DNA, 323 bp, Zea mays
tcggcagctcgcaccagctagtcagcatcgtcttcgaggccgagaggcttaagggctccacgctgctcaccaacggagtgataacggatgggtcagacgagtgggccatctacggtggcaccggggtgttcgccatggccaccggtgtcatacgaagaaggtttctcgccggtagcaacgacgggaactctgatgagcttaccagcatcgaagttttctgcccggcgtttggctcggcacaacaacagccaaacaagcaggactccgtctctgtcaccaagattggggtatggggtggaggtggagggtcggcgcaggacatc

SEQ ID NO: 41023 - DNA, 323 bp, Zea mays
gcaagcagcgctcattagtcactagggttttaaactttccccccgatccgcctcgccgccggcgtcgtcctccgccggaaatccaccaccctacacccagccggagacgactatggtgggtttcggctcgatggcgggctacgggatccagtcgatgctcaaggaaggccaccgccacctctccgggctcgaggaggccgttctcaagaacatcgacgcctgccgcgagctgtccgccattacgcgcacctctctcggcccgaacggaatgaacaaaatggttatcaatcacttggacaagctgtttgtcacaaacgatgctg

SEQ ID NO: 41024 - DNA, 313 bp, Zea mays
agacaacgcaaagaaatacattgaggctggtgcatctgagcatgcaagaaccttgggcccgaaaggttcagacccacacaaggctgctgtcatcggtgacaccatcggtgatcccctcaaggacacctcaggcccctcgctgaacatcctcatcaagctcatggctgtcgagtcccttgtctttgctcccttcttcgccacccatggaggcatcctcttcaaatggctttagaggaagaatggaagatggatgggtagtttatttttgccgggggagagcactagatatatgtcatagagaagtttcagttta

SEQ ID NO: 41025 - DNA, 311 bp, Zea mays
ggattctaatcccctcaagaaaatgactggcttcaatgccttttggtttacgcaccacctatttgttattgtgtatgcactgctcgttgtccatgggatctgcttatatctaagcaggaaatggtataagaaaacggtaaacatatatgtaccctcattggctagagagtgtctaatttctgaatgttagtgcttacatagcatttctaccattgcagacctggatgtaccttgctgtccctgtgctcttgtatgtaagtgagcgcattcttcggctatttaggagccatgacgctgttaggattcagaag

SEQ ID NO: 41026 - DNA, 310 bp, Zea mays
actccataggggcactccctgcttccgtggttatggcaggcgtaatggtgatgctctgggtgaggagttcaagggttatgtcttcaagatcatgggtggatgtgacaagcaaggcttcccaatgaagcaaggagttttgacttctggtcgtgttcgtcttctgctccataggggcactccctgcttccgtggttatggcaggcgtaatggtgagcgcaggaggaagtctgtccgtggttgcatcgtgagccaagacctatctgttatcaacttggtgattgtgaagaagggtgagaatgatctgcctggt

SEQ ID NO: 41027 - DNA, 313 bp, Zea mays
accgtcactcaacacagcacaggcagctcgagagagagagagagagaaagatgtcgtggttcgggcaccaccaccacaaccagccggctcccccggcgtcgggccccaaccaggtgttcaagatcttctgccgcgccaacgagaactactgcctggccgtccgcgacggcgccgtcgtgctggccccggtcaaccccaaggacgaccaccagcactggtacaaggacatgcgcttcagcacccgggtcaaggacgaggaaggcatgccggcgttcgcgctcgtcaacaaggccacggggctcgccatcaagca

SEQ ID NO: 41028 - DNA, 310 bp, Zea mays
atcctcatcgaccatctcggcgacgtcctactcgagcgagatctcgctgcagtccctcgagatctggaggagattgacaaggagattgaggacaagaagacagagctggagcccaaggtcgtggaggcctacgaagcatctcctcctgaggtcaaggctctgttcaaggataagaagccagtcaaggtcatcaagaagaactcggctgcagtcaccaagttcctcgatgagctggctaagattggccgcacttgaagaaatcttatatcagtttgaggaaaaactccaagctgaaaaagtggaagctgct

SEQ ID NO: 41029 - DNA, 314 bp, Zea mays
gtctggccaggtctctcccatatcgggttctcccttcctcttcctgtttccgcgcgcgagatcgccgccccgggtgggctctagatcccgatggcctcgcgccgccgcaccctgctcaaggtcatcatcctcggcgacagcagggttgggaagacgtctttgatgaaccaatatgtgaacaagaagttcagcaaccagtacaaggctacgattggggcggatttcctcaccaaggaggtgcagttcgaggacaggctcttcactctgcaaatatgggacactgctggtcaggaaaggtttcagagtcttggcgt

SEQ ID NO: 41030 - DNA, 314 bp, Zea mays
ctctctctctgcgccctgcgctctgcgccgccgccatggaggacgacgatgactgccctcctctcgccgttgagctccctccgcgggtgccgtcccctccagagcaatctccctcagacgcctcgccagttggcgtcaccgtcatcaccggctacctcggggctggcaagtcgacgctagtcaactacattctgaatgagcaacatgggaagagaattgccgtgatactaaatgagtttggagaggaaattggggtcgaaagggcgatgatcaatgaggggcaaggtggtgcacttatcgaggaatgggtggag

SEQ ID NO: 41031 - DNA, 307 bp, Zea mays
  unsure (1)..(307): unsure at all n locations
tgttcacagtaatactggcatctttggaatccatacatctactgatgcatcatttgttcctaaagctattgacctagcagccagagagctcatttcccttgcaactcctggacaagttgaccaaagccaactggaccgtgctaaagcctcagctaaatcagcgatactggcgaatttggaatcacaggcatcactaacagaggacatggggcgccaagttttggcatttggtgaaagganacctgctgagcaccttctcaaggctatagatggtgtactatggagatatacgtctgtgctgaaagat

SEQ ID NO: 41032 - DNA, 306 bp, Zea mays
gcggcccggcgaacctgttcaggaagatgctcatggagattgtgacgaacaagaaagtgacgatctggaagaagatccacgtcatctacaacttcttcctgatacgcaagatcatcgcgcacatcatcaccttctcgttctactgcgtcatcatcccggcaaccatcttcgtccccgaggtccgcatacccaagtggggctgcgtctacatcccctcggccatcaccctcctcaactctgtcggcactcccaggtctttccacctgcttttcttctgggtcgccttcgagaacgtcatgtcgctgc

SEQ ID NO: 41033 - DNA, 300 bp, Zea mays
  unsure (1)..(300): unsure at all n locations
gcgcaccatccagttcgtggactggtgcccgactggcttcaagtgcggaatcaactaccagcctcccagcgtcgtccccggcggtgacctggccaaggtgcagcgtgccgtgtgcatgatctccaactccaccagtgttgtggaggtcttctcccgcattgaccacaagttcgacctcatgtacgccaagcgcgccttcgtgcactggtacgtcggtgagggtatggaggagggcgagttctccgaggctcgtgaggatctggctgcgctcgagaaggactacgaggangtcggtgctga

SEQ ID NO: 41034 - DNA, 179 bp, Zea mays
caccgtcggatgctcgcagctgccaccgccgcctacggctattttaaccccgcgctcctgccgacgccgcactcgcccccggcctcctcccgcctcccagatctcgctcgctcggcgccagttgcctcgcagtttggatcatctcatacctcggcgaagatgagggagatcctgcacat

SEQ ID NO: 41035 - DNA, 99 bp, Zea mays
gtccgtgtgacaaagaagaacgaagtccgcgcacggataaagaagatgctcgagactccagggccgtacctcttggatataatcgtcccacaccaggag

SEQ ID NO: 41036 - DNA, 312 bp, Zea mays
cacaaggctgagtttttgttcagtctagccgacccgacgatggcgtccagcgacgggaaaccactgccaaccccggcctctgtaggcggcggcggcagcggcaccgcgccgcccgggcagccgaccacggtagcgtccaaggtgctggacatgggcgcggcggcgatgcagtcgttgcgccccgtgaagcaggcgaacagcacgtgtgcacgttcgcgctgtacgcgcacgacccgaagcggcaggtggagacgcaccactacgtctcccgcctcaaccaggacttcctccagtgcgccgtctacgactccg

SEQ ID NO: 41037 - DNA, 308 bp, Zea mays
gagaagggcaaagacaaaaggagggggctgttcctgctgcaccgggtggagaaggtggtagagtcggagggcgggcaggtgcgcgtggtgcgcggccagccgtggccgccggcgtccttcgcagcctgccgcgaggggctcatgcacatcggcttcatcaccatggagcccaagacgctgttcgtgccgcagtacctcgactccagcatcactctcttcgtgcagcggggggaagcgaagttgggtatattcacaaggacgagctcgtggagaggaactcaagatgggcgactcctccacatcgacgc

SEQ ID NO: 41038 - DNA, 295 bp, Zea mays
gcgaggagctcacccccgccgacgacgcgcaccacatcaacaagcacaacttccgcgtccccttcgtctgcggctgccgcgacctcggcgaggcgctccgcgaggtgcgcgagggcgccgccatgatccgcaccaagggggaggccggcacgggcaacgtcgtcgaggccgtgcgccacgtgcgctccgtcatgggcgacgtccgcgcgctccgcagcatggacgacgacgaggtcttcgcctacgccaagcgcatcgccgcgccctacgacctcgtcatgcagaccaagcagct

SEQ ID NO: 41039 - DNA, 305 bp, Zea mays
  unsure (1)..(305): unsure at all n locations
cggatctgagacgagacgagacgatcccccctcccctcaaccggaacttgttttaccccatctcatcccactgaaccccctcanccacccgcccgctgcctccgccggatctcgtcggactcggatccgcccgaccacgaccaccccgcgtcgccgccgcgcacagcagcagatcagagaagatggccggactcgacaccttcctcttcacctcggagtccgtgaacgagggacaccctgacaagctctgcgaccaggtctcagatgctgttctggacgcttgccttgctgaggaccctgacagc

SEQ ID NO: 41040 - DNA, 303 bp, Zea mays
  unsure (1)..(303): unsure at all n locations
agaatcgatcttcctctcacaaaagcactttggttagcagccaccaactcctgtaggtgaggacccaacctattagcaagcattttggtgaccaacttagcaaaactatgaattaagctaattggtctaaagtcccttgctgtcaaggcatcaattttcttaggaagaagagctataaaagcagaattcagcatccccaacttgtaagcatttccttgatgaagcgaatttatagctgccaacaaatctgacttactaatatgccaacaacgcttatanaacctcctgtanaccatcaggaca

SEQ ID NO: 41041 - DNA, 309 bp, Zea mays
gcgccgacaaaaccagaccaccaaacaagtgccagcgccctctcgcagtcgccgcaatggagagcaccttcatcatgatcaagcctgacggcgtccagaggggcctcattggtgagatcatcagccgttttgagaagaagggcttctacctcaaggccttgaagcttgtcaacgtggagaggtcgtttgccgagaagcactacgccgatctcgcctccaagcccttcttccagggcctcgttgactacacaactctggccctgtggtggccatggtctgggagggcaagacgtcgtcacaatggccgca

SEQ ID NO: 41042 - DNA, 297 bp, Zea mays
ctttgcagttgaattgacatacaactatggcgttgacaagtatgacattggaacgggctttgggcatttcgcaattgctaatgatgatgtgtacaagttagctgagaatatcaaatccaagggtggtaagatcacccgcgaacctggtcctgtcaagggaggatccactgttattgccttcgcacaggatcctgatggctacatgtttgagcttatccagagggctgacacacctgagcctctttgccaggtcatgcttcgtgttggtgaccttgagcgttctactcagttttatga

SEQ ID NO: 41043 - DNA, 304 bp, Zea mays
  unsure (1)..(304): unsure at all n locations
actgattgttctggcaactgtttgtcatccttagttccatgtggctgtgcaagaatgacggggggcgaattcccctatacaccagagggcctgcttaagacagaattccttgatgaatgcacctcagttaatcatttcccacaagagcatcataggttctactgtacagtttgccctcttgaaagatctaagaataaagcctcacctggtccgtgtaaaggccatcttatgagaaaattcattaaagaatgctggagtanatgtggatgtggcatgcagtgtggaaatcgtgtgattcagcgtg

SEQ ID NO: 41044 - DNA, 295 bp, Zea mays
cttgcttcctttcgaaagtccttgcgtcacactcgccgatcgatcgagtctctccggattccagagaggcccaactgccgaagccatcgatcgccgccacctcttcgagcagaatagttgagaatggctgacgaggatatccagcctatcgtatgtgacaatggcactggaatggtcaaggccggtttcgctggtgatgatgcgccaagagctgtcttccccagcattgtgggaagaccacgccacaccggtgtcatggtcggcatgggccaaaaggatgcctacgtaggtgatg

SEQ ID NO: 41045 - DNA, 308 bp, Zea mays
gtcgcagtcgcagcacacactgaattctctttagctagctaagagagggtagccacaccaagacaggatgcagacagcgaaggtgaaggcgaaggacatggtgagctcggcgaaggagaaggtgaaggaggggtcggcaaagatgcagggcaagacgggcgaggcgacggcggccacgcacggcgagaaggagatggccaaggaggcggcccgcgccaagaaggaccaggccaacgccgacaagcaccaggagaaggccgaccaccgagcggacgccgccactggccaccacggcacgcgcgtgcccc

SEQ ID NO: 41046 - DNA, 307 bp, Zea mays
gtgcggtgccttcgttcgctttgttggtcgcgggtttgatataatttgggtgtgcagatgagcgcggacgcgagcgccgcgatggagaagatccgcgccgcggtctgctcaagacgcaggggctcatcgccggacagtgggtcgacgcatacgatggcaagaccatcgaggtgcaaaatccagcaactggtgaggtccttgcaaacgtgtcctttatgggcagcagagaaacatctgatgctattgcttctgctcacagtacattctattcttggagtaaactcactgcaagtgagagaggcaaggc

SEQ ID NO: 41047 - DNA, 246 bp, Zea mays
ccgcagttccccgaccacaccgttcctccgagcccaggagcagccccgcgccaggaggaagtttgttcttttaacaatatgtcgagggaggagaatgtttacatggccaagttggctgagcaggctgaaaggtatgaggagatggttgagtatatggagaaggtggctaagactgtagatgtggaagagctcactgttgaggagcgtaaccttctgtctgttgcatacaagaatgtgattggggct

SEQ ID NO: 41048 - DNA, 311 bp, Zea mays
  unsure (1)..(311): unsure at all n locations
gtttcgtaactggtgagggactgagggtctcggagtggattgatttgggattctgttcgaagatttgccgaggggggcaatggcgaccgcggggaaggtgatcaagtgcaaagctgcggtggcatgggaggccggcaagccactgtcgatcgaggaggtggaggtagcgcctccgcaggccatggaggtgcgcgtcaagatcctcttcacctcgctctgccacaccgacgtctacttctgggaggccaaggggcagactcccgtgttccctcggatctttggccacgaggctggangtatcatagagagtg

SEQ ID NO: 41049 - DNA, 307 bp, Zea mays
ctccctttccccttccctccctccctctccccgcgggccgccagaggcaatttcgccctcgattcgaccccgattcgtccgcccgcgaccgggattccctccgccaagcgcggatctgaacgctgcgctccgtgtcgccgctcgaatccgccatgaagggggccaaatccaagggcgccgccaaggccgatgccaagctggcggtgaagagcaagggggcggagaagcccgccaagggcaggaaagggaaggccggcaaggaccccaacaagcctaagagggctcccagcgctttcttcgtgttcat

SEQ ID NO: 41050 - DNA, 293 bp, Zea mays
gcgggggcggcaagcaaccacgggcggactcggagcgtcctcctcctcccgtctataaattcccctccttttcttcctccatatataggggccatcagatccaagaagagggaagagcaccaaggaccttcggcgcccgttcaggatccacatcttcccgagcgagttcttggttgacctcttcctcttcggaccacctccaaggctcttggtgtagcttgccactctcaccaatcaagttttcatgtctgatctcgacattcagatcccaactgccttcgatcccttcgctg

SEQ ID NO: 41051 - DNA, 303 bp, Zea mays
caagagtgggcaatatatgtttgttcaatgtccagcagtgtcaccctttgaatggcatccgttctcaattacttcagcgcctggggatgattatctaagcattcatgttcgacaacttggtgactggacacgagagctcaagagggtttttgcagcagcttgtgaacccccagtgggcggtaaaagtggccttcttagagcagacgagacaaccaagaaagccttaccaaaacttctgattgatggaccttatggttctcctgctcaggattacagcaagtatgatgttcttctacttgttgg

SEQ ID NO: 41052 - DNA, 304 bp, Zea mays
cgcgtctcccacacggccgccgccctcgccttcgtgcgttccccgcgtagagtttagggttttgtcgccgccatggcgatcctctcggcgctcgccaccgaggtgttcatccccgtcgccgccgtcatcggcatcgccttcgccgtcgtgcagtgggtgctcgtgtcgcgggtgaagctctccccggctgcagccgcgtccggcggcagcaagaacggctacggcgactacctcatcgaggaggaggaggggctcaacgaccacaacgtcgtcgtcaagtgcgccgagatccagaccgctatct

SEQ ID NO: 41053 - DNA, 307 bp, Zea mays
ccaagggagacctcaaggaggtgcgcgaggaggtcgccaagtacaaggtgggggctcctgctcgtgttggtctggttgctccagttgatgttgttgtgccccctggcaacactgggctggatccgtcccagacctctttcttccaggtgcttaacatccccaccaagattaacaagggtaccgtggaaattatcacccctgtggagctgatcaagaagggtgaaaaggtgggctcgtccgagtctgccctgctcgccaagctgggtatccgccccttctcgtacggcctccaggtcaccagtgtcta

SEQ ID NO: 41054 - DNA, 314 bp, Zea mays
gcagataataaagctattggctcacatggagctgtatttcttcaaaggcagcttgcaaattcaaaaaagatatctgttctaacccattgtaatactggcagtcttgcaactgctggttatggaactgcccttggggttatacgcgctcttcattcggggggagttttagagaaggccttttgcaccgaaactcgtccatttaaccagggatccagacttacagctttcgagttagttcataaaaaaatacctgcaacactgatagcagattctgctgctgctgcgttgatgaaacaagggcatgttcaggctgt

SEQ ID NO: 41055 - DNA, 292 bp, Zea mays
cggtgggttggcttctcctccccctccggttcgggttcgggttcgtgaggttctccggggttcggtttcgtgggtgagcggatcgagatggcggcgtcggatgttgagtaccgctgcttcgtcggcggcctcgcctgggccacggacgaccactccctccacaacgccttcagcacctacggcgaggtcctcgagtccaagatcatcctcgatcgggagacgcagaggtcccgcggcttcggcttcgtcaccttctccacggaggatgcgatgcggaacccatcgagggcat

SEQ ID NO: 41056 - DNA, 296 bp, Zea mays
aaatacaactgttcgaatgaaatcttatcagtatctgccatgctgtcagcacccaattgcttcctccggcctagggatgctcaaaaggctgctgatgaggcgaaggctcgatttggccacattgacggggaccatctgacgcttctgaatgtataccatgcatacaaacaaaacaatgaagatccccagtggtgttacgagaactttgtcaattcaagagcacttaagtctgcagacaatgtcagacaacagcttgttcgcatcatgactagattcaacctcaagatgtgcagcac

SEQ ID NO: 41057 - DNA, 292 bp, Zea mays
catatctcctcgcattttccttgcaaccgattgcctatccccctcccaaccaaagaccgatggcgcccaaggccgagaagaagcccgcggcgaagaagccggcggaggaggagcccgcggccgagaagacgaccgccgggaagaagcccaaggcggagaagcgggtccccgcgggcaagtccgccggcaaggagggcggcgagggcaagcgtggcaagaagaagggcaagaagagcgtggagacgtacaagatctacatcttcaaggtgctgaagcaggtgcacccggacat

SEQ ID NO: 41058 - DNA, 296 bp, Zea mays
cgactgtacaaatccagacccccctttgagtaatgtgcagtttgttctatccagcgaaagccttaagcatggtattgacatgttggaaagtatccagtctggctcgaagacagcactaaaaggaaatcactgaaggatattgctacggaaaatgagtttgaaaagaggcttcttgcagatgttatccctccacatgaaatcggtgttacctttgaggacattggagctttagaaagtgtcaaagatactctgaaggagttagtgatgcttcctttgcaaagacctgaactttttaa

SEQ ID NO: 41059 - DNA, 295 bp, Zea mays
ccgcctccatttcggcctctgtcccttgcaagttcaatctcacctccaaccatgggtaaagagaagtcccacatcaacattgtggttattggccacgttgactctggcaagtcgaccaccacaggacacctgatctacaagcttggaggcattgacaagcgtgtgatcgagaggtttgagaaggaggctgctgaaatgaacaagcggtccttcaagtacgcatgggtgctcgacaagctcaaggctgagcgtgagagaggtatcaccattgatatcgctctgtggaagtctgaga

SEQ ID NO: 41060 - DNA, 304 bp, Zea mays
cgtgattacaatgttttggttatggacttactgggaccgagtcttgaagatctttttagcttttgcaacaggaagttgtccctcaaaactgttttgatgcttgctgatcaaatgatcaatcgagttgagttttttcattccaagtcattcttgcatagagatatcaagcctgacaattttctcatgggtctcgggaaaagagcaaaccaggtttatgttatcgattttggacttgcaaagaagtacagagatacatcaacacaccagcacattccatacagagagaacaagaacttgactggaa

SEQ ID NO: 41061 - DNA, 307 bp, Zea mays
atgttgttgtcatcaagtacgtgccgtacgtgggagacagtaagacggctatggacgagtacacatcagagatcttcatgggcggcaagagcaccatcgtgctgcacaacacctgcgaggactcgctcctcgccgcgcctatcatccttgatctggtgctcctggctgagctcagcaccaggatccagctaaaacctgagggaacggacaagttccactcctttcacccggtggccaccatcctaagctacctcaccaaggcaccactggttccccctggcacaccggtggtgaacgctctggcaaa

SEQ ID NO: 41062 - DNA, 316 bp, Zea mays
ggctgttgcctttggtgccgcggtgcagggaagcatcttgagtggcgaaggtggtgacgagacaaaagatatcctcctccttgatgtggcccctctcaccctgggtattgagaccgtcggtggagtcatgaccaagttgatcccgaggaacactgtcatcccgaccaagaagtcgcaggtgttcaccacctaccaggaccagcagaccactgtctccatccaggtctttgagggtgagcgcacatgaccaaggactgccgtcttctgggcaagttcgacctcaatggcattccgtcagctccgaggggcacaccca

SEQ ID NO: 41063 - DNA, 307 bp, Zea mays
caagaagacaggagaagggagttgtagtgagttttaagaatggcgagtgcacaggcagtggggcaaggagaacgaggccacttcgttctgaagagcggacacaccattccggccgttggtctaggcacttggagggccggctcagataccgctcactctgttcggaccgccatcgccgaggctggatataggcacgtggacacagctgcccaatacggagtagagaaagaggtcggtagaggacttaaagctgcgatggagggcgggatcaacaggaaagatttgtttgtgacgtcgaagctatggt

SEQ ID NO: 41064 - DNA, 316 bp, Zea mays
caaacacttgcgccgccgctgcctcacaggtaaggccgccatggtctccggttcgggcgtgtgcgcgaagcatcgtaggtcgacgcgcgccaccacatgctgggccgtctctcctcgatcatagccaaggagctgctcaatgggcagaaggtggtcgtcgtccgctgcgaggagatctgcatgtcgggcggcctcgtccgtcagaagatgaagtacctccgcttcctccgcaagcggatgaacaccaagccgtcccacgggcccatccacttccgcgcccccgccaagatcctgtggcgcaccatccgcgggatga

SEQ ID NO: 41065 - DNA, 313 bp, Zea mays
cagcatcctcccgtctccgtcgtctcgtctccgctcctcacctcgccagccatgggcaagatcaagatcggaatcaacggtttcggaaggatcggcaggctcgtggccagggtcgccctgcagagcgaggatgtcgagctcgtcgccgtcaacgaccccttcatcaccacggattacatgacgtacatgttcaagtacgacaccgtgcacggccaatggaagcacagcgacatcgccctcaaggactccaagacgcttctcttcggcgagaagccggtcacgtctttggcatcaggaacccgaggagtcccgt

SEQ ID NO: 41066 - DNA, 318 bp, Zea mays
cccgccgtgcgccccgacctggtccggaagcgagacgacaggtacggcctctccacggaggagctccgcgccgctagggccgacgtcgaggctcccgccgaggagcacccggaccaggccgactactggctccgccaccgcaagggcttcgcggtggacgtcgtgccgcacgagatgaagcgtcacgcgccgtttccgtgagccgtgaccaactggtgttttacagtggcgcatgtgtaagacattgcatcgtagattgcaatgtttatggagtagtttgaatatgggtatggatagatgtctaataaaaccaaacga

SEQ ID NO: 41067 - DNA, 212 bp, Zea mays
agcttactgctttgctgcctttaaatgttaagttgtttcaaacaggtgtttatgaaggggatctattagtttcgcgatgtcgttagtttagtgcattagcaaagaaaaagccgaatgctgctagctgttctgttgcttttcttttgctaaccacttgtgtcacaactttctgtacctgcttcattgactaatctagtgactagtcagttatt

SEQ ID NO: 41068 - DNA, 321 bp, Zea mays
tgtttgcaaagctcctcctcgatcgatccatcgatcactgcaccggccggcggcaccgcgctcgcaggggctagccaacgagacggcagcaatggcggaccgtgaccgcagcggcatctacggcggcgcccacgccacctacgggcagcagcagcagcagggaggaggcgggcgcccgatgggtgagcaggtgaaaaagggcatgctccacgacaaggggccgacggcgtcgcaggcgctgacggtggcgacgctgttcccgctgggcgggctgctgctggtgctgtcggggctggcgctgacggcctccgtggtggggct

SEQ ID NO: 41069 - DNA, 313 bp, Zea mays
gattacccgcacaatggtcaaggccctggagtacgttggtcttgctccgcaggcagtgagagggtctctaatttcctggagaaggctgcagaagggctggtagagggcggaaagaaggagatcttcacgccaatgtacttctttcttgttcggaagcctcttctggaatgagctcttggatcaccttttcagagagagaaggcaagtggtcatttcgaagaagccgaggagagggaacctggaatcaagaaaaccttcagctctcctgtgtaggaggaaagttaacgaacagtgtagtaactgttcagctttg

SEQ ID NO: 41070 - DNA, 312 bp, Zea mays
aactccgaaggttcgacagtggctgttttcggtttaggagccgttggtcttgccgctgcagaaggtgcaaggattgctggagcgtcaaggatcattggtgtcgacctgaaccccagcagattcgaagaagctaggaagttcggttgcactgaatttgtgaacccaaaagaccacaacaagccagtgcaggaggtacttgctgagatgaccaacggaggggtcgaccgcagtgtggaatgcactggcaacattaatgctatgatccaagctttcgaatgtgttcatgatggctggggtgttgctgtgctggtg

SEQ ID NO: 41071 - DNA, 313 bp, Zea mays
gtcatcgatcagcaggctcaagggctccacgctccttaccgaagagtggtgacggatggatcagatgaatgggcaatctacggcgggaccggagagtttgctatggcgagaggtgtcgtcaaaagaaggtaccttgccgatagggatggcgccgggaacactgacgagctcagcatgcaggttttctgcccggtgtttggctcatcacagcaaccaaacaagcaggactccagcatctctgtcaccaagattgggttatggggtggcgaaggagggtcggcgcaggacatcacgacgacggagccaccgcagc

SEQ ID NO: 41072 - DNA, 312 bp, Zea mays
gccccgagtccttcctcagcgtcttcagcgacgacgttatccaggcgtcgttcaacactcgccgggaggagtgggagaaagtgttcgagaagcagagcaagggggagatcacgacggcgtccgaggaacagatccgggagctgagcaggtcctgctcacgtggtggccgcggcagccgcggcgagggtggcgactcgggttcttcttcttcttccaagtgggagatcaaaccgtccagcctcacggacaagaagccgacccattccaacagccacggcaggcactacgagatcaccggcgacgagtgcccgc

SEQ ID NO: 41073 - DNA, 308 bp, Zea mays
cttgcaagaagcgcctggccaaacatgtgttggatgtgacaggtcgttacgattgatccaactagcctttttgatatacagattaagcgcatacatgagtacaagacacagctcctaaacatattgggagctgtttacagatacaaaaaattaaagggaatgagtgcagaagagaagcagaaggtcacaccgcgcactgtcatgataggagggaaagcgtttgcaacatacactaatgccaaaagaatagtgaaattggtgaatgatgttggtgctgttgtgaacaatgatcccgaagttaacaaata

SEQ ID NO: 41074 - DNA, 308 bp, Zea mays
cacaccccccgagctcagcttagctccactccagctccaatcacagtcgtgaccagagcgcgagagctagctagagggccgtgaaaatgccgatcaataggatcgccctggggagccaccaggaggtgtaccacccgggcgccctcaaggcggcgttcgctgagttcatctccaccctcatcttcgtcttcgccggccagggctccggcatggccttcagcaagctgaccggcggcggcccgacgaccccggcgggcctgacggccgcggcggtggcgcacgcgttcgcgctgttcgtgcgcgtgtct

SEQ ID NO: 41075 - DNA, 302 bp, Zea mays
cttcggcttcgggatcctgctgctggagctcgtcacgggccagagcgcgctccagctcggcaaggcctccggcgccctgcacagccagaagggcgtcatgctggactgggtgaggaaggtgcatcaagagaagacgcttgacctgctggtggaccatgacctgggcccacactacgacaggatcgaggtggccgagatggtgcaggtggcgctcctctgcacgcagttccagccgtcgcaccgccccaagatgtccgaggtggtccggatgctggagggcgacggcctagccgagaaatggg

SEQ ID NO: 41076 - DNA, 306 bp, Zea mays
ccttgattgctcaggcaagtatggcgagtgtgaacttatcggcacatgcatactggaccccagatccaactttcacaagctatttaaactacggagctggcattagtgaggtggaaattgatgtgctgacaggagcaacaacaattctaaggagtgaccttgtctacgattgcgggcaaagcttgaaccctgctgtcgacttgggccaggtggaaggcgcattcatccaaggagtaggcttctttacaaacgaggagtacacaacaaactctgaggggttggtcatccacgatggcacatggacgt

SEQ ID NO: 41077 - DNA, 307 bp, Zea mays
gtcgcccaagaaggccgccaagtcccccaagaagggagcggccggtcgcaaggccggcgggccgaggaagaagtcggtgacgaggtccgtgaaggccgggctccagttccccgtcggccgcatcgggcgctacctcaagaagggccgctacgcgcagcgcgtcggcagcggtgcccccgtctacctcgcggccgtcctggagtacctcgccgctgaggtcctggagctcgccggcaacgctgccaaggacaacaagaagacgcgcatcgtcccgcgccacgtgctgctggcgatccgcaacgacgag

SEQ ID NO: 41078 - DNA, 305 bp, Zea mays
cgtgacttcatcaagaacatgatcactggtacctcccaggctgactgtgctgtccttatcattgactccaccactggtggttttgaggctggtatctccaaggatggccagacccgtgaacatgctctccttgcgttcacccttggagtgaagcagatgatttgctgctgcaacaagatggatgcaaccactccaaaatactccaaggcacgttatgatgagattgtgaaggaagtctcatcctacctcaagaaagttgggtacaaccctgataagattgccttcgttcccatttctggttttga

SEQ ID NO: 41079 - DNA, 293 bp, Zea mays
tgcgaagctcctcgtcggtcggtcgatcgatcactgcaccggccgttggcaccgcgctcgcatgggctagccgacgagacggcagcaatggcggaccgtgaccgcagcggcatctacggctgcgcccacgccacctacgggcagcagcagcggcatggaggaggcgggcgcccgatgggtgagcaggtgaaaaatggcgtgctccacgacaaggtgccgacggcgtcgcaggcgctgacggtggcgacgctgttcccgctgggcgggctgctgctggtgctgtcggggcttgc

SEQ ID NO: 41080 - DNA, 305 bp, Zea mays
cacactcgcactcgcacgtacaccacactagttaccacagacgacgggcgccatgaaagtcccggtgcttctcctcctggtctccctgtgcttctcgctcgcgctcgcgtggcaaacggacacggaatcgggctcaggcaggccgtaccactacggcgaggagagtttccggcactggacgcgctcccggcagggccggttcagggtgctggaacggttcacccacgagctgctggaggacgccgtcggcaactaccgcgtcgccgagctggaagccgcgccgcgcacgttcctgcagcccagcc

SEQ ID NO: 41081 - DNA, 304 bp, Zea mays
ggcgcggcgcagatgggctcgggcatcgcccagctcgccgccgccggacctgtgccgtacttctcctcgacgccgaccccactgccctctcccgtgccgtcatctccatctccgcctccctacggcgcctcgccgccaagggccagctctcccaggatctcagggacgcggatcttgtgatcgaggccgtcgtggagaacgaagctgtcaagaagaagctattcgtggagctggataaggtcacgaagccctcggccatcctcgcctccaacacgagctccatctccataacccgcctggcttc

SEQ ID NO: 41082 - DNA, 189 bp, Zea mays
ctcttggaatggccatagcaacagttgtgaccgtggcagaaattctgaagaacaatggatttgctgttgaaaagaaaattaggacctctactgttgaaataaacgacgaatcaagagggcgtccattccaaaaggccaagattgagataatcttgggaaagagcgacaaatttgatgagctgatggccg

SEQ ID NO: 41083 - DNA, 188 bp, Zea mays
cgtgaagctgctgggcatctcgtgcgacgacgtggagtcgcacaggcagtggaccaaggacgtggaggcgtacggcgggaagcagcagcagcagcaggcgacgacgacgaaggtgacgttcccgatcctggcggacccggcgcgggacgccatccggcagctgaacatggtggaccccgacgagaagg

SEQ ID NO: 41084 - DNA, 311 bp, Zea mays
  unsure (1)..(311): unsure at all n locations
cccccactcagaaaacccagccgccgccgcatcggcctcccaggtaagcagtagcgtccaccccagccgccgccatgaagcgcaacccccgcgtcacgagctcccgccggaagtgccgcaaggcgcacttcacggccccgtcctccgtccgccgcgtgctcatgtccgcggcgctatcgacggagctccgccacaagtacaatgtgcgttccatcccgatccgcaaggacgacgaggtgcaggtcgtgcgcggcacctacaaggggcgtgnaggcaaagtggtgcaggtgtaccgccgtcgctgggtcatc

SEQ ID NO: 41085 - DNA, 186 bp, Zea mays
gtggccgtcgtctcccgttcggaacgccaagccccccctccggcgaaatggcccccaagcgaggtggcagggcgccggtgccggccaagaagaagacggataaagtgacgaaccctctattcgagaagaggccgaagcagttcggcatcggcggcgcgttgccgcccaagaaggacctgcaccggt

SEQ ID NO: 41086 - DNA, 185 bp, Zea mays
ctcacggacaagaagccgacccattccaacagccacggcaggcactacgagatcaccggcgacgagtgcccgcacctccggctgctcgacatggacgtcggcctggcaaacatcgcccgcggttctatgatggcgccgagctacaacacccgtgccaacaagatagctatcgtcctcaagggcca

SEQ ID NO: 41087 - DNA, 182 bp, Zea mays; identical to SEQ ID NO: 32083

SEQ ID NO: 41088 - DNA, 299 bp, Zea mays
cgccctacgacctgacgtccttccggttcagccccatcaaggagtccatcgtgtcccgcgagatgacccggcgctacatgacggacatgatcacccacgccgacaccgacgtggtgatcgtgggcgccgggtccgcgggcctgtcctgcgcgtacgagctgtccaaggaccccaccgtgagcgtcgccatcgtggagcagtccgtgtccccgggcggcggcgcgtggctgggcgggcagctgttctcggccatcgtggtgcgcaggccggcgcacctgttcctggacgagctgggcgtg

SEQ ID NO: 41089 - DNA, 299 bp, Zea mays
  unsure (1)..(299): unsure at all n locations
ggagaagatggctgagaaactcaagctgacagaatctctccttgaaagcaaaaaccttgaagttaaaaagataaatgatgagagaaaggctgcattggctgcccagtttgcagcagaagcaactttgcggagagtacatgcagcccagaaagatgatgacatgccaccaattgaagccattcttgcaccacttgaagctgagctanagctttctcgccaggagattgcaaatctccaggatgacaacagagctttggatcgtctaacaaaacaaaaggaggcagctctgctagaagcag

SEQ ID NO: 41090 - DNA, 297 bp, Zea mays
ccagaacctcaagcgcgaactcctccgtgcgcaggaggaggtcaagcggatccagtccgtaccgctcgtcatcggccagtttatggagatggtcgatggcaacaacggcatcgtgacttctactacgggcagcaactactatgtgcggatcctcagcaccatcaaccgcgagctgctcaagccgtcagcatctgtcgcgttgcatcgtcactccaacgctttagtcgacgtgctgccgcccgaggccgactccagcatctccttgctgggatcgtcggagaagcccaacgtcaccta

SEQ ID NO: 41091 - DNA, 169 bp, Zea mays
gccttgaggtgtccaagcttggcttcgggtgcatgggcctcactggagtgtacaacgcccctgttcctgaccaagctgggatcgacataatcaagcacgcgtttgacgccggcatcaccttcttcgacaccgctgatgcctatgggccacacaccaacgaggtcctgct

SEQ ID NO: 41092 - DNA, 282 bp, Zea mays
gaacaacgtcgtgaaaacctagggtattcatcggagataccactagtattaattcaggctgtactgtacattggagtcatagcagtgacccgacttgcacggcctagcttgtcgaagatgtgctacaacagaagaatggagaaaaacactatgttcttgctctcccttctcagaatagtggcagcttggtccatacttgctgcctacaccatacccttcttcatcatcccaaggaccgtgcatccgctgcttggctggcccctctacttgctcggttctttc

SEQ ID NO: 41093 - DNA, 288 bp, Zea mays
  unsure (1)..(288): unsure at all n locations
tggtccggagcgagcaggggtccctgagggtgctccggcccttcgacgaggtgtccaggctcctccgcggcatccgggactaccgcgtggcggtcctggaggcgaacccgcgctcgttcgtggtgcccagccacaccgacgcgcactgcatctgctacgtggcggaaggcgagggagtggtgacgacgatcgagaacggcgagaggcggtcatacaccatcaagcaaggccacgtcttcgtggcgccggccgnggcggtcacctacctggccaacaccgacggccgga

SEQ ID NO: 41094 - DNA, 290 bp, Zea mays
tgagaatgatagcgtagagggactcaggccgaatgcacggcgccctggtcttgttacctttgggcctgatagagttatggagttctgcaacaacaatgacctgcagttgattgtgcgagcacatgagtgtgtgatggatggctttgagcgattcgcccaaggtcacttgatcactcttttctcggcaacgaattactgtggaacggcaaacaacgcaggtgcaattttagttctcggaagggatctggtggttgttccgaaactcatccatcctttgccgcctgctatca

SEQ ID NO: 41095 - DNA, 169 bp, Zea mays
atcacgcatcaccttgcatgatcaaaatggtcttagcaaaggctctggatttgttgctttctcaactcgtgaggaagcatctcaggctttaactgaaatgaatggcaaaatgatatctggaaaaccattgtatgttgcatttgcgcacgcaaagaagatagaaaagcga

SEQ ID NO: 41096 - DNA, 171 bp, Zea mays
  unsure (1)..(171): unsure at all n locations
ggacggcgaacganaggcgcggcgcggcgcggcacggatcgagcgatggcggtggcccctcctacggcggcggcgctggagcagctaagcagcagcaagatgttcgacggcttcaatctccgcttccgccaccagagcgccacccttggctgcgccatgactttctccatc

SEQ ID NO: 41097 - DNA, 173 bp, Zea mays
gtggtggtggcggcggctacggcggtggcaaccgtggcggcggctacggcaactccgacgggaactggaggaactgagcggtggggcccgcgcggccaagttatcctgttcgctaccgtgttgtttaccctagtccagagtgtttatcttcgttcgtctcgtgtttgttgttg

SEQ ID NO: 41098 - DNA, 325 bp, Zea mays
ctttgttaacaaagaattccctcatagccgccgccgccgccgacgccgccgctcatctcgccgagaggtgacgggaccgaggaactcgccgagttctaagatagagaatcgcttttcacagcctggggtctgctgcgtagggtggtgttgaaggggagaagtttaagatctgttccacagatcacgcgtgcgcgctcgcgaatcgggggttccacacatagcttcgtcgttttgaatttgatgtactaatggagtctaagggtggcaagaagtctagcagtagtcgttccatgatgtatgaagctccccttggctacagcattga

SEQ ID NO: 41099 - DNA, 323 bp, Zea mays
acgatggtgagcgccagaattgttgtcctcctcgccaccctcctatgcgctgccgccgcagtcgcgtcgtcctgggaggacgacaaccaccaccaccacgggggccacaagtccgggcaatgcgtgcggcggtgcgaggaccggccgctggcaccagcgcccccggtgcctggagcagtgcagggaggaggagcgggagaagcggcaagagcggagcaggcacgaggccgacgaccgcagcggcgagggctcgtcggaggatgagcgagagcaggagaaggagaaacagaaggaccggcggccgtacgtgttcgaccggcgca

SEQ ID NO: 41100 - DNA, 326 bp, Zea mays
cagtccctcacacactcactatacactgctctgctgcagcaagaaggaagaagctagcgcctccctagctctcgttgtcagcaatggccaccaccgccgcgtccagcctcctcaagtcgtccttcgcgggctcccggctcccttcggccacgcgcaccaccaccccgtcgtccgtggccgtggccaccccgcgcgccggcggcggccccatccgcgcgtccatctcctcctcccccaccccgccctacgacctgacgtccttccggttcagccccatcaaggagtccatcgtgtcgcgcgagatgacccggcgctacatgacggac

SEQ ID NO: 41101 - DNA, 312 bp, Zea mays
gcaagtttgtcgattcgcattggtctgaatactgtagctactagcgcgagtgccactgtgccgcagctgcctgctcgccattactgcaagctgtgttcaatcaaagcgtaattaggctccctctagatctgatccagctaagtagctagccagcactacagaagggcgtggcaagaatcaggagagagatagcaggggggctagctagctgagctcgtgcgacgaagaatggccggaattggcaggaacatggtggcgccgctcctggtgctcaacctcatcatgtagatcatcgtcatcggcttcgcgagc

SEQ ID NO: 41102 - DNA, 316 bp, Zea mays
gccgtcgccttcccattcttcctcgccgcgggggtcgcctgagatcacataaacaatggtgaaggctgttgctgtgcttggtagcagcgatggtgtcaagggcaccatctttttcacccaagagggagatggccctaccgctgtcaccggaagtgtctctggcctcaagcctggcctccatgggttccatgtacatgcacttggtgacaccaccaatggatgcatgtcaactggaccacactacaatcctgcgagcaaggagcatggggcaccagaagatgagaaccgccatgctggtgatcttggaaacgtgaca

SEQ ID NO: 41103 - DNA, 314 bp, Zea mays
gaagggcggcgcgtcggagccgtacaacctatacgacagcgagcccgggttccggaacgcgtacggctggaccgtctccgtcgacaagcaccagtacgagcccctcaagcaccccgacatcggcgtctacctcgtgaacctcaccgcggggtcgatgctggcgccgcacgtgaaccctcgggcgacggagtacggcgtggtgctgggcggggaaggcacggtccaggtggtgttcccgaacgggtccctggcgatgagcgaggtggtgcgccccggcgacgtgttctggatcccgcgctacttcgccttctgcc

SEQ ID NO: 41104 - DNA, 315 bp, Zea mays
agcgccgcgagccacagctagcaccaccaccttgcaccgcacccgcaccgagacgaacagatcgaccatggctgccggcggcgacgacaccaccatcgcgcaggtccacagcggcatcgacagcagcaacaagacgctgctcaagagcgaggccctctacaagtacgtgctggacacgtcggtgctgccgcacgagccggagagcatgcgtgagctgcggctggtgaccgacaagcacgagtgggggttcatgcagtcgtccccggacgaggcgtcgctgctgcggatgctgatcaagctgagcggcgcgcgccg

SEQ ID NO: 41105 - DNA, 312 bp, Zea mays
ctcgccgcctccagtccagagccaccgtgagatctgcccgattccgccgcccggacccggggactccctcccctcctcgatccgttcgggcggcccgccggcctagcttcaagtgcggggatggtgttctacttcaaggcgcggcccgaggccggcgactacaccatcttcatgggtcttgacaagtacgagaacgaggacctcatcaaatacggcttccccgaggacatctggttccatgtagataagatgtcctctgcacatgtgtatgtgagattgaataaaggtcaatcaatggatgacatgagtgag

SEQ ID NO: 41106 - DNA, 311 bp, Zea mays
ttgcatgcataggtatctgcaaagaaggccaaagattttcttcccttcttgcagcggaacagaaggcattcggccatcgttgaatatgtttttagtggccatcggttcaaactaacaattcccaaggagacttgtagtatcgccttctcattatctggtgtccgttgtcctggtaaaggcgagccatactcagacgaagctattgctttgatgaggagaaggatacttcaacgagatgtggagatagaggttgaagcagttgataggacaggaacgttcataggttctttgtgggagtccaagaccaacat

SEQ ID NO: 41107 - DNA, 311 bp, Zea mays
tggaaatattcgaagggcacgcgagctatttgatgccgctactgtggctgatgcaaagcatattgctgcttggcacggctaaagcagagcgctttgaacaggcacggactttgttcgagcaagccagtcaatccaatccaaaaagttgtgcaagctggctataggcttgggctcaggtagaaatgcgtgcaggaaacaataccatggcaagaaagctctttgagaaagctgtccaggctagtcctaaaaaccgattttcatggcatgtatgggcactatttgaggcaaatgaaggtaacattgacagggca

SEQ ID NO: 41108 - DNA, 314 bp, Zea mays
cggcaagtggtcatttcgaagaagccgaggagagggaacctggaatcaagaaaaccttcagctctcctgtgtaggaggaaagttaacgaacagtgtagtaactgttcagctttgtgtttattcagttgttttgctgcttgaggttattcgtttctaggtgggggttggaatccttttcgccataaacctctcagtggcataaataagatggtttgcataagagtacttcatggataccgtaagggctactactgaaagagaaatgtttaagcagcatggtatgtgagcaactagtgataattattccatccttt

SEQ ID NO: 41109 - DNA, 309 bp, Zea mays
cttctccctcttgccggtcccgaataaagagcagcagcgcaagaggtcggtagagcgagaagaaggcaatggcggccgagagcttccttttcacctcggagtccgtgaacgaggggcaccccgacaagctgtgcgaccaggtgtcggacgccgtgcttgacgcatgcctcgcgcaggaccccgacagcaaggtggcctgcgagacctgcaccaagaccaacatggtgatggtgttcggcgagatgacgaccaaggcgaccgtggactacgagaagatcgtgcgcgacacctgccgcgagatcgggttca

SEQ ID NO: 41110 - DNA, 311 bp, Zea mays
cgcggtctgctcgttcgatctgtgcagcagatctgaggtcccgggcgaccgtgaagcagcttcaatcgtcggcatggcgctcgtattgcatagtgcggctggaaacaagaatgccttcaaagcacttattgctgcagaatacagtgggatcaaggttgagttgaccaaggattttgagatgggtgtctccaacaagacccctgagtttcttaagatgaacccccttgggaaggttcctgttctggagactcctgatggccctgtttttgagagtaatgctatcgcacgctatgttgctcgcttgaaggatg

SEQ ID NO: 41111 - DNA, 312 bp, Zea mays
cctctcactcccgatccctgcaccactaccgcctcctccgcgtcacccctctcgtcgcctcttgcggcgaccggcggcggatcgtccgcagcgcaagcgcaaccatggggctcttcaccgtgacgaagaaggccaccacccccttcgaaggccagaagcccggtacctccggcctccgcaagaaggttactgtattccagcagcctcattatctgcagaactttgtccagtcaacattcaatgcccttcctgcagaccaagtaaaaggtgcaaccattgttgtctctggtgatggccgctatttctcaaaag

SEQ ID NO: 41112 - DNA, 308 bp, Zea mays
cactcgagcgaattcggctcgaggtccatccccagcatagatgagcttgacagctacaaccgttctggtgatgtatggattggctctggaattacactcaagggcaaggtgacaattatcgccaagcctggagtgaagttggagattccagatggagacgtacttgagaacaaggatgtcaatggccctgaggatctttaagcaatgtttgtcatcaccagtttttcccaaggacatgtcacaggaactgccaagcctagtcactcctactgagctctatattttgtaattttcatgtgcattccgat

SEQ ID NO: 41113 - DNA, 306 bp, Zea mays
cgcactcgcacgtacaccacactagttaccacagacgacgggcgccatgaaagtcccggtgcttctcctcctggtctccctgtgcttctcgctcgcgctcgcgtggcaaacggacacggaatcgggctcaggcaggccgtaccactacggcgaggagagtttccggcactggacgcgctcccggcagggccggttcagggtgctggaacggttcacccacgagctgctggaggacgccgtcggcaactaccgcgtcgccgagctggaagccgcgccgcgcacgttcctgcagcccagccactacga

SEQ ID NO: 41114 - DNA, 307 bp, Zea mays
accagaagagcggcggcgcgggcggacaaggagcaggcggaggaggagttgtgccaagccacaatgggtatctcgcgtgactcgatgcacaagcgccgagccaccggtggaaagcagaaggcctggaggaagaagcgaaagtatgagcttggtcgccagccagccaacaccaagttgtcaagcaataagacagtgaggagggtccgtgttcgtggaggtaatgtgaaatggagggctcttcgccttgatactggtaactactcatggggaagtgaagctgttacccgcaagacccgtatcctcgacg

SEQ ID NO: 41115 - DNA, 307 bp, Zea mays
cccaactgcaacaagttgcactaacgacgggcgaatgctacgaggtattttggttctcttatgattcatttaatctgttttaaatacttttagttactaaaactaaacagtgttgttttaaatacttttagttactaaaactaaacagtgtagagactaaaaatttagtctcctaactaaactttagtccctgtactaaagtaaccaaacaaccccttacttatccgacacttttgaatccctaggcatttggtaaatcggtagcaacagatgcatcacctttcttgcagattgacaaagcctccat

SEQ ID NO: 41116 - DNA, 311 bp, Zea mays
agttgtcatgcccataaagtacccaaaatacttcactggtctcctttctccatggaaaggcatcttactttttggccccccagggacaggaaagacaatgctggcaaaagcggtcgctactgagtgcaaaaccaccttcttcaacatttcagcatcatcaattgtcagcaaatggcgtggagattcagagaagcttgtcaaagttctgtttgagcttgctaggcatcatgcaccatccacaatattccttgatgaaatagatgctatcatcagccagcgtggtgaagctcgcagtgagcatgaagctagtc

SEQ ID NO: 41117 - DNA, 304 bp, Zea mays
cccgtcgcttccggctcccgcagcgtcgccgaccttcacagccggttccttcctctgccaccatggggaagacacgtggtatgggagctgggcgcaagctcaagacccaccgcaggaaccagaggtgggctgacaaagcatacaagaagagccacttgggcaatgagtggaaaaaaccttttgctggatcatctcacgccaagggcatcgttctggagaagattggtattgaggccaagcagccaaattcggccatccgtaagtgtgcccgtgttcagctggtcaagaatggaaagaagattgc

SEQ ID NO: 41118 - DNA, 300 bp, Zea mays
gatcagcaggctcaagggctccacgctccttaccgaagagtggtgacggatggatcagatgaatgggcaatctacggcgggaccggagagtttgctatggcgagaggtgtcgtcaaaagaaggtaccttgccgatagggatggcgccgggaacactgacgagctcagcatgcaggttttctgcccggtgtttggctcatcacagcaaccaaacaagcaggactccagcatctctgtcaccaagattgggttatggggtggcgaaggagggtcggcgcaggacatcacgacgacggagcca

SEQ ID NO: 41119 - DNA, 301 bp, Zea mays
cacatctttgcatccttcaatgacaccttcattcatatcactgatttgtctgggagggaaactctggttcggatcaccggtggcatgaaggtgaaggctgaccgtgacgagtcgtcaccttacgctgctatgcttgctgctcaagacgtcgcacagcgctgcaaggagcttggcattactgcactgcacattaagcttcgcgccaccggaggcaacaagaccaagacccctggacctggtgcccagtctgccctcagggcgcttgctcgttccgggatgaaaatcggacgcattgaggacg

SEQ ID NO: 41120 - DNA, 298 bp, Zea mays
ccgaggagcgagatgcagaacgtggtggaggtcgagccgggccgcccggctgccgatggccggccatccgtggggcccacctaccggagcgccttcgcccgcaacggattcccgccgcccgtccccgggatggacagctgctacgacatcttccgcatggccgtggagaagtatccaaacaacagaatgcttggccatcgtgagattgttgatgggaaggctggtgcatatacttggaagacatataaggaggtgtttgacattgcaaacaaaattggtaactctattaggagctgtg

SEQ ID NO: 41121 - DNA, 297 bp, Zea mays
ctctcacccgactcgtcagacgtcagccagcagttcgaaaccaaggattgatccaggagcttccggaaggcgaggcgcgcgcgcagtcgaggtgctggtgccggtgccgcccatggatcgggctcgcggatccgcgttcctgctcggcgtcctgctcgcaggatccttgttcgcgttttcagttgccaaagaggagaccaagaagctcgggaccgtgatcggtatcgatctcggtaccacctactcctgtgtcggtgtgtacaagaacggtcatgtcgagatcatcgccaatgacca

SEQ ID NO: 41122 - DNA, 298 bp, Zea mays
cccgagcatatcacagtgacagacacgatggtgagcgccagaattgttgtcctcctcgccaccctcctatgcgctgccgccgcagtcgcgtcgtcctgggaggacgacaaccaccaccaccacgggggccacaagtccgggcaatgcgtgcggcggtgcgaggaccggccctggcaccagcgcccccggtgcctggagcagtgcagggaggaggagcgggagaagcggcaagatcggacaggcacgatgccgacgaccgcagcggcgagggctcgtcggaagatgagcgagacaggag

SEQ ID NO: 41123 - DNA, 304 bp, Zea mays
gccatgggcaagattaagatcggaatcaacggcttcggaaggatcggcaggctcgtggccagggtcgccctccagagcgaggatgtcgagctcgtcgccgtcaacgaccccttcatcaccacggactacatgacctacatgttcaagtacgacaccgtccacggccactggaagcacagcgacatcacactcaaggactccaagacccttctcttcggtgacaagccggtcaccgtctttggcatcaggaaccctgaggaaatcccgtggggtgaggctggcgctgagtatgtcgtggagtcca

SEQ ID NO: 41124 - DNA, 235 bp, Zea mays
gaaacctctcaaaccctagccgcctcctgcaagtttcagagctcaggaatctgcgccatggcgagtgagacggagaccttcgcatttcaggctgagatcaaccagctgctctcactcatcatcaacaccttctactccaacaaggagatcttcctccgcgagcttatctccaactcttccgatgcgctggacaagatcaggttcgagagtctcactgacaagagcaagctcgatg

SEQ ID NO: 41125 - DNA, 306 bp, Zea mays
agctcctcctcgatccatcgatcactgcaccggccggttgcaccgcgctcgcaggggctagccaacgagacggcagcaatggcggaccgtgaccgcagcggcatctacggctgcgcccacgccacctacgggcagcagcagcagcagggatgaggcgggcgcccgatgggtgagcaggtgaagggcatgctccacgacaaggggccgactgcgtctcaggcgctgacggtggcgacgctgttcccgctgtgcgggctgctgctggtgctgtcggtgctggcgctgacggcctccgttgtggggctg

SEQ ID NO: 41126 - DNA, 281 bp, Zea mays
gcgccgcgcacgttcctgcagcccagccactacgacgccgacgaggtgatgttcgtgaaggaaggcgagggcgtcatcgtgctgctccgcggcgggaagaggaacagatccgggagctgagcaggtcctgctcacgtggtggccgcggcagccgcggcgagggtggcgactcgggttcttcttcttcttccaagtgggagatcaaaccgtccagcctcacggacaagaagccgacccattccaacagccacggcaggcactacgagatcaccggcgacgag

SEQ ID NO: 41127 - DNA, 310 bp, Zea mays
aaacaatcgaaagggacaggaccagtacatgacgaatcttgctctaaagatcaacggcaagcttgggggcagcaacgttcagctgtttgactcgctcccacgggtcggtggtggggtacctttcatgttcatcggtgctgacgttaaccacccgtcccccggtaacgtggagagcccatcgatcgcagccgtggtcgcctctgtcaactctggtgtcaacaagtatgtgaccagaatccgtgctcagccgcaccgttgcgaggtgatccagcagcttggtgagatctgccgggagctcattggagtcttt

SEQ ID NO: 41128 - DNA, 216 bp, Zea mays
caaggtcagaatcaatgccttggttgctaaagcccagaaagttcctgaagaaggatggacaatgcaagatggaaccccctggcctggaaacaatgttcgtgatcatcctggaatgattcaggtcttccttggccaaagtggaggtcttgactgtgagggaaatgagctgccgcggttggtttatgtttcaagagagaaacgaccaggctataacca

SEQ ID NO: 41129 - DNA, 199 bp, Zea mays
caccaggattcccaaggtccagcagctcctgcgggactacttcgacggcaaggagcccaacaagggtgtccaccctgatgaggctgttgcctttggtgccgctgtgcagggaagcatcttgagcggcgagggtggtgacgagaccaaagatatcctcctccttgatgtggctcccctcaccctgggtatcgagaccgtc

SEQ ID NO: 41130 - DNA, 278 bp, Zea mays
gcgatgcacagggcaccggtcgagcaggttaagcgtcgtcctccgcccagaaaccactgcctgcccgtcctaagcggcgctccgttcgtcatctgctccagctgcgtcagcctggtccagctgcccgccgacttcgccgtgccgagcagaggagcacgccggctgcggtgcggcgcctgctccgagctcctttcctactcgtacagggaccccgccgggaggaagaagccgcggtcgccattcgagggcgatgagtgcagcactgacgggtacgacga

SEQ ID NO: 41131 - DNA, 281 bp, Zea mays
gcagcctccttcctggcttcctcctctcactctcgctcgtgctgcgctcgctacctcgcttcgcattccattcgaggagagcggtgagaggggaggaaaggcaagatgttcatcgagagcttccgcgtcgagagcccccacgtgcggtacggcccgacggagatcgagtcggagtaccataacgacacgacggagctggtacacgagggcaaggacggcgcctcacgctgggtcgtccgccccaagtccgtcaagtacaacttccggaccagaaccgccgt

SEQ ID NO: 41132 - DNA, 300 bp, Zea mays
gcgccgacaaaggcatcccgctccccaacgtcacctcccacatcctcgacaaggtcatcgagtattgcaacaagcacgccgagccgaccggaccgggcgacgcggccggcaccaccaacaggtccgccgaggatgagctcaacatcttcgacgcagacttcgtcaatgtagagcactccaccctcttggacctcatcctggctgcaaactacctggacatcaaggggctcctgaacctggcccgccaaaccattacagacttgatcaatgggaagatgcctgaggaggtctgcaagacaa

SEQ ID NO: 41133 - DNA, 169 bp, Zea mays
ctcgatgggctagaggcttctggcttgagtgacttatcccgagttactagcgttgcatccttctttgtcagccgagtggacacccttattgacaaaatgcttgacaagattggaacacctgaggcccttgccttgagaggaaaggctgcagtagcgcaggccaaactag

SEQ ID NO: 41134 - DNA, 268 bp, Zea mays
atctggttttgaaggtgacaacatgattgagaggtccaccaaccttgactggtacaagggcccaaccctacttgaggctctggacttgatcaatgagccaaagaggccttcagacaagcccctgcgtctcccccttcaggatgtgtacaagattggtggtattggaactgtccctgttggacgtgttgagactggtgtcattaagcctggtatggatgttacttttgggcctactggtcttactactgaggttaagtcgttgagatca

SEQ ID NO: 41135 - DNA, 235 bp, Zea mays
ctgcggcggacacggaggcgaaggaggaggagcagcagcagcaggcggcgccgaggagcggcatcccactcagtgcttgcaaccatggctaggggattgaagaagcacttgaagaggctcaatgcgcccaagcattggatgctcgacaagcttggcggagcttttgctcccaagccatcttctggacctcacaagtccagggagtgccttcctctgaatctcatcatcaggaaca

SEQ ID NO: 41136 - DNA, 275 bp, Zea mays
  unsure (1)..(275): unsure at all n locations
attgaaaagggagagagagagagagaagagagagagaagagagagagagagagaggagtgggagacccgcgagaggctgccgtgtagggaccgtagactcagcgactgcgaaggagggataaggggatggccgggatcggaccgatcaggcaggactgggagccggtcgttgtgcggaagaaggcacccaccgccgccgccaagaaggactagaaggccgncaacgccgcgcgccgcgccggatcggagagtgacaccactaagaagcacaacgc

SEQ ID NO: 41137 - DNA, 262 bp, Zea mays
atcgtctgcccgcccaactgcacccgccgccgtcgcctcccaaaacccaaccaaaccctagattcgccgccctcagctccggtcagaccctccccccttcgaagatgccgaacctcgagtgccggatgtatgagcagcggttcccggaggtggatgccgcggtgatgatccaggtgaagcacatcgctgacatgggcgcgtacgtctccctgctcgagcacaacaacatcgagggcgatagtcctctcgtcgagcgcgtccg

SEQ ID NO: 41138 - DNA, 166 bp, Zea mays
cgatggggaagaagaagaagcgcgtcgataaggtcttctgctactactgcgaccgcgagttcgacgacgagaagatcctcgtccagcaccagaaggccaagcacttcaagtgccacgtatgccacaagaagctctccaccgcctctggcatggccatacacgtcct

SEQ ID NO: 41139 - DNA, 306 bp, Zea mays; identical to SEQ ID NO: 41113

SEQ ID NO: 41140 - DNA, 306 bp, Zea mays
tacagataccttgctgagttcaagactggagctgagagaaaggacgccgctgagaacacgatggtggcatacaaggctgcccaggacattgctctggctgagcttgctccaactcaccctattaggcttggactggcacttaacttctcagtgttctactatgagattctgaactcacctgatcgcgcctgcagtcttgcaaagcaggcttttgacgaggccatctcggaactggacaccctgagcgaggagtcctacaaggacagcactttgatcatgcagctccttcgtgataacttgacccta

SEQ ID NO: 41141 - DNA, 304 bp, Zea mays
cgttttgctgctctccgaccccgagctccgaatgccgcagcatcaggcgcggcccccctcgcgtgtgaccgagatggcgctgccgaatcaggggaccgttgattaccccagcttcaagctcgtcatcgtcggcgatggtggaactggtaaaactacatttgtgaagaggcatctcactggagagtttgagaagaaatatgaaccaaccattggtgtggaagttcatccgttggatttcaccactaactgtggtaagatcaggttctactgctgggataccgcagggcaagagaagtttggtggc

SEQ ID NO: 41142 - DNA, 296 bp, Zea mays
atctatacgagctcaagacgcggggagaccgagagtgagaattcctggttcttggagccgtaccagaagcacgctggacaggcggccaccttcctggctcacatcaaggagggggtggggatcgcggcgagggatgagggggcactcctgttgttcagcggcggggagacgaggagagatgctggcccgacgagtgaggcacagagctactgggctattgccgagtcgaaaggcatgtacggaaactgatacggctgtagaagccgagcactcaccgaggagcatgcacgagatag

SEQ ID NO: 41143 - DNA, 299 bp, Zea mays
agccgcggcgaacttctgccctccccggcgtcgcgctctggtcgtcgtcggccgggaagatggctggcggcttcagggtacttcatctggtcaggccctttctggctttcttgccagaggtgcagagcgcggataggaagataccattcagagaaaaagttatctacactgttatttctctcttcatttttctggtgtgcagccagctcccactctatggcgatcattcaacgactggagctgatcctttctactggatgcgtgttatcctcgcatcaaaccgtggcactgtgatggag

SEQ ID NO: 41144 - DNA, 299 bp, Zea mays
accgggcacaccccccgagctcagcttagctccactccagctccaatcacagtcgtgaccagagcgcgagagctagctagagggccgtgaaaatgccgatcaataggatcgccctggggagccaccaggaggtgtaccacccgggcgccctcaaggcggcgttcgctgagttcatctccaccctcatcttcgtcttcgccggccagggactccggcatgccttcagcaagcataccggcggcggcccgacgaccccggcgggcctgaatgcgtgcgcggttgcgcacgcgttcgcgctg

SEQ ID NO: 41145 - DNA, 296 bp, Zea mays
atttatttgtcactgatcgttgatcagcctagctagctagcgctgttttcctgtgtgctaatggcgcccgttcaatgtgcgcgttcgcagagggtgttccacttcggcaagggcaagagcgagggcaacaagaccatgaaggaactgctgggcggcaagggcgcgaacctggcggagatggcgagcatcgggctgtcggtgccgccagggttcacggtgtcgacggaggcgtgccagcagtaccaggacgccagggtcgccctccccgcggggcgtctgggccgagatcgtcgacg

SEQ ID NO: 41146 - DNA, 300 bp, Zea mays
gcgacatcaagcgcgccgtcaccatcccggtcatggccaaggcccgcatcgggcacttcgtggaggcccagatcctggaggccctgggcgtcgactacgtggacgacagcgaggtgctcacccccgccgacgacgcgcaccacatcaacaagcacaacttccgcgtccccttcgtctgcggctgccgcgacctcggcgaggcgctccgcacggtgcgcgagggcgccgccatgacccgcaccaagggggaggccggcacgggcaacgtcgtcgaggccgtgcgccacgtgcgctccgtca

SEQ ID NO: 41147 - DNA, 291 bp, Zea mays
  unsure (1)..(291): unsure at all n locations
agtctggttgctccagttgatgttgttgtgccccctggcaacactgggctggatccgtcccagacctctttcttccaggtgcttaacatccccaccaagattaacaagggtaccgtggaaattatcacccctgtggagctgatcaagaagggtgaaaaggtgggctcgtccgagtctgccctgctcgccaagctgggtatccgccccttctcgtacggcctccaggataccagtgtctacgaggactggnccgntgtcagccctgaggatcttgaccttccgaggaggacc

SEQ ID NO: 41148 - DNA, 281 bp, Zea mays
  unsure (1)..(281): unsure at all n locations
gcgccattgttcaacacccgttcgttcaagatcgcctacgtgccgaacggcaagggctacgccgagatcgtgtgcccgcaccgccagtcgcagggcggcgagagcgagcgcgagcgcgacaagggcaggaggagcgaagaagaagaagaagaatcgtctgaggagcaggaggaggccgggcaggggtaccacaccatccgggcgcggctgtcaccgggcacggctgtcgtggatcccgcgggccacccggttcctcgcggctgcgntccgggacagcaacc

SEQ ID NO: 41149 - DNA, 190 bp, Zea mays
atctgaagcgtgggtatgtggcctccaactccaaggatgaccctgccaaggaggctgctagcttcacctcccaggtcatcatcatgaaccaccctggccagattggcaatggctatgccccagttctggactgccacacctcacacattgctgtcaagtttgctgagctcgttaccaagattgataggcg

SEQ ID NO: 41150 - DNA, 219 bp, Zea mays
tttgctggtgtgtttgaagtggatgtatcaaactggtctccgtttatgccaaatggtttcaaatctgtagtgactggagccacagtagtcttttttgcatatgttggatttgatgcggttgctaattctgctgaggaagccaaaaggccacagagagacctacccattggtatactaggaagccttatagcatgtgtgttgttatacgttgctgtatgc

SEQ ID NO: 41151 - DNA, 275 bp, Zea mays
cgctaggattcccccgaaaccctcccccaaaaccccagagcggagaagagcgcaagatgttcggcttcgggcaccacggccaccacggccagaacccgccggcgcacggcggcgtgcaccagcccaccttcaagatcttctgcaaggccgacgaggggtactgcctcaccgtccgcgacggcaacgtggtgctggcccccgccaacccgcgcgacgagcaccagcactggtacaaggacatgcgcttcagcacccaggtcaaggacgaggagggc

SEQ ID NO: 41152 - DNA, 309 bp, Zea mays
cgcacgtacaccacactagttaccacagacgacgggcgccatgaaagtcccggtgcttctcctcctggtctccctgtgcttctcgctcgcgctcgcgtggcaaacggacacggaatcgggctcaggcaggccgtaccactacggcgaggagagtttccggcactggacgcgctcccggcagggccggttcagggtgctggaacggttcacccacgagctgctggaggacgccgtcggcaactaccgcgtcgccgagctggaagccgcgccgcgcacgttcctgcagcccagccactacgacgccgacga

SEQ ID NO: 41153 - DNA, 287 bp, Zea mays
gaggtgatcaatgcgtgtaacgtgtaattgttctcgggcagaggttttcacgcataaatgtcctctgccgggaaaagcccctgcgcctcctctgggagctcatcaggctggtactgaagctgttcatagttcagctgtctagcggcttcgtacagcgcgactccgacgctgacggagaggttcaggcaccggacgtaggtctccaccatgggaatccggagggtcccgccgcctaggccttctctgcagcaatcctcgagggcttgctgaggcaacccttttgtttc

SEQ ID NO: 41154 - DNA, 305 bp, Zea mays
ctcgagccggcaacatgtgtgatctgctcaggatcaacaccgaccgcggtgtgatgattgccgatggcaagtcgcggttttcaatcaatgggaagcctatctaccactttgttgggacttccaccttcagcgagtacaccgtcatgcatgtgggttgtgttgcaaagatcaaccctcaggctccccttgataaagtttgcgtccttagctgtggtatttctaccggtcttggtgcatcaattaatgttgcaaaacctccgaacggttcgacagtggctgttttcggtttaggagccgttggtctt

SEQ ID NO: 41155 - DNA, 291 bp, Zea mays
cgccaggagaagactatcatgaaactggtagttgatgctgaaactgacaaagtacttggtgcatccatgtgtggaccagacgcacctgaaattatccagggcatcgctattgcggttaaatgtggagccaccaaagcagacttcgacagcactgtcggaatccacccttccgctgctgaagagttcgtgaccatgcgcaccgtgacaaggcgcttgagcccgacatccaagccaaagacgaacttgtaagcaagaaattggtgttttgggggaatgttacaccggacaaat

SEQ ID NO: 41156 - DNA, 227 bp, Zea mays
aaggattttaagaaactcgcactggaggatgctgcagcgagctacagatatggtctcgagtgtctattcagattttatagttatggtttggagaaaaaattccaacccaatgtatatgaagatttcgagaagcttactttcgaattctaccgtaatggtgatctttatggactcgaaaaatactgggcatttcaccattaccgaaatccagatatcggtcctgtaga

SEQ ID NO: 41157 - DNA, 251 bp, Zea mays
gaggcgattgccaagaagctagctgagcttacaaccacgaagggtgtcactaccatcatcggcggcggcgactctgtcgctgctgtcgagaaggctgggctggcggacaagatgagccacatttcgaccggcggcggtgcgagcttggaactcttggaaggcaagactctacctggtgtccttgccctcgatgacgcctagatccgctgctgctgctgctgctgctactcaggttctgccagctttgcgtg

SEQ ID NO: 41158 - DNA, 292 bp, Zea mays
gcgccgcgagccacagctagcaccaccaccttgcaccgcacccgcaccgagacgaacagatctatcgatcgatagctagatccatggctgccggcggcgacgacaccaccatcgcgcaggtccacagcggcatcgacagcagcaacaagacgctgctcaagagcgaggccctctacaagtacgtgctggacacgtcggtgctgccgcacgagccggagagcatgcgtgagctgcggctggtgaccgacaagcacgagtgggggttcatgcagtcgtccccggacgaagcgtc

SEQ ID NO: 41159 - DNA, 299 bp, Zea mays
taacacacccgagcatatcacagtgacagacacgatggtgagcgccagaattgttgtcctcctcgccaccctcctatgcgctgccgccgcagtcgcgtcgtcctgggaggacgacaaccaccaccaccacgggggccacaagtccgggcaatgcgtgcggcggtgcgaggaccggccctggcaccagcgcccccggtgcctggagcagtgcagggaggaggagcgggagaagcggcaagagcggagcaggcacgaggccgacgaccgcagcggcgagggctcgtcggatgatgagcgag

SEQ ID NO: 41160 - DNA, 298 bp, Zea mays
cttctcgccttctctaatctctttgcctccctccaccaccagtccaccaccactgctacccaaccctcgcttccccaaaccctagccaagggacacggtggccggcgatggacggcgacggaggaggcgctggtgcgctgcaccaccacacgcgctcacccgaggacgtcttccgcgatttccgcgcgcgccgagccggcatcgtcaaggcgctcaccacggatgtggagaagttctatcagcagtgcgatccagagaaagagaacttgtgcctttatggtttgccaaatgagacttg

SEQ ID NO: 41161 - DNA, 294 bp, Zea mays
aaactttcttatgaaaggtttccatttggtagttttgttgactgctggtcccgggatcaaagatacacaggtattctgtttcaaccatacatgttcttctaataaacaagtgccattgacgcttcatgtgttcattttaataacaatgttcatagtctcatttgttgttaccaattccagtgtgggtttaagatgttcacacgagcagctgcaaggaagcttttcacaaatatcagattgaagaggtggtgtttcgatgttgaacttgtatacctgtgcaagcgcctcaggatc

SEQ ID NO: 41162 - DNA, 185 bp, Zea mays
cttatatgtagccaatgaaacagggagtttaaggagaagaacaaagtggacaaggttgttgtgctgtggactgcaaacactgaaaggtacagcaatgtatgcgctggtctcaacgacacaatggagaatctgctggcatctgtggacaagaacgaggcggaaatctcgccatcaacactatatgc

SEQ ID NO: 41163 - DNA, 271 bp, Zea mays
accagaagagcggcggcgcgggcggacaaggagcaggcggaggaggagttgtgccaagccacaatgggtatctcgcgtgactcgatgcacaagcgccgagccaccggtggaaagcagaaggcctggaggaagaagcgaaagtatgagcttggtcgccagccagccaacaccaagttgtcaagcaataagacagtgaggagggtccgtgttcgtggaggtaatgtgaaatggagggctcttcgccttgatactggtaactactcatggggaa

SEQ ID NO: 41164 - DNA, 275 bp, Zea mays
cgaaaaccaaatggatttctcagcttaaggagccatatctggacagatactgataataatcgtgcagggatgctcccttttgtctttgacgactcatttgggattttatgcaaggaaagcttccacaggctcctggggagttgcccactcttaacgattgggagaaccatctaacaacaatttttcctgaggttaggctaaagaggtaccttgagatgagaggtgctgatggtggccatggaggagattgtgtgcgttgcctgcattttgggttg

SEQ ID NO: 41165 - DNA, 296 bp, Zea mays
ccaccacatccatccccttcccttcccttccctcgtgccccgccggctctccagcgcgccgtctctgcccagatccaggagatatgcctcgctatgatgatcgctatggaggcacgcgcttgtatgttggcagattggccccccgtactcgttctcgtgatttagaatatctcttcggcaaatatggaagaatacgagaagtggagttgaagcgcgactatgcatttattgagttcagtgaacatcgtgatgccgatgaagctcggtaccaactagatggcagggatgtcgatgga

SEQ ID NO: 41166 - DNA, 238 bp, Zea mays
caacggtccaaccctccggttcgacgtaggcgccggcgggaaatgaaggtctccgtgaagacgctcaagggatccagcttccatatcgaagtggatcctaccgacaaggttgccgacgtgaaaaaggttatagagagtatacaagagcaggcttcctatcctgctgaccaacaagtgcttatacaccaggggaaggtgctcaaggacgacacaacattggaggaaaaccaagtagttg

SEQ ID NO: 41167 - DNA, 309 bp, Zea mays
  unsure (1)..(309): unsure at all n locations
gaagtacaggaaggagaaggagagaatcgatgagatcaggaagctgaagcagcgccgcgaggagctccagttcaccctgcaggaggccgagcgccggatggacctggcccgtgtggccgacctcaagtacggcgccctccaggaaatcgacgccgcgatctccaagctggagagcgaaacaggggagaacctgatgctcaccgaaaccgtcggccctgaacaaattgcagaggtggtgagccgttggacgggtattccagtgacccggcttggccagaacgacaaggagaggctggtcgngctggctga

SEQ ID NO: 41168 - DNA, 224 bp, Zea mays
ggaatgcccaggcggggttcaccttcgtcatgaagttcggcggctcgtcgctcgcgtcagccgagcggatgcgggaggtggccggcctcatccttagcttcctcgacgagatgcctgtcgccgtcctctccgccatggggaagaccaccaataacctcatcctaggacattccatttctagctctcagcgcctgagtcagggtgctcgattctttcggttacta

SEQ ID NO: 41169 - DNA, 194 bp, Zea mays
tctcgagccgcagccacatctctccactgctccgtccagcgcgtccacctcccaaacccctactcccccaggaagcaatggcttcccccacccagggccaggtcatcacctgcaaagcggcggtggcgtacgagccgaacaagccactcgtgatcgaggacgtgcaggtggcgccgccgcagccggcgaggtcc

SEQ ID NO: 41170 - DNA, 301 bp, Zea mays
gctcgttgccggctgcccccgcggccccggccagtccatcccctcgctcgctccccaactccagcaggcagatcagatacatccatccattcgcggaccggaaggaaaggaaagggttgaactatgagcgccgtggcggtttcgtcgtcgctgaacccggacgcgccgctcttcatcccggcggcgctgctgcaggtggaggacttctcgccgcagtggtgggacctcatcaccaccactgcctggttccgcgaccactggtcccgcgagcgcgcccacctggacgagatggccgagcaga

SEQ ID NO: 41171 - DNA, 298 bp, Zea mays
catttcccaaaccctacccatacccccgctgccgccgccgccatgccgcccaagctcgacccgtcgcaggtggtggaggtcttcgtccgggtgacgggcggcgaggtcggcgcggcgtcgtccctggcgcccaagatcggcccgctcggtctctccccgaagaagatcggcgaggacattgccaaggagacggccaaggactggaagggcctgcgcgtcaccgtcaagctcactgtccagaaccgccaggccaaggtctccgtcgtcccctccgccgccgcgctcgtcatcaaggcgc

SEQ ID NO: 41172 - DNA, 246 bp, Zea mays
gtcagatgctcatgtcctaacaagagctgaacagtttgcgaacaacaaaagattaagatatgggagaactatgtcgagggtgagaatgcttcaaatggatccgcacctgaatcgaaacaaaaggaaatcctcaaggttgtcgccacggaagttcttggtggtgggaagttttatgttcagacagtgggtgaccagagggtggcttcaattcaacagcagcttgcatctttgaaacttagagatgca

SEQ ID NO: 41173 - DNA, 305 bp, Zea mays
cagaaaaccctagccgccgccaccgaagcggcctcccaggtaagcaagagcgtccaccccgccgccgccatgaagcgcaatccccgcgtcacgagctctcgccggaagtgccgcaaggcgcacttcacggccccgtcctccgtccgccgcgttctcatgtccgccgggctgtcgacggagctccgccacaagtacaacgtgcgctccatcccgatccgcaaggacgacgaggtgcaggtcgtgcgcggcacctacaagggccgtgaagggaaggtggtgcaggtgtaccgccgccgctgggtcat

SEQ ID NO: 41174 - DNA, 305 bp, Zea mays
ctgttttttcatggaatcaacgacgaccaggaggcacgagtcctggaagacaagaaggtgggcgtgaaaggcgtcgggaggaagacgaccgacgagtcggagcacttcagctggagggacggcgtcaaggtcccctgcggcaagctggtgccgtcggcgaacaaggacggcccgctcgagtacaacgagtacgccgtgtacgaccccaagcaggtgagcatctgcttcctggtcggggtgaagtacgaggagcagaacatcggagtggtgccgccggacgaccagtgaaggagtcgtctcgtgga

SEQ ID NO: 41175 - DNA, 238 bp, Zea mays
ccgcagccgccgcccgctcgctcgcctccgctccggcagcgagctctatctcccgcgacgagcagcagctgccaccgacgcacgcagaccggggaataaatattggtattggtagtgtgatatctataagaagtcaagatggtgaagttcacagctgaagagctccgcgctatcatggacaaaaagaacaacattcgtaacatgtctgtcattgctcatgtggaccatggcaagtcta

SEQ ID NO: 41176 - DNA, 169 bp, Zea mays
gcctctcccacgcagagaccgcccacccggacgagcttgacgaggagttcgacaccttccccacctcccgcccaccggacttggtgcggatgcggtatgacaagctgcgcacgtcgccgggaggatccagaccgtggtcggcgaccttgccacgcaaggcgagcggctg

SEQ ID NO: 41177 - DNA, 225 bp, Zea mays
cacacccgagcatatcacagtgacagacacgatggtgagcgccataattgttgtcgtcctcgccaccctcctatgctgtgccgccgcagtcgcgtcgtcctgggaggacgacaaccaccaccaccacgggggccacaagtccgggcaatgcgtgcggcgttgcgatgaccggccctggcaccagcgcccccggtgcctggagcagtgcagggaggaggagcggga

SEQ ID NO: 41178 - DNA, 321 bp, Zea mays
tcgcagtccagccaaccccgtcgcccaccccaatctccacgcgtcgccgccgcttgccggcgagtctattcccctccgtcacgccgccgaggctacccggaccccgcagcggttcggataagactgccgcccgccgtccgccacctgccaaccgccctcctttgactcccactactctcggccccgggaccgcttcggcctggatctagggttgtgtggggaggggttctggaagccttggccgcgatgggcgagtcagacgatgacgcccgcaccttcaaggtcgttttcaccaccaccggagaggagcagttccgggag

SEQ ID NO: 41179 - DNA, 247 bp, Zea mays
tgcgctcatttctgcatccccctcccgccgcgccgcctcaccgccgccggagaagatgggtcgcgtgatccgcgcgcacgtaagggtgcggggtccgtgttcaagtcccacacccaccaccgcaacggccccgcccgcttccgctccctcgacttcggcgagcgcaacgggtacctcaagggcgtcgtcaccgacgtcatccacgaccccggccgtggcgcgccgctcgccaaggtcactttccgcc

SEQ ID NO: 41180 - DNA, 310 bp, Zea mays
gacaacactcaccgatagcaagtagcgccgccgacgtttcgagagcagagtatccaagctagccaagcgcgcacctcggtgacctagctagctacctagctagttcaggcgacgatatggcgtctggtcaggagagcaggaaggagctggaccgcaaggctcgcgagggcgagaccgtcgtccccggcgggaccggcggcaagagcgtcgaggcccaggagcacctcgccgaaggcgcagcgcggaggccagactcgcagggagcagctggggcagcaggggtacagcgagatggggaagaagggcggtc

SEQ ID NO: 41181 - DNA, 251 bp, Zea mays
ctctttctcaatcatagctgaagaggattcaaaagacttgagagaagatggtgcccaagaaattatagaacacattaccaccctcattaatgaaaccatcgtaaatgatggttcatacaacatgtcgttatctaaggcagatgtgctttctgcaattgatggtggtaaatctgagggaggtccatctgggcgacattggatattagacccaatagatggcactaaaggtttcataaggggagatcagtatg

SEQ ID NO: 41182 - DNA, 312 bp, Zea mays
cagaaaaccctagccgccgccaccgaagcggcctcccaggtaagcaagagcgtccaccccgccgccgccatgaagcgcaatccccgcgtcacgagctctcgccggaagtgccgcaagcgcacttcacggccccgtcctccgtccgccgcgttctcatgtccgccgggctgtcgacggagctccgccacaagtacaacgtgcgctccatcccgatccgcaaggacgacgaggtgcaggtcgtgcgcggcacctacaagggccgtgaggggaaggtggtgcaggtgtaccgccgccgctgggtcatccacgtcg

SEQ ID NO: 41183 - DNA, 314 bp, Zea mays
  unsure (1)..(314): unsure at all n locations
gcactgcgctcatttctgcatccccctcccgccgcgccgcctcaccgccgccggagaagatgggtcgcgtgatccgcgcgcacgtaagaggtgcggggtccgtgttcaagtcccacacccaccaccgcnaaggccccgcccgcttccgctccctcgacttcggcgagcgcaacgggtacctcaagggcgtcgtcaccgacgtcatccacgaccccggccgtggcgcgccgctcgccaaggtcactttccgccacccattcaggtacaagcaccagaaggagctctttgtcgcagccgagggcatgtacacgggc

SEQ ID NO: 41184 - DNA, 311 bp, Zea mays
ttctctacccgtatcctatacccgatgtggggtacccgaccctgtgttcacccatactcatagacaaaggaaaaaaccaacacactctcgcttgcggcaagaattttccggcccgaaaccgaaagcacccgcaccaatctctgcgtctcttcgtcttcggctgcgcggcggcggcagcagcggaggaggttgaggagatgctgtccggcgacatccccccgagccagaccatctacctcaacaacctcaacgagaaggtcaagaaagaagaattgaagagatcgctttatgccttgtgctcacagtatgga

SEQ ID NO: 41185 - DNA, 307 bp, Zea mays
ctcgagccgcgctgcagcagcggcaacgctcccctcctcgacggtcgacgccgcggcttctcctcatcctcgtcccctccgtccgctgactggaagtggtctacacagaaggttaccatattgttaagttaaagttggatcattggaacaatgccgccccataagattgagactgggcatcaagatgtggtccatgatattgccatggattactacgggaagcgcctagctacagcctcctctgataacacaataaagatcattggcgtaagtggaacctcacaccagcagcttgcaaccttgagtg

SEQ ID NO: 41186 - DNA, 307 bp, Zea mays
cgagaggcgaggagagagaaagttctcgagctagacgagcgccgtgcgaggagagaagcgagatgagcggtgaggcggcggccgtgggcggaggcgaaggagaggcgaatggcatcccgccgaacgtcaccatctatatcaacaacctcaacgagaagatcaagctcgaagaacttaagaagtccctaacagccgttttttcccagtttgggaaaattcttgatgtgcttgctttcaagactttgaagcataaaggtcaagcttgggttgtcttcgaagatgtcgcatcagctactgaggctctgaa

SEQ ID NO: 41187 - DNA, 263 bp, Zea mays
cggaggagcagcagcagcaggcggcgccgaggagcggcatcccactcagtgcttgcaaccatggctaggggattgaagaagcacttgaagaggctcaatgcgcccaagcattggatgctcgacaagcttggcggagcttttgctcccaagccatcttctggacctcacaagtccagggagtgccttcctctgatcctcatcatcaggaacaggctcaagtatgctctgaactaccgtgtagtcatttctatcctgatgcaacg

SEQ ID NO: 41188 - DNA, 306 bp, Zea mays
tgatgggaaaactgtatttactagtgatcatgcactgaaacttgagtcggttccagactggatagctattgttggaagtgggtacattggacttgagttcagtgatgtatacacagctcttggaagtgaggttacttttgttgaagctcttgaccagctgatgcctggatttgatcctgaaattgcaaaattagcccagagagttcttatcaatcctcggaaaattgactatcacactggtgtttttgcaagcaagattactcctgcaaaggatggaaaacctgtgctcatcgagcttattgatgc

SEQ ID NO: 41189 - DNA, 300 bp, Zea mays
gtccaatagatctcctcgccgcctcacccgtctcctcctccgcagcttccccgcgatcccgaccatggagggcgacggtaccaaccttgatgcggcgatagagtcgctcctgaatgtcgagaagcagatgaggctggccggagatgtcgccggcactcggaaggccgtcatcgacatcgtcgagctctgctacaaggccggcgcgtggaagacgctaaacgaccagatcgttctcctatctaagaggagaggccagcttaagcaggctattactgctatggttcagaaagcaatggagta

SEQ ID NO: 41190 - DNA, 297 bp, Zea mays
gcaatgtatgcgctggtctcaacgacacaatggagaatctgctggcatctgtggacaagaacgaggcggaaatctcgccatcaacactatatgccattgcctgtgtcacggaaggggtgccattcatcaatgggagcccccagaacacttttgtgcctgggctgattgatcttgctatcaagaacaactgcctgatcggtggtgacgacttcaagagtgggcagaccaagatgaaatcggtcttggttgatttccttattggtgctggaataaagcccacctcgattgtgagctaca

SEQ ID NO: 41191 - DNA, 134 bp, Zea mays
tgccagcctgctgcgggtaggcaccgtccgtaagaacggcttcatcgtcatcaagaaccgtccctgcacagttgtggaggtttctacctccaagactggtaagcatggccacgccaaatgccactttgtcgcca

SEQ ID NO: 41192 - DNA, 120 bp, Zea mays
acctccccctccggttcgggttcgggttcgtgaggttctccggagttcggtttcgtgggtggacggatcgagatggcggcgtcggatgttgagtaccgctgcttcgtcggcagcctcgcc

SEQ ID NO: 41193 - DNA, 310 bp, Zea mays
gcagcagagagcgggggtgcagagagatcgagatccggaggccgcgagtgggagcgccaccaccagcgactgcggcaatggcgggcacggtgacggtcccggggtcgtcgaccccctccacgccgctgctcaaggacgagctcgacatcgtgatcccgacgatccgcaacctcgacttcctggagatgtggcggcccttcttccagccctaccacctcatcatcgtgcaggacggcgacccgaccaagaccatcaaggtgcccgagggcttcgactacgagctctacaaccgcaacgacatcaaccgcat

SEQ ID NO: 41194 - DNA, 135 bp, Zea mays
tgcgaaggcgaccctccctccttcgctccttccgcgccgcctcccggccgtcgccgccatggtgaagtactcgcaggagccgggcaaccctaccaagtcggctaaggccatgggcagggatctgagggtccactt

SEQ ID NO: 41195 - DNA, 193 bp, Zea mays
tgccgcgcgcctgcaggaaatgggcgccaacgtgacggccaactgcgtccacccgggcatcgtcaggacgcgccttaaccgcgaccgcgacggcgtcctaaccgatctggtgttcctgctgctgtccaagctgctgaaaacgatccctcaggctgcggcgaccacgtgctacgtggcggcccacccgagagtg

SEQ ID NO: 41196 - DNA, 313 bp, Zea mays
ggcggtcctggaggcgaacccgcgctcgttcgttgtgcccagccacaccgacgcgcactgcatctgctacgtggcgtaaggcgatggagtggtgacgacgatcgagaacggcgagatgcggtcatacaccatcaagcaaggccacgtcttcgtggcgccggccggggcggtcacctacctggccaacaccgacggccggaagaaactggtcatcgccaagatcctccataccatctccgtgcctggcgagttccagttcttcttcggccccggcgggatgacaccggaatcgttcctgtcgagcttcagcaag

SEQ ID NO: 41197 - DNA, 141 bp, Zea mays
caaccccgcctcgaccggatctcgtcggactcggatccgcccgaccaccccgcgccgccgcagatcaaagaagatggcagctgtcgacacattcctcttcacctcggagtctgtgaacgagggacaccctgacaagctctg

SEQ ID NO: 41198 - DNA, 164 bp, Zea mays
cccggcgacgtgttctggatcccgcgctacttccccttctgccaggtggcggcgcgggccgggcccttcgagttcttcggcttcaccacctcggcgcgccgcaaccggccgcagttcctggtcggcgcctcctcggtgctccgtaccatgctagggccggagat

SEQ ID NO: 41199 - DNA, 123 bp, Zea mays
gtcggctgccgcagactggtagtagccggcgcgccgtcaccgtatcctcagatcagcggcgagcagaaaccacaccactctactgacgcccgacgagcagtgtaacattttccttcagccatg

SEQ ID NO: 41200 - DNA, 192 bp, Zea mays
gcggtgaggcggcggccgtgggcggaggcgaaggagaggcgaatggcatcccgccgaacgtcaccatctatatcaacaacctcaacgagaagatcaagctagaagaacttaagaagtccctaacagccgttttttcccagtttgggaaaattcttgatgtgcttgctttcaagactttgaagcataaaggtc

SEQ ID NO: 41201 - DNA, 303 bp, Zea mays
tctgccccggtgggaggaacccggaatcgttcctgtcgagcttcagcaagagcatccagagagctgcatacaaggtacaacacacgtgctacgtgtgctgctgctgctgctgcaacgtactgtcgtcctgtgtgtgtgctcacatcgatcgcgttgcgcgtgcagacctcgagcgaccgtctggagaggctgttcgggaggcatgggcaggacaaggggatcatcgtgctcgccacggaggagcagacccgcgatctgcggcgccacgcctcggagggcggccacggcccgcactggctcctg

SEQ ID NO: 41202 - DNA, 173 bp, Zea mays
accgacaccagtctcggcgtcctcacagatggaggagaaaagttggaatctctcttttacattggtttggaactctatagtgtggcttgtgcttctgaacttctccgttaagataatcacgtcgacggcacaggattatctcaaaaagcagcaggatatggagatggaacgcg

SEQ ID NO: 41203 - DNA, 259 bp, Zea mays
gccgccgccgccgcagttgtcttcggtcttccgtgctcaccttcgagagatcaagttgctgctgcggtagtcgccaaccatcatcatgcagaacgaggagggtaagacggtggacctctacgtccccaggaagtgctcggccacgaataggatcatcactgccaaggatcatgcctctgtccagatcaacattggccacttggatgcgaatggcctgtacgatggtcacttcaccacgtttgctctctctgggtttgtc

SEQ ID NO: 41204 - DNA, 247 bp, Zea mays
gctcagggtccggcggcgaagggaaggcaagatgtacaccgcgaggaagaagatccagaaggagaagggtcttgagccctccgagttcgaggactccgatgcccaggctttctttgatctggagaacgggaaccaggagctcaagagcgacctcaaggacctgtacatcaacaatgctatccagatggatgttaccgggagtaggaaggctgttgtcattcacgtcccataccgcctgcgcaaggcc

SEQ ID NO: 41205 - DNA, 317 bp, Zea mays
tgcaagtttgtccattcgcattggtctgaatactgtagctactagcgcgagtgccactgtgccgcagctgcctgctcgccattactgcaagctgtgttcaatcaaagcttaattaggctccctctacatctgatccagctaagtagctagccagcactacagaagggcgtggcaagaatcaggagagagatagcaggggggctagctagctgagctcgtgcgacgaagaatggccggaattggcaggaacatggtggcgccgctcctggtgctcaacctcatcatgtacatcatcgtcatcggcttcgcgagctgga

SEQ ID NO: 41206 - DNA, 316 bp, Zea mays
tgaacctaatccacatattaaatttctccgcatcatgcgtgggacacaaggtgcgttgattgtggcttcagccttacagattatagttggcttcagtggcctttggcgtaatgttgccaggtatctgagtccactttcagctgctcctttggtggcactagttggatttggactgtatgagctaggatttccatcggttgccaaatgtgttgagattggtctacctcaactcatccttcttgtgatctttacaatgtacctgccacatgctgttcacatgctgaagtctatcttcaatcgttttgctgtcctgttc

SEQ ID NO: 41207 - DNA, 315 bp, Zea mays
cgacgaggggatgccgatttaccagaggcccttcatgaaggggaagctctacattcatttcacggtggagttccccgactcgctggcaccagagcagtgcaaggctctcgagtcggtacttccgccaaagccttcgtccaagctgacagacatggagatcgatgaatgcgaggagacaaccatgcatgatgtgaacaacatcgaggaagagatgcgcaggaagcaggctcatgctgctcaggaggcgtacgaggaggacgatgagatgcctggtggagcccaaagagtgcagtgcgctcaacagtaagcagacta

SEQ ID NO: 41208 - DNA, 309 bp, Zea mays
tgcgcaggcgctggggaagatcccgattgatgtgaacaggatggggattgggctcatgtccttgtccggccacaagatttatggccccaagggcgtgggggccctctaccttcgtcgccgccctcgcatcagggtggaaccacagatgaatggtggtgggcaggagcgtggcatccgcagtgggactgttcctacacctcttgttgttggatttagggctgcctgtgagattgccgctcaagagatggattatgaccacaggcgtgtcagtgctctgcagcagaggctgcttgatggcatacgtgcgca

SEQ ID NO: 41209 - DNA, 307 bp, Zea mays
tgcctggacctgaacacacattcagattgaattgggcctctttcagctctggtgagaggcgtcctgatccaggatctgatcattcaattttcgtaggggatctggcacctgatgtcacagattacttactacaggagacattccgagtgaactattcgtctgttagaggtgctaaggttgtcacggatccaaataccgggagatctaaaggatatggattcgtaaagttcgcagatgaaaatgaaaagaaccgtgcaatgacagaaatgaatggtgtgtactgttcaacaagacctatgcggataag

SEQ ID NO: 41210 - DNA, 309 bp, Zea mays
tgataaacctgtttttgttggaccttttcttcgcaagcaagaaagggatcactcttttgacaagacaaaatttaacaatgtcttcgtgaaaaacttgtctgagtctaccacaaaagaagatttactcaaaatctttggtgaatatgggaatattacaagtgctgttgtgatgattggcatggatggtaaatcaaggtgctttggtttcatcaattttgagaatccagatgcagcttcccgtgctgttcaggaacttaatggtaagaagataaatgacaaagagtggtatgttggaagagctcagaagaa

SEQ ID NO: 41211 - DNA, 239 bp, Zea mays
atcaaatcacactgcggcaacaagagctcttgtcaatgaatttgatctatctgagaaacaagctgaagcgctgttggatatcacactaaagaagcttacttcccttgagcggaagaaatttgtggatgaagctaaaaccatgtcagaggaaatttctaagttaaatgagcttctgtcaagcaagaaacttatcctccagcttatacaacaagaagccgccgatttgaaaagcaagtttt

SEQ ID NO: 41212 - DNA, 195 bp, Zea mays
gtgagttttaagaatggcgagtgcacaggcagtggggcaaggagaacgaggccacttcgttctgaagagcggacacaccattccggccgttggtctaggcacttggagggccggctcagataccgctcactctgttcggaccgccatcgccgaggctggatataggcacgtggacacagctgcccaatacggagt

SEQ ID NO: 41213 - DNA, 234 bp, Zea mays
ccagtttcgatgagatacagcctgagaaggatgtgcagaaacctagtaccactgtggaggattatagtaataagaatgttgttgggtctgagagagttcagtttgatgatgaagggaaagacctcttagatgatgatgtggagatgagagatgacacacctgggtacggttcatcccacgctgaagatgatgcacatggttttgttgttcacgatgatggtgttgagtccggtg

SEQ ID NO: 41214 - DNA, 301 bp, Zea mays
agcctgctgttgccggcttcctcatgcagaaggaacttgactaccttgttggagctgttgccaacccaaagaagccatttgccgctattgttggtggatccaaggtctcaagtaagattggtgtcattgagtccttgctggcgaaggtcgatatcctcatccttggtggtggtatgatctacacattttacaaggcacaaggatattctgttggaaaatctctcgtggaagaggataaacttgagctcgcaacttctcttattgagaaggcgaaggcaaagggggtttctcttttgcttcc

SEQ ID NO: 41215 - DNA, 201 bp, Zea mays
aggcctcatccgcaactatgtctcatatgctaccttcctcctccaggaaaggagaattaaagagattgttttgaaggccatgggacaggcaatcagtaagtctgttgctgttgcagagattatcaagaaaagggcccctgagttacaccaggataccaacatcagctctgtcagcatcactgatgtctgggaacccataga

SEQ ID NO: 41216 - DNA, 158 bp, Zea mays
tcgattcttaccaatccccctggcctgctgctttcctgacaatcgaccagttccccagtcttgctccctgcagtcctccctcctccatctccagcgttgtgttctgactcacctgcaccaatggctgttctttctgctgctggtgctcccccggcctc

SEQ ID NO: 41217 - DNA, 307 bp, Zea mays
cactgacagacatgctggaaatcttctggtcaagaaggttggtcctggggctgacaatttcggagagcagacagaactcattcctattgaccacggtctttgtcttccagaatgcctagaagacccctacttcgagtggatccactggccgcagtcgtctgttcccttctccgtcgaggagctcgaatacattgcaaaacttgaccctataaaggacgcagagatgctacgcgtggagctacctatgatacgggaggcgtgtctcagggtgctggtgctgtcgacagtgtttctcaaggaagctgca

SEQ ID NO: 41218 - DNA, 256 bp, Zea mays
gtgacagacacgatggtgagcgccagaattgttgtcctcctcgccaccctcctatgcgctgccgccgcagtcgcgtcgtcctgggaggacgacaaccaccaccaccacgggggccacaagtccgggcaatgcgtgcggcggtgcgaggaccggccctggcaccagcgcccccggtgcctggagcagtgcagggaggaggagcgggagaagcggcaagagcggagcaggcacgaggccgacgaccgcagcggcgagg

SEQ ID NO: 41219 - DNA, 129 bp, Zea mays
caggcagctcgagagagagagagagagaaagatgtcgtggttcgggcaccaccaccacaaccagccggctcccccggcgtcgggccccaaccaggtgttcaagatcttctgccgcgccaacgagaacta

SEQ ID NO: 41220 - DNA, 227 bp, Zea mays
gtttgagaaaagggcgggaacgtgcattgcaacttcctcgttttgattggacaggtccattgagaccacatccaatatcaaagatgcgtgtggtgccagatgaaattgagaagcctgattgggcgcttgatggaactcccaagatagaaccagatagtgatttgcagaaaagtgtagagattaagacccctgaactcatagaaaggatgagagtaacatgtcgaatt

SEQ ID NO: 41221 - DNA, 225 bp, Zea mays
acacaccacaccacacctcctcgcttccactccgctcgtctgacatctcgtcccgtcctttcgtttcgaagcctcgcgagccccgacgatggccaccgccgcggtgtcggtcgacgagaagctcgacaagcttcgcgccgaggtcgccaagctcgaccagatcagcgagaacgagaagtccgggttcatcagcctcgtgtcacgctacctcagtggggaagcgga

SEQ ID NO: 41222 - DNA, 220 bp, Zea mays
acgacgcacgcagagccgcagagatccgtcacactgcaagttttgaaaactgaactgtaagatggcatcagcagagctttcccgtgaggaaaatgtgtacatggcgaactcgccgagcaggcagagaggtacgaggaaatggttgagttcatggagaaggtagcgaaaactgttgactcggaggagctcactgtggaggagcgcaacctcctgtctgttg

SEQ ID NO: 41223 - DNA, 215 bp, Zea mays
accgagctgtgagaagaagttcgcagacaggatgggcaagctgtggacgatactcactcacctccactccctagcagggccaacggtgatgctgctgtaccctctgtacgcgtccgtgcgggcgatggagagcccgtccaagctggacgacgagcagtggctcgcctactggatcctctactccttcgtcacgctcatggagatgctcctcgagt

SEQ ID NO: 41224 - DNA, 216 bp, Zea mays
ctttgtttgcaaagctcctcctcgatcgatccatcgatcactgcaccggccgttggcaccgcgctcgcaggggctagccaacgagacggcagcaatggcggaccgtgaccgcagcggcatctacggcggcgcccacgccacctacgggcagcagcagcagcaggtaggaggcgggcgcccgatgggtgagcaggtgaaaaagggcatgctccacga

SEQ ID NO: 41225 - DNA, 230 bp, Zea mays
cgcagcgccgcccgctcgctcgcctccgctccggcagcgagctctatcccccgcgacgagcagcagctgccacagacgcacgcagaccggggaataaatattggtattggtaatgtgatatctataagaagtcaagatggtgaagttcacagctgaagagctccgtgctatcatggacaaaaagaacaacattcgtaacatgtctgtcattgctcatgtggaccatggca

SEQ ID NO: 41226 - DNA, 228 bp, Zea mays
gagctcgacaaggacgaccgacgacgcacgcggagatccggcgtactgcaaattttgaaaactgaactgtaagatggcatcagcagagctttcccgtgaggaaaatgtgtacatggcgaactcgctgagcaggcggagaggtacgaggagatggttgagttcatggagaaggtagccaagactgttgactcggaggagctcactgtggaggagcgaaacctcttgtct

SEQ ID NO: 41227 - DNA, 226 bp, Zea mays
aagtatttgaagcctgctgttgccggcttcctcatgcagaaggaacttgactaccttgttggagctgttgccaacccaaagaagccatttgccgctaatgttggtggatccaaggtctcaagtaagattggtgtcattgagtccttgctggcgaaggtcgatatcctcatccttggtggtggtatgatctacacattttacaaggcacaaggatattctgttggaa

SEQ ID NO: 41228 - DNA, 225 bp, Zea mays
ctttgtttgcaaagctcctcctcgatccatcgatcactgcaccggccggaggcaccgcgctcgcaggggctagccaacgagacggcagcaatggcggaccgtgaccgcagcggcatctacggcggcgcccacgccacctacgggcagcagcagcagcagggaggaggcgggcgcccgatgggtgagcaggtgaagggcatgctccacgacaaggggccgacggcg

SEQ ID NO: 41229 - DNA, 224 bp, Zea mays
ataaattgcaggcacaatctttttctgcactcagcattagtattgtcaagaaaagtgccacggtctgttcatgggattaaggaggcctgcagattctatacgattgaaagtgcatttgcccttacagttgcttttctcatcaacatatctatcatatctgtcagtggttctgtctgtggttcaggtaatttaaacccagaagatcaagcaaattgcagtgatct

SEQ ID NO: 41230 - DNA, 223 bp, Zea mays
gcaggccgtaccactacggcgaggagagtttccggcactggacgcgctcccggcagggccggttcagggtgctggaacggttcacccacgagctgctggaggacgccgtcggcaactaccgcgtcgccgagctggaagccgcgccgcgcacgttcctgcagcccagccactacgacgccgacgaggtgatgttcgtgaaggaaggcgagggcgtcatcgtgct

SEQ ID NO: 41231 - DNA, 221 bp, Zea mays
cgacatggggcggcaggtggaggcgcaccacttctgcgcgcacctgaacgaggacgtgcggcagtgcctcatcttcgacgggcccggcgccggcgcgcgcctcatcggcgtggagtacatcgtctccgagacggtgttcctgacgctgcccgacgccgagaagccgctgtggcacacgcacgagttcgaggtgaagggcggggtgctgttcatgccggggg

SEQ ID NO: 41232 - DNA, 222 bp, Zea mays
gacagacacgatggtgagcgccagaattgttgtcctcctcgccaccctcctatgcgctgccgccgcagtcgcgtcgtcctgggaggacgacaaccaccaccaccacgggggccacaagtccgggcaatgcgtgcggcggtgcgaggaccggccctggcaccagcgcccccggtgcctggagcagtgcagggaggaggagcgggagaagcggcaacagcggag

SEQ ID NO: 41233 - DNA, 221 bp, Zea mays
ctccctagcagcagatcctcgtgcaacgcaaagcgctagccttcctactgtcccgatggcccgcacgaagcagacggcgaggaagtccactggcggcaaggcgccaaggaagcagctggccaccaaggcggcgcgcaagtctgccccggcgaccggcggagtgaagaagccccaccgtttccgccccggcaccgtcgcgctccgggagatccgcaagtacc

SEQ ID NO: 41234 - DNA, 218 bp, Zea mays
gccggccggaatatgtggacgatcaggaaggtggcgacgccgcaggtggccgtcctcctgctgctcctcatcgtcgttgcgcaggaggcggcgccgttggcggaggcgcgcgtgtgccggcgccggagcgcgggcttcaagggggtctgcatgtccgaccacaactgcgcgcaggtgtgcttgcaggaaggctacggctgcggcaactgcgacggcat

SEQ ID NO: 41235 - DNA, 218 bp, Zea mays
gccggcaacgagcatccaccaggaaaatgttgtgaggactgatgcaataactaagcttgctggatggacggatgcgattgcatcgagccactatggcctaccgatgatcttctcgtcaagtatcagtacatctcagacttcttcatacgccttgcgtacttctcgattccattggagctcatatattttgtgaagaagtcgtccttcttcccatacag

SEQ ID NO: 41236 - DNA, 219 bp, Zea mays
gaacacgatcgagcacacaagcacgaagactcgtttaggagaaaccacaaaccaccaagccgtgcaagcatcatggagtacggtcagcaggggcagcgcggccacggcgccacgggccatgtcgaccagtacggcaacccagtcggcggcgtcgagcacggcaccggcggcatgaggcacggcacgggaaccaccggcggcatgggccagctgggtgag

SEQ ID NO: 41237 - DNA, 212 bp, Zea mays
gccgtccgccttgcccttcacgaaggcttggtcctcctccttgtatctccactccccccttcacagatccgttcctccagctagggttagcgttcctctgcagcgatggcgatcaagcggaccaaggcggagaagaagatcgcgtacgacaagaagctgtgcagcctgctcgatgagtacaccaaggtgctcatcgccctcgccgacaacgt

SEQ ID NO: 41238 - DNA, 217 bp, Zea mays
gcagcagagagcgggggtgcagagagatcgagatccggaggccgcgagtgggagcgccaccaccagcgactgcggcaatggcgggcacggtgacggtcccggggtcgtcgaccccctccacgccgctgctcaaggacgagctcgacatcgtgatcccgacgatccgcaacctcgacttcctggagatgtggcggcccttcttccagccctaccacct

SEQ ID NO: 41239 - DNA, 251 bp, Zea mays
ccagattatgtttgatcatgaaaccaaacgttcccgaggctttggatttatagtttttgcttctgagcaagttgtagttgatttgtaagcaaatggaaatatggttgaccttgctggttcaaaggtggagatcaagaaagcagaaccaaagaaatcctccaatgcaccgccaccaccagtgcatgttagaaatgctaggtcagcatatgatagcggctctagagaccacccttcagctgacaactatggtg

SEQ ID NO: 41240 - DNA, 225 bp, Zea mays
cacaaacactacaagagttcgctctacatgggaacaaatgatatgcaaatactgtttccatatgctactgcacttaagaagttagaccttcagtttacattcctttccacagaggatcattgtcagatagttcaacgctgctccaatctggaaaccttagaggtgagggatgtcataggggatcgtggactacaagttgttgcacagacctgcaagaaattgcat

SEQ ID NO: 41241 - DNA, 229 bp, Zea mays
tgcagcgccgccagacactccgtagtctgtaccccaagcaccggcgcggcggcggcggctaccatggcagtcgggaagaacaagaggatctccaagggaaagaagggtggtaagaaaaagaccgtcgatcccttctctaagaaggactggtatgacatcaaggccccatcggtcttcagtgtgcgcaacattgggaagactctcgtgtccaggacacagggtaccagga

SEQ ID NO: 41242 - DNA, 219 bp, Zea mays
cagatgcagagcttgatccagctgtgaaggaagccttcgatgttgcatatgacaatatatatgccttccatgtttcacaaaaaatacctgagaagacagttgaaaatatgaaaggcgtaagatgtaagagaataactagatgcattggttctgttgggctgtatgtcccaggtggcactgcagtcttgccttcaactgcattgatgcttgctgtgcctg

SEQ ID NO: 41243 - DNA, 214 bp, Zea mays
actaactggcacctgctgtaggttattgtgtcacttggcagtggcccatgggatcagctgtttggcggtggaaatgcacccgcttttgcggtggcagccggtgcatctttcatcggtgggctggtggctattctggggcttcctcgggcacgcattgcatcctcgtcctccaggaggagaggcgggacacaccgataagtctgctcatttacca

SEQ ID NO: 41244 - DNA, 217 bp, Zea mays
gtgatcacttctggaactctcagcccaatagatctttaccctcgtctcttgaattttaatcctgtcataagcagaagcttcaccatgtccttaacaagagattgtatttgtcccatggtcttgacccgaggaagtgatcagctacctgtgagtacaaagttcgatatgcgtagtgatcctggtgttgtgaggaattatggccgcctcttgctggaaa

SEQ ID NO: 41245 - DNA, 222 bp, Zea mays
cgctgcctccgcctctcgagtctcgtccacccgtcatcctcctagctcctctactcgccagtcgccatgggcaagattacgatcggaatcaacggcttcggaaggatcggcaggctcgtggccagggtcgccctccagagcgaggatgtcgagctcgtcgccgtcaacgaccccttcatcaccacggactacatgacctacatgttcaagtacgacaccgtc

SEQ ID NO: 41246 - DNA, 221 bp, Zea mays
gtcaaacaccattgcccatggacttctttctccaggtacggcgatggccagtggaatgagacgcagcggcagacgtacaatttggtggacgcgcaggcaagacacaccgttcaggtgtaccccaacgggtggtcggcgatcctggtgtcgctggacaaccaggggatgtggaacctgcggtcggcgatgtgggaccggcagtacctcgggcagcagctcta

SEQ ID NO: 41247 - DNA, 272 bp, Zea mays
cgcgagaaggggttccttcctggccccaaggagagcggcggccacgaggagcgggagcaagaggaggaggaggaacgcgaagaacgccacggcggccgtggggagagggaacgccacggacgtgaggagcgggagaaagaggaggaggaacgcgaaggacgccacggccgcgggcgccgcgaggaggtggcggagacgctcatgaggatggttaccgccaggatgtgaggccgccgcgctcgccaaaacgagcaagaagcaacaagagggtg

SEQ ID NO: 41248 - DNA, 308 bp, Zea mays
ggagaaactccccggctcgaggagatcgtgacattgagaggacgatgggagggcgcgcgctcctcctcctcctcctggtctcggcgttggtctttcagatccacgcctccgacccgctgctgtacgacgccgttcgatgaggactttgaggggagatgggtcgtctccaagaaggatgaataccaaggtgtgtggaggcatgccaagagtgatggtcatgaggactatggcctccttgttagtgagaaggcaaggaaatacgccataatcaaggagcttgatgagccagttaccttgaaggatgggac

SEQ ID NO: 41249 - DNA, 309 bp, Zea mays
ggcccaacgcctgttcgatcttcctgccgcagatgagagcgtggttgcgctggcgaacggctgccttcacctgcgctccctgggtctctactactgccagaacatcacggaccgcgccatgtactccctggccgccaacagccgcgtgaggagtcggggccggggctgggacgcgacagcgaagagcggcggcggtggcaaggaccgggagcgggacggactggcgagcctgaacatcagccagtgcacggcgctgaccccgcccgcggtgcaggcggtgtgcgactcgttcccggcgctgcacacgtg

SEQ ID NO: 41250 - DNA, 305 bp, Zea mays
aattgacagttgatgtcaaagcaaactcagaatcagatcttttgacaacaatcactgtcgatgagtttggtactccagggctaaaatcaattatcaatttggttgttccagaccagaggtcagggaagcttgaattccagtacctacatgaatatgctggtgtgaatgcaagcgtcgggcttaattccaaccctatggttaacctttctggtgcctttggaagcaaagcactatcagtcggcgttgatgtctcatttgatacggcgactagcgatttcaccaagtacaacgctgccctgagcctc

SEQ ID NO: 41251 - DNA, 250 bp, Zea mays
gcagtgcgtgcgctgcagcctgcagggcaagaacaggcgacgaagaagatgagcacgctggacacgcggacgctcaaggacgagctgacgagcatggacaggaagtgcctcgtggaccttggccacccgctgctcaaccgcgtcgccgacagcttcatccgcgccgccggggtcggggcggccagggccgtctccagggaggcctacgtcgtcaccgtcgaagggctttcaggagactcgtccgggctgg

SEQ ID NO: 41252 - DNA, 301 bp, Zea mays
gtccaccaccgcttcccgtgcagcgccctccctatacgttcccccatttcctgtgttggcggcgatggcgcggcacttcgtgctcaacaccggcgccaagatcccctccgtggggctcggcacctggcagtctgaccccggcgtcgttggcaacgctgtctacgccgccgtcaaggcgggttaccgacatatcgattgtgccagagtttacggcaacgaaaaggagattggtttggcgctgaagaagctatttgaagagggtgtagtgaagcgagaagatatgtttatcacctctaagcta

SEQ ID NO: 41253 - DNA, 302 bp, Zea mays
caccttcccaaaaaaatcccccattttcttcgaggcgaggagagcgtgaaagacagggcaccggcagcgacgatgtcggggcgcggcaagggcggcaaaggtctgggcaagggcggagcaaagcgccaccgtaaggtgctccgtgacaacatccagggcatcaccaagcccgcgatccgtaggctggctcggaggggcggcgtgaagcgcatttcggggcttatctacgaggagacccgcggcgtcctcaagatcttcctcgagaacgtcatccgcgacgccgtcacctacaccgagcacgc

SEQ ID NO: 41254 - DNA, 295 bp, Zea mays
ggttaattaaggattggatgcgtatgtaggcctatatgatcaaggactatcttaactagccacatgccctggatatgggacagggtaagcttgaacccggctattccatacatgaaaagacaatcgcgcactgggagtggagagatggcgagcgtggcacgtaccctcctggcaaaggatcacctaaaaggggtggtgtgctctcgggtggcgtggacctgttcatgtagtggaggatccgtgggaacggttgacatatgcaagggttaagtgctacatatgtcttgtggttaga

SEQ ID NO: 41255 - DNA, 296 bp, Zea mays; identical to SEQ ID NO: 40877

SEQ ID NO: 41256 - DNA, 291 bp, Zea mays
cgagcatatcacagtgacagacacgatggtgagcgccagaattgttgtcctcctcgccaccctcctatgcgctgccgccgcagtcgcgtcgtcctgggaggacgacaaccaccaccaccacgggggccacaagtccgggcaatgcgtgcggcggtgcgaggaccggccctggcaccagcgcccccggtgcctggagcagtgcagggaggaggagcgggagaagcggcaagagcggagcaggcacgaggccgacgaccgcagcggcgagggctcgtcggaggatgagcgaga

SEQ ID NO: 41257 - DNA, 220 bp, Zea mays
gtcggacggacccttgccggagacgagcacacgccacagcaggaattatcgggcgtagagcagcgcgaacgagagatccaatggcggcggcggaggggcagtgggtgctcatggcaacggggcggacgccgaccaacattgcggtgatcaagtactgggggaagcgggacgaggcgctcatcctccccatcaacgacagcatcagcgtaacgctcgaccc

SEQ ID NO: 41258 - DNA, 295 bp, Zea mays
agtggccttactactgaggtgaagtctgttgaaatgcaccatgaggctctccaggaggcccttcctggtgacaatgttggcttcaatgttaagaatgttgctgtgaaggatctgaagcgtgggtatgtggcctccaactccaaggatgaccctgccaaggaggctgctagcttcacgtcccaggtcatcatcatgaaccaccctgggcagattggcaacggctatgccccagtgctggactgccacacctcgcacattgctgtcaagtttgcggactcattaccaagattgatag

SEQ ID NO: 41259 - DNA, 295 bp, Zea mays
cgtgaacccgccgccgacgcagcagcaggagacgcgccaaggagagcccgcaaggaggcgactatgagggccaagtggaagaagaagcgcatgaggaggctgaagaggaagcgccgaaagatgaggcagagatccaagtaggctgatggggattgtggatggtggtgtcggcatagttgtgttacgtttcttcgatgcgtgagttcatggagagatgtcacatcctagttcgtcgtcaccgtttgccatgggtccaatggctcgtcttggaaacctgcacttcagtaggccatct

SEQ ID NO: 41260 - DNA, 294 bp, Zea mays
tgcgcaggcgctcggggaagatcccgattgatgtgaacaggatggggattgggctcatgtccttgtccggccacaagatttatggccccaagggcgtgggggccctctaccttcgtcgccgccctcgcatcagggtggaaccacagatgaatggtggtgggcaggagcgtggcatccgcagtgggactgttcctacacctcttgttgttaggattagggctgcctgtgagattgccgctcaagagatggattatgaccacaggcgtgtcagtgctctgcagcagaggctgcttg

SEQ ID NO: 41261 - DNA, 237 bp, Zea mays
gttggcttctcctccccctccggttcgggttcgggttcgtgaggttctccggggttcggtttcgtgggtgggcggatcgagatggcggcgtcggatgttgagtaccgctgcttcgtcggcggcctcgcctgggccacggacgaccactccctccacaacgccttcagcacctacggcgaggtcctcgagtccaagatcatcctcgatcgggagacgcagaggtcccgcggcttcggc

SEQ ID NO: 41262 - DNA, 289 bp, Zea mays
aagaattccctcccctagccgccgccgccgccgctcgtctccctgagaggtgccgggaccgaggaactggccgagtactaggtagagaatcggtttttcttgtctcagcccggggtctgctgcgtctggtggtggtgaaggggagaaattcgtgagatctgttccggatcaggcgtgcgagctcgggaatcaggggtttcacacatagcttcgtcgatttgaatttgatgtactaatggagtctaagggtggcaaaaagtctagcagtagtcgttctatgatgtatgaa

SEQ ID NO: 41263 - DNA, 315 bp, Zea mays
caaggagttccacgccaacaacatccgtgacaccttccgcgtccttctccagatgggcgtcgtgctcatgttcggtggcaagatgccggtcgtcaaggtggggaggatggctggccagttcgccaagccaaggtctgagccgttcgaggagaaggacggagttaagctgccgagctacaggggcgacaacgtcaacggcgacgacttcaccgagaagagccgcgtgccggacccgcagaggatgatccgcgcctacgcacagtcggtggcgacactcaacctgctccgcgcgttcgccaccggagggtacgctgc

SEQ ID NO: 41264 - DNA, 316 bp, Zea mays
accgagagaatcggcgccggcgcccctgtctacctcgctgccgtgctcgagtatcttgctgctgaggttcttgagctggccggcaatgcggcacgtgacaacaagaagacccgcatcgtaccgcgccacatccagctcgccgtccgcaacgacgaagagctctcccgcttgctgggcacggtgaccatcgctagcggtggtgtaatgctcaacatccataaccttttgctcccgaagaaggccggcggcggcagcgccaaggctgcggctggtgacgaggactaagtccttgactacgcctggtggcacctccagg

SEQ ID NO: 41265 - DNA, 113 bp, Zea mays
gagcatatcacagtgacagacacgatggtgagcgccagaattgttgtcctcctcgccaccctcctatgcgctgccgccgcagtcgcgtcgtcctgggaggacgacaaccacca

SEQ ID NO: 41266 - DNA, 230 bp, Zea mays
aagggtgtggagaagggattccctcttctttcccttcttagcagcatcctcccagtctacaaggaggtcattgctgagttgaaggcagctggggcttcatggattcagtttgatgagcccactcttgtcctcgaccttgattctgacaaattggctgcattctctgctgcatacgcagaacttgaatctgtactttctggattgaatgtgcttgttgagacttactttgc

SEQ ID NO: 41267 - DNA, 222 bp, Zea mays
gggttcgtgaggttctccggggttcggtttcgtgggtgggcggatcgagatggcggcgtcggatgttgagtaccgctgcttcgtcggcggcctcgcctggtccacggacgaccactccctccacaacgccttcagcacctacggcgaggtcctcgagtccaagatcatcctcgatcgggagacgcagaggtcccgctgcttcggcttcgtcaccttctccac

SEQ ID NO: 41268 - DNA, 227 bp, Zea mays
aagagattgaatcaaataacttcctgaatgatcatgagagatttaaacacacaatgagaacagcacaaggagctctgattgtggcatccatcctcaacatgattcttgggttcagcacgatatggggggcatatgccaaaaagttcagtccggtgataatgacccctgttgtttgtgttgttggtcttggactattccaacttggctttccccaggttgggaaatgt

SEQ ID NO: 41269 - DNA, 226 bp, Zea mays
gtttcgtaactggtgagggactgagggtctcggagtggattgatttgggattctgttcgaagatttgcacaggggggcaatggcgaccgcggggaaggtgatcaagtgcaaagctgcggtggcatgggaggccggcaagccactgtcgatcgaggaggtggaggtagcgcctccgcaggccatggaggtgcgcgtcaagatcctcttcacctcgctctgccacacc

SEQ ID NO: 41270 - DNA, 224 bp, Zea mays
tagaaggcctttctcttagttctgatatggtctacatcagacagagtgctggacgtctcttacgggcactatttgagattgttttgaagaggggatgggctcaactagcggagaaagcactgaatctttgcaagatggttgataaacaaatgtggagtgtccaaactcccttgaggcagtttactggaattcctaaggagatcttgatgaaacttgagaagaag

SEQ ID NO: 41271 - DNA, 223 bp, Zea mays
gtttcgtaactggtgagggactgagggtctcggagtggattgatttgggattctgttcgaagatttgcagaggggggcaatggcgaccgcggggaaggtgatcaagtgcaaagctgcggtggcatgggaggccggcaagccactgtcgatcgaggaggtggaggtagcgcctccgcaggccatggaggtgcgcgtcaagatcctcttcacctcgctctgccac

SEQ ID NO: 41272 - DNA, 219 bp, Zea mays
ccgggcacaccccccgagctcagcttagctccactccagctccaatcacagtcgtgaccagagcgcgagagctagctagagggccgtgaaaatgccgatcaataggatcgccctggggagccaccaggaggtgtaccacccgggcgccctcaaggcggcgttcgctgagttcatctccaccctcatcttcgtcttcgccggccagggctccggcatggc

SEQ ID NO: 41273 - DNA, 223 bp, Zea mays
cccgagcatatcacagtgacagacacgatggtgagcgccagaattgttgtcctcctcgccaccctcctatgcgctgccgccgcagtcgcgtcgtcctgggaggacgacaaccaccaccaccacgggggccacaagtccgggcaatgcgtgcggcggtgcgaggaccggccctggcaccagcgcccccggtgcctggagcagtgcagggaggaggagcgggaga

SEQ ID NO: 41274 - DNA, 221 bp, Zea mays
cagcaatcgcaggaaccctagcgccgccgcacccgcaggaatgggtatcgacctcgtcgccggtgggaggaataagaagaccaagcgcactgcgcccaagtctgacgatgtctacctcaagctcctcgtcaagctctaccgtttcttggtcaggaggaccaagagcaatttcaacgctgtcattctcaagaggcttttcatgagtaaaaccaaccgaccac

SEQ ID NO: 41275 - DNA, 219 bp, Zea mays
gttggcttctcctccccctccggttcgggttcgggttcgtgaggttctccggggttcggtttcgtgggtgggcggatcgagatggcggcgtcggatgttgagtaccgctgcttcgtcggcggcctcgcctgggccacggacgaccactccctccacaacgccttcagcacctacggcgaggtcctcgagtccaagatcatcctcgatcgggagacgcag

SEQ ID NO: 41276 - DNA, 219 bp, Zea mays
cggaagtaggggggtattttgaatgtcccagattcatttttgaagcgacacccatttcctgggcctggtcttgcagtacgtgtcctaggtgatgttacacaaggcaatgctttggaggttcttcgtcaggtggacgagatatttgttcagtctattaaagacgcaggcctgtatgataaaatttggcaagcttttgctgtgttcttgccagtacagaca

SEQ ID NO: 41277 - DNA, 300 bp, Zea mays
gccgccaccgccaccgccaccgccacctgccccagcgcgccgccgccgcagccaccatgggtcgcgtccgcaccaagaccgtgaagaagacctccaggcaggtgatcgagaagtactactcccgcatgaccctcgacttccacaccaacaagaaggtgctggaggaggtctcgattctgccctcgaagcgcctccgcaacaaggtggctggcttcagtacccacctgatgcgccgcatccagcgcggcccagtccgcggcatctcgctcaagctgcaggaggaggagcgcgacgccgcat

SEQ ID NO: 41278 - DNA, 297 bp, Zea mays
atcgatcaggtggcactccgagcagcggaggtgctgtccaagctggcgtcgttcggggtgaaggtcctactggacgagcggagaggggagtcgtcctcggagaggaggcgcgccagggcggtggagttgcgcaccatcttcactaggctcggcccaaccttcgtcaaaattggacagggcctgtccacgcgccccgacctctgcccggccgagtacctcgaggagctcgccgagctgcaggattcacttcccagatttccggatgaagaggcattgcatgtattgagagagagttgg

SEQ ID NO: 41279 - DNA, 296 bp, Zea mays
actgttttgggctttgaattgggttactccatggagaacccaaactcattggtcttatgggaagctcagtttggtgatttttcaaatggagctcaagtgatatttgatcagttcctgagtagtggggagtcaaaatggctccgccagactggccttgtcgtttgccttcctcatggatatgatggtcaggggcctgaacattctagtgcaagattggaacgctttcttcagatgagtgatgacaacccttatgttatacccgagatggatccaacactgcggaagcaaatccagca

SEQ ID NO: 41280 - DNA, 300 bp, Zea mays
atccgctcggccaccagctttgaccgcatcccctcccctcctctcctgtgttcctccatacaccactccccccgcaagagcagcgcggcggcggcaaaggcaaaggcaaaggcaagatgttcgggcgcgcgccgaagaagagcgacaacaccaagtactatgagatcctcggggtgcccaagtcggcgtcccaggacgacctcaagaaggcctaccgcaaggccgctatcaagaaccaccccgacaagggcggtgaccccgagaagttcaaggagctcgcacaagcctatgaggttttga

SEQ ID NO: 41281 - DNA, 299 bp, Zea mays
tataaatcagggctcattttctcgctcctcacaggctcatctcgctttggatcgattggtttcgtaactggtgagggactgagggtctcggagtggattgatttgggattctgttcgaagatttgccgaggggggcaatggcgaccgcggggaaggtgatcaagtgcaaagctgcggtggcatgggaggccggcaagccactgtcgatcgaggaggtggaggtagcgcctccgcaggccatggaggtgcgcgtcaagatcctcttcacctcgctctgccacaccgacgtctacttctgg

SEQ ID NO: 41282 - DNA, 216 bp, Zea mays
cgagacgagtcgcctccccccacctcgcctcacccaaccggaacgaacaagttacaatactcatcccaaccccgcctcgaccggatctcgtcggactcggatccgcccgaccaccccgcgccgccgcagatcaaagaagatggcagctgtcgacacattcctcttcacctcggagtctgtgaacgagggacaccctgacaagctctgtgaccaggt

SEQ ID NO: 41283 - DNA, 292 bp, Zea mays
agcaaaagactccaattttcccacggctactgaatcacggatgcttaaatctccccaatccgtatctctgtttccctcacagcgcggctgcctgtaaccactccaggtctccagcgaacaggctcaggcgcaacgcaacaacacaaggcggcggttatggcctctgctgctgcgacggctacgatggggacggggaaggtggtttgcgtcaccggcgcatcagggtacatcgcgtcctggattgtcaggctcctactcgaccgcggctacaccgtccgcgccaccgtgcgag

SEQ ID NO: 41284 - DNA, 300 bp, Zea mays
catctctctaaccgcaggcacgggccggccgccatcgttcacatggctgcgatgccaccggccttcacgggcaacctgaagaaagcacttacaggtactagaagaatcaatttagatgggcttcgatggcgcgtatttgatgctaagggtcaggtgctgggacgattggcttcccaaatagccgttgtgcttcaaggcaaggataaaccgacctatgcgccacatgtggaaaatggagacatgtgcattgtacttaatgcacaggatatcagtgttacaggaaggaaaatgacagataag

SEQ ID NO: 41285 - DNA, 217 bp, Zea mays
gtgctggcttctcgtccccctcttatcaagtcctcctcgggttagggttccttagggttttgtggaggggcgatggcggcggctgatgtggagtaccgttgcttcgtcggcggacttgcctgttccaccatcaacgagtcgctggaggatgcgttcgcctcctacggcgagatcctcgagtccaaggtcatcaccgaccggaagacgtgaacgtccc

SEQ ID NO: 41286 - DNA, 242 bp, Zea mays
aatgaacatgaaggaggcttggaagccttctcccgtagttatgagaagtttggatttaatcgcagcgcggaaggtatcacatatcgagaatgggctcctggagcattttctgcagcattggtgggtgacttcaacaactgggatccaaatgcagatcgtatgagcaaaaatgagtttggtgtttgggaaatttttctgcctaacaatgcagatggtacatcacctattcctcatggatctcg

SEQ ID NO: 41287 - DNA, 288 bp, Zea mays
agccaacaccgacggccggaagaaactggtgatcgccaagatggtggataccatctccgtgcctggcgagttccagttcttcttcggccccggcgggaggaacccggaatcgttcctgtcgagcttgagcaagagcatccagagagctgcatacaagacctcgagcaaccgtgctggagaggctgttcgggaggcatgggcaggacaaggggatgatcgtgcgcgccacggaggagcagacccgcgaggtgcggcgccacgcctcggagggcggccacggcccgcact

SEQ ID NO: 41288 - DNA, 289 bp, Zea mays
cgcacacacacgcaaccagatctcccccaaatccagccgtcggcacctccgcttcaagatgcagatctttgtgaaaaccctgactggcaagactatcaccctcgaagtggagtcgtctgacaccattgacaacgttaaggccaagatccaggacaaggagggcatccccccagaccagcagcggctcatcttcgctggcaaacagcttgaggacgggcgcacgcttgctgactacaacatccagaaggagagcaccctccaccttgtgctccgcctcaggggaggcatg

SEQ ID NO: 41289 - DNA, 291 bp, Zea mays
aacagtcaccggcacgcagacgctcagcaagagccaacaggacatcgtcgctcagcaagaaacaaggggggcaataatggcggagtaccagggcgagtatggacacccgtacccgcgcgtcgaccagtacgggaaccccgtgccgccggtggaccagtacggcaacccgctcccgagggagccggcgtccggtttcggcgccatcgctcccccctacagcgctggcgacacgccgcggggcacgtggcggcgctgtcgagtacggtgccgacgccagtatccgcacgatgg

SEQ ID NO: 41290 - DNA, 99 bp, Zea mays
gcagatgatttgctgttgcaacaagatggatgccaccacacccaagtactccaaggcccgttatgatgagattgtgaaggaagtctcttcctacctgaa

SEQ ID NO: 41291 - DNA, 154 bp, Zea mays
ccgggcgcaagtgagatgccactacttttaacgttattttacttattccgtgggtcggaagcagggcaccgcccctccttttggctccaaagaccggcctcgccgggccgatccgggcggaagacattgtcaggtggggagtttggctggggcg

SEQ ID NO: 41292 - DNA, 157 bp, Zea mays
aaccaacattgcggtgatcaagtactgggggaagcgggacgaggcgctcatcctccccatcaacgacagcatcagcgtaacgctcgaccccgaccatctctccgccaccaccactgtcgccgtcagcccctcattcccttccgaccgcatgtggctc

SEQ ID NO: 41293 - DNA, 99 bp, Zea mays
ggcgtacaaccgaaaggtcgacgtctacagcttcggactgctcttgtgggagatggtgtccggtagaatcgcttacgagaacctgaccccttaccaggt

SEQ ID NO: 41294 - DNA, 202 bp, Zea mays
gttggcttctcctccccctccggttcgggttcgggttcgtgaggttctccggggttcggtttcgtgggtgggcggatcgagatggcggcgtcggatgttgagtaccgctgcttcgtcggcggcctcgcctgggccacggacgaccactccctccacaacgccttcagcacctgcggcgaggtcctcgagtccaagatcatcc

SEQ ID NO: 41295 - DNA, 169 bp, Zea mays
caagaagacaggagaagggagttgtagtgagttttaagaatggcgagtgcacaggcagtggggcaaggagaacgaggccacttcgttctgaagagcggacacaccattccggccgttggtctaggcacttggagggccggctcagataccgctcactctgttcggaccg

SEQ ID NO: 41296 - DNA, 170 bp, Zea mays
gacacggtggtgagcgccagggttgttgtcgtcgtcgccaccctggtgtgcgctgccgccgcagtcgcgtcgtcctgggaggacgacaaccaccaccaccacgggggccacaagtccgggcagtgcgtgcggcggtgcgaggaccggccctggcagcagcgcccccggtg

SEQ ID NO: 41297 - DNA, 218 bp, Zea mays
atcatcgaggaggccgaggacgagctcaagctcatcgctaaaatgattgaatgggatccatggggagttccagatgactacgaatgtgaggtgattgaagacgacaccccaattcctaagcatgttcctcagcaccggcatgttgctcttcctgaggagttcttcaaggcactagatgctgtcaaatctgatcctgctcttcaaggcgatgctcctcc

SEQ ID NO: 41298 - DNA, 297 bp, Zea mays
aacgagaagagcggcggcgcgggcggacaaggagcaggcggaggaggagctgtgccaagccacaatgggtatctcgcgtgactcgatgcacaagcgccgggccaccggtggaaagcagaaggcctggaggaagaagcgaaagtatgagcttggtcgccagccagccaacaccaagttgtcaagcaataagacagtgaggagggtccgtgttcgtggaggtaatgtgaaatggagggctcttcgccttgatactggtaactactcatggggaagtgaagctgttacccgcaagacccg

SEQ ID NO: 41299 - DNA, 293 bp, Zea mays
agcatccctcccttccgcgtggtgtgctctctgttcctacgccgtttcctctcccgactctctcctcgccggcgacgcgcggagtaggtgcaacagaaactgctcgaggcggaggcggacctgcggctgcacagacatgggtgatcacgaggcgcgcggtgatgacttcgagaagaaggcggagaagaagctctcgggctggggcctcttcggctccaagtacgaggacgccgccgacctcttcgacaaggctgcgaactccttcaagctcgccaagaactggagcagagctg

SEQ ID NO: 41300 - DNA, 295 bp, Zea mays
tagcaacatagaaagcacaatagtgtaccaacaatggcagccaaaatattttgcttccttatgctccttggtctttctgcaagtgctgctaccgcaaccattttcccacaatgctcacaagctcctatagcttcctttcttcccccatacctctcaccagcggtgtcttcagtatgtgaaaacccaattcttcaaccctacaggatccaacaggcaatcgcagcaggcatcttacctttatcacccttgttcctccaacaaccgtcagccctattacagcagttacctttggtgc

SEQ ID NO: 41301 - DNA, 293 bp, Zea mays
ggactccaccatctctgtcaccaagattgggttatggggtggatccgatgaatgggcaatctacggcgggaccggagagtttgctatggcgagaggtgtcgtcaaaagaaggtaccttgccgatagggacggcgccgggaacactgacgagctcagcatgcaggttttctgcccggtgtttggctcatcacagcaaccaaacaagcaggactccaccatctctgtcaccaagattgggttatggggtggcgaaggagggtcggcgcaggacatcacgacgacggagccaccgc

SEQ ID NO: 41302 - DNA, 295 bp, Zea mays
tacaaggcccgcagaaactacaaggtgttctaccccaccatgtacgccatcgagtcggagaacaaggacgccaagctcttcaactgcgtgcagatggggcaccagaactctctagagtggatgcccgttttcttcgtcatactgctgctgggcggtctgcagcacccgaccatcgccgccggtctgggcggcatctacatcgtcgcgaggttcttctacttcaagggatacgccaccggcgttccggacaaccgtctcaagattggggggctcaactacttggcgttgcttgggc

SEQ ID NO: 41303 - DNA, 293 bp, Zea mays
cccgagcatatcacagtgacagacacgatggtgagcgccagaattgttgtcctcctcgccaccctcctatgcgctgccgccgcagtcgcgtcgtcctgggaggacgacaaccaccaccaccacgggggccacaagtccgggcaatgcgtgcggcggtgcgaggaccggccctggcaccagcgcccccggtgcctggagcagtgcagggaggaggagcgggagaagcggcaagagctgagcaggcacgaggccgacgaccgcagcggcgagggctcgtcggaggatgagcgaga

SEQ ID NO: 41304 - DNA, 291 bp, Zea mays
tgaagcaacatgagaaggttcttgaggaaggtgtcctcaacccagaatcaactgttgttgcgatcttcccctctcctatgcattatgctgggccaactgaggttcaatggcatgctaaggctcgtattaatgctggtgcaaatttctatatcgttggaagggatcctgctggtatgagccaccccacagagaaaagggacctctatgatgctgatcacggaaagaaggttttgagcatggctcctggccttgagaggctcaacatccttcctttcaaggtggctgcgtatg

SEQ ID NO: 41305 - DNA, 288 bp, Zea mays
cagccactccaaacacttgcgccgccactgcctcacaggtaaggccgccatggtctccggttcgggcgtgtgcgcgaagcatcgtggtggacgcgcgccaccacatgctgggccgtctctcctcgatcatagccaaggagctgctcaatgggcagaaggtggtcgtcgtccgctgcgaggagatctgcatgtcgggcggcctcgtccgtcagaagatgaagtacctccgcttcctccgcaagcggatgaacaccaagccgtcccacgggcccatccacttccgcgccc

SEQ ID NO: 41306 - DNA, 287 bp, Zea mays
agatttcataactattcatctcgtacgcatgcaaagagtgtggtgcacctgtaccatcgggcattccctccacaacaatgaaagctacatctgatgcctcttccacattaggaactaagcggttggcttcagaggacctggccaatgactgggataataaaaggctaaatccaggaaatgacaattatccactttcaacaggagctgcaaataatttatttttgggtattgagcaaggagctggaagcagcaatggccagtctgccattcccaaatttgacaatggg

SEQ ID NO: 41307 - DNA, 218 bp, Zea mays
gttcgggaggcgtgggcaggacaagggggtcgtcgtgcgcgccacggaggagcagacccgcgagctgcggcgccacgcctcggagggcggccacggcccgcactggcccctgccgccgttcggcgagtcgcgcggcccctacagcctcctggaccagcggcccagcatcggcaaccagcacgggcagctctacgaggccgacgcgcgcagcttccacg

SEQ ID NO: 41308 - DNA, 286 bp, Zea mays
gccatacggatgccgatgctcagagtgtccaacttcgtcgacgcatcatcctcattatccgatgggcagggagctggtgtcagctacgcgatcatggtcttggtccttccggctccagttccgaccactaagaatcacaggactagaggacccagaggagaaggaggagcacgagagtggagcaggcaggagctggagatcgtggaggttgcggcggaccagttagccgtggcgctgtcgcacgcggcggtgctgaaggagtggcagctgactcggcacaagctgg

SEQ ID NO: 41309 - DNA, 288 bp, Zea mays
cccttcgccgcgaaaaccctagaaactacccaccccgactgcacgccgccatgtcatccacaacgccggccatcgcgtcccccgcctctgagcaagccaaatcgaagaaaaagaagcacagatcgaaggacgacccctccgctgctgccgccgacccaccgtcgctcgctgaggccgaggagaagactgatggctacctcatcaagccgcagtcccttgttccgtccctcgacacctccacctggccgctcctcctcaaaaactacgaccgccttaacgtccgcaccg

SEQ ID NO: 41310 - DNA, 283 bp, Zea mays
cccagctcgctcgtcccagctgatcaggtcgagcacctagtagcgacctgctcgatcatcagtgtagagtgtcggtaggtgtctgtctctcttggtggctggttgcaacggtcatggcgacgtcgtctcgtcgggtgcccttgctgctgctgtgcctgggcgtgctggtgtcctgctccttcgcggcgggcagcttggaccaggagctggacatcacgtggagcgacgggcggggcaaggtccttgacaacgggcggctgctgacgctgtcgctggaccgcac

SEQ ID NO: 41311 - DNA, 282 bp, Zea mays
gtgcgagtgagctatgcagcacatgtcatgcttgtctttcccattgtcttctttgccctccggctcaacttggatgagttgctcttccccacgtcaaggcacatctctcgtgacaacaagagattcgccatcatcaccgtctctctcctcgcagtaatttatcttgctgccattctcataccaagcatctgggacgcgttccagtttactggtgccacagctgctgtcctgattggttttatatttcctgccatggtcatacttagggattcttacggaatc

SEQ ID NO: 41312 - DNA, 113 bp, Zea mays
gctcctcgtcgatccatcgatgactgcaccggccggctgcaccgcgctcgcaggggctagccaacgatacggcagcaatggcggaccgtgaccgcagcgggatctacggcggc

SEQ ID NO: 41313 - DNA, 284 bp, Zea mays
attctgtaagaagtacaacatagagcctagggctccggaatggtactttgctcagaaaattgattacttacaagacaaagttcaaacttcatttgtgaaagaacgccgggccatgaagagagaatatgaagaattcaaagttcgtatcaatggtcttgtagccaatgcacaaaaagttcccgaggagggatggatcatgcaagatggtacaccttggcctgggaacaatactagggaccatcctggaatgattcaggttttcctgggtcacagtggagggcttg

SEQ ID NO: 41314 - DNA, 282 bp, Zea mays
atgccgtcttgctgggaagtatcttttagagttgctaaagatggatttgaagcctaaggacattatcactgagaagtcattgcgaaatgcaatggttattgttatggcacttggtggttcgactaatgctgttctgcatttgattgccattgctcggtccgttggtttgcatttgactcttgatgatttccagaaggtcagtgaccaagttcctttccttgcagacctcaagcccagtggcaaatatgtcatggaggatctacataagattggtgggacact

SEQ ID NO: 41315 - DNA, 198 bp, Zea mays
agaagcggcggcggcggacaaacgcaggcgaaggcgagggtgtgagggaaggagcaccagccatggtgcacgtcaacttctaccgcaactatggtaagacgttcaagaaaccaaggcgtccttatgagaaggagcgtcttgatgctgaactgaagctggttggtgagtatgggctgaggtgcaagcgtgagctttgga

SEQ ID NO: 41316 - DNA, 205 bp, Zea mays
agcatatcacagtgacagacacgatggtgagcgccagaattgttgtcctcctcgccaccctcctatgcgctgccgccgcagtcgcgtcgtcctgggaggacgacaaccactatcaccacgggggccagaagtccgggcaatgcgtgcggcggtgcgaggaccggccctggcaccagcgcccccggtgcgctgtagcagtgcaggg

SEQ ID NO: 41317 - DNA, 293 bp, Zea mays
acctggtgcaatagtttgtcgtgtagcaccgtcttttttacgttttggttcgtatcagatacacgcttcaaggggcaaagaggacattgagattgttcgtcgtttggcagactacacgatacatcatcactttccacatcttgaaaatatgaaaaagagtgaaggtttgtcattcgagacagctataggagattccccaacaatagatctcacatcaaacaaatatgcagcttgggcagttgaggtggcggagaggactgcttacttgatagctagatggcaaggtgttggct

SEQ ID NO: 41318 - DNA, 285 bp, Zea mays
cagaaagaagtggcatgacctcccatgccgccgtggtcgcacgcaggtggggaaaatgctgtgtctcgggatgctctgggattcgtgtaaatgacgcagagaaggttgtgaagattggaggcaatgtgctgcgcgaaggtgagtggctatcgctgaatggatcgaccggcgaagtgatcctcggaaagcagccgctctccccaccagccctcagtggcgatctgggaacattcatgtcctgggtggatgacgttagaaagctcaaggtcctggcaaacgcggata

SEQ ID NO: 41319 - DNA, 291 bp, Zea mays
gcgctcacggtggccacccccgtgctggtgatcttcagcccggtgctggtaccggccgccatcgcgctggcgctcatggcggcgggttcgtcacctccggcggcctcggcgtcgctgcgctgtccgtgttctcctggatgtacaagtacctgacgggcaagcacccgccgggcgccgaccagctggaccacgccaaggcgaggctggcgtccaaggcccgcgacatcaaggatgcagcacagcaccgcatcgaccaggcgcaggggtcttgagagaagaaccacactcgag

SEQ ID NO: 41320 - DNA, 301 bp, Zea mays
ttgggatcgtcttccaggctaagtgtttggagactggagagaccttcgccattaagaaggtgctgcaggatcggcgttacaagaaccgggagctgcaacttatgcgtgccatggagcaccccaacgtcatctgcctgaagcactgcttcttctcaacaacgagcagggacgagttgtttctaaaccttgtcatggaatttgtccccgagaccctgtaccgtgtcctgaagcactacagcaacgcgaaccagaggatgcctcttatctacgttaagctctacatgtatcagcttttcagagg

SEQ ID NO: 41321 - DNA, 300 bp, Zea mays
agacaacactcaccgatagcaagtagcgccgccgacgtttcgagagcagagtatccaagctagccaagcgcgcacctcggtgacctagctagctacctagctagttcaggcgacgatatggcgtctggtcaggagagcaggaaggagctggaccgcaaggctcgcgagggcgagaccgtcgtccccggcgggaccggcggcaagagcgtcgaggcccaggagcacctcgccgaaggcgcagcgcggaggccagactcgcagggaccagctggggcagcaggggtacagcgagatggggaa

SEQ ID NO: 41322 - DNA, 240 bp, Zea mays
agatcaagaagccccgtggcctaggtcagtggcccgcattgcacatggcaggtgcgctggcttaccatctccccaagtgggagagtggacgtcataatttatggtagaggggtacgcgttcgcgcggcccctgccaattctgataaatttaattctggtcctttgaagatttaaaagtttgggtagctttattgttcgctgtactgtttttagagtttcaaaagagccaattctaataaa

SEQ ID NO: 41323 - DNA, 288 bp, Zea mays
accggcaccaacccagcgcggcgccaccgggacccgtacccccttccccggagagcgatggcgacggagctgacggcggcgcactgcgcgcgtacgacggcaccgacccgtccaagcccatctacgtctccgtccggggcaaggtctacgacgtcacctccggccgcggcttctacggccccggcggcgcctacgcactcttcgctggccgcgatgccagccgcgccctcggcaagatgtccaaggacgaggccgacgtctccggggacctctccgggctcaccgaca

SEQ ID NO: 41324 - DNA, 284 bp, Zea mays
gcgctgctcaactgtgacctaattggcttccacacttttgattacgccaggcacttcctctcgtgctgcagtaggatgctgggaattgaataccagtcaaagcgtgggtacattgaattggattactttggccgcactgtcgggatcaaaatcatgccagtgggagttcatatgggtcaattggagtcgggtctgcgcttgcctgataaggaatggaggctttctgagcttcaacggcagtttcaggggaaaactgtcttgcttggtgtggatgatatggatat

SEQ ID NO: 41325 - DNA, 290 bp, Zea mays
agtcgctccgccgccgccgaaacagcacatcgctctctcgatctcagccatggcggaggtggagcagccccaggacgcggtgaagctcttcaaccgctggaccttcgacgatgtccaggtgaacgatatctcgctgaacgactacctggctgtgactgcagcgaacacgcgacattcctgccgcactccgcggggcgctactccaagaagcggttccgcaaggcgcagtgcgccatcgtcgagcgcctcaccaactcgctcatgatgcacgggcgcaacaacggcaagaa

SEQ ID NO: 41326 - DNA, 288 bp, Zea mays
ttcagccgcaagcacggcgagaagaagtggaagtgcgacaagtgctccaagcgctacgccgtgcagtcggactggaaggcgcactccaagatctgcggcacccgcgagtaccgctgcgactgcggcacgctcttctcccggagggacagcttcatcacgcaccgggcgttctgcgacgcgctcgcgcaggagagcgcgctgctgccgccgaccagcagcctcagcaacctcaccagccacctctacggcgccagcaccaacgcgggcaacatggcgctcagtctctcg

SEQ ID NO: 41327 - DNA, 296 bp, Zea mays
ctccaacagagtcctcagagggttaactcccattggcgcgatgaagtcgtataggctatcggagctcagcgacaccgaagttagcggcctcaaagctcgtccccgcatcgatttctcgtctatttttggcacggtgaatccaatcgttgaagatgtccgtgtgagaggtgatgcagcagttaagcactacacagaaaagtttgacaaggtcatgcttgatgatgttgtcgtctgtgttagcgatcttccagatgcagagcttgatccagctgtgaaggaagccttcgatgttgcat

SEQ ID NO: 41328 - DNA, 264 bp, Zea mays
acgacgcagagtcgcagtcgcagcacacactgaattctctttagctagctaagagagggtagccacaccaagacaggatgcagacagcgaaggtgaaggcgaaggacatggtgagctcggcgaaggagaaggtgaaggaggggtcggcaaagatgcagggcaagacgggcgaggcgacggcggccacgcacggcgagaaggagatggccaagggagcggcccgcgccaagaaggaccaggccaacgccgacaagcaccaggaga

SEQ ID NO: 41329 - DNA, 229 bp, Zea mays
atcgccgctgctgccatggacgaatcgtcagccagattttggagaagcaagtgctgtctgccgcgaaggggtggaggacaagctcgatgaggagatcgccgcgctcgatcgcctcgatccggacgacatcgaggcgctccggagcgcggatccagcagatgcgccgcgccgccgagcgccgcgccaagtggcgtgcgctggggcacggggagtacaccgaggtccccga

SEQ ID NO: 41330 - DNA, 193 bp, Zea mays
caacacgccgccgtcttctgcggttctgccgtttactcctccactttggcctcctcacttgcaagtttaatcttcgcctccagccatgggtaaggagaagtctcacatcaacattgtggttattggccacgtcgactctggcaagtcgacaaccaccggccacctgatctacaagcttggaggcattgacaag

SEQ ID NO: 41331 - DNA, 279 bp, Zea mays
cggctcgagtggaaagctgaggagggaagccgagcgcgccaagagagccctcagcaaccagcaccaggtccgtgttgagatcgagtccctctttgacgggaccgatttctcggagccactgacccgtgccaggtttgaggagctgaacaacgacctcttccgcaagaccatgggccctgtcaagaaggccatggaggatgctggccttgagaagagccagatccacgagatcgtcctggttggtggaagcaccaggattcccaaggtccagcagctcct

SEQ ID NO: 41332 - DNA, 276 bp, Zea mays
gcgggacgttcatctttcctggcgcacagccagccccccaccggagcttctccgaggaagttgctgtacttaaccgatactttgggggcctgaagtctggtggcaatgcttatgtgattggagatgcagcaagaccaggacagaagtggcacatctactacgccactgagtacccagagcaaccaatggtcaaccttgagatgtgcatgactggtctggacacgaagaaagcttcagtcttcttcaagactaatgctgatggcaacaccacatgtg

SEQ ID NO: 41333 - DNA, 220 bp, Zea mays
agctccgcctcgatccatcgatcagtgcaccggccggcggcaccgcgctcgcacgggctagccaacgagacggcagcaatggcggaccgtgaccgcagcggcatctacggcggcggcgacgccacctacgggcagcagcagcaggagggaggaggcgggcgcccgatgggtgagcaggtgaagggcatgctccacgacaaggggccggcggcgtcgcagg

SEQ ID NO: 41334 - DNA, 284 bp, Zea mays
atcaagaagtcaagaatttctggcatccctaagcttgaggatgcaaatgaagctggtgggaaggactctcacaagtgcaccttgattctgactgagggtgactctgcaaaagctcttgctatgtcgggcatagctgttgtagggagagattactatggtgtatttcctctcaggggaaaactattgaatgtcagagaggcaaaccacaagcagataatggacaacgctgaaattcagaacataaagcaaatccttggtttgcagcatggaaagcagtatgatag

SEQ ID NO: 41335 - DNA, 318 bp, Zea mays
agccgagaagaccggcaaccacacctttgacccgctcatggacctgctcgtcggcaacgttggcctcatcttcaccaagggagacctcaaggaggtgcgcgaggaggtcgccaagtacaaggttggggctcctgctcgtgttggtctggttgctcctgttgatgttgtcgtgccccctggcaacactgggctggatccctcccagacctctttcttccaggtgcttaacatccccaccaagattaacaagggtactgtggaaattatcacccctgtggagctgatcaagaagggtgagaaagtgggctcgtccgagtc

SEQ ID NO: 41336 - DNA, 303 bp, Zea mays
cgagctctactccaccccctcgatctcgaagcgcacagcagcagtcaggcggccatggacgcgagcgcactcggagccggcgggaaggcgaagaagggcgcggccgggcgcaaggccggcgggccgaggaagaagtcggtgacgaggtccgtcaaggccgggctgcagtttcccgtcggccgcatcgggcggtacctgaagaagggccggtacgcgcagccgtcggcacgggcgcccccgtctacctggccgccgtcctcgagtacctggccgccgaggtgctggagctggccggcaacgctg

SEQ ID NO: 41337 - DNA, 313 bp, Zea mays
ccgcgcctctacatttcttctctctctgctcctccgcctccgcctccgcctgatccatccaagacagggatcgccatgtcggactcggaggagcaccacttcgaatcgaaggccgacgctggggcgtccaagacctacccgcagcaggctggcaccgtccgtaagaacggcttcatcgtcatcaagaaccgtccctgcaaggttgtggaggtttctacctccaagactggtaagcatggccacgccaaatgccactttgtcgccatagacatattcaatgggaaaaagcatgaagatattgttccttcatcac

SEQ ID NO: 41338 - DNA, 274 bp, Zea mays
cgtcgccggccggggcggtcaggtacctggccaagaccgacgggcggaagaacgtggtcgtcggcaggatgctgcataccatctccgtgcctggcgagttccagttcttcttcggccccggcgtgaggaacccggaatggttcgtgtcgagcttcaggaagaggatccagagagctggatagaagacgtcgagcgaccgtctggagaggctgttcgggaggcatgggcaggacaaggggatcatcgtgcgcgccacggaggagcagagccgcga

SEQ ID NO: 41339 - DNA, 267 bp, Zea mays
gttggaagctggaaaacttggatgctatgaatggtggggtggttggggtatttatagccccaaccaccaaacttgaccgttggtggaggctgtctgtcgtatggtgcaccggacagtccggtgcacaccggacatgtccggtgcgacagccacgtcaagtaatagccgttgggtcaaccgttggagctctgtctctgggcccgccttgatgtccggtggcgcaccggacatgcactgtagagtgtccggagcgcctgctcccgcgtg

SEQ ID NO: 41340 - DNA, 312 bp, Zea mays
cccacaccgggcacaccccccgagctcagcttagctccactccagctccaatcacagtcgtgaccagagcgcgagagctagctagagggccgtgaaaatgccgatcaataggatcgccctggggagccaccaggaggtgtaccacccgggcgccctcaaggcggcgttcgctgagttcatctccaccctcatcttcgtcttcgccggccagggctccggcatggccttcagcaagctgaccggcggcggcccgacgaccccggcgggcctgatcgctgcggcggtggcgcacgcgttcgcgctgttcgtggc

SEQ ID NO: 41341 - DNA, 309 bp, Zea mays
cacacaccacaccacacctcctcgcttccactccgctcgtctgacatctcgtcccgtcctttcgtttcgaagcctcgcgagccccgacgatggccaccgccgcggtgtcggtcgacgagaagctcgacaagcttcgcgccgaggtcgccaagctcgaccagatcagcgagaacgagaagtccgggttcatcagcctcgtgtcacgctacctcagtggggaagcggacagatcgagtggagcaagatccagacccctacggatgaggtggtggtgcctacgataccgtcagcgtcgctccgaagatctcg

SEQ ID NO: 41342 - DNA, 312 bp, Zea mays
gccgttgcggtggaggacctgatcgtgcggcgggggcgcgtcggcggcgtggtcatcaactgggcgctcgtgtccatgaaccacgacacgcagtcgtgcatggaccccaacgtcatggaggccaaggtggtggtcagctcctgcggccacgacgggcccttcggcgccaccggcgtcaagaggctccaggacatcggcatgatcagcgccgtgcccgggatgaaggcgctcgacatgaacgccgccgaggacgagatcgtgcgcctcacgcgcgaggtcgtgcccggcatgatcgtcaccgggatggaggtc

SEQ ID NO: 41343 - DNA, 318 bp, Zea mays
cgcactcgcacgtacaccacactagttaccacagacgacgggcgccatgaaagtcccggtgcttctcctcctggtctccctgtgcttctcgctcgcgctcgcgtggcaaacggacacggaatcgggctcaggcaggccgtaccactacggcgaggagagtttccggcactggacgcgctcccggcagggccggttcagggtgctggaacggttcacccacgagctgctggaggacgccgtcggcaactaccgcgtcgccgagctggaagccgcgccgcgcacgttcctgcagcccagccactacgacgccgacgaggt

SEQ ID NO: 41344 - DNA, 304 bp, Zea mays
agatcaagaagccccgtggcctaggtcagtggcccgcattgcacatggcaggtgcgctggcttaccatctccccaagtgggagagtggacgtcataatttatggtagacgggtacgcgttcgcgcggcccctgccaattctgataaatttaattctggtcctttgaagatttaaaagtttgggtagctttattgttcgctgtactgtttttagagtttcaaaagagccaattctaataaatttatttctggtccttacatttgaagatttggttagctttattgtcctctgtactgattttaga

SEQ ID NO: 41345 - DNA, 307 bp, Zea mays
gcagcttaaagctatcaagagactcgtagaggctgaggcacttaagatggaaattattccaaaccccaaggaagttgatggtgtgaaagtccttcaactcgaaaccgcagctggtgcagctattcggttcttcgacaaagcgattggaattaatgttccccgctcaaggtttctcccagtgaaggctacatctgatctgttgcttgtgcagtctgatctttacaccttggttgatggctttgtcatccgcaacccatccagagcgaatccagctaacccttcaattgagcttggagctgagttcaag

SEQ ID NO: 41346 - DNA, 306 bp, Zea mays
acaaactccaagcaggatatttgtttcctgagattgccaggagaagagccgctcatttgctgaagtttccagatgccaaaattataagccttggaataggcgacactaccgagcccattccaaatgtcataacaaatgccatggcagagagagcacatgccttgtcaacaattgatggctacagcggttatggagctgagcaaggtgaaaagaaactcagagcagcaattgctgcaacctactatgcggaccttggtattgaagattcagacatatttgtctctgatggtgccagatgtgacatat

SEQ ID NO: 41347 - DNA, 306 bp, Zea mays
attcagagctccagacaacgtaaaatacccatcaatggacctagcctatgcagctggccgcgctgggggcaccatgacaggagtcctgagcgctgctaatgagaaggccgtggagttgttcattgacgagaagattagctacctggacatattcaaggtggtggagcttacatgtaacgcgcatcggaacgagctggtaacaagcccgtcactggaggagatcgtccattacgatctgtgggcgaggagatatgcagccagtctacaaccatcttctggcctgagccctgtccctgcataataggt

SEQ ID NO: 41348 - DNA, 307 bp, Zea mays
gccgccgcagtcgcgtcgtcctgggaggacgacaaccaccaccaccacgggggccacaagtccgggctatgcgtgcggcggtgctaggaccggccctggcaccagcgcccccggtgcctggagcagtgcagcgaggaggagcgggagaagcggcaagagcggagcaggcacgaggccgacgaccgcagcggcgagggctcgtcggaggatgagcgagagcaggagaaggagaaacagaatgaccggcggccgtacgtgttcgaccggcccttcgacgaggcatccgggactaccgcgtggcggtcct

SEQ ID NO: 41349 - DNA, 251 bp, Zea mays
tattggtcatgacctgatgggacggcctctaaggattgacatggctaccgagaggggtgcatacactcctagcagcgggaaggacaacggttctttcaagaagttcgctccaaggtcaggcaacaccgtgtttattaagggctttgacacctctggtggagaggaccagatccgcaccgctcttgaagagcattttggatcatgtgagatatcacccggatttcaattccaaaggattatgacactggtgt

SEQ ID NO: 41350 - DNA, 268 bp, Zea mays
cccgagcatatcacagtgacagacacgatggtgagcgccagaattgttgtcgtcctcgccaccctcctatgcgctgccgccgcagtcgcgtcgtcctgggaggacgacaaccaccaccaccacgggggccacaagtccgggcaatgcgtgcgagcgtgcgaggaccggccctggcaccagcgcccccggtgcctggagcagtgcagggaggaggagcgggagaagcggcaagagcggagcaggcacgatgccgacgaccgcagcggcg

SEQ ID NO: 41351 - DNA, 300 bp, Zea mays
cagacgacgggcgccatgaaagtcccggtgcttctcctcctggtctccctgtgcttctcgctcgcgctcgcgtggcaaacggacacggaatcgggctcaggcaggccgtaccactacggcgaggagagtttccggcactggacgcgctcccggcagggccggttcagggtgctggaacggttcacccacgagctgctggaggacgccgtcggcaactaccgcgtcgccgagctggaagccgcgccgcgcacgttcctgcagcccagccactacgacgccgacgaggtgatgttcgtgaag

SEQ ID NO: 41352 - DNA, 295 bp, Zea mays
gtcttaggttattatagaagttaaaatgttattccaatgaggcaatgactactcacaatggaatatcaccttgcttgttggattatttacggtgaagacttttagatatagtttgaactgtacctcatttatagcgtatttacataaatgtgatacccatctgattgttgtgatttttgatgtgtaaggtatcctcctggtcatggtgatgtgtttccttctttgaataacagcggaaaacttgacatcttattggctcagggcaaggagtatgtctttgttgcaaactcagaca

SEQ ID NO: 41353 - DNA, 298 bp, Zea mays
caagtttgtccattcgcattggtctgaatactgtagctactagcgcgagtgccactgtgccgcagctgcctgctcgccattactgcaagctgtgttcaatcaaagcttaattaggctccctctacatctgatccagctaagtagctagccagcactacagtagggcgtggcaagaatcaggagagagatatcaggggggctagctagctgagctcgtgcgacgaagaatggccggaattggcaggaacatggtggcgccgctcctggtgctcaactctcatcatgtacatcatcgtca

SEQ ID NO: 41354 - DNA, 304 bp, Zea mays
cgcctccctttccccttccctccctccctctccccgcgggccgccagaggcaatttcgccctcgattcgaccccgattcgtccgcccgcgaccgggattccctccgccaagcgcggatctgaacgctgcgctccgtgtcgccgctcgaatccgccatgaagggggccaaatccaagggcgccgccaaggccgatgccaagctggcggtgaagagcaagggggcggagaagcccgccaagggcaggaaagggaaggccggcaaggaccccaacaagcctaagagggctcccagcgctttcttcgt

SEQ ID NO: 41355 - DNA, 302 bp, Zea mays
cggaaggcgaaagagtagcagcagcaggcggcgccgagtagcggctccccacctcgagcttgccaccatggctagaggattgaagaagcatttgaagaggctcaatgcgcccaagcattggatgctggacaagcttggcggagcttttgctcccaagccatcttctggacctcacaagtctagggagtgcctgccactgatcctcatcatcaggaacaggctcaagtatgctcttacataccgtgaggtcatttccatcctgatgcaacgccatgtacttgttgatggcaaggtcaggacag

SEQ ID NO: 41356 - DNA, 303 bp, Zea mays
caaaaatgctcgcattggagaaaatgtgaagataatcaattttgataatgtccaagaagcagtaagggagacagaaggatattttatcaaaagtggaattgtcacggtgattaaagatgctttaattcctagtggaacaatcatataaagtcagccaacaccatgtatataaggttgggttgcatcatatggtgatcgccaatgcgcatcaagttctctcatcccttgcgagaccatgcttatttccattgcaaaatcatcaagctctgcatcaacttgttgtggataataatgaaataataa

SEQ ID NO: 41357 - DNA, 300 bp, Zea mays
gtctgtttgttgtgttagggtttcgtctcgtgtataaggcgttcggagctcgcaaatcctttcctctctcgcgttcgaggctaggtagccgtcaccatgagccgctcggggcagcctccggatctcaagaagtacatggacaagaagcttcagattaagatgaatgcaaaccgtgttgttatcggcacacttcgtggattcgaccagttcatgaatctggtggtggacaacattgtggaggtcaatggaaatgacaaaacagatattggaatggtggttatcaggggaaacagtgttgta

SEQ ID NO: 41358 - DNA, 300 bp, Zea mays
tattgatcataagaaatatgatgaggctaaggcatgcgcaagtgtgagcattgctcgcctgaagaatctaaaccggagaactgttgatgttttggcatcacgactgtacttctattactcttatgtgtatgagcttaccaacagccttgctgaaatccgtgggaatttgcttgctctacacagaatggcaactttgcatcgtgacgagcttggccaggaaacactgctcaatctcctccttcgcaattacctccactacaatttgtatgatcaggcagaaaagcttagatcaaaggcacc

SEQ ID NO: 41359 - DNA, 286 bp, Zea mays
cgcaagtagcgccgccgacgtttcgagagcagagtatccaagctagccaagcgcgcacctcggtgacctagctagctacctagctagttcaggcgacgatatggcgtctggtcaggagagcaggaaggagctggaccgcaaggctcgcgagggcgagaccgtcgtccccggcgggaccggcggcaagatacgtcgaggcccaggagcacctcgccgaagggcgcagcgtcggaggccagactcgcagggagcagctggggcagcaggggtacagcgagattgggaa

SEQ ID NO: 41360 - DNA, 302 bp, Zea mays
acgcagttccccgaccacaccgttcctccgagcccaggagcagccccgcgccaggaggaagtttgttcttttaacaatatgtcgagggaggagaatgtttacatggccaagttggctgagcaggctgaaaggtatgaggagatggttgagtatatggagaaggtggctaagactgtagatgtggaagagctcactgttgaggagcgtaaccttctgtctgttgcatacaagaatgtgattggggctcgccgcgcttcatggcgcattgtttcttccattgaacaaaaggaggagtcccgtaa

SEQ ID NO: 41361 - DNA, 302 bp, Zea mays
cttggctaggtcttcgctgggtccttccccggcgacgagcgaccatctggggtcgactgaactgagcaggcagtaggaagagacactatgttgttcttctcctacttcaaggagctggtggggaaggaggtgacagtggagctcaagaatgacttggcgatccgcgggacgctccactcggttgaccagtacctcaacatcaagctcgagaacacccgcgtagtcgaccaggacaagtatccccacatgctttcagtgcggaactgcttgcatcagggctcggtggtgcggtacgtgctgct

SEQ ID NO: 41362 - DNA, 281 bp, Zea mays
gcagcagaagcactgcgcggcattgcagcgatcgagcgggaggcatttggggcatggtggtcgccaacggcgctcggatctagaggcccgcacgggcggttggtctccgcccgcctcgtcggtgttggtgtcgttggcgtgtggagccgtctcggtgggagcagcggggagggagcggagatggcggccaacaaggggatggtggcgggctcgcacaaccgcaacgagttcgtcatgatccgccacgacggcgatgcgccgggctcggctaagcccacaaa

SEQ ID NO: 41363 - DNA, 292 bp, Zea mays
gtcagaagctcaaatactgatctcactgatccagtatggctatggcaaaggcaggcgcgccgagggtctcggcggcccagctggtgactctcgggctatcactcctctgcgctgtcgccggcccggccgccgcgcagaactgcggctgccagccaaacgtatgctgcagcaagtttgagctactgcgcgcacgaccgacgagtactgcggcgacgggtgccagtcgggcccgtgccgctcgggcggcggcggcagcagtggcggcggtggtgcgaacgtggctagcgtcgtc

SEQ ID NO: 41364 - DNA, 296 bp, Zea mays
gcatgatcagcgccgtgcccgggatgaaggcgctcgacatgaacgccgccgaggacgagatcgtgcgcctcacgcgcgaggtcgtgcccggcatgatcgtcaccgggatggaggtcgccgagatcgacggcgccccgaggatgggcccgacgttcggcgccatgatgatctccggccagaaggcggcgcacctggcgctgaaggcactgggcaggcccaacgccgtggacgggaccatccccgaggtgtcgccggcgctgcgcgaggagttcgtgattgcgtccaaggacgacgag

SEQ ID NO: 41365 - DNA, 216 bp, Zea mays
cgacaacatcggcgacggctacgccatcatcttctcccacccagccgacatcacgcccgtgtgcacaacggagatggcggcgatggcggggtacgccaaggagttcgagaagcgtggcgtgaagctgctgggcatctcgtgcgacgacgtggagtcgcacaggcagtggaccaaggacgtggaggcgtacggcgggaagcagcagcagcagcaggc

SEQ ID NO: 41366 - DNA, 288 bp, Zea mays
tgcggaggatcctgaccggcgggggcggcctggcggccctgagggcggcgcgcgccgtgaaggagacgacggggatcgtgggccttgaggtggtgcctaacgcgcgagaggttctggtagggctctacgagcgcacgctcaaagagatcaaggccgtccccgaagacgagggttaccgcaaggccgttgaatccttcaccggtcaccgcctccagatctgccaggaggaggaggactggaagcgcatcgaggaccgaatcggatgcgggcaggtcgaggagctcatcg

SEQ ID NO: 41367 - DNA, 297 bp, Zea mays
aggtggaggacgatgttgtcatgaagctgtggcggcctaccatgaagctgctcctagtgactcttggagatcaagggtgcaagtactatgccagggatttccatggcgctgtgccttccttcaaagtacaacaagttgatacaactggcgcaggtgacgcgttcgttggtgctctgctccaaaggatcgttaaagatccatcctcgctacaagatgagaagaagcttgtggagtcgattaaattcgctaacgcgtgcggagcgatcaccaccacgaagaagggggcgatctcgtcgc

SEQ ID NO: 41368 - DNA, 167 bp, Zea mays
  unsure (1)..(167): unsure at all n locations
atcgcgagcagccgccctttttttttttttttaagcaaacaaacacatgaatacagntacagntaccacacaagcgagctagaggtagttggaatttgtatcttacgttcataccatgtagagccaaaaggtgatggttcataccatataattaccgacacgggaag

SEQ ID NO: 41369 - DNA, 220 bp, Zea mays
caagagatagatctgtccgcagccatggcggcggcggcggcggcggcggacaaggcgtggacgccgcgaggaaagaggaggaggaggagcaggtagtgaatccgtgggaggtgtcggcggggaagggcggcatcgactacgacaagctcgtggaccagttcggctgccagcgcatcgacgacgcgctcgtggaccgcatcgcacgcctcaccgcccgacc

SEQ ID NO: 41370 - DNA, 261 bp, Zea mays
cacacactgaattctctttagctagctaagagagggtagccacaccaagacaggatgcagacagcgaaggtaaaggcgaaggacatggtgagctcggcgaaggagaaggtgaaggaggggtcggcaaagatgcagggcaagacgggcgaggcgacggcggccacgcacggcgagaaggagatggccaaggaggcggcccgcgccaagaaggaccaggccaacgccgacaagcaccaggagaaggccgaccaccgagcggac

SEQ ID NO: 41371 - DNA, 268 bp, Zea mays
ctcagattgagatcctgaggaagaaggggcactcctactctgagatcatcaacgagagcgtgattgagtcggtggactcgctgaacccgttcatgcacgcccgtggggtcgccttcatggtggacaactgctccacaacggctcgcctgggatccaggaagtgggcgcctcgcttcgactacatcctgacgcagcaggccttcgtggcggtggacaaggacgctccgatcaaccaggacctcatcagcaacttcttgtcggaccctgt

SEQ ID NO: 41372 - DNA, 222 bp, Zea mays
cgaggacacacccgtacgcgagcgacgggctggccatctggcacgccatcgagcagtgggtgggcgagtacctggccatctactaccccgacgacggcgcgctgcggggcgacgaggagctgcaggcgtggtggaaggaggtgcgcgaggtcgggcacggcgaccacaaggacgcgccctggtggcccaagatgcaggccgtgtcggagctcgccagcgcct

SEQ ID NO: 41373 - DNA, 201 bp, Zea mays
ctttgtttgcaaagctcctcctcgatcgatccatcgatcaccgcaccggccggcggcaccgcgctcgcagcggacatccaacgagactgcagcaatcgcggaccgtgaccgcagcggcatctacagcggcgcccacaccacctacgggcagcagcagcagcagggaggaggcgggcgcccgactggtgagcaggtgaaaaa

SEQ ID NO: 41374 - DNA, 306 bp, Zea mays
ggcgaggccatcaagcactcccagggcgagggccacccggtcaagctggtgccctacaaccccggctaccaggacgagtcggtgctgtggacggagagccgcgacgtcggccacggcttccgctgcgtccgcatggtcaacaacatctacctcaacttcgacgccttccacggcgacaaggaccacggcggcgtgcgcgacggcaccaacatcgtgctctggaagtggtgcgagggcgacaaccagcgctggaagatcgtcccctggtaaatgtgctgttctgtggctgcactggtcatcaccatg

SEQ ID NO: 41375 - DNA, 307 bp, Zea mays
tcggctcccatcaatctctcagaccgtctgaaccaggtgctccggtgggctctcggttcagtggaaatccttttcagcccgcattgccccctatggtacggctacggaggacgcctgaagttcttggagagattcgcctacatcaacaccaccatctacccgctcacgtccctcccgctcctcatttactgtatcctgcctgccatctgcctgctcacggggaagttcatcatcccagagatcagcaacttcgctagtatctggttcatctctctcttcatctcgatcttcgccacgggtatcctgg

SEQ ID NO: 41376 - DNA, 208 bp, Zea mays
atctcttgccttggtgtacagtggaatgtaccttggatcagtcaccggcctgtctttgtcacctctgttgattagcagatttggctggccttctgtcttttatgcatttggatctcttggaaccgtttggtttgcactgtggcaaagcaaagcacacagctctccagatgatgatccggagctaagtaaagctgaaaagaggcatata

SEQ ID NO: 41377 - DNA, 188 bp, Zea mays
cgcgtggagccgggcgcgagtacgagctggtgatcaccacgtacgcggggctgaaccggtaccgcgtcggcgacgtgctccacgtgaccggcttccacaactcggcgccgcagttccggttcgtgcgccgcaagaacgtgctgctgtccatcgagtcggacaagacggacgaggccgagctgcagcgc

SEQ ID NO: 41378 - DNA, 281 bp, Zea mays
ccgatccgccggcgcggcgctgcggctgtggctgctggcgctcctgctgggctgctgccaggggaggttcgtggtggagaagaacagcctcaaggtgacggcgcccgacggcctcaagggcacctacgagtgcgccattggcaacttcggggtgccccagtacggcggcaccatggtcggcttcgtcgcctaccccaaggccaacaggaaggcctgcaagagcttcgacgacttcgacatctcctacaaggccaagccgggggcgttccccaccttcctgc

SEQ ID NO: 41379 - DNA, 238 bp, Zea mays
gtgaaagtagtaatctacaagttggtcaaggcaacttgaaacttcaatataatgaagctggaaaattatccctgtacaccgatagtaagactatggttcaagcaaactttgagcagctatacaagtattatattggacaggatggaaatggaagtgatcctcaggcttctggagcatacatattccgccctaatggcacagttccaatcagtactgatgggcaggtttctctcacagt

SEQ ID NO: 41380 - DNA, 168 bp, Zea mays
agcaccgcaccaggacccttgttcgccgccgccgcctctgatcaccgcgaggttgtcaggattcaatatgtcgaccagcacattcgctacttcctgcacgctgttgggcaatgttagaacaacgcaggcctcccagacagcggtgaagagcccttcgtctctaagcat

SEQ ID NO: 41381 - DNA, 294 bp, Zea mays
cattctcaggggatcgttcaccgtgacatcaagcccgagaacattctcttcgacgagaacctctgcgtgaagatcgctgatttcggcattgcctgccaggaggccttatgcgatgtgctcgtggaggacgaaggcacttacaggtggatggcgcccgagatgatcaagcagaaggcgtacaaccgaaaggtcgacgtctacagcttcggactgctcttgtgggagatggtgtctggtagaatcccttacgagaacctgaccccttaccaggtggcttacgcagtagccaacagg

SEQ ID NO: 41382 - DNA, 180 bp, Zea mays
atcaatgtcgagaacgttgaggagaaccgccgtgccctccgtgagctcctattctgctgccctggtgctctccagtacatcagcggtgtgatcctcttcgaggagaccctgtaccagaagaccaaggatggcaagccttttgttgatgtcctcaaggagggaggcgtcctccctggcatc

SEQ ID NO: 41383 - DNA, 190 bp, Zea mays
gaattgcagaatcccgcgaaccatcgagtttttgaacgcaagtagcgcccgaagccttctggcggagggcacgtctgcacggacgtcacgccaaaagacactcccaacacccccccgcacggcgagggacgtggcgtctggaccccagcgcagcacgggcacgtgggccgaagcaggggctgcaggcgaa

SEQ ID NO: 41384 - DNA, 305 bp, Zea mays
agtggccacaatcaagaccaagcgcaccatccagttcgtggactggtgcccgactggcttcaagtgcggaatcaactaccagcctcccagcgtcgtccccggcggtgacctggccaaggtgcagcgtgccgtgtgcatgatctccaactccaccagtgttgtggaggtcttctcccgcattgaccacaagttcgacctcatgtacgccaagcgcgccttcgtgcactggtacgtcggtgagggtatggaggagggcgagttctccgaggctcgtgaggatctggctgcgctcgagaaggactacg

SEQ ID NO: 41385 - DNA, 308 bp, Zea mays
agccaaggaggctgccagcttcacctcccaggtcatcatcatgaaccaccctgggcagattggcaacggctatgccccagtgctggactgccacacctcccacattgctgtcaagtttgctgagctcattaccaagatcgacaggcggtctggcaaggagcttgagaaggagccaaagttcctgaagaacggtgatgctggtatggtgaagatgataccgaccaagcccatggtggtggagacgttctcagcgtatcctccccttggtaggtttgctgtccgtgacatgaggcagacggttgctgttg

SEQ ID NO: 41386 - DNA, 303 bp, Zea mays
agtcgcatcccatcccactaccacccatctcgtcgtccgccgattcgatccggttcttccaacccaggggctgtgatggcgacgaagaggagcgtgggcaccctcggcgaggcggatctgaaggggaagaaggtgttcgtgcgcgccgacctcaacgtccctctcgacgacgcccagaagatcaccgacgacacccgcatccgcgcctccgtccccaccatcaagttcctcctcgagaagggcgccaaggtcatcctcgccagccacctgggtcgtccaaaaggtgtcaccccaaagtacagc

SEQ ID NO: 41387 - DNA, 305 bp, Zea mays
ccgggttggtggagtacatcatttccggccccgtggtggcgatggtgtaggaggggaaggacgtcgtgttgactggccgcagatcattggggccaccaggccttgggaggcagcccccggtaccattcgtggggactacgccgtggaagtcggcaggaatgtcatccatggaagcgactccgtggagaacgggaagaaggagatcgctctctggttccctgaaggtgtggcacagtggaagagcaaccttcatccctggatctacgaggcttgagcagttgagcttggatgccttgcctgcttcc

SEQ ID NO: 41388 - DNA, 308 bp, Zea mays
cgcacgtacaccacactagttaccacagacgacgggcgccatgaaagtcccggtgcttctcctcctggtctccctgtgcttctcgctcgcgctcgcgtggcaaacggacacggaatcgggctcaggcaggccgtaccactacggcgaggagagtttccggcactggacgcgctcccggcagggccggttcagggtgctggaacggttcacccacgagctgctggaggacgccgtcggcaactaccgcgtcgccgagctggaagccgcgccgcgcacgttcctgcagcccagccactacgacgccgacg

SEQ ID NO: 41389 - DNA, 260 bp, Zea mays
agaggaggggagaatactagtaacaaggcaaactgaagatgtgaagagacgattgattttggaggagataaatgctgacagagagaagtggatccaagtgataaatacaacatttgagcatataggaggtggtttgcgaacgatattaaccgaccaaaataagctagtggtagcagttggaggggtaacagcacttgctgcagggatatacacaacaagggagggtgcaagagtagtctggggctatgttgatcgtatct

SEQ ID NO: 41390 - DNA, 304 bp, Zea mays
tcgcactcgcacgtacaccacactagttaccacagacgacgggcgccatgaaagtcccggtgcttctcctcctggtctccctgtgcttctcgctcgcgctcgcgtggcaaacggacacggaatcgggctcaggcaggccgtaccactacggcgaggagagtttccggcactggacgcgctcccggcagggccggttcagggtgctggaacggttcacccacgagctgctggaggacgccgtcggcaactaccgcgtcgccgagctggaagccgcgccgcgcacgttcctgcagcccagccacta

SEQ ID NO: 41391 - DNA, 266 bp, Zea mays
cagacacgatggtgatcgccagaattgttgtcctcctcgctaccctcctatgcgctgccgccgcagtcgcgtcgtcctgggaggacgacaaccaccaccaccacgggggctacaagtccgggcaatgcgtgcggcggtgcgaggaccggccctggcactagcgcccccggtgcctggagtagtgcagggaggaggatctggagaagcggcaagatcggactaggtacgatgccgacgaccgcagcggcgatggctcgtcggaggat

SEQ ID NO: 41392 - DNA, 297 bp, Zea mays
ccgaacctgacgcaggtagagctgctggagctcatcgccgggcgcaagcgtcggggagttcggcgacggcgtggacatcgtgcactgggtgcggacggtgaccgggtcgagcaaggagggcgtgatgaagatcgccgacccacggctctcgacggtgcctctgtacgagctaacccacgtcttctacgtcgccatgctgtgcgtggcggagcagagcgtggagcgccccacgatgcgcgaggtcgtgcagatactggccgacatgcccggctcgacatccacgtccatagacgtgcc

SEQ ID NO: 41393 - DNA, 298 bp, Zea mays
cccgtacccgcgcttcgcctgccacttcgacccctacggcccgatctacggcgaccgggagcgcgcccagatcttcgtctcggacgccggcgtcgcggccgtggcgttcgggctgtacaagctggcggcggcgttcgggctctggtgggtggtgcgcgtgtacgccgtgccgctgctgatcgtcaacgcgtggctggtgctcatcacgtacctgcagcacacccacccggcgctgccccactacgactcgggcgagtgggactggctgcgcggcgcgctcgcaccgtcgaccgcgact

SEQ ID NO: 41394 - DNA, 242 bp, Zea mays
gcgcgtccatctcctcctcccccaccccgccctacgacctgacgtccttccggttcagccccatcaaggagtccatcgtgtcccgcgagatgacccggcgctacatgacggacatgatcacccacgccgacaccgacgtggtgatcgtgggcgccgggtccgcgggcctgtcctgcgcgtacgagctgtccaaggaccccaccgtgagcgtggccatcgtggagcagtccgtgtccccgggc

SEQ ID NO: 41395 - DNA, 259 bp, Zea mays
atccaaccttggtgtgatgtcgattggattcatgctgcctaatccagacgatgctgtcatatggaggggtccccgcaagaatggactgatcaagcagttcttaaaggatgtcgattggggggagattgactatcttgttgtggacgctcctccaggaacatctgatgagcacatctcgatcgtgcaataccttcaagccacaggaatcgatggcgcgataatcgtcacgactccgcagcaggtctctctgattgacgtg

SEQ ID NO: 41396 - DNA, 315 bp, Zea mays
gcaccatggtagttggaatgttattacagaatcaagcagtaatagcatagaactgttcactctgtatccggccgctgggaattgtatatgcgcctacttcagaaagcttttattggtctgatctgctggtgcaattggtgcttgtattggtagtcctgctgatctggcactcattagaatgcaagccgattcgaccctgccagttgcacaacgacgcaactataagaatgctttccatgcactctaccgtatcagtggtgatgagggagtccttgcgctttggaagggtgcaggtccaactgtggtgagagctat

SEQ ID NO: 41397 - DNA, 220 bp, Zea mays
  unsure (1)..(220): unsure at all n locations
caagggcttccgctgcatccgcatggtcaacaacacccgcctcaacttcgacgccttccacggcgacaaggaccacggcggcgtgcacgacggcaccgccgtcgtgctntctgggagtagtgcaagggcgacaaccagagctggaacatcctgccgtggggtcccgaggccaactcctccgcggcccacgcgggaggcccgcacgccgtgcgcgtcttct

SEQ ID NO: 41398 - DNA, 325 bp, Zea mays
ttgcccaccagggcttcacattatggagagctcgcaccggagtgtgccagcacatacttcaaatatggatgtgccctgctatacaaagctcaggaggagagtgatgttttgggaaatgttcccaagagcttgccaaatgaagactcagtgaagagtacagctactaaagatgacagtggaacctcaaaggtctctggtaccgatgcggaggatgctgcgtcatcagaaaaagttgatgctgaagaaggtcacaactcaaatggcaaaaatcaggagaatgggaatggtgaagttgagaaagatgatgacgacgtcgacgatgatg

SEQ ID NO: 41399 - DNA, 297 bp, Zea mays
gcagactctctcacccgactcgtcagacgtcagccagcagttcgaaaccaaggattgatccaggagcttccggaaggcgaggcgccgcgagtcgaggtgctggtgccggtgccgcccatggatcgggctcgcggatccgcgttcctgctcggcgtcctgctcgcaggatccttgttcgcgttttcagttgccaaagaggagaccaagaagctcgggaccgtgatcggtatcgatctcggtaccacctactcctgtgtcggtgtgtacaagaacggtcatgtcgagatcatcgccaat

SEQ ID NO: 41400 - DNA, 230 bp, Zea mays
tagagtttccaatatgtttctgatctggtcgagggtctgatgaagctgatggaaggcgagcatgtaggaccatttaacctgggcaaccccggcgagttcaccatgctggagcttgccaaggttgtccaggacaccatcgaccccaacgcacggatcgagttccgtcagaacacccaggacgacccacacaagcgcaagcccgacatcggccgtgccagagagctccttgg

SEQ ID NO: 41401 - DNA, 237 bp, Zea mays
ctcgctttggatcgattggtttcgtaactggtgagggactgagggtctcggagtggattgatttgggattctgttcgaagatttgcagaggggggcaatggcgaccgcggggaaggtgatcaagtgcaaagctgcggtggcatgggaggccggcaagccactgtcgatcgaggaggtggaggtagcgcctccgcaggccatggaggtgcgcgtcaagatcctcttcacctcgctctg

SEQ ID NO: 41402 - DNA, 312 bp, Zea mays
taagagtgcagccgattatagtagatgctggagtgtatttagcatggaggaatcagttcttccaagccacagagaaacgggacactcctgatagtttcaaatttttcacaggttctccatgggtcattttaaacagacgctttgttgagtattgtatttttggctgggagaatctccctagaacactcctcatgtacttcacaaacgtgatgctacctctcgaggggtatttccattcggttgcatgcaactcggacttccgcaatttcacagtgaacaacgacttgcggtatatgatttgggacaatccac

SEQ ID NO: 41403 - DNA, 224 bp, Zea mays
tgtggagctggctgtgacggccatggaggagctggttcggatggcgcagctggacgagccgctgtggaacgcgccggcaggcgggcacgacgggtctgctgagacgctgaacgaggaggagtacgcgcgcatgttcgtccctgctggagggctcgggctaaaaaagcagtacgggttcaagtcggaggcgtcgcgcgacagctccgtcgtcatcatgacccatg

SEQ ID NO: 41404 - DNA, 279 bp, Zea mays
tcaaaatgcaagcactacttccacaaccgcctgaagcctgcaaagcttacctggacagcaatgtacaggaagcagcacaagaaggatatccatgctgaggctgtcaagaagaggcgccgcgccaccaagaagccatactcgaggtccattgtgggtgcttccctagaggtgatccagaagaagagggctgagaagcccgaggtccgcgatgctgctagagaagctgctcttcgcgagatcaaggagcgcatcaagaagaccaaggatgagaagaaggcg

SEQ ID NO: 41405 - DNA, 272 bp, Zea mays
agcagatatgaggactgggactatagaggttgtggcacatcatgttctagtgctgaactcagtaactcggtcactgccgtttccagttacaacttctgatactgtaaaagagaagtttccagaagaaattagattgaggtttagagtgttggacttgcgtcgtccacaaatgcagtcaaacttgcggttgcgccataatgttgttaaactcatacgccgctacttggaggatgaacatgaatttgttgagttacatgttcaagggtagattg

SEQ ID NO: 41406 - DNA, 246 bp, Zea mays
ctcgagcgaccgtctggagaggctgttcgggaggcatgggcaggacaaggggatgatcgtgcgcgccacggaggagcagacccgcgagctgcggcgccaggcctgcggagggctgccacggcccgcactggcccctgccgccgttcggcgagtcgcgcgggccctagagcctggtggacgagcggcccaggatcgccaagcagcacgggcagctctacgaggccgacgcgcggagttgccaggacc

SEQ ID NO: 41407 - DNA, 128 bp, Zea mays
atcgatcgatgcatcgatcactgcaccggccggcaccaccgcactcgcaggggctagccaactagacggcagcaatggctgaccgtgaccgcagcggcatctacggcagcccccacgccacctacggg

SEQ ID NO: 41408 - DNA, 141 bp, Zea mays
ccggaatcgttcctgtcgagcttcagcaagagcatccagagagctgcatacaagacctcgagcgaccgtctggagacgctgttcgggaggcatgggcaggacaaggggatcatcgtgcgcgccacggaggagcagacccgc

SEQ ID NO: 41409 - DNA, 215 bp, Zea mays
agctttggcctctgttgtaagatttaagcttaacctccaaccatgggcaaggagaagtcccacatcaacattgtggttattggccatgtcgactctggcaagtcaaccaccaccggccacctgatctacaagcttggaggcattgacaagcgtgtgattgagaggttcgagaaggaagccgctgaaatgaacaaacggtccttcaagtacgcttg

SEQ ID NO: 41410 - DNA, 208 bp, Zea mays
ctcagtccctcacacactcactatacactgctctgctgcagcaagaaggaagaagctagcgcctccctagctctcgttgtcagcaatggccaccaccgccgcgtccagcctgctcaagtcgtccttcgcgggctcccggctgccttcggccacgcggaccacaaccccgtcgtccgtagccgtagccaccccgcacaccggcaggagc

SEQ ID NO: 41411 - DNA, 177 bp, Zea mays
caaggtcatcaaggaggttctgggtgacaaagttgagaaggtggtggtgtctgatcgcgttgtggactcaccgtgctgccttgtgactggcgagtatggctggaccgccaacatggagaggatcatgaaggcacaggccctgagggactcgagcatggcgggctacatgtcgagcaa

SEQ ID NO: 41412 - DNA, 286 bp, Zea mays
agcgtgcgagctcgggaatcaggggtttcacacatagcttcgtcgatttgaatttgatgtactaatggagtctaagggtggcaaaaagtctagcagtagtcgttctatgatgtatgaagctccccttggctacagcattgaggacgttcgacctgccggaggcgtgaagaagttccagtctgctgcttactcaaactgcgcgaagaagccatcctgatatcccttttggcttcctcattctagtagttaaggatttcttttctgacactttgattctgaccattct

SEQ ID NO: 41413 - DNA, 148 bp, Zea mays
tgcaaagctcctcctcgatccatcgatcactgcaccggcacgcagcaccgcgctcgcagggactagccaacgagaacgcagcaatggcggaccgtgaccgcagcggcatctacagcagcgcccacgccacgtacgggcagcagcagca

SEQ ID NO: 41414 - DNA, 165 bp, Zea mays
aaaggaggaaggcgttaagatctggttgttggcaataatctacttcatatctggtgttcctggtgcatatgttttgtggtatcgtcctctatataatgcaatgaggactgatagcgcattgaagtttggattgttcttcttgctttacgtgttccacattctttt

SEQ ID NO: 41415 - DNA, 177 bp, Zea mays
aagctctctggtatctcggacatcatcccagagatggagatctgtgacttcgacttcgagccctgtggctactccatgaatgctgttcatggccctgatttgtcgaccattcatgtgaccccagaggacggcttcagctatgcaagctacgaggtcatgggctttaacgcgggctct

SEQ ID NO: 41416 - DNA, 298 bp, Zea mays
cgagcatatcacagtgacagacacgatggtgagctccagaattgttgtcctcctcgccactctcctatgcgctgccgccgcagtcgcgtcgtcctgggaggacgacaaccaccaccaccacgggggccacaagtccgggcaatgcgtgcggcggtgcgaggaccggccctggcaccagcgcccccggtgcctggagcagtgcagggaggaggagcgggagaagcggcaagatcggagcaggcacgatgccgacgaccgcagcggcgagggctcgtcggaggatgagcgagagcaggag

SEQ ID NO: 41417 - DNA, 169 bp, Zea mays
gtttcgcgtccgcctcagcccgccgcaaggagaggtaagttcaggagacatcttcgagaagctgaaatggctcctaaagctgctcctgccaagaagggtgatgccaagacccaggccttgaaggttgccaaggctgtgaagtctggggcagccaagaagaagaccaaga

SEQ ID NO: 41418 - DNA, 168 bp, Zea mays
cccgcctccactcgcccctcccaggcgctgcccaggtaagtcggcggcggcgatgacaacgcgcttcaagaagaaccgcaagaagcgcggccacgtgtccgccgggcacggccgcatcggcaagcacaggaagcacccgggaagtcgcggtaacgccggtggcatgca

SEQ ID NO: 41419 - DNA, 178 bp, Zea mays
  unsure (1)..(178): unsure at all n locations
ctttgtttgcaaagcacctcctcgatccatcgatcaccgcancggccggcggcaccgcgctcgcaggggacaaccaacgagacggcagcaatggcggaccgtgaccgcagcggcatccacggcggcgcccacgccacctacgggcagcagcagcagcagggaggaggcgggcgcccga

SEQ ID NO: 41420 - DNA, 271 bp, Zea mays
agagggctgtagcctccgagccagcagcgatggcggccgagacgagaagcgttgttggaggccggggcttagacaaggccgttgggaatgttgataccggtggcgaggatgggagggatgcagattccagtggcggtgaccctcggggaagattttcgtagggggtgtagcttgggagacaactgaagaaacattcacaaagcattttcagaagtatggagctataactgattctgtgatcatgaaggacaagcatactaggatgcctcgc

SEQ ID NO: 41421 - DNA, 293 bp, Zea mays
aggaggctgcagcggacacggaggcgaaggaggaggagcagcagcagcaggcggcgccgaggagcggcatcccactcagtgcttgcaaccatggctaggggattgaagaagcacttgaagaggctcaatgcgcccaagcattggatgctcgacaagcttggcggagcttttgctcccaagccatcttctggacctcacaagtccagggagtgccttcctctgatcctcatcatcaggaacaggctcaagtatgctctgaactaccgtgaggtcatttctatcctgatgcaacg

SEQ ID NO: 41422 - DNA, 291 bp, Zea mays
agctgcgcagacagtccctccgccctgataacatcaagatgtttgttctagatgaagctgatgaaatgctttctcgtggtttcaaggatcagatttacgacatcttccagcttctcccagccaagattcaggttggagtcttctctgctaccatgccccctgaggcccttgagattacccgcaagttcatgaacaagccagtgagaatcctcgtgaagagagatgagctgactcttgagggtatcaagcagttctatgtgaatgtggataaggaagactggaagctggaca

SEQ ID NO: 41423 - DNA, 302 bp, Zea mays
gaaacctctcaaaccctagccgcctcctgcaagtttcagagctcaggaatctgcgccatggcgagtgagacggagaccttcgcatttcaggctgagatcaaccagctgctctcactcatcatcaacaccttctactccaacaaggagatcttcctccgcgagcttatctccaactcttccgatgcgctggacaagatcaggttcgagagtctcactgacaagagcaagctcgatgcgcacctgagcttttcatccaccttgtcccagacaaggccacgaacacgctctccatcatcgacagc

SEQ ID NO: 41424 - DNA, 306 bp, Zea mays
cgcgagtcgcgcggcccctacagcctcctggaccagcggcccagcatcgccaaccagcacgggcagctctacgaggccgacgcgcgcagcttccacgacctcgccgagcacgacgtcagcgtctccttcgccaacatcaccgcggggtccatgaacgcgccattgttcaacacccgttcgttcaagatcgcctacgtgccgaacggcaagggctacgccgagatcgtgtgcccgcaaccgcagtacgcaggcggcgagagcgagcgcgagcgcgagcaagggcaggaagagcgaagaagaagaaga

SEQ ID NO: 41425 - DNA, 302 bp, Zea mays
atcgagaacacgatcgagcacacaagcacgaagactcgtttaggagaaaccacaaaccaccaagccgtgcaagcatcatggagtacggtcagcaggggcagcgcggccacggcgccacgggccatgtcgaccagtacggcaacccagtcggcggcgtcgagcacggcaccggcggcatgatgcacggcacgggaaccaccggcggcatgggccagctgggtgagcactgcggcgctggcatgggtggcgggcagttccagcctgcgagggaggagcacaagaccggcggcatcctgcatcgc

SEQ ID NO: 41426 - DNA, 307 bp, Zea mays
gtccgccttgcccttcacgaaggcttggtcctcctccttgtatctccactccccccttcacagatccgttcctccagctagggttagcgttcctctgcagcgatggcgatcaagcggactaaggcggagaagaagatcgcgtacgacaagaagctgtgcagcctgctcgatgagtacaccaaggtgctcatcgccctggccgacaacgtcggttccaagcagctccaggacatccgccggggcctcaggggcgactcggtggtgctcatggggaagaacacgctcatcaggcgttgcatcaaggtgt

SEQ ID NO: 41427 - DNA, 302 bp, Zea mays
gcgcgggccaagcggcggctggtggaggtccctacaccgcgacgctggcgcacacggccaacgcgctcctggcagcgcgcgtctctgccgtggccgtggctgcgccaccgggccactggatcggcgccggcggctctatgatcctcgagtccgcaagcactacatcggcatggtgaacatgctcgacatccttgcccacatcgccgaggccagcgacgacgacgaggcggtcgatctcgaccgccggattgccgtgccggtgtcctccgtcatcggacactccctcgagggcctcactctgt

SEQ ID NO: 41428 - DNA, 300 bp, Zea mays
ctcgcactcgcacgtacaccacactagttaccacagacgacgggcgccatgaaagtcccggtgcttctcctcctggtctccctgtgcttctcgctcgcgctcgcgtggcaaacggacacggaatcgggctcaggcaggccgtaccactacggcgaggagagtttccggcactggacgcgctcccggcagggccggttcagggtgctggaacggttcacccacgagctgctggaggacgccgtcggcaactaccgcgtcgccgagctggaagccgcgccgcgcacgttcctgcagcccagc

SEQ ID NO: 41429 - DNA, 292 bp, Zea mays
aaaccagattacacctatttgaagagactcttccgtgacttatttatccgcgaagagtaccaactagattatgtatttgactggaccattatgaaatatcctcagtttagagataaaagcaaaattcagtctagcggcaagatgagtaggttggcaggcccttctgcagaaaggactgatagaactgcagctgaagctttgtttagaaggactggatcaggttctggtcacaatcgagagcacaccaagcacagaagtcatctggagtcactgatgccatccaaggctgttg

SEQ ID NO: 41430 - DNA, 294 bp, Zea mays
cacgaacgcactagcaacgacctaacaacaatggcttccaagacattatccctccttgcgcttcttgccctttttgtgagtgcaacaaatgcgttcattattccacaatgctcacttgctccgagtgccattattccacagttcctccctccagttacttcaatgggcttcgaacacccagctgtgcaagcctataggctacaacaagcgcttgcggcgagcgtcttagaacaaccaattgcccaattacaacaacaatccttggcacatctaaccatacaaaccatcgcaacg

SEQ ID NO: 41431 - DNA, 248 bp, Zea mays
agaattgttgtcctcctcgccaccctcctatgcgctgccgccgcagtcgcgtcgtcctgggaggacgacaaccaccaccaccacgggggccacaagtccgggcaatgcgtgcggcggtgcgaggaccggcccttgcaccagcgcccccggtgcctggagcagtgcagggaggaggagctggagaagcggccagagcggagcaggcacgatgccgacgaccgcagcggcgaaggctcgtcggaggatga

SEQ ID NO: 41432 - DNA, 281 bp, Zea mays
cttctcctccccctccggttcgggttcgggttcgtgaggctctcaggggttcggtttcgtgggtgggcggatcgagatggcggcgtcggatgttgagtaccgctgcttcgtcggcggcctcgcctgggccacggacgaccactccctccacaacgccttcagcacctacggcgaggtcctcgagtccaagatcatcctcgatcgggggactcagaggtcccgcgagttcgggttcgtcaccttctccacggaggaagcgatgcgcaagccatcgagggcat

SEQ ID NO: 41433 - DNA, 292 bp, Zea mays
gtcggctgccgcagactggtagtagccggcgcgccgtcaccgtatcctcagatcagcggcgagcagaaaccacaccactctactgacgcccgacgagcagtgtaacattttccttcagccatgggtaaggagaagactcacatcaacattgtggtcattggccatgtcgactctggcaagtcgaccaccactggccacctgatctacaagcttggaggtattgacaagcgagtgattgagaggttcgagaaagaggctgccgagatgaacaagcggtcattcaagtatgcgt

SEQ ID NO: 41434 - DNA, 291 bp, Zea mays
ccgcgcctctacatttcttctctctctgctcctccgcctccgcctccgcctgatccatccaagacagggatcgccatgtcggactcggaggagcaccacttcgaatcgaaggccgacgctggggcgtccaagacctacccgcagcaggctggcaccgtccgtaagaacggcttcatcgtcatcaagaaccgtccctgcaaggttgtggaggtttctacctccaagactggtaagcatggccacgccaaatgccactttgtcgccatagacatattcaatgggaaaaagctt

SEQ ID NO: 41435 - DNA, 170 bp, Zea mays
gtcgctgcaggatggaaccgtaagcgcgatggctggagcttgcacggttgtccgtgatgtcaccgatttctgcttccactcgtacttctctttcatggatgatcttattgacaaaatgggggacaatgaagaagcccctctcgacatcaagttgtcttatctaccacgga

SEQ ID NO: 41436 - DNA, 304 bp, Zea mays
cgagctgcgggggaagagcaaggcggatctgcaagcgcagcttaacgagtttaagtcggagctctccctgctacgcgtaccaaggtcaccggcggggctcccaacaagctctccaagatcaaggttgtgcgcacctccatcgcgcgcgtgctgaccgtcatctcgcagaagcagaagtcggcgctgcgtgaggcgtacaagaagaagaagctgctcccgctcgacctccgccccaagaagacccgcgccatccgcagcgcctcaccaagcaccagctctccttgaagaccgagagggaaaagaa

SEQ ID NO: 41437 - DNA, 304 bp, Zea mays
agcgaaggcgaccattccttcttcgctccttcgccgccgctatggttaagtactcgcaggagccgggcaaccctaccaaatcggccaaggccatgggaagggacctgagggtccacttcaagaacacaagggagacagcttttgcgcttcgcaagctgcctttgaccaaggctaagcgataccttgaggatgttattgctcacaagcaggcaattcccttccggagatactgtggaggtgttggtcgcaccgcacaagcaaagtctcgccactccaatgggcagggtcgctggcctgttaagtc

SEQ ID NO: 41438 - DNA, 295 bp, Zea mays
gaagaattcattgagaggcttgttcgtcaccagaggttctctatcgagaaacccaagtatggggctccacatgtgaaggccaatgctctgctgcaagcccatttttcaaggcacacagtggtcggaaatctggcagctgatcagcgcgagattctcctttctgctcataggttgctccaggcaatggttgatgttatatccagcaatggttggcttagtcttgctcttagtacaatggagctgagtcaaatggtgacacaaggcatgtgggatcgggattctgtgctgcttcaag

SEQ ID NO: 41439 - DNA, 168 bp, Zea mays
ccgtcgcatcccatcccactaccacccatctcgtcgtccgccgattcgatccggttcttccaacccaggggcagtgatggcgacgaagaggagcgtgggcaccctcggcgaggcggatctgaaggggaagaaggtgttcgtgcgcgccgacctcaacgtcccgctcga

SEQ ID NO: 41440 - DNA, 303 bp, Zea mays
tcaaaccctagccgcctcctgcaagtttcagagctcaggaatctgcgccatggcgagtgagacggagaccttcgcatttcaggctgagatcaaccagctgctctcactcatcatcaacaccttctactccaacaaggagatcttcctccgcgagcttatctccaactcttccgatgcgctggacaagatcaggttcgagagtctcactgacaagagcaagctcgatgcgcagctgagcttttcatccaccttgtcccagacaaggccacgaacacgctctccatcatcgacagcggcatcggc

SEQ ID NO: 41441 - DNA, 300 bp, Zea mays
acggcgtcgagctctacgccgagaaggtcgtcaaccgcggcctctgcgccatcgcgcaggctgagtccctccgctacaagctcctcggaggccttgccgtccggagggcctgctatgagtgttcttcgctttgttatggagagtggtgccaagggttgtgaggtcattgtgagtggaaagctcagggctcaaagagccaagtccatgaagttcaaggatggctacatgatctcatctggtcagccagtgaatgagtacatcgactcagctgtgagacacgtcctcctcagacaaggtgtt

SEQ ID NO: 41442 - DNA, 298 bp, Zea mays
ggtcaacgaacctcgactcatggactccagaccagctgaagatgatggcattcggaggcaacaaccgggcacatgctttcttcaagcagcatggatggaccgatggcgggaaggtcgaggcaaaatacacatcaagagccgctgaactttacaggcagatgcttaccaaggaggtcgctaagagcgccacgaccgataatgccctgccatcgtcacctgtcgcatctgaggcttccaagccgccatccgatgacttccctgaattcaaactcccagatgtgccagcaccaccggcaga

SEQ ID NO: 41443 - DNA, 293 bp, Zea mays
ctctcgccgtccgcacagccgctcatcgtctcccactgcctgccctctccctgcgccggccggtgccccgacgcgccatgtcgtacaacaaggccccgtccatcaccgccgagaccataaatcccagggtcaagatcatcagatacgcgccttgcggggagatcgtcaagcacgcagcgcggctggagcaggagatagaggagaaccctgcttctatccctttccaagagataatatactgcaacctcgggaacccccaggtccttggtcagccgccactaactttctttcgt

SEQ ID NO: 41444 - DNA, 300 bp, Zea mays
ctcgtccacccgtcatcctcctagctcctctactcgccagtcgccatgggcaagattaagatcggaatcaacggcttcggaaggatcggcaggctcgtggccagggtcgccctccagagcgaggatgtcgagctcgtcgccgtcaacgaccccttcatcaccacggactacatgacctacatgttcaagtacgacaccgtccacggccactggaagcacagcgacatcacactcaaggactccaagacccttctcttcggtgacaagccggtcaccgtctttggcatcaggaaccctgag

SEQ ID NO: 41445 - DNA, 162 bp, Zea mays
cccaacaccacctcgccgcgatctccgtagcctccgtcgcgtcgagcatcgatcatgtcggcctactgcggaaagtacaaggatgagctcatcaagaatgctgcctacattggcacccctggcacaggtatccttgctgctgatgagtccactggcaccatt

SEQ ID NO: 41446 - DNA, 294 bp, Zea mays
ggcgaccctccctccttcgctccttccgcgccgcctcccggccgtcgccgccatggtgaagtactcgcaggagccgggcaaccctaccaagtcggctaaggccatgggcagggatctgagggtccacttcaagaacacaagggagacagcctttgcgcttcgcaagttgtctttgaccaaggctaagcgataccttgaggatgttattgctcacaagcaggcaattcccttccggagatactgtgggggtgttggtcgcaccgcgcaagctaagtcgcgccactccaatgggca

SEQ ID NO: 41447 - DNA, 156 bp, Zea mays
acaacactcaccgatagcaagtagcgccgccgacgtttcgagagcagagtatccaagctagccaagcgcgcacctcggtgacctagctagctacctagctagttcaggcgacgatatggcgtctggtcaggagagcaggaaggagctggaccgcaa

SEQ ID NO: 41448 - DNA, 136 bp, Zea mays
ccccagacaacactcaccgatagcaagtagcgccgccgacgtttcgagagcagagtatccaagctagccaagcgcgcacctcggtgacctagctagctacctagctagttcaggcgacgatatggcgtctggtcag

SEQ ID NO: 41449 - DNA, 331 bp, Zea mays
cactccacgtgtagtaagctcggcgtggtcctcgcccgaggtcaggggcggccacgcgcccgcgcccagggacagccacagcaccgtggccgtcggcgcaggtcttcgtcttcggcggggactgcggcgaccggtaccacggcgacgtggacgtgctcgacgtcgacaccatggcgtggtcaatgtttccggtgaagggtgcatcgcccggcgtcagagcaggtcatgcagatatgaatgttggatctaaggtatatattatcggaggcgttggcgacaagcactactacagcgatgtctggggtcttgatgtcacaaaccgctcgtggag

SEQ ID NO: 41450 - DNA, 300 bp, Zea mays
ctgcagatgagaaggcattctttgatgactacaaagaggcccacctcaagctctccgaactggggtatgctgatgcttaaatgtccatatcctggagcgggacacaaactgctgcctgtatggactcgtgcgattcagggtgaaccatcagattgtctagtgtcttctttgtaataaatttatctgttcttggtactttgtctatggttgaatcggaacccattttccgtttgcctagattcttaatttctggtgctgtatccagctgaaactagtagatctatgatcttgtggctgcag

SEQ ID NO: 41451 - DNA, 305 bp, Zea mays
taccaagtgttacgctgggctcttggttcagttgaaattctacttagcagacactgtcctatctggtatggttacaatggaaggctaaagcttctggagagactggcatacatcaacaccattgtttatccaattacatctatcccactagtagcatactgcgtccttcctgctatctgtttactcaccaacaaatttattattcctgcgattagcaattatgctggggcgttcttcatcctgctttttgcttccatcttcgccactggtattttggagcttcgatggagtggtgttggcattga

SEQ ID NO: 41452 - DNA, 303 bp, Zea mays
caacccagccatggagaaggcgatcgatcggcagctggtcctcctggcgcacctcctcccctccccctccgccgcctcctcgcagcctcagcttgcggcgtcggcgtgcgcggccggggacagcgccgcctaccagaggtcctcctccttcggggacgatgtcgtcgtcgtcgctgcctacaggacgccgatatgcaaggccaagcgaggaggcttcaaggacacctacccagaggacctcctcactgttgttctcaaggctgttctggacaacactagaatcaatccagctgacatcggtga

SEQ ID NO: 41453 - DNA, 309 bp, Zea mays
ccttggattttcgaagtctctttcagaatggatcggcagtaacttgaagaaggacaacgatcatgtgacctgggctttcaatcttcaggctgccatagacatgtttagttcttatagggaaagggactattggtcggtgctggaacacccacctaaggatttggagattgcaatagtgcaagcagagcacagtgatcgatgggtccctgatgacgttcaaaggctaaaagcattagccaggagagagtccaagcctgatgtaggaaaagtgtcacttcacgttctccctaactctggccactgggttca

SEQ ID NO: 41454 - DNA, 308 bp, Zea mays
agaagatcctcatcgacatctttcccgcggacaggaagacggaccaaatgccaggaggattggcaggctttgcgagtatgttgctagaaatcctcatcgcgtgccaaagatcacagcttacttggcgaggacgtgttacatggagttgagaaatgagcagtatgacattgtgaaagttgttgtgctaatataccgcagctattggtctcttgtaatgaacaaatgccgttactggcaaatagtttattaagcatcatacaaacacttttggatcaatcaaggcaggatgacatgtgcatcattggctg

SEQ ID NO: 41455 - DNA, 308 bp, Zea mays
  unsure (1)..(308): unsure at all n locations
gtcgattatatgtttcttctcgggacgcgtgtcgcgtgctcggctcggcagtcgggctccgatttctggacggacccgacggaggcgatccggcgcgcgtaccaccgcacggaccggaagctgctgaagaagacggcgggcgacgacagcggcgaggggatgaagaagggcaggcggcacggcgggtcgacggcggtcacggcgatcctgatcaacggagaggatctcgtggtcgccaacgtgggcgactcccgcgccgtgctgtgcgacgcgggcggcagggccaggcanctgtccgtggaccacga

SEQ ID NO: 41456 - DNA, 297 bp, Zea mays
caaggaggaacagcattggatgcctgttctggcttttggccaggatggttctgcagatgaggggcactatcctccctgggcacaagtgggaaatcatggtggatttgttcttctacagggacccagaggaagcaaaggagcaggaggaggaagctgctgttgcccctgagtttgccgcaatcactgattaccaaggagctgatcagtggggtggtgaccagtggacctctgatgtgactgcgccgcctgttgctcctactggtgctgattggggtgctgctccagctccggttccta

SEQ ID NO: 41457 - DNA, 296 bp, Zea mays
gagacgctcatgaggatggttaccgccaggatgtgaggccgccgcgctcgccaaaacgagcaagaagcaacaagagggtggcgcgcgaccgacgtgcgtacgtagcatgagcctgagtggagacgttggacgtgtatgtatatacctctctgcgtgttaactatgtacgtaagcggcaggcagtgcaataagtgtggctctgtagtatgtacgtgcggatacgatgctgtatgctactgaggcaagtcccataaataaataatgacacgtgcgtgttctataaaaaaaaacaaaaa

SEQ ID NO: 41458 - DNA, 303 bp, Zea mays
gagctggtaaagacatagcattggcaaacaaagagacacttattgcaggtggtccttttgtagctccccttgcacacaaacacaaagtgaaaattcttccagctgattctgagcactctgcaatatttcagtgtatacaaggcttgtccgatagtgcacttcgtcgcattattctaactgcatcaggtggtgctttcagggactggccagttgacaggctgaaagatgtaaaagttgctgacgctttaaagcatccaaactggaatatgggaaggaagatcacagtagattctgctactttat

SEQ ID NO: 41459 - DNA, 299 bp, Zea mays
cgcttacatccctgagaacacatgcgatccacgtgcagctatctgtggtgtagatgacagccaagggaaatggttgggtggtatgtttgacaaagacagctttgtggagacatttgaaggatgggcaaaaacagtggttactggcagagcaaagcttggaggaattcctgtgggcgtcatagctgtggagacacagaccatgatgcagatcatccctgctgatccaggtcagcttgattcccatgagcgatctgtccctcgtgctggacaagtgtggttcccagattctgcaaccaaga

SEQ ID NO: 41460 - DNA, 303 bp, Zea mays
acaccactcacggactcatctactgagcagcgcggtgggcatccgagcgagagggcgagcgcggaaggatcggaattccgaaggttgggcatggaggcgagcggcgagaaggctgcggtggtgcgacggctgatggaggcgaaggaggtgtccgggaagaccttctcgggaatcgccgccgagacgggtctcaccaacgtctacgtggcgcactgctgcggcgccaggcgcactcaaggccgacacggtgcccgcgctgagggcggccctgcccacgctcacggacgacctcatcgaactcat

SEQ ID NO: 41461 - DNA, 294 bp, Zea mays
cggcaaccgcgtccggccgtccgcttccgtttccttggataaccacgacccccgcccgccccccggcaagcgaaaggaacactgccaacccagccatggagaaggcgatcgatcggcagcgggtcctcctggcgcacctcctcccctcctcctccgccgcctcctcgcagcctcagcttgcggcgtcggcgtgcgcggccggggacagcgccgcctaccagaggtcctcctccttcggggacgatgtcgtcgtcgtcgctgcctacaggacgccgatatgcaaggccaagcgag

SEQ ID NO: 41462 - DNA, 292 bp, Zea mays
agttgcagttggatctcagatcggtgatcacataaacaatggtgaaggctgttgctgtgcttggtagcagcgatggtgtcaagggcaccatctttttcacccaagtgggagatggccctaccactgtcaccggaagtgtctctggcctcaagcctggcctccatgggtttcatgtgcatgcgcttggtgacaccaccaatggctgcatgtcaactggaccacactacaatcctgcgagcaaggaacatggagcaccagaagatgagaaccgccatgccggtgatcttggaaa

SEQ ID NO: 41463 - DNA, 296 bp, Zea mays
ccacactcctgtccgcgctgtcaatgcactgggagctgccattgccatccttggcacattcctgtactctcaggcaaaggcgtgaggcgggccatgatgacgaacgtctgcagaatcagtagcaagcactaaatccaattttgcttgttccagtggcatgtaaatatcgggttaggtttccgtatgagagtttgtaataatggatgaatggctctgctgtttcgttcttgtttgttggccagactcaaatccataggccatgaactgcggtcgagtgtacctgaataatactgtaa

SEQ ID NO: 41464 - DNA, 300 bp, Zea mays
tgttaacaaagaattccctcatagccgccgccgccgccgccgccgccgctcatctcgccgagaggtgacgggaccgaggaactcgccgagttctaagatagagaatcgcttttcacagcctggggtctgctgcgtagggtggtgttgaaggggagaagtttaagatctgttccacagatcacgcgtgcgcgctcgcgaatcgggggttccacacatagcttcgtcgttttgaatttgatgtactaatggagtctaagggtggcaagaagtctagcagtagtcgttccatgatgtatgaag

SEQ ID NO: 41465 - DNA, 242 bp, Zea mays
ggaagatacagaatcgcagaagttactataccattcagctacttcgtcagctggtccaatgcatggtgttgcactgaataatccttatcaacctttgagtgtgattgatctaaagcgctgctctgctaggaacaacagaacaacatattgctacgattttccgctggcatttgaaactgcactgcagaagtcatggcaatccaactgttctagtgttcctgaaggcagtgaaaatagtaaat

SEQ ID NO: 41466 - DNA, 305 bp, Zea mays
caacgtcaaggccaagatccaggacaaggagggcatcccaccggaccagcagcgtttgatcttcgctggcaagcagctggaggatggccgcacccttgcggattacaacatccagaaggagagcaccctccacctggtgctccgtctcaggggtggcatgcagatctttgtgaagacactcactggcaagacaatcacccttgaggtggagtcttcggataccattgacaatgtcaaggccaagatccaggacaaggagggcatcccaccggaccagcagcgcctcatcttcgccggcaagcagc

SEQ ID NO: 41467 - DNA, 308 bp, Zea mays
ccaccgagcccatggcggaccagctcaccgacgaccagatcgccgagttcaaggaggccttcagcctcttcgacaaggacggggatggttgcatcacgaccaaggagctgggcactgtcatgcgctcgctggggcaaaatcctacagaggctgagctccaggacatgatcaacgaggtcgatgctgatggcaacggcaccatcgatttcccagagtttctcaaccttatggctcgcaagatgaaggacaccgactctgaggaagagctcaaggaggccttccgtgtgtttgacaaggaccagaacggc

SEQ ID NO: 41468 - DNA, 311 bp, Zea mays
ggaatcaacgacgaccaggaggcacgagtcctggaagagaagaaggtgggcgtgaaacgcgtcgggaggaagacgaccgacgagtcggagcacttcagctggagggacggcgtcaaggtcccctgcggcaagctggtgccgtcggcgaacaaggacggcccgctcgagtacaacgagtacgccgtgtacgaccccaagcaggtgagcatctgcttcctggtcggggtgaagtacgaggagcagaacatggaggtggtgccgccggacgaccagtgaaggagtcgtctcgtggagtgtcctagggcaaggca

SEQ ID NO: 41469 - DNA, 308 bp, Zea mays
gcgtaccgttggtggcttactataaaagcaacgggcgcaccagggcacggtgcgaagttgtatgatggtagtgcaatggagaatttgatgaagagcgtggaggctattaggagattcaggacatcacagtttgatctagtgaaatctggagagaaggctgaaggagatgttgtatcggtgaattttgcgtacctgaaggctggcacacctacaccaacgggttttgtcatgaatcttcaaccatctgaagcagaggtaggtcttgacatccggatccctcctagtgcccatgtggaagcactggagag

SEQ ID NO: 41470 - DNA, 315 bp, Zea mays
acattttgatatctctattctggagatctcaaatggagtttttgaggtcaaagcaacaaatggtgatactttcttgggtggtgaagattttgataatacactattggagttcttggtgagtgatttcaagagaactgagggcatagatctgtcgaaagatagattggccctgcaaaggcttcgtgaagctgctgagaaggcaaaggttgaactttcgtcgacttctcagacagaaatcaatctgccattcataacagctgatgcttcaggggcaaaacatttgaacatcacactgacaaggtcaaaatttgaatc

SEQ ID NO: 41471 - DNA, 318 bp, Zea mays
attggtttccctgtctcactagaacactatcctttcagagaaacaggaacagttaagcttaaaatgcaaggtgcctgcagcggctgtccaagttcgtcagtcacattgaagtctgggatagaaaacatgcttatgcactatgtgcctgaggtgacatgaagcaatttattctgtttgctgatgtttcctaatgctcgtggttcaaaaaattgttctctatttgataactagaatgcgaagtggtttattctgttcttgctgctgttccttctgcctgtggcacaaccgcacaaaagatgttctctgttagataactag

SEQ ID NO: 41472 - DNA, 304 bp, Zea mays
cagagataagcaaatgggttttccatgagaggggacatctaaaggctgttaatgttaggcatcacaaggttggggagaccaatgaaccaggcatgtaccgcattaatgatgacctggaatactctgttgagatctatgaatggtccggaacaagctggaagccgtatgttgctgatgatgtgcagcttcaatttttcatgatgagcccttacgttctgaaaactatgtcgactgacaacaagggtttgtattcaacaaccttcaaagttccagatgtttatggagttttccagttcaaagttga

SEQ ID NO: 41473 - DNA, 289 bp, Zea mays
cagacaacttccttatgggcttaggtcggaaagctaatcaggtctatatcattgattatggacttgctaagaaatacaaggaccttcatactcataaacacatcccgtacagggagaacaaaaatctgactggaacagcacgttatgctagtgtgaatactcatcttggaatagaacaaagtaggagagatgatctggagtctgctggctatcttctgctatattttttaagaggaagggtcttaaagctggcactaagaaacagaagtatgacaaaattagtgagaag

SEQ ID NO: 41474 - DNA, 299 bp, Zea mays
ctttgtttgcaaagctcctcctcgatccatcgatcacggcaccggccggcggcaccgcgctcgcaggagctagccaacgagacggcagcaatggcggaccgtgaccgcagcggcatctacggcggcgcccacgccacctacgggcatcagcagcagcagggaggatgcgggctcccgattggtgagcaggtgaagggcatgctccacgatcaagggccgacggcgtcgcaggcgctgacggtggcgacgctgttcccgcttggcgggcggctgctggtgctatcggtggtggcgctgac

SEQ ID NO: 41475 - DNA, 130 bp, Zea mays
ctattctccagtccacccattccattccactacccacgcgcagaattcacgcgaacggacacgcacccacacgacacatccagatgatgcttagggtttccccgtccccggccgccgcggtgccaaccca

SEQ ID NO: 41476 - DNA, 296 bp, Zea mays
aaccccaacgccaaccccaaccccccaagaagcaccgcacagaaccctctgctcctctcaccctcacgctccaaggcggcggcgccatgcacggcggaggcgcggcctcgcccgatgccgccatatgcatctccccagaagctgggcccatcgtcggggtcgcccccgccgggatcagggtcgaaaactgctacgtgttcaagagccggctgcaggagtatgctcagagggttggcattccaaccccggagtaccacacgctgaaagaaggcccatctcatgaacctgtcttcaag

SEQ ID NO: 41477 - DNA, 295 bp, Zea mays
aatcgattgacctgaaggaggtcggcccccggttcgagttgcggctgtaccagatcaaactaggaaccgtggaacaaaaggaagcgcagagcgagtttgtgctgcggccctacatcaatactgccaagaagcaaaagacgcttggagcgtgagctacactgcagtacagaacttaatttttttttggtcttcatcgtttatgctgtagtagcaacattcacagggtgattagatcaatatctgtcaatctaatagaagccgcaatgtacccctgactcgaacccaagctggctga

SEQ ID NO: 41478 - DNA, 294 bp, Zea mays
gctcaagtatgctctgaactaccgtgaggtcatttctatcctgatgcaacgccatgtacttgttgatggcaaggtcaggactgacaagacctaccctgctgggttcatggatgtcatttccatccctaagacaatggagaactacaggctgctttatgacaccaagggccgcttccgtcttcacccaatcagggatgaggatgccaagttcaagctctgcaaggtgaggtccgttcagtttggccagaagggcatcccctacctgaacacctacgacggccgtaccatccgcta

SEQ ID NO: 41479 - DNA, 297 bp, Zea mays
caccatcatgtcgctctccacacacagccacccggccgccgccgccgccgggagcggaaaatccctttttccggctggcccagcggcgcagtccgtacatttccccaaggcacggccccctgtccccgccgacgtctccgccgcgactgggctgttcacgcggaggatagggtttcgtcgctgactcaagtctccggcgtgctggggtcgcagtggggcgacgagggaaagggcaagctcgtcgacgtgctcgccccccgcttcgacatagtcgcgcgttgcccagggggagcgaac

SEQ ID NO: 41480 - DNA, 185 bp, Zea mays
cacactcactatacactgctctgctgcagcaagaaggaagaagctagcgcctccctagctctcgttgtcagcaatggccaccaccgccgcgtccagcctcctcaagtcctccttcgcgggctcccggctcccttcggccacgcgcaccaccacgccgtcgtccgtggccgtggccacgccgcgcg

SEQ ID NO: 41481 - DNA, 115 bp, Zea mays
  unsure (1)..(115): unsure at all n locations
cgagaacacgatcgagcacacaagcacgaagactcgtttangagaaacgacaaacgaccaacccgtgcaagcatcatggagtacggtcagcaggggcagcgcggccacggcgcca

SEQ ID NO: 41482 - DNA, 172 bp, Zea mays
ggcgcggcgatgaagtcgccggagctgcaggcgtcggtgatcagcgacctggtcctgctgtcctgcgtcggcctccgctccactctcgtccacggcggcgtgctcgagatcaactactggctggcgcgcgtcggcgtggagcctcagttccgcaacgggctccgcgtcaccg

SEQ ID NO: 41483 - DNA, 319 bp, Zea mays
cgcactcgcacgtacaccacactagttaccacagacgacgggcgccatgaaagtcccggtgcttctcctcctggtctccctgtgcttctcgctcgcgctcgcgtggcaaacggacacggaatcgggctcaggcaggccgtaccactacggcgaggagagtttccggcactggacgcgctcccggcagggccggttcagggtgctggaacggttcacccacgagctgctggaggacgccgtcggcaactaccgcgtcgccgagctggaagccgcgccgcgcacgttcctgcagcccagccactacgacgccgacgaggtg

SEQ ID NO: 41484 - DNA, 307 bp, Zea mays
  unsure (1)..(307): unsure at all n locations
aattccagaactttccgacttcttacctccgctgtgctgctcatcgtgttgcacaacattatggcttagagactatagtagcagatagtttagtagaaggctcagttagcaggattgttgcaagaanaacagcagaaagcaggtatcctgcaatttgtttatcagaagttcctagcaatcaagcaagaaatgatcatgaaacagctgagaagcttaagtttgtcatttatcagaggcccaaagcattccaaaatggaagcgctgattctagaaacaagagtggtgtaccaanaactcgtgatgagag

SEQ ID NO: 41485 - DNA, 291 bp, Zea mays
agccccaccgcttccgcaccggcaccgtcgcgctccgggagatccgcaagtaccagaagagcacggagctgctgatccgcaagctgccgttccagcgcctggagcgggagatcgcgcaggacttcaagaccgacctacgcttccagagctctgctgactccgcgctgcaggaggcggctgaggcctaccttgtcgggctcttcgaggacaccaacctctgcgccatccacgccaagcgcgtcaccatcatgcccaaggacatccagcttgcccgccgcatccgcggggaga

SEQ ID NO: 41486 - DNA, 314 bp, Zea mays
gagagtccagcggagttgggtggcaagatctatgagatgatggcgattgccctcggcgggagatggggaaggtccgacatggaggaggccgaagcgtcgacgggtgaggccagcgcagaggcagactcatctgaagtcaccgtagcagaggtgattgagccctcggaagttagacccgagagcgatccgtggagggaccagtgagttctcccacgggcatccttaactccatatttagcagtgccggggataaaaactaagccatgggcaagaacatattgccgtggcaatttttttgtaggcttagactttgc

SEQ ID NO: 41487 - DNA, 310 bp, Zea mays
atcgattccccccgcatctgatctcttcggtgctagagaaatataggccgccgccgcctcctccgtgttcggtgaaaggtgggcagttagggttgggagatctcttgactcacgacacgagcagcagaattcgtcgagggccgctggttgctgcgagaggtccgggccttcgtgggatcttgaaaattgaatgttctaatggagtccaagggtggcaagaagaagtctagcagtagtcgttcctccctgatgtacgaagctccccttggctacagcatcgaggatatccgccctgcaggcggcatcaaga

SEQ ID NO: 41488 - DNA, 324 bp, Zea mays
ctccgctgggccaccagctttgaccgccgcctcccttcccctccgctacagctcctccccacgccactcccccgcaggagcggcggcggcggcggcgaggtcgtaccccacatcggcgagcggcggcggcaccgccggaggcaaaggcaagatgttcgggcgcgcgccgaagaagagcgacaacaccaagtactacgagatcctcggggtgcccaagtcggcgtcccaggacgatctcaagaaggcctaccgcagagctgctatcaagaaccactccgacaaaggcggtgaccccgagaagttcaaggagctcgcacaagccta

SEQ ID NO: 41489 - DNA, 182 bp, Zea mays
cactcactatacacggctctgctgcagcaagaaggaagaagctagcgcctccctagctctcgttgtcagcaatggccaccaccgccgcgtccagcctcctcaagtcctccttcgcgggctcccggctcccttcggccacgcgcaccaccacgccgtcgtccgttgccgtggcaacccgcgcg

SEQ ID NO: 41490 - DNA, 79 bp, Zea mays
ctcgcgagctgcggcgccacggctcggagggcggccacggaccgcactggccccttccgccgttcggcgagtcgcgcgg

SEQ ID NO: 41491 - DNA, 305 bp, Zea mays
agcgccccctgccatgccacaatattcgagtggggagaagacaaagattggcatcaacgggtttgggcggattggcaggttggtcctgcgaattgcaaccagcagagatgatattgaagttgtggctgtgaatgaccctttcattgatgctaagtacatggcctatatgttcaagtatgattccactcatggcccgtttaaaggttctattcgtgtcgtggatgattcaaccctcgagatcaatgggaagaaggtcacaattacaagcaaaagagatcctgcagagattccatggggtaactttg

SEQ ID NO: 41492 - DNA, 309 bp, Zea mays
ggacagacccgtgagcatgctctccttgctttcacgcttggagtgaagcagatgatttgctgttgcaacaagatggatgccaccacacccaagtactccaaggcccgttatgatgagattgtgaaggaagtctcttcctacctgaagaaggttggatacaaccctgacaagatccacttcgttcccatctctggtttcgaaggtgacaacatgattgagaggtccaccaaccttgactggtacaagggcccaaccctacttgaggctttggacttgatcaatgagccgaagaggccttcagacaagccc

SEQ ID NO: 41493 - DNA, 308 bp, Zea mays
tgcaccctcatcttctcggtggtcgtgctgttcaccacgatcaggatgctgcgcaacatcctcgaggtcctgatggaaagcacgccccgtgagatcgacgccaccaggctggagatggggctctgcgagatggaaggcgtggttgccgtccacgagctgcatatctgggccatcacagtggggaaggtgctactggcttgccatgtgacggtcgccagggaagccgacgcagacgagatccttgacaaggtgattgggtacatcaagacggagtacaacatcagccatgtgaccattcaggtcgagcg

SEQ ID NO: 41494 - DNA, 303 bp, Zea mays
cgcatgccgtctgtttcccttcctcttctctggacgccgaggactccttctctgtcttcgcacgcagcttcctcctcctctgtccaagcggcggtcgtcggagacaacctgggaacggcgacggcggatgtgcgacggacgcgagcgggtggatccagtggtcgtccaatcctgtgatatccggtgacgacgacgtctaccactccctccacttttcagcttggagaagatgggagctctcaactgggccaaagtagttcatgagcaccaagggtggcgcctcattagctgtatctggctcca

SEQ ID NO: 41495 - DNA, 305 bp, Zea mays
gaaatattcttcccgtcgaaagaacgagagaggaaaagggacaagggcaaggcaagagagaggcgtcgtcgtttgatctgctgccggagtgcgaagaggaagaggaagaggagcgccggagttgtaaagatgttcctggtggactggttctatggggtgctggcatcgcttgggctgtggcagaaggaggctaagatcctcttccttggcctcgacaacgccggcaagaccaccctcctccacatgctgaaggacgagcggctcgtacagcaccagccgacgcagtactccacgtcagaagagtt

SEQ ID NO: 41496 - DNA, 297 bp, Zea mays
gcaagtagcgccgccgacgtttcgagagcagagtatccaagctagccaagcgcgcacttcggtgacctagctagctacctagctagttcaggcgacgatatggcgtctggtcaggagagcatgaaggagctggaccgcaaggctcgcgagggcgagaccgtcgtccccggcgggacctgcggcaagagcgtcgatgcccaggagcacctcgccgaaggcgcagcgcggaggccagactgcgcaggagcagctggggcagcaggggtacagcgagattgggaagaagggcggtctgag

SEQ ID NO: 41497 - DNA, 317 bp, Zea mays
cagctcccatatccgctcccctacctctccagcatctcccgtctccgtcgtctcgtctctgctcctcacatcgccgccagccatgggcaagatcaagatcggaatcaacggtttcggaaggatcggcaggctcgttgccagggatcgcctgcagagcgaggatgtcgagctcgtcgccgtcaacgaccccttcatcaccacggattacatgacctacatgttcaagtacgacaccgtgcacggccaatggaagcacagcgacatcaccctcaaggactacaagacgcttctcttcggcgagaagcggtcaacgtctt

SEQ ID NO: 41498 - DNA, 317 bp, Zea mays
  unsure (1)..(317): unsure at all n locations
ganaacagctccaatccggaagctgaaaatagcagaagaatccagaggcgactccaggtatgtcggcgatgctgcgaacaggaggcaggcggctcctcgccccggggctccgtcggctcggcctgggcacaggcgcctccggcgaggcgggtcctgccgcggcggcggcgggggtgagggcgtaccacgagcgggtggtggaccactacaacaacccgcggaacgtaggttccttcgacaaggacgactccaacgtcggcactgggttggtcggcgcgccacctgcggcgacgtcatgaagctgcagatccgcgtcg

SEQ ID NO: 41499 - DNA, 197 bp, Zea mays
atcatatctgctagtatagcgggtgatatggttcttgcttctgcctactctcatgagttgccacgatatggtcttgaagttggtctgaccaactatgcagctgcctactgcactggacttctgttggctcgccgtgtgctaaagatccgtggtttggataaggagtatgagggcaatgttgaggccactggtgagga

SEQ ID NO: 41500 - DNA, 291 bp, Zea mays
cctcgttcctgtcgcgcaccacgacctccacttcacatctcccccggcggcggcgcggtcagttgaacaatggcggactccaaggccacctcggcggtcaccctccgcacccgcaagttcatgaccaaccgcctcctggcccgcaagcaattcgtgcttgaggtgatccaccccggccgcgccaacgtctccaaggcggagttgaaggagaggcttgccaaggcgtacgaggtgaaggacccaaacaccatctttgtcttcaagttccgcacccacttcggaggaggaaag

SEQ ID NO: 41501 - DNA, 162 bp, Zea mays
gcctcgcctccgcaccgcatctcatccgcaaggtccatctggactacctcgaagcaggtgcggacgtcataatctcggcgtcctaccaggccacgatcgaggggttccagtcgaggggcttctcgcgggacgagagcgaggagctgctgcggcgtacgtgca

SEQ ID NO: 41502 - DNA, 302 bp, Zea mays
aaccattcctcccaacaccacctcgcctgcgatcttcgtagcctccgtcgcgtcgagcatcgatcatgtcggcctactgcggaaagtacaaggatgagctcatcaagaatgctgcctacattggcacccccggcaagggtatccttgctgctgatgagtccactggcaccattggcaagcgcctttccagcatcaatgtcgagaacgttgaggagaaccgccgtgccctccgtgagctcctattctgctgcactggtgctctccagtacatcagcggtgtgatcctcttcgaggagacctgt

SEQ ID NO: 41503 - DNA, 303 bp, Zea mays
agcgacgccgccgccgcaagccgtccgccttgcccctcgaaggcttggtcctcctccttgtatcccgacctcccccgcgacagacccgtttccccgctaggctagagttatcgttcctctgcagcgatggcgatcaagcggaccaaggcggagaagaagatcgcgtacgacaagaagctgtgcagcctgctcgatgagtacaccaaggtgctcatcgccctcgccgacaacgtcgctccaagcagctccaagacatccgccggggcctcaggggcgactcggtggtgctcatgggcaagaaca

SEQ ID NO: 41504 - DNA, 298 bp, Zea mays
cggctcgaggtcgcttccagccgccgccgcgtccgcctcgccaagcgcacagccgccgcagcacatcgctctcttgatctcagccatggcggaggtggagcagcaacaggacacgccgaagctcttcaaccgctggaccttcgatgatgtccaggtgaacgacatctcgctgaacgactacctcgctgtgaacgcgacgaagcacgcgatgtacctgccgcacaccagggggcgctactacaagaagcggttccgcaaggcgcagtgcccgatccgtgagcgcactacaaactccctc

SEQ ID NO: 41505 - DNA, 302 bp, Zea mays
  unsure (1)..(302): unsure at all n locations
gtcgcagtcgcagcacacgctgaattctctttagctagctaagagagggtagccacgccaagacaggatgcanacagcgaaggtgaaggcgaaggacatggtgagctcggcgaaggagaaggtgaaggaggggtcggcaaagatgcagggcaagacgggcgaggcgacggcggccacgcacggcgagaaggagatggccaaggaggcggcccgcgccaagaaggaccaggccaacgccgacaagcaccaggagaaggccgaccaccgagcggacgccgccactggccaccacggcacgcgcg

SEQ ID NO: 41506 - DNA, 302 bp, Zea mays
acgagaagaccagaaggtgagaagagagacagagagtgtgtgtgatcggtacaaggatcaccgctgtgcctgcgcgtgctgcttcaccgaatcgagtcagatcctgtccgaatccgagctaagggatggcaaccggtagtgaagcctcgaaggcagctgaggctgtggttgactggcataaacacgacagcaagaggatgctccatgcggtttaccgtgttggggatctggaccgcacaatcaagtactacacggaatgctttgggatgaaactgctgaggaaaagggatgttcctgatgag

SEQ ID NO: 41507 - DNA, 301 bp, Zea mays
actcgctttggatcgattggattcgtaactggtgagggactgagggtctcggagtggattgatttgggattctgttcgaagatttgccgaggggggcaatggcgaccgcggggaaggtgatcaagtgcaaagctgcggtggcatgggaggccggcaagccactgtcgatcgaggaggtggaggtagcgcctccgcaggccatggaggtgcgcgtcaagatcctcttcacctcgctctgccacaccgacgtctacttctgggaggccaaggggcagactcccgtgttccctcggatctttgg

SEQ ID NO: 41508 - DNA, 300 bp, Zea mays
agtccgcacagccgctcatcgtctcccactgcctgccctctccctgcgccggccggtgccccgacgcgccatgtcgtacaacaaggccccgtccatcaccgccgagaccataaatcccagggtcaagatcatcagatacgcgccttgcggggagatcgtcaagcacgcagcgggctggagcaggagatagaggagaaccctgcttctatccctttccaagagataatatactgcaacctcgggaacccccaggtccttggtcagccgccactaactttctttcgtgaggttctctccctg

SEQ ID NO: 41509 - DNA, 303 bp, Zea mays
acgccgtctgccttctgcgcctccatttcggcctctgtcccttgcaagttcaatctcacctccaaccatgggtaaagagaagtcccacatcaacattgtggttattggccatgtcgactctggcaagtcgaccaccacaggacaccttatctacaagcttggaggcattgacaagcgtgtgatcgagaggttcgagaaggaggctgctgaaatgaacaagcggtccttcaagtacgcgtgggtgctcgacaagctcaaggctgagcgtgagagaggtatcaccattgatatcgctctgtggaa

SEQ ID NO: 41510 - DNA, 292 bp, Zea mays
cccgagcatatcacagtgacagacacgatggtgagcgccagaattgttgtcctcctcgccacccgcctatgcgctgccgccgcagtcgcgtcgtcctgggaggacgacaaccaccaccaccacgggggccacaagtccgggcaatgcgtgcggcggtgcgaggaccggccctggcaccagcgcccccggtgcctggagcagtgcagggaggaggagcgggagaagcggcaagagcggagcaggcacgaggccgacgaccgcagcggcgagggctcgtcggaggatgagcgag

SEQ ID NO: 41511 - DNA, 294 bp, Zea mays
gcaggaggtagtctctgaaatctttgggaagaacccaagcaaaggagtcaatccagatgaagctgtggccatgggtgctgcacttcagggtggcattctccgtggagatgttaaggagcttcttcttcttgatgttactcccctgtcactaggtattgagacgctcggtggtatcttcaccagattgatcaacagaaacactacaatccccacaaagaaaagtcaggtgttctcaactgctgctgacaaccagacccaggtaggtatccgggtgttgcaaggtgagcgtgaaat

SEQ ID NO: 41512 - DNA, 296 bp, Zea mays
ggaacaccaggccctgatctacaagtacctggccgcgaacagccccatacctcacagcctcctcatccccatcaggaggagcctcgcagcgtctccctacccgccttcatacttcggcacgagcacattggggtggggctctttccagctgggctactccggcaatgcggatctggagcacgggcggtgccgccggacggacggcaagaaatggcggtgctccagggacgcggtcgccgaccagaagtactgcgagcgacacatgaaccggggacgccatcgttcaagaaagcatg

SEQ ID NO: 41513 - DNA, 293 bp, Zea mays
gcgacccacggcacggcaagtacatggcttgctgcctgatgtaccgcggcgacgtggtgcccaaggacgtgaacgccgcggtggccaccatcaagacgaagcgcaccatccagttcgtggactggtgcccgacggggttcaagtgcggcatcaactaccaggcgccgacagtggtgccgggtgccgacctcgccaaggtgcagcgcgcggtgtgcatgatctccaactccaccagcgtcgtcgaggtgttctcccgcatcaacagcaagttcgacctcatgtacgccaagcgc

SEQ ID NO: 41514 - DNA, 286 bp, Zea mays
acaccacactagttaccacagacgacgggcgccatgaaagtcccggtgcttctcctcctggtctccctgtgcttctcgctcgcgctcgcgtggcaaacggacacggaatcgggctcaggcaggccgtaccactacggcgaggagagtttccggcactggacgcgctcccggcagggccggttcagggtgctggaacggttcacccacgagctgctggaggacgccgtcggcaactaccgcgtcgccgagctggaagccgcgccgcgcacgttcctgcagcccagcc

SEQ ID NO: 41515 - DNA, 132 bp, Zea mays
accgccgccaacgtcgcctggcggccgtctgcagctccgcgcctctgctcggaagttggtgaaggtttcttgaagctgagaagatggtgctgaagacagaactctgccgcttcagcggccagaagatttatc

SEQ ID NO: 41516 - DNA, 168 bp, Zea mays
gcacccggaagccggggaggtgctggagttcgatatggaaggggtgtggagggagatggaaggcctcgtgaaagacgggctcgtcaaggatataggtgtctgcaattacacggtcgccaagctcaaccgcctgatgcggtcagcgaatgttccaccggcagtgtgcca

SEQ ID NO: 41517 - DNA, 294 bp, Zea mays
cagcaaaggtgtttgagaacttacagcttgaggaatgcaaccgtgttactcttgttggtattcttgctttcctcaactgcagccagaagttcagggctctctctttggtgaaatgcatggggatcaaggatatctgctctgtgccacaacttcctttttgccgttcacatcgtttccttacaatcaaggactgcccaggtttcaccgatgcaagcttggccgtggtagggatgatttgccctcagttggagcaggttgacttgagtggtcttggtgaggtcactgataatgggc

SEQ ID NO: 41518 - DNA, 292 bp, Zea mays
aaattctaaaatgtccattgcagcctgaggactgggacgatgaggaagatggtgaatggactgcccctaccattcccaacccagaatacaagggaccatggaaacaaaaggtatggcagttccttttaacctataaactgacagcaattcatattctgatatctgacagcatgttgtttcacttgccagaaaatcaagaacccgaactaccagggtaaatggaaggcacctatgattgacaacccaggtatgtttgcctgaaacggatccttatatcttcttactgtttggc

SEQ ID NO: 41519 - DNA, 295 bp, Zea mays
gcatcctcccgtctccgtcgtctcgtctccgctcctcacctcgccagccatgggcaagatcaagatcggaatcaacggtttcggaaggatcggcaggctcgtggccagggtcgccctgcagagcgaggatgtcgagctcgtcgccgtcaacgaccccttcatcaccacggattacatgacgtacatgttcaagtacgacaccgtgcacggccaatggaagcacagcgacatcgccctcaaggactccaagacgcttctcttcggcgagaagcggtcaccgtctttggcatcagga

SEQ ID NO: 41520 - DNA, 298 bp, Zea mays
cgccaacatggagcggatcatgaaagcccaggcgctgagggactccagcatgtctgggtacatgtcctccaagaagacgatggagatcaaccccgagaacgccatcatggaggagctccgcaagcgtgccgaggctgacaagaacgacaagtccgttaaggaccttgtcatgctgctgttcgagacggcgctgctcacttctggctttagcctcgacgatcccaacacctttggcagccgcatccaccgcatgctcaagctgggcctgagcatcgacgaggacgaggaggctccggag

SEQ ID NO: 41521 - DNA, 297 bp, Zea mays
acacaccgcccgtacccgatctccgatcccctcgtcgatccaaagatgcagatcttcgtcaagaccctcactggaaagactatcaccctcgaggtggagtcttctgacaccattgacaacgtcaaggccaagatccaggacaaggagggcatccccccggaccagcagcggctcatctttgctggcaagcagctcgaggacgggcgcacacttgccgactacaacatccagaaggagagcaccctccaccttgttctccgcctcaggggaggcatgcagatcttcgtcaagacctca

SEQ ID NO: 41522 - DNA, 297 bp, Zea mays
gccggtaccagatcaaagattctgatcttaggattgaacgtttccgatctggtggccctggtggtcagcatgccaacactacagagagtgccattcgaattgtgcacattccgactggtataagtgcaacatctcaaaatgaaagatcacagcacatgaacaaggcatcagcaatggcagtgctccaatctcgtcttgatcagcttgagattgcccgccaggcacagatgaatgcagagcacacacaatcactcaacgaaatcagctggggcaaccaaataagatcttatgttctcc

SEQ ID NO: 41523 - DNA, 281 bp, Zea mays
gtcggaatggttccgcgtcgtcatgctcctcagccccgtcgtctccacgtctggacgcttcgaggagttcttccccatcggaggcgagagccccgagtccttcctcagcgtcttcagcgacgacgttatccaggcgtcgttcaacactcgccgggaggagtgggagaaagtgttcgagaagcagagcaagggggagatcacgacggcgtccgaggaacatatccgggagctgagcaggtcctgctcacgtggtggccgcggcagccgcggcgagggtggcg

SEQ ID NO: 41524 - DNA, 284 bp, Zea mays
agacaacactcaccgatagcaagtagcgccgccgacgtttcgagagcagagtatccaagctagccaagcgcgcacctcggtgacctagctagctacctagctagttcaggcgacgatatggcgtctggtcaggagagcaggaaggagctggaccgcaaggctcgcgagggcgagaccgtcgtccccggcgggaccggcggcaagagcgtcgaggcccaggagcacctcgccgaaggcgctacgcggaggccagactcgcagggagcagctggggcagcaggggt

SEQ ID NO: 41525 - DNA, 286 bp, Zea mays
caaagaattccctcccctagccgccgccgccgccgctcgtctccctgagaggtgccgtgaccgaggaactggccgagtactaggtagagaatcggtttttcttgtctcagcccggggtctgctgcgtctggtggtggtgaaggggagaaattcgtgagatctgttccggatcaggcgtgcgagctcgggaatcaggggtttcacacatagcttcgtcgatttgaatttgatgtactaatggagtctaagggtggcaaaaagtctagcagtagtcgttctatgatgt

SEQ ID NO: 41526 - DNA, 286 bp, Zea mays
acaacactcaccgatagcaagtagcgccgccgacgtttcgagagcagagtatccaagctagccaagcgcgcacctcggtgacctagctagctacctagctagttcaggcgacgatatggcgtctggtcaggagagcaggaaggagctggaccgcacagctcgcgagggcgagaccgtcgtccccggcgggaccggcggcaagagcgtcgaggcccaggagcacctcgccgaaggacgcacgcggaggccagactcgcagggagcagctggggcagcaggggtacag

SEQ ID NO: 41527 - DNA, 283 bp, Zea mays
actcgctcgcgctcgcgtggcaaacggacacggaatcgggctcaggacaggccgtaccactacggcgaggagagtttccggcactggacgcgctcccggcagggccggttcagggtgctggaacggttcacccacgagctgctggaggacgccgtcggcaactaccgcgtcgccgagctggaagccgcgccgcgcacgttcctgcagcccagccactacgacgccgacgaggtgatgttcgtgaaggaaggcgtaggcgtcatcgtgctgctccgctgcggga

SEQ ID NO: 41528 - DNA, 308 bp, Zea mays
tctcaacccaagtcgtgcctccgctccggtcacccgtcgctccacgcaaccatgtcgaggaggaagaccagggagcccaaggaggagaacgtcacccttggacccactgtccgtgaaggagagtatgtctttggtgttgctcacatctttgcatccttcaatgacaccttcattcatatcactgatttgtctgggagggaaactctggttcggatcaccggtggcatgaaggtgaaggctgaccgtgacgagtcgtcaccttacgctgctatgcttgctgctcaagatgtcgcacagcgctgcaagga

SEQ ID NO: 41529 - DNA, 305 bp, Zea mays
gccaaagttcttcggagtccgaagccggctggtttgatcttttcagcaagcgttactggaaagttgtgagtgtgggggcagcactgtttttgttccagcagcttgctggtataaacgctgttgtatattactctacatcggtgttccgtagtgcaggcattgcatctgatgttgctgctagtgctcttgttggagcagccaatgtttttggtactatggttgcatcttctctaatggacaaacaaggaaggaaaagccttctgataacaagcttttctggaatgggtgcttcaatgctactccta

SEQ ID NO: 41530 - DNA, 304 bp, Zea mays
gttggagagggtgtgactgacgtagctccgggcgaccatgtccttcctgtgttcacaggggagtgcaaggagtgtgcccactgcaagtcggcagagagcaacatgtgtgatctgctcaggatcaacaccgaccgcggtgtgatgattgccgatggcaagtacgcggtttcaatcaatgggaagcctatctaccactttgttgggacttccaccttcagcgagtacaccgtcatgcatgtgggttgtgttgcaaagatcaaccctcaggctccccttgataaagcttgcgtccttagctgtggta

SEQ ID NO: 41531 - DNA, 310 bp, Zea mays
cctgcagtcctccctcctccatctccagcgttgtgttctgactcacctgcaccaatggctgttctttctgctgctggtgctcccccggcctcagctatcgggtttgagggctatgagaagcgccttgagatcacattctctgaggcacctgtctttgtggacccccatggcagcggtttgcgtgccctctccaggtcccagattgactctgttctggatcttgcacggtgcacgatcgtgtccgagctctccaacaaggattttgactcctatgttctctccgagtcaagcttgttcatctatcctctga

SEQ ID NO: 41532 - DNA, 311 bp, Zea mays
ggccgcgccttcatcctccagggcggcgactgcgccgagagcttcaaggagttccacgccaacaacatccgtgacaccttccgtattctgcttcagatgggcgccgtgctcatgttcggtggtcaggtgccggtcgtcaacgtggggaggatggctggccagtttgccaagccaaggtccgaaccgttggaggagagggacggcgtcaagctgccaagctacaggggcgacaacgtcaacggcgacgacttcaccgagaagagccgcgtgccagacccgcagaggatgatccgcgcctactcgcagtcggt

SEQ ID NO: 41533 - DNA, 305 bp, Zea mays
ggcctgcgcctcgtcggctgctgcaacgagctcaacgccgggtacaccgccgacgggtacgcgcgcgcgcgcggcgtcggggcctgcgccgtcacgttcacagtcggggggctcagcgtgctcaacgccatcgcgggcgcctacagcgagaacctgcccgtcatctgcatcgccggatggcccaactccaacgactacgggaccaaccgcatcctccaccacaccatcggcctccccgacttctcgcaggagctccgctgcttccagaccgtcacctgccatcaggcggtggtgaacaatctgga

SEQ ID NO: 41534 - DNA, 295 bp, Zea mays
gcgccatgaaagtcccggtgcttctcctcctggtctccctgtgcttctcgctcgcgctcgcgtggcaaacggacacggaatcgggctcaggcaggccgtaccactacggcgaggagagtttccggcactggacgcgctcccggcagggccggttcagggtgctggaacggttcacccacgagctgctggaggacgccgtcggcaactaccgcgtcgccgagctggaagccgcgccgcgcacgttcctgcagcccagccactacgacgccgacgaggtgatgttcgtgaaggaagg

SEQ ID NO: 41535 - DNA, 300 bp, Zea mays
aaccgcaccgcctccacacctcgcgccgctgccgcatctcctctacaggtaagaaggagagaaagagggcgaaatggtgaagcacaacaacgtcatccccaacgggcacttcaagaagcactggcagaactatgtcaagacatggttcaaccagcccgcccgcaagcagaggcgccgcatcgcacgtcaaaagaaggctgtgaagatattcccacgaccaactgctggccctcttcgtcccattgttcaatgccagactctcaagtacaacatgaagtcaagggctgggagaggctttac

SEQ ID NO: 41536 - DNA, 304 bp, Zea mays
agcagcggcggcggacaaacgcaggcgaaggcgagggtgtgagggaaggagcaccagccatggtgcacgtcaacttctaccgcaactatggtaagacgttcaagaaaccaaggcgtccttatgagaaggagcgtcttgatgctgaactgaagctggtcggtgactatgggctgaggtgcaagcgtgagctattggagggtccagtatgcactgagcaggatccgtaatgctgcaaggcacttgctcacccttgacgagaagaactcccgtcgtatctttgagggtgaggcgcttcttcgccgca

SEQ ID NO: 41537 - DNA, 207 bp, Zea mays
caagacctcgcagacggcgcacaccgcgggcgacaagctcggcgagtacagggactacaccgccgacaaggcccgggaggccaacgacagcgtctcgcgtaagacgggcgagacggcggaggccacccggaacaagctgggcgagtacaaggacagcgccgtggagaaggcgagggagaccaaggacgcggtggcgcagaagacgag

SEQ ID NO: 41538 - DNA, 186 bp, Zea mays
gcagtcccctgatattgctcacggtgtgcatggccacttcaccaagcgccccgaggagattgcagctggtgaccagggacacatgttagggtatgcgaccgatgagacccctgagttgatgcccctcagccatgtccttgccaccaagctaggtgcacgtctcaccgaggtccgcaagaacggaac

SEQ ID NO: 41539 - DNA, 296 bp, Zea mays
gcctcctcccatcctcctgcccccgatcttcctcctcttcctcgtcgcccctttggcggcgccgcagcccgcgccgggatcggcggcggcgcgcaggaggacgacctgcgctgcctccgaggcgttaagcacgacctcgccgacaccaacgagcgtctcgcagactgggacttcaagaacacctcgggcggcgccgtcagcaattacaacggcatcggctgctggaacctgcaggagtcccgcgtcctctcgctctcgctctccgggttcggcctcgtcggctccatcccctcctc

SEQ ID NO: 41540 - DNA, 200 bp, Zea mays
gtgtggcagtatgatgcagcagatgtctcgtgcattggaacatgaacagtttggtgcatgtaaacacggaagcccaaacagtccttcaacatgctttggtacacatcaaagatgcttctggcagctattgatgaaagtcaccggggaacttatgattttatctaccagccaattgactttaagaataagtgcaatgttgg

SEQ ID NO: 41541 - DNA, 192 bp, Zea mays
cacacactcactatacactgctctgctgcagcaagaaggaagaagctagcgcctccctagctctcgttgtcagcaatggccaccaccgccgcgtccagcctcctcaagtcctccttcgcgggctcccggctcccttcggccacgcgcaccaccactccgtcgtccgtggccgtggccaccccgcgcgccggc

SEQ ID NO: 41542 - DNA, 132 bp, Zea mays
gagacgttggacgtgtatgtatatacctctctgcgtgttaactatgtacgtaagcagcaggcagtgcaataagtgcggctctgtagtatgtacgtgcggacacgatgctgtatgctactgaggcaagtccca

SEQ ID NO: 41543 - DNA, 296 bp, Zea mays
gcaactgccgccgccactcccacgctcgcagccatgccgcccaagctcgacccgtcgcaggtggtggaggtgttcgtccgtgtgaccggcggcgaggtcggcgcagcgtcttcgctggcccccaagatcggcccgctcggtctttcccccaagaacatcggagaggacatcgccaacgagacggccaaggactggaagggcctccgcgtcaccgtcaagctcaccgtccagaaccggcaggccaaggtctccgtcgtcccctccgccgcggcgctcgtcatcaaggcgctcaagga

SEQ ID NO: 41544 - DNA, 292 bp, Zea mays
ctcaatgctcacaagctcctatagcttcccttcttcccccataccatccatcaattatagcttcaatatgtgaaaacccagctcttcaaccatataggcttcaacaagcaatcgcagcaagcaacatacctttatcgcccttgttgtttcaacaatcgccagccctatctttggtgcagtcattggtacaaaccatcagggcacaacagctgcagcaactcgtgctacctctgatcaaccaagtagctctggcaaacctttctccctactctcagcaacaacaatttcttcc

SEQ ID NO: 41545 - DNA, 290 bp, Zea mays
cgacgcagagactcgccaaatttcccaccctcctcctagccttctcgtcgctcctgttcttctcgcatccccagcccacgatgtgtcccctgtcgcgttgatgcatgctccctcggcggtggccttgagctgaggcggcggagcgatgacggactccgacaacgactccggcgggccgagcaacgccgggggcgagctgtcgtcgccgcgggagcacgaccggttcctgcccatcgccaacgtgagccggatcatgaagaaggcgctcccggccaacgccaacatcagca

SEQ ID NO: 41546 - DNA, 287 bp, Zea mays
gcattatcctctcgtctcgtgccggccagtcccgcgcagattagaggcacgtttcagatgtcaacaccgtgccgccgacagcagcctggtcgtagctgggtcatgttctatatccatgagacaagaagctggagcactttgactctttgagaggcttacttttatgctgtctagttttccatcttctgttgagtcgagaaaacaagaaaggctgtgtagccaagggatgacttttacccttgtgccattcttttccctgtcgtggtggggggtgggttgcggttgat

SEQ ID NO: 41547 - DNA, 286 bp, Zea mays
ggcatgcacttgacaagggtgaggcagtcaattttatgaaaggagcagttgtgacagcagatcgaatcgtgactgtcagtaagggttattcatgggaggtcacaactgctgaaggtggacagggcctcaatgagctcttaagctccagaaagagtgtattaaacggaattgtaaatggaattgacattaatgattggacccctgccacagacaaatgtatcccctgtcattattctgttgatgacctctctggaaaggccaaatgtaaaggtgcattgcagaagga

SEQ ID NO: 41548 - DNA, 170 bp, Zea mays
cagaattgttgtcctcctcgccaccctcctatgcgctgccgccgcagtcgcgtcgtcctgggaggacgacaaccaccaccaccacgggggccacaagtccgggcaatgcgtgcggcggtgcgaggaccggccctggcaccagagcacccggtgcctggaccagtgcaggg

SEQ ID NO: 41549 - DNA, 195 bp, Zea mays
cgcccgttgttgtatcttgtcactgatcagtgttgtttgctttgctttgccgtgctaatggcgcacgctccatgtggccgttcgtcgcagagggtgttccacttcggcaagggcaagagcgagggcaacaagaacatgaaggagctggtgagagggtcctacttctgtattcaattcgcttgctttgctactgca

SEQ ID NO: 41550 - DNA, 317 bp, Zea mays
gggaagccaaatcgatggcggcggcggcggccggcggcgagaacagcggcgcgggcgcgggcgcgggcgagggcgagttctacctgcggtactacgtggggcacaagggcaagttcgggcacgagttcctcgagttcgagttccgccccgacggcaagctccgctacgccaacaactccaactacaagaacgacaccatgatccgcaaggaggtcttcgtctccccctccgtcctccgcgaggccaggaggatcatccaggagtccgatatcatgaaggaggacgacagcaactggcctgagcccgaccgcatcggc

SEQ ID NO: 41551 - DNA, 312 bp, Zea mays
atctgctggcaatgatgaatttatcggatccatgattgctgaagcaattgacaaagtggggcctgatggtgttctatcaattgaatcctcctcgtcttttgagaccactgttgaagttgaagaaggaatggagattgaccgcggttatatttccccacaatttgtgacaaacctcgagaaatcaattgtggagtttgagaattgtaaggttcttattactgatcagaagatcacaagcataaaggaaatccttccgattttggagaagaccacacagctgagagcccctctgttcattattgctgaggacat

SEQ ID NO: 41552 - DNA, 314 bp, Zea mays
ctcgcactcgcacgtacaccacactagttaccacagacgacgggcgccatgaaagtcccggtgcttctcctcctggtctccctgtgcttctcgctcgcgctcgcgtggcaaacggacacggaatcgggctcaggcaggccgtaccactacggcgaggagagtttccggcactggacgcgctcccggcagggccggttcagggtgctggaacggttcacccacgagctgctggaggacgccgtcggcaactaccgcgtcgccgagctggaagccgcgccgcgcacgttcctgcagcccagccactacgacgccga

SEQ ID NO: 41553 - DNA, 313 bp, Zea mays
gtcgtcgtaggcagcgagcgtctctcctctcccacgcatcgcgccaaggaagagagagagatcgccgctccccttctcggcgtcggtggtgcgggtgccctccctcctcgagcgagatctgtctggtcacagatctatctgacaaaatggtgaagatctgctgcatcggtgctggctatgtcggtggcccaaccatggccgtcattgccctcaagtgcccagacattgaggtcgtcgtcgttgacatctccaagccccgcattgaggcctggaacagtgacaccctgccaatctacgagcctggtctcgatga

SEQ ID NO: 41554 - DNA, 306 bp, Zea mays
cgggaggcgttggccaagaaaggtgccaagaaacaaaggttgttgtgggcatccaccggtgtcaagaacccagcttatcctgacactctttatgtggacagtctcatcggacctgacacggtcaacacgatgcccgaccaagctttgcaagcattcatagaccacggcaccgtttcaaggacagttgatgcgaatgtgtctgaggcggaaggtgtatacagcgccttggagaagcttggcatcgactgggaagaggttggaaagcagcttgagctggagagcgtggactccttcaagaagagcttt

SEQ ID NO: 41555 - DNA, 299 bp, Zea mays
aaggacctggccaagaagatttggtgttttggacctgagaccactggcccgaacatggttgtagatatgtgcaagggagtgcagtatctcaatgaaatcaaggattctgttgtggctggtttccagtgggcatcaaaggagggtgcactggctgaggagaacatgcgtggaatttgctttgaggtctgtgatgtcgttcttcatgctgatgctatccacaggggtggtggtcaggtcattcccactgccaggagggtcatctatgcttctcagctcacggcaaagccaaggctgctgga

SEQ ID NO: 41556 - DNA, 306 bp, Zea mays
ctcgttctctccttcctatcggctccacacctccacgcaactggaagcttcgcttcaatctgccctactcctccgccggctccaacaccgcagacgcagctgccgcgggcgggagcttggacgtgctactctgctctcatctcgtttccgcgcaggaattgttcacaatggcccgcgtgtatgttggcaacttggattcacgggtgacttctggggaactcgaagatgagttccgtgtgtttggagttctgcgaagtgtttggattgcacgtaaaccacctggctttgcatttattgattttgacg

SEQ ID NO: 41557 - DNA, 306 bp, Zea mays
gtagctactagcgcgagtgccactgtgccgcagctgcctgctcgccattactgcaagctgtgttcaatcaaagcttaattaggctccctctacatctgatccagctaagtagctagccagcactacagaagggcgtggcaagaatcaggagagagatagcaggggggctagctagctgagctcgtgcgacgaagaatggccggaattggcaggaacatggtggcgccgctcctggtgctcaacctcatcatgtacatcatcgtcatcggcttcgcgagctggaacctgaaccacttcatcaacggg

SEQ ID NO: 41558 - DNA, 275 bp, Zea mays
accagactatgcttaacaccctcgacggtgtcagagatgagacaggtgcaagccccactgcctgggctgtttggacgagggcatggactgctgaggagaacaggcatggtgatctgctcaacaagtatatgtacctcactgggagggtggatatgaggcagattgagaagacaattcagtatcttattggctctggaatggatcctaggactgagaataatccttatcttggtttcatctacacctccttccaagagcgggcgacttcatctcac

SEQ ID NO: 41559 - DNA, 302 bp, Zea mays
aaaggattgagcgtgatagaatccgtgaggagcgcagacgcgagagggagagggagaggaggctggaagccaaggatgctgcaatgggcaagaagagtaagatcacaagggacagggatcgtgatatcagtgagaagattgctcttggtatggcaagcactggtggtgcaaaaggtggtgaggttatgtatgaccagcgtctgttcaaccaggacaagggaatggactctggttttgccacagatgatcagtacaatatctactctaagggtctcttcacagcgcagtccacgatgtccacg

SEQ ID NO: 41560 - DNA, 299 bp, Zea mays
aaatatcatatttcttaatcttatttcagcgccccaaggagtgcatgtggtgtgcaagagattccctagaatgaagatcgttacttcggagattgagtccggtctaaatgatgatttccgtgtcgtacctgggatgggcgaatttggagacagatacttcggaacagatgaatatcagtcatcgacgccatttttctgtgacgataaaaatcgtgtcaggctcttgtgagaagacaacataagccatggacgcggcatattctccaattttttagaaacttatatctgcatttcgaact

SEQ ID NO: 41561 - DNA, 300 bp, Zea mays
agtaccaaccagaagagcggcggcgcgggcggacaaggagcaggcggaggaggagttgtgccaagccacaatgggtatctcgcgtgactcgatgcacaagcgccgagccaccggtggaaagcagaaggcctggaggaagaagcgaaagtatgagcttggtcgccagccagccaacaccaagttgtcaagcaataagacagtgaggagggtccgtgttcgtggaggtaatgtgaaatggagggctcttcgccttgatactggtaactactcatggggaagtgaagctgttacccgcaagac

SEQ ID NO: 41562 - DNA, 301 bp, Zea mays
ctacacagttcacacgccaagcgagggccgcatctagatccgcgacgccgagctgacttgactattggacttgaggagcgggtgggaatgcgggcgtcctcgcgctcttcgacgtcgacggcaccctcacagcgccgcgcaagggggtgacgccagagatgctagagttcatgaagcagctgcgccagcagtgtgacagtgggcgtggttggcggatccgatctggtgaagattaccgagcagctcggcagtacagttattactgattatgattacgtcttctccgaaaacggcctggttg

SEQ ID NO: 41563 - DNA, 299 bp, Zea mays; identical to SEQ ID NO: 39006

SEQ ID NO: 41564 - DNA, 300 bp, Zea mays
attcaatggcataattgaaataaactgttcaaaagatattaaagtccaaggtattattggaccatgcacatctttggagaaccaaggagccatgtgctctgacacagttgtcggtcaaggaaatacatcagcatggaaaatgtgtggtctcgatagaaatacttctcttacagtattttttgatgtctcaccgagtgaacgatcgagccagccaggaaaccaaaatccccatttgtatatacaatttgtgacaagttaccaacacccagaaggtcaaatgaggataagagttactacgat

SEQ ID NO: 41565 - DNA, 178 bp, Zea mays
ttgactcgctgtacgagggcattgacttctactccaccatcacccgtgccaggtttgaggagctcaacatggacctgttcaggaagtgcatggagcctgttgagaagtgcctgagggatgccaagatggacaagagcagcgtccatgatgttgtccttgttggtggctccactaggat

SEQ ID NO: 41566 - DNA, 304 bp, Zea mays
  unsure (1)..(304): unsure at all n locations
ccccgtcatcgatctcgtttcaaatccatccatcctcgtttcctccgtcccgcagcatctcaaccccatggccaagatcaagatcgggatcaatgggttcggcaggatcggaaggctggtggccagggtggccctgcagagtgacgatgtcgagctcgtcgccgtgaacgaccccttcatcagcaccgactacatgacctacatgttcaagtacgacactgtgcacggacagtggaagcaccatgaagtcaaggtgaaggactccanaacccttctctttggtgagaaggaggttgctgtgttt

SEQ ID NO: 41567 - DNA, 308 bp, Zea mays
ctccctctccccgcgggccgccagaggcaatttcgccctcgattcgaccccgattcgtccgcccgcgaccgggattccctccgccaagcgcggatctgaacgctgcgctccgtgtcgccgctcgaatccgccatgaagggggccaaatccaagggcgccgccaaggccgatgccaagctggcggtgaagagcaagggggcggagaagcccgccaagggcaggaaagggaaggccggcaaggaccccaacaagcctaagagggctcccagcgctttcttcgtgttcatggaggaatttcgcaaggagtt

SEQ ID NO: 41568 - DNA, 229 bp, Zea mays
atgctaccctcgaagcagagaaattccagggttacttcaatggtgcacccttgatgaaggtgcctgggagacttcatccagttgagatattttacacccaagaaccagagagggactacctagaggctgctatcaggacggttatgcaaatacatatgtgtgaacctgctggtgatatccttgtattccttacaggagaagaggagattgaggatgcatgccggaaaat

SEQ ID NO: 41569 - DNA, 312 bp, Zea mays
gcaactggtgtggcccaataatatggtagagctagagcttgaactctggtttcgaaagtggcataattcccgcctcgccagaggagtacccaattttgggactcaatcttctgaggctgttggttcagaatagaattgccgagttccacactgagctggagcttttacctgtcaaggcactcgagcatccttgcatcaagcatgctgtagagcttgagcaatccttcatggagggtgcctacaaccgagtgttaagtgctcggcaggctgtgccacatgagacctacgtttacttcatcgaccttctcgcca

SEQ ID NO: 41570 - DNA, 282 bp, Zea mays
attcatatcaggtttacgagaagggtgctgaagttgtcagaatgtaccagaccatgtttggagcatcagggttccgaaagggcatggatctttattttaaaaggcatgatgggcaagctgtcacttgtgaagacttctatgcagccatgtgtgatgccaataatgcacaactgccaaactttttacaatggtactctcaagcaggtacgcctatagtcaaggtggcatcttcatatgatcctagttctcagacattctctttgaaacttagccaagaagtac

SEQ ID NO: 41571 - DNA, 296 bp, Zea mays
gcaaaagctactgctgaagatttcaacttatttcaattcaatgatggtcaatatgagtcagctgcccaacttcatgctagggctcaacagatatgtgccgttctttatcccggtgatgctacagaagaaggaaagcttctaaggctgaagcagcagtttttcctttgcagcgcatcacttcaggatatgattgccagatttaaagaaaggaaatctgatagagtttcagggaagtggagtgagttccctactaaagttgctgttcaactgaatgacactcaacctactcttgccat

SEQ ID NO: 41572 - DNA, 303 bp, Zea mays
gtattgtggttactaatgatggtaattctattttgagggaaatagacatcgcacaccctgctgccaagtctatgattgaactaagtcgtacacaagatgaagaagttggtgatggcactacatctgtcattgttctagctggagagatgctacacgttgcacaggcattcattgacaagaactaccatcctactgttatttgtcgagcatacaccaaagcgcttgatgatgctattgctgtacttgacaaaattgcaatgcctgttgatgtgaatgatcgcggggcaatgctaggcctcgtga

SEQ ID NO: 41573 - DNA, 212 bp, Zea mays
ccgaggatgccaaggagaagaataggaagttcactgagactgtggaacttcagattggtctgaagaattatgatccacagaaggacaagcgtttcagtggctctgttaagttgccccatatccctcgtcccaagatgaaggtgtgcatgcttggtgatgcccagcatgttgaggaggccgagaagatgggacttgactacatggatgttgag

SEQ ID NO: 41574 - DNA, 290 bp, Zea mays
ctctcggccaggtctccctctccccggctctccgccttcctcttccagtccccgcgcgcgagatcgccgccccgtgtgggccctagatcccgatggcctcgcgccgccgcaccctgctcaaggtcatcatcctcggcgatagtggggttgggaaaacttccttgatgaaccaatatgtgaacaagaagttcagcaatcagtacaaggctacgatcggcgcggatttcctcaccaaggaggtgcagttcgaggacaggctcttcactctgcaaatatgggacactgctggc

SEQ ID NO: 41575 - DNA, 291 bp, Zea mays
gaaatcgattcccccgcatccgatctcttcggtgctagagaaatataggccgccgcctcctcctcattcggtgaaaggtgggcggttagggttgggagatctcttgactcacgacacgagcagcagaattcgtcgagggccgctggttgctgcgagaggtccgggccttcgtgggatcttgaaaattgaatgttctaatggagtccaagggtggcaagaagaagtctagcagtagtcgttcctccctgatgtacgaagctccccttggctacagcatcgaggatatccgcc

SEQ ID NO: 41576 - DNA, 290 bp, Zea mays
ccgtcgcatcccatcccactaccacccatctcgtcgtccgccgattcgatccggttcttccaacccaggggcagtgatggcgacgaagaggagcgtgggcaccctcggcgaggcggatctgaaggggaagaaggtgttcgtgcgcgccgacctcaacgtcccgctcgacgatgcccagaagatcaccgacgacacccgcatccgcgcctccgtccccaccatcaagttcctcctcgagaagggcgccaaggtcatcctcgccagccacctgggtcgtccaaaaggtgtca

SEQ ID NO: 41577 - DNA, 318 bp, Zea mays
agggcatcccccggaccagcagcgtctgatcttcgccggcaaacagctggaggatggccgcaccttagcagactacaacatccaaaaggagagcaccctccaccttgtgctccgtctccgtggtggtcagtaagtcatgggtcgtttaagctgccgatgtgcctgcgtcgtctggtgccctctccatatggaggttgtcaaagtatctgctgttcgtgtcatgagtcgtgtcagtgttggtttaataatggaccggttgtgttgtgtgtgcgtactacccagaactatgacaaatcatgaataagtttgttgtttgaa

SEQ ID NO: 41578 - DNA, 315 bp, Zea mays
cgtcctactggccggcgctcttcgctaagctcctggagaagcgcagctcgaggatctaatcctctccgtgggatctggtggtggcgctgctccagttgctgcttccgccccagctgggggtgctgcagctgctgctgcccctgctgcagaggagaagaaggaagagcccaaggaggagtctgatgacgacatgggcttcagcctgttcgactgagaccctcgctacccagccattagcaaattcgcttatgctgtccaagacttatcttacgttatgtctgtaggcttttgttattacaagtactcaagttttga

SEQ ID NO: 41579 - DNA, 272 bp, Zea mays
taagagatcaaacatttcatgcaaggcaaagttagttcttagcttgccatttttatactcacatctacttcacattacctacctgcaaatagagcctcccaagaggtatcccttcctctttgatgcactgataatgttcgtctgtatttcacaatttgtcatcttagctgtgtacaccaactataagcaatggatgttggacacaaattctagatccataggtgtgaagaaggatctgtgattgaaagatatgacagctaattttacagaga

SEQ ID NO: 41580 - DNA, 321 bp, Zea mays
agatgtgtatagctacggtgttgtattgctcgagctgctcactgggaaaccgcctacagattcaactgacttcggtgacgacaacaatcttgtaggatgggtcaaacaacactcgaagtcgaggctcacggatctgtttgatcctgaactcgtgaaggaagatccagccctggagctcgagctactggagcacctaaaagttgcttgtgcatgcttggacgacagaccgtcgaagcgtccgacaatgctgaaggtcatggcaatgttcaaggagatgcaggccagttcgacagtggactcaaagacttcggcgtgcacaga

SEQ ID NO: 41581 - DNA, 308 bp, Zea mays
gtttgctgctgatctttttgtatcaaaatttaaagatgacttgctcaatcagcatgctggattgcggttcagaaataaggtgttggctccaggaggctcaaaagatcccctggagataataacggactacctaggaagagaaccatcactccaaccttttattcagagcagaacaaggaacagtctgtgagggatcatttatgatgtaaccgttgagttttttctttcttttttcctttttgaatttagctatagaaggcctgctgactgtctcgagttatttttttcgtaacggactgacaagtctg

SEQ ID NO: 41582 - DNA, 244 bp, Zea mays
gtggtaagaaaggtgtttggactcctgtagaacaggagtatcttccatccttcctgaagactagtttggagggcaatagataagctaattgaaactcttcaggcctagtttgggtactctagtaatgaaatgaattggaatgaattgagatgtattgtgtgagtctttgatctgttagggatttaaacactctttaatccctccaaaccattcaatagggatttaaattctcttcaatctctcc

SEQ ID NO: 41583 - DNA, 308 bp, Zea mays
gggttttcctgttcccccagtgctacgcagagaagcaggctctgggtgaagtgagccaggagctgctggacactcaggtgaacccagctgtgtgggagatcagtggacacatggtgctgaaacggaggatggactatgaggaggcatctgaaacctccgcgtggaaactcctcgccgaggtctctctctccgaggagcgcttcgaggaagtgaaggcgtacatcttcagcgctgctggcctggttcagtatgatgaggaagaggaggaagccagcgacggtgagggccctacggcctatgttcctgtc

SEQ ID NO: 41584 - DNA, 304 bp, Zea mays
ggagacaagaggttgaggcagcagctgaggaaacgaaaaagagcaaccatgtcacgaggaagcttgagaagcgcaaggagggacgtacccttgacccacacattgaggagcaatttggcagtggacggttgctggcatgcatttcttcccgccctggacagtgtggccgagctgatgggtacatccttgagggtaaagagcttgagttctacatgaagaagctacagaggaagaagggcaagagcgctgtagcttagagcattctcatggattgtcttgcaccgaaatgtgtgtcctgatgagt

SEQ ID NO: 41585 - DNA, 299 bp, Zea mays
agcaccctcgacaagaacctcgctacgaacctgtttaagatgcttctcaagtaccggcctgaagacaaggctgccaagaaggagaggcttctgaagagggcccaagctgagaatgaaggaaaaactgttgagtcgaagaaaccaattgttgtgaagtatggccttaaccatgtgacttacctcattgagcagaacaaggctcagcttgttgtcatcgctcacgacgtggatccgatcgaacttgttgtgtggcttccagccctgtgcaggaagatggaggtcccttactgcattgttaa

SEQ ID NO: 41586 - DNA, 280 bp, Zea mays
cgagaagtggatgaagcactcactggggtactgggaaaacgagaaggttcgattggcatacaggccagtgcacatgaacacattagacgatgaagtagagtccttcccgccgaaagcccgtgtctattgatcgattcgagcctcacaccctcgggaattccgtgtaaggtgttaataaagcagatgggcgttcctggctgagaacatgatctgaactcgtgactcccctttttctgtggttctgtattttgtctgatttgctagaaataaaaggaacaca

SEQ ID NO: 41587 - DNA, 163 bp, Zea mays
aaatggtatagcaactatatagggtgtaaaaccataataaatatggaaaaaatacaaggagaaaaaaaaaaaaaaaaaaaaaaaaaaaaaaaaaaaaaaaaaaaaaaaaaaaaaaaaaaaaaaaaaaaaaaaaagggccggccgcgacaaaatggccacgaca

SEQ ID NO: 41588 - DNA, 283 bp, Zea mays
  unsure (1)..(283): unsure at all n locations
agatgactacatgttagtggaagcgcttcaaaatgtcgatgctgtttgtgctgaagatgtggactgggagaaccttctcgagcacaggtctggggagctttgccgtcatagatggaaccagatgattcgcctgatgggtgaccacagatataggcctttcattgagcaagtggaagtgcttgcaaggcggtactgcccagagatgcttgcgtacaggaaaccagtcgcaggtggatcctcggccgacgaacctagctgnagctctgacttgtaatatgggatc

SEQ ID NO: 41589 - DNA, 250 bp, Zea mays
cacaccgtcatctcagaagacacgtggcaataagggcgcagccgtccatgtggcaactccagacccagctgaaggcaagaccattgtaaacaatgacaaatcggtcaagtctcgaaaatctgcgccaaaatctggtgtcccttgcaaatcgtgcagcaagtcattcatcagtgagacggcacttcaggctcactcgaaggggaacatggctggcaagtgagtcgcaggtccagtaggagtcacagcaaat

SEQ ID NO: 41590 - DNA, 295 bp, Zea mays
gtcttgccggtatgggagctgaagcagggcatccgtgctgtgcccctgcacgatcgcaagggtgtcaggtacaagtccgtcaggctcctcatgcgatttgattttgtgtagccgagccgagccgccattcagattcagcttctgtttttttccttcttgtgtgaattgaatgtattactcccttccttccatcttcaacgtatatgtgtatgtatgtacttatttttgtcggaataaaagttgtatggaatggaatggaaggaaggagtagaactgtcttcaaactccagcttct

SEQ ID NO: 41591 - DNA, 280 bp, Zea mays
ccagggaaatgcaacatggtggtggagaggctcggcgattacctgatcgagcagggcttctaaaagttcgtcatgttctgttttggtcatttgggcaccaaagtttgcgcctcatttggttctgtaatccgtgagctcgtgcatgtacttggcgtattgcatgcagtgaataatttagcttgggtttgtttgttgggggcagtgttggggacggatttggattggggtttatgcttggcatcgcgtcgtatcgaaactcagctgctgtttcgctgagtaa

SEQ ID NO: 41592 - DNA, 258 bp, Zea mays
agatggggatgttttcttgtggagctatactagctcgctgctgccttttgttacaatgtttgtacggtcgcaataaatgtatggtcgtgtttgctcgagagctactcaggtgattttgtcgtgggagcaccaaaagcagaaaagaactgtttttttttttcaatctctctagattctgacgagtggtggtctgcactcgtcgtaatgtcgtttgcctaaactgattttgatggaacaggaaatcttgctggtcttgcc

SEQ ID NO: 41593 - DNA, 266 bp, Zea mays
aaaagtcagggcaatatcacttcatggatttcgacaggcgggcagagaatgtttacaggtccttcaactatcccgaacgaagtcgggcagcaaggatatggcccttcaggaatcccgggaacggatggctcaaggagtatggacttgaaagcctttccaccaggatatggacctgctggagaaaaccagggcggtggtgcttcagggagcgtcataagcccccatgctcggtctgcagagaacgtagagttttcagacgacgctag

SEQ ID NO: 41594 - DNA, 274 bp, Zea mays
ccgtcaccgtgcgcatggtgccggcgcccagggggtctgggattgtcgctgcccgcgtgcccaagaaggtcctccagttcgcagagcattgaggatgtctttacctcgtcccgtggctccaccaagacactcggtaacttcgtcaaggcaacctttgattgtctgatgaagacctacggcttcctcacccctgagttctgggccgagaccaagtatgccaagaccccgttccaggagttcaccgatctcttggctaagccgacaaagggtcttc

SEQ ID NO: 41595 - DNA, 277 bp, Zea mays
cacaccgtcatctcagaagacaggtggcaagaagggcgccgccgtccatgtggcaactccacacccagcaaaaggcaagaccattgtaaacaatgacaaatcggtcaagtctccaaaatctgcgccaaaatctggtgtcccttgcaaatcgtgcagcaagtcattcatcagtgagacggcacttcaggctcactcgaaggcgaacatgggggcaagtgagtcgcaggtccaatagagtcaacaacaaatgcgaaacatgggagaggagggtaagcga

SEQ ID NO: 41596 - DNA, 280 bp, Zea mays
ctggccagattggcaatagctatgacccagttctggactgccacacctcacacattgctgtcaagtttgctgagctcgttaccaagattgataggcgatccggcaaggagctggagaaggagcccaaatttctcaagaacggtgatgctggtatggtgaagatggttcccactaagcccatggtggtggagaccttttctcagtatcctcctcttggtcgatttgctgtccgtgacatgaggcaaacggtggctgtcggagtcatcaagagtgtggagaa

SEQ ID NO: 41597 - DNA, 268 bp, Zea mays
  unsure (1)..(268): unsure at all n locations
ctcgagccggtcgccgatagagttgtcgtgaccaccaagcacaacgatgacgagcagtacgtgtgggagtcccaagcgggcgggtcgttcactgttacacgtgacacgtcaggggagcagcttggcaggggcactaagatcacactgttccttaaggacgatcagctggagtaccttgaggagcgtcgcctcaaggatctggtcaagaagcactctgagttcatcagctacaccatctacctgtggactgaanagacaacagagaagg

SEQ ID NO: 41598 - DNA, 287 bp, Zea mays
acaactgatgagactcttgtggcccagattaaggaagggttcgaaagcgggaaggatcttgttgtgcatgtacagtctgcgatgggggaggagcagatctgcgcgctgaaggatgtaggccccaagtaacttccttggctttggagacggaaccctactctatctcaacttaaatcggaaaagaagtgtatcaccaaaggattgctaccgagacattcacctggcttgagctggcttttgctatagcgtgcaaggagttgctgggtgtcgtacctacctgacttatc

SEQ ID NO: 41599 - DNA, 289 bp, Zea mays
acagacagttgcgcttggaacgtcaaagatcaactatcttgatcctagaataaccgtggcatggtgcaaacgccatgaagtccctattgagaagattttcaacaaatctctcctcgcgaaatttgtatgggcaatggacgttgacccggaattcagattctaggagaccattggctaccatgtgccagccagtttggtccagtttccagcccttctccctggacactaattgcagctaggaaaggaaagagctcggtgtttgttttttcaaagtccccaccccccctgc

SEQ ID NO: 41600 - DNA, 283 bp, Zea mays
ctgatgtatttggctatggaattactcttttagagcttattacaggacaacgtgccttcgatctagctcgtcttgctaatgatgatgatgtcatgcttcttgactgggtcaaggggttgctcaaggagaagaaactggagagtctggtcgacgaagatctagaccacaactacatcgatgtcgaggtggaatctctgatccaggtggcgctcctctgcactcagagcaaccccatggaacgtcctaagatgtcggaggttgtgaggatgcttgaaggcgatgg

SEQ ID NO: 41601 - DNA, 286 bp, Zea mays
agaagaaaacccctgctgcaaagaaggataatgctgagggacaagaggttgaggcagcagctgaggaaacgaaaaagagcaaccatgtcacgaggaagcttgagaagcgcaaggagggacgtacccttgacccacacattgaggagcaatttggcagtggacggttgctggcatgcatttcttcccgccctggacagtgtggccgagctgatgggtacatccttgagggtaaagagcttgagttctacatgaagaagctacagaggaagaagggcaagagcgctgt

SEQ ID NO: 41602 - DNA, 280 bp, Zea mays
caaagactatggaaatcaacccggagaacccaatcatggatgagctccgtaagcgcgccgaggctgacaagaatgacaagtcagtcaaggatcttgtgatgttgctgttcgagacagctctcctgacctccggcttcagccaggatgaccccaacacctttggcacccggatccatcgcatgctaaagctcggtctgagcatcgatgaggacaagtctgctgaggccgaagctgagatgcctccgctggaggatgacgccggcgaaagcaagatggagga

SEQ ID NO: 41603 - DNA, 281 bp, Zea mays
agtcccctgactcgttggcaccagagcagtgcaaggctctcgagacagtacttccaccaaggccttcatccaagctgacagacatggagatagatgaatgcgaggagacgactatgcatgatgtgaacaacatcgaggaagagatgcgcaggaagcaagctcacgctgcccaggaggcgtacgaggaggacgacgagatgccgggcggagccagagagtgcagtgcgcgcaacagtaagcagactatcatcaaggcaattgggaggggtggtgcccttaaa

SEQ ID NO: 41604 - DNA, 238 bp, Zea mays
accaggttgtggtgttgaaaaacctttgtttgtgtcctgggtaatgtttgggtgtttccttccatcatcacttgctgaactgctctagtatttgcatttgtaattgaagtctgtcgctttaagcactcttggttctaaagatctctgtgcttttggggggtgtttttgcattgccccaaatcccaataaactcaccaaattcgggtcgtgcgtgccttcggcgccttgcccgactagc

SEQ ID NO: 41605 - DNA, 323 bp, Zea mays
acagaaaccttcccacatgatgctttggaggctaccgcatggactgaagatggactcatcatggctgctcgccacaagaagtacaaacacatccagggtgtccagttccatccggagagcatcatcacccctgaaggcaagaaaatcatcctcaactttgtcagattcattgaggagctggagaagcagcgttcctaatctaggggaggtatatgcgaatgcgacgggtggtttcatagatcaggcggaagcagagacataagcccatgcgaagttccggcactggcagtggaagtttagctaggaatcaacgtttccctctc

SEQ ID NO: 41606 - DNA, 329 bp, Zea mays
cgatttgtctttgcagacaataagctaacttcattcaatattgggcctgacgatttgggcaagaaatttagaagtgattgcgtgattgaaagaattataatcctcggtttacgatccggagtgaagaaggctattattgagcctggaaatcaagaactagaaattgaatcagggccaattagtttaaggagtggttccagcccagtcgcgccaacaatccggaggcccaatgtttgcattgcagacagttggactataaggatagcataaaaggtaggccattcacatctggatcctgatgtctgatgtcttcttttgtctgctgtcag

SEQ ID NO: 41607 - DNA, 256 bp, Zea mays
tgcacgcgtgccacgccggcggcgtgtgcactgcctggcatggtgggagcaccacgaggtgggcgccctcgaggtggaccggatcgacgtcgtgtgggaggcggcgctcaagcacgggctcacgccggcgtgagcgggagggcgcccggagcgggagaccgagacggccggcacgcgcggccccgcccggaaataacgcgtcgtctattcgttgtcgcatggctgttgcgacgggtgggtcggtgtactaccgtgt

SEQ ID NO: 41608 - DNA, 220 bp, Zea mays
atcctcctcaaggtgtggcagacgatgatccaccccttcatcgacgccaacaccagggacaagttcgtgttcgtggatgaccagagcctgcgggagacgctgcggcgggagatcgacgagagccagctcccggagttccttggcgggaagatgacctcgtctccctcaaggatcagacagcagctcagccgttgcgatcatactgctaggatgtggcggc

SEQ ID NO: 41609 - DNA, 317 bp, Zea mays
caccgctgtgatggcgacctgtgatcatggtgcagttgcaaagatcaagagggtggtgatggacagagatacatacccgaggaagtgggggcttggcccggtggcactcaagaagaaaaaactggttgctgagggtctccttgacaagcatgggaagccaaatgagaaaacgccagctgaatggcttcggaatgtggtgcttcccactggtggtgatgtctcaattgccagcattgcagctgctcctgagccagagaaggtgaaggtggagcaggacacagctgtgactgaagaagtcaaggagaataagaagaaga

SEQ ID NO: 41610 - DNA, 182 bp, Zea mays
ctggagtacttgaggagcgtcgcctcaaggatctggtcaagaaccactctgagttcatcagctaccccatctccctgtggactgaaaagacaacaaccaaggaaatttctgacgacgaagacgaggaagagaagaaagatgctgaggaaggaaaggttgaggatgttgatgagaaggaagag

SEQ ID NO: 41611 - DNA, 319 bp, Zea mays
cgagctcaagctcatcgctaaaatgattgaatgggatccatggggtgctcccgatgactacgaatgtgaggtgatcgaagacgacaccccaattcctaagcatgttcctcagcacctgcctgttgctcttcctgaggagttcttcaaggcactagatgctgtcaaatctgatcctgctcttcaaggcgatgctcctcctcaagtgaaggcgtaaggaggcgtaaggatgctcttcaaggcgatgttcctggctaacgtcatttcacattttgccgcggtgggtagggactgctttcttgtgtcatgtgccagcaatgcg

SEQ ID NO: 41612 - DNA, 317 bp, Zea mays
gaaagctcaaggaagaatatggtattgaaccctggacgtttgaacagaagcttggtgaagctgttttcattcctgctggatgtcctcaccaagtgagaaatttgaagtcctgcatcaaagttgcgcttgattttgtttccccagaaaatgttggtgagtgtgttaagctgacggaggagtttagacgacttccatctttccacaaggctaaagaagacaaactagagatcaagaagatggctgttcatgccctgaacgaagctgtaaacttcctggatcctcgttcctcagaagagttgaaaattggggttggtgag

SEQ ID NO: 41613 - DNA, 284 bp, Zea mays
  unsure (1)..(284): unsure at all n locations
ctaccattacccntactctgttgtacgtggatgtgaccgtatagcccctgtggacatctacgtccctgggtgcccaccaaccgctgaggcactgctgtacggcgttcttcagctccaaaagaagatcaacaggcgtaaggatttccttcaccggtggaccaagtgaagcatgctcctgctatttctcggtcgctatgttttctttgcatttgacccgcttgtcacatctgaaataaggacacactttgctcggatttgcaagtactcttttttctttcttggtg

SEQ ID NO: 41614 - DNA, 324 bp, Zea mays
cagaacaccgtctcctttgtgaccctgaacaaggttggtggattcctgcagcggatggacctgtgccgcaagtacgcctttgggaagatgctcgtgataggctctgagccacccttcaagctgaagggcctttggctcttccgtggccaggatgttcccaagtttgtaatggacgaggtctatgacatggagctctacgagtggaccaaggtggacatctctgatgaggcccagaaggagcgtgtcaatgcgatgattgaggaccaggagccctttgagggccacgccttgcttgacgcgaaatgcttcaagtgagtgtgcttg

SEQ ID NO: 41615 - DNA, 241 bp, Zea mays
cccatgctgtggtgttgaaaaacctttgtttgtgtcctgggtaatgtttgggtgtttccttccatcatcacttgctgaactgctctagtatttgcatttgtaattgaagtctgtcgctttaagcactcttggttctaaagatctctgtgcttttggggggtgtttttgcattgccccaaatcccaataaactcaccaaattcgggtcgtgcgtgccttcggcgccttgcccgactagcgag

SEQ ID NO: 41616 - DNA, 315 bp, Zea mays
acatgatggactttgccttcccgtacctgttgcagttcattcgtgaatacactagcaaggtggatgatttagtgaaggacaagattgagtcgcagaaggaagaaagagccaaagagaaggaggagaaagaccttgtggctcagcagaacatgtatgcgcactgcttcctctcgctttgcccgccccgccaatgcctggcatgggtggccctccacctccgatgggcggaatgggcatgcctccgatgggtatgccgccgatgccagcatttgggatgccaccgatgggaagctactgatttggttttgcagcata

SEQ ID NO: 41617 - DNA, 310 bp, Zea mays
caaatccctgagcctaggtgggttatttcaatgggcagctgtgccaacggtggtggatactaccattactcctactctgttgtacgtggatgtgaccgtatagtccctgtggacatctacgtccctgggtgcccaccaactgctgaggcactgctgtccggcgttcttcagctccaaaagaagatcaacaggcgtaaggatttccttcaccggtggaccaagtgaagcatgctcctgctatttctcggtcgctatgctttctttgcatttcacgcgcttgtcacatctgaaataaggacacactttgctc

SEQ ID NO: 41618 - DNA, 274 bp, Zea mays
atgacatggagctctacgagtggaccaaggtggacatctctgatgaggcccagaaggagcgtgtcaatgcgatgattgaggaccaggagccctttgagggcgaggccttgcttgacgcgaaatgcttcaagtgagtgtgcttgcctggagacagaactgtttagcccttgaatttgcctatggaagagtttgcccttttactagtgtcgatgttgatctggtataccttgctatgaactggttaaagtttgtgctggtttgggattttttgtgc

SEQ ID NO: 41619 - DNA, 242 bp, Zea mays
tcctgccgcacgaagataaaatccccgcggtgatcacccgcttcaaggctttccatgaggcgttcatggctgagtaccgtgactgaactgttacagtggctgagtaccaccgtgtagaccgaaacaaaataaagctcccccctctctctgtgtctgtgcgtgtgtgtgaactgatctctgaatggacgaacaatgtactctgttggcgcctttaatggcaattgaggaaaattttgatcaag

SEQ ID NO: 41620 - DNA, 319 bp, Zea mays
atgatgaagggtatggaggaagtgatgtaccgacgcagtgggcaaacagctcatggggcaagaagctgattgtccagaagaggagggctcggctcagtgactttgacaggttcaaggtcctgctggcaaggatccagaagggttgtgctatcaggctaagagccgccaagctgatcaaggcgtccacggcttaagtcgcttttggtggatggcatgttagtttttggtggtcaggttcatcagcattttgttttgagtggtgtcaaagcccggattagtaatatgtttcatgtgtacccttttcaaacttcagcaagaa

SEQ ID NO: 41621 - DNA, 172 bp, Zea mays
ggcatgcagtgagatctaagctggtagagcttggatatgaaatcagtgacaaggaatttgaagatttctttaaacgctacaaagaggtcgcagagaagaaaaagcgtgtaactgatgaggacatagaagctttattgtcagatgagatattccagcctaaggttaattggtc

SEQ ID NO: 41622 - DNA, 322 bp, Zea mays
cgggcgcagagaatccccaagcaaacaaacagggtagatgtagagggagaggacaggagaggagaggagacgagaggttgggtctgggacaccatggctccgatgaagctgtacggggcggtgatgtcgtggaacgtgacgaggtgcgcaacggcgctggaggaggctggctccgactacgagatcgtgcccatcaacttcgccaccgccgagcacaagagccccgagcacctcgtccgcaacccgtttggtcaggttccagctctgcaggatggtgacttgtacctcttcgaatcacgcgcaatctgcaagtacgctgctc

SEQ ID NO: 41623 - DNA, 268 bp, Zea mays
  unsure (1)..(268): unsure at all n locations
gcgcactcaatttggctttacatcgtcccatcgggcatgtatggagtcgtgaactacctaaaggaaaagtaccataatccaatcatcatcatatcggaaaacggaatggatcagcctggaaacctcacgcgcgaggagtacgtgcacgacgccgtgangatcgatttctacaagaactacctgacggagctanagagagggatcgacggcggcgcgaacgtgatcggctacttcgcgtggtctctactggacaacttcgagtggctgt

SEQ ID NO: 41624 - DNA, 285 bp, Zea mays
atgagccaatcaagcaaatcatcaagacctgcatgaatgaccagaaggagaaattgtggcccatgctgcaaaagctcaatgttaccatgaaggctgatgagaaggagttgattggcaaagctttgatgaagcgtgttatgcaaacgtggcttccagctagcactgctctgcttgagatgatgatattccaccttccttccccagcaaaggctcaaaagtatcgtgtggagaacttgtacgagggaccccttgatgatgtgtatgcaactgctatcagaaactgtg

SEQ ID NO: 41625 - DNA, 320 bp, Zea mays
  unsure (1)..(320): unsure at all n locations
gcaggagttcttctacgaccaggtgcccgacaagctgcgcacctcgggctggcgctctacctcagcatcttcggcgtcggcagcttcatcagcagcgcgctcgtgtcggtcatagacagggtgacgacggacaggggcgggagctggttctccaacaacctgaaccgtggccacgtggactacttctactggctgctcgccgcgctcagcggcgtcgagctcctcgcctatgtcttcttcgcggtgacatacaagtacaagaacagaggagccgtacatgcaactgttgatggttagcggngagagtcaatacatagtat

SEQ ID NO: 41626 - DNA, 316 bp, Zea mays
cggcgccgtggcgatggcgctgctccacgccgggcccgtggagttcctctactcatggttccaccgggcgctgcaccaacacttcctctactcgcgctaccactcgcaccaccacgtctccatcgtcaccgagcccatcacatccgtgatccatcccttcgctgagcacatggtctactacgtcctgttcgccatccccatgctgtcgactctctacatggggaacgcctccgtcctgggcatcgtgctctacatcgcctacatcgacttcatgaacaacatggggcactgcaacttcgagctggtgcccaggtgg

SEQ ID NO: 41627 - DNA, 127 bp, Zea mays
ggaatttatcgaagcgacaaaggagccaggccttaccttcatggttgcaaaatttgatggcattcttgggctaggctttcaggaaatatctgttcggaatgcaacacctgtgtggtataacatggta

SEQ ID NO: 41628 - DNA, 318 bp, Zea mays
  unsure (1)..(318): unsure at all n locations
gcaggacctgcttctgctggacgtcacccctctgtccctgggtctggagactgctggaggagttatgacagtgctgatcccgaggaacaccaccatccccaccaagaaggagcaggtattctccacctactcggacaaccagcccggtgtcctgatccaggtctacgagggtgagaggacccggacacgcgacaacaacctgctgggcaagttcgagctctccggcatcccccctgcacaccgtggtgtgccacagatcaccgtgtgctttgacatcgacgccaacggcatcctgaacgtgtctgccgangacaagac

SEQ ID NO: 41629 - DNA, 286 bp, Zea mays
ggaaacttccttgttaaccttcttgggatgtggaaggagtctgaatactctggccattctgttcctgttggtggtcttgcttactatgtaactgccccatcaagtttggctgatgtccttgcaaatccattccatgcactgttttatgtggtcttcatgctgtcagcttgcgctctgttctcaaaaacgtggattgaagtttctggttcatcagcaaaggatgttgctaagcagctcaaggaacaacaaatggtgatgccaggacatcgtgagtcaaacttgcaga

SEQ ID NO: 41630 - DNA, 334 bp, Zea mays
  unsure (1)..(334): unsure at all n locations
cgctactccaagagtacccaatcaccgagccatggccatctcagtcactgccgtggccgccttgtccgctttctcggctcaaagaagcctcccgcagccgtaccgccagagggtcgtaacgttcatcgtcgtccggccggtgcgcgcgcaccgccggtttgtgggcgtggcggccagctcgccgcccacgccgccggatctcgcaaagaaggtgtccgagagcatcaagcaggcccaggagacgtgcgcagatgacccggtgagcggcgagtgcgtggcggcgtgggacgangtggaggagctcagcgcggccgccgactaatgtactcgtcga

SEQ ID NO: 41631 - DNA, 180 bp, Zea mays
  unsure (1)..(180): unsure at all n locations
ggactcgggttaaaaccatacgcgatgtgaaaagcatgattganacgaaggctgatgttgctccgaagctacacgtaaggnagcttcggctaacnngcggaaaaaggaaccgacctaaaggggaaaaggctatttagctctcattggttcatccataagtcaatagtaaatataaagggc

SEQ ID NO: 41632 - DNA, 313 bp, Zea mays
cgcctcccgtctttcctcaagaagtcgattcccttccccaagaacccaagcccccaccatgacaagctcctcctctccttcccgaaaggcgctgagcaagatcgcttgcaatcggctgcagaaggaactcgccgagtggcaactcagcccccctgctggattcaagcacaaggtctccgataacctacaaaggtgggtaattgaggtcactggagcggcgggcaccctttacgccggcgagatctaacagttgcaggttgacttccctgagcattatcctatggaggcacctcaggtcatttttctcaatcca

SEQ ID NO: 41633 - DNA, 312 bp, Zea mays
aggcggacaaggagcaggcggaggaggagctgtgccaagccacaatgggtatctcgcgtgactcgatgcacaagcgccgggccaccggtggaaagcagaaggcctggaggaagaagcgaaagtatgagcttggtcgccagccagccaacaccaagttgtcaagcaataagacagtgaggagggtccgtgttcgtggaggtaatgtgaaatggagggctcttcgccttgatactggtaactactcatggggaagtgaagctgttacccgcaagacccgtatcctcgacgtggtctacaatgcatcaaacaatg

SEQ ID NO: 41634 - DNA, 128 bp, Zea mays
ccgaacaccaaaccctagcttcgctcgttgcagcggcgagccggcgattgcgaagtctctgcgatccaaacgcgagaagcggcttcggacgttgcgccgggagatagcggaccgttctacgacaagaa

SEQ ID NO: 41635 - DNA, 270 bp, Zea mays
gcatcattggccagcactctgtcctcatggaaggttcgctggtggagaccaactcgatcctcgaagctggctctatattgcccccaggaaggcggattccaaccggcgagctctgggcaggaagcccagccaggttcgttcggaagctgaccaatgaggagatcatggagattccgaagctcggaactgccatcaacgatctgatgcagagccatttctcggagttcctgccttactctaacgcttatctggaggtagagaagctgaaga

SEQ ID NO: 41636 - DNA, 269 bp, Zea mays
  unsure (1)..(269): unsure at all n locations
atatgaggttgtcacaggaacagccaagaaagagtccaaagaaaaaacaactanaagcagcaacaagactaacaaatctggcntcaagccttcacgccaggtagaacccaactcaagggtcccaaagatgccacctccaaaggacgaggagagtgaaggggaggaaggtgaaccacaggaagaccatgagagtacgctgtgcggcgcatgtagcctaggttatgacgacttctggatctgttgcgacttatgcgagacatggttccacg

SEQ ID NO: 41637 - DNA, 294 bp, Zea mays
agagtaggggggaaccaaatcttgaacgggaacggagagttctttcgtggaggaggaaggggggcagcaggaggagggtagagaggtagctcaatagatctactgctgtcaggggagttaatgcaaagctgagttgctgcacgttggttttcttcagagatggcttcagctggtgtagccccatctgggtacaaaaacagcagcagcactagcattggtgccgagaagttgcaagatcagatgaacgagctaaagattagagatgataaggaagttgaagcaaccataattaat

SEQ ID NO: 41638 - DNA, 150 bp, Zea mays
cagctgacagacttcatcgagagtgagtacctcgaggatcattgcaccttgttgccacaccacgcaggttcgtgcagcttctcattgaccagctgcacaacctagagggtgcaaaagtgaagatctcagctcgacagacttcatcgagag

SEQ ID NO: 41639 - DNA, 282 bp, Zea mays
cacaggtggtacaacgttccaaaccatgcagctgagctcactgccggatactacaacctagatgacagagatggctacagaaccatagcacacatgctcacaaggcatcgtgctagcatgaactctcattgtgctgagatgagggacagtgaacagagttcagaggcgaaaagtgcacctgaggaactggttcaacaggtgttgagtgccggatggagagagggcctaaatttggcatgtgtaaatgcactcaaccgatatgatgcaaagcttacaacacca

SEQ ID NO: 41640 - DNA, 305 bp, Zea mays
cccagtcgctcaaaaccctagagctctcgcctgctcgcctccgccgccggagcgagctccccatcttcatccgtcaaccatggcgacccagatcagcaagaagaagaagttcgtcagcgacggtgttatctacaccgagctcaatgagatgctgacgcgggagcaggcggaggatggctactctggcgtggaggtgcgcgtcacgacgatgcgcacggagatcatcatccgcgccacgtgcacgcagaacgtgctcggcgagaaggagcgcagatcagggagcttaccaccgtcgtccagaagag

SEQ ID NO: 41641 - DNA, 307 bp, Zea mays
ccttatcccttccattcgcccaaacccccgccgccgtgacccctgccagcccgcggccttcccctcgttctaggcttcaactgccggcctcgtgtcttctgggcaagtgaagagagagatggcgtcgccaataccgcgcgagtaggtcgggctgcagcagtttcctccggccacccagaccgagctgcacgagctcctcggcaagctcaaggaggaggatgtgagcacattgacaattctggtgatggggaaaggcggagtggggaagtcatctactgttaactccatcgtcggggagaggatcgcc

SEQ ID NO: 41642 - DNA, 302 bp, Zea mays
gtcgagaggaagcccaatcccgaaaccgtcgccgtattccaatggcgcccaaggccgagaagaagcccgccgccaagaagcctgcggaggaggagccggcggcggagaaggccacggcggggaagaagcccaaggccgagaagcggctccccgcgggcaagtccgcaggcaaggagggtggcgagaagaaggggaagaagaaggcaaagaagtcggtggagacgtacaagatctacatctttaaggtgctgaagcaggtgcacccggacattggcatctcgtccaaggccatgtccatcatg

SEQ ID NO: 41643 - DNA, 305 bp, Zea mays
ggatttgacatgccggattgagaaaagcgcctcctatgatgatgtgaaagcagccatcaagacggcatcagagggtgcactcaaaggtattcttggctacacagacgaggatgttgtttccaatgattttgttggtgattcaaggtcaagcatctttgatgccaaggctggtattggactgagctcttccttcatgaagctcgtgtcttggtatgacaacgagtggggctacagcaaccgggttctggatctgatcgctcacatgggctcttgtgagcgccaagcactgatgttcgtactcgttc

SEQ ID NO: 41644 - DNA, 296 bp, Zea mays
agctcctcctcctcctccccccagtccctcccaggctcccacaccgccttgctcgcagcctccccaaaaccctagccctagccctagccctagccctagctctcccacacccgcactgggagatggacggcggcggcacgcaccgcacgccggaagacgtgttccgggatttccgcgcgcagcgggctggtatgatcaaagcgctcaccaccgacgtggagaagttctaccagcagtgtgacccagagaaagagaatctgtgtttgtatggtcttcccaatgaaacatgggaagtg

SEQ ID NO: 41645 - DNA, 302 bp, Zea mays
gttgcaacggatgtatcaaaaggcatgagctacttacaccagaataatattattcatcgtgatttgaaaacagcaaaccttctgatggatgaaaatgggactgttaaagttgctgattttggtgttgcacgtgttaaagctcaatctggagttatgactgcagaaactggtacttaccgttggatggccccagaggtcattgagcacaaaccctatgatcacaaggctgatgtttttagttttggaattttgatgtgggaactactcacagggaagattccttatgagtacctgactccact

SEQ ID NO: 41646 - DNA, 306 bp, Zea mays
gcagaagtggaaggaagcaggcggccaccatggtgaagggacgcacgggacagcgcgtcaggctctacgtccggggcaccatcctcggatacaagaggtccaagtcgaaccagtacgagaccacgtcgctcattcagatcgagggggtgaacaccaaggaggacgtcgcgtggtacgctggcaagcgcatggcgtacatctacaaggctaagaccaagagcagcgagacccgctacaggtgcatctggggcaaggtcacccgcccgcacggcaactacggcgtcgtccgcgccaagttcaagtcca

SEQ ID NO: 41647 - DNA, 213 bp, Zea mays
accagagatgagtaaacggaacttattctgggtggttagccagatgcaggctatcatcgagcgttatccatgctggggtgatactgttgaagtaaatacatgggttagtgctaatggtaaaaatggaatgcgtagggattggcatatacgtgattctatgacaggtcacacaatactgaaggcgacaagtaaatgggttatgatgaacaaact

SEQ ID NO: 41648 - DNA, 290 bp, Zea mays
  unsure (1)..(290): unsure at all n locations
agcaaatccccaattcctccgagttcgagcgaccatgtcngggcgtggcaaagacgggaagggtctgggcaaaggcggcgcaagcgtcaccgcaagttctccgcgcaacatccaggctcacgaaccggcgatccggagctggcaggangggggcgtgaacgcatctcggggctcatctacgaggagacccgcggcgtgctcaagatcttcctcgagaacgtcatccgcgacgccgtaacctacacggagcacgcccgccgcaagaccgtcaccgtcatggacgtcgtcta

SEQ ID NO: 41649 - DNA, 305 bp, Zea mays
  unsure (1)..(305): unsure at all n locations
cagatggtaaccaatacttgatcaaccttattgactcgcctggacacgttgatttttcctcggaagtcacagctgctcctcgcatcaccgatcgtgctctggttgtgggtgactgtattgaaggtgtctgtgtgcaaactcgaactgtgcttcgccaagcccttggtgagaagattaggccagttctcacggtgaacaagatggacaggtgcttccttgagcttcaggttgagggtgacgaagcgtatcagactttctcncgtgtcattgagaatgacaatgtcatcatggcaacatatgaagat

SEQ ID NO: 41650 - DNA, 282 bp, Zea mays
cgccatccctcactctcctccgaagccatcgtccccgtcccagcctccccggactccaggggcaaaagctgcagcgtcgagatggtgaaggggcgcacggggcagcgcgtgaggctctacgtccggggcaccgtccttggatacaagcggtccaagtcgaaccagtacgagactacgtcgctggtgcagatcgagggggtgaacaccaaggaggacttcgcgtggtactgcgggaagcggatggcctacatctacaaggccaagaccaagagcagcggcacc

SEQ ID NO: 41651 - DNA, 257 bp, Zea mays
gcagcaggaggaccaggcggcggccatcatgaaggcggcgcgcgccgagatcgcggcggcgcttaacaagatgaagaaggagaccaccgcggagccggaggccaagctggacgagggacgcagccgtgtggaggccgagctcgtagaggcgctcgccaacctcgaggcgcagaaggaggaggctgtcaaggcgctcgacgcccagatcgcctcgctcagtgatgagatcgtcaagaaggtgctcccatccgcgtgat

SEQ ID NO: 41652 - DNA, 263 bp, Zea mays
cgcagagacaggcgtcttcgtactcgcctatctccgcgacccaaagcgttcccccttctcccattcttctctcatttctcaccaccgccgccgctaccccctttcgacaacaccatgagggagtgcatctcgatccacatcggccaggccggtatccaggtcggaaacgcgtgctgggagctgtactgcctcgagcatggcattcaggctgatggtcagatgcccggtgacaagaccattgggggaggtgatgatgctttcaa

SEQ ID NO: 41653 - DNA, 352 bp, Zea mays
  unsure (1)..(352): unsure at all n locations
ctncaatctgnccttggcgccgccgccgacggatccaggtctgtagaccgctcactcctctacgctccgctccgaatggcncgcacgaagcagacggcgcgcaagtcgaccggcggcaaggcgccgcggaagcagctggccaccaaggcggcgcgcaagtcggccccggccacgggcggcgtgaagaagccgcaccgcgtccgccccggcaccgtcgcgctccgcgagatccgcaagtaccagaagagcactgagctgctcatccgcaagctacccttccagcgcctggtccgcgagatcgcgcaggacttcaagacggacctgcggttccagtcgtcggcggtagcggcgc

SEQ ID NO: 41654 - DNA, 259 bp, Zea mays
caccaaactgtctagcaataagacagtcaggagggtccgtgtccgtggaggcaacgtgaagtgagaggctctccgattggatacaggtaactactcgtggggaagtgaagctcttacccgcaagacccgcatcctggatgtggtctataatgcatcaaacaatgagcttgtgaggactcagactcttgtgaagagcgccattgtacaagttgatgctgctccattcaagcagtggtaccatcactcatatggagtggac

SEQ ID NO: 41655 - DNA, 347 bp, Zea mays
tcactagcgaggcgagtgacaagtgccagagggagaagcggaagaccatcaatggcgacgacctgctgtgggccatgagcacgctggggtttgaggactatattgaacccctcaaggtgtacctgcagaagtacagagagatggagggtgatagtaagttaacttcaaaatccagcgatggctccattaaaaaggatgcccttggtcatgtgggagcaagtagctcagctgtacaagggatgggtcagcaaggaacatacaaccaaggaatgggttatatgcaacctcagtaccataacggagatatctcgaactaatgaagacatggaccttttctgcaacagctg

SEQ ID NO: 41656 - DNA, 299 bp, Zea mays
ctacccggaacttcaggcctgaaagtctccttggagaagggggttttggatgtgtttttaaagggtggattgaagaaaatggaactgcacctgtgaaacctggtacaggtctcacagttgctgtcaagacgctgaaccatgacgggcttcaagggcataaagaatgggtggctgaagttgattttcttggaaatcttcaccatccgcatttggtcagattgattggatattgtgttgaagatgaccaaaggtagctggtctatgaattcatgcctcgtggcagtgtggataaccatctt

SEQ ID NO: 41657 - DNA, 325 bp, Zea mays
cggtacacatctccaggtaaggaaagggttcgtactcatggcgccgccgcagccaaagtcgggccttttcgttggcatcaacaagggtcatgtcgtcaccaagcgcgagcagcctccccgcccgtaccaccgcaaggggaaatcaacgaagagggtgtctatggtcaggggcctgatcagagaggttgctgggtttgctccttatgagaagcgtatcactgagcttctgaaggttggcaaggacaagcgtgccctgaagcttgctaagagaaagcttggaactcacaagagggcaaagaagaagagagaggagatggcgggcgtc

SEQ ID NO: 41658 - DNA, 316 bp, Zea mays
agattatgttgctgggcagatctttgatttagctgataaactagagcaagctgaaggccagctggcacacagtcgatttggtggtatgattatgccatcgcaacgaaagaaagagcaagaagagtctccactggctaaggtaacacgagatagctccaaaatcacagctgagcaggttcacggcctcatgtcacaggtcataaaagacatccttttcaactctgttcacccgtcaagcaaggcaagcacaagtgctccaccagattcatccggtcctgagcctatggttgaagcctgagttccagcggaaggggac

SEQ ID NO: 41659 - DNA, 296 bp, Zea mays
gttcaggccatgaaggcagtcgttggagaggaggcactctcgtctgaggatctgctttacttagagttccttgacaagtttgagaggaagtttgtgacacaaggagcatacgacacacggaacatcttccagtcactagatcttgcatggacattgcttcggatcttccctcgcgaacttctccaccgtatcccggcgaagaccttggaccagtactatagcagagatgcctcccactgaatcactgatcgttgatcagtgttccaatagtttggcaagtgttgaataaattgaac

SEQ ID NO: 41660 - DNA, 333 bp, Zea mays
cctttgtcttcacgtccatcgaacgagcttgaggagattgctctcgctgaagctgatgttgcaaggttaaaacagaaggttgcagagcttcacctccaactcaatcaacaacgtcaacaccagtatggctctgtagtggatgcaaatgatcgtcatcaccgcctccctggtcatttctcacagcaaaactttgttcaacaaggatttgatatgaaccttgctttctgcaatcaagagaagcagagaaatgaggagagttcggtggagtcatcacaatggagaaacatcaagcagcatgtgctagcttatggttcttcgaggccactcacacga

SEQ ID NO: 41661 - DNA, 248 bp, Zea mays
ggcaatcatcccatgcactgtcattttagagacacttttcttcaggaagaagttcagtcggagtatccagatgtccctttctgtgcttcttcttggtgttggtgttgcaactgtcactgatctgcaactcaatgctgtgggatccatactgtccttgctggcaattatcacgacttgcattagctcaattatgacaaacactatccagaagaagttcaaggtctcatcaacccaactgctttaccagt

SEQ ID NO: 41662 - DNA, 323 bp, Zea mays
ctcagatgttgacatgagggacaagctcacaaccttcatcctgaaaaacccaccagaacagaagaagggaggaaaagacaagaagaaggccatgaggagagctgagaaggaacgcctgaaggaaggtgaggctgctgatgaggagcagaagaaactgaagaaggatgcaaagaagaagggtgcatcttccaaggagtctactgccaagggttcaaagaagaaggctactgctggtggctctgatgaggaccactcaacctctccaactcgcagccgtgatggtgaccatgcagctgcggacgaggaagaggatgatgatgatg

SEQ ID NO: 41663 - DNA, 332 bp, Zea mays
atcgaagatgggtacctcaacggcgtactctctgtgacccgggctttaggggactgggacatgaagctgccccaaggctctccgtcgccccttatcgcagaagcagagatccactggaccaccctgacggaagacgacgagttcctcatcatcggctgcgatgggatatgggatgtgatgagcagccagcacgcggtgagcacggtccgcaaaggacctccggagcacgatgaccccgggcggagtgtccaggagctcgccaatggagcgaagaagctcgagaccttcgacaacctcaccgtgatcggtgtctgctttgtcccccgactcgc

SEQ ID NO: 41664 - DNA, 333 bp, Zea mays
ggcaaagcagagggcgatgctggagaacatcatgagggcctgcgttggcctggccccagagaacaacatgatcctggagtacaagtgagccaagcggcgtggcctgcagctggatatggaggaggctgcacgaagggaactagagaggcgagattagttgtgggattgtgttggcttctcgtattttccttttgcgttcttttctggtcaccgctgtcgcgcttttgtattttatttgttggacccgtaactatcagggctcagctattagcgcatgaagcctgtaatggcatcgtatgataatgtgatcgagggtgctagtaagcattaaaa

SEQ ID NO: 41665 - DNA, 255 bp, Zea mays
cttgccgttgaaggcaatgagaaggtgcaggacctgcttactgctggacgtcacccctctgtccctgggtctggagactgctggaggagttatgacagtgctgatcccgaggaacaccaccatccccaccaagaaggagcaggtattctccacctactcggacaaccagcccggtgtcctgatccaggtctacgagggtgagaggacccggacacgcgacaacaacctgctgggcaagttcgagctctccggcat

SEQ ID NO: 41666 - DNA, 297 bp, Zea mays
tagagacattggaaattaagcttgcagctgccaatgaaaagttaaagaggtctaatatgacggcctcggaaaccatgaccgagtatgagaacatgaagaaaatgctggaaagtgttcagtctcgccttgaagaggccgagcaaacaattctggaaggagagaatttacgaaaaaagttacataatacaattcttgagttgaagggaaatatcagagtattttgtagagttaggcctttgctgccaaatgattcaggagcagtatcatatccaaagaatggagaaaacttaggccgag

SEQ ID NO: 41667 - DNA, 302 bp, Zea mays
gatgggatgactactggtacaccaattcacgtctttgtcccaaacacagatcaaaggggtggtgattacagtgaaatgtctaaggcgtacagaccatcccatgcagatgcaacctatgacttcaagtatggagttagagctgtgcagggaggtggaaggtcatcagccagagaaaccattggcagggtggctgcaggagctcttgcaaagaaaattctaaagctcaaatcaggagtggagatcttggcatttgtttctaaagtgcaccaagtcgtacttccagaagatgcagttgattatga

SEQ ID NO: 41668 - DNA, 299 bp, Zea mays
attggatgtggtttggtgttctttcagcaggtcactggtcaacctagcgttctatactatgctgctacaatttttcagagtgctggattctctggggcatctgatgccactcgtgtgtcaattcttcttggcgtactgaagctaatcatgaccggagtagcagtccttgtggtcgacagacttggcaggagaccattgcttattggaggtgtcagtggaattactgttgccttatttttgctgtcctcctactacactttactgaaagatgcctcctatgtggctgtaatagcgcttct

SEQ ID NO: 41669 - DNA, 295 bp, Zea mays
attgcgtcttgaaaagagagagagagagagagaagagagagagaagagagagagagagagaggagtgggagacccgcgagaggctgccgtgtagggaccgtagactcagcgactgcgaaggagggataaggggatggccgggatcggaccgatcaggcaggactgggagccggtcgttgtgcggaagaaggcacccaccgccgccgccaagaaggatgagaaggccgtcaacgccgcgcgccgcgccggtgcggagatcgataccatgaagaagtacaacgctggtacgaacaag

SEQ ID NO: 41670 - DNA, 294 bp, Zea mays
actacgacggccgtaccatccgctacaccgacccgctcatcaaggccaacgacaccatcaagatcgatctggagaccaacaagatcatggacttcatcaagtttgacgtcggcaacgtggtcatggtgaccggcgggaggaacaccgggcgtgtaggtgtgatcaagaacagggagaagcacaagggcggcttcgataccatccacgtcgaggactccatgggccaccagttcgccacccgcatgggcaacgtgttcaccattggcaagggcaacaagccgtgggtgagcctgc

SEQ ID NO: 41671 - DNA, 288 bp, Zea mays
agcatgtctgatgagcgtgctctctcactcctttctgtcaagccacccaagtcagggcagcttgatcctctgcactctgctgcaactcgcatacaaaataagttcagaggatggaaggggagaaaggaatttcttcttattaggcagcgaattgtgaagatccaggctcatgtgcgaggtcaccaagtgaggaagcattatcggaaaatagtttggtctgtagggatcgtggagaaagttatattgcgttggaggcgtagaggggctgggttacgtgggtttcggtct

SEQ ID NO: 41672 - DNA, 285 bp, Zea mays
caaagcaagccgctctgggtgcagggataccaaacactgttgtttgcaccactgttaacaaagtctgcgcatctggcatgaaagctactatgttcgccgcacagtcaattcagctgggtatcaatgatattgttgtggcaggtggcatggaaagcatgtccaatgccccaaagtacattgctgaagctaggaaagggtctcgttttggacatgacacacttgttgatgccatgcttaaggatggactttgggatgtatacaatgactgtgccatgggaatgtgtg

SEQ ID NO: 41673 - DNA, 289 bp, Zea mays
agcgttctggcaaggagcttgagaaagagcccaagttcttgaagaacggcgatgctggtatggtgaagatgattcccaccaagcccatggtggtggagacattctcgcagtatcctccccttggtaggtttgctgtccgcgacatgaggcagacagttgctgttggagtcatcaagagtgtggagaagaaggacccgaccggcgccaaggttaccaaggcagctgccaaaaagaaatgatgcaacctgtcgttaatcctgtatctgcttttgcaatacctgacttgtca

SEQ ID NO: 41674 - DNA, 289 bp, Zea mays
aacatttgcagagcaggctgagaatgactgcaaagctggctccagctcttctgcagtcaagcattgccgcatggaaaccatgcttcaggagtgcgcatgcactcgttgactccgcagttcagcaatggaagaagtcacatgctgctgtcaacgatctcagcagaaagcaagttgctgaagttgaagcactcgtcaggactgcaattgagaacaatgagcaacatgaagtggaagttgcatcttctcgagctgtggctgaagaagacaccaccaatagcagcaaggacat

SEQ ID NO: 41675 - DNA, 289 bp, Zea mays
aaagatatatcccatgaataccgccgtagaagaaaagaagagactgatgtagctcgaagcagggtagagacatacataaggtcttcactacggacagcttttgctcaaagaatggaagaagcagattcaaaacgatcatcaagaaaccctactccagttctttctatccttgcgaaggacattagtgacctagctacgaaggagaaaaaattgtacagtccaatactgaagacatggcatcctcttgcttctggtgttgctgttgcaacccttcattcttgttatggaa

SEQ ID NO: 41676 - DNA, 233 bp, Zea mays
tcaacaccggtgacactagagttgaaataaaacttctcttgatatcctggtccatctggaatgtgtgatatgcgatagcacccaagatatcaagagaagttttatttcaaccccggtgacacaggctttaaggctttcaaaaccaagtatgccaccattggtgttggaatctgctgggatcagaagtttccagagtatgcaagagcaatggcacttctgggggctgaaatact

SEQ ID NO: 41677 - DNA, 282 bp, Zea mays
acgaaacaagagcttattgattctcttgggactattgcaagcagtggaactgccaagttcctgaaggcattgaaggagagtcaagaagcgggcatggacaacaacttgattggccaatttggtgtaggtttctattccgcatttcttgtttcagagaaggttgttgtatcaacaaagagcccaaaatctgacaaacaatatgtttgggaaggacaagcagattctggttcttataccattagagaggaaaagacccggagcagctcatacctagggaactcg

SEQ ID NO: 41678 - DNA, 279 bp, Zea mays
acgtggtacgcggaacctacaaaaactaggatttaatactactggaacgagatcgttcccacgttcccggaacggaacgaacgttcccggaacgaggaacgtggccaagttcccggttcccggttactaaggtctagatcttcgcagcaaccacaacaactcttccgaatcttcgaccaatgctgcaaatcagagtggtcgtggaggtcctagccggtttggacgaggtactcatggaggaaggaactcaaacgctccaacctagcggggcggccgccg

SEQ ID NO: 41679 - DNA, 248 bp, Zea mays
agggacaatctcatctgtagcggatgaagagggaattctacaccgcatcgcagatctaccggaaaagaagtctcctccaacgaactccgaaaatgctggaaagacgctacctccagctcttcggaagaaaatcgtctccggaaaggctggagctggaagctcgctaacccggaagactccgctgtctacttccccgacgaaagaatggacacggatcgcgaggaagaaggagaccaaggaaaggcaag

SEQ ID NO: 41680 - DNA, 185 bp, Zea mays
cacagctctcgccttctctctcccatcggcacgcccgagctcgctccctccttccacgtcgaggtccgagtcctgctttgatggcgaccgacgtggctgagactcccgcgccgttggtggatgcggccccagaggcgcccgccgacgccccggcggcgcctgctgccgacgcgaaccggccaagg

SEQ ID NO: 41681 - DNA, 303 bp, Zea mays
gagcctcattcatctccattcgaaacaccctcgcacccacactctcccttcgtccccagcctaaatccccgcaacgatggctcgcacgaagcagacggcgcgcaagtccacgggcggcaaggccccgaggaagcagctggcgaccaaggcggcgcgcaagtcggcccctgcgaccggcggcgtgaagaagccgcaccgcttccgcccgggcaccgtggcgctgcgcgagatccgcaagtaccagaagagcacggagctgctcatccgcaagcagcccttccagcgcctggtccgcgagatcgc

SEQ ID NO: 41682 - DNA, 301 bp, Zea mays
acagccatggcctccgggtgatatcaagcaaatatctacacctgtacgtgtgcaaggccttgagaaagtgagggtcattgctgtaggtgcattccataatttggcactaacggaggatgtaattttgtgggcatggggtaataatgagtatggtcagctggggactggagatacccaaccaagatcacaaccgatacgtgtcgaagggctatctgatctctcactggttgacattgctgctggaggctggcattcaactgcactaactatagatggagaggtgtatgcttggcggagagga

SEQ ID NO: 41683 - DNA, 300 bp, Zea mays
gacagcacatcaggacattgagcaagtaaaagctgatgctgagggcctggcaaagaaactggaagcacttgaagcttacaaaagaaaacttttgggtgagaggttggaagaatgctcctttgaagaactgcacagtttggaagtgaaactcgaaaagagccttcattgcatcaggggaagaaagactcagctgctggaggagcaactccataagctgaaggagaaggagatgaatctgcgcaagagcaacgaagatttacgtgaaaagtgcaagaagcagccgccgccgccgccgcctat

SEQ ID NO: 41684 - DNA, 301 bp, Zea mays
gttgataaagtacaagggatatcaggtacctcctgccgaactggagcatatcctgaattctcatcctgatatcatggacgcagcagttattccttatccagacgaagacgccgggcaactcccaatggcttttatagtgaggaaaccagggtcaaaccttaccgagcaacaagtcatggatttcgtggctaaacaggtcgcaccctacaagaaagttcgtcgagtggcctttgtttctgcaatccccaaatcgcctgctgggaagatcttgcggcgggagcttgtagagcaggccgtgtcc

SEQ ID NO: 41685 - DNA, 125 bp, Zea mays
gttgagtacctatgtgtgagcatgcttgcttgtaacgagacattgaattgttcggaaatgagcattcctgtgctcttcttgaaaataaactttgcgttaggttcctaaaaaaaaaaaaaaaagga

SEQ ID NO: 41686 - DNA, 297 bp, Zea mays
ggcgacaaccagagctggaagatcctgccctggggcgacgaggcctacgccgggggcggcagcagcgccgccaacgcgccccgcttcggcggcggcgagcccaccgtccgcatctactgcaaggccgacgaatggttcagcgccacggtccgcaacggcgccgtgtgcctcgcgcccaccaacccgcgcgacgagtaccagcactggatcaaggacatgcgccacagcaacagcgtcaaggacgaggaagggtacccggccttcgcgctcgtcaacagggtcaccggcgaggccatc

SEQ ID NO: 41687 - DNA, 305 bp, Zea mays
gttttgtgatttccgactcggagggcattgatcggatcactactcctcctcacgccaactactcttactcaattgaggctggtgttggtgctggaattgacatgatcatggttccattcagatacacagaattcatcgacgatctgacgacacaagttcagaacaaggtcatccccatgagcagaatcgacgacgccgtctacaggatccttcgtgtcaagttcaccatgggtctgttcgagaacccttaccccgactctagcctcgccggcgagctcgggaagcaagaacaccgggaactggcg

SEQ ID NO: 41688 - DNA, 211 bp, Zea mays
tggacactagccaacggtactggtgtgattgatattcaacacccttgcaggtctaatgttgctgttcggaaggagctgcacaaaccagcttcagatcgctcttgtatccatctcgagtttgacatttctggcactggtcttgtgtatgaaaccggagaccatgttggtgtatatgcagaaaattctgttcagactgtggaggaggttgaaa

SEQ ID NO: 41689 - DNA, 300 bp, Zea mays
gtcgtcagatttggatccgctgctgaaggatctcacggagaagaagttgacctttaggaggaacgtggtgtcattggcagctgagctcaaggatgcgaggaacaagcttgcctcccaggagcagctgtttgtaaaggaatctcaaactagaaaggttgttgagacaaaggcaaggagcatggaagaggaagtaagcaagctgcagaaatgcttgcaggacaaggatgagcaactgcgttcatccgcaagtagcacggaacagtacctccatgagttggatgatcttagaacacaactgtc

SEQ ID NO: 41690 - DNA, 302 bp, Zea mays
actcaccgtcactgacatcgcttgtgctgcactaaatggtatcaagatgggtgacaaaacccttactgtcagacgagcaaaccagggggcatctcagcccagaccagagcaggaaagtatcctattgcaggcacaacaacaggtgcagttgcagaaacttgtgtatcaagttggagcgcttcctacaaaggttgtatgcctcacacaggtggtaactgcagatgaattgaaagatgatgaagagtatgaggacattatggaagacatgaggctagaagcaggcaaatatggtaatttggtga

SEQ ID NO: 41691 - DNA, 287 bp, Zea mays
aaggtgtatgcccaaatgacactgcaaccattgagcccggaagagcaaaaggatccttttcttccaattgaattgggtgctggtagcaagcagccaaccaattacttctgcaagacgttgacatcgaatgatacgagtacccatggtggattctctgttccgcgccgagcagctgagaaagtcttccctccattggatttttcacaacagcctccagtgcaagagctggttgcaagagatctgcatgataatgaatggaaatttcgtcatatttttcgtggtcagcc

SEQ ID NO: 41692 - DNA, 224 bp, Zea mays
tcgactgagcgtagtaagctcggccgaccagaggcagggagtgcgctcgacggccgccgccattagtgatttagtgttgagagagggagagaatctaaagtgaccggacgctgtccttccttgctgatcggcgacacggtccatgcctccctcgctcgctagggttccttttcgtccatggatcagagcttcgggaatctcggggccggagctgggagcagcag

SEQ ID NO: 41693 - DNA, 297 bp, Zea mays
  unsure (1)..(297): unsure at all n locations
accgaacgaacccaaccgaagcgagagctgagcaaggcagaggcggcgtgaccggcgatggagcggctgcagcggatctttggcgcctccggcatggggcagccgccgacggactcgccgctgctcgattcctccgagcaggtctacatctcctccctagcgcttctcaagatgctcaagcacgggagggctggggtgcccatggaggtcatgggcctcatgctcggcgagttcgtcgacgactacaccgtcanggtcgtcgacgtcttcgccatgccgcagagcgggactggtgtc

SEQ ID NO: 41694 - DNA, 300 bp, Zea mays
ccgtgacttcatcaagaatatgattactggcacttcccaagctgactgcgctgttcttatcattgatgaagtcactgtgtccagtggcatcaatgacagtgcagtagtacttggtggtctcgaacttccacaaagacaatatcatttgtcattgatgcccctggacaccgtgacttcatcatgattatgattactggcacttctcaagctgactgcgctgttcttatcattgactccactactggtggttttgaggcgggtatctccacggatggacagtcccgcgagcatgctctcctt

SEQ ID NO: 41695 - DNA, 198 bp, Zea mays
agagacacgacgccaagaggttacccccacaccgcgccgaggccaccccgcttgggattgtgaggtaaagcgtgatggcagcgccaccggcgagggcccgagccgactacgactacctcatcaaactgctcctcatcggtgacagcggtgttggaaaaagttgtctcctgttacggttttcagatggatcattcacca

SEQ ID NO: 41696 - DNA, 295 bp, Zea mays
gtccttctcgtacgtggtccacgacctggtgatcgccgcggcgctcctctacttcgcgctggccatcataccggcgctcccaagcccgctccgcaacgccgcctggccgctgtactggatcgcgcaggggtgcgtgtgcaccggcgtgtgggtcatcgcgcacgagtgcggcaaccacgccttctcggactactcgctcctggacgacgtggtcggcctggtgctgcactcgtcgctcatggtgccctacttctcgtggaagtacagccaccggcgccaccactccaacacgggg

SEQ ID NO: 41697 - DNA, 290 bp, Zea mays
aaaagggggtggccaaagaaagcaggggcagaggaagcagagtagtagagcgaaggcgagcgtatcaatgatggggcctctgcctctccgccgccgcgtgggcgtcctcctgttcctggccctcgtgctcctgggcggcggcggcgcggacgacggcacgacaagctcgtacaggcggaagctggaggcgacggtggagatgccgctggacgccgacgtgttccgcgtcccgccgggctacaatgcgccgcagcaggtgcacatcacgctgggcgaccaggagggcacgg

SEQ ID NO: 41698 - DNA, 197 bp, Zea mays
aaaaaccataaccctggaggttgagagctcggacaccatcgacaatgtgaaggcgaagatccaggacaaggagggcatccccccggaccagcagcgtctgatcttcgccggcaaacagctggaggatggccgcaccctagcagactacaacatccaaaaggagagcaccctccaccttgtgctccgtctccgtggtg

SEQ ID NO: 41699 - DNA, 197 bp, Zea mays
acgagaaggtgcaggacctgcttctgcttgacgtcactcctctctctctgggtctggagactgccggaggagtgatgaccgtccttatcccgaggaacaccaccatccccaccaagaaggagcaggtgttctccacctactcggacaaccagcctggtgtgttgatccaggtgtacgagggtgagaggacccggacc

SEQ ID NO: 41700 - DNA, 296 bp, Zea mays
agtgggcagagtcaccatcagccgcatgaagatttcgctttcgttggataaaatcccaggctcgcagcacaattttggccacgggattaattatatgacgaaggaaatccagataagccgagaaatggaaaaaggaagactcgggttgtgagtagctatgtttgttgggttgagtgatcgaatttttttgtgtgtgctctcaaggagacctctgtgaacttgaataaactccacacggagttgtgccaaattagaccgaggcgtccgtgaacttgaatcagttcctcgggatgttg

SEQ ID NO: 41701 - DNA, 85 bp, Zea mays
actttggaacaatctcatccatagcagaagaagaggggactctacaccgcattgcagatccgccgaaaaagaagtctcctccaac

SEQ ID NO: 41702 - DNA, 298 bp, Zea mays
aggtgctgccgtccaggccgctatcctcagtggtgagggcaacgagaaggtgcaggacctgcttctgcttgacgtcactcgtctctctctgggtctggagactgccggaggagtgatgaccgtccttatcccgaggaacaccaccatccccaccaagaaggagcaggtgttctccacctactcggacaaccagcctggtgtgttgatccaggtgtacgacggtgagaggacccggacccgcgacaacaacctgcttgggaagttcgagctctccggcatcccaccggctcctcgtggt

SEQ ID NO: 41703 - DNA, 307 bp, Zea mays
agctgaacaacgaactgctggtggtttgcgattgacgcaggcaactaaggagaaaccttctgttggatcagtggtagccgttggcccagggccgttgggcgaggacggcagcaggagtcccctgtcgatcactcctggaagcaacgtgatgtgttccaagtatgcggggagtgagttcaagggcgaggacggtgagtacatcgtgctcagggcgtctgacgtgatggctgttctttcctgatccccaaaccatacagcgccaggtgcgcgataggaagttttgatgttgaggccgaaccttatcttt

SEQ ID NO: 41704 - DNA, 291 bp, Zea mays
acagaacttctctaagagcctgctagatgttgctgacaatttgttgaagtccaaagatggtgaaatcaaagatatgaaggataaggttttgcgcactatgcagaaatggaaaatatcattgctcggacaaaacgtgaatctgagaacaccaaaaaatatgcagtacagaacttctctaagagcctgctagatgttgctgacaatttggctagggcatcatctgttgtcaaggaaagcttctcgaaaattgatacctcaaaagattctgctggagctgtcccactactgaaa

SEQ ID NO: 41705 - DNA, 289 bp, Zea mays
gtagactgtagttctgttcctccccactcactcctgcgcttcctcgccgcgcggttccttctccctgatcctcctttggcttcgcggttcatggcgatgtggagggccgccgctaggcagctggtcgaccgggcgctcggctcaagggccgcgcacacgtctacaggcagcaaaaagatagtcggggtgttctacaaggccggggagtatgccgacaagaaccccaacttcgtcggctgcgtcgagggtgcactcggcatccgcggctggctcgagtcgcagggccatc

SEQ ID NO: 41706 - DNA, 283 bp, Zea mays
atcaaggtagcatacaccgctgcagtatctagagccctctctgccactcgtgatcccactagtcacgatgcctgccctcgccaagcccgcctcccgcaccgccaagcccgccgcggctccgaagccgaagcctgccgccgccaagccgaagcgcccaccgctggtgcctcccacccgccttactttgagatgatcaaggaggctatcacggcgctaaaggagaggaccggctccagctcgcaagcgatcgccaagtatgtgggggacaagcacggcgcgtctc

SEQ ID NO: 41707 - DNA, 295 bp, Zea mays
aggcgagggccagcaacagaagatagaaattaacgagctccatttattatttgagacagcaccaagccggttgcatgtgaatgtccactggctacagaatgcttcaagaaaatatgccacctcaatgctgaacaatctacctgagatccacaagctcgagcttatcccgaaaggaactgaagattctgttgcactacatggttgtctggaagcctttctaaaagaggagccgttggggccggaggacatgtggtattgcccgcgctgcaagaagcatcagcaagcgatgaagaaa

SEQ ID NO: 41708 - DNA, 288 bp, Zea mays
caagaccattcctgaccctgatgacaagaagccggaggactgggatgagagagctaaaatccctgatccagatgcagtgaagcctgatgattgggatgaggatgcccccatggaaattgtggatgaggaagccaccaagcctgagggatggttggatgatgaacccgaggagattgatgatcctgaggcagccaagcccgaggactgggacgatgaagaggatggtgaatgggaggcaccaaagattgacaaccccaggtgtgaagaggcacctggatgtggcgagtg

SEQ ID NO: 41709 - DNA, 287 bp, Zea mays
agcgctcaagttctcgcgcccagagccaaatttttctccactcaatcactgcagccatggacgccagcggagccggtagcaaggcgaagaagggggcggctgggcgcaaggctggcggccccaggaagaagtcggtgtcgcggtccgtcaaggccgggctgcagttccccgtcggccggatcgggcgctacctcaagaagggccggtacgcgcacgcgtgggcaccggcgcccccgtctatctcgccgccgtgcttgagtacctcgccgccgaggtactggagctgg

SEQ ID NO: 41710 - DNA, 285 bp, Zea mays
atcagattggcaaccttgaagatactcggaatcgtactctgcatggtattttaagggttcaaagctgtttcaggaggcatcaagcccgtcatcatgcaagagaacgaacaagaggagttttggctcttcaatcattcattcgtggtgagaatgcacgacaaatttacacctctttgttgaagaaacatagagcagcagttgttttgcagagaaatgtgagatgttggcttgcaagaaggtatttcataaatgtccggaaggcctcagtgataatacagtctggta

SEQ ID NO: 41711 - DNA, 287 bp, Zea mays
atcgttccattcccctctaaacactagccgcctagcgcctcgatccgagcagccctaggtctcgcggaggtagttctggttgatttggtccaagatggcggaggaaaaggtggggcggatcttcgtcggcgggctgtcgtggaacaccacggagcgcacgctcgagcgcaccttcggtcagtacggcaaggtcatcgaggctcaggttgtagtggaaagggagacaggccgctctaggggatttggatttgtcacattttcagaacatcgggctgtggatgcagcca

SEQ ID NO: 41712 - DNA, 297 bp, Zea mays
gtgacttcacctccccttcgagcctctccactccatcgtcaaggaaggaacacggccctaactaaaccctagctaagggaagggaaacaagaccatggatgcctccaagctccgcgagcttcgcgacttcgtcgaggcgtgcaagaagaatccttcgctcctcgccgacaccaacctctccttcttccgggattacctccagagtttgggtgccaaaattcccgccgccgccccctctttcgaaagtcccaagagatcttccatggacgacattgatgacgacggtgatgacgacga

SEQ ID NO: 41713 - DNA, 292 bp, Zea mays
ggaatcggcaagctggtgttcagcggcggcgtggcggagatgtacagcctggaggagctgctgcgcgcgtcggccgagacgctggggcgtggcgaggtaggcagcacgtacaaggcggtcatggagacggggttcatcgtgacggtgaagcggatgcgcgacccgtcggcgggcggggtgggggccgccgagttcgggcggcgcgccgaggagctggggcgggtgcggcactccaacgcagtggcgctgcgggcctacttccaggccagagaggagcggctgctggtgtacg

SEQ ID NO: 41714 - DNA, 309 bp, Zea mays
tcacatcccacgaccacccatctcgtcgtccgccgattcgatccggttcttccaacccaggggctgtgatggcgacgaagaggagcgtgggcaccctcggcgaggcggatctgaaggggaagaaggtgttcgtgcgcgccgacctcaacgtccctctcgacgacgcccagaagatcaccgacgacacccgcatccgcgcctccgtccccaccatcaagttcctcctcgagaagggcgccaaggtcatcctcgccagccacctgggtcgtccaaaaggtgtcaccccaaagtacagcttgatagctcttg

SEQ ID NO: 41715 - DNA, 310 bp, Zea mays
ccataccccacctccaaattcccaattgtcaacctctcctcagagttcgagtgaccatgtcggggcgcggaaagggcgggaaggggctgggaaagggcggcgcgaacgtcaccgcaaggtcctccgcgacaacatccagggcattacgaagccggcgatccggaggctggcgagaaggggcggcgtgaagcgcatctcggggctcatctacgaggagacccgcggcgtgctcaagatcttcctcgagaacgtcattcgcgacgctgtcacctacacggagcacgcccgccgtaagaccgtcaccgccatg

SEQ ID NO: 41716 - DNA, 304 bp, Zea mays
actacttgttggttggattctcttcagtctagcagctagtccagttaagtttcagacacacatggggagcattggcagaggcacggccaactgcgccaccgtgccgcagccgccgccgtcgacagggaagctcatcacgatcctgagcatcgatggcggcggcatccgcggccttatcccggcgaccatcattgcgtacctcgaggccaagctccaggagctggacggcccggacgctcggatcgccgactaattcgacgtgattgccgggacgagcaccggcgccctgctcgcgtcgatgctg

SEQ ID NO: 41717 - DNA, 261 bp, Zea mays
  unsure (1)..(261): unsure at all n locations
ccgcctctcctgntcctancgcagctctccctcaggtttagtgttcgcaatgacggccttcaacaagcttggtggccttctaaggcacagtgctctggtgagcggtatcaccggtggctcttctcctgcagtgttcaatgctgcacggctcatgtctaccaagctatttattggtggtcttgacccgggtgttgatgacgtgaaactaagagaagcatttagcagctttggagaggttaccgnagcgcaggtgatcacaga

SEQ ID NO: 41718 - DNA, 305 bp, Zea mays
gagcatgtctaaggtggcagtgtcattcacacacataattaaaagcgcagaacctgcattcagtgttttggtgtcaaggttcttccttggggagacgtttccaattccagtatatctttctcttcttccaatcattggtggttgtgctctagctgctgtcacagagctgaactttaatatggttggatttatgggtgccatgatatccaaccttgcatttgttttccgcaacatcttctcgaagaggggcatgaaggggaagtccgtcagtggcatgaattactacgcttgcctgtcaattatgt

SEQ ID NO: 41719 - DNA, 307 bp, Zea mays
caactacccccagcctcggaaggaaccttccagaagcgcaagactctaaggccgtcgccttcccattcttcctcgccgcgggggtcgcctgagatcacataaacaatggtgaaggctgttgctgtgcttggtagcagcgatggtgtcaagggcaccatctttttcacccaagagggagatggccctaccgctgtcaccggaagtgtctctggcctcaagcctggcctccatgggttccatgtacatgcacttggtgacaccaccaatggatgcatgtcaactggaccacactacaatcctgcgagca

SEQ ID NO: 41720 - DNA, 307 bp, Zea mays
ctctcggcgatgtctggccgcggcaagggcgggaatggtctgggcaagggcggcgccaagcgccaccgcaaggtgctgcgtgacaacatccagggcatcaccaagccggcgatccgcaggttggcgaggacgggcggcgtcaagcgcatctccgggctcatctacgaggagacccgcggcgtgctcaagatcttcctcgagaacgtcatccgcgacgccgtcacctacaccgagcacgcccgccgcaagactgtgaccgccatggacgttgtctacgctctcaagcgccaggggcgcaccctctacg

SEQ ID NO: 41721 - DNA, 306 bp, Zea mays
agcagaaataccaaaggttgccaggagttgaagatgacctgtgcaaattagttccatatgtcagtcgtcgtcgtcagacacctgaactttgtcgatatgttgggttgtcacagaaaatgccaggtgtcattgaagttctggtgaaaagtggaagaactattgatgcaattaatttagcttacgtgtttgagcttactgaacagtttgaaccagtgcaactgcttaaagcatatctgagggatgttaagaaactgtcacatgccaggaatcgtcaaatttctcctggagcacagaatgagatgaatg

SEQ ID NO: 41722 - DNA, 300 bp, Zea mays
cccagcagctgtaccccttatccagcgaatacttgaagcaacaggtgatgtagttacggatcaatattatgagagactatcacctttggtgccactgaaatcaccacttgggtctttctctaacatcaaggcaggagattgtttagtaacattctcaagacgtggaatttataaacacaagaaaagaattgaaaggaagggaaaacatctttgctctgtggtctatggttcatagccaccagaaactcgaacaaaacaggcgacaatgttcaatgatgacaccagtgaccttaatgtgct

SEQ ID NO: 41723 - DNA, 297 bp, Zea mays
  unsure (1)..(297): unsure at all n locations
cacaaagttgggtttctttttgcaccaatcgtatgcatttggcttgtctgcataagtgcgattggcctctacaatatcatccgttgggatccccatgtttatcgagccctctcgccatactacatgtatcaattcctcaggaagactcaaactggtggctggatgtcactgggtggaatccttctttgtgtaacaggctctgaagctatgtatgcagatcttggacatttttcgcaatcatcaatccagattgcatttatatccgtggtttatcctgcnattgtattggcttatatg

SEQ ID NO: 41724 - DNA, 279 bp, Zea mays
ctcgagcgctcctatccactgcggcctggacgcgtgcgagagacttgaccaagcagcagcagcagggatggcgcctctgaagctgtacgggatgccgctgtcccccaacgtggtgcgcgtggccaccgtgctcaacgagaagggcctcgacttcgagatcgtccccgtcgacctcaccaccggcgcccacaagcagcccgacttcctcgccctcaaccctttcggccagatcccggctctcgtcgacggagacgaagtcctcttcgagtcccgtgcgat

SEQ ID NO: 41725 - DNA, 296 bp, Zea mays
ggcatgatcagcgccgtgcccgggatgaaggcgctcgacatgaaccccgccgaggacgagatcgtgcgcctcacgcgcgaggtcctgcccggcatgatcgtcaccgggatggaggtcgccgagatcgacggcgccccgaggatgggcccgacgttcggcgccatgatgatctccggccagaaggcggcgcacctcgcgctgaaggcactgggcaggcccaacgccgtggacgggaccatccccgaggtgtcgccggcgctgcgcgaggagttcgtgattaagtccaaggacgacga

SEQ ID NO: 41726 - DNA, 295 bp, Zea mays
gtttcttggaaagatccttgtggagaagatacagcgggtgcagcctgacgtgcgcaagatttaccagcttgtacgcgcggtcgacgagccatcagcgaacagcgcgtccaacaagaggtgatagacacggagctgttcggcctgctgagagagaaacacggcaagggattccagcagttcgtagaggccaaggtcgtcgctttggccggagacatcgtatacgacggcctggggctggaggcagccgtgctggacgcgctggccaaggacgtcgacgtcatcgtcaacatcgcag

SEQ ID NO: 41727 - DNA, 316 bp, Zea mays
  unsure (1)..(316): unsure at all n locations
gttctacgtccgagtcgtcgcatcaggtcncctcgattcgccggcggcgccaccaaccaagctcatacatctgaattgactagtcaaactcagtgatctctttggggactaatcaaactcaagaactaagtttcatgtctgatctcgacgtccagcttccatctgcttttgatccgtttgcagaggcaaatgctgaggattccagtgctggtgctggatcaaaggactatgtgcacgtgcgtattcagcagcgcaacggaaggaagagtctgacaactgttcagggcttgaagaaagagtacagctacaacaagat

SEQ ID NO: 41728 - DNA, 316 bp, Zea mays
ccgcaaccggcgccgccacgcccacgctcgcagccatgccgcccaagctcgacccgtcgcaggtggtggaggtgttcgtccgtgtgaccggcggcgaggtcggcgcacgtcttcgctggcccccaagatcggcccgctcggtctttcccccaagaagatcggagaggacatcgccaaggagacggccaaggactggaagggcctccgcgtcaccgtcaagctcaccgtccagaaccgtgcagccaaggtctccgtcgtcccctccgccgcggcgctcgtcatcaaggcgctcaaggagccagagagggaccgcaag

SEQ ID NO: 41729 - DNA, 319 bp, Zea mays
  unsure (1)..(319): unsure at all n locations
cagctaataaggtaataaggggcgacgaaaatggctccaacgaccgccaccaaggacgacagtcgctacggcgacgagcgccggcgcgagctgcaggcgttcgacgacacgaagctgggggtgaaaggcctggtggactccggcgtcaagtccatcccgtccatcttccaccacccgccggaagccctgagcgacataatttctccggcgcctctgncgccgtcgtcgtcgccctccgccgccgccatcccggtggtggacctctcggtgacgcgccgcgaggacctagtcgagcaggtgaggcacgcggccgggacgg

SEQ ID NO: 41730 - DNA, 242 bp, Zea mays
gtattttgaagagatcagtcaggatacagggaaatatgtctttggtgttgatgacacactgaaggctcttgaaatgggtgctgtcgagaccctgattgtgtgggaaaatctggatatcaacagatatgtgatcaagaacagtacaactggggaaattattataaaacatctgaacaaagagcaggaagctgaccagagcaatttccgtgacccatctaccaatactgatctcgaagttcagg

SEQ ID NO: 41731 - DNA, 207 bp, Zea mays
aggaaggcccagaccggtgcgcggccagcaggaagcgtgtagggctgacgggattcagcagccgatgcgggaacatgtacagttcggtgcaccgctacaccgacaaacatgactatcagtacgactatcggacagcagcaagggacgcgattaacaaggccaatcctgtggtgaggacggagaagctcgacaagatccgaggcgggc

SEQ ID NO: 41732 - DNA, 315 bp, Zea mays
ccgacttcctctagaattcgataccctttcccaagaaaccaagaacccagccccccaccatgacgagctcctcctctccttccagaaaggcgctgagcaagatcgcttgcaatcggctgcagaaagagctcgccgagtggcagcaaaacccccccgccgggttcaagcacaaggtctccgataacctccaaaggtgggtaattgaggtcaccggagcggcgggcaccctttacaccggcgaggcttaccagttgcaggttgacttccctgagcattatcctatggaggcacctcaggtcatttttctcaatccag

SEQ ID NO: 41733 - DNA, 313 bp, Zea mays
cggctgcggcggacacggaggcgaaggaggaggagcagcagcagcaggcggcgccgaggagcggcatcccactcagtgcttgcaaccatggctaggggattgaagaagcacttgaagaggctcaatgcgcccaagcattggatgctcgacaagcttggcggagcttttgctcccaagccatcttctggacctcacaagtccagggagtgccttcctctgatcctcatcatcaggaacaggctcaagtatgctctgaactaccgtgaggtcatttctatcctgatgcaacgccatgtacttgttgatggcaagg

SEQ ID NO: 41734 - DNA, 311 bp, Zea mays
gcaagttcccagaagcactgaggcagttccttagcatcttacataccattccagttatcgtggtggactcacggagagaagttgatgaggtgaaggagttaatcgagatagtgagggagtatgtccttggtctgaggatggaactcaagagaaaggaactgagggatgatgtgacccgtcaacaggagttggctgcttacttcacaaactgcaagcttcagagagttcacatgaggcttgtgctcgctagtgccatggctctttgcttcaagcagaaaaactatgcaactgcggcacactttgctaggatg

SEQ ID NO: 41735 - DNA, 232 bp, Zea mays
ggagcagcgagatcgtgcgcacctccgagatctccacgaagttgtggtaacatggggctcaccttcacgaagctcttcagccggctcttctccaagaaagagatgaggatccttatggttggtctcgatgcagctggtaagaccaccatcctctacaagctcaagctcggagaaatcgtgaccaacatccctacaatcgggtttaatgtggagactgttgaataccagaaca

SEQ ID NO: 41736 - DNA, 307 bp, Zea mays
ctcgagccgctctgcagtccctgaacaagaagtatggatgcaatgtccctttacttctgatgaactctttcaacacccatgatgacacacagaagattgttgagaagtattccaactccaacatcgaaattcatactttcaatcagagccagtatcctcgcattgttaccgaggacttcttgccacttcccagcaaagggaaatctgggaaggatggctggtatcctcctggtcatggtgatgtgtttccttctttgaataacagcggaaaacgtgacatcttattggctcagggcaaggagtatgt

SEQ ID NO: 41737 - DNA, 305 bp, Zea mays
atgagctgaatgtgttgggtactcggggccctaggcggatgaactgtgttatgcactccatacctacctcgtgccttgaggctggtggcactgttcccagccagctggacagcatccttgctcgctctactgatgagtcatttggcagcatttccttctccaagtcatctgttgtggaccggtctatgcgtttcagcagctcaagattctccgacatctcaatgagcagcagccgcaggattggagacacggcatcgggagacaatgatgagtgcaaggagaggccattgattctccggaacaag

SEQ ID NO: 41738 - DNA, 311 bp, Zea mays
gtcagagcaaccctatctcttccccactccgctcctcgctcaccctctcaccaaatccttctcctccgcgccgccacagccgggcgcgcctccccgatcgagatccaggagatatgcctcgttatgatgatcgccatgggaatacacgcttgtatgttggaagattggcccctcgcacccgttcccgcgacctagaatatcttttcagcaaatatggaagaatacgtgaagtggagttgaagcgtgactatgcattcattgaattcagtgacccccgtgatgctgatgatgcgcagtacaacctagatggc

SEQ ID NO: 41739 - DNA, 314 bp, Zea mays
ctgccttcctgcctgcttccctccctccgtgagatccccgctagggttgccatggcggaccagctcaccgacgaacagatcgccgagttcaaggaggccttcagcctcttcgacaaggacggcgacggctgcatcaccaccaaggaacttggcactgtgatgcgctcattggggcagaaccctactgaggctgagcttcaggacatgatcaatgaggttgatgctgatggcaatggaaccatcgactttcctgagtttctcaacctcgaggcgcgcaagatgaaggacaccgactccgaggaggagctcaagga

SEQ ID NO: 41740 - DNA, 312 bp, Zea mays
cgcctcgggtcaaaccctaagcagggagttgatttatccgctgcagccatgagtaagttgcagtctgagtctgtcaaggatgccatctcccagattgttggggatgccaaggagaagaataggaagttcactgagactgtggaacttcagattggtctgaagaattatgatccacagaaggacaagcgtttcagtggctctgttaagttgccccatatccctcgtcccaagatgaaggtgtgcatgcttggtgatgcccagcatgttgaggaggccgagaagatgggacttgactacatggatgttgaggct

SEQ ID NO: 41741 - DNA, 316 bp, Zea mays
ggaatcatggattgtgtgaaaacaatatacagacaaaatggattgaaaggcatataccgtggcatggctccttcactatatggaatcttcccttactctggtcttaaattctacttctacgagaagatgaagagccacgttcctgaagagcacagaaaaggtatcatagcaaagctcggttgcggatcagttgcaggtttgctaggtcagacaataacataccccctagatgttgttaggcgacaaatgcaggttcaagccctttcgtcatccagccttgtgggtaggggaacatttgaaagcctggttatgatag

SEQ ID NO: 41742 - DNA, 314 bp, Zea mays
gcacgctataccacgtggaagaccttcccttccgcctcgaggacatgccgtccaactatggcggcttcagggaggccgtgaaggggttggaggtcagaaaggtgctggaggctcccgaggaggtcaagtgcgtgcccatgaagaatgtgctcgagcccggtgacatccccacgcttgctgagctcgggctcactgcgccaccagccatgtcacaggactcaaaacctgctgttggctctactctcattggtggtgagacagaagctctggagaggttgaagaagtttgctgcagaatgctctatgtcagcaaac

SEQ ID NO: 41743 - DNA, 315 bp, Zea mays
aggagaaattgcatgcatgatgggtgctcattccatggctcgtataaggagctttgcaagcatgtgaaatcgaagcaccctacagcaaaacctcgtgaagttgatcctgctactgcagatgagtggaaaaggtttgaatgtgagagagagcggcaggatgccatcagcactatcaggtccatgaacccaggatctgtgatcatgggggattatgtccttgagttgaatggtggtggcaacaaccatttgctctcagatggagataactttgacttaggggaaaggctcaacttcttcacatccttagatcgtact

SEQ ID NO: 41744 - DNA, 304 bp, Zea mays
ctcgagccgctcgatctcgcacctagggtttcgtctcgccgcactcgtcctccgcgaagatgccgaagaacaagggtaagggaggcaagaaccggaagcgaggaaagaacgaggctgacgacgacaagcgcgagctcgtcttcaaggaagacgggcaggagtacgcgcaggtgacccggatgctcggcaacgggcggtgcgaggccatctgcgtcgatggcacgcgccgcctctgccatatccggggtaagatgcacaagaaggtctggatcgcggctggggacatcgtctcgtcggctgcgcg

SEQ ID NO: 41745 - DNA, 310 bp, Zea mays
cctcagggcacatttttactgttggaagccctgtgtatggacagcttggcaatccaaataatgatggaaggtatcctcgcctggtcgaagagcagcttgggggtagcggtgttgtggaggttgcttgtgggtcttatcatgtcgcggttttgacaaatgctggtgaagtttacacatggggtaagggtacaaatggaagattaggcatggtgatattgcggatcgtaaagtgcctacactcgttgaggcattgaaggataggtctgtacaacgtgttgcttgtggatcaagctttacagcagccatctgt

SEQ ID NO: 41746 - DNA, 309 bp, Zea mays
gcaactctcatcctcactccccccactcgcccgcatcttccggtcttcctcatggcgtcgagcgacctcgccgagagcctcctccccggcggcgggggcggagctccgcctcacatgacgaatacgaggagcgcgcgtacgactccgaggacaagatctccatcgccgtgtcggattccgacggcgaagacgacggcacgccggcgtcgcgcccgcccttctcgtggcggaagctctggcgcttcacgggcccgggttttctcatgtgcatcgcgttcctggacccgggcaatctcggaggggacctac

SEQ ID NO: 41747 - DNA, 309 bp, Zea mays
gtcgaaggcggcggcggcgatggggagcgaccaggagacggagaagaagaagaccccggtggcactaatgcccatcgcgaacccctcgcaggaaagaagctctgcaagcggaccctcaagctcgtgcgacgagcctctgaggccaagtgcctcaagcgcggagtcaaagaggtagtcaagagcattcgccgcgggaacaaagggttgtgtgtgattgctggaaatatttctcctattgatgtgattacacacgttccaatactatgtgaggaatctaatgttccttacatatatgttccgatcaaagag

SEQ ID NO: 41748 - DNA, 309 bp, Zea mays
ctccggcggcggcaactcgacggccaaccgcgccaccctgccgcggcaccatggtgcatgttaacttctaccgcaactatgggaagactttcaagaagccaaggcggccgtatgagaaggagcgcctagatgctgagctgaagctggttggtgagtatggcctgcggtgcaagcgcgagctgtggcgcgtgcagtatgccctgagccgtatcaggaatgcagccagggagctgctcaccctggatgagaagaacccacgccgtatctttgagggcgaggcgctcctccgccgcatgaacagatatggtc

SEQ ID NO: 41749 - DNA, 298 bp, Zea mays
ggcaacaccgatgtgaggagcattgacctgaatgaaattgtcaggtttgaaaaacactatgtggtggtttatgaggatgagacttgtaagccacctgtagggcatggtcttaacaaagcagcagaaatatccttgctgctgaatctgaaggatcatccggagcccagtatccttgttgaagtgctaaggtgtcgtgcaagaaagcaaggttctaggtttctttcattcaatccagtgaatggaaaatggaaatttgaggttgatcattttagtagatttgggcttgtgcgagaggacg

SEQ ID NO: 41750 - DNA, 297 bp, Zea mays
tgaggcatcacggcgaaccaagggttttacctcctgggcctggacaacacgtcgccgacgttcgcgtccgccatccagaactcggtcccggccatcaccttcgccatggccgcggcgctgcggatcgagaaggtccggctggaccgccgcgacggcgtagccaaggtggcgggcacgctggcgtgcgtggcgggggcatccgtcatcacgctctacaagggccccaccatcttcggtcccggcggcggcggcggcctcgagctggcgtcaaccagcaaggcggtggccggcgacaag

SEQ ID NO: 41751 - DNA, 303 bp, Zea mays
ccgcctccccgatctcgtcgagaggaagcccaatcccgaaaccgtcgccgtattccaatggcgcccaaggccgagaagaagcccgccgccaagaagcctgcggaggaggagccggcggcggagaaggccacggcggggaagaagcccaaggccgagaagcggctccccgcgggcaagtccgcaggcaaggagggtggcgagaagaaggggaagaagaaggcaaagaagtcggtggagacgtacaagatctacatctttaaggtgctgaagcaggtgcacccggacattggcatctcgtccaag

SEQ ID NO: 41752 - DNA, 274 bp, Zea mays
gcggacatggtgttcatccgcaccatcaccagccagttccagaccatcctgggcatctcgctcatcgagatcctctccaagcactcctccgaagaggtgtacctcggccagcgtgacgagcctgatcgctggacgtcagacgccaaggcgctggatgcgttcaaaagattcgggagccggctggtgcagattgagaatcggatcaagacgatgaacgacagtccggacttgaagaacctggaagagccagtggaaatgccgtacatgctgctgt

SEQ ID NO: 41753 - DNA, 285 bp, Zea mays
  unsure (1)..(285): unsure at all n locations
aaataagttactttattgagtttggaatttaacattccaccactttccaaagttcagatataagcctatctcaaattcatagggtagaggatgagaaatgattttatgcattattagaatttgtttctaatctgtcatgtcacttacatgacactcttcgtctcagttctctatagtaaaatgtaccacaaatatctccgatatcttactaataatagtatacaaatatattttgcataaaaccgaattaacttaattgatatatgcctanattactattattag

SEQ ID NO: 41754 - DNA, 218 bp, Zea mays
gatcaggatcagcgcagttgcagccgaacagctgctacagccatggcaggctgagccccttctgcgagcgcatccagttcgtccagtcgtcatcgtagtcgagctccacatgcacaggtttatacatccagaggctcaagttgggtaatcgacagcaggtgcacaaaccacatgacatgtgagaagaagatgttctcctcctacgagaaaaaccaaga

SEQ ID NO: 41755 - DNA, 321 bp, Zea mays
ggctcgaggtattttggaggaaaaagtaaccgatcttgcggaatctacgtttacgtcagtgtgagttactcctccaacacagtcattatctcgagaaggctatctaccacagaatctgtactgccttgactcatgttatggttccctccatgagctaaaattgttgcttcataaaatgagcgaacataatgtaagggctatggcagatgttgttatcaaccatcgaattggaactactcaaggatccaatggcatgtataatcgttatgatggcatcccagtatcatgggatgaacatgctgttacatcttgttctggcgg

SEQ ID NO: 41756 - DNA, 305 bp, Zea mays
  unsure (1)..(305): unsure at all n locations
ggctcgagagcatctccgctccggctgcgctcagccttgctttcctgacaccagctctagcgcgaggacgagaggtacggcggccgatctggcggcgcaggcggagggctcggccggggccggcaagtcggcgccgaacatggggaggggccgggtcgagctcaagcggatcgagaacaagatcaaccgccaggtcaccttcgacaagcgccgcaacggcctgctcaagaaggcgtacgagctctcggtgctctgcgacgccgangtcgcgctcatcatcttctccaaccgcggcaagctctacg

SEQ ID NO: 41757 - DNA, 339 bp, Zea mays
  unsure (1)..(339): unsure at all n locations
attttctcattttcatgatccaatttctagcaaggtagatttcatgtatcaattgactagaatagagaaagaagctaattgggtaattctaaccggcctggtggtggctanaccaactgataacaagggcctatggtgtaattaagtagctanaaattcatactaactgcacttacgaagtcagaagaaaattcgtgtgacttcagaataacaatccctgaaatactggaggatgagtggttcaaaaagggctacaagcgcccggagtttgacgagaaatatgacacgccattggatgatgtggatgctgtcttcaatgactcagaagagcaccacgtg

SEQ ID NO: 41758 - DNA, 337 bp, Zea mays
aagagttttcttgtttgcaagaagaaaatagctacctctccagatctattatgctgtttttgcccaactccattcagacttttccaggagactgtgacaaacatgaaatttgatgaagaaccaaattactcaaagcttatttcccttttcgatgaattgattgagccccagcatttgaggcctattagaattgatggtgcattgaaggctggacaaaaacgtggaagattacatgtaaatccagaagaagatgagcaaccgaagaagaaagttcgacttggaagcccagcaaatcagtggatttcagtttataatgctagaaggcccatgaagcaga

SEQ ID NO: 41759 - DNA, 324 bp, Zea mays
gaagtttgtggtgaatcgaaattctctgaacttggtgcggattcgctggacacggttgagattgtgatgggccttgaggagcacttcgacattagcgtggaggagtccagcgcgcagacaattgccaccgttgaagacgccgctgacctcattgacaagcttgttgctgtgaaggcataggccgcatctcttctatcattgtcttaccactctaggtttcaatggtctgaagacttgtgattttctccgcacagctgttgctattcccgtgtcgtaataatacgagatgttttaagcggctgaacacacggtggtgtaatctgt

SEQ ID NO: 41760 - DNA, 326 bp, Zea mays
ccatatccgctcccctacctctccagcatcctcccgtctccgtcgtctcgtctccgctcctcacctcgccagccatgggcaagatcaagatcggaatcaacggtttcggaaggatcggcaggctcgtggccagggtcgccctgcagagcgaggatgtcgagctcgtcgccgtcaacgaccccttcatcaccacggattacatgacgtacatgttcaagtacgacaccgtgcacggccaatggaagcacagcgacatcgccctcaaggactccaagacgcttctcttcggcgagaagccggtcaccgtctttggcatcaggaacccc

SEQ ID NO: 41761 - DNA, 310 bp, Zea mays
  unsure (1)..(310): unsure at all n locations
ggctcgaggtctcttccactctcccttgacctgtctcctctcacctgttgactgctgtgccgctccgcaccggtggcatctgcatctgcatctccatccctcgatctgtcttctctcagggtggaagaagcgtgacaatggaggctccacccgtggcgctgttcgacaccctcaaggcagccaaaccgttcttcttgttggctggtcccaacgtgcatggatcggaggagcacgtcctgaagatggccanacacatcaaagcaattacgaccaagcttggaattaccctcgtgttcaagtccagctttga

SEQ ID NO: 41762 - DNA, 322 bp, Zea mays
gaagagcgtgtgcgtgaccggcgctggcggcttcgtcgcgtcggagctggtgaagctcctcctctcccggggccaatacgcggtccgcggcaccgtgcgcgaccctggtgctagcaagaatgcccatctcaaggtgctggaaggagctgaggaaaggttgcagcttctcaaggctgatctgatggactacgacagcattgcatcagcagttgccggctgtgagggtgtcttccatgtagctagccctgtcctttcccatcgaccctccaaccctgaggtggaggtcatagctcccgctgtaataggtacaaccaatgtgtta

SEQ ID NO: 41763 - DNA, 316 bp, Zea mays
atggttgctggtggtctggccgctggtcaaacgccatatgcaattagtgccgttgtaactgggttggctcggttgacttatgaattctcagagcttatcggagtcgcatacaagctccttcctcagactttcttgcttatgcaaaggaacaaccgggaaatagtcaaagcgaacttaggttttgtcaaagctttagttgctaaatctaaagctgacatattgcatgaacacttgactggagttgttgagggcctgctgagctggcaaagtgataccaagaattcctttaaagctaaggtcaagtcactcatagaaa

SEQ ID NO: 41764 - DNA, 181 bp, Zea mays
ccgctttagttcagtttttttgtttttagggttggttcgatcatttggctgtagcgtgaatcgcatggacaacagactccaattactaagcaaatattttttcttcttctgcatatatttgaagaatcttgttcactacccctttcgaaatgaaattcgggaatttttttttcttgtttcc

SEQ ID NO: 41765 - DNA, 206 bp, Zea mays
cgatcgagcgtagtaactacggaattctgctcaacgctttagttcagtttttttgtttttagggttggttcgatcatttggctgtagcgtgaatcgcatggacaacagactccaattactaagcaaatattttttcttcttctgcatatatttgaagaatcttgttcattacccctttcgaaatgaaattcgggaacttttttttc

SEQ ID NO: 41766 - DNA, 182 bp, Zea mays
tccgctttagttcagtttttttgtttttagggttggttcgatcatttggctgtagcgtgaatcgcatggacaacagactccaattactaagcaaatattttttcttcttctgcatatatttgaagaatcttgttcacaccccctttcgaaatgaaatacgggaatttttttttcttgtttcc

SEQ ID NO: 41767 - DNA, 181 bp, Zea mays
tcgctttagttcagtttttttgtttttagggttggttcgatcatttggctgtagcgtgaattgcatggacaacagactccaattactaagcaaatattttttcttcttctgcatatatttgaagaatcttgttcactccccctttcgaaatgaaattcgggaatttttttttcttgtttcc

SEQ ID NO: 41768 - DNA, 314 bp, Zea mays
cgcatttcgaataacacaggtgagcgcgacgatgggatccctcgctaataacatcatggtcgtgggcgccgtccttgcggcgctcgtcgccggcgggtcgtgcgggcccccgaacgtgccacccggccccaacatcaccaccaactacaacggcaagtggctcaccgctagggccacctggtacggtcagcccaacggtgccggcgctcctgacaacggcggtgcgtgcgggatcaagaacgtgaacctgccaccctacagcggcatgacggcgtgcggcaacgtccccatcttcaaggacggcaagggctgcg

SEQ ID NO: 41769 - DNA, 183 bp, Zea mays
atcaaagagcacggtggcgatgacttctcctttacgctcaaggagggcccgactggcacctggacgctcgacaccaaggccccgctcaagtaccccctttgcatccgctttgctgtcaagaccggcggctaccgcatcgccgacgacgtcatccctgccgatttcaaggccgacaccacctat

SEQ ID NO: 41770 - DNA, 314 bp, Zea mays
aaaaatacaggaggtgttgttcaagagagagtaccaaattctcaaggagctcagtctgagaatgatcctaacaataccactatatttgttggtgggcttgaccccaatgtcactgaagataccctaaaacaagttttttctccttacggtgaagtcgtccatgttaagatccctgttgggaagagatgtggttttgttcagttcgttaccagaccttctgctgaacaagcgctgctaatgctgcaaggggccttgattggtgcacagaatgttcgactttcatggggtagaagcctgtcgaacaagcaggctca

SEQ ID NO: 41771 - DNA, 242 bp, Zea mays
atcacgacaagatggcatgcacaaacaatgcgatgagagccttgttcctcctggtcctcttctgcatcgtgcatggtgagaaggaagagtcaaagggcatcgatgcgaaagcgtccgggcctggtgggtccttcgacatcaccaagttgggcgcctccggcaatggcaagacagacagcacgaaggctgtgcaggaggcatgggcatcggcgtgcggcggcactggcgaccacggacctaag

SEQ ID NO: 41772 - DNA, 315 bp, Zea mays
gagcgccgaggagaagttcccaggcaaggtgcgcgccgtggtcaagttcaacgcggcgctggcgcaccacatcatggccggcgccgacgtgctcgccgtcaccagccgcttcgagccctgcggcctcatccagctgcaggggatgcgatacggaacgccctgcgcctgcgcgtccaccggtggactcgtcgacaccatcatcgaaggcaagaccgggttccacatgggccgcctcagcgtcgactgtaacgtcgtggagccggcggacgtcaagaaggtggccaccacattgcagcgcgccatcaaggtggtcgg

SEQ ID NO: 41773 - DNA, 311 bp, Zea mays
catggggacacttatcatttgattctcaagaactgcaatcaattcacagcagatgtctgcgagcgtttgaccgggaagccagtacctggatgggtgaatcgactcgccagattaggttccttcttcaattgtgtattgcctgacagtatcaaggtttcagcagtcagagatgtaaatgcacatccagatttttctgatgatggcttggggtccaatgcctcgatccttgagggaagtgatgacgatgatttagaccaactcctaagaacacctaacagcgacactgtgtcttcaagggacaagacactcct

SEQ ID NO: 41774 - DNA, 243 bp, Zea mays
  unsure (1)..(243): unsure at all n locations
cgcggcatttcgaataacacaggtgagcgcgacgatgggatccctcgttaataacatcatggtcgtgggcgccgtccttgcggcgctcgtcgccggcgggtcgtgcggaaccccgaacgtgccacccggccccaacatcaccaccaactacaacggcaagtggctcaccgctanggccacctggtacggtcagcccaacggtgccggcgctcctgacaacggcggtgcgtgcgggatcaagaa

SEQ ID NO: 41775 - DNA, 299 bp, Zea mays
gcaagcagcacacgagacgatatagagggagggatcatggctctcttccgtgccgccgcgtcaggagggttcgcgctgatccttctcgcgtgctgcagcctcataatgctggcggcggcgtctggcggcggcggcgtggacgacgacggcgtcggtggtgacaggctgatgatggaccggttcctcagctggcaggcgacgtacaaccggtcgtacccgacggcggaggagaggcagcgtcggttccaggtataccgccgcaacattgagcacatcgaggccaccaaccgggcgggcaa

SEQ ID NO: 41776 - DNA, 265 bp, Zea mays
agcctgagcgagcatccacgcgccagcatgcaagcagcgtcttatctgggccggcgccatcacggggtttcttcttttaatctgggactttgttgctgttggacgaatgaattcccttcgatcggttagctttaatctgtctcgttagtgtgtcgtgttcgtgtagcaccatgccacacaccagccgtgtgctctgtcacgtgggggccactcgtggggtctcctgctgctgtcagaacgaataagagaagatggaattgtgatg

SEQ ID NO: 41777 - DNA, 297 bp, Zea mays
ataaaattccccattccaactcacacagatctcgtacccggcagtcgcgacgaatctcgcggggcggaggtggtggcgcgactgaggcggtgtcgactccgacgaactcgcagccaccgggggatacgcagcagcagcaccggcgtactccatcgacgttcatatttaaggacttggattggataattctactcgtcaacaaaagtgattaaaaatggtggttcttgcagcttcaatcgtttcaaagtcgggaaaagcacttgtttcaagacagtttgttgacatgtctcgcataag

SEQ ID NO: 41778 - DNA, 303 bp, Zea mays
gcagctcacgtggaggtagagggctctgaggtgacctacgggagtgtgattaagctgttgcacgagaagacaaagcaccgtctgcactcacatgatgtgccgtacggctcaggcagcggtcagcagtctgtcaccggctttcctgaaggcgatgactcaaatagctactggatcataaagcctactccagattcatcgtctaagcaaggtgattccattgaaactggtggcatcatcaagttgcaacacatgaagactcggaggtggttgcacagtcacctgcacgcttcaccgttatctggt

SEQ ID NO: 41779 - DNA, 321 bp, Zea mays
agacaagatggcgtgcacaaacaatgcgatgagagcattgtaccaccaggacctcttcagcatcgtgcatggagagaaggaagagtcaaagggcatcgatgcgaaacgtccgggcctggagggtccttcgacatcaccaagttgggcgcctccagcaatggcaagacacacagcacgaacgcagtgcatgatgcatggtcatcggcgtgcggctgcacagcgaagcagacaatcctcatacccaagggtgactaccttgtcggacaactcaacttcacaggcccttgcaaggacgacgtgaccatccaggaggatggcaat

SEQ ID NO: 41780 - DNA, 319 bp, Zea mays
agaactattgtgttctggatgaagggcatataataaaaaactcaaggtctagaataacgtttgctgtgaaacagctgaaagcgcaacaccgtcttatcttgagtggcacacctattcagaataatgtgttggagttatggtctttatttgacttccttatgcctgggtttcttggaacagaaaaacaattccaagctgcatatggaaaacccttgctagctgccagagattctaaatgttcagcaaaggatgctgaagctggtattcttgcaatggaggcactgcataagcaggtcatgccgtttctactgagaagaac

SEQ ID NO: 41781 - DNA, 322 bp, Zea mays
gcggctcaagtccgtcgtgtcacgctacgccggcaaggtcatccactgggacgtggtgaacgagaacctgcagttcaacttcttcgagacgaagctgggccccatggcgtcggcacagatctaccagcaggtggggcagctggaccgcaatgccatcctattcatgaacgaattcaacacgctggagcagcccggcgatcccaaccctgtgcccgccaagtacgtggccaagatgaaccagatccgcggctacgccggcaacggtggcctcaagctcggcgtcggcctcgagagccacttcagcacacccaacatcccgtac

SEQ ID NO: 41782 - DNA, 265 bp, Zea mays
acgcagagcgttcaggatacacatggctgccacctttgccttcatccctctcctgctactggtctgcgtccagagcgcggctcctgttcatcggttcacaaggagcgagttccctgaagatttcgtcttcggatccgctacatcggcttatcagtatgagggtgctgttggtgaggatggtaggagcccaagcatctgggacaccttcactcacgcagggagaataccggacaaaagcaatggtgatgtagccgccgacgggtac

SEQ ID NO: 41783 - DNA, 302 bp, Zea mays
catcgatctccccccagcggcgaggagagccggcggccacaggaaggagaaatggcttccgcacacaacgctctccgggtgtttttcatcctagccgtggtatgtgccgtatgcacagcgaaaaggacaggagccaagaaggaagaatcggcggcagcccctggtggtgctgctggaggcagcggcgggacgttcgacatctccaagctcggcgcgaccagcgacggcaagacggactgcacaaaggcagtccaggacgcgtggacgtcagcgtgcgaacgaccggaagcgccacggtggtg

SEQ ID NO: 41784 - DNA, 317 bp, Zea mays
cgacaagatggcgtgcacagacaatgcgatgagagccttgttcctccaggacctcatctgcatcgtgcatggagagaaggaagagtcaaagggcatcggcgtgcggcggcacagggaagcagacaatcctcatacccaagggcgacttccttgtcggacaactcaacttcacaggcccttgcaagggcgacgtgaccatccaggaggatggcaatcagctggcgaccacggacctaagccagtacaaggaacatggtagatggatcgagattctacgcgtggataaccaggtcatcaccggcaagggaaaccttgac

SEQ ID NO: 41785 - DNA, 312 bp, Zea mays
ctcgatccatcgcctcgccgcagcacacacgacgccggcggcgccatggccatgaagctggacatgtccgcgctcgagaccaacttcgccaacctgaccgcctccgccggcgacgacacgtacttctccgccgaggcccccgacgtgccgtccatggtgctccccatctgcgacgacttcgacggcttccaggcggccaccaaggatatggtgaagaataacaaggggacgaccacgcttgccttcatcttcgacaagggcgtcatcgtcgccgctgattccagggccagcatgggcggttatatatcctca

SEQ ID NO: 41786 - DNA, 244 bp, Zea mays
gataaatgaagtcacacatgattactccagtcttctcagtggaggtacatcagcaaccgaggtttataaaggaacgcttgatgacaacacgatggtggcggtgcatagattggtctacgagggctctgaggaggcgttcatcaacggagggatggtcgtgtccaagatcgcccacaggaacatcgtcagagttctgggctgctgtctggaaccccagaccaccgctttcctctacgagtacgtc

SEQ ID NO: 41787 - DNA, 244 bp, Zea mays
attaacggcgcctgattccgaatggttttatttccgcgcgtgtaattaacgtgtggcaggaatacagcctcacgtgaccatctatcacttcgaccttccccaggctctccaggatgaatacaacggcctgctcagtccgagaatcatcgaagacttcaccgcgtacgcagacgtgtgcttccggagcttcggcgacacggtgaagcactggatcacggtgaacgagcccaacatcgagcccatc

SEQ ID NO: 41788 - DNA, 233 bp, Zea mays
acaaggtcatcgccaaagacgtcatcccgccgaactggagacccgatgccgtctacacttccaacgtccaattctactagactttgaattcccttcgattcatccggcgcggtgggctatggacctgcagcagcaagctaattaagtttatatatattgcatgagagagcatgcaccgctaaccatatatactactgagacttctgaattctagtatatgtaatccttttgtt

SEQ ID NO: 41789 - DNA, 284 bp, Zea mays
agaacagctactgggactccgttggtacagttgctacctttatctgatggagagcggataacctccatcattcctgtgagtgaatttggtgagaaccaatatctagtgatgctcaccgttaatagctatatcaagaaagtaccccttaatgccttttcatcaatcagatctactggtatcatatcaattcaactggttcctggtgatgagcttaagtaggtccgtcattgtggcaatgatgacctggttgcattggcttcacagaaaggaagggtaatagtcaa

SEQ ID NO: 41790 - DNA, 278 bp, Zea mays
caggaagccggaagcaggaagcaggggctaacctccgagcggcgaggatgacgggcggcggcgggatgattgacgatgaagagcgggtgggccacgcggagatcccgaccagcttcggccccgagctgcgcgcctgcctccgatgccgcctcgtcaagacctacgaccaggaacccttctccgctggcgccgctcccctcccccctcctcacgcctaggcctgcggtctaggttcaccagcctcccgttgaagggagggttcgaggacagggggtttc

SEQ ID NO: 41791 - DNA, 294 bp, Zea mays
cgtcgacccaccctcgcgtgatgtcaccaccacccccgctgagctcgtcaccttcttccgcgacatgtccctcatgcgccgcatggagatcgcggccgactccctctacaaagccaagcttatccgtgggttctgccacctctacgacggccaggaggcgtcgccgtcggcatggaggccgccatcacccgctccgattccatcatcaccgcctaccgcgaccactgtacctacctcgcccgcggaggggacctcgtctccgccttctccgagctgatgggccgcgacgtgggt

SEQ ID NO: 41792 - DNA, 202 bp, Zea mays
ccctttcgttccacctcgccccagcgacgcggcctcccgtagaccgagcaaggcaacccaccactgagaggcacgcagaggagcaggaagccggagaccaagatgtcgtcggtgttcagccgcgatgagacggcccccttcttcggtttccacggcgccggcgccggcctcgtcttctcatgcatgggcgcagcgtacggga

SEQ ID NO: 41793 - DNA, 101 bp, Zea mays
atcctcgtcaacgtgttcaacatgctcgaccagccgctcctcttcacatggcacgggatccagcagaggaagaactcgtggcaagacggcatgccgggcac

SEQ ID NO: 41794 - DNA, 184 bp, Zea mays
atcgagagaagaagctacggattcagctcgacctaggtgtggtttcagtgcattagcagtgaaggtcctccagcaatatggtgtccccatcagtgctagagatattctttcagatctaaagctcaaagagagtgtcaaagcatacagtaactggcctacgtttccacaaatatttatcaaagga

SEQ ID NO: 41795 - DNA, 321 bp, Zea mays
  unsure (1)..(321): unsure at all n locations
tcggaggcatgtcggtgcagaacgcactgaggaacaagaggctcttcatcctagaccaccatgaccatttcatgccgtacctcgacgagatcaacgagctggaggggaacttcatctacgccagcaggaccctactgttcctgaaggacgatggcacgctgaagcccctggccatcgagctgagcctgccccacactgacggccagcagcgcggcgcggtcagcaaggtgtacaccccggctcacaccggcgtcgacggccacgtctggcagctcgccaaggcttataactgcgtaaacgactctgnctggcatcagctga

SEQ ID NO: 41796 - DNA, 310 bp, Zea mays
cccgggacgacctccccgcggggttcgtcttcggcgtcggcaccaccgcgtaccaggtcgaaggtgcagttgcagaggacggaaggaagcctagcatctgggacacattcacacatgaaggctattcccttgacaacgccacaggcgatgtaacagcggatcagtatcataagtacaaggacgacgtaaagcttctgcatgagatgggtgtcgatgcctaccggatgtcgattgcctggcctcgacttatcccagatggtcggggagccgtgaatccgaagcggctggagtactacaacaatctcataga

SEQ ID NO: 41797 - DNA, 231 bp, Zea mays
caccctgatcgcgcctgcaaccttgcaaaacaggcctacgatgaggcgatctctgagctagacagcctgggagaggagtcatacaaggacagcacactgatcatgcagctcctgcgcgacaacttgaccctatggacttccgacaccaacgaggatagcggcgacgagatcaaggatgctgctgccccgaaagaatcagcggagggtcagtaagatggattcagtctcacg

SEQ ID NO: 41798 - DNA, 309 bp, Zea mays
cgagacacacaggattgtccgtcaatcaccatttaatgctaaagggcttcggcagacaagctttgctggtgttgaggttataactcttctaccagaggaatccatggctgtggacatacctgaagaggacctggagataagcttcacaagagctggaggtaaaggaggccagaacgtgaacaaggtggaaacagctgtacgcatggttcatattccaactggaattgcagtacgttgctcagaggagaggagccagctggccaacaaaataaaggccctcagccggctcaaagcgaactgctcggtgat

SEQ ID NO: 41799 - DNA, 231 bp, Zea mays
ctcccgaacaccgaaccacaagtttcgcttctcgtcgcgacgactgggcgagaccggcgccgccgccgccgcctgagttctttagaaatgagtgatggtgaggacatccagcctcttgtctccgacaatagcactggaatggtcaaggctggttttgctggcgacgatgcaccaagggctgttttccctagtattgttggccgtcctcgccacactggtgtaatggtaggg

SEQ ID NO: 41800 - DNA, 235 bp, Zea mays
cccaggcgacggaggaccagatccagcgggacccagccatgaacaagttcgaccgggaccacccgatgcacctacgggcgacgagcccgacggccgtgaagcaggtgagctgcgagtgggacgcgtacgaggccaccaagggcgcccacgggctgtgcatcctgaccgagtaggacgagttcaagaccctggactaccagaagatcttcgacaacatgcagaagcccgccttcgt

SEQ ID NO: 41801 - DNA, 234 bp, Zea mays
cccaggtgacggaggaccagatccagcgggacctagccatgaacaagttcgactgggaccacccgatgcacctgcagccgacgagcccgacggccgtgaagcaggtgagctgcgtgtgggacgcgtacgaggccaccaagggcgcccacgggctgtgcatcctgaccgagtgggacgagttcaagaccctggactaccagaagatcttcgacaacatgcagaagcccgccttcg

SEQ ID NO: 41802 - DNA, 228 bp, Zea mays
cccaggtgacggaggaccagatccagcgggacctagccatgaacaagttcgactgggaccacccgatgcacctgcagccgacgagcccgacggccgtgaagcaggtgagctgcgtgtgggacgcgtacgaggccaccaagggcgcccacgggctgtgcatcctgaccgagtgggacgagttcaagaccctggactaccagaagatcttcgacaacatgcagaagcccg

SEQ ID NO: 41803 - DNA, 229 bp, Zea mays
gactcgccggggacagagagagagaccgacgcgccggcagatcccaagctcaccctagagggggaagagggcgaccgaacgcggcgatgggtttcatcatggacttcgcggagaatctgatcctccgtctgatggaggacccggacaagcgcgaccaggttcggcgggagcatgtctacaagatgaaggagcggtgcgagcgcactaaggcggcgtggagcctccctct

SEQ ID NO: 41804 - DNA, 230 bp, Zea mays
atttcgaataacacagttgagcgcgacgatgggatccctcgctaataacatcatggtcgtaggtatcgtccttgcagcgctcgtcgccggcgggtcatgcgggcccccgaaggtaccgcccggtcccaacatcaccaccaactacaacggcaagtggctcaccgccaggaccacctggtacggtcagcccaacggtgccggcgctcctgacaacagcggtgcgtgcggga

SEQ ID NO: 41805 - DNA, 228 bp, Zea mays
  unsure (1)..(228): unsure at all n locations
ctcccgaactccgaaccacaagtttcgcttctcgtcgcgacgactgggcgagaccaccgccgccgccgncgcctgagttctttagaaatagctgatggtgaggacatccagcctcttgtctgcgacaatggcactgcaatggtcaaggctggttttgctggcgacgatgcaccaagggctgttttccctagtattgttggccgtcctcgccacactggtgttatggta

SEQ ID NO: 41806 - DNA, 229 bp, Zea mays
gactcgccggggacagagagagagaccgacgcgccggcagatcccaagctcaccctagagggggaagagggcgaccgtaagcggcgatgggtttcatcatggacttcgcggagaatctgatcctccgtctgatggaggacccggacaagcgcgaccaggttcggcgggagcatgtctacaagatgaaggagcggtgcgagcgcactaaggcggcgtggagcctccctct

SEQ ID NO: 41807 - DNA, 218 bp, Zea mays
cttacttgttagaaccactaattgagaacaagctgaaccagaacttataaccggtaattcaaggcagctttcaaaatatccaagcagaagtaaggtcagagaaggtaaatgtgatcctgattgcacgaaggtgcacacgaaggataggtactcgaatgtggagacgaggagctgatgcagagggttttgctgcaaacctcgttgaatcagagcagata

SEQ ID NO: 41808 - DNA, 216 bp, Zea mays
cgcctatctcgccagcaccgccgcatcaccgaagttcgcaaagatggcggtggcgctgctgacgcagaagatcgtgaagaagagggtcaagcagttcaagaggccccatcttgatcgctacacgtggcttaagccaagctggcgcaggcccaagggtatcgactcccgcgtcaggcgtaagtccaagggatgcaccttgatgcccaacattggata

SEQ ID NO: 41809 - DNA, 222 bp, Zea mays
gcagcataccataccgcgcggaccgggccgggagaaacaaaaccgacaaggacgatatggtgcgtacctcgtcgcgctgatcctcgtcgccacggccgtagccgccgtggccacagccgcaccctcgccggggtttgtcgtcaccggccgcgtctaccgcgacaaccgccgcgccgggttcgagaccaacgtctcccacgccatcgaaggcgcgacggtgga

SEQ ID NO: 41810 - DNA, 313 bp, Zea mays
  unsure (1)..(313): unsure at all n locations
cgtcctcctccccacgccccagaggccaagccaaaggtccagcaatggcgaggtctccccggcttctcgcgctgctagtggctgtcgtctggatatgcggcgcggccctagtagcgcgtggcgacccgatgctcgagaggttccagcagtggatgggcaggcacggccggctgtacgctgacgccggagagaagcagaggcggctcgaggtgtaccggatgaacgtcgagctggtcgagaccttcaactaccagggcaacgggtacangctggccgacaacaagttcgccgacctgacgaacgaggagttcag

SEQ ID NO: 41811 - DNA, 312 bp, Zea mays
  unsure (1)..(312): unsure at all n locations
cgtccggctcgccaggccccagaggccaagccaaaggtccagcaatggcgaggtctccccggcttctcgcgctgctagtgngtgtcgtctggatatgcggcgcggccctagtagcgcgtggcgacccgatgctcgagaggttccagcagtggatgggcaggcacggccggctgtacgctgacgccggagagaagcagaggcggctcgaggtgtaccggaggaacgtcgagctggtcgagaccttcaactccatgggcaacgggtacaggctggccgacaacaagttcgccgacctgacgaacgaggagttca

SEQ ID NO: 41812 - DNA, 310 bp, Zea mays
cgtgtctatctcggatatcaacatgaccgaagtagagttgtctgtgttgctgttagctaagtaggaggaaagaggatttcctagtaccatagagagtatagatggcatgtatatattggaagcggaggaactgtcctattggatggggaggacagttcacaaggaggacattaagtcaccgatcatcatgctcaaggcgattgccgcgtatgacttgcggatctaacatgttttttggatggtaggatcgaacaacgacgtgaacaagttcaaccaatcaccgttgttcgctgatgcactcaagggtgaa

SEQ ID NO: 41813 - DNA, 319 bp, Zea mays
  unsure (1)..(319): unsure at all n locations
ccctcatcctccgctccagacttccagcatctccgctccggctgcgctctgccttgctttcctgctacctgctctagcgcgacgagagaggtacggcggccgatctggcggcgcaggcggagggctcggccggggccggcaagtcggcgccgaacatggggaggggccgggtcgagctcaagcggatcgagaacaagatcaaccgccaggtcaccttcgccaagcgccgcaacggcctgctcaagaaggcgtacgagctctcggtgctctgcgacgccgangtcgcgctcatcatcttctccaaccgcggcaagctcta

SEQ ID NO: 41814 - DNA, 305 bp, Zea mays
acaacttcttatcctgacttacccgaggactgatcatcagcccattaaggagtctgcccttggaaacattcccaccatcgccttctgtgatactgattcccctatgcgctatgttgatatcggcattcccgccaataacaaggggaaacagagcattggttgtctgttctggctgctcgcccgaatggtcctccagatgcgcggtacaattcttccaggacacaagttggacatcatggtagatcttttctcctacagagacccagatgaagcgaacagctaggaggaagaagaggctctggttg

SEQ ID NO: 41815 - DNA, 303 bp, Zea mays
gatctaagcaaagacttgatttagttatggacggattggtaggcctcttgaaagttcgcgtggaccggggtatcaaccttgcctaccgcgacgcaagaagcagcgatccgtatgtcgtcctacggcttggcaagaagaaactgaagacaagcgtgaagaagagatccgtgaaccccatatggcaagaggagctaactctgaccgtcacagatcccagccaaccactgaagctggaggtgttcgacaaggacaccttcagcagagacgaccccatgggagacgcggatgtggacgtggcgccac

SEQ ID NO: 41816 - DNA, 307 bp, Zea mays
agtcttttccttttaggtcggtttcatcctccaccatcgtccttgtgctaaaccgaagcttctccagccatagcttcggagtcggtccatccttcttctagatcacactttttcataccatgcacgccttcatcttaaagccgaagttcctgtgacagtatactatactggaacacatgttacttgtgtttttgaggaccttcggatgatgaaggccaccaacacacaccaaggaaatcttcgtcaacatcgatattgaacaacagttgtggcatagcataagttttaattatttgcgaagcatgaa

SEQ ID NO: 41817 - DNA, 304 bp, Zea mays
gcatttcgaataacacaggtgagcgcgacgatgggatccctcgctaataacatcatggtcgtaggcgccgtccttgcggcgctcgtcgccggcgggtcgtgcggacccccgaacgtaccacccggccccaacatcaccaccaactacaacggcaagtagctcaccgctcaggccacctggtacggtcagcccaacggtgccggcgctcctgacaacagcggtgcgtgcgggatcaagaacgtgaaccagccaccctacagcggcatgacggcgtgcggcaacgtccccatcttcaaggacggca

SEQ ID NO: 41818 - DNA, 247 bp, Zea mays
gtcagaaaacagtgggatcgagttgtttcactgcacgagcacatcctccggcgaccaccggcctccctctccgtcctctagcgaccgaccaacgcgccgagcgaagatgtcgtggcagacgtacgtggacgagcacctgatgtgcgagatcgagggccaccacctcacgtcggcggccatcgtcggccacgacggcgccacctgggctcagagcaccgcattccccgagttcaagcccgaggagatg

SEQ ID NO: 41819 - DNA, 140 bp, Zea mays
  unsure (1)..(140): unsure at all n locations
gacatcgtgccaacacctgtaaaggttgagcttatacgaagatcggccacatccggattacctgttgtggaggcaacgagttttgtatcaccanaatgggtacctcagttagctgatgcgaaggatgttatggaagcagt

SEQ ID NO: 41820 - DNA, 297 bp, Zea mays
ctagccgcctcctgcaagtttcagagctcaggaatctgcgccatggcgagtgagacggagaccttcgcatttcaggctgagatcaaccagctgctctcactcatcatcaacaccttctactccaacaaggagatcttcctccgcgagcttatctccaactcttccgatgcgctggacaagatcaggttcgagagtctcactgacaagagcaagctcgatgcgcacctgagcttttcatccaccttgtcccagacaaggccacgaacacgctctccatcatcgacagcggcatcggca

SEQ ID NO: 41821 - DNA, 292 bp, Zea mays
atgaccaccaagcacaacgatgatgagcagtatgtatgggagtctcaggccggtggctccttcactgtcacacgtgatacctctggggagcaacttggcaggggtacaaagatgaccctgtacctcaaggatgatcagttggagtatcttgaggagcgccgcctgaaggatctgatcaagaagcactcagagttcattagctacccaatctctctctggactgagaagaccactgagaaggaaatttctgatgatgaggatgaggaagataagaaggacgaggagggcaagg

SEQ ID NO: 41822 - DNA, 292 bp, Zea mays
cgaggacttggtcgcgcggctgccggggcagctccggtcacgttcaggcagttcgccgggtacgtggacgtcgacgccaaggccggcaggagcctcttctactacttcgccgaggcgcgggaggacgccgccgccaagccgctcacgctgtggctgaatggaggtcctggctgttcttcggttggaggtggtgctttcaccgagctagggccattttatccgcgaggagacggccgaggcctcagattgaacaagaagtcatggaacagagcgtccaatcttctgttcgtgg

SEQ ID NO: 41823 - DNA, 292 bp, Zea mays
cgaaggcttggtcctcctccttgtatctccactccccccttcacagatccgttcctccagctagggttagcgttcctctgcagcgatggcgatcaagcggactaaggcggagaagaagatcgcgtacgacaagaagctgtgcagcctgctcgatgagtacaccaaggtgctcatcgccctggccgacaacgtcggttccaagcagctccaggacatccgccggggcctcaggggcgactcggtggtgctcatggggaagaacacgctcatcaggcgttgcatcaaggtgtac

SEQ ID NO: 41824 - DNA, 295 bp, Zea mays
agttatctcgccttctgaagtagcatcatcaaaatatgatggaactctgaaatactgggagagttccattacccttgtcgacattcttaaaaatgagatccgtgatgggcagttgagcttcaggggcaagcgggttctagagcttggatgtggatatggcctctctgggatttttgcctgcttgaagggtgcatccacagttcactttcaggacataaatgcagaaacgatacggtgcagaacaatacccaatgttcttgcaaatcttgagcaggctcaggaccgacagaacaga

SEQ ID NO: 41825 - DNA, 295 bp, Zea mays
aagttctgtgagataaagttagcacttagagaatggtgtgaaagtgccaatatcactatagcttctatggccgaagcaatgcagaaaaaatatgataagtattggaaaaagtccaacatagctcttgcagtggcttgctttcttgtatctaggatcaagaaaaaattggtagaatatttcatgttgaagatttataaggacagtgctgtcgcagaactcactcgctttatggatgttgtgaaccaattattccaatcatatttgagcagtacacgtgatgtttctattactcaaa

SEQ ID NO: 41826 - DNA, 290 bp, Zea mays
ccggagcgcggaggaggcacaggcgccgatctagagacgatggccgccgcgggctcctcgccgtccttctcctcctcgagtaagcgactggaagggaaggtggccctcgtcactggtggcgccaccggcatcggcgaggccatcgttcgcctcttcatggagcacggcgccaaggtctgcatcgcggacatccaggatgaggccgggcagcagctgcgcgacgccctgggaggtgacgcgcagggcgccatgttcgtccactgcgacgtgacgtcggaggaggacgtgag

SEQ ID NO: 41827 - DNA, 291 bp, Zea mays
accagctcaaccttattatcgcgaaatgtacccggatcgaaatccatttgcttacccctcagggcctccagccgatgcttgatgtgcctatatatggaagaattgcaacgattgagctcttccggcctcataatgagactcaggactttcttttcattgctacggagaggtacaaattctgtgttctgcaatgggatgcagaaaagtcagagctaatcaccagagccatgggtgatgtttctgatcgcattggccgccctactgacaatggacagattggaatcattgacc

SEQ ID NO: 41828 - DNA, 289 bp, Zea mays
gacaccctctgctcctctcaccctcacgctccaaggcggcggcgccatgcacggcggaggcgcggcctcgcccgatgccgccatatgcatctccccagaagctgggcccatcgtcggggtcgcccccgccgggatcagggtcgaaaactgctacgtgttcaagagccggctgcaggagtatgctcagagggttggcattccaaccccggagtaccacacgctgaaagaaggcccatctcatgaacctgtcttcaagtccacagtgttcgttaataataccaagtatgag

SEQ ID NO: 41829 - DNA, 291 bp, Zea mays
gcgactttatttcaagaagacagaagaagggagagtcgtactgaggtgtaagaatggcgagtgcacaggcagtggggcaaggagaacgaggccacttcgttctgaagagcggacacaccattccggccgttggtctaggcacttggagggccggctcagataccgctcactctgttcggaccgccatcgccgaggctggatataggcacgtggacacagctgcccaatacggagtagagaaagaggtcggtagaggacttaaagctgcgatggagggcgggatcaacagga

SEQ ID NO: 41830 - DNA, 285 bp, Zea mays
cgagaagtttactgacctcatggttaaagacgagaagacaggcacatgctaccgtgctgaccacttgttgaaagatttttgcaaggagaagcttgagaaagaccttgccttgccccaagagaaggctgatgaatttaagcgtattcttgccattttggatgacctctcagcagaggaacttggtgcaaagattaaggaatacggcattgttgcccctgatacaaaaaatccgctttctgatccctacccattcaatcttatgttccagacatctattggccccac

SEQ ID NO: 41831 - DNA, 283 bp, Zea mays
tcccgttctccgccaccgccaatcccctcccgtcctccgccacctctgctgagagcgagaagagatggccggcaagggtgatgggccggcaatcggcatcgatctcggcacgacctactcttgcgtcggtgtgtggcagcacgaccgtgtcgagatcatcgccaacgaccagggtaaccgcaccacaccctcgtacgtcgccttcaccgactccgagcgcctcatcggagatgcggccaagaaccaggtcgccatgaaccccatcaacaccgtctttgatgcc

SEQ ID NO: 41832 - DNA, 281 bp, Zea mays
gacctttgatatgattgaagagattgcggaaaaggaagataaggaggactataagaagttttgggagagctttggcaagtttgtcaagcttggttgcatcgaggacacagggaatcacaagcgccttgctccattgttgcgcttccactcttctaaaaacgagggagatttgataagtcttgatcaatatgtagagagcatgcctgaaagtcaaaaggcaatctactacatcgctacagatagtctccagagtgcaaagactgctcctttcctggaaaagc

SEQ ID NO: 41833 - DNA, 280 bp, Zea mays
catcgagccgattcggctcgagcggctcgagatgcattcaggaatacgaaaaagcaggatcgctcttcatgcggttctaacacaccttcaagtagtgatgtagatgcgggcaatgttcctgaggaggacaatgctaatgagaaggcgaacaagcctcctgcagcaactcttcagctggtgacactaaccaccgcagatttagaagcaatggaagcacaagtgattcatggaaggaagtttccgaagagggtcgtctggctttcgatgcgctgttcagtag

SEQ ID NO: 41834 - DNA, 278 bp, Zea mays
gttctagatcgcgagcagccgccctttttttttttttttcttcatatatgggctgctatgggctcaatctacaaggtatgccgtggcccaattcatcaagctttgcatagatcttatctgaaagaggatgtgaatcgtccccaacatagaacttgtggaccttatcatcaagctcaacccagctagaggcagcgaccttctcaatcccctttgccttcatttccaacctaagctttgcagcatcttcccatcttccactgttcgagtaaatgttagaa

SEQ ID NO: 41835 - DNA, 279 bp, Zea mays
cgacgaaaccctcgccagtccccaactcgaacctcagtcaggcagcgtgaggagggagagttcaaggaccgaggcggcgtcgggcgagatgaagcttaacgtcaagaccctcaagggcaccaacttcgagatcgaggcgagccccgatgcatcggttgctgatgtgaagaggatcattgagaccactcaaggtcagagtacctaccgggcggaccagcaaatgctcatataccaagggaaaattctcaaggatgaaaccactttggaaagcaacggagt

SEQ ID NO: 41836 - DNA, 275 bp, Zea mays
cgcacctgagcttttcatccaccttgtcccagacaaggccacgaacacgctctccatcatcgacagcggcatcggcatgaccaagtccgaccttgtcaacaacctcggtaccatcgccaggtccgggacgaaggagttcatggaagctcttgctgccggcgctgatgtgtccatgattggccagttcggcgtcggtttctactctgcctacctcgtcgccgatagagttgtcgtgaccaccaagcacaacgatgacgagcagtacgtgtgggagt

SEQ ID NO: 41837 - DNA, 327 bp, Zea mays
caactcgccgtctgccttgtgcgcctccatttcggcctctgtcccttgcaagttcaatctcacctccaaccatgggtaaagagaagtcccacatcaacattgtggttattggccatgtcgactctggcaagtcgaccaccacaggacaccttatctacaagcttggaggcattgacaagcgtgtgatcgagaggtttgagaaggatgctgctgaaatgaacaagcggtccttcaagtacgcgtgggtgctcgacaagctcaaggctgagcgtgagagaggtatcaccattgatattgctctgtggaagtttgagaccacaagtacta

SEQ ID NO: 41838 - DNA, 328 bp, Zea mays
  unsure (1)..(328): unsure at all n locations
gaacgagaaggtgttcctggccggcgccgacaacgtgctgcagaagctcgaccgggtcgccaaggcgctgtcattcgcctccaaggcggaggaggtggacgaggtgctcggctcgcggcgcagaaggggttccttcctggccccaaggagagcggcggccacgaggagcgggagcaagaggaggaggaggaacgcgaagaacgccacggcggccgtggggagagggaacgccacggacgtgaggagcgggagacagatgaggaggaacgcgaaggacgccacggccgcgggcgccgcgangaggtggcggagacgctcatgaggatgg

SEQ ID NO: 41839 - DNA, 323 bp, Zea mays
ggctcgaggaagaagggcctcctgtatcctctcacttccctcagtcctcgtccgtctgctccctcctctctctacctagctctgagtagccttcctgtagcgcggcagagatggctgcccctgcctccaccacggcggcggcggcggcagcgctgctgctgctgctcctcctgtcgctcgccgcggcggcggacatgtcgatcgtgtcctacggggagcgcacagcgaggaggcgcggcggatgtacgcggagtggatggcggcgcacggccggacctacaacgccgtcggcgaggaggagcggcggtaccaggtgttccggg

SEQ ID NO: 41840 - DNA, 198 bp, Zea mays
cccgagcatatcacagtgacagacacgattgtgatctcctgaatcgttgtcctcctcgctaccctcctatgcgctgccgccgcagtcgcgtcgtcctgggatgacgacaaccaccaccaccacgggggccacaagtccgggcaatgcgtgcggctgtgcgaggacctgctctggcatcagcgccccctggtgccggag

SEQ ID NO: 41841 - DNA, 308 bp, Zea mays
gcctcgtcatcaagtcgtgggcgccgcaagcggacgtgctcagcaaccccgctgttggcgcgtttgtcacccactgcgggtggaactcgtcgcttgacgccatcacagcgggtgtgccgatgctgtgctggccacagggcgcagagcagaagatcaacaaggtacttatgaccgatgccatgggcatcgggctggagctggatgggtacaacacaggtttcatcacggctgaggagatagagacgcaggtgaagcttctgctggagtccgatgaggagagtggattatgacacgggcggcagacgtga

SEQ ID NO: 41842 - DNA, 188 bp, Zea mays
  unsure (1)..(188): unsure at all n locations
cataagacatataactcctataagcatttctagtttgtctcctatcatgatacaaaaacgcatggttctttttagcactagtagtcatagggaccttcaatatctccttaacgtgtttnagagccttatggcttattaagttcttagcatccatcttgaagacaagtccatccttaattgaggggtgt

SEQ ID NO: 41843 - DNA, 313 bp, Zea mays
gaccggcgaagtgcacgacgtgattctctttttcgggataattgacatccttcaggattacagcgtcaaaaagcggctcgagcatagttacaagtcattgcagacagaccccaactcgatctctgccgtggaacccaagctctactcgaggaggtttcaagagttcatcggcagaattttcgtggaagatggctaacacgcattgggtacagattaaccggtggagcagcagctcatcggcggctaggtaactaaccgtgaagcctcgggtcagcggtgaaggggatctgagttcgaagcaaacttgccccga

SEQ ID NO: 41844 - DNA, 310 bp, Zea mays
tgcgcggcggggcagaagtactacgggcgcggcccgctgcagatctcgtggaactacaactacgggcccgccgggatggacatcggcttcaacgggctcgccgaccccaacagggtggcgcaggacgccgtgatcgcgttcaagacggcgctctggttctggatgaacaacgtgcaccgtgtgatgccgcaggcttcggcgccaccatcagggccatcaacggcgccctcgagtgcaacgtgaacaaccccgcccagatgaacgcgcgcgtcggctactacaagcagtactgccgacagctccgcgtcga

SEQ ID NO: 41845 - DNA, 189 bp, Zea mays
ctcgagccgcgatcggcaagatgatcaccggcacggacttctaccacgtcatgacggccatagcgccgttgtacgttgccatgatcctggcgtacggatccgtcacgaggtggcgcatcttcacgccggaccagtgctcggggatcaaccgcttcgtggcgctcttcgccgtgccgctgctgtccttcc

SEQ ID NO: 41846 - DNA, 295 bp, Zea mays
ctcaagcttggcatccatgaggactcgcagaacaggggcaagattgctgagcttctgagataccactccacgaagagcggtgatgagctgaccagcctcaaggattatgtgacgaggatgaaggagggacagaacgacatctactatatcactggtgagagcaagaaggcagtggagaactcccctttcctggagaagctgaagaagaggggctacgaggtcctgtacatggttgatgccattgatgaatatgctgttggtcagctcaaggagtttgaaggccagaagcttgtct

SEQ ID NO: 41847 - DNA, 313 bp, Zea mays
atcaaacacacacacaaccagatctcccccaaatccacccgtcggcacctccgcttcaagatgcagatctttgtgaaaaccctgactggcaagactatcaccctcgaggtggagtcgtctgacaccattgacaacgttaaggccaagatccaggacaaggagggcatccccccagaccagcagcggctcatctttgctggcaaacagcttgaggacgggcgcacgcttgctgactacgacatccagaaggagagcaccctccaccttgtgctccgtctcaggggaggcatgcagatctttgtgaaaaccctga

SEQ ID NO: 41848 - DNA, 264 bp, Zea mays
acctacctgaacacctacgacgaccgcaccatccgctaccccgaccctctcatcaaggccaacgacaccatcaagatcgatctggagaccaacaagatcatggacttcatcaagttgtatttgccctttcatagacttcatcaagttatatacttagttaggctcaatgttagcacaaacagttgatgagcaagtttaaatttagagtacacttatgtatgagttattatttgacaatacttatttatgagatattgaatatta

SEQ ID NO: 41849 - DNA, 303 bp, Zea mays
acgttcgtagctgtctgcgtagtgtaccttggccgtagctagtgctactctctactttggagtagctgaatgataataatgtagctagcagcatgcatgtaggcgatcatacatacgtacgtacacaggtacgtgtgtgtgatcatgtatgcttccagaagggtatcctagcttaatcagtcacgtcgtcaagtcgtcaatatggcaggttcgcgtcagggctttgtagtttgatagcctgtttcacgactcctcaataatcaagtagtgtaatgaaagtttggcggttccttgttattaaaa

SEQ ID NO: 41850 - DNA, 309 bp, Zea mays
aaaggatccctgccgtccaggagttcgagattctgttcgtttatgtcaggcagctggcattaaggtgcgcctggttactggtgataatcttcaaactgcgagagccattgccctggaatgcgggatacttgatgatcccaatgtgttggagcctgtcatcattgaaggaaaagcattccgggtgctgtcagacttagaaagggaggaagctgctgaaaaaatatctgtgatggggaggtcttcaccaaatgataaacttttacttgttaaggcactgagggcaagaggtcatgttgttgctgttactgg

SEQ ID NO: 41851 - DNA, 304 bp, Zea mays
ccattcctcctccggatttcgcagtcagcggtggtgaaggtagcgggcgcagaggaagatggggctcgcgttcgggaagctcttcaaccggctcttcgccaagaaggagatgcggattcttatggtcggtctcgacgccgccggtaaaaccaccatcctctacaagctcaagctcggcgagatcgtcacaaccatccccaccatcggtttcaatgttgaaactgttgagtacaagaacattagcttcacggtctgggatgtcgggggtcaggacaagatcagacctctctggaggcattacttc

SEQ ID NO: 41852 - DNA, 304 bp, Zea mays
cacggagggtactcagagccaatgggatggaaaataaggtcaaagtatttcacaagcgatcagatgagctcggagttggagtcgagcttgattctcgacctgatatattggtaagtgaaattcttgattctgagctgctgggtgagggtctcatacctactctacagcatgcgcatgacatgctattggtgaaaaatccaaagacagttccatatcgagctactacttatggagtgttggttgagagcacgtccttgtggaagatgcatgatctgcacagcaatgaagcaaatgctgaagatgg

SEQ ID NO: 41853 - DNA, 303 bp, Zea mays
gctgaagggcctttagctcttccgtggccaggatgttcccaagtttgtaatggacgaggtctatgacatggagctctacgagtggaccaaggtggacatctctgatgaggcccagaaggagcgtgtcaatgcgatgattgaggaccaggagccctttgagggcgaggccttgcttgacgcgaaatgcttcaagtgagtgtgcttgcctggagacagaactgtttagcccttgaatttgcctatggaagagtttgcccttttactagtgtcgatgttgatctggtataccttgctatgaactgg

SEQ ID NO: 41854 - DNA, 298 bp, Zea mays
ctctcgcggaaccacgagacttttggacgctccgatacactagtggtcttgacgatggcagtcttgtgatctgcgaaaggtcattgactcagtccactggaggtccttctggacctaacactccaaattttatcagagctgaggtgcttcctagtggttatctgattcgaccctgtgatgggggaggttccatgatttacattgtggatcatgttaatctgaatgcttgtagtgtgcctgaggttcttcggccactctatgaatcccctaagatactggcacagaagatgactgcggc

SEQ ID NO: 41855 - DNA, 298 bp, Zea mays
gctttccatatgccggcacgcacttcctgcactcccaatctctattatgctgggagtgacattctacttcttgacacggttgctgatggagccatttgtggttggtgcttcaacaaatttggtgatgttctgacttttcactgatctgctgttgcatttacatgtggatgaagccctcaaccaaaagaaagttgttggtcagcaactcagcattctatgtgagagtgactaatattttgttggttacttatcgtaaactgtcatttgtatttattgctaggagtgctcaagaccatag

SEQ ID NO: 41856 - DNA, 301 bp, Zea mays
ccctctccgaaatcaaggtagcgtacaccgctgcagtttctagagccctctctgccactcgtgatcccactagtcacaatgcctgccctcgccaagcccgcctcccgcaccgccaagcccgccgcggctccgaagccgaagcctgccgccgccaagccgaagcggtccaccgctggtgcctcccacccgccttacttcgagatgatcaaggaggctatcacggcgctcaaggagaggaccggctccagctcgcaagcgatcgccaagtatgtgggggacaagcacggcgcgtctctgccgg

SEQ ID NO: 41857 - DNA, 298 bp, Zea mays
aggaagacagactcaaggctgcctacaaagccacaactgagggcaggttcccagaagcactgaggcagttccttagcatcttacatacgattcctgtaatcgttgtagactcacggagagaagttgatgaagtgaaggaattaattgagatagtgagggagtatattcttggtctgaagatggaactcaagagaaaggaattgagggatgatgtgacccgccaacaggagttggccgcttacttcacaaattgcaagcttcagagaattcatatgaggcttgtgctttctagcgccat

SEQ ID NO: 41858 - DNA, 294 bp, Zea mays
gcaacccgagggctctccggaggctgaggacctcttgtgagagggccaagagaactctgtcttccactgcccagaccaccattgagattgactcgctgtacgagggcattgacttctactccaccatcacccgtgccaggtttgaggagctcaacatggacctgttcaggaagtgcatggagcctgttgagaaatgcctgagggatgccaagatggacaagagcagcgtccatgatgttgtccttgttggtggctccactaggatccccagggtgcagcagctgctccaggact

SEQ ID NO: 41859 - DNA, 292 bp, Zea mays
acggaagtcacagctgctcttcgcatcaccgatggtgctctggttgtggttgattgtattgaaggtgtctgtgtgcaaactgaaactgtgcttcgccaagcccttggtgagaggattaggccagttcttaccgtgaacaagatggacaggtgcttccttgagcttcaggttgagggtgaggaagcttatcagactttctcccgtgttattgagaatgccaatgtcatcatggcaacatatgaagataagctccttggtgatgtccaagtatacccagagaaggggacagttg

SEQ ID NO: 41860 - DNA, 288 bp, Zea mays
agtatgtcctggtgttcgtcgtgtgtgttcatcgccgctccagttgaattccggtgtctgttcatcgccgctccaggtcgtagatgtgaatatactttgctaggggaataagtgataagtctgtctggaaggtaatgtttgagctttgctagtgtggctgggcactctggtcactggttgtgttgtgcatgcatcagctgtatgatcgtcgtctgttgtggaaaattggtcaatgtattctcttgctgaataatttgtgacatctaaaaaaaaaaaaaaagggcggcc

SEQ ID NO: 41861 - DNA, 295 bp, Zea mays
gtccgctgtgattgccgcgcacagacttgccccgccgacctcgacagcaaatgcgatggtggcgcgtctgatgatgattcggagggggagttcttccccggcgtcccgaaaatcaagtatgagggtccaacaagcaagaaccctcttgcttataagtggtataacaaggaggaagtgattctcggtaagaagatgaaggattggatgcgcttcagtgttgcattctggcacacgttccgtggtactggcgctgatcctttcggtgctcctacaaagacttggccttgggaggacg

SEQ ID NO: 41862 - DNA, 310 bp, Zea mays
ctcgtctctattgcttctctgccggagctcctacaacctcgcctcgcgcagcactccgctcaccctccctgactccctccctgccgctgggatggccggcaaacgagttacgggccgcgatgggcaagacgagggcggcgccaaggccgggctcccggcgatggacatctccctcgcgttcccgcacgccacgcctgcctccattttcccgccgtccgcttcggattattaccagtctgatgatttgctgaccagtgaagagcgctctatcaggatgaaggtcaggggtattatggaaaaagaaattgct

SEQ ID NO: 41863 - DNA, 305 bp, Zea mays
agatgatggaattgactggtcttctaatcaaaatttgataaaccagacatcattgaaacctgtggatctccctatttgttcttttgctgctgctggtaattgtccttatggggaagggtgccctcaaatgcatggagatctgtgtgcaacctgtggaaaactgtgcttgcatccttatcgtcctgatgagacggaggagcatatcaagttatgtgagaaaaatcacaaacgccttgtagctctgaaacgcagccaagaaatagaatgcagtgtatgtttggatcgtgtgctttcaaagcctactg

SEQ ID NO: 41864 - DNA, 294 bp, Zea mays
ggaagaacccaagaggaatacttatttctccagggcctggtgaaccacaagattcagggatatcattgcagactgttcttgaattaggcccaaccatcccaattttcggagtttacatgggcctgcagtgcattggggaggcatttggaggaaagattatccgtgctccttctggagtgatgcatgggaaaagctctccagtttattacgacgaggaattaggcaaggcattattcaatggcttgccaaaaccttttacagcggcgaggtcacacagcttagtcatttagaaag

SEQ ID NO: 41865 - DNA, 301 bp, Zea mays
aaaatttgctgactagattggtcgaacaaagcagaagaaaattcgtgtgacttcagaataacaatccctgaaatactggaggatgagtggttcaaaaagggctacaagcgcccggagtttgacgagaaatatgacacgccattggatgatgtggatgctgtcttcaatgactcagaagagcaccacgtgacagagaagaaagaagaagaacccgtagctctcaatgcatttgaactgatttcaaggtcagcaggcctaaatcttgggaacctatttgactcggagcaggaattcaaaagag

SEQ ID NO: 41866 - DNA, 298 bp, Zea mays
aaaaaaaacaaaaagggtaccggaagccgcgaaacctcgccccccgccgctctcgcatcgtctccggagcgcacgtcagatcaggtgtgccgcgcccccctcgcctaagctgcgacgaccatccatcgaacaggatggatgacgggctccatggatctcccggccaagggcgggttcagcttcgacctgtgccgccggaacaacctcctggagaagaacggactcaaggtcccgggattcaggaagaccgggacaaccatcgtcggcctcgtctttcaggatggggttgttcttgggg

SEQ ID NO: 41867 - DNA, 305 bp, Zea mays
gccgaggggatggtacttggtgcctgtgagcattaccgagaagctgccatactgtgtccatctcatgccagggcactcaagctcctggggagcgctctctttggcgttggggagtaccgagctgctgaggaagcactggaggaggccatcttcttgaaggaagactatgctgatgcgcactgtgaccttgggtccgctctgcatgcagtaggggaggatgaccgtgccatccaggagtttcagacagcaattgatcttaaacctggccatgttgatgccttatataatcttaggtggatgaacat

SEQ ID NO: 41868 - DNA, 301 bp, Zea mays
gttcgggggctttcctctgatgtatcttctgaagatctcaaacaactatttgaatctgttggagaagttgcagaagtgcgaatgcgaggaaagggggataacaagacatatgcttttattaatttcagaactaaagagatggctttaaaggccatccaaaagttgagccatagagacctaaagggaaaaaagataaaagtttcatcctctcaggctaagaataggctttttattgggaatgtaccccatgattggacacctgatgatttcaaaaccgcagtggaagaagttggtcctggag

SEQ ID NO: 41869 - DNA, 297 bp, Zea mays
agttggtgttattattggaaaagctggggaaactattaggtatatccaacttcaatcaggagcaaagattcaagttacgagagaccatgaagctgaacctggtgcactgacaaggcaagttgagctttctggcaatcctgagcagataagcaaagctgaacagttgatcaaagaagttatagcagaggctgatgctgggtcatccgatgctgtatctggtggccggaaatacaatgcaccacagccaggcgctgagacattccagatgaaaattgctaataataaggtgggattgat

SEQ ID NO: 41870 - DNA, 299 bp, Zea mays
cggtggaccttcggtcgccgtcctcgcaagcagacccgccgcgcccagcgcggagggatgctttggatggctcgatcgtagcggctacgctggcgcatgagttgtcttggacccgtgactgcttggaggacccccgctgccgtgcggccgactcccggcgcccgtgtcccatcgctcgtgcgggcatcccgtgcctgctgcgttgagaagtgcttgcgtgctgctacccgtcccacgggaagccgtgctcgatacacgttgccttcgtcgagctcaccccccggggtgcggctcgtcgg

SEQ ID NO: 41871 - DNA, 294 bp, Zea mays
gcctcgggtcaaaccctaagcagggagttgatttatccgctgcagccatgagtaagttgcagtctgagtctgtcaaagatgcgatctcccagattgttggggatgccaaggagaagaataggaagttcactgagactgtggaacttcagattggtctgaagaattatgatccacagaaggacaagcgtttcagtggctctgttaagttgccccatatccctcgtcccaagatgaaggtgtgcatgcatggtgatgcccagcatgttgaggaggccgagaagatgggacttgact

SEQ ID NO: 41872 - DNA, 296 bp, Zea mays
gttgactctgaggaccttcccctcaatatctctcgtgagactcttcagcagaacaagatcctgaaggtgatcaggaagaaccttgtgaagaagtgtgttgagctcttctttgagattgctaagaacaaggaggactacaacaagttttacgaggctttctccaagaacctcaagcttggcatccacgaggactcgcagaacaggaccaagatcgccgagcttctgagataccactccaccaagagtggtgatgagctgactagcctcaaggactacgtgaccaggatgaaggaggg

SEQ ID NO: 41873 - DNA, 298 bp, Zea mays
caactctccgatctccaggaatccgcggctgacgcgccggcgatggcggctcccatggtcgacgccgaatacctgcgccaggtcgacagggcgcgccgccacctccgcgccctcatctccaacaagggatgcgccccgatcatgctccgcctcgcatggcatgatgctggaacttatgacctgaagacaaaaactggtggtgcaaatggttcgattagatatgaagaagagtacactcatggttcaaatgctggtttaaagattgctatcgatctccttgagcctatcaaagcaaaga

SEQ ID NO: 41874 - DNA, 289 bp, Zea mays
catcctctcactcctctcggacccccggtggccggtgcagagctgcgcgaccgagaaccgaatctgtgagccatgtcgaccaacaagggcagcgcggccaagggcggcggagggaagaagaaggaggtgaagaaggagacgaagctcgggatggcctataagaaggacgacaacttcggggagtggtactccgaggttgttgttaacagtgaaatgattgagtactatgacatttctggttgttatatattgaggccatgggcgatggaaatctgggagctactgaaag

SEQ ID NO: 41875 - DNA, 288 bp, Zea mays
caagaaccagatcgccatgaaccccatcaacaccgtctttgacgccaagcgtctcattggcaggaggcttagtgatgcccctgtccagagtgatattaagctgtggcccttcaaggtcattcctcggctcggtgagaagccaatgatagctgttcagcacaagggggaggagaaacagtttgcagccgtagcgatctcctccatggttctcatcaagatgcgtgagatcgctgaagcttaccttggcagcacgatcaagaatgctcattgtcacggaccctgcctact

SEQ ID NO: 41876 - DNA, 289 bp, Zea mays
gaggatggcttactatgtcgtcgcggagtgctgtttggtcactgcagtgagggacgggatgaacctgatcccatacgagtacgtaattgctcgacaagggaatgagaggatagatagtattctaggccttggtccggcttcaaggaagaagagcatgcttgtcgtgtcagagttcatcggctgctcgccctccctgagcggcgctatccgtgtgaacccttggaacatcgattcagtagccgacgcaatggactacgcgctggagatgccggatagggagaaggtgttg

SEQ ID NO: 41877 - DNA, 287 bp, Zea mays
catatgccttatccctgtgcacaattgttgacaacgcctcaacaggatccccgttgatttgtatatccagctttactagtcggaagggcacttactcaaaagctcaaggaacttatacctcggcaaatgtttagagttcctattcaagcatgtattggcacaaaggtgattgcaagcgaaccctgtctgccatcaggaaggatgtcttatcaaaatgctatgggggtgatatatcaaggaaaaagaagttgctgaagaagcaggctgaaggaaagaaaaggatgaag

SEQ ID NO: 41878 - DNA, 263 bp, Zea mays
atcagccgccgccgtcaccaccaccaccttggtagccgccgccgaagcgcgccgcgggcgacggcgcttaagcgatggctaaccgcacggaccccctcgcgaagagcatccatgggacgaacccacaaaacctggtggagaagatcgtgcgctccaagatctaccagagcacctactggaaggagcaatgcttcggcctcaccgcagagacgctagtcgacaaggccatggagctcgacaacaccggcggaatctacggcggc

SEQ ID NO: 41879 - DNA, 308 bp, Zea mays
agcaaagtatgacatcaagctgaacaatgccattctcgctgaggagaagcacttgcctatgtatgatgagttggctagcaacagcaatgttgaatatattgctggaggagccacccagaactctatcagggttgcccaatggatgcttcaaactcctggtgcaacaagttacatgggatgcattgggaaggacaagtttggtgaggagatgaagaaaaatgctcaagctgcaggagttactgctcattactatgaggatgagactgctcctactggcacatgtgctgtatgtgttgttggtggtgaaa

SEQ ID NO: 41880 - DNA, 308 bp, Zea mays
tgaggattttcgcgcaggaggagctgaaagaagtcacgcacaattactcttgtctactcggtggaggtctttcaggcaaagtctacagagggacactcgaggacaacgcagtggtcgcggtgagagtgttctctgaagtgctcgagggcttcgaggaagcgtttgtcaatggcgggatgatcctgtctcagatatcccacaggaacgtcgtaaaactcttggaaaactgcttgaacgccgattgcccggcgttcgtgtacgagtacgcagctagaggcagcctatccgatgttctggacaggcacgag

SEQ ID NO: 41881 - DNA, 223 bp, Zea mays
acaaaacccagtcctttgttcttcccccggcacgcctagcgccagtcaccaaccttccactccctccctccgtcgccatggcgcgcaagaagatccgggagtacgactccaagcgcctcctcagggagcacctcaagcgcctcgcgggcatcgacctcaccatcctctccgcccagatcacgcaatcagcggacttcgcagagcttgtgagccagcagccata

SEQ ID NO: 41882 - DNA, 228 bp, Zea mays
ccataaccacaacctcttctcccctgtttcctctcgtgcgttctccgcagagcgaggagggctcgcggcagcggcagggtctccggtgtttttgttccagaatctgtagcaaatggctgacggcgaggacatccagccccttgtttgtgacaatggaactggcatggtcaaggctggttttgctggtgacgatgcgccaagggctgttttcccaagcattgttggacg

SEQ ID NO: 41883 - DNA, 276 bp, Zea mays
gtgtgggcaagcacaaccaacggaaacaagaagcttgatgctgcttaccaagaagctcagtcaaagggatctgcatgccctatattcttgttcttctcagtgaatacaagtgggcagtttgttggtgttgctgaaatgactggcgccgttgattttgagaaaaccctagagtattggcaacaggacaagtggaacggctccttctctgttaagtggcacattgtcaaggacgtgcccaacaatattctcaagcacatcatcctggagaacattgag

SEQ ID NO: 41884 - DNA, 302 bp, Zea mays
tgcgaggccgagcgccggatcgcgggcaacctcaacatggagtaccttccgatgggaggcagcatcaagatgattgaagagtcactgaagctggcgtacggagaagattctgacttcatcaaagataagaggatagcagcggtgcaggcgctttcaggcactggtgcctgccggctctttgctgatttccaaaagcgttttttgccggattcgcagatctacataccaacaccaacgtggtccaaccatcacaatatttggagggatgctcaagtgccacagaagacattcacatactacca

SEQ ID NO: 41885 - DNA, 234 bp, Zea mays
cgcaggatgcgttcaagcggttcggcgcgcggctgaccgagatcgagaaacgcgtcgtcaccatgaacgcggaccctcgcctcaagaaccgaaacggcccggccgagttccactacacgctgctctaccccaacacctccgacacgaacggcgacgccgccggcatcaccgccaagggcattccaaacagcatctccatttgagttctgtctgagatgaggacgtacgtcgtcg

SEQ ID NO: 41886 - DNA, 239 bp, Zea mays
gctgactgtgacagatgatgatgttatagagaaaagcaatctcagtcgccagtttctattccgtgactggaacattggacagcccaagtccacagttgctgcaactgccgctatggcaattaatcccgagcttcatgtggaggcccttcagaatagagcaagtcctgagactgaaaatgtgtttaatgatgccttttgggagagcttggatgctgttgttaatgcattggacaatgtca

SEQ ID NO: 41887 - DNA, 255 bp, Zea mays
  unsure (1)..(255): unsure at all n locations
ggaggaggctgagacccgagcagagtttgctgaaagatctgtggcaaagttggagaaaaccatcgatgacctggaagatgaagtctatgcgcagggggggggagggangccatcagcgaggagctggacaacgcgctcaatgacatcacttccctctgagttcccactgtggccatcgcaggcgcctttcttgtttgtccattctctctgagggaagggggcagccagggggagcacaaactggccatgttgcac

SEQ ID NO: 41888 - DNA, 300 bp, Zea mays
ctcgagccgaatcagctcgactcgagtgcaacgcaacgttggcgcttggcggccagtagtagcagcaaccttagcgtcgctccttcctactagacgagagatcgagaaaccatggccaagctccaagtcactcctggcgccgcgttcaccgagtgcaatgaactcaacttccagggcctgtacatgtaccacacgcccctgggtcccaaggccaaccaagctgcgatcctagagagcaaggccaagatcgtcatcggtgccaccgtggttaacaaactgggcattgtatgacgggccagg

SEQ ID NO: 41889 - DNA, 289 bp, Zea mays
gaagccatcgtccccgtcccagcctccccggactccaggggcaaaagctgcagcgtcgagatggtgaaggggcgcacggggcagcgcgtgaggctctacgtccggggcaccgtccttggatacaagcggtccaagtcgaaccagtacgagactacgtcgctggtgcagatcgagggggtgaacaccaaggaggacgtcgcgtggtactgcgggaagcggatggcctacatctacaaggccaagaccaagagcagcggcacccactaccgctgcatctggggcaaggtcg

SEQ ID NO: 41890 - DNA, 289 bp, Zea mays
acggcatcgacgaggcgaaaccctagcgcccgagtccctctccctgctcccacaacccatggcggcggatatggcgtacgcgccgccgatgaaggctggcaaggccgggttcgaggcaggcatgatggatccacagcacaggatccgcatcacgctctcctccaagagcgtcaagaacctcgagaaagtctgcggggatctggtgaagggcgccaagggtaaggagctcaaggtcaagggccccgtgcggatgcctaccaaggtgctccacatcaccaccaggaagtct

SEQ ID NO: 41891 - DNA, 257 bp, Zea mays
tagacatcaagggaatgggtactgttcaaaaaggaatgccccacaagtgttaccatggcaaaactggaagagtctacaatgttacccagcatgctgttggcattgttgtaaacaaacaagttaagggcaagattcttgccaagagaattaatgtgcgtattgagcacattaagctctctaagagccgagatagcttcctgaaacgtgtgaaggaaaatgatcagaaaaagaaagaagccaaagagaaaggtacctgg

SEQ ID NO: 41892 - DNA, 309 bp, Zea mays
gagttctcccctccaacaattgatgttcctgaattgtcattggatgatttgaaacaaaagactgatgattttggatcaagtgctctgattggtgaaggttcttatggacgagtatatcatgccgctttagatgatgggaggcaagccgcagttaaaaaacttgatgcatctgaaaatgagcctaatgatgagttcctcaaacaggtctcactggcatcaaagctaaaacatgaaaatcttgttgagatgttgggttatagtgtggatgggaattatcgtatacttgcttatgagattgcagccatgggg

SEQ ID NO: 41893 - DNA, 306 bp, Zea mays
ccgatggaaagctttgggttggggaatctggtaatgaaaatgaacagggagaagatgttattgctatcctgccctgggaggaatggtgggagtttgaagtgacaaaggatgactcaaatcctcagattgcactgcttcctttgcatccagatctgcgggcaaaatttaatgagacagcagcttggatttatgcaaaaagcatggaggggaaaccttatgggtatcacaatatgatatttagctggattgataccatcagtgataattatccaccaccattagatgctcatgtggttgcttctgtta

SEQ ID NO: 41894 - DNA, 297 bp, Zea mays
attgggcacaattattatgataagtctctttgggagggcctatcaagatctataccgtcacttcagaagggtccgggcaaagatgatgaaaatgaaactggatttgctgttgatgcttcagagatggggaactttgcaaaatttatcaatcacaattgcaccccaaacatatatgcacaaaacgtcctttatgatcacgaagatatcagtgtgcctcatatcatgttctttgcttgcgatgatattcgacccaatcaagaactagcataccactacaattataaaatagatcaggtt

SEQ ID NO: 41895 - DNA, 296 bp, Zea mays
aagccaaccggctcgtccgcccgttgcctgtcgtcgctatggccgccgtggaggtgtgcgtgaaggccgccgcggggaaccccgacacgctcggcgattgcccgttctcgcagagggtgctgctcacgctggaggagaagaaggtcccgtacgaggtgaagctcgtcgacctcggcaacaagcccgaatggtttctgaacatcagcccagagggtaaggtgcctttgttcaacggtggagatggcaaatgcattgctgattctgatgtaatcacccaagtcattgaggagaattcc

SEQ ID NO: 41896 - DNA, 295 bp, Zea mays
aaaggttctaaatcttttgaagaagcccgagcagcaggattcaccgaagagagtgggacgctgggtgatatatgggagactgtatcaaacagtgatcttgttttgctactgatatctgattctgctcaggctgataactacgagaaaattttctcgcacatgaaaccaaacagtattcttggtttgtcacatggatttctccttggacatttgcaatctctgggttttgatttccctaaaagcatcagtgtgattgctgtatgccccaagggaatgggcccatcagtcagaagat

SEQ ID NO: 41897 - DNA, 295 bp, Zea mays
gctgaaaaagatggccctaaaggttattgcctcaaaccttaacgaggaagagatcaaggggctaaagcaaatgttcatgaacatggacacagacaatagtggcacaatcacgtatgaagaactcaaagcaggactagccaaacttggatcaaagctgtcggaagctgaagtaaagcagttgatggaagctgctgatgttgatgggaatggatccatcgactatgttgagttcatcactgccacaatgcatagacacaagctcgaaagagacgagtatttgtttaaggcattccag

SEQ ID NO: 41898 - DNA, 278 bp, Zea mays
cgcgtgcccgtctcctcagctaccgtcgtccggaaagatggcgtggcacattgttggataccctcggatgggccccaagagggagctcaagtttgcacttgagtctttctgggatgggaagagcaccgctgaggatctggagaaggttgctaccgacctcagggccagtatctggaagcagatggctgatgctgggatcaagtacatccccagcaacactttctcgtactatgaccaggtcttgacgacatgccatgcttggcgctgtccccgaacgt

SEQ ID NO: 41899 - DNA, 292 bp, Zea mays
gagaagatggaaagggatgtcaagttcttcacagagacagaggagaacaaccagatgctatgcccaaggaccgcagtcccatatttcctatgacttcaattgtacaattttagaagtctattcgaatctgtaagggctaaagatcaatcagatgtgtttattgctttaggtccagattatagtgcaatctgatgcgtttgatttctgttttcctttaaccacatgtacaatagaccatcgggacagtcatatgttcctgtaactctcggtgacactgccaaagttttgtttg

SEQ ID NO: 41900 - DNA, 288 bp, Zea mays
cacctgaaggagagcagcccggaggagggggagcaagcagcagccgtcggtggaagatgtcgtacctgctgccgcatctgcactcggggtgggcggtggaccaggccatcctcgccgaggaggagcgcctcgtcatcatccgcttcggccatgactgggacgagacctgcatgcagatggatgaagtgctagcagcagtagctgagaccataaagaactttgcggtcatctaccttgttgacatcacagaggtccctgatttcaacaccatgtatgagctgtacgacc

SEQ ID NO: 41901 - DNA, 288 bp, Zea mays
cggtccagtccgagggaagaaggcaagaagctcccggcgcgcgcgcgcaagcgagaggaaatggcgaccagcaacggctcaggggtcgcgcagggggaggaggggaagacgccaccgcctgcggggtcgatcggcgggtacgagtccctgcacaggctcctggaggccaacctttcccccgatctattccaggaagcaagtcgattgctgctgggactgaattgtgcacgacctcttgaggctatctcactgcctgacgccacaagccctcttgcggaaacacacagt

SEQ ID NO: 41902 - DNA, 268 bp, Zea mays
atcgagccgatgacatgaaggccaaggtggcggactttggattggtccggcttgcaacagctgatgggaagtgtgtctccgtagagacaagacttgctggcacttttgggtaccttgcaccagagtatgcagtcactggacgagtgaccacaaaagctgatgtcttcagctttggtgtcatcttgatggaactgttacaggacgcaaggcacttgatgagatcagcccgagatagcatgcatttagttacagggtccggagacgcagt

SEQ ID NO: 41903 - DNA, 286 bp, Zea mays
agaacggcaagcatcgggcgtccaagccaacgaagggctcgcagcgcgtgttagtgggcatggaaggcggagtgaaggaggaggagaagctcaacggcgggctgcagttcgaggtgtacaaccagggcatgctgaagacagagctctgcaacaagtgggaggagaccggcacgtgcccgtacggtaatcagtgccagttcccgcacggcatcggcgagctcccgcctgttatccgccatccgcgctacaagaccgaggtctgccgcatggttctcgctggcgttgt

SEQ ID NO: 41904 - DNA, 298 bp, Zea mays
gagaaaatctggcaccacaccttctacaatgaactgcgtgttgctcctgaagagcacccagttctgctgacagaagcacctctgaacccaaaggcaaacagagagaagatgacccaaattatgttcgagacattcaatgcaccagcaatgtatgttgctatccaagctgtcctttccctgtatgccagcggtcgcactacaggtattgtgctcgattctggtgatggtgtgacccacaccgggccaatctacgagggatacgcgctccctcatgccattcttaggctgatctggctgg

SEQ ID NO: 41905 - DNA, 307 bp, Zea mays
cgtaaaattagctacgaagaatttgtagcgatgatgaagactggaacagattggaggaaggcgtcgcggcattattcaagagggcgcttcaatagccttagcataaagcttataaaagatgggtctgtaaaactgggtagcgagtgacgttgtagcttgctgccgatgctcttctcctccacgcattgtagtctgcctctgcgggcccgctaagcagaaacccccttccgtttgctaatgattatcttgtctgggatttaggtagaatgtttatgattacctcaaaggcatggtgacttgccacagg

SEQ ID NO: 41906 - DNA, 310 bp, Zea mays
ctcagttgaaaagagctatgagctgcctgatggccaagtaatcaccatcggcgcagagagattcaggtgccccgaggtcctcttccagccatccatgattggtatggaggctgctggaatccatgagacaacatacaattcaatcatgaagtgtgatgtggatatcaggaaggacctctacggcaacattgtgctcagtggaggttcgactatgttccccggtatcgctgatcggatgagcaaggagatcacttcccttgcaccaagcagcatgaagatcaaggtcgtcgcgccacctgagaggaagtac

SEQ ID NO: 41907 - DNA, 283 bp, Zea mays
cagtgtctccctcttagtagtaccagctgacttggatatctcccaaggatcagtgctttatgatgttgatgaagctactgtccgtagtcttaatgggtgcagagtagcagaccaaatcattagacttgttccaaattttgagaattttcgcacggcattaagatgtttgaagtactgggcaaaaaggagaggtgtttactctaatgttactggctttcttggtggtgtcaactgggctttactggttgcgcgtgtctgccagctctatcccaatgctgtgcca

SEQ ID NO: 41908 - DNA, 254 bp, Zea mays
cagggatctagctaccctagtggttgcttatggcattagtatcaatcttgtcgaagtcacatggaaatcaaaactcaaggcacagttccctagtccaaatgaatactcatctttcatgggtgatttctcaaccgcaactggaattgcaactttcacgatgatgctgttaggacgtattatactacggaaatttggctggggtgtggccgcaatgatcacccccaccgttctgttgctaactggtgttggattct

SEQ ID NO: 41909 - DNA, 320 bp, Zea mays
atataataataagctaatagcagcgccacgcaccgacaccaatacgccatgggttccatcatggagcaacgctgcaacaacgatccgcaggcgctgctcgacgctcagctcgagctctggcacagcacgttcgcgttcatcaagtccatggcgttcaagtcggcgctggagctcggcatcgccgacgctatccactgccacggcggcaccgccacgctcacccagatagccaccaaggccgcgttccatccgtccaagacaccgtgcctgcgcagctcatgcgcgcgcttagagtcgccggcatcttcagcgtcgccaag

SEQ ID NO: 41910 - DNA, 255 bp, Zea mays
gcagataccaagctgcagattggagattgaggccccttcctgatgaaatgatcaaatatgctagagaggatacacactatctgctatatatatatgacctgatgagattgagactagtgaatgggtcatcatggaaatgatcttctttagagttgcaacgacaacgaattgcttcactgatagagacactgactgtatcattctaataatggtgaagaaaactatcacaactgcatcttcgagactatctcttca

SEQ ID NO: 41911 - DNA, 276 bp, Zea mays
gcaacaacaacaatgggagcgccaacggcacttctgtggctgacaagcgcttcaagacattgccgacgagtgagatgctaccgaggaatgaagtccttggtggatacatctttgtctgcaacaacgataccatgcaggaggatctcaagaggcagctttttggtttgccagcaagatatcgtgattcagtccgagcaatcactcctggcttgcctcttttcctctataactacacaacccaccagcttcatggggtatttgaggctgccagtttcg

SEQ ID NO: 41912 - DNA, 99 bp, Zea mays
cctggaggctgcccgaatttgtgccaataagtacatggtaaaaagttgtggcaaagatggcttccatatccgggtgcggctccaccccttccacacaac

SEQ ID NO: 41913 - DNA, 262 bp, Zea mays
gcaaaggggacatacctgctgatagcaggtttgccctagacaattacaagaacctggcgaacaggtccctggttgacgacacgcttcgaaaagtgaatgggctaaaacctatcgccgctgaacttggcgtttcgttagctcagctctcgattgcttggtgcgcgtcgaaccccaatgtctcgtctgtgatcactggagccaccaaagaaagccagattgtggagaacatgaaggccctagatgtcatcccactgctgacgcc

SEQ ID NO: 41914 - DNA, 315 bp, Zea mays
cactgccacccagaagactgttgatggaccctcagccaaggactggagaggtggcagggctgccagctttaacatcattcccagcagcaccggtgctgccaaggctgtcggtaaggttcttcctgaattgaatggcaagctcactggcatgtccttccgggttcccaccgtggatgtgtcagttgttgacctcactgtcagaatcgagaagggggcctcttacgaggaaatcaagaaagctattaaggctgcttctgagggcccactcaagggtattatgggctacgtggaggaggatctggtctccaccgactt

SEQ ID NO: 41915 - DNA, 280 bp, Zea mays
caagaccagtatatgctctagagccacatgacgtaggacgctatttgcaagctgaaatcgacgttggcggcgaaatcgcagtagcaaagactgctgggccagtagaccctgatgctgggttggttgattatgtggagacgctcgtaaggaaacctgaaactgaattcaatgttgttgtgcttcaatccaatggcgtcgatcagccaaaagagtcggttcatgtactaaatgtcgggaggctgcggatgaggcttactaaagggaagtcggtagtcgccag

SEQ ID NO: 41916 - DNA, 298 bp, Zea mays
caaaaaccagtcctttgttcttcttcccccggcacgcccagcgccagtcaccaaccttccactccctccctccgtcgccatggcgcgcaagaagatccgggagtacgactccaagcgcctcctcagggagcacctcaagcgcctcgccggcatcgacctcaccatcctctccgcccagatcacgcaatcaacggacttcgcggagcttgtgagccagcagccatggctgtcaaccatgaagctagtggtgaagcctgatatgctgttcgggaagcgtgggaagagcggcctcgtggct

SEQ ID NO: 41917 - DNA, 297 bp, Zea mays
tctgggcctgccaggtcgtgctcatgggtgccgtcgagggctaccgcattgccggcgggccgctcggcgaggtcgtcgacccgctgtaccctggcggcagcttcgaccccctcggcctggccgacgaccccgaggccttcgccgagctcaaggtgaaggagctcaagaacggccgcctcgccatgttttccatgttcggcttcttcgtccaggccatcgtcaccggcaagggcccgctcgagaacctcgctgaccacatcgctgacccagtcaacaacaacgcatgggcctacgcca

SEQ ID NO: 41918 - DNA, 298 bp, Zea mays
  unsure (1)..(298): unsure at all n locations
agncttcacaaattgccctctcagctcttctcccaatcccactctagccctagccaaatcccagacccaccccagccctaccgacaccaaccagctcgccagcgaccatggggaacccggagaagctgatgaatcagatcttcgacctcaagttcacctccaagtcgctgcagcggcaggcgcgcaagtgcgagaaggaggagaaggagcagaagctcaaggtcaagaaggcgatcgagaagggcaacatggactgcgcccgcatctacgccgagaacgccatccgcaagcgcatcga

SEQ ID NO: 41919 - DNA, 301 bp, Zea mays
  unsure (1)..(301): unsure at all n locations
cccagttccaccatctgaatctgctcaagcttggcaacaaccgaacacgtacgatgctgctgttcaagctcagatggcagctgctggatatcaaggtgnacggtcaagctatgtgtatgcggaacagcagttgggttatccagaacagtatgtgcagcaaagcacccaggaatacgatgtgttagcggaccctagtatatcccaggatccgaggttcatgactcaggcggacaaggatcggggtttaggttctgttttcaaacgtgacgatcaaaggcttaatcagctgagggaaaaagat

SEQ ID NO: 41920 - DNA, 206 bp, Zea mays
ataatttccaagtcacttttctttgtgggagaggtcggtggaaatgattacaaccatttaatcgttagggataaatctgttgatgagctacatgaagttgttcctaatgttgttggtgccataagctcggccatcacggatcttataaatcttggagcaaagaagttagttgttccagggaacttcccaatagggtgcgtcccatt

SEQ ID NO: 41921 - DNA, 313 bp, Zea mays
agaacgcgcgcaaggccggcgccctctacgacaccatcgacgccagcggagggtactacgtctgccccgtcgacaagtccgtgcgctcgcacatgaacgtgcccttcaccctggccaagggcccggacttcgagaagcagttcatcgccgaggcggccaaggagggcatggtgcagctcaaggggcacaggtctgtcggcggcgtccgcgcctccatctacaatgccatgccgctcgccggcgtcgagaagctcgtcgccttcatgaaggacttccaagccaggaacccttgattgcctcgtgcttatgatca

SEQ ID NO: 41922 - DNA, 307 bp, Zea mays
tgtgttggcagcatcctggtgacagcgttcgtggggactgccattgcgttcgcgtgcttctcttgcgcggccatggtggccaagcgcagggagtacctctacctgggcgggctgctctcttctggcctctccatcctgctctggctgcagttcgccgcctccatcttcggccaccaatccactagcagcttcatgtttgaggtgagagatcatatggaacatattcactgacatagtgacatgcacatctgtggaacgcatatatgcgcgcggagcgcttaattaacttgaagtactttgacgctgc

SEQ ID NO: 41923 - DNA, 305 bp, Zea mays
gtgctgcccaggtaagtcggcggcggcgatgacaacgcgcttcaagaagaaccgcaagaagcgcggccacgtgtccgccgggcacggccgcatcggcaagcacaggaagcacccgggaggtcgcggtaacgccggtggcatgcaccaccaccgtatcctcttcgacaagtaccatccgggctacttcggcaaggttggcatgcgttacttccataagctccgcaacaagttctactgccccgcggtcaacatcgagcgcctctggtcgatggtgcccaccgacaaggcggcggaagccggcggcg

SEQ ID NO: 41924 - DNA, 311 bp, Zea mays
catcaacctgcgccgctgccttctccgttctcgccgtcgcctccgcctccgctgccgccgcgcaggtcagggtcatgtcgatcttcgagtacaacgggagcgccgtggtggcgatggtggggaagaactgcttcgcgatcgccagcgaccgccgcctcggcgtgcagctgcagacgatcgccaccgacttccgacgggtgttcaaggtccacgacaagctctacatcgggctctcggggctcgccaccgacgcccagacgctgtatcagcggctggtgttcaggcacaagttgtaccagctgagggaggag

SEQ ID NO: 41925 - DNA, 233 bp, Zea mays
gcgattgcaggaaggaacttgtacatgaggttcagctgcagcacaggggatgccatggggatgaacatggtctccaagggtgtgcagaacgtgctggactacctccaggccgacttccctgacatggatgtcatcagcatatcaggtaacttctgttctgacaagaagtcagctgctgtgaactggattgatggccgtggaaactcggtggtttgtgaggcagtaatcaggga

SEQ ID NO: 41926 - DNA, 192 bp, Zea mays
tgttattgtagttggtgatccagggctaggcaaaagccaactcctccaagctgcagcagctgtttccccacgaggaatatatgtatgtgggaatacgacaacaaaggctggcctaactgttgctgtggttaaagattctatgacaaatgattatgcatttgaggctggtgccatggtccttgctgatcgtgg

SEQ ID NO: 41927 - DNA, 306 bp, Zea mays
gacgcttctcttcggcgagaagccggtcaccgtctttggcatcaggaaccccgaggagatcccgtggggtgaggctggtgctgagtatgtcgtggagtccaccggtgtcttcactgacaaggacaaggctgctgcacatctgaagggtggtgccaagaaggttgttatctctgccccaagcaaagatgcacccatgtttgttgttggtgtcaatgaggacaagtacacctccgatgttaacattgtttccaatgctagctgcaccacaaactgccttgctccccttgctaaggtcattcatgacaa

SEQ ID NO: 41928 - DNA, 240 bp, Zea mays
aacgacatacgtttgctaggaagtggtcctcggtgtggtcttggtgaactaatcctaccagaaaatgagcctgggagcagcattatgcctgggaaagttaatccaacccagtgtgaggctctgacaatggtttgtgcacaggttatgggtaatcatgttggtgttacaattggtggtgccaatgggcattttgaactgaatgtttttaagccattgatcgcagccggattacttcgatca

SEQ ID NO: 41929 - DNA, 299 bp, Zea mays
aaaagatctctgaggaggaatacgtcactgccatcaaggaggaaatcaacaaggtcgttaagcttcaagaagagcttgacattgatgtgcttgtgcatggcgagcctgagagaaacgatatggttgagtacttcggtgagcagctctccggttttgcgttcactgccaatggctgggtgcagtcttatgggtcaaggtgcgtcaagcctccgatcatctacggtgacgtgagccgccccaaccccatgaccgttttctggtcgaagaggcacagagcatgacgtctcgcccaatgaagg

SEQ ID NO: 41930 - DNA, 300 bp, Zea mays
ctgagtcggaggactcggtgtcaggtgttctatatgataacttgcaaaaggaggtcatttctctaaggaaggcgtgccacgaaaaggatcagagcctgaaagacaaggacgacgcagttgagatgttggcaaagaaagtagatactttgacaaaagctatggagtcagatgccaagaaatcgaggcgcgagctagctgctatggagaaggagctggcagctgtgcgcttggagaaagagcaggataacagggcaagacgttttggtagttcaagcggttctgccagcaagtcgcagctcc

SEQ ID NO: 41931 - DNA, 314 bp, Zea mays
ctgccgctcttcgagctgtcccaccggaagaacgtgtgggacgtcgtcggccacgacccgtccgtgagccagctcttcaacgccgggatggtcgcggatacgcgcttcctcatggacatcgccgtcagggagtgcggcgacgtgtttcaggggatacgctccctggtcgacgttggcggcggccatggcgcggcggcgcaggccatctctgcggcgttccctgccatacagtgcaccgtgctggaccttgcacacgtggtcgccaccgctcccgcttgcgccgggctcagcttcgttgctggcgacatgtttga

SEQ ID NO: 41932 - DNA, 278 bp, Zea mays
ctggaacaaaaagaaaaaaaacacgagaaaaatcaaatcaggagacggggattccagagagcccctctcgggtagggaagggaaggagaggcgaagcggaggcgagatgggggcggccgaatccgtgccggagacctccatacacgaattcaccgtcaaggattgcaacggcaaggaagtgagcctggaaacctaccaggggaaggtcctccttgttgttaacgtcgccctccaatgtggggtcacggagaccaattacacgcagctgacggagcttt

SEQ ID NO: 41933 - DNA, 255 bp, Zea mays
cgaggactctggttctcttctgttcaaccttattggaaatttggcattcccgcttatccttatcggtggtctgtttttactttcaagaagggcacagggtggcctcggtggacccaatggtcctggctttccccttggttttggtcaatctagggccaagtttcagatggaacccaacactggtgttacatttgatgatgttgctggtgtcgatgaagcgaacaagacttcatggaagtggtttatttctaaaag

SEQ ID NO: 41934 - DNA, 238 bp, Zea mays
aaaaaactcaacaagaataaaaaactggtcaagaagctggccaagaagtatgatgcgttttttgcctcagagtctctgatcaagcagattccacgaatcctcggcccaggtttaaataaggcaggaaagttcccttccctgctcacacacaacgaaaacatggtggccaaagtggatgaggtgaagtccacaatcagtttccaaatgaagaaggtgttatggtctggcggaagctgtt

SEQ ID NO: 41935 - DNA, 295 bp, Zea mays
cttggaacaatttttgtgaaaatctttcatccaccagccatatcagtggttggtgaaataccacagggtcttcccaggttctccattcctcaaggatttgagcatctaatgtcacttgtgccaactgctgtactaatcactggtgttgctattttggaatctgttggtattgctaaagctttggcagcgaagaatgggtatgagttggactctaacaaagagttatttggtctgggaatagcaaatatctgtggttcattcttctctgcatatcctgccacaggctccttttcta

SEQ ID NO: 41936 - DNA, 295 bp, Zea mays
cggtgctctcactctatgctagtgggcgtactactggtattgtactcgactctggtgatggtgtgagccacactgtgcccatttacgaaggatatgcccttcctcatgccattcttcgtttggatcttgctggtcgggacctcacagactccctcatgaaaattctcactgagaggggttactccttcacaacctcagccgagcgagaaattgtaagggacatcaaggagaagctagcatatatagcgcttgactatgagcaagagttggaaactgccaagaacagctcttcagt

SEQ ID NO: 41937 - DNA, 298 bp, Zea mays
gtgaagcaggtgagctgcgtgtgggacgcgtacgaggccaccaagggcgcccacgggctgtgcatcctgaccgagtgggacgagttcaagaccctggactaccagaagatcttcgacaacatgcagaagcccgccttcgtcttcgacggccgcaacatcgtcgactccgagaagctgagggagatcggcttcatcgtctactccatcggcaagccgctcgacgcctggctcaaggacatgcccgcggtcgcctaatcccacccccctcacccatggattggattccgggaaggaagag

SEQ ID NO: 41938 - DNA, 297 bp, Zea mays
tttcactcttcatggccctgggaaacatacttggatatgccaccggagcatacagtggatggtattcgatatttcctttcactgttacagagtcctgcggcatcagttgtgccaaccttaagtctgcctttcttcttgacattattgttctggtcatcacaacgtacactactgtaacatccgtgcaagaacctcaaacttttggaagtgatgaagcacaaaatccaggtgctgaacaggaagctttcctctgggaactttttgggtcattaagatacttcaccctaccaatttgga

SEQ ID NO: 41939 - DNA, 310 bp, Zea mays
ccgccgacggggcgctgggcgcgatgcgcgagtcctggggctccgtctggcgcatggacaccaaccaccgcatgcagccgcccttctccatccgcatccgcaacgagtccggcaagacgctcggggccagggacgtcatcccggccaactggtggcccagcaccttctaccgctgcctcgtccagtacagctagctagctagctggtttgcgcccctagttcaccacccaccactactaccaccgccacccactagactactgcttccggctaccaatactacggcggaacggaacggctggttgccgcc

SEQ ID NO: 41940 - DNA, 301 bp, Zea mays
ctggcctcgccgccgcctgggtttccatcctcctccgcaagagggccgccgtcttccggatccactacttcatgctcgccgtgctcgtgctcaaggctctcaacctcctcgccgaggccgaggacaagtcatgcatcgagcgcaccggcacggcccacggatgggacgtgctcttctacatcttcagcttcctcaaggggatctcgctcttcacgctcatagtgctcatcggcaccggctggtctttcctcaagccctacctggccgaccgagagaagaaggtgcttatggcggtcatccc

SEQ ID NO: 41941 - DNA, 259 bp, Zea mays
tgccgaacacgcccgccgccattctacgccctgctgcccaggtcggacggaccctttgccggagacgagcacacgccacagcaggaattatcgggcgtagagcagcgcgaagcgagagatccaatggcggcggcggaggggcagtgggtgctcatggcaacggggcggacccgactaacattgcggtgatcaagtactgggggaagcgagacgaggcgctcatcctccccatcaacgacagcatcagcgtaacgctcga

SEQ ID NO: 41942 - DNA, 292 bp, Zea mays
acaaagcccacaccccaacgatccacttgtacagctccaacgatgctgcggcggctgattttttcgacctgggcagactcaagaaggctacggccaaagccttggtggccttctaccccctcgccggacgcctcgtcgacagcgacgatggtaggaaggagatcagctgcaacggcgaaggtgcactctttaaaggtcgctcgcgcggatggtgatctcactatcgatgaagtcaagaaattcaagccatcaccagagttgaggaggctgtttattccactcatcgggccat

SEQ ID NO: 41943 - DNA, 269 bp, Zea mays
ctccaaggtggccctcacaaccaccagattgctgcacttgctgttgctctagagcaaactatgtcgcctggcttcaaggcctatgcgaagcaactcaccgccaatgctgttgcaattggaaactatctcatgagcaagggctacaagatggtgactgatggaactgagaaccaccttgttctctgggatctccgcccccttggcttgactggaaacaaggtcgaaaagctatgtgatctttgccacatcacatggagcaagaatgctat

SEQ ID NO: 41944 - DNA, 254 bp, Zea mays
gcaaaggggacatacctgctgctaccgcgtttgccctagacaattacaagcacctggcgaacaggtccctggttgacgacacgcctcgaaaagtgaatgggctaaaacctatcgccgctgaacttggcgtttcgttagctcagctctcgattgcttggtgcgcgtcgaaccccaatgtctcgtctgtgatcactggagccaccaaagaaagccagattgtggagaacatgaaggccctagatgtcatcccactg

SEQ ID NO: 41945 - DNA, 279 bp, Zea mays
gagaagaaacctccaaacacctacctctctacgaactacctgccgccggaaaaccctagagcgctcgaccatggatccgcagcagccggagcctgtcagttacctctgcggagattgcggactgagaacaccctgaagcccggagatgtcatccagtgccgtgaatgtggctaccgcatcctctacaagaagcggacccgccggaacgtttaatcgacgttccaagttactagtgggccggccttcctgggctttcgcttccaaagccgcccagcccag

SEQ ID NO: 41946 - DNA, 297 bp, Zea mays
  unsure (1)..(297): unsure at all n locations
agncttcacaaattgccctctcagctcttctcctaatctcactctagccctagccaaatcccagacccatcccagccctagcgacaccaaccagctcgccagcgaccatggggaacccggagaagctgatgaatcagatcttcgacctcaagttcacctccaagtcgctgcagcggcaggcgcgcaagtgcgagaaggaggagaaggagcagaagctcaaggtcaagaaggcgatcgagaagggcaacatggacggcgcccgcatctacgccgagaacgccatccgcaagcgcaccg

SEQ ID NO: 41947 - DNA, 84 bp, Zea mays
ggtatattttcggcggtggaaccaagctcactgtcctaggtcagcccaagtccactcccacactgcacagtatttccacacaac

SEQ ID NO: 41948 - DNA, 305 bp, Zea mays
gtcaacagagagggttccaatggcaagaacccacacatacaatttgatctggttttcgataaagagtttgagctgtcgcacacatcaaaaactaccagcgtcttcttcactggctacaaggttgagcagccattcgaggaagatgaaatggatcttgattctgaagatgaagacgaggagcgggatgttccagtagtcaaggaaaatggcaaagctgatgggaagaaacagaaaagtcaagaaaaggcagttgctgcaccttcaaaatcaagtccggattccaagaagagcaaggatgacgatga

SEQ ID NO: 41949 - DNA, 303 bp, Zea mays
tggaaaaaccatcgaagctgaagctgcccatggcacggttacccgtcatttccgtgtccaccagaaaggaggcgaaaccagcacgaacagcattgcttcgatctttgcatggacaagaggacttgcccacagggcaaagctcgacgacaacgctagactactcgacttcgctctcaaactcgaggctgcttgcgttgagaccgtggagtccgggaagatgactaaagatctggcgattcttgtccatggatcttccagcgtcacgagaagccattacctgaacaccgaggagttcatcgacgc

SEQ ID NO: 41950 - DNA, 309 bp, Zea mays
gcacgagctgcgggggaagagcaaggcggatctgcaagcgcagcttaaggagtttaagtcggagctctccctgctacgcgtaccaaggtcaccggcggggctcccaacaagctctccaagatcaaggttgtgcgcacctccatcgcgcgcgtgctgaccgtcatctcgcagaagcagaagtcggcgctgcgtgaggcgtacaagaagaagaagctgctcccgctcgacctccgccccaagaagacccgcgccatccgcaggcgcctcaccaagcaccagctctccttgaagaccgagagggaaaagaag

SEQ ID NO: 41951 - DNA, 309 bp, Zea mays
atgatgccttcaacacgttcttcagcgagaccggttctggcaagcatgtgccgagggccatcttcgtcgaccttgaacccactgtcattgatgaggttcgcactggctcgtaccgccaactcttccacccagagcagctcatctcgggcaaggaagacgcagctaacaactttgcccgtggccactacactgttgggaaggagattgtcgatctatgcctggaccgtgtgcgcaacttgcagacaactgcactgggctgcagggattcttggtgttcaatgctgttggtggtgggactggctctggact

SEQ ID NO: 41952 - DNA, 308 bp, Zea mays
cgtgaggacccaatccgttggaatcccctcactgatgttgtagatggttattctccaacacttcctcatctcaagggtcttcagaatggtgacacagccacaagtgccattaagcaggttgcatctggacgttttggagttacaccaacattcttagtaaatgctgaccaaattgagataaagattgcgcaaggtgcaaagcctggtgaaggaggtcaacttcctgggaaaaaagtcagtgcatacattgctcgtctgacgaactccaaacctggagttcctctaatctccccgcctccacaccatga

SEQ ID NO: 41953 - DNA, 309 bp, Zea mays
acgcgtgcgaaccaagcagaccacagcaagaagcgtagtcgtcgccggaaggaaaggcgcggacaagatgtcgtggcaggcgtacgtcgatgagcacctgatgtgcgagatacaaggacaacatctcagcgccgccgccatcgtcggtcacgacggcagcgcttgggcgcagtccgagagcttccccgagttaaagcctgaggaggttgctggtatcataaaggactttgatgaacctggtactcttgcaccaactggtcttttcgttggaggtacaaagtacatggtgatccaaggtgaacctggagt

SEQ ID NO: 41954 - DNA, 306 bp, Zea mays
ccgacgccggagcgtccaagacctacccgcagcaggctggcaccgtccgtaagaacggcttcatcgtcatcaagaaccgcccctgcaaggttgtggaggtttctacctcaaagactggtaagcatggccatgccaaatgccactttgttgccatagacatattcaacgggaaaaagcttgaagatattgttccttcatcacacaactgtgatattccgcatgtgaaccgtactgagtaccagctgattgatatatcagaggatgaatttgtgagccttcttacttcagatggcaacactaaagatg

SEQ ID NO: 41955 - DNA, 300 bp, Zea mays
accaaatggtggaagaaactcgttcgagatgatcaaagggcacctcactttgtgaaagctgattgggacaaatgggttgatgaagatgatgatggtgctgatatcaacatggatgggatggacttctcgaatttcggtggcatgggtggtatgggcggcatgggtggcatgggtgatatggctggtatgggtggtcttggtggcatgggtgggatgggtgatcttggtggcatgggtggtatgggaatggatgatttcgaagatgagagtgatgatgaagaagaattgtcgaaacctcaa

SEQ ID NO: 41956 - DNA, 304 bp, Zea mays
ggcgcctccaccctccgcctggtgtccttcgccgtcgacgagcgcacaccagtacgtattgctcgtgatttgtgtaactacggagcaagctgcatacagcacaagatagaagatgggtatccttgagaggatcaaggagattgaggccgagatggctcggactcagaaaaataaagcaacagaatatcatcttggacaactgaaggcaaaactagcaaagttgaggacacaactattagagcctccaaagggttccagcggaggtggagatggttttgaagtcacaaagtttgggcatggtcgt

SEQ ID NO: 41957 - DNA, 297 bp, Zea mays
cgttcaggctatagagaagcgaatatctgtgttctctcaaatacctaaagaaaatggggagctcattcaagtattgaggtatgaagctagtcagtattatagaccacatcatgattacttctctgacactcttaaccttaagcgcggagggcagcgtgttgctacaatgcttatgtatttgacagatggcgttgtaggtggtgaaactcactttccgcaggcaggagatggagagtgcagctgtggaggaaacgtggtcaaaggattgtgtgttaagccaaacaaaggggacgctgt

SEQ ID NO: 41958 - DNA, 293 bp, Zea mays
ccttgatgagcaagtacaaggtggaaggttttccaactattttggtatttggtgctgataaggagagcccattcccctaccagggggctagagttgcatctgccattgaatcctttgcattggagcagttggaagccaattctggcccggctgaagtttctgagttgactggcccggatgtcatggaagagaagtgcgcttctgctgccatttgttttgtatcattccgtccagacatccttgattcaaaggcagaaggaagaaacaagtaccttgagctcctgctctctgta

SEQ ID NO: 41959 - DNA, 297 bp, Zea mays
catcccgtcgcatcccatcccactaccacccatctcgtcgtccgccgattcgatccggttcttccaacccaggggcagtgatggcgacgaagaggagcgtgggcaccctcggcgaggcggatctgaaggggaagaaggtgttcgtgcgcgccgacctcaacgtcccgctcgacgatgcccagaagatcaccgacgacacccgcatccgcgcctccgtccccaccatcaagttcctcctcgagaagggcgccaaggtcatcctcgccagccacctgggtcgtccaaaaggtgtcaccc

SEQ ID NO: 41960 - DNA, 297 bp, Zea mays
tatcaccctcgaggtggagtcttctgacaccatcgacaacgtcaaggccaagatccaggacaaggagggcatccctccagaccagcagcggctcatttttgccggcaagcagctcgaggacgggcgcacgctggccgactacaacattcagaaggagagcaccctccacttggtgctgcgtctcaggggcggcatgcagatcttcgtgaagactctgaccggcaagactatcacccttgaggtcgagtcttctgataccattgataatgtcaaggccaagatccaggacaaggaggg

SEQ ID NO: 41961 - DNA, 306 bp, Zea mays
tgagagtggtgctgtgcccatctttgttaagctcctcaactccaatagcgaggatgttcgtgaacaggctgtatgggctttaggtaatgttgctggtgactccccaaagtgccgtgatctggtgctaggccatggtgggctattccccttgctgcaacagcttaatgagcatgctaagctctcgatgctgaggaatgccacatggacactatcaaacttctgccgtgggaagccacaaccgaactttgatcaggtcaaaccagcattgccagcacttcagcaacttatcgactctcaggatgagga

SEQ ID NO: 41962 - DNA, 298 bp, Zea mays
tgatctgactaacttcactgatattccccctggtggagtagaggacaaagctacaaataattccgttttactgagggaatttgtgggctgttttatagattttcctaagcctctgactgcagtggtcaatggtccagctgtgggcatctctgtcaccctccttgggctattcgatgccgtgtatgcatctgacagggcaacatttcatacaccatttagtcaactaggccaaagtccggaaggatgctcctcttacacttttccgcagataatgggcccagccaaggcacagagatgc

SEQ ID NO: 41963 - DNA, 304 bp, Zea mays
attatttaatggacagacacataggataaagaagtttgtttagcatacaaacttccctggccactcagatttcaattcatataagaaatgcaactttgttatatacgacgctgaagctgaaggtatatgtcagcctaataatgcctcaaaaaattgcataacacctagtacaaaatgggaacaagtcaaggagatcctcggtgactgtggccgagctgcaatccagacacaaggctccatgaacaatccatttggatcaacttttgtatatggttatcagaatatcgctttcgaggtgatgaaa

SEQ ID NO: 41964 - DNA, 301 bp, Zea mays
ctgcattttatccttcctggtgctctgtccacctctctcgctctgggccgccgccgccgccctaagccacgtgctgaggctttcgttggtctcttcgccggcgacgagcacccagttctgtagaaatggctgatggtgaggacatccagcctcttgtctgcgacaatggcactggaatggtcaaggctggttttgctggcgatgatgcaccaagggcggttttccctagcattgttggccgtcctcgccacactggtgtcatggtagggatgggacagaaggacgcatatgttggcgatga

SEQ ID NO: 41965 - DNA, 290 bp, Zea mays
tgcggcccgatccaccctgctccaatcccccggcgatggtcgtgtgcaaatgccgaaatcgcacgagggtttactgcttcgtccatcatgtccccgtctgtggcgtgtgcatatgcttcccggaacatcagctatgtgtggtgaagaactatgctgaatgggttgttaattctgagtatgactggccacaacactgttcgtcttgcaattctgttctcgaaggtggaactgaagaaacaacacgattgggttgcttgcatgtggtacacaccaaatgcttgatatcacat

SEQ ID NO: 41966 - DNA, 287 bp, Zea mays
cctagtcccctgctccattctcagccgccgccaatcccttcccgtgctccgcaacctctgagtgagaagaagagatggccggcaagggcgatggcccggctatcggcatcctcctcggcacgacgtactcttgcgtcggcgtgtggcagcacgaccgcgtcgagatcattgccaacgaccagggtaaccgcaccacgccctcgtacgtcgccttcaccgactccgagcgcctcatcggagatgcggccaagaaccaggtcgccatgaaccccatcaacaccgtcttt

SEQ ID NO: 41967 - DNA, 307 bp, Zea mays
ggatgccagtagcaagtcaaagcaaagcaggagtgagaagaagagccgcaagccatgctgaagcttggcatgaagcccatcactggtgtcagccgcgtcactgtaaagaaaagcaagaatatactctttgtcatctccaaaccagatgtgttcaagagtccgaattccgacacgtatgtcatattcggcgaggctaagatcgaggacctcagctcccagctgcagacccaggcagcagagcagttcaaggctcctgacttgagccagatgatctcgaatccagagacgtctggcccgggacaggagg

SEQ ID NO: 41968 - DNA, 103 bp, Zea mays
cgccaacgtgggccgcgttcgcgccagaaccgtgaagaaggcggcccgggtcgtcgtggaggagtgctacacgcgcctgggcagcgacttccacacgacgtgc

SEQ ID NO: 41969 - DNA, 285 bp, Zea mays
caccgcccgtccccgatctccgatcccctcgtcgatccaaagatgcagatcttcgtcaagaccctcactggaaagactatcacctgcgaggtggagtcttctgacaccattgacaacgtcaaggccaagatccaggacaaggagggcatccccccggaccagcagcggctcatctttgctggcaagcagctcgaggacgggcgcacacttgccgactacaacatccagaaggagagcaccctccaccttgttctccgcctcaggggaggcatgcagatcttcgtc

SEQ ID NO: 41970 - DNA, 296 bp, Zea mays
tcctctcccaccgccgcgcaccgagaagatggggaagcggtggatcccgctggaggccaacccggacgtcctgaaccagttcatatgggggctgggagtccacgaggaggatgtgcagttctgcgacgtctacggccttgacgatgagctgctcgctatggtgccccagcccgttctacgccgtcctcttcctctacccgctcacctccctggacgaggagaaagaagaatcaagtgtttctgctgccacatcgacctcagcgggcaaggaattgagcaagaaagtatactttacg

SEQ ID NO: 41971 - DNA, 294 bp, Zea mays
acggcgggggcggcctggcggccctgagggcggcgcgcgccgtgaaggagacgacggggatcgtgggccttgaggtggtgcctaacgcgcgagaagttctggtagggctctacgagcgcacgctcaaagagatcaaggccgtccccgaagacgagggttaccgcaaggccgttgaatccttcaccggtcaccgcctccagatctgccaggaggaggaggactggaagcgcatcgaggaccgaatcggatgcgggcaggtcgaggagctcatcgaggaggccgaggactatctca

SEQ ID NO: 41972 - DNA, 294 bp, Zea mays
tcggttttaggagacctgcgccgctcctccggccacgcgagcacgccgaaatggtcgcccacaggttccatcagtaccaggtggtgggtcgcgcgctgccgaccccgaccgatgagcaccccaagatctaccgcatgaagctctgggccactaacgaggttcgcgccaagtcgaagttctggtacttcctgagaaagctgaagaaggtgaagaagagcaatggccagatgctcgcaatcaacgagatcttcgagcgcaaccctaccaccatcaggatctacggaatctggctgg

SEQ ID NO: 41973 - DNA, 288 bp, Zea mays
ccaattcctccttcggatctcgcattcagcgcccaggtgtgaaggaagggggacgcggaggaagatggggctcgcgttcgggaagctctttagccggctcttcgccaagaaggagatgcggatcctcatggtcggcctcgacgccgccggtaaaaccaccatcctctacaagctcaagctcggcgagatcgtcaccaccatccccaccatcggtttcaatgttgaaactgttgagtacaagaacattagcttcactgtctgggatgtcgggggtcaggacaagatcag

SEQ ID NO: 41974 - DNA, 275 bp, Zea mays
aacctctcaaaccctagccgcctcctgcaagtttcagagctcaggaatctgcgccatggcgagtgagacggagaccttcgcatttcaggctgagatcaaccagctgctctcactcatcatcaacaccttctactccaacaaggagatcttcctccgcgagcttatctccaactcttccgatgcgctggacaagatcaggttcgagagtctcactgacaagagcaagctcgatgcgcacctgagcttttaatccaccttgtccaagaaagggccac

SEQ ID NO: 41975 - DNA, 285 bp, Zea mays
ttcacctccgagctctgggacaggggagatctgtggtgtcgcaacctcgcctttcttgtacgcgctagtgtgggcactcagcagcaccttcagaaatggacttttttacagagtatggcgaggggagcaggtacaagatagaagaggtcatagggaaaggcagttacggtgtggtttgctctgccttggacactcatactggtgaaaaggtcgccataaagaagataaatgacatctttgagcatgtgtctgatgcgacaaggatgcttagggaaatcaagttgc

SEQ ID NO: 41976 - DNA, 285 bp, Zea mays
accttgatgatgtttatgcaactgctatcagtaactgtgatccggagggtcctcttatgctgtatgtttcaaagatgattccagcatctgacaagggcaggttctttgcctttggtcgtgtcttctcagggaaggttgctactggtatgaaagttcggatcatgggtcccaactatgtccctggccagaagaaggacctgtatgtcaagagtgttcagcgtactgttatctggatgggaaagaaacaagagttgtctgaggatgttccttgtggtaacactgttg

SEQ ID NO: 41977 - DNA, 182 bp, Zea mays
aatgaatcagaacggggactcagtggacactatgatcgggaggatattcaacaacatatcctctttaaaatctgcatacattcagctgcaggaagcccacaccccatatgaccctgacaagatccaggaagctgataaacttgtcatggaggagcttacaaatctttaggagctcaggcatg

SEQ ID NO: 41978 - DNA, 316 bp, Zea mays
ggccaatccgaaatctcgagctttcgcgccggcgaccacagcaaagaggaggccacagcacgacagcgccacagggttcctactctcgtcgcagcggcagcagtgaggggaagatgtcgtcggtgttcagcggcgatgagaccgcccccttcttcggcttccttggcgccgccgccgctctcgttttctcatgcatgggggcggcgtacgggacggccaagagtggcgtcggcgtggcgtccatgggtgtcatgcgcgcagagctcgtcatcaagtccatgttgctctctgtcatgccatgcagaagagggaggac

SEQ ID NO: 41979 - DNA, 315 bp, Zea mays
ggccgtgcagctcaaggaatgcctacgagagtaactcctgctagaattgcttgtcttgattttaaccttcagaagacaaaaatgcaacttggtgtccaagttcttgtaactgatccaagggaacttgagaagattcgtcagagagaatctgacataacaaaggagcgaattgagaaaattctcaaggctggagctaatgttgtgttgaccaccaagggaattgacgatatgtccttgaagtactttgttgaggctggtgcgattgcagtaaggcgtgtgcgcaaggaagatttgcgacatgttgccaaagccact

SEQ ID NO: 41980 - DNA, 317 bp, Zea mays
ctcgagccgtggagcaactgtggctgcattctaacgacttcactgggcccatgccggacttctctaggtttgataatctatgggatttgcaacttcgcgacaacgagctcacagggccggtgcctgagagtcttttcaagttgaaggccctgaagaacgtgactctgacgaataatttgctgcaggggccgatgcctcagattcctaatcaacttcatgctgacatcaaagcagattcagagcggttttgtgtgcaggaagccgggaagccgtgcgatccccgtgtgagcctgctgcttgaggttgctgctgggttc

SEQ ID NO: 41981 - DNA, 317 bp, Zea mays
cacgacttcctcccgccgccggttggcttcgctgctcgtccacctccgcccggcccgtgggacgagtggggactggagagggtcgcctctgggcttcgcctctcggcggccgagtgtctgcgtcgtccacggagctgagagcctgagactgagactgagagcgaccggcggcggggatggcgagggagaggcgggagataaagaggatagagagcgcggcagcgaggcaggtcacgttctccaagcgccgccagggcctcttcaagaaggcccaggagctctccgtgctgtgcgatgccgacgtcgcgctcatagtc

SEQ ID NO: 41982 - DNA, 322 bp, Zea mays
acatgcctaagcacccggagctggaagacaagaatgtgcccaaccttcatgtcatgaaggccatgcagtctctcaagtcccgaggctacgtgaaggaacagtttgcctggagacatttctactggtaccttaccaatgagggtatccagtatctccgtgattaccttcatctgcccccggagattgtgcctgccaccctacgccgtagccgtccagagactggcaggcctcggcctaaaggtctggagggtgagcgacctgcgagactcacaagaggggaagctgacagagatacctacagacggagtgctgtgccacctgg

SEQ ID NO: 41983 - DNA, 297 bp, Zea mays
cagctagctacatggactcctgctttcacgttctcatacaggcactcctgcactgtgctccttcgtctcctcctcccctgcctgccaccaactgccaaggtttatgttcaggtggcactgccagcagaagtgatccgttgacttcagctatgggcaacctgtgctgctgtgttcaagtcgaccagtcgactgtggccatcagggagcagtttggcaagtttgacagcgtgcttgagccaggatgccactgcatgccttggttcgccggcaagcgtgtagctgggcaactcacactca

SEQ ID NO: 41984 - DNA, 314 bp, Zea mays
tcaggacaagatcagacctctctggaggcattacttccagaacacacagggtcttatctttgttgtggatagcaatgaccgtgaccgtgttgttgaagccagagatgagctgcacaggatgctgaacgaggatgagctacgtgatgctgtgctgcttgttttcgccaacaagcaagatcttcctaatgccatgaatgctgctgagatcactgacaagcttggattacactccctgcggcagcgacactggtacatccagagcacttgtgccacaactggcgagggtctgtacgagggcctggactggctgtcca

SEQ ID NO: 41985 - DNA, 313 bp, Zea mays
gccgagcaaacaaaacgatatgccgctgccctgaaccgagaccaccaccgctctgcctcgcctcgcctcacctcacctcatctcacctcgccgactagggttttgtaccgccgtggatctcgccgtccccgccatggacgtctcgcacgcgggatcctccgtcgccggcgaggctccgaccaccggggagcaccggatggggactaccatcgtcggggtctgctacgagggcggcgtcgtcctgggcgccgattccaggaccagcactggaatgtatgtagccaaccgtgcttcagacaagattactcaactg

SEQ ID NO: 41986 - DNA, 312 bp, Zea mays
cacacatacacaagcacaagcgcactctagcaatggcttctgaggttgtccgccctagcgacgccgagctactaaaggcacaagccgacatatggcggctcagcctctcctacctcacgcccctgtcactgaggtgcgccgtggagcttggcatccccacggcgatctaccgccatggcggggctgcctcagccgctgagctggtcacggcgctgtctctcccctccactaagctgccgttcctccgccgcctgctagggctcctcgccgcgtcgggcgtgttcaccgtcgacaagcagagcacggaggagg

SEQ ID NO: 41987 - DNA, 313 bp, Zea mays
ctcagatgccgttcttgacgcttgccttgctgaggaccctgacagcaaggttgcttgtgagacctgcaccaagaccaacatggtcatggtctttggtgagatcaccaccaaggccaatgttgactacgagaagattgtcagggagacctgccgcaacattggttttgtgtcaaacgatgttgggcttgacgccgaccactgcaaggtgctcgtgaacattgagcagcagtcccctgatattgctcagggtgtgcatggccacttcaccaagcgccccgaggagattggagctggtgaccagggacacatgttc

SEQ ID NO: 41988 - DNA, 316 bp, Zea mays
tgctctccgaccccgagctccgaatgccgcagcatcaggcgcggcccccctcgcgtgtgaccgagatggcgatgccgaatcaggggaccgttgattaccccagcttcaagctcgtcatcagtggcgatggtggaactggtaaaactacatttgtgaagaggcatctcactggagagtttgagaagaaatatgaaccaaccattggtgtggaagttcatccgttggatttcaccactaactgtggtaagatcaggttctactgctgggataccgcagggcaagagaagtttggtggcctcagggatggatactatat

SEQ ID NO: 41989 - DNA, 299 bp, Zea mays
ctcgagccgcgcgatggcgcaaaggagaccaatggcagcaacggcgagcacatctcaccccgcccgccgccgaccccgtcgcccctccgcttctccaagttcttccaggctaacctgcggatcctggtcactggtggggcgggcttcatcggctcgcacctcgtggacaggctcatggagaacgagaagcacgaggtcattgttgctgataactttttcaccggttcaaaagataacctgaagaagtggatcggacacccaagatttgagctcatccgccatgatgtcactgagccact

SEQ ID NO: 41990 - DNA, 303 bp, Zea mays
aatccccaaagcctccgacccccttcctctctccctccgccgccgctgcgcacgcagggaacaagcgacatgggcgtctacacctttgtgtgccgcaacaacggcggcgagtggaccgccaagcagcactccggcgagatcgaggcttccgccgctaccccatacgagctgcagcgccgcctcgtcgctgccgcctccgcggccgactctgtctacggcgtccagtcgtccttctccatggtcacccccagctccgccgtgttccaggtgatcgtcggtgctgtcggtggtggtgcaatgatg

SEQ ID NO: 41991 - DNA, 313 bp, Zea mays
ctcccggtccgtagcagatagcgggggccagagagatcgagatccggaggcgctagcgccacccatcagcgtctgcggcaatggcgggcacggtgacggtcccggggtcgtcgaaaccctccacgccgctgctcaaggacgagctcgacatcgtgatcccgacgatccgcaacctcgacttcctcgagatgtggaggcccttcttccagccctaccacctcatcatcgtgcaggacggcgacccgaccaagaccatcaaggtccccgagggcttcgactacgagctctacaaccgcaacgacatcaaccgcat

SEQ ID NO: 41992 - DNA, 303 bp, Zea mays
ggagtcggggaaccgaaaactcagggtctcgaatttcctaggagcggaggcgatggctgggaagggaggaaaaggattgctcgccgcgaagacgacggcggccaagtcggcggagaaggacaaggggaagaaggcccccatctcacggtcctcccgcgcgggcctccagtttcctgttggacgaatccaccgtcagctgaagcaaaggactcaggcaaatggccgcgttggtgccactgcagccgtctactctgccgccatcctggagtacttgactgccgaggttctggagctggctgggaa

SEQ ID NO: 41993 - DNA, 303 bp, Zea mays
cgtcactcgacgcaggctagcagcacagcagcagccagagccatcccctctcctcgctacgcttcgcttcctcggcgccgattcctcctcctcctcctccaccctcgtccgtccccttccggcgcacgagctcgcccgagatggcgaacgcgagatcgggtgtcgctgtgaacgatgagtgcatgctgaagtttggcgagctgcagtcgaagaggctgcaccgcttcataactttcaagatggacgacaagttcaaggagatagttgtggaccaggtcggggatcgcgctaccagctacgatg

SEQ ID NO: 41994 - DNA, 298 bp, Zea mays
agaggacaaagtggctgctgttgctgattgcttctgtttggcaaaagatgctgggtttaaggtggttgcccacatgatgccagatttacctaatgttggagttgaaagagatttggaaagtttcagagaattttttggaagtccagcgttccgggctgatggtctgaagatttatccaacacttgtgattcgtggaactggtctttatgagctctggaaaactggcagatatagaaattatccacctgagctgttggtggatattgtggcaagaattctgtctttggtaccaccttga

SEQ ID NO: 41995 - DNA, 303 bp, Zea mays
gaagccgaacatgggccgcgtgcgcagcaagactgtgaagaaggcggcccgggtcatcatcgagaagtactacagcgcgcctgaggtgaatgactttcacacgaacaagcgcgtgtgcgaggagatcgccatcatccccagcaaaaaccttcggaacaagatagccggctatgtcacgcatctgatgaagcggattcagagaggtcctgtgagaggcatctccatcaagttgcaggaagaagagagggagaggagagataattatgttcctgaggtctcagccctagatcaggagatcattga

SEQ ID NO: 41996 - DNA, 304 bp, Zea mays
gaagcgactgtcgaaggcggcggcggcgatggggagcgaccaggagacggagaagaagaagaccccggtggcactaatgcccatcgcgaagccctcgcaggaaagaagctctgcaagcggaccctcaagctcgtgcgacgagcctctgaggccaagtgcctcaagcgcggagtcaaagaggtagtcaagagcattcgccgcgggaacaaagggttgtgtgtgattgctggaaatatttctcctattgatgtgattacacacgttccaatactatgtgaggaatctaatgttccttacatatatg

SEQ ID NO: 41997 - DNA, 306 bp, Zea mays
cggcgaacggagagcacgccatgaaggcctcgggcacgctacgagagtacaaggtagtgggtcgctgcctgcccacccccaaatgccacacgccgcccctctaccgcatgcgaatctttgcgcctaatcatgtcgtcgccaagtcccgcttctggtactttgtatctcagttaaagaagatgaagaagtcttcaggggagattgtctactgtgggcaggtgtttgagaagtcccccctgcgggtgaagaacttcgggatctggctgcgctatgactcccggagcggcacccacaacatgtaccggg

SEQ ID NO: 41998 - DNA, 301 bp, Zea mays
cttgcttgtgccaccaccgtaccgtaccaaacagatcaaatcagagatggcaagtcgtagtagctctgcagaaggtgcaggcaggacgttgcctgtcaatctcaagttgatcaccgtgctgagcatcgatggcggcggcatcagagggatcatcccggccaccatcctcgccttcctggaagcgaactccaggaactggacgggccagacgctcgtatcgcggactacttcgacgtcgtcgccggcacgagcaccggcggtctcctgacggcgatgctcacggccccggacacgaacgaac

SEQ ID NO: 41999 - DNA, 297 bp, Zea mays
ccccactgccgccgccgctgccaccgccgcttgctgccgcagccgccatgggggcgtacaagtacgtgtcggaactatggaggaggaagcagtcggacgtgatgcgcttcgtgcagcgcgtgacgctgctgggagtacaggcagcagccgtccatcgtccgcctcaccaggcccacccgccccgacaaggcccgtcgtctcggctacaaggccaagcagggatatgttgtctaccgtgtccgtgtgaagcgtggtggcaggaagaggcctgtgcccaagggtattgtctatggcaag

SEQ ID NO: 42000 - DNA, 300 bp, Zea mays
gcggagggcaggtcctggtgcttgatggtcgaggccatctcctgggccgcctggcggccatcgtggctaaacaggtactgctgggccggaaggtggtggtcgtacgctgtgaaggcatcaacatttctggcaatttctacagaaacaagttgaagtagctggctttcctccgcaagcggatgaacaccaacccttcccgaggcacctaccacttccgggcccccagccgcatcttctggcggaccgtgcgaggtatgctgcaccacaaaaccaagcgaggctaggccgctctggaccgtc

SEQ ID NO: 42001 - DNA, 284 bp, Zea mays
acaggatccacgaccagtgctgctgcctatggcacccacctgagcccacacgtgccccaccgcgtgctaagcacatcctccaccctcacacgggactacaactcactgacccgctcagaacactcacactcgaccacactgccgagggactactccaccctcacctccgtctcctcccacgactctcgcctgactgctggtgtgcccgacacgcccacccgcctggtgttctctgccctggggcccacatctctcagagtgagctggcaggagccgcggtgcga

SEQ ID NO: 42002 - DNA, 300 bp, Zea mays
cacaacttaggcagcgagcgtctctcctcttcctctcgcacgcaccggccaaggaaggcagagagagatcgccgctcctcttctctccgtcggtgctgcggttgaccgccctcctcgagcgagatctcgctgcagtccctcgagatctggtcacagatctatccgacaagatggtgaagatctgctgcatcggtgctggctatgtcggtggcccaaccatggctgtcattgccctaaagtgcccagacattgaggttgtcgttgttgacatctccaagccccgcattgaggcatggaaca

SEQ ID NO: 42003 - DNA, 311 bp, Zea mays
cgctcgcagccatgccgcaagctcgacccgtcgcaggtggtggaggtgttcgtccgtgtgaccggcggcgaggtcggcgcacgtcttcgctggcccccaagatcggcgcgctcggtctttcgcccaagaagatcggagaggacatcgccaaggagacggccaaggactggaagggcctccgcgtcaccgtcaagctcaccgtccagaaccggcaggccaaggtctccgtcgtcccctccgccgcggcgttcgtcatcaaggcgctcaaggagccagagagggaccgcaagaaggtcaagaacatcaagcac

SEQ ID NO: 42004 - DNA, 300 bp, Zea mays
aagagtagtggatcattgctgctcagggatgcttccgacaaaatttgacggttgtaacaatatatgcatctctcggtgaggatgcattggtgcattcactaaacgagacacaggtttcaactctgacatgtgattcgaagcaacttaagagaatacctgcaatcagctctaaattgcagagtcttaggcatattatctatatcgaggatgaacctgtcgacgctgagacactgaaccaagtgaagcatctgacaacattgtctttcactgaagtagaggagttaggcaagacatctagtg

SEQ ID NO: 42005 - DNA, 302 bp, Zea mays
  unsure (1)..(302): unsure at all n locations
aaggtacagcaatcgcaggaaccctagcgccgccgcacccgcaggaatgggtatcgacctcgtcgccggtgggaggaataagaagaccaagcgcactgcgcccaagtctgacgatgtctacctcaagctcctcgtcaagctctaccgtttcttggtcaggaggaccaagagcaatttcaacgctgtcattctcaagaggcttttcatgagtanaaccaaccgaccaccaatctccatgcgccgccttgtcaagtttatggaaggaaaggagaagaacattgctgtcattgttggcacagtca

SEQ ID NO: 42006 - DNA, 297 bp, Zea mays
cgaagagggagcgccctgcccaagcaaagagaaaccgcggcgcagaagagggaggaagggcagacgggcgagcaggatgagagaggtcatcagcatccacatcggccaggccgggatccaggtcggcaacgcctgctgggagctctactgcctcgagcacggcatcgagcccgatggcaccatgcccagtgataccacggttggcgtcgcacatgatgccttcaacacgttcttcagcgagaccggttctggcaagcatgtgccgagggccatcttcgtcgaccttgagccactgtc

SEQ ID NO: 42007 - DNA, 300 bp, Zea mays
  unsure (1)..(300): unsure at all n locations
gcgaatgaagaccattctcatgaatcagactaacnacattccagaaaatgtcgacatcactctgaaggggcgcacaagcattatggaagtgcccagatgaactctgaggagggacttcaatcacatcaatgtagagctgagtagtcttggaaagaaaaagaaaaggctccgtgttgacaagtggtggggtaacaggaaggaactggccactgtcagaaccatctgcagtcatgttcagaacatggatcaagggtgtgacactgggcttccggtacaagatgaggtctgtgtatgctcact

SEQ ID NO: 42008 - DNA, 298 bp, Zea mays
atttctatttctttcatggaacaagacaatacaaatttgatcctaaaacgaagagaattttgactctccagaaagctaatagctggttcaactgcaggaaaaattgaacattactaatttgaatggaaaacacatggtgtgagtccaaagaaggtgttttcctgaagaactgtctatttaatcagtcatttttaacctctagagtcactgatacacagaatataatcttatatatacctcagtttgcatatttttgtactatttagaatgtagccctttttgtactgatataatttag

SEQ ID NO: 42009 - DNA, 296 bp, Zea mays
actgaatccactcctgatccttacctttgtggcagctgctcttgctgccccctttgatgatgatgacaagatcgttgggggctacaactgtgaggagaattctgtcccctaccaggtgtccctgaattctggctaccacttctgtggtggctccctcatcaacgaacagtgggtggtatcagcatcccactgctacaagtcccgcatccaggtgagactgggagagcacaacatcgaagtcctggaggggaatgagcagttcatcaatgcagccaagatcatccgccacccccaat

SEQ ID NO: 42010 - DNA, 298 bp, Zea mays
ctgtcacgcttgcagcagcggccctctcccatcaacgaggagatagaaccctgtcgccgcgctaccgctccacatggctaccgcgctcggtggggagcacaaccccaccagcgaagccatggaggtcgaccctccgcgtgcctccgccgacgagaagcatgtcgcaactattattgcggggggtagtgatgcagtgacaggccacataatatcgactacgattgggggaaagaatgtgaaccaaagaggaccatcagctatatggctgagcgagttgttggaactggatcgtttgggg

SEQ ID NO: 42011 - DNA, 296 bp, Zea mays
tgtcagcaatgacctatatgactttctccaggtgttctttaagaagcacccagaatttgcaaagaatgacttctgtataactggagaatcttatgctgggcactacattccagcatttgcaagcagagttcaccaaggaaacaaagcaaacgagggcattcatataaacttgaagggatttgctatcggcaacggtctcactgatccagaaatccaatacaaagcctacacagactatgcgctggaaatgaatcttatcacaaaatccgactacgagaggatcaataggttcattc

SEQ ID NO: 42012 - DNA, 296 bp, Zea mays
ccaaatctatcaccttgcttgccctgcttcaccaatcttctacaagcacaaccctgttaagaccatcaagacaaatgttattggtaccctgaacatgctaggacttgcaaagagagttggagctaggattttgttgacatcaacctctgaagtttatggtgatccacttgagcatcctcaaactgaggcctactggggcaatgttaacccgattggtgttaggagttgttatgatgagggtaagcgtgtagcagagacgctgatgttcgactatcacaggcagcatggcattgaaa

SEQ ID NO: 42013 - DNA, 295 bp, Zea mays
atgggtgtcgggtttgcaagagggctcaatagagtcagggcagagacagttcgcgaaattgtgaccaaccaggacgccacaattccagttggtgctgtcctatctatcttctacacattgatcttaaccaaaattctggcgtacttcatgtgagtggattgtaaaataaaagggctgcttttaagtggtacagcccattgtcacttcataaattttgatcagtggaaaaaggattttcttttgcaaaagtaaagagatggactgattccacaagttccaccagaaatttacaaga

SEQ ID NO: 42014 - DNA, 297 bp, Zea mays
cgcgacgccaccaccacacgttcacggtagcgagagcttatcgtcgtcggcggcgaagatggtgtcgctgaagctgcagaagcggctcgcgcgagcgtcctcaagtgtgggaaaggcaaagtctggcttgaccccaatgaagtcagcgagatctccatggctaactcccgccagaacatccggaagttggttaaggatgggtttatcatcaggaagcctcagaaggttcactctaggtcccgtgcaagaagggcacatgaggccaagcagaagggaaggcactctggatatggcaag

SEQ ID NO: 42015 - DNA, 300 bp, Zea mays
ctcgacaaacgaccgacgacgcacgcggagatccggcgtactgcaaattttgaaaactgaactgtaagatggcatcagcagagctttcccgtgaggacaatgtgtacatggcgaactcgctgagcaggcggagaggtacgaggagatggttgagttcatggagaaggtagccaagactgttgactcggaggagctcactgtggaggagcgaaacctcttgtctgttgcatacaagaacgtcattggagcccgccgcgcctcatggcgcatcatctcctccatcgagcagaaggaggaggg

SEQ ID NO: 42016 - DNA, 293 bp, Zea mays
cagaggtcccgcggcttcggcttcgtcaccttctccacggaggacgcgatgcgcacgccatcgagggcatgaacggcaaggagctcgacggccgcaacatcaccgttaacgaggcccagtcccgcggcggccgtggaggcggcggtggcggatacggtggcgggcgccgtgatggaggcggctacggcggtggcggtggaggctacggcggtggtcgtggaggctacggcggcggtgggggatacggtggtgcaaaccgcggcggcggctacggcaacaacgacgggaactgg

SEQ ID NO: 42017 - DNA, 297 bp, Zea mays
gaggtcgttgcggaggcaggaagagagacgacggcggccatggcgacctccttccaggggacgaccaccaagtgcaccgcctgcgacaagactgtgtaccttgtggacaagctcaccgccgacaaccgcatctaccacaaggcctgcttccgctgccaccactgcaagggcaccctcaagctcgccaactacaactccttcgagggagtgctctactgcaggcctcacttcgaccagctgttcaagaggacagggagcttggacaagagcttcgaaggaactcccaaggttgtcaag

SEQ ID NO: 42018 - DNA, 290 bp, Zea mays
gagcctgacggaactgccacgatactgcgactttggactctttcactggtgctgggagtagtaggaggaaaaggagtttgctactaaagagtcggctgcttcagtgatgactccccatggtcaggaattacgatgagacccctcgatatattgcgttgggctccaaaagatgtcaacacccgcttcgcgctatatactagtgagaacccaaacaactttcaagaagttgccgcagattcatcaagcatcagtggctccaatttcataacaaatagaaaaactcgctttat

SEQ ID NO: 42019 - DNA, 298 bp, Zea mays
gagggagaggagaggaggatggctgcggcagcggggaggaaggtggcggtcgccgccgtgcagttcgcctgcaccgacgtcgaggcggagaacgtcgccaccgccgagaggttgattagagaagcacacaagaaaggtgcaaagattgtactcgttcaggaattgtttgatgggcactatttctgccaagctcaaagactggatttctttcggcgcgctaagccttacaaaggcaatccaactattataaggatgcaacagcttgcaaaggagctggaagttgtcatacctgtcagtt

SEQ ID NO: 42020 - DNA, 294 bp, Zea mays
gagccgcagacgcgccgccatgggccgtgtgatcccaggccagaggaacggtgccggttctgtatttcgtgcgcacgtgatagcaccgtaagggagctgcacgtctgcgtgctgaggacttcgcgaagcacaccggccacattataggcatcgtaaaggacatcattcatgacgctggccgcggcgctcccctcgcgagagtagtcattcgtgatccctatcgatctcagaagcggacagagctgcacatcgccgcatagggacatccacactggacagtttgtgtactgcggc

SEQ ID NO: 42021 - DNA, 207 bp, Zea mays
caacctcttctcccctgtttcctctcgtgcgttctccgcaggagctgatgagggctcgcggcagggcagaggtctccggtgtttttgttccagaatctgtagcaaatggctgacggcgaggacatccagccccttgtttgtgacaatggaactggcatggtcaaggctggttttgctggtgacgatgcgccaagggctgttttccca

SEQ ID NO: 42022 - DNA, 296 bp, Zea mays
gctcgagctagaactagtcaaaccgagaagagaccaggccgaaggaaaacaatcctgaaaccaagccatgggtctgcaggaggaatttgaggagcatgctgagaaggcaaagaccttgcctgagaacacgagcaatgagaacaagctgatcctatacgggctctacaagcaagccacggttggagatgtgaataccgatcgtccgggcatattctaccaaaaggacagggccaagtgggatgcctggaaggctgttgaaggcaaatcgaaggatgaggcgatgaatgactacatca

SEQ ID NO: 42023 - DNA, 296 bp, Zea mays
gctcgaggcagagaactcagagctcttcgtgccctcctgcaagcgccaaggaggaagagaagtgtgcgtagttccatagacccctgacaaatcagcgccatcatacaacaccagcaactgttggtttagttgtaaatctgccttgcagccgtattatctgtatcaccgtttttgtgtcgcgatggctggcctatctttggaacatccttgggcgttcgccttcggtctcctaggcaacgtcatctccttcatgaccttcctggccccgataccgacgttctaccgcatctacaaga

SEQ ID NO: 42024 - DNA, 297 bp, Zea mays
gctcgagatgaaagtcactattcgtcagctgggcccttccatgatacagcagatgcagcagccttgcaatgagtgcaaggggactggagagagcatcaatgagaaggaccgctgcccagggtgcaagggtgagaaggtcgttcaagagaagaaggttcttgaggttcatgttgagaaggggatgcaacacaaccagaagatcaccttccctggtgaagctgatgaagcgcctgatactgtcactggagacattgtattcgtcctccagcagaaggatcactccaaattcaaaagaaa

SEQ ID NO: 42025 - DNA, 300 bp, Zea mays
ctgacaagctgttgacccattctcaaaatttgggccaaaggcagagatatcacatatattccgcgcaccagagaagaggccacccaaggagctctcgctagcgttcacgggtctcacgcttctgccgtttattggattcttgatagggctcgttcgtcttggagtgaacttgaagaacttcccgtccttgccaggaccggccgcatttgcctcacttttccatgctgggataggagcagtcctgatgctctacgttctcttctggatcaagttggaccttttcacaactctcaagtacct

SEQ ID NO: 42026 - DNA, 289 bp, Zea mays
gcaccacaagcgagcgagggacccggggcggaagaagagagagaagacgtctctctcctctcggcgtccccgttccccaacctctcgtctgctgcctgcctgcctgcctgcctgcaaaaaggagtttgtcatggcgtctaagcggctcctcaaggagctgaaggacctgcagaaggacccccccacatcatgcagtgcaggtcctgctggtgaggacatgtttcattggcaagcaacaattatgggaccacctgacagtccctatgctggtggtgttttttttagtgaa

SEQ ID NO: 42027 - DNA, 277 bp, Zea mays
caccgctgttaggttctaccaggagaccttcggcgtccctccggccacgcgagctcgccgaaatggtcgcccacaggttccatcagtaccaggtggtgggtcgcgcgctgccgaccccaaccgatgagcaccccaagatctaccgcatgaagctctgggccaccaacgaggttcgcgccaagtccaagttctggtacttcctgagaaagctcaagaaggtgaagaagagcaatggccagatgcttgccatcaacgagatctttgagcgcaacccgac

SEQ ID NO: 42028 - DNA, 276 bp, Zea mays
ctccgtccgcgtactctcggtttcggcgatgtcggggcgcggacaagggcggcaaggggctgggcaagggcggcgccaagcgccaccgcaaggtgctgcgcgacaacatccagggcatcacgaagccggcgatccgtaggctggccaggaggggcggcgtcaagcgcatttctgggctcatctacgaggagacccgcggcgtgctcaagatcttcctcgagaacgtcatccgcgacgccgtcacctacaccgagcacgctcgccgcaagaccgtca

SEQ ID NO: 42029 - DNA, 275 bp, Zea mays
cgcaatcacaacgaacaaaagctctcgatctcaccgacaccgaggaagaagagatcaatggcgtccgagcagggagtcgtgatcgcgtgccacagcaaggctgagtttgacgcccacatgaccaaggcccaggaagccggcaagctggtggtcatcgacttcactgccgcctggtgcggtccatgccgcgccatcgccccactgttcgtcgaacacgccaagaagttcactcaggtcgtcttcctgaaggtggacgtggacgaagtgaaggaagt

SEQ ID NO: 42030 - DNA, 273 bp, Zea mays
atgaaaatgacaaattcctgatcgatggatttccaaggaatgaggagaatcgtgcagcctttgagaatgttaccaaaatttctcctgcatttgtgctattctttgactgttctgaagaagatatggagaaacgactcctggggcgcaatcagggaagggttgatgataacattgaaactatcaaaaaaaggttcaaaacctttgttgactcaactctgcctgtcattgagcattacaactcaaaggacaaggttaaaaagattgatgctgcaa

SEQ ID NO: 42031 - DNA, 269 bp, Zea mays
cgttcataccattcccgtttacatggcccttatagcgttcaagtgaagataaagattcaaacaactcagatgagaagtgtaacacgtttgcatctgctgagtcggaggactcggtgtcaggtgttctatatgatatgttgcaaaaggaggtcatttctctaaggaaggcgtgccacgaaaaggatcagagcctgaaagacaaggacgacgcagttgagatgttggcaaagacagtagatactttgacaaaagctatggagtcagatgcc

SEQ ID NO: 42032 - DNA, 272 bp, Zea mays
ctcccatatcgggttctcccttcctcttcctgtttccgcgcgcgagaccgccgccccgggtgggctctagatcccgatggcctcgcgccgccgcaccctgctcaaggtcatcatcctcggcgacacggggttgggaagacgtctttgatgaaccaatatgtgaacaagaagttcagcaaccagtacaaggctacgattggggcggatttcctcaccaaggaggtgcagttcgaggacaggctcttcactctgcaaatatgggacactgctgg

SEQ ID NO: 42033 - DNA, 258 bp, Zea mays
tggccgggtggcctatgtctcctttggacctcatgccggaaaattggtcgcgattgtagatgttattgatcagaacagggctttggtcgatggaccttgcactcaagtgaggagacaggccatgcctttcaagtgcatgcagctcactgatttcatcctcaagtttccgcacagtgcccaccagaagtatgtccgacaagcctggcagaaggcagacatcaatacaaaatgggcagccacacgatgggccaagaagat

SEQ ID NO: 42034 - DNA, 271 bp, Zea mays
ggagccggtgcggaagagcgtgtgcgtgaccggcgctggcggcttcgtcgcgtcggagctggtgaagctcctcctctcccggggccaatacgcggtccgcagcaccgtgcgcgaccctggtgctagcaagaatgcccatctcaaggtgctggaaggagctgaggaaaggttgcagcttctcaaggctgatctgatggactacaacagcattgcatcagcagttgccggctgtgagggtgtcttccatgtagccagtcctgtcctttcccat

SEQ ID NO: 42035 - DNA, 266 bp, Zea mays
ccgcgcgtcgcggtgaggaacacgtctccaccgttgtagctatgccgtccaagggtccgctgcagtctcgttcaagtcttcggacgcaagaaaacagccacagctgtggcccactgcaaacgaggaaatgggctcatcaaggtgaatggacgtcccctggagatgatcgagccgcgcacgctgcagtacaagttactggagcctgttctgcttctgggcaaggagagatttgctggtgtggatatccgggtccgtgtgaagggtgg

SEQ ID NO: 42036 - DNA, 268 bp, Zea mays
ctcgagcgatctccgtctccacgccgcgtcctcccgcacgaatccgcgctccggccaacgggccaagccctagccacccccgcccattcatggtgggcgggccgtgagatctctagggaggcttgtcggcttcgtcgggcgggaggggaggagatgggcgcccggaacagcgctgccgccacgccggtgctgctcaacgtgtacgaccttacggccgcgaacgattacctctactggctcggcttcggcgtcttccactccggaatcg

SEQ ID NO: 42037 - DNA, 267 bp, Zea mays
cgcagacctcggttacatcttaggggacaccactgagccatgcagaacatataaaggttcaaggtttcgagctgctattgttttcattctaggattctggatgttggacctggcaaacaatacagtgcaaggtcctgctcgtgctcttctagctgatctttcaggtcctgatcagtgcaattctgcaaatgcaatattctgctcatggatggctgttgggaatattcttggtttttcagctggagcgagtggggaatggcacaagtg

SEQ ID NO: 42038 - DNA, 147 bp, Zea mays
atcatacatgagctgtgagacgggccggcaccagagcctgcagtgccgcagccctgaagaacactgcctggatgtggtgacccactggatccaggaaggtgaagaagggactccaaaggattaccgccacctccgtggctgtggcta

SEQ ID NO: 42039 - DNA, 270 bp, Zea mays
  unsure (1)..(270): unsure at all n locations
agaaaaaaaacacgagaaaaatcaaatcaggagacggggattccagagagcccctctcgggtagggaagggaaggagaggcgaacggnaggcgagatgggggcggccgaatccgtgccggagacctccatacacgaattcaccgtcaaggattgcaacggcaaggaagtgagcctggaaacctacaaggggaaggtcctccttgttgttaacgtcgcctccaaatgtgggttcacggagaccaattacacgcagctgacggagctttatc

SEQ ID NO: 42040 - DNA, 268 bp, Zea mays
atttttcttcactccaaaagactgagatgactactgctgagagggaacttgatgctaacacaaattatgactggaatagaatacaagaaagtggaaaagacgctgagcttctgtttggacccggctatactggtcttgcgaatcttgggaatagttgctatatggcttcaataatgcaagtcatgttttcaatccatcctttcatatcaaggtacttcgagaaacagagtttgaaagctgcatttgcaactgcacccgctgatccaac

SEQ ID NO: 42041 - DNA, 267 bp, Zea mays
cagagggagagattggagggaggcccctgcccaaggcaagagaaaccgcggcgcgcggagagggaggaagggcagacgcagacgggcgaacaagatgagggagatcatcagcatccacatcggccaggccgggatccaggtcggcaacgcctgctgggagctctactgcctcgagcacggcatcgagcacgatggcaccatgcccagtgattcctcggttggcgtcgcacatgatgccttcaacacgttcttcagcgagactggttc

SEQ ID NO: 42042 - DNA, 266 bp, Zea mays
cgcgtgatcccgaggcgtatccatacccctgcatctacacacagatcgagacggaagctatttctgacgaggagtctgatgtgtcagattctgaaacaaatggagaactcgagctctcaaaagttatggaaatgcgcatcataccttcagatcctggtcaattggatgaactctttgaagcattctgcaattgcgctgagcttaaccctgatcctagtgctgagagtgatgaagaacatggctgggttcatggtgatgagggttat

SEQ ID NO: 42043 - DNA, 276 bp, Zea mays
gagggattgtgcggtaaagcgtgatggcagcgccaccggcgagggcccgagccgactacgactacctcatcaaactgctcctcatcggtgacagcggtgttggaaaaagttgtctcctgttacggttttcagatggatcattcaccactagcttcattaccactattggcattgacttcaagataaggactgtcgagttggatggcaaacggattaagttgcagatctgggacactgcaggccaagaacgtttccgcacgattactactgcttact

SEQ ID NO: 42044 - DNA, 298 bp, Zea mays
cacgtacgtggcgcaggctccgaatccggctcgagctcggcatctacgacgagcccatgacccccgggcagtgcaacatggtggtcgagaggctcggcgactacctcgtagagcaaggcctgtaaacggaattgcttcagtccaatcggaattgtttataatttgttgttgtcgttccggcaaataattttgtgtggtttcacctaaaagtttggttgtcgtatgatttgtaaaccccgaacagtatctatatgtgattgaactgcgcctacctattcttttattatacgggaatatg

SEQ ID NO: 42045 - DNA, 267 bp, Zea mays
gcaggcagtcccatcattcccttcttcatttccccatctcttcgctggcaaggaccaactgcggtgtcttatcccatgtgcaatagatcaggatccatattttaggatgactcgtgatgttgctcctagaattggttatcagaaaccatcactgattgaatctagattttttcctgctcttcagggggagaacacaaaaatgtcagctagtgacgcaaattcggcgatatacgtgacagatagtgctaaagaaataaagacaaaggt

SEQ ID NO: 42046 - DNA, 266 bp, Zea mays
agttgatggtttacccaatctaaatcttgccttcgtggctcatattttccaaaaaagaaatgagttgtccaaacaaatgaaacaagtttcctttgtggatggactctctgatgatgctcaagtttccagggaagaaaggtcattccggctgtggattaacagccttggaatttcaacttacatcaacaatgtgtttgaagaccttagaaatggatgggttctccttgaggtgattgacaagattgctccaggctcagttaattgga

SEQ ID NO: 42047 - DNA, 265 bp, Zea mays
agattcacatactgtgttgttgctgttgaatcggtggggcaacaaattcctattgctttcatggatagggttaaggaggatttcacaaaaaggtatggtggtgggaaagctgctactgctgcagctaacagcctcaatcgagagtttggatcaaaacttaaagaacacatgcagtattgtgtggatcaccctgaagaggttagcaagctggccaaagtgaaggcgcaggtttcagaagtcaagggtgttatgatggaaaacattg

SEQ ID NO: 42048 - DNA, 265 bp, Zea mays
atctggagctactgccttgccctcataggatctaagacatggcacgcaataaggccaagagaagggcagcagcagaagggagctccaatgtgttctccatgtttgaccagactcagatccaggagttcaaggaggctttcactgtaattgatcagaacagggatggcattattgacaaggaggatcttcgggacacctttgcggccatgggcctctcaatgtgaagaatgaggaactcgacgccatgatgaaggaagccagtggg

SEQ ID NO: 42049 - DNA, 265 bp, Zea mays
ctcgagccgcttcctctctccctccgccgccgctgcgcacgcgggaacaagcgacatgggcgtctacacctttgtgtgccgcaacaacggcggcgagtggaccgccaagcagcactccggcgagatcgaggcttccgccgctaccccatacgagctgcagcgccgcctcgtcgctgccgcctccgcggccgactctgcctacggcgtccagtcgtccttctccatggtcacccccagctccgccgtgttccaggtgatcgtcggt

SEQ ID NO: 42050 - DNA, 266 bp, Zea mays
cgcaacggcgtcaagttcggcgaggcggtgtggttcaaggcgggctcccagatcttcagcgagggcgggctggactacctcggcaacccgagcctggtccacgcgcagagcatcctggccatctgggcgtgccaggtggtgctcatgggcgccgtcgaggggtaccgcgtcgccggcggcccgctcggagagcgtggtcgacccgctgtaccctggcggcagcttcgacccgctcgggctcgccgacgacccggaggcgttcgccg

SEQ ID NO: 42051 - DNA, 265 bp, Zea mays
aaatcattcaagatacacgcactttcaaagataatgatactgcacttgaagaggttcagttatggaaatcatgggagcactaaagtctataagccactccactttccatgtactggttcttagtcgtgatctgctgagctcaccatcacaagagggtagaaaatacgagcttgttgcaaccatcactcatcatgggagggacccctacagggggcactacaccgctcacgcaaagcatggcaacgggcaatggcttcgtttcgac

SEQ ID NO: 42052 - DNA, 260 bp, Zea mays
cacaacaatgcagctggtatcccggcctcagcagtttgatgtcatggtgatgcctaatctctatggtaacattgtcaacaacgtctgtgcagggctagttggaggcccaggccttgtggctggggccaactatggccatgtgtatgcagtattcgagacagctacaaggaacacaggcaaaagtattgccaataagaacattgctaaccctactgccacattgctagcaagttgcatgatgctagaccacctcaagctcc

SEQ ID NO: 42053 - DNA, 264 bp, Zea mays
ctgaaatgaaaagttctcttgctcctcaattgctagaactcatgaagatgcttttcaatgtggagacatatagagctgctatgatggaatttgaaattaatatgtcagaaatgcctcttgggaagctaagcaaggaaaatattgagaaaggatttgaagcattaactgagatacagaatttattgaaggacaccgctgatcaagcactggctgttagagaaagcgtaattgttgctgcgagcaatcgctttttcactcttatcc

SEQ ID NO: 42054 - DNA, 259 bp, Zea mays
caagctccgggcagccctggcctgcagcaaagagttgtggatcctgaacaggtacctgagctacaccctgaacccggacttaatccggaagcaggacgccacctctaccatcatcagcattaccaacaacgtcattgggcaaggtctggtctgggactttgtccagagcaactggaagaagctttttaacgattatggtggtggctcgttctccttctgcaacctcatccaggcagtgacacgacgattctccaccgag

SEQ ID NO: 42055 - DNA, 256 bp, Zea mays
cggcacacacaccacaccacacctcctcgcttccactccgctcgtctgacatctcgtcccgtcctttcctttcgaagcctcgcgagccccgacgatggccaccgccgcggtgtcggtcgacgagaagctcgacaagcacccgccgaggtcgccaagctcgaccagatcagcgagaacgagaagtccgggttcatcagcctcgtgtcacgctacctcagtggggaagcggacagatcgagtggagcaagatccgacc

SEQ ID NO: 42056 - DNA, 260 bp, Zea mays
tgcactgcatctcgtcccaagagagctctcgctgaagattgtgagcaagattgaagctggcgagcattttgcagtctatgtcgtcctgccaatgtggccagaaggccctcctgctagtgggtcgattcagggtatactggactggcagaggaggaccatggagatgatgtacaatgacatctctgttgcgctcgatgcaaagaggatcgacagggactcgagggattaccttacattcttttgcttggggaacagggagg

SEQ ID NO: 42057 - DNA, 267 bp, Zea mays
ctttgcggagtttggtgaagttttgcatgctcgagttgtgaccgatcgtgtcagtgggttttctaagggatttggctttgtaaggtatgctacgaccgaagaggcagccaagggaatagaaggaaaggatggaaagttccttgatggatgggttatttttgcggaatacgctaaacccagaccaccgccggaggaaacagggatgaattcgcagccccagcagtcatggggagctccatcaggttcctggggtgcacagtagatgaa

SEQ ID NO: 42058 - DNA, 260 bp, Zea mays
cagccaccttggtcaccggcggcgatggcgagttccaagtccggcatccctatcaaggcagaacaagattcggatggctcggcacaaagcacagctgatatgacggcttttgtgcaaaaccttcttatgcagatgcaaaccaggttccaagctatgtcggagaacatcatttcaaagatagatgaaatgggtgcgagaattgatgaattggaacagagcctcaatgacctcaaggctgagataggcggtgaaggcatgtc

SEQ ID NO: 42059 - DNA, 239 bp, Zea mays
tattgttgtgggtcaagatgattgaacctgagcttgcctttgcggatctgaacgatgacatggcttgtgcaactgcatatctccagtatgtagtaaagtatattctggagaactgcaaagaggatatggatttcttcaatacttggattgaaaaaggcatcatagatcggttaaatgatgtagtagagaagaacttcgttcacctgtcttacactgatgctgttagctactactgggtc

SEQ ID NO: 42060 - DNA, 313 bp, Zea mays
tcgtgatggtgtcagccacacagtgccaatctatgaaggttatgcccttcctcatgccatcctgcgccttgaccttgctgggcgtgacctgactgacagcctgatgaagatcctcactgagagaggttactccttcaccacctctgctgaacgcgaaattgtaagagacatcaaggaaaagcttgcatatgtggctcttgaatacgaccaggagctcgagaatgccaagagcagctcatctgtggagaagagctacgagctgcctgatggtcaggtgatcaccattggggcagagaggttcagatgccctgag

SEQ ID NO: 42061 - DNA, 293 bp, Zea mays
aaccattcctcccaacaccacctcgccgcgatctccgtagcctccgtcgcgtcgagcatcgatcatgtcggcctactgcggaaagtacaaggatgagctcatcaagaatgctgcctacattggcacccctggcaagggtatccttgctgctgatgagtccactggcaccattggcaagcgcctttccagcatcaatgtcgagaacgttgaggagaaccgccgtgccctccgtgagctcctattctgctgccctggggctctcgagtacatcagcggtgtgatcctcttcgagg

SEQ ID NO: 42062 - DNA, 244 bp, Zea mays
cttgccgcgccgccacaatggtgcgcatgaatgtcctggcagctgctctcaagagtatcaacaatgccgaaaagagaggcaaacgccaggatgttattaggccgtgctccaaagtcatcgtccggtttctcactgtgatgatgaagcatggttacattggcgaatttgaaatcattgatgaaaacagagctgggaaaattgttgtgaacctcacaggcaggctagacaagtgtggggtgatcag

SEQ ID NO: 42063 - DNA, 306 bp, Zea mays
gagctgagcagtcaagatgtgtgacttcaccgaagaccagaccgcatagttcaaggaggccttccagctgtttgaccgaacaggtgatggcaagatcctgtacagccagtgtggggatgtgatgagggccctgggccagaaccctaccaacgccgaggtcctcaaggtcctggggaaccccaagagtgatgagatgaatgtgaaggtgctggactttgagcactttctgcccatgctgcagacagtggccaagaacaaggaccagggcactatgaggattatgtcgaaggactgcgggtgtttgac

SEQ ID NO: 42064 - DNA, 315 bp, Zea mays
ccgacagaatctgccagtggactggtttatttccttctgcaatcaatcacgtgctgataaatgagtatcatcctaaccaagggatcatgccacaccaagatggtcctgcctactaccctgtcgttgctatcatatctcttgcttcacctgtcgtgattaatttcacaccccatcaaaagcttagagagcagcaggacactgatccacaggacttactggcccatgagttgccttcgccagctgagacagagaacaacggctctggatcacaagaacggtgagccacaaatgaatctgatccttcatcttcatcac

SEQ ID NO: 42065 - DNA, 206 bp, Zea mays
ctcgagccgaactgcttgagaaggctgaggagctcatcaggatgggcttgcatccaagtgagatcatcattggctacactaaagccatcaacaagacaattgagatcttggaggatcttgttgagaaaggctcagagaacatggatgtgagaaacaaggaggacgttgtgttgaggatgagatccgctgtcgcgagcaagcagttt

SEQ ID NO: 42066 - DNA, 256 bp, Zea mays
attccagtgcgtgcctggcaagtggcaaactcgagctgtctagtcctcggttcgcgaatcttccacagagaggcagacggcaggactcgcttcaagctcctcatctcgcgcagggggggtcgcctgagatcacagcgacaatggtgaaggcagttgctgtcctcgccggcactgatgtcaagggcaccatcttcttttcacaggagggggatggtccgaccaccgtgactggaagtatctctggcctcaagccagg

SEQ ID NO: 42067 - DNA, 248 bp, Zea mays
gaatcctatgaaagtgcacactccatgcatgatttgactggctctattgcagagaaacttggtgtccaagctcctccagttagaatcgacagccaagcaaaatatggtgctctggctcgaggtgatggcgccatttacttgcgctttccacacaaaggttatagcgagaaaatatgggaccatgcagcaggctcaattgtcgtgacagaagctggaggcatagtgacagatgctgcgggaacgacttg

SEQ ID NO: 42068 - DNA, 154 bp, Zea mays
gtgcggcggaggcaactgtgcaactttcttcggtcgtcccgaatccgggttcatccgacatcagccacctccaccatgccgcccaagttcgagcccaacgagatctcagtcgtgtacttgatgtgcatcgtaggcgatgtcggcgccacatccg

SEQ ID NO: 42069 - DNA, 246 bp, Zea mays
ggcaaatcaggctgtggagcgggcagctggtactgatggccaaaagataacatacggtgtcataaaacaccgtttgggcgatctattttatcgcctagtatctcaaaagttcgaggatcctgccgaaggtgaagaagctttggtcggcaaatttaagaaactgtatgatgacctcaacactggtttccgcaatctcgaagacgaggcacggtgaactagtgtagattctgtgtaaacaaggactgc

SEQ ID NO: 42070 - DNA, 260 bp, Zea mays
gtgttgtaacagatagcggtgatctgtattcttggggttcaaatgaaaatggctgccttggtctgggaggtacggatatggtccgctctccggaaattttgaaaagttctctatttaaacttcctgtatctaaggtatcttgtggttggaagcacacagctgtagtttcaggtgatgacatctacacatggggttggggaggcgccaatgggacttttttcgaagagggccattcttccggtggacagctgggacatgga

SEQ ID NO: 42071 - DNA, 275 bp, Zea mays
ctgcagccatgagtaagttgcagtctgagtctgtcaaggatgccagctcccagattgttggggatgccaaggagaagaataggaagttcactgagactgtggaacttcagattggtctgaagaattatgatccacagaaggacaagcgtttcagtggctctgttaagttgcccgatatccctcgtcccaagatgaaggtgtgcatgcttggtgatgcccagcatgttgaggaggccgagaagatgggacttgactacatggaggttgaggctctc

SEQ ID NO: 42072 - DNA, 123 bp, Zea mays
tcgttaaagaatggtgctcctgtagaaatggagactagtgaatgctcatggaacagctgtgggtctcccatctgatgatgacatgggcaacattgaagttggtcacaatgcacgtggtgctga

SEQ ID NO: 42073 - DNA, 298 bp, Zea mays
tggagctgaaacgcgatcctggattgtgcggttgcttcatcttgctgtgtcatggcttgccttgtgggctatatgttatgaggaggccaagaagaggatgtatgcttgtagtacgacgacttatgttggttttcaggctgtaatgaccgaggaaatgtcagaaaaatttcgcggtttgcctggagtagtttacatttggcctgattcatatcgatatccagaaacaaaggagtacggaggagacaagatatgaccatggtgtcatcactccaagaccaccacctgttcattatagcag

SEQ ID NO: 42074 - DNA, 243 bp, Zea mays
ggagccacctgactaaattttagtcccgttagatcaaatgtttgaatactagttagaatttttaaatatagtataattacaaaattaattacgcagataaagactagagataaggactaaacggtaagatgagtcaattaggcctgattagtctattattcgtccatgtgatgctacaataaacatttgctaaccatggagtcattaggcttaatgaatttatctcgtcgtttagtcttcatc

SEQ ID NO: 42075 - DNA, 265 bp, Zea mays
cctgtcaacagtggccagccccccaactatgagatgctcaaggaggagcacgaggtggctgtgctgggggcgccccacaagcctgctcccccgacgtccaccgtgatccacatccgcagcgagacctccgtgcccgaccatgtcgtctggtccctgttcaacaccctcttcatgaacccctgctgcctgggcttcatagcattcgcctactccgtgaagtctagggacaggaagatggttggcgacgtgaccggggcccaggcta

SEQ ID NO: 42076 - DNA, 299 bp, Zea mays
gcgacggcgagcgtgtgagccgcagccgcgagaagcacgccctgctggaggggcggaccaaggagctgggctacacggtgaagaagcatctgcaggacctgtccggcaggatctccagagctcggcacaacgaactctgaaggcattggggagcccagcccggcagggaagaggccagcgtgaatgacctgggctcttggccgtggcatttccgtggacagcccgccgtcaaggtggctggggctggcacgggtgtcgaggcaggaaggattgtttctggtgactgcagccgctgccgt

SEQ ID NO: 42077 - DNA, 147 bp, Zea mays
caaacacatgggatcggtttgagttccgcattcacaagagggtgattgacctaatcagctcccctgatgtggtgaagcagatcacctccatcacaattgagcccggtgttgaggttgaggtgaccattgccgacgtgtaaggacgtg

SEQ ID NO: 42078 - DNA, 292 bp, Zea mays
gtggtgaaaggtcattgattgcaaatctgtcagcggcaaactgttacaaatctgagcatctaaagagaccagagaactgggcactagttgaaaaggcaaaatacatctacattgctggatttttccttacagtgtcgcctgattctatccagctagttgctgagcatgctgcagcaaataacaaggtgttcctgatgaacctctctgctcccttcatctgtgagttcttccgtgatgcccaagagaaggtcctcccggatgctgactacgtcttcggcaacgaaactgaggc

SEQ ID NO: 42079 - DNA, 156 bp, Zea mays
tcattggaaagtattaatgaagcttagagaacctataattacagctacaatttggtcctcaggaaaaattatttgcactggagcaacgagtgaagaagaagcgagatttggtgccagacgtttagcccgtagtgctgagaaactaggttttcaggt

SEQ ID NO: 42080 - DNA, 211 bp, Zea mays
cggctcgagggaagcagctggcttcactgctcaggtgattatcctgaaccatccaggccagatcagtgctgctatgccctgttctggactgccacacggcccacatagcatgcaagtttgccgagcttagagagaagatcgatcgtcgttctggtaagaagctggaagatggccccaaattcttgaagtctggtgatgctggcattgttga

SEQ ID NO: 42081 - DNA, 292 bp, Zea mays
gcaatcatctcatgctacagccaacgttacctccgtattcctaacagaaacgatgttgctcgcatacttcgtgtcaacgctgataggggtttcccgggcatgcttggctcaattgactgtatgcattgggaatggcgtaactgtccaactgtatggcggggtcaattttgtggccggaactcacgtccaaccatgatattagaagctgtggcgtcgtacgacctctggatttggcatgccttttttggaatgctaggaagttaacaacgacctcaacgtgctccataggtct

SEQ ID NO: 42082 - DNA, 219 bp, Zea mays
ctgctcttcctccttccccgcacctcgtccacacgctccgctccgattccgcccgcgtccgcggacccagatctggcgcccgcgcccatggcgacgcgcaggcgaatgctcctcaaggtcatcatcctcggcgacagcggggtcggcaagacctcgctgatgaaccagtacgtcaacaacaggtacaacaaccagtacaaggcgaccatcggcgcggat

SEQ ID NO: 42083 - DNA, 294 bp, Zea mays
ctcgagccgcacacactcgagaactccatttcgatcccatttgagatcaacccatcctcgtttcctccgtctagcagcctctcaccctcatggccaagatcaagatcgggatcaatgggtttggcaggatcggaaggctggtggccagggtggccctgcagagcgacgacgtcgagctcgtcgccgtgaacgaccccttcatcagcaccgattacatgacctacatgttcaagtatgacactgtgcacggacagtggaagcaccatgaggtcaaggtgaaggactctaagaccc

SEQ ID NO: 42084 - DNA, 292 bp, Zea mays
ctctctccatctccctgctcctccgccttcttcttgatccagccaagccagggatcgccatgtcggactcggaggagcaccacttcgaatcgaaggccgacgccggagcgtccaagacctacccgcagcaggctggcaccgtccgtaagaacggcttcatcgtcatcaagaaccgcccctgcaaggttgtggaggtttctacctcaaagactggtaagcatggtcatgccaaatgccactttgttgccatagatatattcaacgggaaaaagctcgaagatattgttccttc

SEQ ID NO: 42085 - DNA, 285 bp, Zea mays
cggatctcgctcaccttactcgagaagcacaaggtaccgaagtcgctctaggagtgtcgactctagtgatgctgaaaaccctgggaacaacctgtatgtgactggtttgtcggctcgtgtaacggatcgagatctggagaagcacttctccactgagggtgaggtgattgatgcaagcgttgtgtatgatccttggacaagggaatcacgggggtttggttttgttaccatggctgctgttaaagatgcagatcgctgcatcaaatatctggaccgttctgttgt

SEQ ID NO: 42086 - DNA, 292 bp, Zea mays
agcgaacccgcgtgcaacctgtcccgactctagccgcctcttcaactcgccatggatcccaactgctcctgcgccgccggtgactcctgcacctgcgccggctcctgcaaatgcaaagagtgcaaatgcacctcctgcaagaaaagctgctgctcctgctgccctgtgggctgtgccaagtgtgcccagggctgcatctgcaaaggggcgtcggacaagtgcagctgctgcgcctgatgctgggacagccccgctcccagatgtaaagaacgcgacttccacaaacctggat

SEQ ID NO: 42087 - DNA, 285 bp, Zea mays
gcccgccgccaggagagccggctcggtcggttcgtcgaagatcccggatctgctctgtcacgaggtctttcggcgggtgttgtctcgcgaggtgtagcgagccaaggtctggtcgcctgttcaggagagtttcgagaagctgaaatggctcctaaagctgctcctgccaagaagggtgatgccaagacccaggccttgaaggttgccaaggctgtgaagtctgggtcagtaaagaagaccaagaagatccgcacgtccgtgacatttcaccgccccaagaccctg

SEQ ID NO: 42088 - DNA, 245 bp, Zea mays
gaggagcatggcgaggttaagctggggatacgacgagcacaacggtcctattcactggaatgaattgttccctattgcggatggttatcagcagtctccaattgagattaaaaccaaagaagtgtaatacgactcctcactccgacctctcagtatcaagtatgatcctgcctcggcgaagatcatcagcatcagtggccattccttcaacgttgacttggacgacacagaggacaaatcagttc

SEQ ID NO: 42089 - DNA, 292 bp, Zea mays
ggccgcctccctaccgctccaagcccagccctcagccatggcatgccccctggatcaggccattggcctcctcgtggccatcttccacaagtactccggcagggagggtgacaagcacaccctgagcaagaaggagctgaaggagctgatccagaaggagctcaccattggctcgaagctgcaggatgctgaaattgcaaggctgatggaagacttggaccggaacaaggaccaggaggtgaacttccaggagtatgtcacttcctgggggccttggctttgatctacaatg

SEQ ID NO: 42090 - DNA, 288 bp, Zea mays
gtctgtccgtagttgcatcgtgagccaagacctatctgttatcaacttggtgattgtgaagaagggtgagaatgatctgcctggtctgactgacactgagaagccaaggatgaggggtcccaagagggcctctaagatcagaaagctgttcaaccttaacaaggatgatgatgtacgcattacgtgaacacataccgcagacattcactaccaagaacggcaagaaggtcagcaaggcacctaagatccaacggcttgtgacacccttgaccctccagaggaagcgtg

SEQ ID NO: 42091 - DNA, 287 bp, Zea mays
ggaagaaaagaagctgaaccatggggaagagaaagtcagctgctaagccacctcctaagaagcggatggacaagcttgacactgtcttttcctgcccattctgcaaccacgggagtagtgttgagtgccgaattgacatgaagaatctgattggcgaacatcttgtagaatctgtcaggaaaacttcagcacaactgttaatgcactcactgagcctattgatatatatagtgaatggattgatgagtgtgagcgtgtcaacacgtgttgaaggcgacgatgatgcg

SEQ ID NO: 42092 - DNA, 261 bp, Zea mays
atctcacgctcgcgtcaccggagctctccagaaccgaaccccaactgcgcaagggagagcgatccgaacccctcggaggcttcgtcaacgacgccgagaacactttgaggactggctgaagacgatgtccagcgccgtgtgtgtgaaaatggcactagaatggtcaaggcgggtttcgctggtgacgacgcaccgagagctgtctttcctagcattgtatgcaggccacgccacactggtgtgatggtggtcatgggacaa

SEQ ID NO: 42093 - DNA, 292 bp, Zea mays
aaatccccaaagcctccgacccccttcctctctccctccgccgccgctgcgcacgcacgggtacaagcgacatgggcgtctacacctttgtgtgccgcaacaacggcggcgagtggaccgccaagcagcactccggcgagatcgaggcttccgccgctaccccatacgagctgcagcgccgcctcgtcgctgccgcctccgcggccgactctgcctacggcgtccagtcgtccttctccatggtcacccccagctccgccgtgttccaggtgatcgtcggtgctgtcggtgg

SEQ ID NO: 42094 - DNA, 288 bp, Zea mays
gaggtttccaactggggtttgttcttctgtgtttcaattggtctgtgggctggtttgattattggttttgtcacagaatactacactagcaatgcatacagtcctgtgcaagatgttgcggattcgtgcagaactggtgctgccactaatgtcatttttggtcttgctcttggatacaagtctgttatcatcccgattttcgctattgctgttagcatctatgtcagtttctccattgctgcgatgtacggcattgcagttgccgctcttggtatgctgagcacaatc

SEQ ID NO: 42095 - DNA, 251 bp, Zea mays
cgaagagacgacttggaatctcttggatatgtactcatgtacttcctaaggggcagccttccttggcaaggtcttaaagcaggaacaaagaagcaaaagtatgagaaaattagcgagaagaaagttgcaacatcaattgaggctctatgccgtgggtatcctactgagtttgcatcatatttccattattgccgctcactgcggtttgatgacaagcctgactgttcatacctcaagcgattattccgtga

SEQ ID NO: 42096 - DNA, 290 bp, Zea mays
ggaagagctccattgaactgggagacaagagtcaagatatctctggacgtggcccatggaatcgcccaccttcatgccgagggaggagggaagttcatccacggcaacatcaaagcatcgaacgtcctcctatcgcagaacctcgacggctgcgtctccgagttcggcctggcacagatcatgaccaccccacagaccccgccgcggcccgtcgggtaccgggcgcccgaagtcctcgagaacaagaaatcgacccagcagtccgacgtctacagcttcggcgtcctgct

SEQ ID NO: 42097 - DNA, 275 bp, Zea mays
cgtggtttaaccacattgatgcgctcgtgaggctgagcggaattactgcagagggccaaggtgtgaaggttgaatcctcagcagttccttcagccccaactccagatgttgctgaagcacaggccccagttgctgaggaggacgacgacgatgatgttgacctttttggtgaggagaccgaagatgagaagaaggctgctgaagagcgtgctgcagctgccaaggcttctggcaagaagaaagaatctgggaagtcatcagttttacttgatgtg

SEQ ID NO: 42098 - DNA, 274 bp, Zea mays
accttcgccgccgaatccgagactccgatctcgggttcaccgcagcgcacagagcagccccgactaccggcccgatccgcgctctcctctccgtcgcgtcagtcatggcaggaatggcacctgagggttctcagttcgatgctaagcactatgattctaagatgcaggagctgctgagcaccggtgagactgaggagttcttcacttcatatgatgaagtttttgagagttttgatgatatgggcctccaagagaatcttctgagaggcattta

SEQ ID NO: 42099 - DNA, 270 bp, Zea mays
gcgcgtgccccgagctctctgccttcccccgcccgtcagcccgagcccagcccgcgatcccagcagcagcccgcagagcagccccagcagcagcgccatggccgggtggaacgcctacatcgacagccttatggcggacgggacctgtcaggacgcggccatcgtaggctacaaggactcgccctccgtctgggccgctgtccccgggaagaccttcgttagcattacgccagctgaggttggggtcctggtaggcaaagaccggtcaag

SEQ ID NO: 42100 - DNA, 285 bp, Zea mays
tatcgccattgtagtcggcaagtacgcacaggcaatatagtgtggctggacacagggacggtgtgctagaaaagagtgcgcaattgtttcggcagatgcttaaaaatgcatagagtaatgctgaacttaagggcttggatgtagactctctggtcagtgaacacatccaggtggacaaggctccgaagatgcgcagacgaacctacagagctcacggccggattaacccatacatgagctccccctgccacatcgagatgatcctcactgagaaggatcagattg

SEQ ID NO: 42101 - DNA, 252 bp, Zea mays
ctgctccattctcagccgccgccaatcccttcccgtgctccgcaaccgctgagtgagaagaagagatggccggcaagggcgatggcccggctatcggcatcgatctcggcacgacgtactcttgcgtcggcgtgtggcagcacgaccgcgtcgagatcattgccaacgaccagggtaaccgcaccacgccctcgtacgtcgccttcaccgactccgagcgcctcatcggagatgcggccaagaaccaggtcg

SEQ ID NO: 42102 - DNA, 288 bp, Zea mays
cccaacccaacccaacccaccactgcctccctccccgttccccagtccccaccccgaccggctggtcctcctcctttccccgcgccatcctcgaggcatcgccggcgccgcaacttcgttcaggaggaagcccgcacccggccccgatccgatggccaacagcaacctcccgcggcgtatcatcaaggagacgcagcgactgctcagcgagccagcgccggggatcagcgcgtcgccctcggaggagaacatgcgctacttcaacgttatgatccttgggccggcgca

SEQ ID NO: 42103 - DNA, 203 bp, Zea mays
gtgctaacggaacgctactccaagatgtgcctgctgtaggtcatggatcggtactcggctgtggtgcgtaacatggagcaagtggtgatgatccccaggcttctgagggatttggatctgagtgggtacggaggctcggtcatgacggatcccccgatctctatacctacttcatcatgctcaagagcatctgtgtataagtg

SEQ ID NO: 42104 - DNA, 281 bp, Zea mays
ggacatcactcccatgggtggcttcccccactatggtatcgtgaagggtgactacctgatgatcaagggatgctgtgtgggtccaaagaagagggtggtgaccctccgccagtccctcctgaagcagacttcccggctggcgctggaggagatcaagctcaagttcatcgacacatcgtccaaatttgggcacggtcgcttccagactaccgatgagaagcagaggttctttggtaagctcaaggcgtaaggtgctgcggtgcagcgaaagtcccatttgt

SEQ ID NO: 42105 - DNA, 282 bp, Zea mays
gacaacacttaccattatgcgcattctgccacgtgaggtcgagcctgtggtttacaacatgctacatgaagatcctggcaatgtaagttactcagctgtaggtgggttgtcagatcaaataagggaactcagagaatccattgaattacctcttatgaaaccagaattgtttctccgtgtcgggattaaaccgccgaaggcgtgctgctctacggtccacctggaactgggaagacgctcctagctagagccattgctagcaacattgatgctaattttttg

SEQ ID NO: 42106 - DNA, 263 bp, Zea mays
agataatcaggtcgaaccatgtctccatttatttgcactgatgaggcagtctgtgtgcaagccaaatgacatcacatttgcaactatcttgagtgtctgcactaatcatgcatttcttgtacttggtaaaagtgtgcaagccctacaaatgagaatgggttttggttcctatgtgcatgtgtccaatgcattgatatcaatgtatgcaaaatgcgggaccattgtggagcacgagctgtatttgagagcattacatgcaaaga

SEQ ID NO: 42107 - DNA, 245 bp, Zea mays
cccaggagaaccaagatggtcgttactctctgacctatatctacactgggctgtccaagcatgttgaagacgttcccgcgtttcaggcccttggctcactcaatgacctccagttctttagatacaacagtaaagacaggaagtctcagcccatgggactctggagacaggtggaaggaatggaggattggaagcaggacagccaacttcagaaggccagggaggacttctttatggagaccctg

SEQ ID NO: 42108 - DNA, 266 bp, Zea mays
gggaaatttgttctgctctgatcatactatccataggcgatttgatctgaaaggatcatctcttggccgtataactgacaagccaccagcagaaattgatgagtatacaactctgaaagaccttgatcttaactttatctttcggttacagaaacaatggtaccaagagtttcaaagcaggcaagtggacaaggactgtgagttcctcgagcaggagaagattatggattacagtctattggtgggtgtactttttaggggtgcca

SEQ ID NO: 42109 - DNA, 298 bp, Zea mays
gagaaaatctcaaatgttcttcctggtatttcatcaattgtagaaggtgtgaaagtatataggaaattctatgcagaggaaaaggagaactcttatggagttttagcgatatcagtttcaaagccaacatctcaaccttacataaccatgaataatatccttgctggattggggtatgatggactgggtagactccttggtatggcgaaaacaactggaactgttccagatggactacctcctccaagatctgcactgctgtcatcttgtatgggactggttcaaccaaatgagtagg

SEQ ID NO: 42110 - DNA, 295 bp, Zea mays
gcagaaaaacttagcacagctcaatctgctgttttgatggctacagggtttatttggtcaagatactcacttgtaattattccaaaaaattggagtctgtttgctgttaatttctttgtgggggcagcaggagcctctcagctttttcgtatttggagatataaccaagaactaaaagctaaagcacacaaataaaagagttcctgatcacctgaacaatctagatgtggttaaaaccattgggacctagtttattatttggttattgataaagcaaagctaactgtgtgtttag

SEQ ID NO: 42111 - DNA, 298 bp, Zea mays
cttggaggcaggcatgattgtcactgatgagcccgggtactatgaagatggggcttttggaattcgcattgagaatgttgtccttgtggttcctgtgaagaccaagtataattttaataaccggggaagcctgacctttgaacctctaacattggttccaattcagacaaaattgttagatgtggattctcttacagacaaagagtgcgactggctcaacaattaccacctgacctgcagggatgtgattgggaaggaattgcagaaacagggccgccagaagctctcgagtggctca

SEQ ID NO: 42112 - DNA, 229 bp, Zea mays
gaaggcatgaaaaagaagggaatccgtgtgcctgggattggtcacaggattaagagcagagacaacagggataagcgtgtgcagcttctacagaaatatgctcacacacatttcccttcagtcaagtacatggaatacgctgttcaggttgagacctacaccttgtcaaaagccaacaatttggttatgaatgtcgatggtgcgatcgggtcccttttcttggatcttc

SEQ ID NO: 42113 - DNA, 297 bp, Zea mays
gcaggatgctataaatctatttctggggtattttcaaccacaagaaggaaaaccagctctttgggagctggatactgattactatcttcatgtgacgacagctggggatgatcttatgtctgatagctaccacttgagttctgcacctggaaataatgtgttcatggggtctggagctgcaatgaaccctgggaccatattgagccctgtcccagcatgcaaagaggatctctcacggaagaagcttacttcgttcgacaaacttatagaaagaacatgtagttcgataaggaatgt

SEQ ID NO: 42114 - DNA, 290 bp, Zea mays
cagagctggaggacgacttcaaagagggctacctggagacagtggcggcttattatgaggagcagcacccagagctcactcctctacttgaaaaagaaagagatggattacggtgccgaggcaacagatcccctgtcccggatgttgaggatcccgcaaccgaggagcctggggagagcttttgtgacaaggtcatgagatggttccaggccatgctgcagcggctgcagacctggtggcacggggttctggcctgggtgaaggagaaggtggtggccctggtccatgca

SEQ ID NO: 42115 - DNA, 287 bp, Zea mays
acaggattaccaactagtagacgaaagtgatgctttccatgacaaccttaggtctcttgacaggaatctgccctcagacagccaggacttctgtcaacatggattagaagaggattttatgttataaaagaggattttcccaccttgacaccaggcaatgtagttagcatattttatgtaccatggttatatgattaatcttgggacaaagaattttatagaaatttttaaacatctgaaaaagaagcttaagttttatcatccttttttttctcatgaattcttaa

SEQ ID NO: 42116 - DNA, 288 bp, Zea mays
cgaggactacaagaagaatgagaacaaggaggttgctgtgaatgactttctaccagcgagcgccgcttatgaagccatacagcactctatggacctgtatgctacatacatcgttgagggcctgaggaggtaggattctgatggctaggaaaggtggggaggatgttgacgaaaaactgggagaccatttaccgcatggaacgagtaccgttattattttatttgtgtcgtgtatactgctagtagtgaaccctcaatcaaagaccgaaatcccctggggagtcggag

SEQ ID NO: 42117 - DNA, 292 bp, Zea mays
gcccgatcccgatccagcgaggcggcgagcctccctcctccccttgcttcgctcgtccagccctgaccacccgcatccccgtcagtcatggcagcggcagcaggcggaggcgcggtgcgtgcgctgtcccagaaggagcaggacatacagatgatgctcgccgccgacgtccaccttggcaccaagaactgcgatttccagatggagcgctatgcctttaagcgccgcaccgacggcatctacatcatcaaccttggcaagacatgggagaaactgcagcttgcagcgaggg

SEQ ID NO: 42118 - DNA, 287 bp, Zea mays
cgatctcgtttcaaatccatccatcctcgtttcctccgtcccgcagcatctcaaccccatggccaagatcaagatcgggatcaatgggttcggcaggatcggaaggctggtggccagggtggccctgcagagtgacgatgtcgagctcgtcgccgtgaacgaccccttcatcagcaccgactacatgacctacatgttcaagtacgacactgtggcacggacagtggaagcaccatgaagtcaaggtgaaggactccaaaacccttctctttggtgagaaggaggtt

SEQ ID NO: 42119 - DNA, 285 bp, Zea mays
ggcaatttgggggattcaagagctgtcttacgcaccagagatgaaaataaccagcttattgctgttcaattgacagttgatctcaaacctagcattccaagcgaacacagggaatcaggcaacgcaggggcagaatattcgcgcttcccgcggagccggaggttgctcgtgtttgggctccaaagtacaactctcctggactggccatggctagggcatttggagacttctgtctgcaggaccatggtgtaatttctacgcatgacgtctcctatcaaccaatca

SEQ ID NO: 42120 - DNA, 285 bp, Zea mays
gaaggcaagatgggtcaccagcagctctactggagtcacccgcggaagttcggccagggttctcgctcttgccgcgtctgctctaaccgccactgtctgatccgtaaatacgggctgaacatgtgccgacagtgcttccgtcagtacgcgaatgacataggcttcattaagttggactaagcgacctgaatggatgattcgactgtctacccaatgaaaccaactgtctaccctgtgataccaatcatgctagtctttgtgcacacagaatagcaaactgaaggc

SEQ ID NO: 42121 - DNA, 285 bp, Zea mays
cccggacgagttcctacggctcaagagccagctcgccgtacgagcggcgccggggtctgagtccgcgtccttctgtttccggtccacggcgctcctgcacgtcgctagcgccactagggacctcaagaagcgtgtgccctgggtgctcggtgtcgaggcggaccccagcggcggcccacgggtgtaggaggcggccatgaagctgtaccacagccgtaggcccggtgagggcgaggaggcaggcaaggtggacctgctccaggccttccaggcggtggaggtggc

SEQ ID NO: 42122 - DNA, 286 bp, Zea mays
aagcacgccgcctacgcctggcccttgtacaagcctgtggacgtggaggcactgggcctacacgactactgtgacatcatcaagcaccccatggacatgagcacaatcaagtctaacctggaggcccgtgagtaccgtgatgctcaggagtttggtgctgacgtccgattgatgttctccaactgctataagtacaaccctcctgaccatgaggtggtggccatggcccgcaagctccaggatgtgttcgaaatgcgctttgccaagatgccggacgagcctgagg

SEQ ID NO: 42123 - DNA, 254 bp, Zea mays
agaatagtgagagtggggaaaagaacgagggatcggagagtgctcccgaaggccaggcccaacaacgccggccctaccgcaggcgaaggttcccaccttactacatgcggagacgggtgggcgtcgaccacagtattccaaccctcctgtgcagggagaagtgatggagggtgctgacaaccagggtgcaggagaacaaggtagaccagtgaggcagaatatgtatgggggatatagacaatttcgcgggggcc

SEQ ID NO: 42124 - DNA, 274 bp, Zea mays
cagcattcctatcctctccccgcccgcccgtgccgccgccgcggcttcccttcctctcccgagccaagatgaatgttgaaaagctcaagaagatggcaggtgctgtgcgcaccggggggaagggtagcgtgcgcaggaagaagaaggcagtccacaagactacaaccacagatgacaaacggcttcaaagcaccttgaaaagaataggagtgaacagcattcctggtattgaagaggtcaacatctttaaggatgatgttgttattcagtttgt

SEQ ID NO: 42125 - DNA, 279 bp, Zea mays
aaccccgcctccccgtcttgctgatttgtatgttactgctgacacatttgaaaaggacacggaaatgtggcagcaacgagtagaaaaatattggagtttgttgggcccaaaggtaaaaccagacactattagaaacatcatggacatgaaagcaaatttttgggtcatttgctgctgcactcaaggaaaaagacgtatgggtgatgaatgttgtgccacatgatggaccaaacaccctcaagataatctatgatagagggctgataggcagcaatcatg

SEQ ID NO: 42126 - DNA, 265 bp, Zea mays
aagaaactcggtatcgtcaaaggtatcttgatcttatggtaaaccatgaagtgaggcacatcttcaagacacgatctaaaattgtctcatttatcggaaagtttcttgatgaccgtgaatttttgtaggtggagactccgatgatgaacatgcttgctggtggagcagctgcaggtcttttgtcacacatcacaatgaattagacctgcggctttttatgcgcattgctcctgaattatatctgaaggaactgggtattggtgga

SEQ ID NO: 42127 - DNA, 280 bp, Zea mays
gccgccgagtcgcgcggaagcggaggcttgggtgcgttcaagattcagcttcacccgtaacccaccgccatggccgaggaatgcattgctgctggaggtgtaatggacgttaatactgctttacaagaggttctgaagactgccctcatccacgatggcctagcacgtggaattcgcgaactcgccaaagccttagacaagcgccaagcccatctttgtgtgcttgcatccaactgtgatgagcctatgtatgtcaagttggtggaagccctttgtgctg

SEQ ID NO: 42128 - DNA, 277 bp, Zea mays
tgctgagtcaagaatatgccatggaatgaatgggcagtatcctcatgaaccagtcatcactgagcttcagggtcggattacgaaagctgaggctgtattgagggacaaggaagaagaaaatgtgatgctgaaacagcaattggaacagtatgagagtacatggtcagaatatgaggccaaaatgaaatctatggaagaggcatggaagagacagctctcttctctgcagctgagccttgttgctgctaagaagagcctagctgctgccgatgtggct

SEQ ID NO: 42129 - DNA, 287 bp, Zea mays
gctcgtgcaatgactgagatgaatggcatgctatgttcttctaggcctatgcgtattgggcctgctgcaaacaagaaagctactgttgttcaggagaaagtaccaagtgctcagggagttcagtctgacaatgatcctaacaatacaaccatttttgttggtggtcttgaccccaatgtcactgaagatatgttgaaacaagttttcaccccttatggggacgtagtccatgttaagattcctgttggcaaaagatgtggttttgttcaatatgctaacagatcttc

SEQ ID NO: 42130 - DNA, 283 bp, Zea mays
gttggcttctcctccccctccggttcgggttcgggttcgtgaggttctccggggttcggtttcgtgggtgggcggatcgagatggcggcgtcggatgttgagtaccgctgcttcgtcggcggcctcgcctgggccacggacgaccactccctccacaacgccttcagcacctacggcgaggtcctcgagtccaagatcatcctcgatcgggagacgcagaggtcccgcggcttcggcttcgtcaccttctccacggaggaggcgatgcggaacgcatcgaggg

SEQ ID NO: 42131 - DNA, 279 bp, Zea mays
ctggcagcgcggaggccgcacgatgcctggagttactgtgaaagacgtgaaccagcaggagttcgtcagagctctggcagccttcctcgagaagtccgggaagctgaaagtccccggatgggtggataccgtcaagctggccaagcacaaagagcttgctcgctacgatgacaactggttctacacgcgagctgcttccacagcgcggcacctgtacctccggggtggcgctggggttggctccatgaccaagatctatgggggacgtcagagaaacgg

SEQ ID NO: 42132 - DNA, 129 bp, Zea mays
ggattactggtcgttggatccactcagccagtggtaggacttaccactcaaaatttgcacctccaaagtctccaggagttgatgatgtaactggagagccattgattcaaaggagagatgaccccgctg

SEQ ID NO: 42133 - DNA, 286 bp, Zea mays
gattatgattactctctggacatgtggagtctgggctgcatgtttgctggaatgatttttcgtaaggagccatttttttacggtcatgacaaccatgatcaacttgttaagatagccaaggtacttggaacagatgggctgaatgtctatttgaacaagtacagaattgagcttgaccctcagctcgaagcccttgttggaaggcatagcaggaaaccctggacaaagtttattaatgcagacaaccaacacctagtgtctcatgaggccatagatttcctcgaca

SEQ ID NO: 42134 - DNA, 306 bp, Zea mays
gtgggctgctgcggggcctgcaacgagaactattgtcttatgatcacgtttgccatctttctgtctcttatcatgttggtggaggtggccgcagcattgctggctatgtgtttacagataaagtgatgtcagagtttaataataacttccggcagcagatggagaattacccgacaaacaacgatactgcttcgatcctggacaggatgcatgcacattttaagtgctgtggggctgctaactacacagattggggagaaaatcccttcgatgtcgaagaaccgagttcccgactcatgctgcatt

SEQ ID NO: 42135 - DNA, 314 bp, Zea mays
gtcgtcgtcgtggaactcggtgggtctggcgatcctgtaccacgtgctgggctgggtcgccttcgccgcgtggtccttcagcttctacccgcaggtcctcctcaactacaagcgcaagagtgtttgggcctgaatttcgattttctggtgttgaacttgacaaagcactcgtcctacctcatatacaatgctgctctcttcttcagcccattcattcagcaacagtatcatgacaaatatggtgacaaagagatgattccagttgctgcaaatgatgttgctttttcactgcatgctgtagcattgacagcctt

SEQ ID NO: 42136 - DNA, 313 bp, Zea mays
tgggcttcggttccggcgacatggctaaacgcaccaagaaggtcgggatcgtcggaaaatacgggacccgctatggtgcctccctccggaaaatggtgaagaaaattgaaatcagccagcacgctaagtacacttgctccttctgtggcaagaccaagatgaagagacgagccgttggcatctggcattgtggttcctgcatgaaaacagtggccggtggggcctggacctacaataccacttctgcagtcacagtgaagtctgccatcagaagactgaaggaactgaaggaccagtagaagcacctcctgag

SEQ ID NO: 42137 - DNA, 312 bp, Zea mays
caacccgtacgtgcggaaggccctcaacatcccggagcagctgccacaatgggacatgttcaactttctggtaaacttacagtaccgccgtctctaccgaagcatgaactcccagtatctgaagctgcttagctcacagaaataccagatcctattatataatggagatgtagacatggcctgcaatttcatgggggatgagtggtttgtggattccctcaaccagaagatggaggtgcagcgccggccctggttagtgaagtacggggacagcggggagcagattgccggcttcgtgaaggagttctccca

SEQ ID NO: 42138 - DNA, 232 bp, Zea mays
ggaggtccagaagaactatgaacacttatttaaggtgaatgataaatccgtgggtggatccttctacgtgcagtcaaaggtggtccgcgcacaggagcgcctggatgagcaactcaaaatccaggccaaggaggacagagaaaaagggcagatgcccatacgtgactgctcggctcccaccgtcccccacgccgcctctaatttatagcttggtaataaatttcttttctgc

SEQ ID NO: 42139 - DNA, 203 bp, Zea mays
gtgttatgtctggctgtagctgttggtcacgtgaagatgacagacgatgagcttgtgtataacattcacctggctgtcaacttcttggtgtcattgctcaagaaaaactggcagaatgtccgggccttatatatcaagagcaccatgggcaagccccagcgcctatattaaggcacatttgaataaattctattaccagttag

SEQ ID NO: 42140 - DNA, 308 bp, Zea mays
caaggaccaaatcagaagctgccagttatgaaaaggtttatggagaacccatttctgtgaaggaattggctgatcgtgtggcaagttatgttcatctttgcacgctgtactggtggctcaggccttttggttgcggtgttattcttggaggttatgatagggatgggccacagctctacatgatagaaccctcaggagtttcctacaaatacttcggtgctgcattggggaagggaagacaggctgcaaagactgagatagaaaagttgaaactttcggagcttacctgccgggaaggattgttgaag

SEQ ID NO: 42141 - DNA, 303 bp, Zea mays
cctctggccgctgctcgaccccgacgccagctgcccagttcttcgccggcgacgagcactccaccagacgacaggggattccaagatgccgagggccaccagcgacgcaagtcctgatccagtccctcggcaaggcgtacgctgccacaccaacaaatctcaagattattgacctctacgtgggttttgcggttgccactgcccttattcaggttgcttacatgggattggttgggtcgtttcccttcaactccttcctctcaggagttctttcatgcataggaactgcagttcttgctgttt

SEQ ID NO: 42142 - DNA, 308 bp, Zea mays
agttccctgactcgttggcaccagagcagtgcaaggctctcgagacagtacttccaccaaggccttcatccaagctgacagacatggagatagatgaatgcgaggagacgactatgcatgatgtgaacaacatcgaggaagagatgcgcaggaagcaagctcacgctgcccaggaggcgtacgaggaggacgacgagatgccgggcggagccagagagtgcagtgcgcgcaacagtaagcagactatcatcaaggcaattgggaggggtggtgcccttaaagcatgggagtgatctctggttttgctg

SEQ ID NO: 42143 - DNA, 300 bp, Zea mays
gagagaatgaagactattctcagcaatcagactgtcgacattccagaaaatgtcgacattactctgaagggacgcacagttatcgtgaagggccccagaggaaccctgcggagggacttcaatcacatcaatgtagaactcagccttcttggaaagaaaaaaaagaggctccgggttgacaaatggtggggtaacagaaaggaactggctaccgttcggactatttgtagtcatgtacagaacatgatcaagggtgttacactgggcttccgttacaagatgaggtctgtgtatgctcac

SEQ ID NO: 42144 - DNA, 308 bp, Zea mays
gatccaagaagagaaactggaacctttatccagcttgcctacgggagatgagccgtgtctgcacacctaccacaggccgagctgtactacttactcaagacacaaaatgctttaccaaggcgttatctggaatgcgacacgtatggcgaaaggtggatacagtctgggtgaacgttggtggtcttcgtgctgcagtttacgttctgatacgtacacctcaagcttttgttcatccttcagaacaagacggagaaagaggaactctttggcaatgcaaagaatgaagatgactaatagtacttgtactt

SEQ ID NO: 42145 - DNA, 303 bp, Zea mays
gacttccctgttcagtacgatgctgcaaagttctttgtcattaaatcgtacagcgaggatgacatccacaagagcgtaaagtacaatgtgtgggcaagcacaaccaacggaaacaagaagcttgatgctgcttaccaagaagctcagtcaaagggatctgcatgccctatattcttgttcttctcagtgaatacaagtgggcagtttgttggtgttgctgaaatgactggcgccgttgattttgagaaaaccctagagtattggcaacaggacaagtggaacggctccttctctgttaagtgg

SEQ ID NO: 42146 - DNA, 304 bp, Zea mays
cgacatcgtcccttcgtccccacgagcaaccgataatccgccggcgttgagatgttggtttatcaggatctcctatctggcgacgagctcctgtcggattcattcacctacaaggagctcgagaacggcgtcctgtgggaggtcgagggaaagtgggtcacccaaggtcctgttgatgtggacattggtgccaatccatccgccgagggtggtgaggacgaaagcgttgatgacacagctgtgaaggtggttgatattgttgacacattccgtctacaggagcaacctccttttgacaagaaat

SEQ ID NO: 42147 - DNA, 298 bp, Zea mays
ggttctccatccggtcagaccaatcaacaaagtgacgcgagcacgagcatccatcgtttcaccttcttccccatcgcgtgccctcgccgcagccatcttccatggcggaccagctcacggacgagcagatcgcggagttcaaggaggccttcagcctcttcgataaggatggcgacggctgcatcactaccaaggagcttggaactgtgatgcgctcccttggccagaaccccactgaagcagagctgcaggacatgatcaacgaggttgatgctgatggcaatgggaccattgactt

SEQ ID NO: 42148 - DNA, 313 bp, Zea mays
actagttctagatctcgagcggcctcgtcagatgcttgtggagatgctttgtgaggatagaggtatcttcttggagatagctgacttcattaaaggactaggattaaccatcttaaggggcgttatggaagcacgcaaaaataaaatctgggcacggttcactgttgaggccaacagaaatgtgactagaatggaaatcttcctttccctaatgcgcatgctggaaccgagttgtggagcaggagagaattctaataacaacataaaaatgcctcttgggattgtgcagtatcccataatccctgcgacaggt

SEQ ID NO: 42149 - DNA, 295 bp, Zea mays
ccaaggtgctcggtccttccgacgaagctaaggccgcgttgacgtgaggcactcacttcatccggcgactagcaccgtgccggcagtccacaacatggcttctgtctctgagcttgcctgcatctactccgccctcatcctgcacgacgacgaggtgacggtcacggaggataagatcaatgctctcattaaagcagctggtgtcaatgttgaacctttctggcctggcttgtttgcaaaggctcctggcaatgtcaacattgggaagctcatctgcaatgtaggggctggtggg

SEQ ID NO: 42150 - DNA, 307 bp, Zea mays
gatgatcacaccatgtgtggacttgccagtgcaatgagcaccctttctgtctttcatccagatgcaaaccctgctctacaaggtcaagatctttataaatcgaagcaggtgagggataaacaaattgtgcgagtacttgggaacgcaccaacaatagcagttgctgcctacttgagattagcaggaagacctcccgtccttcctttaaatactctatcttatggaggagaacttcttgtacatgctggactctttgggtgacagatcatataaaccaaatcctcgacttgctcgagctctagatatt

SEQ ID NO: 42151 - DNA, 302 bp, Zea mays
cgattgatgaagagtgctattggtgagggcatgacacgtcgagaccattcggatgtatctaatcagctttatgccaactatgctattggaaaggatgttcaggccatgaaggctgtcgttggagaggaggcactctcgtctgaggatctgctttacttagagttccttgacaagtttgagaggaagtttgtgacacaaggagcatatgacacacggaacatcttccagtcactcgatcttgcatggacattgcttcggatcttccctcgcgaacttctccaccgtattccagcaaagacctt

SEQ ID NO: 42152 - DNA, 312 bp, Zea mays
ctgttttcttcgcttacatcaggctccgcgagcaggagatcaggaacctgatgtggatctctgaatgtgtcgctcagaaccagaagtcccgggtccatgacagtgtcgtcttcatattctgagaacccccgccactatatatgtatgtacaaaatgcctgctttgatgatggcacaatcgctcgacaattataaatctgggacttattattattcccattccctctgttagacgccggcgtaaaaaatgccagacctggagttgatgtattatttgttttgtagtcaaataaaggtgtgattatctggcaca

SEQ ID NO: 42153 - DNA, 300 bp, Zea mays
gtcaccgtgaggaactggaacgacaaggactactcggtggtgaccatcagatgcaacgacaggtccaagcttctgttcgacacggtctgcactctgacggacttgcagtacgttgtggtccacgcgaacatcgatgacaaggacaatcaggcttaccaggaattctatgtaacgcatgtgaatggatcgccaatgagcactgaaaccgagaggttgcgagtcatcgaatgcctggaagcagccatcgaacggagggtatctgagggtgtgaagctggagctgtgcaccaacgacaaggtc

SEQ ID NO: 42154 - DNA, 301 bp, Zea mays
gcggaatctcccacccctatcagctggacagcggctgaacattgcgattgatattgcccgctgtctagattacctgcacaacgagcgggtgattccacatggcaacatcaagtcgtctaacgtcctgattcagaactccactccatctgctctggtgactgactacagccttcacaggctgatgactccaatcggcatggcggacaggtcctaaacgccggcgcgctaggatattcccctcctgagttttcaagcaccagcaagccatgcccatctctgaagagcgacgtgtatgccttcg

SEQ ID NO: 42155 - DNA, 295 bp, Zea mays
cccacgtgacggaggaccagatccagcgggacctggccatgaacaagttcgactgggaccacccgatgcacctgcaaccgacgagccccacggccattaagcaggtgagctgcgtgtgggacgcgtacgatgccaccaagggcgcccacggggtgtgcatcctgaccgagtgggacgagttcaagaccctggactaccagaagatcttcgacaacatgcagaagcccgccttcgtcttcgacggccgcaacatcgtcgacccggagaagctgagggagatcggcttcatcgtcta

SEQ ID NO: 42156 - DNA, 269 bp, Zea mays
cgaacagagaccagaaagagtaaaaccttttatgacaggggctgcagaacaaatcaagcacatccttgctaatttcaaaaactaccagttctttattggtgagaacatagatccagatggcatggttgctctattggactaccgtgaggatggtgtgaccccatatatgattttctttaaggatggtttagaaatggaaaaatgttaacaaatgtggcaattatttaggatctatcacctgtcatcataactggcttctgcttgtcatc

SEQ ID NO: 42157 - DNA, 129 bp, Zea mays
gagattgttgatctgtgccttgaccgtatccgcaagcttgctgacaactgcaccggcctccagggcttcctggtcttcaatgccgttggtggtggcactggctctggccttggttctctcctccttgag

SEQ ID NO: 42158 - DNA, 290 bp, Zea mays
caggccttgccagaactaccactggcaataaagtttttggtgccctgaagggagctgtggatggaagcttgtctatccctcacagtacccaacgattccctggttatgattctgaaagcaaggaatttggtgcacaagtacatcggaagcacatcatgggccagaatgttgcagattacatgcgctacttaatggaagaagatgaagatgcttacaagaaacagttctctcaatacataaagaacagcgtaactccagacatgatggaggagatgtataacgaagctcat

SEQ ID NO: 42159 - DNA, 180 bp, Zea mays
acgagatcgagctcacgggcgaaggcaacagtcgattcacctacagcacgcttgtggatggctgcacgagtcacaccggaacttggggcaagacagtcatcgaatacagaaccaccaagacctcccgcctgcccatcatcgatgtggctcccgtggacattggtgcgccagaccaggaat

SEQ ID NO: 42160 - DNA, 291 bp, Zea mays
  unsure (1)..(291): unsure at all n locations
gaaaggtcattgattgcaaatctgtcagcggcaaactgttacaaatctgagcatctaaagagaccagagaactgggcactagttgaaaaggcaaaatacatctacattgctggatttttccttacagtgtcgcctgattctatccagctagtcgctgagcatgctgcagcaaataacaaggtgttcctgatgaacctctctgctcgcttcatttgtgagttcttccgtgatgcccaagagaaggtcctctcgtatgctgactacatcttcggcaacganactgaggcaaag

SEQ ID NO: 42161 - DNA, 284 bp, Zea mays
caccagccgccgtcatgtcgaagcgaggtaggggaggttgcggctgggaactagttccgcatgtcactgggtctaccggtggcggccacggtgaactgcgcggacaacacgggcgccaagaacctctacatcatctccgtcaagggcatcaagggccgcctcaaccgcctcccgtccgcctgtgtcggcgacatggtcatggccaccgtaaagaagggaaagcccgacctcaggaagaaagtgatgcccgccgtcatcgtccggcagcgcaagcgtggcgtcgc

SEQ ID NO: 42162 - DNA, 198 bp, Zea mays
gcgagagcatggcagggattcgatggccgccagaggacccggagatcttcccttccaggatggtcagcggcggggcttgggtccccgtcgcgcccccacgagagatggcgtcggacgacgaccggtcggtggccgcggactcgtggtcgatcaagagcgactacggcagcaccctcgacgacgatcagcgttactccg

SEQ ID NO: 42163 - DNA, 289 bp, Zea mays
gcaaaaggctataaaactcgtggaatggcatatgccatgcttggcaaatgggacgaagctgctcatgatctgcacacagcatctaacatggattacgacgaggagatcaatgctgtgctcaagaaggtggagcctaatgctcacaagatagtggaacatcgcaggaagtatgagaggttgagaaaagagagggaggaaaagagagcgcacgaggatcggcttcgtcaacgtgcagaggcgcaggctgcttacgacaaggccaagaggaaggagcaatcgtcaagtcgct

SEQ ID NO: 42164 - DNA, 293 bp, Zea mays
  unsure (1)..(293): unsure at all n locations
ctttggtgacctcaagggagcattggatggaggcctggatattcctcacagcgagaagacgtttgctggattcaagaaggacgacaagcagttggatgctgatacacaccgcagtacatctatggtggccatgttgctgactacatgaagaaccttgctgaagaggagccagaaaagtaccagagccacttcagtgcgtacattaagaagggagttgaggctgatgaaatagaagcgctgtacaagaaggtccatgctgccatccgtgtgtnatccttcattgttaagtcaac

SEQ ID NO: 42165 - DNA, 283 bp, Zea mays
agctacgtgcccaaataattgctgaagccgaagaattcaagaaagccttttttgagaagaggatacagaactgtgcgtcaaacatggtgaacaacagagagagggagaagatttttgtagccagccaggagaaattccacgccggcgcagacaagcagtactggaaatcgatttcagatctcatcccacatgaaatagccaccatcgagaagcgggggaagaaagacaaggacaagaagccatccatcacagttgtccagggccccaagcctggcaagcccac

SEQ ID NO: 42166 - DNA, 147 bp, Zea mays
cgcgaaaccctagcgtcgagctctatctccggccacagctggtcaggttagcgacgaaggatgagcaggcgctggagccgcacgatctacgtcgggaacctccccggcgacatccgggagatggaggtggaggatctgttctacaag

SEQ ID NO: 42167 - DNA, 294 bp, Zea mays
cgaccagacctactgcgacaagacctacacccagtacccctgcgtcgagggcgccgagtactacggccgaggcgcgattcctgtctactggaactacaactacggcgctgccggtgacgggatcaaggcggatctgctccaccacccagagtacctggagcagaacgcgacgctggcattcatggcggcgatgtggcggtggatgacgccgatcaagaagagccagccgtcggcgcacgacgccttcgtgggcaactggaagctcaccaagaacgacacgctcagcaaacgcct

SEQ ID NO: 42168 - DNA, 263 bp, Zea mays
ctgagcaaagatgggtgcatacaaatacatccaggagctgtggagtcagaagcagtccgacgtgatgcgcttccttctaaggctccgctgctgtcaggaccgccagctctctgcgcagcacagggctccacgccccatccggcctgataaggcgcgaaggctgagatacaaggctaagcaaggtcatgtgcttcacaggatccgtgtccgccgcggtggtcgcaatcgcccaattcctaagggtgcaactacgggatacctgt

SEQ ID NO: 42169 - DNA, 291 bp, Zea mays
agcagatgtgggatgccaagaacatgatgtgtgctgctgacccacgccatggtcgctatctcacagcctctgccatgttccgtggcaagatgagcactaaggaggttgatgagcaaatgattaatgtccagaacaagaactcgtcctactttgtggagtggatccccaacaacgtcaagtccagtgtttgtgatatccctccgcgtggcctctccatggcctccaccttcattggcaactccacgtccatccaggagatgttccgccgtgtgagctagcagttcactgcta

SEQ ID NO: 42170 - DNA, 289 bp, Zea mays
gcggagaagatgcggggaggagaccggccatcggcgtcgctccagctcctctcgctgggcctcgtgctcctctacttcttcacctcaggcagcaccgttggtctcgtggagggacagaagacgtggtgcatcgcgaaccgtcggcgtcgaacgagatcctggcgcagaacctggactacgcgtgctcccaggtgagctgcgccgtgatccagaagggcgggccgtgctactacccggacagccccgtgtcccgcgccgccgtcgccatgaacctctactacgcctacag

SEQ ID NO: 42171 - DNA, 289 bp, Zea mays
cttcaagactgatttgcgtttccagagccatgcggtgcttgctactccaggaggctgctgaggcataccttgttggcctgtttgaggacaccaacctgtgcgccatccatgctaagcgtgtgaccatcatgcccaaggacattcagctggcaaggaggatccgcggcgagagggcctaatcgccacctcaaacatcgtgacaaaaaaatgaagtcctggggttattgttaatctggtgccattgtaaggacatatgagtagggtttgttttgtggatcgcaagtttctc

SEQ ID NO: 42172 - DNA, 291 bp, Zea mays
gcggaccagctcacggacgagcagatcgcggagttcaaggaggccttcagcctcttcgataaggatggcgacggctgcatcactaccaaggagcttggaactgtgatgcgctcccttggccagaaccccactgaagcagagctgcaggacatgatcaacgaggttgatgctgatggcaatgggaccattgacttcccagagttcctgaacctgatggcaaggaagatgaaggacaccgactccgaggaggagcttaaggaggcctttcgcgtcttcgacaaggaccagaat

SEQ ID NO: 42173 - DNA, 288 bp, Zea mays
cacacgaacacacaccgcgcccagctccgaggtgatcttccggcggccggcgagatgagccgtggcacaggcgcgggctatgaccgccacatcaccatcttctccccggagggacgcctgtaccaagtcgagtacgcgttcaaggcggtgaagtcggcgggtgtcacgtcgatcggcgtccgcggcgcggactccgtctgcgttgttacgcagaagaaagtcccggataagttgctggatcagacgagcgtgacacacctgttcccgatcaccaagtacgtcggattg

SEQ ID NO: 42174 - DNA, 247 bp, Zea mays
gcgcactgcctctcctctctttggcacccggagccggagcaagagcgccgccaacagcccgctaccggcgccgtgtcatggcgggggcaggagacaaggtggactacgtcttcaaggtggtgctgatcggcgactctgcggtgggcaagtgcagatcctcgcgcgcttcgccccaacgagttcagctcgactcaagccacatcgcgtcgattcagaccgacctcgtcatcgacacagagctcaagcc

SEQ ID NO: 42175 - DNA, 287 bp, Zea mays
aaagaaaccatctgccgtgtgactggtgggatgaaggtaaaggcagaccgagatgaatcctcaccatatgctgctatgttggctgcccaggatgtggcccagaggtgcaaggagctgggtatcaccgccctacacatcaaactccgggccacaggaggaaataggaccaagacccctggacctggggcccagtcggccctcagagcccttgcccgctcgggtatgaagatcgggcggattgaggatgtcacccccatcgccctctgacagcactcgcatgaacgggg

SEQ ID NO: 42176 - DNA, 288 bp, Zea mays
cacgcagagccgcagagatccgtcacactgcaagttttgaaaactgaactgtaagatggcatcaccagagctttcccgtgaggaaaatgtgtacatggcgaactcgccgagcaggcagagaggtacgaacaaatggttgagttcatggagaaggtagcgaaaactgttgactcggtagagctcactgtggaggagcgcaacctcctgtctgttgcatacaagaacgtcattggagcccgccgtgcctcatggcgcatcatctcctccatcgagcagaaggaggagggt

SEQ ID NO: 42177 - DNA, 286 bp, Zea mays
cggaacagagcgaggcgacgccgaggcacctcatctccggcgaagggaaatggcgaccgttccaggggatctgatctggcagattgtgaggaagaacaactccttcctggtgaagcagtttggcaacggcaatgccaaggtgcagttcaccaaggagcccaacaacctctacaatgtacactcctacaagtactctggcttagcaaacaagaaaactgtaacgatccagccagctgctggaaaggactcggctgtggtcctctctactaccaagaccaagaagcag

SEQ ID NO: 42178 - DNA, 258 bp, Zea mays
caagacaactggctttggcatgatttatgattccctggattatgcaaagaaaaatgaacccaaacatagacttgcaagacatggcctgtatgagaagaaaaagacctcaagaaagcaacgaaaggaacgcaagaacagaatgaagaaagtcagggggactgcaaaggccaatgttggtgctggcaaaaagccgaaggagtaaaggtgctgcaatgatgttagctgtggccactgtggatttttcgcaagaacattaat

SEQ ID NO: 42179 - DNA, 284 bp, Zea mays
gactattgcaagaagtccaagctcgggatcaccgtgtacccatctccccaggtgtccacatccgtggttgagccatacaacagtgtcctgtccacgcactctctcgtcgaggacactgatgtcgctgtcctgctcgacaatgaggccatctatgacatctgccggcagtcccttgacattgagcgcacaacctacaccaacctcaacaggattgtgtcccaggtcatctcatccctgtctgcatcactgaggttcgatggtgctctgaacgttgatatgaacga

SEQ ID NO: 42180 - DNA, 292 bp, Zea mays
cgcgccgcgtctctcgctcactcgctcgcgctctccatccagatcggagcgctcggttcggataggggcgactaggaggtgaaggcgggcgcgtcagccatggcggacgaggagcacccggagaggagggaggaggcctccgagcttgccccctttgatccaaccaagaagaagaagaagaagaaggttgtcatccaagagccttctgatgaagtggacaaggttgcagagaagacagaatcactagcagtcgcagaacctgctgaacttaacttcactggaatgaagaaga

SEQ ID NO: 42181 - DNA, 285 bp, Zea mays
ggcgctgcgccggagcctcagggaccccggcggcgttctgcagagctgggaccccacgctcgtcaacccctgcacctggttccacgtcacctgcgagcgcgacaaccgcgtcacccgcctagatcttggtaatttgaacttatctggtcatctggtgcctgagcttgggaaactggagcatcttcagtatctggaactttataagaataacattcaaggaacaatcccttctgagcttggcaatttgaagaatctaataagcttcgacttgtacaagaacaacat

SEQ ID NO: 42182 - DNA, 287 bp, Zea mays
cggctcgaggtctacaagagccctgcttcagatacttacatagtttttggggaagccaagatcgaagatttatcccagcaagcacaactagcagctgctgagaaattcaaagttcaaggtgaagctgtctcaaacattcaagaaaacacacagactccaactgtacaagaggagagtgaagaggaagaggtcgatgaaacaggtgtagaagttaaggacatagaattggtcatgtcacaagcaaatgtgtcgagagcaaaggcagtccgagccctgaagaacaacag

SEQ ID NO: 42183 - DNA, 282 bp, Zea mays
gatcattagcatcatcgaggaggaggacaaccataaggttcgctgatatcaaacagaagagatacagtgttccccttgtgataggaatcggtctccttgtcctgcagcagctaagtggtgtcaatggcattctattttatgctgcgagcatcttcaaagctgctggtattacaaacagtaatctagcaacatttggtttaggggctgttcaggtgattgctactggagtgacaacctggttgactgacaaagctggtcgaaggcttcttctcattatttcca

SEQ ID NO: 42184 - DNA, 284 bp, Zea mays
ggcaaaacggatccgtaacttcgggaaaaggaagaggacaaggagatgactctggaggaatttgagaaaataagagaggagaagaggaaagcactacttgagattgaaggctgaggagaggaaagttgaagttgacaaggatttgcagtctctgcagccactttcaaacaagaaagaaaatgatgaagttttcattaagctgggttctgacaaggataagaagaaggaaaatgctgagcgtgatgagcgtgccaagaagtcggtgagcatcaacgagttcctga

SEQ ID NO: 42185 - DNA, 273 bp, Zea mays
cgcctttgttgatggatctcaagagtgtgtcttgatggatctcaggcatttgatgagagaaactggggttgtcagtgtcctgccgtgcacgatgttgatgtcgtcaatggtttagatccatcaagaaacacgcctttgttgcatctccctatcctgtcatcataacacttgaagaccacctcccctctcaactccaggagaaagttgccaagatggttgtagaagtatttggcaacatactgtactacccgccagacgacactcatgagctca

SEQ ID NO: 42186 - DNA, 276 bp, Zea mays
cgccatgccatccagactgaggaagacccggaaactccggggccacgtgagccacggccacggtcgcatcggtaagcaccgcaagcacccaggaggccgcgggaatgctggaggcatgcatcaccacaggatcaactttgacaaatatcatccaggttacttcggcaaagttggcatgaggcattaccacttgaagaggaaccagagcttctgcccaactgtcaacctggataaattatggacgttggtcagcgagcagacacgggtcaatgcagc

SEQ ID NO: 42187 - DNA, 278 bp, Zea mays
gctgcctccgcctctcgagtctcgtccacccgtcatcctcctagctcctctactcgccagtcgccatggggaagattgagatcggaatcaacggcttcggaaggatcggcatgctcgtggccagggtcgccctccatagcgaggatggcgagctcgtcgccgtcagtgaccccttcatcaccacggactacatggcctacatgttcaagtacgacaccgtccacggccactggaagcacagcgacatcacactcaaggactccaagacccttctcttc

SEQ ID NO: 42188 - DNA, 277 bp, Zea mays
gtagctggtggcagtattctcaggggagtcctgagggtgaaccagaagattgaagttcgccctggcattgtcatgaaagatgagactggaaacatcaagtgcaccccaatctactcaaggattgtctcactgtacgctgagcagaatgaactccaatttgctgtcccaggagggcttattggtgtgggaacaaccatggacccaactctaacgcgtgctgacaggctggttggccaggttcttggtgaagtaggttcactacctgatgtttacgtag

SEQ ID NO: 42189 - DNA, 283 bp, Zea mays
caacgaagtatcatgctgtacaaggggtctcatgtgcatgcaccggctaaagattgttcaccgggacctcaagagtgcaaattgcctcgttaacaaatactggacagtcaagatatgtgattttgggctctctcgagtaatgtcaaattctgcaatgaatgacaactcatctgcgggaactccagagtggatggctcctgagctcattcgcaacgagccattcatagaaaaatgtgatatcttcagcttcggggtcatcatgtgggagctttgcactctttgt

SEQ ID NO: 42190 - DNA, 280 bp, Zea mays
ggcgatgatgattcaagtgatgaggatgataccagtgatgatgacgaggaagaaaccccaactcctaaaaagccagaggcaggcaagaagagaggtgctgaaaatgctctgaaaacgcctctttctgataagaaagcaaaggttgccacaccgccagcccagaaaacaggtggcaagaagggtgccacccatgtggcaactccacacgcagcaaaaggcaagactcctgcaaacaatgacaaatcaacggagaagtctccaaaatctggtgggtcagtcc

SEQ ID NO: 42191 - DNA, 276 bp, Zea mays
tgtacatcttccctgtccactggcagtttggccagctggatcagcacccgattgatgggtacctgtcccacacggagctggccccactgcgcgctcccctcattcccatggaacattgcaccactcgcttctttgagacctgtgacctagacaatgacaagtacattgccctggaggaatgggccggctgcttcggcatcaaggagcaggacatcaacaaggatctggtgatctaagttcaagcctcctgcagcagtcctggactctctccccctg

SEQ ID NO: 42192 - DNA, 276 bp, Zea mays
cgacaagcacatgtaccacgatatgtacatgaaggtcaaaggtaactcgttcaagaacaagagggtgcttatggagagcatccacaagtccaaggctgagaaggccagggagaagacgctctccgatcagttcgaggccaggcgcgccaagagcaaggcgagtcgcgagaggaagaatgctaggagggaagagaggctggcccagggcccaagagaaataccaccaccagtctcagccacagctcccactaccggggcaccgaagaaagcaaagaa

SEQ ID NO: 42193 - DNA, 295 bp, Zea mays
tcagttcatcacgaagaacgctacactcactaatgagaaggaggttgatgcatgcccaatcagagcaatgaagttctctgtctcccctgttgtgcgtgttgctgttcagtgcaaggttgcttccgaccttcccaagctagtagaaggtttgaagcgtctggcgaagtccgatcctatggttctgtgtacaatggaagaatctggtgagcatatcattgctggagctggtgagcttcatcttgagatttgcctgaaggatctgcaagaggacttcatgggaggtgctgaaattatt

SEQ ID NO: 42194 - DNA, 297 bp, Zea mays
agatctggcatcacaccttctacaatgagcttcgtgtcgcaccagaagagcacccagttcttcttacagaggcccctcttaacccgaagctaacagggaaaagatgacacaaatcatgtttgaaaccttcagtgttcctgctatgtatgttgctattcaagctgtgctttccctatatgctagtggccgtaccactggtatcgtcctggattctggagatggtgtcagtcacactgtcccaatctatgaaggctacgccctcccacatgccattcttcgtctcgatcttgctggcag

SEQ ID NO: 42195 - DNA, 297 bp, Zea mays
gcgccccgcccgacgcccgccacggcgccaccatgtcgcaggctacggaggtcgtcggaaacccgtacgccgccgagctcgctgcagccaagaaggccgtcgccctagcggcccgcctctgccagagagtgcagcggagcattttgcactctgacattcaatcgaaggcagacaagactcctgttacagttgcggattatggatcacaggtactggtatgtctggtcctgaagaaggaattgccttctcactctttctcaatcatagctgaagaggattcaaaagacttgagagaag

SEQ ID NO: 42196 - DNA, 299 bp, Zea mays
cccaaatccccaaagcctccgacccccttcctctctccctccgccgccgctgcgcacgcagggaacaagcgacatgggcgtctacacctttgtgtgccgcaacaacggcggcgagtggaccgccaagcagcactccggcgagatcgaggcttccgccgctaccccatacgagctgcagcgccgcctcgtcgctgccgcctccgcggccgactctgcctacggcgtccagtcgtccttctccatggtcacccccagctccgccgtgttccaggtgatcgtcggtgctgtcggtggtggtg

SEQ ID NO: 42197 - DNA, 294 bp, Zea mays
cagagaagcatcgcatctctgagtctgaaaccctagccgcctgtctccctgtccggtctccactcgtccgggcgacgagacgacgacggagggtttctgcgggggatttgtttgtcgctgactcgccggcgaccaagatgaggccggttttcgtggggaacctagactatgatacccgccactcggagctcgaccacctcttctaccgctatggcagggtcgagcgcatcgacatgaagtcaggaactaccagggcaaaacatagctccccagggctcctcaactcctgaaatt

SEQ ID NO: 42198 - DNA, 295 bp, Zea mays
cgccgtcactggatctgatgcacgagctgctccgccgcatgaagtgcagctccaagcccgacaagcgcctcatcctcatcggtccacctggctctggaaagggaactcagtctcctattatcaaggatgacatattgcttgtgccatttagccactggtgacatgctgagggctgctgtggcggccaagacacctctaggtatcaaagctaaagaagctatgaataagggagagcttgtttcagatgatttggttgtgggcattattgatgaagctatgaagaaacctcatgcca

SEQ ID NO: 42199 - DNA, 294 bp, Zea mays
caggctctcaaggatgtgtacgctcactgggttcccgaggacaggatcctcaccaccaacctgtggtctgctgagctctccaagctcgctgccaacgcgttcctggcacagaggatctcctctgtgaacgccatctccgccctctgcgaggccaccggcgcgaatgtgactgaggtggcttacgccgtgggcaaggacacgaggattggccccaagttcctgaacgccatgttgggttcggtgggtcttgcttccagaaggacatcctgaacctgatgtacatctgcgagtgca

SEQ ID NO: 42200 - DNA, 289 bp, Zea mays
gccagaagaaatcacaaaagaagaatatgctgccttctataagagcttgacaaatgactgggaggagcatctggctgtgaagcacttctctgtggagggtcaactggagttcaaggctgttctctttgttcctaagagggccccctttgatctctttgacaccaagaagaagcaaaacaacatcaagctctatgtgcgcagggtgttcatcatggacaactgcgaagagctgatccctgagtggctgagcttcgttaagggtattgttgactctgaggaccttcccctc

SEQ ID NO: 42201 - DNA, 294 bp, Zea mays
gcgaaccgctgccagtccaaaccctacggccgccgccagcatcaagctccccgaccaaaccctactcgtaccccgccgccgccgcagccgcagccgcggccacaccagcaagcagaactagcagccatgccgcccaaattggacccctctcaggtggtggaggtcttcgtccgcgtgacgggaggcgaggtcggcgcggcgtcgtcgctggcccccaagatcggcccgctcggtctctccccgaagaagatcggcgaggacatcgccaaggagaccgccaaggactggaagggc

SEQ ID NO: 42202 - DNA, 291 bp, Zea mays
ccgccagggcctcggcgccgtgtacctgaccggcgagaagctcaagtcccccggcgaggagtgcaacaaggtgttcctggccctcagcgagggcaagctcatcgaccgcatgctcgactgcctcaaggagtgggacggcaagcccctgcccatctgctgaggacgccaccggtgccaagatgcaagaccgcaagaggaggagatgacaccgtatgcgcgcgaggaagaaataaagaagggagtatttcggtattctcaagcaggcttcatatcgtttgcgatctgaagatc

SEQ ID NO: 42203 - DNA, 290 bp, Zea mays
caaccacacgttcacggtagcgagagcatatcgtcgtcggcggtgaagatggtgtcgctgaagctgcagaagcggctcgccgctagcgtcctcaagtgtgggaaaggcaaagtctggcttgaccccaatgaagtcagcgagatctccatggctaactcccgccagaacatccggaagttggttaaggatgggtttatcatcaggaagcctcagaaggttcactctaggtcccgtgcaagaagggcacatgaggccaagcagaagggaaggcactctggatacggcaagcg

SEQ ID NO: 42204 - DNA, 292 bp, Zea mays
cagtcttcctgcccagggaagaccaccttttccgcaaggtccactatctccccttcctgccctcaactgaggacgtttacgactgcagggtggagcactggggcttggatgagcctcttctcaagcactgggagtttgatgctccaagccctctcccagagactacagagaacgtggtgtgtgccctgggcctgactgtgggtctggtgggcatcattattgggaccatcttcatcatcaagggattgcgcaaaagcaatgcagcagaacgcagggggcctctgtaaggcac

SEQ ID NO: 42205 - DNA, 294 bp, Zea mays
tagtgtggaatcttacaacattgtgatagattgctttgccaaggcaggtgaagtggaaagagcactggagaccatcaaagttatgcaagagtcaggtttctctcctaatcttgtgacttttaacacattgataaatggatatttgaaactaggcaatgtacatgatgcaaaagcatttcttaaaatggtcatggaacatggtttaatgccagatgtcattacttttacttcccttattgacgggctatgtcatacccatcagctggatgatgccttcaattgcttcagtgagat

SEQ ID NO: 42206 - DNA, 292 bp, Zea mays
ggccgaagacgaggagaagcgaacaagcaggcttcgagaacaagactgcagggggagggggaggaccaagcgaaaggggaactagagcaagatgggcggcgcactgctgcttgcgctcctcctcgtctctgctgctgccgcccctcaggtacttggagttggcaatggagacaatcacatgagaatcatccaggaggacatcatcgagacagtcaacaaccatcccagtgctgggtggacagcctcacgtaatccttacttttcaaactataccattgcgcaatttaagcac

SEQ ID NO: 42207 - DNA, 293 bp, Zea mays
ccaggagaggcagccgccgttgctgctgccgcgtccacagaatggggggtttcgtgaagactcataagaccaatgcgtatttcaaacgtttccaagtgaaattcaagagaaggcgggctggcaagacagactacagggccaggataaggctgattaaccaagacaaaaacaagtacaacacacccaaatacagatttgttgtgcgatttaccaacaaggacatcactgcccaaatcatatctgctagtatagcgggtgatatggttcttgcttctgcctactcgcatgagttg

SEQ ID NO: 42208 - DNA, 296 bp, Zea mays
ccaagtttcacaacagatacctacaagaagtacatcatagattagatgatatcaatcaaagggacacttgaagaacagagaccagaaagagtaaaaccttttatgacaggggctgcagaacagatcaagcacatccttgctaatttcaaaaactaccagttctttattggtgaaaacatgaatccagatggcatagatgcactattggaataccgtgaggatggtgtgaccccatatatgattctctttaaagatggtttagaaatgcgaaaatgctaacaaatgtggcaattatt

SEQ ID NO: 42209 - DNA, 283 bp, Zea mays
gccagcaggcgctgcgatacattccacacaacatccgagggctctgccccagcccgccacaggagttcccgcatctccctctggtccggtcacaggagctccgagacctctccaatggcggttaagatctacgttgtgtactattccatgtatgggcatgttggcaaactagctgatgagatcaagaaaggtgccttatctgttgaaggtgttgaggctaaaatatggcaggtccctgaaattctctctgaagaagtgcttggaaagatgggcgcgcccccta

SEQ ID NO: 42210 - DNA, 285 bp, Zea mays
caacaaccgtagcctggacctggacagcatcatcgctgacgtcaaggcccagtatgacgacattgccaaccgcagccgagcagacgctgagtcctggtaccagatgaagtaccgaggagctgcagcagacagccgaccggcacggagatgacctccgcaacaccaagcatgagatctcagagatgaaccggatgatccataggctgagatccgagatcgacaatgtcaagacgcaatgtgccaacctccagaatgccatcgccgaggctgagcagcgtggggagc

SEQ ID NO: 42211 - DNA, 269 bp, Zea mays
ctgggtatcgcttcgcgcggtttacggcgcatcctctaccccgggatggagctgctggagctgtgcgagcaggtgtttagcaccgccgacctctaccaggtgctgggcgtgcggcgcgaggcttccgacggcgaagtccgacgcggctaccacaaggtgtccctgcaagtgcaccccgacagagtaaaggatgaccagaacgaggacgccacccgccgcttccagatcttggggatagtgtacgcggttctgagtcacaaggagcagaa

SEQ ID NO: 42212 - DNA, 286 bp, Zea mays
ctaggccttgttgctgcattaggattctattgttacaagagaaaacagaagcctttcggaagggtgcagagtccacatgccatggttatccatccgaggcactcaggttcagatgacatggttaaaatcacagttgcagggggaaatgctaatggtggtgctcgcgcaagtgagacatatagccaagcgagcagtggtccacgggacatccatgttgttgaaagtggaaatatggtcatttcaatccaagttctccgcaatgtgaccaacaacttcagcgaggaca

SEQ ID NO: 42213 - DNA, 297 bp, Zea mays
caagaactcggctgcagtcaccaagttcctcgatgagctggctaagattgacttccctggagccaaggtggtgagcgatgcggtggccaagtccggcacctcgcccctgcttccggcgatcaccttcatcttggacaaggtcgcaccgtttatccccaaggaggagcccaaggcggatccgtcggcggaggccacctcccgggaagtcgccgtggaggagaagaaggaggaggccgagccagctgcagcgacggaggcggcaccggcgccggcagagacaccgtcggaggcggcggt

SEQ ID NO: 42214 - DNA, 281 bp, Zea mays
attgccacataattccttcccctagccgccgccgccgccgctagtatccctgagaggtagcccgatcgatgaactagccgagtactaggtagagaatcggttgatcttatctcagcccggggtctgctgcatctggtggtggtgaagtgggagaaattcgtgagatctgttccggatcatgcgtgacgagctctggaatcaggggtttcacacatagcttcgtcgatttgaatgtgatgtactaatggagtctaagagtcggcacaactctagcagtagtc

SEQ ID NO: 42215 - DNA, 293 bp, Zea mays
gttcggaggaggcaacggtgcaactttcttcggtcgtcccgaatccgggttcatccgacaccagccacctccaccatgccgcccaagttcgaccccaacgagatcaaagtcgtgtacttgaggtgcaccggaggcgaggtcggcgccacatccgccttggcccctaagatcggtcctctgggtctgtctcccaaaaaagttggtgatgacatcgccaaggctaccggtgactggaaaggcctcaggattacagtgaaactgaccatccagaacagacaggcccagattgaggt

SEQ ID NO: 42216 - DNA, 292 bp, Zea mays
agccagccatcctactgtcacacacacacacacacacagacaagtggtttccaaagccaagtgtgtgtactagcaaccagctagctcgggcggcacaggcagccatcatgtcggaggagaagcaccaccacttcttcaaccaccacaagaaggacgaggagcagcccgccggcgagtacgggtactccgagaccgaggtggtcaccgccaccggcgagggcgagtacgagaggtacaagaaggaggagaaggagcacaagcacaagcagcacctcggcgaggccggcgccat

SEQ ID NO: 42217 - DNA, 292 bp, Zea mays
agcccatcctgccctttgaggtgttatctgctcgccttgggcgtagaccagaggacataatcaagttggatgcaaatgagaatccatatggtccacccccggaggtcgctgcagcactaggtagtctcaagttcccctatgtgtaccctgatcctgaaagccgccaattgcgtgctgcccttgctgaagattctggacttgaatctgattacatacttgctggatgtggcgcagatgaactaattgatttaattatgagatgtgtgcttgaaccaggcgacaaaattgttga

SEQ ID NO: 42218 - DNA, 290 bp, Zea mays
caatcttcttggaatggagattgtgcaccgttttgtcaagaagcatattttcagtcttcacatcacggtgcacaatcttcttggaatggagatagcttaatcccctggcgaggtcaagagcgaaaatatgcttcttgacaaaacgagaaccgtgaagatcgctgattttggtgttgctcgccttgaagcttcaaatcccagtgacatgacgggcgaaactggaacgcttggttacattgcacctgaggttctcaatggaaatccctacaacaggaaatgcgatgtttaca

SEQ ID NO: 42219 - DNA, 292 bp, Zea mays
ctcgagtgcaacgcaacgttggcgcttggcggccagtagtagcagctaatttagcgtcgctccttcctactagacgagagatcgagaaaccatggccaagctccaagtcactcctggcgccgcgttcaccgagtgcaatgaactcaacttccagggcctgtacatgtaccacacgcccctgggtcccaaggccaaccaagctgcgatcctagagagcaaggccaagatcggcatcggtgccaccgtggttaacaactgggcagtgtatgacgggccagggccaggcgctaag

SEQ ID NO: 42220 - DNA, 303 bp, Zea mays
attcatagatcgctagcagccgcccgcgatctagaacctctcatgcacacatgtattttgaaagttatggttcagattgtacacaaacatttgttgttgccaagacaaagagcactgttgatgttctgtggcagaatggaactgtatctcttggtctagaaccccaggcattactccctgtgagtacccttggtgaccatgatttttggccaggtcaatttgtcctagaaaaactgactgtagaagatgctgcaagatgtccgcgaacggcaatagtgagtgatgtggatgcactggagcgaa

SEQ ID NO: 42221 - DNA, 290 bp, Zea mays
cacatacacaagcacaagcgcactctagcaatggcttctgaggttgtccgccctagcgacgccgagctactaaaggcacaagccgacatatggcggctcagcctctcctacctcacgcccctgtcactgaggtgcgccgtggagcttggcatccccacggcgatctaccgccatggcggggctgcctcagccgctgagctggtcacggcgctgtctctcccctccactaagctgccgttcctccgccgcctgctgcggctcctcgccgcgtcgggcgtgttcaccgtcga

SEQ ID NO: 42222 - DNA, 288 bp, Zea mays
cacatacacaagcacaagcgcactctagcaatggcttctgaggttgtccgccctagcgacgccgagctactaaaggcacaagccgacatatggcggctcagcctctcctacctcacgcccctgtcactgaggtgcgccgtggagcttggcatccccacggcgatctaccgccatggcggggctgcctcagccgctgagctggtcacggcgctgtctctcccctccactaagctgccgttcctccgccgcctgctgcggctcctcgccgcgtcgggcgtattcaccgtc

SEQ ID NO: 42223 - DNA, 268 bp, Zea mays
gaggaatggtcgggggaaagacgacctcgctagggaagcttgcttacaggtttaagaacgaaggtgtcaaggtattgatggcagcaggtgataccttcagagcagcagctcgtgaccagctagaagtttgggctgagagaactggttcagagattgtcattgacaatgacaagaaggcacagcctccagcagtactttcgcaggcagtaaagcgcgggaagcgtgaacggtttgatgtggttctatgtgctacatcaggtagacttca

SEQ ID NO: 42224 - DNA, 285 bp, Zea mays
ctcagcttcgtctctctcgccggcgcggcaactatcatcacttcattagctcatccaatctattccgatgacgaccgtgctcacgccacagcaggtggcgtactcacgggcacggctcgcaccccgcgcgatcggcgccttgctggagtttgccccagcctcctcctccctccgcttcgccgtgcaccgctgccgcactgctcgcctagaggtgaaggcatctggaaacacgtatggaaactactttcaggttgcaacttatggtgaatctcatgggggtggtgt

SEQ ID NO: 42225 - DNA, 289 bp, Zea mays
ggagaagccgccgcaccagcaatcacagcagcccggagaacgccctggtccaacaagatgcagatcttcgtgaagacgctgacagggaagaccatcaccctcgaggtcgagagcagcgacaccatcgacaatgtcaaggccaagatccaggacaaggaagggatcccgccggaccagcagcggctgatctttgccgggaagcagctggaggatggccgcacccttgcggactataacatccaaaaggagtctacgctccacctcgtgcttaggctccgcggtggaatca

SEQ ID NO: 42226 - DNA, 286 bp, Zea mays
ccgcgtgcgaaccaagcagaccccagcagaagaagcgaagtcgtcgccggagcaggaggaagagcgagcagcaagatgtcgtggcaggcgtacgtcgatgaccacctgctgtgcgacatcgaaggccagcacctcagcgccgccgccatcgtcggccacgacggcagcgtctgggcacagtccgagaacttccccgagttaaagcctgaggaggttgctgggatgataaaggactttgatgaacctggaactcttgcaccaactggtctttttgttggaggtacga

SEQ ID NO: 42227 - DNA, 266 bp, Zea mays
ctgatccgccacatgaacatcaccaagtaaatgaacaaactgatgaaaacatgcaaagagtgatgaaagcatgcagagagagttgtgtttcttccccggaagtgcttccgagaataaatttttcttatctgattgtctaaaacctataacgggtgtaatggtatcgtagtggttggttgagcatcaagtgactcatattttgtcaggtctatgtgtcatcgttaaacttttaacggtcattatatttcaaaagttttgcattttcc

SEQ ID NO: 42228 - DNA, 285 bp, Zea mays
gttttgatctaagttgatcatgttcgggattcagtattataatggtgatatctcagagttggaactatattttgttattgtaaataatgaatatggtgaacaatgtgaagaagaacttctccctggtgggaggcacatgcgtgtaacaaatgataatgttattacttttatccatcttgtcgccaatcatcggttaaactaccagatccgtgcacaaagtacacacttcttgagaggttttcagcagcttataccaaaagattggattgatatgttcaatgaaca

SEQ ID NO: 42229 - DNA, 284 bp, Zea mays
ctcgctcgctccccgatctggagtctgccatcatggatgttctcgcagaagcaaatggcacctttgccttaaaccttttgaaaacgctgggtaaagacaactcgaagaatgtgtttgtctcacccatgagcatgtcctgtgccctggccatggtctacatgggggcaaagggaaacaccgctgcacagatggcccagatactttctttcaataaaagtggcggtggtggagacatccaccagggcttccagtctcttctcaccgaagtgaacaagactggcacg

SEQ ID NO: 42230 - DNA, 310 bp, Zea mays
gaaagacaagacttatgatcttaatttcaaggaggagaacaacgatggctcaaacaaaatttcaggcgacagcctgaaagacctgtacaagtcctttgtttctgagtaccctatcgagtcgatcgaagacccatttgatcaggatgactggagcacttatgccaaactcactgatgagattggacagaaagtgcagattgtaggagatgatcttctcgttaccaaccccaccagggtcgccaaggccatcaatgagaagacctgcgatgctctcctcttgaaggtgaaccaatcgggtctgtgacgagag

SEQ ID NO: 42231 - DNA, 313 bp, Zea mays
gcttgttctcaagaaaaggttagaactagaaggcatctgtagaaatgcacacatggagcctgatatgagcacagcaccagagaagatcaccgcgctgattgattccggtttagtggatccttgcgaactcctttccagcattgaagtgcaaataacaaaagcaaatgaagagtccttaacgaggaaagatatcatggagagagtggataaatggctatcagcttgtgatgaagagacttggcttgaggaatataaccaagatgataataggtatagtgctggcaggggtgcccacttgaatcttaagcgtgca

SEQ ID NO: 42232 - DNA, 311 bp, Zea mays
gcagctggctccaaactgcttgccaacatggtgtatcagtacaaaggcatggggctgtccatgggcaccatgatctgtggctgggataagagaggccctggcctctactacgtggacagtgaagggaaccggatttcaggggccaccttctctgtaggttctggctctgtgtatgcatatggggtcatggatcggggctattcctatgacctggaagtggagcaggcctatgatctggcccgtcgagccatctaccaagccacctacagagatgcctactcaggaggtgcagtcaacctctaccacgtgcg

SEQ ID NO: 42233 - DNA, 312 bp, Zea mays
  unsure (1)..(312): unsure at all n locations
cggacgnaaggcgaaggagtagcagcagcaggcggcgccgagtagcggctccccatctcgagcttgccaccatggctagaggattgaagaagcatttgaagaggctcaatgcccccaagcattggatgctggacaagcttggcggagcttttgctcccaagccatcttctggacctcacaagtctagggagtgcctgccactgatcctcatcatcaggaacaggctcaagtatgctcttacataccgtgaggtcatttccatcctgatgcaacgccatgtacttgttgatggcaaggtcaggacagacaaga

SEQ ID NO: 42234 - DNA, 311 bp, Zea mays
ccttgcaggagctgcaggacactacgctgggctcactgctctcagcgcttatgcagcactgcgagcccccacagcggcgctacccgctcgagaagggcgttcctccaccgtggtggcctaccggcgacgaggagtggtggccggaactcggcattcccaaggaccagggcccacccccgtacaagaagcctcatgaccttaagaaggcctggaaggtgagcgtgctcaccgctgtcatcaagcacatgtcaccggacatagagaagatccgtcgcctggttcgccagtccaagtgcctccaggacaagatg

SEQ ID NO: 42235 - DNA, 311 bp, Zea mays
gccgccgccgccgccgcgctgccggagacgaaagactggagggaggatgggatcgtgagcccagtgaaaaaccagggccactgtggatcatgctggaccttcagcactactggtgcgcttgaggctgcatatacccaggcaactggcaaggccatctctctttctgagcaacagcttgttgactgcggttttgcattcaacaatttcggatgtaaggggggccttccatcccaggcctttgaatacatcaaatacaatggtggtcttgacactgaggagtcctacccttaccaaggtgtcaacggaatctg

SEQ ID NO: 42236 - DNA, 311 bp, Zea mays
acaagacacaacacaactcgtaggcagcgagcgtctctcctcttcctctcccacgcaccgcgccaaggaaggcagagagagatcgccgctcctcttctctccgtcggtggtgcggttgacagccctcctcgagcgagatctcgctgcagtccctcgagatctggtcacagatctatccgacaagatggtgaagatctgctgcatcggtgctggctatgtcggtggcccaaccatggcggtcattgccctcaagtgcccagacattgaggttgtcgttgttgacatctccaagcctcgcattgaggcatgga

SEQ ID NO: 42237 - DNA, 310 bp, Zea mays
ggatagtcaaagccgtattatgaagagaacagaatcttcagctcccatctttaacatggaagacatcgaggagggtattgaaggttatgaggatgaaaggtcagtgcttatgtcccagaggaaattggagaaacgctttggtcagtctccaatcttcattgcatccacctttatgactcaaggtggcataccaccttcaacaaacccagcttctctactgaaggaagctatccatgttatcagctgtgggtacgaggacaaaactgaatggggaaaagagattggctggatctatggttcagttacagag

SEQ ID NO: 42238 - DNA, 314 bp, Zea mays
agctcgtacagaattccatatgacagacatgcagaaggtggtcaacttggtgcttcatggtattttagtagaaaagaaatagaggagaattcgctttcgaggagatacggcattgatctgaagaaagagtcttatcttcgcaagtcatattgcacatttctgcaggatttggggatgagacttaaagtacctcaagtgacaattgctactgctatagtgttctgtcatcggttcattcttcgtcaatcgcatgccaaaaatgacagacggacaattgcagcagtatgcatgttcttggcgggaacagttgaaga

SEQ ID NO: 42239 - DNA, 296 bp, Zea mays
gggtttttgattttagccgccgccgctgctcatctcacatccctcgagaagacgcctgctcctcgccgatcgatacgatggccgtcttctccgacctccacaccgccgacggcctcaagtccctcgaggctcacctcgccggcaaaacctatgtgtctggtgactccattactaaggatgacattaaggtcttcgccgcggtgccgtcgaagcctggcgctgagtttcctaatgccgcccgctggtacgagaccgtctctgcggctgtagctcaagatccctggtaagctgttggt

SEQ ID NO: 42240 - DNA, 308 bp, Zea mays
caggagcggcgatccattccacacaacgatcactcttcttgccccagcccgccgcaggagttgccagatctgctccggtcacaggagctccgactccgagccctctccaatggcggttaaggtctacgtcgtgtactattccatgtatggacatgttggcaaactagctgaagagatccagaaaggtgcctcgtctgttgaaggtgttgaagctaaaacatggcaggtccctgaaaccctccctgaggaagtgcttggaaagatgggcgcacccctaagcctgacgtgccagtcatcacgccgcaaga

SEQ ID NO: 42241 - DNA, 307 bp, Zea mays
accagctccgctcaggtagtcccccaaagtctccacgaaccacagtccatgacaagtctgcccaccaaacacacagctcctggacaccccccaacgcacagtactggtcccagtttcacagcgtgaggccacaggggccccagttgaggcagcagcaacacaaacaaaacaaacaagtgctggggtactgcctcctcctcatgctggcgggcatgggcctgcactacattgccttcaggaaggtgaagcagatgcaccttaacttcatggatgaaaaggatcggatcatcacagccttctacaacga

SEQ ID NO: 42242 - DNA, 303 bp, Zea mays
ggcctttgtcgccctagactacgagcaggagctggagaccgctaagagcagctcctccgtcgagaagagctacgagctgcccgatgggcaggtcatcacgatcggcgcggagaggttcagatgcccagaggtgcttttccagccgtcgctgatcgggctggaagctcccggcatccacgagaccacctacaactcaatcatgaaatgtgacgttgatatcaggaaggacctttacgggaatatcgtcctcagtggagggacgaccatgttccctggcatcgctgacaggatgagcaaggagat

SEQ ID NO: 42243 - DNA, 309 bp, Zea mays
gattgatccgtcgcccgcaggccacagcagccgcggcgaggtcgtccgtcggattcggaggctcagttattactgaaaagataatacagtacctatggcttctctggacgccgtgcgaggagacctcgccctgctgattctgtacctgaacaaggccgaggcgcgggacaagatctgccgagcgatccagtacgggtccaagttcatcagcaacggcgagccagggcctgcgcagaacgtcgacaagtccaccagcctggcccggaaagtgttccggctctgtaagttcgtcaacgatctgcacgcttt

SEQ ID NO: 42244 - DNA, 300 bp, Zea mays
gattttgtcaagtatgcccatgatgaggaagctgctgatgaccaggaagagtctggatggaagtatattcatggtgacgtcttccggttcccaaagaataagtcgctattttccgctgctcttggcacaggaactcaattatttgcactcacaacctttatattccttcttgcacttgttggagtattctacccttacaaccgtggtgcactatttactgcattggttgtcatctatgcactcacttcaggaattgctggatacgttgctacctctttttattctcagctggaggggaca

SEQ ID NO: 42245 - DNA, 297 bp, Zea mays
ctgaagcgtgggtatgtggcctccaactctaaggatgaccctgccaaggaggctgctagcttcacatcccaggtcatcatcatgaaccaccctgggcagattggcaacggctatgccccagtgctggactgccacacctcgcacattgctgtcaagtttgcggagctcattaccaagattgataggcggtctggcaaggagcttgagaaggagcccaaatttctcaagaatggtgatgctggtatggtgaagatggttcccactaagcccatggtagtggagaccttttctgaatat

SEQ ID NO: 42246 - DNA, 300 bp, Zea mays
caaagccaaaccctaattcacggccgccggagatgggacaaggttctcccggcgggatgggcaagcagcccggcctcccgggcgaccgcaagcagggagacggcaagaaagagaagaaatatgaaccacccgctgcaccttcccgtgtcggccggaagcagaagcggcagaagggctccgaggcggcggcgcggctccccgccgtggcgccgctctcaaagtgccgccttcgcctactcaagctcgaacgcgtcaaggactaccttctcatggaagaggagttcgttgccagccaggagc

SEQ ID NO: 42247 - DNA, 299 bp, Zea mays
atatgcttgtagtcctgctcacagcagccttgctggctctgagctcagctcagggcacagatgaagaggtcaacaatgctgagaccagtgatgtaccagcagattctgaacaacaacccgtggactcgggttcagatccaccttctgctgatgcagatgcagagaatgttcaagagggtgaatcagccccaccagcaaatgaagagcctcctgccacctctgggagtgaagaggaacagcagcagcaggaacccacacaggcagagaatcaagagcctcctgccacctctgggagtgaa

SEQ ID NO: 42248 - DNA, 300 bp, Zea mays
cagaaacagaaaggtagtagatcaaggaacgccagtgcggcgacaatgaccggcagtggaagcacgggcgccaatggcaagagccagagctccagggccaaggcaatgctgctcgccttgggcaagagctttcctgaccaagttctgcctcaggagaaggttgtggagagctacctccaagaaagcagctgcgacgatcccgccaccagggccaagcttcagcgcctttgcacgactacaacagtgaagacaaggtacactgttatgtccaaggagctattggataagcacccagagctg

SEQ ID NO: 42249 - DNA, 296 bp, Zea mays
gagaggtaggtggccggacggtggtggcatcgccaattcaactccgcatctgaatcggcactcggcagcgcgccactccatagtgtaggaggaggagatggcgctcacaagaatcggtcttgctggccttgcggtcatggggcagaaccttgccctcaacattgcagagaaagggttccccatctctgtgtacaacaggacaacctccaaggtggacgagaccgtgcagcgtgccaaggcagaaggaaaccttcccgtctacggcttccatgaccccgcgtcctttgtgaactcca

SEQ ID NO: 42250 - DNA, 254 bp, Zea mays
  unsure (1)..(254): unsure at all n locations
gcacaacacacgattttancnnccagnctccgancgncctccgatttccnctccgactncaacctccgggaccatcttctcggccatctcctgcttctgggacctgccagcaccgtttttgtggttagctccttcttgccaaccaaccatgagctcccagattcgtcagaattattccaccgacgtggaggcagccgtcaacagcctggtcagtttgtacctgcaggcctcctacacctacctctctctgggct

SEQ ID NO: 42251 - DNA, 298 bp, Zea mays
gggtttttgattttagccgccgccgctgctcatctcacatccctcgagaagacgcctgctcctcgccgatcgatacgatggccgtcttctccgacctccacaccgccgacggcctcaagtccctcgaggctcacctcgccggcaaaacctatgtgtctggtgactccattactaaggatgacattaaggtcttcgccgcggtgccgtcgaagcctggcgctgagtttcctaatgccgcccgctggtacgagaccgtctctgcggctgtagcctcaagattccctggtaaggctgttgg

SEQ ID NO: 42252 - DNA, 292 bp, Zea mays
taccgaattccttgcaattcctctcccctcgcctcctcgtctccccctaggggatcgtcggagaggaatcgcaaagagggccgtctcatccgagttaaggaagccatggagcacaaggaggctgggagccaggcccacgagggacccatcctctgcatcaataactgtggcttcttcggcagcgcggcgaccatgaacatgtgctccaagtgccacaaggagatgataacgaagcaggatcaggccaagctggctgcctcctctatcgacagcatcgtgaacggcagcgacg

SEQ ID NO: 42253 - DNA, 294 bp, Zea mays
caggctcagcctcccctctcccctcctcggcatcttcgccgccggcgatctatctctctcacaatggcggcgcacatgtcagccatcgactcagcgtggcagctcctgatcgccaacttcaccgagttctagctcgacaccgtcgtcaccttcctggtccacgagaccgtcttcttcctctccggcctcccctccctcctcttcgagcgcttcggactcttcgccaagtacaagatccagaagaagagcaacacctctgcttaccaaaacagatgtgtcttgcgcctcattctc

SEQ ID NO: 42254 - DNA, 300 bp, Zea mays
tgcggcctctcgaatctgacccatttccacggttcgcgtgcgccgttgccgcggatctgcgtgcttgtggcatcgggttccgtggatctagttgcggtggctttgtttctagtgttattgttaatcatctgcgcactgtgagtggatccataggctgaaccctttgctttcgtttacatctcagcggagatggggctcacgttcacgaagctgttcaggcggctattcgccaagaaggagatgaggattctcatggtcggtctcgatgcagctggtaagaccaccatcctctacaagctc

SEQ ID NO: 42255 - DNA, 294 bp, Zea mays
ggagggacgagggaggggaaaagagagatggtggaggcatcgccggagtccggcgccgcggcgaccggaggtgcctctagtacggcggcggtgcggaaggggaagtcatgcaagggctgcctctactactcgtcagtgctcaagtcccgcggttacaacccaatctgcgttgggatcccccgctccatcccccaagttcctaactacgtggtggatgaacctaaggaggaggcgacggcgcaggggcatgacctcaggcggttcaggtacgggtgcgcgggttactccatgttc

SEQ ID NO: 42256 - DNA, 282 bp, Zea mays
catcccgtcgcatcccatcccactaccacccatctcgtcgtccgccgattcgatccggttcttccaacccaggggcagtgatggcgacgaagaggagcgtgggcaccctcggcgaggcggatctgaaggggaagaaggtgttcgtgcgcgccgacctcaacgtcccgctcgacgatgcccagaagatcaccgacgacacccgcatccgcgcctccgtccccaccatcaagttcctcctcgagaagggcgccaaggtcatcctcgccagccaactgggtcgtc

SEQ ID NO: 42257 - DNA, 282 bp, Zea mays
cgcaaccgagctcaatccccagaggccagagccagctgctcggcgctccacgcgatggcgcagaaggagaccaatggcagcaacggcgagcacatctccacccgcccgccgccgaccccgtcgcccctccgcttctccaagttcttccaggctaacctgcggatcctggtcactggtggggcgggcttcatcggctcgcacctcgtggacaggctcatggagaacgagaagcacgaggtcattgttgctgataactttttcaccggttcaaaagataacctg

SEQ ID NO: 42258 - DNA, 284 bp, Zea mays
cccgcacaacggcacgattctcctcctccgtccgcgtactctcggtttcggcgatgtcggggcgcggcaagggcggcaaggggctgggcaagggcggcgccaagcgccaccgcaaggtgctgcgcgacaacatccagggcatcacgaagccggcgatccgtagctggccaggaggggcggcgtcaagcgcatttctgggctcatctacgaggagacccgcggcgtgctcaagatcttcctcgagaacgtcatccgcgacgccgtcacctacaccgagcacgctc

SEQ ID NO: 42259 - DNA, 284 bp, Zea mays
  unsure (1)..(284): unsure at all n locations
actcgaagagtaccagcttactatatacatgaccccaactagcgctctgcgagtagtcatgcctcagatctgcttcgtgattaccgttcggagcggctcagaagtccggatcccatacgatggggacnncaacgangtgcccaagaccgcgganaacttccgcgcgctgtgcacgggcgagaagggcgtgggcaagtccgggaagccgctccactacaagggctccacctgataccgcgtcatccccgagttcatgcgccanggcggcgacttcacccgcggca

SEQ ID NO: 42260 - DNA, 286 bp, Zea mays
aagcaagcaagcaagcagcgagtacatacatactaggcagccaggcagccatggcgcccaccgtgatgatggcctcgtcggccaccgccgtcgctccgttccaggggctcaagtccaccgccagcctccccatcgcccgccgctcctccagaagcctcggcaacgtcagcaacggcggaaggatccggtgcatgcaggtgtggccggcctacggcaacaagaagttcgagacgctgtcgtacctgccgccgctgtcgacggacgacctgctgaagcaggtggacta

SEQ ID NO: 42261 - DNA, 288 bp, Zea mays
ctcgagcggtgcatggaacctgtggagaagtgcttgcgcgacgccaagatggacaagagcagcgtgcacgacgtcgtgctcgtcggtggctccacccgcatccccaaggtgcagcagctgctgcaggacttcttcaacggaaaggaattgtgcaagagcatcaacccctccgaggcttcggcgtacggcgccgctgtccaggctgccatcctcagcggcgagggcaacgaaaaggtacaagatctgctcctgctcgacgtcacgccactgtctctcggcctggagact

SEQ ID NO: 42262 - DNA, 337 bp, Zea mays
catttgctaagtctaaaagctgactgagcaccatgaggctgagcccgcgtcttcttctgatcattctggttgtttgttgctatgaaactactgctggcaatgtctgtgatgctgttttgcgtgaaagcgcggccttcgttctaggaagtaaggataacctgaggaaggaacttgagcaatattctgtccctgccgaggctgttaaagcagaactggaggtgaagcgatgtgtagaccagatgagatacggagacagacttaaagtggcaggagcactggtacaaattttatttagatgtggcgtgagacgatggctggatgagtattttcctggtat

SEQ ID NO: 42263 - DNA, 335 bp, Zea mays
ggctgatgaaggcatctcgttcaggggcctatttatcattgatgataagggtattcttcggcagatcactgtaaatgacctccctgttggccgctctgtggatgagacttcgcgactagttcaggccttccagttcactgacaaacatggggaagtgtgcccagctggcttgatacctggcagtgataccatcaagcctgatgtccacaagagcaaagaatatttctccaagcagaagtgagcgctgggctgttttagtgccaggctgcggtgggcagcatgagaacaagacctctactgtattctcaggtttccattagtataacgcaagactt

SEQ ID NO: 42264 - DNA, 333 bp, Zea mays
cttgcagctcggaggccgcacgatgcctggagttactgtaaaagacgtgaaccagcaggagttcgtcacagctctggcagccttcctcaaaaagtccgggaagctgaaagtccccgaatgggtgtataccgtcaagctggccaagcacaaagagcttgctccctacgatgagaactggttctacacgcgagctgcttccacagcgcggcacctgtacctccggggtggcgctggggttggctccatgaccaagatctatgggggacgtcagagaaacggcgtcatgcccagccacgtcagccgaggctccaagagtgtggcccgccgggtcct

SEQ ID NO: 42265 - DNA, 332 bp, Zea mays
cgaatcccgagcacaggccgccgctcgctcgctcgctgcaactacgcacgcacgcgcctgctcctccccttagcttccacaaggctcgactcggccggcggcgatggcgcggaagaagatccgggagtacgactccaagcgcctcctccgggagcacctcaagcgcctcgccggcatcgacctccagatcctctccgcgcaggtcacacagtcaacggatttcactgagcttgcaaaccaggagccgtggctctcatctatgaagttggttgtaaacctgacatgctctttgggaaacgtgggaagagtgggcttgtgggcctcaacctaga

SEQ ID NO: 42266 - DNA, 333 bp, Zea mays
attcgaaactatctactatcatgctctgaaagcttctgctgaacttgctgctaaagaaggtccctatgaaacatatgaagggagccctgtcagcaagggcattctccaacctgacatgtgggatgtagtgccatctaacagatggaactggccatctctaagggagaccatttcaaaagttgggataagaaattctcttcttgttgctccaatgcccactgcttccactagtcagattcttggcaacaatgagtgttttgaaccctacacgtctaatatatacagtcgacgtgttctaagtggggaatttgttgtggtcaacaagcatcttct

SEQ ID NO: 42267 - DNA, 346 bp, Zea mays
cgccagccgaaccgacattgttttctccccccttctcgccttctccttctcccccctagtctagaggcgtttgctccccaatcccttcggcccgcccgctcgacgtgatcccaccggcagccatggatccatacaagcaccgcccgtctagtgggagcaactccagcttctggaccaccaactccggcgcccccgtctggaacaacaactctgtgcccaccgtcggacagcgaggtccaatcctccttgaggattatcatctaatcgaaaagcttgctcagttcgacagagaacgtatccctgaacgtgttgtgcatgcacggggagccagtgccaagggtttctt

SEQ ID NO: 42268 - DNA, 323 bp, Zea mays
gaaatgtgaccctcgccatggtaaatacatggcttgctgcctgttgtaccgtggtgacgtggttcccaaagatgtcaatgctgccattgtcaccatcaaaaccaagcgcacatccagtttgtggattggtgccccactggcttcaaggttggcatcaactaccagcctaccactgtggtgcctggtggagacctggccaaggtacagagagctgtgtgcatgctgagcaacaccacagccattgctgaggcctgggctcgcctggaccacaagtttgacctgatgtatgccaagcgtgcctgtgttcactggtacgtgggtga

SEQ ID NO: 42269 - DNA, 308 bp, Zea mays
ccgtcgctgactcccacaccggccgccgcgcagctccggcaccatctccgcacgagcagaaatggcggatgcgtgtatctcaacacagctaattgatggagatggggtcttcaacgtctctggattggagaacttcatgaaggatgtcagattgggtgaatgcgggctctcctatgctgttgtatcaataatgggcccgcagagtagtgggaaaagtacacttttgaatcatctttttggcaccaattttagggagatggacgccttcagaggaatgtcacagactaccagaggtatatgcgttagcg

SEQ ID NO: 42270 - DNA, 291 bp, Zea mays
cggcatcgagcacgatggcaccatgcccagtgattcctcggttggcgtcgcacatgatgccttcaacacgttcttcagcgagactggttccggcaagcatgtgcccagggccatcttcgtcgaccttgagcccactgtcatcgacgaggttcgcactggctcgtaccgccagctcttccacccagagcagctcatctcggggaaggaggacgcagctaacaactttgcccgtggccactacacggttgggaaggagattgtcgatctatgcctggaccgtgtgcgcaactt

SEQ ID NO: 42271 - DNA, 315 bp, Zea mays
gccaacgagtgccaggctaacttcatcagtgtcaagggtcctgaattgcttaccatgtggtttggtgagagtgaagccaacgtccgcgaaatttttgataaggctcgccaatctgctccttgtgtcctcttctttgatgagcttgactcaattgcgactcagagaggaagtagtgtgggtgatgctggaggcgcggctgatagagtgcttaatcagctactgaccgagatggatggcatgaacgccaagaaaactgtgtttattattggtgctacaaacagccttgacatcaatgatcctgctcttctgaggcca

SEQ ID NO: 42272 - DNA, 245 bp, Zea mays
ctgaccagcaccatggcggttggcaagaacaagcgccttacgagaggcggcaataagggagctaaggagcgagtggttgatccatgttctaagaaagattggtatcatgtgacagcacctgctatgttcaatataggatatattggaaagacgctcgtcaccatgacccaagggaccacaattgcatctgatggtctcaagggtcgtgtgccctaagtgagtctcgcggatttgcagatcgatga

SEQ ID NO: 42273 - DNA, 322 bp, Zea mays
cgtcaagtgaaacttttcatgtggttgcctacgactttggtatcaagcataatattttgagacgattgacatcatatggatgcaaaataacagttgttccagcaaattggcctgcttcagaggtactcaatttgaagcctgatggtgttctttttagcaatggtcctggggatccagctgcagttccctatgctgtgaagacggtacaggaaataattgggaaggttcctgtttttggcatctgtatgggccaccaattgattgggcaggctcttggtgggaagacattaaaatgaatttggacatcatggcgggaatcacc

SEQ ID NO: 42274 - DNA, 325 bp, Zea mays
aaaatcctcaagcatggaaattcttatgtccttaaaatagctaataggatatatgtggagaaaacatacctatttcataataaatatttggaggacatgaaaacatactttggtgcagaaccacagtctgttaactttgtcgaagcttctggacagatcaggaaggagatcaactcctgggttggacagccagactgggggtaaaatcccaaatctcctcccagatgacgcagtagacaacaagactacgatggttctggtgaatgccctttattttaaaggaacctgggagcatcagttctcagtgctaaacaccactgaaaga

SEQ ID NO: 42275 - DNA, 325 bp, Zea mays
ctcccgagtcccgatcgcaaccgccccccacattccccagagttagcccgatcagatcgtttttccctcgaggtgagagtaagatgagggagatcctgcatatccagggagggcagtgcgggaaccagatcggctccaagttctgggaggtggtgtgcgatgagcacggcatcgacccgacggggcggtacatggggacgtcggacgtgcagctggagcgcgtcaacgtctactacaacgaggcttcatgtggtaggttcgtgccgcgcgcggtgctcatggaccttgagcccggcaccatggacgccgtccgcacgggccccta

SEQ ID NO: 42276 - DNA, 320 bp, Zea mays
ggacgctggcgccatggaggagtacgctcgcgaaccttgcccgtggcgaattgtggatgattgtggcggagcttcaccatgggtgtcattggtggtggagtcttccaggctgtcaagggcttccgcaatgcccctgttggaattcgacaccggttcagaggtagtatcaatgctgtgaggatccgagcaccccagattggaggtagctttgcagtatggggtggcctgttttccaccatcgactgtggcctggtccggctgcggggcaaagaagacccctggaactccatcaccagtggagcattgaccggagccgtgtt

SEQ ID NO: 42277 - DNA, 325 bp, Zea mays
cagcgtcgtcctcttcgtctccagtccaagcaagcgaagagcacccctcgagatctctccctccccgcgccgccatggacgcagttgactcggtagtcgacccgctccgggagttcgccaaggacagcatccgcctcgtcaagcgctgccacaagccggaccgcaaggagttcaccaaggtcgccgcgcggactgcgatcggcttcgtcgtcatgggattcgtcggcttctttgtcaagctcatcttcatccctatcaacaacatcatcgtcggctccggctgatccgttcacctcaggctagtggctgccggagtggacaatgg

SEQ ID NO: 42278 - DNA, 286 bp, Zea mays
ctgaccgcttggccacctacctggataaggtgcgtgccctggaagaggccaacagtgacctggaggtgaagatcagtgactggtaccagaggcagcgccccactgagatcaaagactacagcccctacttcaagaccatcgaggacctgaagagcaagatcctggcagccactgtggacaatgccaatggcctcctgcagattgacaatgcccgcctggcggctgatgacttccgtagcaagtttgaggcagagcagagcctgcgcataaatgtggagtctgacat

SEQ ID NO: 42279 - DNA, 282 bp, Zea mays
atccatccccacacggccctcgccaaatctactcctccagtcggcaggaaaggaacccctctctacctcggaggctcggacagagtgaacgcgccacccgccccggcgagcattgtccgctgccgcgcgccaccttccgctcacgggtgcatttgatccgtcccggccgcctacacgatgtccaatccgggagcgctggatcttgcttctggcctcgaactgaagatcgacaaggcggtactcaagtcggccgtcgatgagtatgcgcaatatcatggatac

SEQ ID NO: 42280 - DNA, 313 bp, Zea mays
tgaatgtgttccttccatccaggaagttatcgctaatggcattagcgtcaacgtcacgcttattttctcaattgcgagatatgaggctgtgattgatgcttacctcgatgggctagaggcttctggacttgagtgacttatcccgagttactagcgttgcatccttctttgtcagccgagtggacacccttattgacaaaatgcttgacaagattggaacacctgaggcccttgccttgagaggaaaggctgcagtagcgcaggccaaactagcaaatcggctctaccagaagaaattctctggcccaaggtg

SEQ ID NO: 42281 - DNA, 315 bp, Zea mays
aactgtgttcactagcaacctcagacagacaccatggtgcatctgactcctgaggagaagtctgccgttagtggcctgtggggcaaggtgaacgtggatgaagttggtggtgaggccctgggcaggctgctggtggtctactcttggacccagaggttctttgagtcctttggggatctgtgcactcctgatgctgttatgggcaagcctaaggtgaaggctcatggcaagaaagtgctcggtagctttagtgatggcctggctcacctggacaacctcaatggcaccttgtgcacactgaatgagctgcactgt

SEQ ID NO: 42282 - DNA, 311 bp, Zea mays
ggccctcattgcagctcacaggaaggagatcgagaatactatggagatcgtacgggaagaaatgaaccttttggcagaacttgatcaaccaggtagcctgattgacaactacgtgacccaactgagctttctgctgtcacgcaaggctgcaggcttggtcagcctccaagcacgcttggcacggttccagcaccggctcaaagagcaagagatccttagccgcaagaaacctcccagatagtatgatgatcagcaatgactctgtccttgtgccttgtaatctgattgcttggagctcagttgtggtccat

SEQ ID NO: 42283 - DNA, 311 bp, Zea mays
caacccctacactcccggcggcggcgcaggagcagcagcacccgaggatggtgaagttcctcaagcccggcaaggccgtgatcctcctgcagggccggttcgccggcaggaaggcggtgatcgtgcgcgtgttcgaggagggcacccgcgaccgcccctacggccactgcctcgtcgccggcctcgccaagtaccccaagaaggtggtccgcagggactcggccaagaagacggcgaagaagtcgcgcgtcaagtgcttcatcaagctcgtcaacttcacccacctcatgcccacccgctacaccctcgac

SEQ ID NO: 42284 - DNA, 316 bp, Zea mays
cgcgtctccagtagcagggcaagagaaaggagaggatggcgtcgccgataccgcgcgagtgggtcgggctgcagcagtttccggcggctacacagaccaagctgcacgaactcctcggcaaactcaaggacgaggatgtgagcacattaacaattctggtgatggggaaaggtggagtggggaagtcatctactgttaactccatcgttggggagagggttgcctctgtcagcgctttccagtctgagggtctgagaccaatgatgtgctcgcgcacaagggcagggtcactttgaacattatcgacactcctggg

SEQ ID NO: 42285 - DNA, 245 bp, Zea mays
aagtccatagactcctccaagatgcttgtggtcctgctcacagcagccttgctggctctgagctcagctcagggcacggatgaagaggtcaacaatgctgagaccagtgatgtaccagcagattctgaacaacaacccgtggactcgggatcagatccaccttctgctgatgcagatgcagagaatgttcaagagggtgaatcagccccaccagcaaatgaagagcctcctgccacctctgggag

SEQ ID NO: 42286 - DNA, 208 bp, Zea mays
ctggcagcgcggaggccgcacgatgcctggagttactgtaaaagacgtgaaccagcaggagttcgtcagagctctggcagccttcctcaaagagtccgggaagctgaaagtccccgaatgggtggataccgtcaagctgtccaagcacaaagatcttgctccctacgatgagaactggttctacacgcgagttgcttcataagggcgg

SEQ ID NO: 42287 - DNA, 297 bp, Zea mays
atttgatatccgtgtgtctggtaaagaccttattcaaaaccatttgacattctgcatatacaatcatacagcacttcttcctgagcaacactggcctattggtttccgctgcaatggacatctaatgcttaactctaagaaaatgtccaagtccacagggaatttcctaactctggaagatgccataaaaaagtactcttctgatgccactagatttgcccttgctgatgctggcgatggtatggatgatgcaaattttgtcactgaaactgcaaattctgctgttatgaggcttac

SEQ ID NO: 42288 - DNA, 294 bp, Zea mays
cacacagaagcggcggcggcggagaaacgcaggcgaaggcgagggtgtgagggaaggagcaccagccatggtgcacgtcaacttctaccgcaactatggtaagacgttcaagaaaccaaggcgtccttatgagaaggagcgtcttgatgctgaactgaagctggttggtgagtatgggctgaggtgcaagcgtgagctttggagggtccagtatgcactgagcaggatccgtaatgctgcaaggcacttgctcacccttgacgagaagaacccccgtcgtatctttgagggtga

SEQ ID NO: 42289 - DNA, 303 bp, Zea mays
gctgccttcagccttccctctctttcgcgactccccccggagccggagcagagatcgccagcgctaccggcgcggaggcatggcgggggccggagacaaggtggactacgtcttcaaggtggtgctgatcggagactcggcggtgggcaagtcgcagatcctcgcccgcttcgcccgcaacgagttcagcctcgactccaaggccaccatcggcgtcgagttccagacccgcaccctcgtcatcgaccacaggagcgtcaaggcccagatctgggacaccgccggccaggagaggtacagagc

SEQ ID NO: 42290 - DNA, 300 bp, Zea mays
gtctaatctggcagtcaactcacttggacatgttcttcaggtctacatcaatggtaaaattgcaggaagtgcacaaggtagtgcaagcagctcactcatctcatggcagaaaccaattgatcttgtacctgggaagaacaaaatagatcttctaagtgcaacagttgggctgtcgaattatggtgcattctttgacctggtaggtgctggaattactggcccagtaaaactgagtggactaaacggtgcgctcgatctgtcttctgcagaatggacatatcagattggactcagaggaga

SEQ ID NO: 42291 - DNA, 297 bp, Zea mays
ctcgccgccgccgccgctcgtccctcgccccatcgcgatggcacggatcaaggtgcacgagctgcgggggaagagcaaggcggatctgcaagcgcagcttaaggagtttaagtcggagctctccctgctacgcgtagcaaggtcaccggcggggctcccaacaagctctccaagatcaaggttgtgcgcacctccatcgcgcgcgtgctgaccgtcatctcgcagaagcagaagtcggcgctgcgtgaggcgtacaagaagaagaagctgctcccgctcgacctccgccccaagaag

SEQ ID NO: 42292 - DNA, 253 bp, Zea mays
gaatgtatgggtttgcgtgaagtaaagtctttgcggcgcatgaatcatcctaacattgtgaagctcaaagaggttatccgagaaaatgatatattatacttcataatggaatacatggagtgtaatctctaccaacttatgaaggataaggtcaagcctttctcggagtctgaagtccgctactggtgctttcagatatttcaggctcttcgctagatctatcttaggggctaatttcatcgtgacctcggac

SEQ ID NO: 42293 - DNA, 206 bp, Zea mays
cgcttccaagatgtcgaagcgaggacgtggaggttctgctggtaacaagttccggatgtcactgggtctaccagtggcagccactgtgaactgtgctgataacactggagccaagaacctttacatcatttctgtgaagggaatcaaggggcgccttaacaggcttccttctgcctgtgttggtgacatggttatggcaactgtga

SEQ ID NO: 42294 - DNA, 296 bp, Zea mays
gcggtcccgcgggtctgtctcttgcttcaacagtgtttggacggaacagatccggggactctcttccagcctccgaccgccctccgatttcctctccgcttgcaacctccgggaccatcttctcggccatctcctgcttctgggacctgccagcaccgtttttgtggttagctccttcttttcaaccaaccatgagctcccagattcgtcagaattattccaccgacgtggaggcagccgtcaacagcctggtcaatttgtacctgcaggctccttacacctacctctctctgggc

SEQ ID NO: 42295 - DNA, 247 bp, Zea mays
gcatcaggcaaagctgttagattcccattgcaccctggcaatggtacgcatgggtccatgtgcatcgtgaaggcaaatcgtttctttgccgagctgcatgatacagccactcctccaatacgatgtatcaataacgcctgtggttccttcacgtggtgtcaatcgtgctgtcatgaaagagcttgtaaaccttcatagacactcccatttggattagcgtctgcctgcatatgatggaaggaagagt

SEQ ID NO: 42296 - DNA, 305 bp, Zea mays
attcttttctgatgcactgcaggcctctctaggtgacctagtgtctggcatgttttgctgggctcattctctatttcccacattatgtgcgaagtcaagtgggaatccccttgcaagagatttggttttgcagttgcttgaaagaattttgtctgtcaccaaagctcgttctatattattgaatggtgctgttagaaagggagaacgcttagttccccctgtttcatttgacttgttcatgagagccacatttcctgtttctaatgctcgagtgaaggctacagaaaggtttgaagcagcctacc

SEQ ID NO: 42297 - DNA, 293 bp, Zea mays
ggatcactcatcctctccaactcgcagccatgatggtgacaaagcagctgcagatgatgatgacgatgatgtccagtggcagactgacacttcaattgatgctgcgaacagccatgcaagagcagctgagtgcagcaactgctgaaatggtgatgctgtcgactgaggagactgagaagaagatgaaacaggcaacccacaaagatggaagcactaatggttcagcaaaagaaatccctaatgacaagcctgccgtcactaagcctagtccctatgaagaactgattggagac

SEQ ID NO: 42298 - DNA, 309 bp, Zea mays
gcgacttgatctccttgtctgaacaagagcttgtcgactgtgacacttcgtacaatcaggggtgcaatggaggtctgatggactatgcatttgagttcatcatcaacaatggcggaatcgacaccgagaaggattacccttacaagggcacggacggacggtgtgatgtcaacaggaaaaacgcgaaggttgtcactattgacagctacgaagatgtaccagcgaacgatgagaagagtctgcagaaggcagttgcaaaccagcctgtcagtgtcgcaattgaggctgctggcacagcatttcagctct

SEQ ID NO: 42299 - DNA, 299 bp, Zea mays
tcgacgtccctcgccttcgccgccgaatccgagactccgatctcgggttcaccgcagcgcacagagcagccccgactcccggcccgatccgcgctctcctctccgtcgcttcagtcatggcaggaatggcacctgagggttctcagttcgatgctaagcactatgattctaagatgcaggagctgctgagcaccggtgagactgaggagttcttcacttcatatgatgaagtttttgagagttttgatgatatgggcctccaagagaatcttctgagaggcatttatgcttatggtttt

SEQ ID NO: 42300 - DNA, 298 bp, Zea mays
caagcattaactgatcctatatctcgtgagaattatgagaaatatggtcaccctgatgggcggcaggggctgcaaatgggcattgctttgcccaagtttttactaaatattgatggtgcatctggtgggataatgcttcttggaatagtcggattttgtatattattgcctttgatgatagctgttatttatttgtcaagatcatcaaaatatactggaaactatgtcatgcatcaaactttgtccacttactactactttatgaagccatctcttgctccaagcaaagttatagatg

SEQ ID NO: 42301 - DNA, 287 bp, Zea mays
cactggtggttttgaggctggtatctccaaggatggccagacccgtgaacatgctctccttgcgttcacccttggagtgaagcagatgatttgctgctgcaacaagatggatgcaaccactcccaaatactccaaggcacgttatgaagagattgtgaaggaagtctcatcctacctcaagaaagttgggtacaaccctgataagattgcctttgttcccatttctggttttgagggcgacaacatgattgagaggtccaccaaccttgactggtacaaaggcccaa

SEQ ID NO: 42302 - DNA, 252 bp, Zea mays
cttgcttgtcccttgcgaacatcggagagtgacttttacctacgttactacgtgggtcacaaaggcaagtttggtcatgagttcctggagtttgaattccgacctgacggtaaattgcgatatgccaacaacagcaattacaaaaatgatgtcatgatcaggaaagaggcttatgtacataagagtgtgatggaagaattaaagaggattattgacgacagtgggatcaccaaagaagatgacgctctgtgg

SEQ ID NO: 42303 - DNA, 300 bp, Zea mays
gacaaaaatcaagggtatactgtcaggagaaacatctattcagttgacattgcagttcctatacagccataatagatctgatcttcaaattttgaagactataaagcaagccatggaaatgaggaacagtgtctgtcacagcgcacaatatgctccaatgcaatcatgcatgcagggacaacagttgataccttcctcagagaaaacttggaatggctaggtagggcaaccaactgggccaagttcagtgccactgctggactaggtgtcattcacagaggacatcttcaacaaggccgt

SEQ ID NO: 42304 - DNA, 302 bp, Zea mays
gaaattgcttggccaaggcacctttgccaaggtttaccatgctcgtaacacggcgacttcggaaagtgtcgcgatcaaagtgattgataaggagaaggttatgaaggttggtctcattgatcaaatccagcgagaaatttctgtgatgaagcttgttaggcatccaaacatcgtacagctctatgaggtcatggccaccaaaaccaaaatatactttgtgctggaacatgttaaaggtggagagctgttcaacaagattcagcgaggaaggctcaaggaagacgcagcgaggaagtacttcc

SEQ ID NO: 42305 - DNA, 286 bp, Zea mays
aggagagtttgtaccccttgctgaacttcctcaaggctcataactacaagggcacgacgatgatgttgaatgacagaatccaaagccttcgtggtctccaatcatccctgagaaaggcagaggagtatctactgagtgttcctcaagacactccctactcggagttcaaccataggttccaagagcttggtttggagaagggttggggtgacactgccaacgtgtactcgacacactccacttgcttcttagacttcttgaggcccctgatcctgccaacttggga

SEQ ID NO: 42306 - DNA, 302 bp, Zea mays
cacacacgcaaccagatctcccccaaatccagccgtcggcacctccgcttcaagatgcagatctttgtgaaaaccctgactggcaagactatcaccctcgaggtggagtcgtctgacaccattgacaacgttaaggccaagatccaggacaaggagggcatccccccagaccagcagcggctcatcttcgctggcaaacagcttgaggacgggcgcacgcttgctgactacaacatccagaaggagagcaccctccaccttgtgctccgtctcaggggaggcatgcagatcttcgtgaagac

SEQ ID NO: 42307 - DNA, 293 bp, Zea mays
tggccaagcttgccgagcaggcggagcggtacgacgatatggtggaattcatgaagaatcttgctaggatggacgtggatatgagtgctgaagaaaggcatttgttctcagttggtttcaagaacactattggagcaaagagagcatcatggagaatcatttgttcacatgagcaaaaggtcgcagctgatcgtcagactggtgtgatgatagatgcctataagaagaaagtagaagaggaactaaggaaggtttgcaatgaagtattgtcagtcattgctattcactgcctt

SEQ ID NO: 42308 - DNA, 297 bp, Zea mays
agactctcttgcacgctttcaaggaggctcaccttatatctatccactatatgggttgggtgagctaccacagggttttgcacgactgagtgctgtttatggtggtacttacatgttaaacaagccagattgcaaggttgaattcgatatggaggggaaagtgtgtggtgtcacatctgaaggtgaaactgcaaagtgcaagaaggtggtgtgtgatccttcgtatttacaaaacaaggtcaggaagattggtagagttgttcgtgcaattgctatcatgagccaccaaatcctaat

SEQ ID NO: 42309 - DNA, 299 bp, Zea mays
cactcccatccagccgccaccaggtgcagagtctttcgtcatctcttctccggcgaagaacccccagtcgcccaccagatcacttgttaaactttgttgaggggtgatggcggtttctttcgcaaacctcaactccgaggcagggcttaaaaagcttgatgagtaccttctcactcgctgctacatcactggctaccaagcttccaaggatgacttggctgtctacacttcgttttcggctgctccctcgtccaagtatatcaacatagcaaggtggtttaaccacattgatgcgctcg

SEQ ID NO: 42310 - DNA, 297 bp, Zea mays
gtcggctgccgcagactggtagtagccggcgcgccgtcaccgtatcctcagatcagcggcgagcagaaaccacaccactctactgacgcccgacgagcagtgtaacattttccttcagccatgggtaaggagaagactcacatcaacattgtggtcattggccatgtcgactctggcaagtcgaccaccactggccacctgatctacaagcttggaggtattgacaagcgagtgattgagaggttcgagaaagaggctgccgagatgaacaagcggtcattcaagtatgcgtgggtg

SEQ ID NO: 42311 - DNA, 290 bp, Zea mays
cccacctcccagctcctccgccgccggagctactcctccgcatccgggcagcccgagcggaaggtggccatcctcggggcggcggggggcatcgggcagccgctgtcgctgctcatgaagctcaacccactcgtctcctccctctcgctctacgatatcgccggcaccccaggtgtcgcggccgacgtctcccacatcaactcccccgccctggtgaagggtttcatgggtgatgagcagcttggggaagcgctagagggctcggacgtggtgatcataccggccggcgt

SEQ ID NO: 42312 - DNA, 288 bp, Zea mays
cgacgtccctcgccttcgccgccgaatccgagactccgatctcgggttcaccgcagcgcacagagcagccccgactcccggcccgatccgcgctctcctctccgtcgcttcagtcatggcaggacatggcacctgagggttctcagttcgatgctaagcactatgattctaagatgcaggagctgctgagcaccggtgagactgaggagttcttcacttcatatgatgaagtttttgagagttttgatgatatgggcctccaagagaatcttctgagaggcatttatg

SEQ ID NO: 42313 - DNA, 291 bp, Zea mays
cctgggcgtgtccttggccgtgtgtaaggcgggagcagctgagaagggggtccccctgtaccgccacatcgcagatctcgctgggaaccctgacctcatactcccagtgccagccttcaatgtgatcaacgggggctcccatgctggaaacaagctggccatgcaggagttcatgattctgcctgtgggagccagctccttcaaggaagccatgcgcattggcgccgaggtctaccaccacctcaagggggtcatcaaggccaagtatgggaaggatgccaccatgtgggt

SEQ ID NO: 42314 - DNA, 294 bp, Zea mays
acgacaaaagcaaagcaaagcagctcaaaaaagtttagccagctagcaagacatggctccacttgttgctgctgccacgaatcacactgcccatagaagccacatagtaggacccaacaatgagaattttccaaggcaccaaccttgttcatcacaaaacagaaacaagagactcaggcttaggtcacgagcacaaaggataagcagtcagctgcttgcaagccgaaagcttatgccatgggaaatccctaaaaaggactggtttcctcctagcttcatcttggtgccgccacg

SEQ ID NO: 42315 - DNA, 287 bp, Zea mays
gacacaagcaaagcaaagcagctcaaaaaactttagccagctatcaagacatggctccacttgttgctgctgccacgaatcacactgcccatagaagccacatagtaggacccaacaatgagaattttccaaggcaccaaccttgttcatcacaaaacagaaacaagagactcaggcttaggtcacgagcacaaaggataagcagtcagctgcttgcaagccgaaagcttatgccatggcaaatccctaaaagggactggtttactcctagcttcatcttggtgccg

SEQ ID NO: 42316 - DNA, 284 bp, Zea mays
tctcgagccgagcattcgctcgaggtgccggaccagatctcaccatcatgcaggctaacgatagattcaacataaactcacagcttgagcatcttcaagccaaatatgttggtacagggcatgctgatttgtctagatttgaatgggctgtaaacatccagagagacagctatgcctcttatattgggcactatccaatgctagcatattttgccattgctgagaatgaatcgatcggaagagaacgttacaatttcatgcagaaaatgctgcttccttgtggc

SEQ ID NO: 42317 - DNA, 292 bp, Zea mays
atcggttccagtcaccattgacgtagaggcgccctttgaccttcaccgttacgttattgggcagaacggaagtgggatccgcaagatgatggatgagtttgaggtgaacatacatgtcccggcacctgagctgcagtctgacatcatcgccatcacgggcctcgctgcaaatttggaccgggccaacgctggactgctggagcgtgtgatagagctacaggccgagcaggaggaccgggctttaaggagttttaagctgactgtcactgtagaccccaaataccatcccaag

SEQ ID NO: 42318 - DNA, 251 bp, Zea mays
accatgaccaagaagctagatgtggaagagccagacagcgccaactctcgttctacagcacgcggtctgctcctgcttcccaggctagcctgcgagccacctcctctactcagtctctagctcgcctgggttctcccgattatggcaactcagccctgctcagcttgcctggctaccgccccaccactcgcagttctgctcgtcgttcccaggccggggtgtacagtggggcccctccaggatagaacagc

SEQ ID NO: 42319 - DNA, 283 bp, Zea mays
aatttatgtggtcctggcaccacaaaaccttgtcctggtgctcctcccttttctccacctcctccatacaaccctacaacccctgtgcaatcaccaggaagtagctcttccagtactggagcaattgctggtggagtggctgctggtgcagccttgctatttgctattcctgcaattagttttgcctattggcggcgcaggaaaccgcaagaacatttctttgatgtacctgccgaggaagatccagaggtgcatcttggccagcttaaaagattttcactac

SEQ ID NO: 42320 - DNA, 289 bp, Zea mays
cccgagtctccagccaaccacatccagtccaccccatccccctcgaccccgacaaccccgagtcccgacccgatggcgcccaaggccgagaagaagccagcggagaagaagccggcggccgaggagaaggcggagaagacgaccgcaggcaagaagcccaagtccgagaagcgcctgcccgcctcgaagtcctccggcaaggagggcggcgagaagaaggggaagaagaaggccaagaagagcgtgggagactacaaaatctacatcttcaaggtcctaaagcaggtgc

SEQ ID NO: 42321 - DNA, 305 bp, Zea mays
gacgagtgcatgctcaagttcggcgagctgcagtcgaagaggctgcaccgcttcctaactttcaagatggacgacaagttcaaggagatcgttgtggaccaggtcggggatcgcgctaccagctacgaggacttcacaaacagcctccccgagaatgactgccgatacgcgatctatgatttcgactttgtcactgcagaagatgtccagaagagcaggatcttctatatcctatggtccccatcctccgccaaggtgaagagcaagatgctttatgcaagctccaaccaaaaattcaagagtgg

SEQ ID NO: 42322 - DNA, 241 bp, Zea mays
  unsure (1)..(241): unsure at all n locations
ccgtctggacgaggctgagcagctggcgctgaagggcggcaagaagcagatccagaaactggaggccagggtacgtgaacttgaaggagaggctgagactggacacctacgtaatgctgaggccgttaaagggttaaggaagcaccacagnagagtaaaggaacttacctaccagaccgatgaggaccgcaagaacgtgctgaggctgcaggacctggtggataaattacaggtgaagtga

SEQ ID NO: 42323 - DNA, 302 bp, Zea mays
gaacttggtggggattcatcgaagatcgccctagtgaagaggtcagtctcaagtgtctgtgctgatgtatctgaggatcacccaaacatcaagaactggcagatcgaaagctacggcgagcgcgagtaccacagggccaaagtgcacttaagatgtgcgcgtgggcagtccatttccgcaatcaaattcgcaagctttgggacacctacaggaacctgtggagatttccagcaaggagattgccactcagctaactctcacacagtcctagagaagaaatgcattgggctccaaagatgcgt

SEQ ID NO: 42324 - DNA, 303 bp, Zea mays
aggttctgttgaaccacctttccattagtccagatgaggtaatggcaattggtgacggagaaaatgacattgaaatgttgcaactagcttcgtttggggttgctcttgcaaatggatctgacaagacaaaagcagcggcaaatgtaattggcgccacgaatgatgaagatggagttgcacaggctatttatgaatatgccttctaagagcaacgaatcattttggactgggttaatttcttctgatttcccatttttcgtggactcaacacagaacaattgtagtggttccaacttgcaagta

SEQ ID NO: 42325 - DNA, 295 bp, Zea mays
gagggtttcctcaaagagacccaaacccaagcagtgaacactagcgttccctcaccagggcgtccatcccagcagccatggcgatggcgtacaagatggcgacggaggggatgaacgtgaaggacgagtgccagcgctggttcatggagatgaagtgcgtccatctgcaccgctttgtggtgtacaagatcgacgagcggtcgcgcgccgtgctggtggacaaggtgggcggccccggggaagggtacgaggagctcgtggccgcgctgcccggcgacgactgccgctacgccgt

SEQ ID NO: 42326 - DNA, 296 bp, Zea mays
caaattcgttccgtccaggcaaggaagaaatcgagcagccaaggagaggagaagatggctcgtacgaagcagaccgcccgcaagtccaccggaggcaaggccccgcgcaagcagctcgccaccaaggcggcgaggaagtctgcgccgacgaccggcggcgtgaagaagccccacaggtacaggcccgggacggtggctctgcgcgagatccgcaagtaccagaagagcacggagctgctgatccggaagttgcccttccagcgcctggtccgtgagatcgctcaggacttcaagac

SEQ ID NO: 42327 - DNA, 289 bp, Zea mays
gttgactcacaaactcagaaacagacaccatggtgcacctgactgatgctgagaaggctgctgttaatggcctgtgggcggaggtgaaccctgatgatgttggtggcgaggccctggtcaggctgctggttgtctacccttggacccagaggtactttgatagctttggggacctgtcctcggcctctgctatcatgggtaaccctaaggtgaaggcccatggcaagaaggtgataaacgccttcaatgatggcctgaaacacttggacaaactcaagggcactttgct

SEQ ID NO: 42328 - DNA, 294 bp, Zea mays
agcaactaatccctgatttacatctgctatctatagcagctaggattctatccctgatttacatctgctatctatagcagctaggatatccacagatggcatattctattgcctaacagggccgtcgcagagtggacagttgacgccggcccgttagtgatggggggccaggttctcggattttctcggccgggaccattgtttcggtctcttcttatatggaataccgggagggcggtctttccctccccggccgagttttttttaaatacatcagctacagaacttgtcagt

SEQ ID NO: 42329 - DNA, 296 bp, Zea mays
ggcgaccgccgccgcttccctactcacccttggccggcgacgacgagcgcccaccatggcaggatgacgacgctgaggaacctcaagatcaagacgtcgacgtgcaagaggatcgtgaaggagctgcgctcgtacgagaaggaggtggagaaggaggcggccaagaccgccgacatgaaggagaagggcgctgatccctacgacctcaaacagcaggagaatgttttggctgagtcaatgatgatggtcccagactgccacaaacgacttgaaactgcactggctgacttgaaagc

SEQ ID NO: 42330 - DNA, 295 bp, Zea mays
tctggagacgacgttcagaaatggcacctcgcaaggggaaggaaaagaaggaagaacaggtcatcagccttggacctcaggtggctgaaggagagaatgtatttggtgtctgccacatctttgcatccttcaatgatacctttgtccatgttactgatctttctggcaaggaaaccatctgccgagtaactggtggaatgaaggtgaaggctgaccgagatgagtcctctccgtatgcagccatgttggctgcccaggatgtggcccagaggtgcaaggaactgggcatcactgc

SEQ ID NO: 42331 - DNA, 266 bp, Zea mays
atcgctggattgcagccgccagaatgaagttcaatcccttcgtgacttctgaccgaagcaagaaccgcaaacggcatttcaatgcaccatctcacattcggaggaagatcatgtcttctccgctttccaaagaactgagacagaaatataatgtacggactatgcccattcgaaatgacgacgaagttcaggttgctcgaggacactacaaaggccagcagattggtcaagtggtccaagtgtacaggaatacatacgtcatctac

SEQ ID NO: 42332 - DNA, 292 bp, Zea mays
aagagttaaggaccaaagtagatgcatctgaaagagatgttgtggaacttaaggaggcaataagaattaaagaggctgaaggagacgcctatatttctgatatcgagacagttggtcaagcatatgaagacatgcaaacgcaaaatcagcatcttcttcaacagcttactgatagagatgactttaacataaatctagtatcagatagtgtgaagatgaaacaagcttgtagttcccttctctctgacaagcttatgctagagaagcaactccagcaagttaacacttcact

SEQ ID NO: 42333 - DNA, 133 bp, Zea mays
aaagaaattgacgccttagaatccagagtggaatcaattcagcgagtgttagcatatttgaaagttcagttgtatgcaaaattcgggagcaacataaaccttgaagctgatgaaagttaaacattttataata

SEQ ID NO: 42334 - DNA, 260 bp, Zea mays
gacctccgccatcatgggtcgcatgcacgctcccgggaagggcctgtcccagtcggcgctgccctaccgccgtagcgtgcccacgtggctgaagttgacgtctgacgacgtgaaggaacaaatttacaagttggccaagaaaggcctgactccttcccagataggtgtgattctgagggactcacatggtgtggcacaggtccgttttgtgaccggaaataaaatcttgagaatccttaagtccaaaggccttgcccctg

SEQ ID NO: 42335 - DNA, 260 bp, Zea mays
gcacaaatcatatctgctagtatagcgggtgatatggttcttgcttctgcctactctcatgagttgccacgatatggtcttgaagttggtctgaccaactatgcagctgcctactgcactggacttctgttggctcgccgtgtgctaaagatccgtggtttggataaggagtatgagggcaatgttgaggccactggtgaggacttctctgttgagccagctgatgagaggaggcaattccgtgctctcttggatgttgg

SEQ ID NO: 42336 - DNA, 275 bp, Zea mays
tgaggcctctgtcccttgcaagttcaatctcacctccaaccatgggtaaagagaagtcccacatcaacattgtggttattggccacgttgactctggcaagtcgaccaccacaggacacctgatctacaagcttggaggcattgacaagcgtgtgatcgagaggtttgagaaggaggctgctgaaatgaacaagcggtccttcaagtacgcatgggtgctcgacaagctcaaggctgagcgtgagagaggtatcaccattgatatcgctctgtgg

SEQ ID NO: 42337 - DNA, 257 bp, Zea mays
aagtggagtaggtaccgttgttgctcttggtgttgaatcccaaaccggctccgccatgggactagaggatgaacgaaagatgctcactggctccggagaccccaaagaggaagaagaggaagaattagtggaccccctgacaacagtgagagagcactgtgagcagttggagaagtgtgtagcagcccgggaacgactagagtcgtgtgataggcgcgtgtcttcccgatcacagacagaagaggattgtacagagg

SEQ ID NO: 42338 - DNA, 257 bp, Zea mays
ctcgagccgctcactcactcacacagcaaatacccacagtccacactccacagcaagaaccgaagatgttcggaaacatcggaaagatcccgatcattggcgacctgacgggcagcaacaagaatgcgcacctcaagggcaacctggtgctcatgcgcaagaccgtgctcggcttcgacgtcaccagcatcgccggctccctcatggacggcctcggcgagttcctcggccgcggcgtcacctgccaactcgtcagc

SEQ ID NO: 42339 - DNA, 254 bp, Zea mays
aattctagggttttgctgctctccgaccccgagctccgaaggccgcagcatcaggcgcgccccccctcgcgtgtgaccgagatggcgctgccgaatcaggggaccgttgattaccccagcttcaagctcgtcatcgtcggcgatggtggaactggtaaaactacatttgtgaagaggcatctcactggagagtttgagaagaaatatgaaccaaccattggtgtggaagttcatccgttggatttcaccactaa

SEQ ID NO: 42340 - DNA, 299 bp, Zea mays
ctggaagaggaggcgagcacgtttgcggtgcccaccctcaccgtccactccagaaccccaaatccagttccgttccaatcgccgagaagggcagcaaaggggagaaaaaaaaaaggaaatctatggcggcggccggcggcgagaacagcggcgctggcgagggcgagggcgagttctacctgcgctactacgtgggacacaagggcaagttcgggcacgagttcctcgagttcgagttccgccccgacggcaagctccgctacgccaacaactccaactacaagaacgacaccatgatc

SEQ ID NO: 42341 - DNA, 298 bp, Zea mays
ggaaaatggaggttccatactgcattgtcaagggataagcacgccttggatcgatcgttcacaagaagactgcatctgttctttgcttgaccaccgtcaagaacgaggacaagcttgagttcagcaaaatcttggaggctatcaaggctaacttcaacgacaagtttgatgaggtcaggaagaagtggggtggtggtatcatgggctccaaatcacaggcgaaaaccaaggccagggaaaagctgcttgccaaggaagctgcccagcggatgacctaagtcttgccctgttaaattaa

SEQ ID NO: 42342 - DNA, 284 bp, Zea mays
gttaactgatgaggaggtggacgagatgatccgtgaggctgatgtcgatggtgatggccagatcaactacgaggagtttgtcaaggtcatgatggccaagtgagccacagaaccataatctgaaggcagagaagattatgcatggcatattagtcaagatgcaactttttattccatcgacttctagtgaaacattctgctagttgtagttgctgaaaaaggcaatgtagttcctgctttgttcttccctccagtgtgttttcagaactgttgtttcatgtgaa

SEQ ID NO: 42343 - DNA, 298 bp, Zea mays
gtggaaactggtgttctcaaacctggtatggtgtgtacatttgctccagtcaatgtaacaactgaagtcaagtcttaggaatatgcccatgaagctttgagtgaagctctgtctggggacaatgtaggcttcaacgtaaagaacgtgtctgtcaaagacgttagacgtggcaatgttgctggggacagcaaaaatgacccaccaatggaagcagctggcttcactgctcaggtgattatcctgaaccatccaggccagatcagtgctggctatgcccctgttctggactgccacacgg

SEQ ID NO: 42344 - DNA, 300 bp, Zea mays
atctactgcgagaatgaagatcattctcagcaatcagactgtcgacattccagaaaatgtcgacatcactctgaaggggcgcacagtcattgtgaagggccccagaggaactctgaggagggacttcaatcacatcaatgtagagctgagtcttcttggctagaaaaagaaaaggctcctgtgttgacaagtggtggggtaacaggaaggaactggccactgtcagaaccatctgcagtcatgttcagaacatgatcaagggtgtgacactgggcttacgttacaagatgaggtctgtgt

SEQ ID NO: 42345 - DNA, 293 bp, Zea mays
cgccaccgcttgtgacgccgccatgtccctagtgatccccgagaagtttcagcacatcctgcgagtactcaacaccaacatcgatgggcggcggaaaatagccttcgctatcactgccattaagggtgtggggcggagatacgctcatgtggtgttgaggaaagcagacattgacctcaccaagagggctggggagctcacggacgacgaggtggaacgtgtgatcaccatcatgcagtactcacgacaatacaagatccctgactggttcttgcacagacagaaggacgtga

SEQ ID NO: 42346 - DNA, 288 bp, Zea mays
tctggagctactgccttgccctcagaggatttaagacatggcacccaagaaggccaagggaagggcagcagcagaagggagctccaatgttttctccatgtttgaccagactcagatccaggagttcaaggaggctttcactgtaattgatcagaacggggatggcattattgacaaggaggatcttcgggacacctttgcggccatgggccgtctcaatgtgaagaatgaggaactcgacgccatgatgaaggaagccatgggcctatcaacttcactgtctcctga

SEQ ID NO: 42347 - DNA, 260 bp, Zea mays
gagtacccagcgcgcctcgtcgccatgcctcggaaaattgaggaaatcaaggacttcctgctcacagcccgacgaaaggatgccaaatctgtcaagatcaagaaaaataaggacaacgtgaagtttaaagttcgatgcagcagatacctttacaccctggtcatcactgacaaagagaaggtcagagaaactgaagcagtccctgccccccggtttggcagtgaaggaactgaaatgaaccagacacactgattggaact

SEQ ID NO: 42348 - DNA, 118 bp, Zea mays
ctattggatgattatccgaaatgtttcattgtgggagcagacaatgtgggctccaagcagatgcagcagatccgcatgtgccttcgggggaaagctgtggtgctgatggggaagtaca

SEQ ID NO: 42349 - DNA, 238 bp, Zea mays
gcagcctgactgccttcttgtcgcttacaccgttgctccagattcaccagatctcggaatggaccccaactgctcctgctccaccggcgggtcctgcacctgctccagctcctgcggcttcaagaactgcaaatgcacctcctgcaacaagatctgctgctcctgctgccccgtcggctgctccaaatgtgcccagggctgtgtctgcaaaggtgcctcggacaagtgcacctgctgt

SEQ ID NO: 42350 - DNA, 282 bp, Zea mays
gcgttcccgaacctggagtgcagcgtgctggatctcccaaacgtcgtcgccagcgctcccgctgataccgccgtgaagtatgtccccggtgacatgttcgagagcgttccggcggcagacgctgtcttcctcaagtggattatgcatgactggggtgatgccgactgtgtcaagatactgaagaactgcaagaaggccataccggctcaaggaggcaaggtgataatactggatatcgtggttggagcagggtcgtcatgcgaccggaagaatgtggagacg

SEQ ID NO: 42351 - DNA, 265 bp, Zea mays
cattcctcctccggatttcgcagtcagcggtggtgaaggtagcgggcgcggaggaagatggggctcgcgttcgggaagctcttcagccggctcttctccaagaaggagatgcggattcttatggtcggtctcgacgccgccggtaaaaccaccatcctctacaagctcaagctcggcgagatcgtcacaaccatccccaccatcggtttcaatgttgaaactgttgagtacaagaacattagcttcacggtctgggatgtcgggg

SEQ ID NO: 42352 - DNA, 232 bp, Zea mays
gcttgtgattgttgttgatgatgaatcaagggaaaatgaaggagatctgataatggctgcctccttggttaccccagaggctatggcttttatagtaaggcatgggacaggaattgtttgtgtcagcatgaaagaagatgatctggaaagactgagccttcctttgatggttaccacaaaagaaaaggaggagaggctatgcactgctttcactgttacagtggatgcaaaa

SEQ ID NO: 42353 - DNA, 290 bp, Zea mays
ggcagtgtgacattgacatccgcaatgattcatatgctaataatgtcgtctctgggggcactaccatgtaccctgggattgctgacaggatgcagaaggagatcacagccttggctcccagcaccatgaagatcaagatcatcgctcctccggagcggaagtactcagtctggattggaggctccatctctggcttctctctccaccttccagcaaatgtggatcagcaagccagagtatgatgaagcggggccctccattgtccacaggatatgcttctaaagtcacag

SEQ ID NO: 42354 - DNA, 278 bp, Zea mays
ctcgtgtacggagcgatactgcacggattgttttaagaaaatggcagacaaaccagacatgggggaaatcgccagcttcgataaggccaagctgaagaaaacggagacgcaggagaagaacaccctgcagaccaaagagaccattgagcaggagaagcggagtgaaatttcctaagatcctggaggatttcctacccccgtcctcttcgagaccccagtcgtgatgtggaggaagagccacctgcaagatggacacgagccaaaagctgcactgtgaa

SEQ ID NO: 42355 - DNA, 289 bp, Zea mays
cctacgtcgactctgccggccacaagcgctctgctggtccctggggaggttccggtggacagcctgatcaggtccagctcgccgagtctgaggtggtcacacaagtgtccggaacatacggcaccatcgacgacgacgaccgcaccgtgataacctccattaagttcgtcacgaaccttgacaagacctacgggcctttcggagcgtacggggacggcgacgacacctccttcaccgtccccgtgcagccggggagtggcgccatcgtgggcttcttcgcccgcgttgg

SEQ ID NO: 42356 - DNA, 276 bp, Zea mays
  unsure (1)..(276): unsure at all n locations
atctcatatcctgagccagagatcaaagaaaccagagggagcgaggcatggcagcaggcttgcaggtgtttggccagccggcgtctactgatgtctccagggttctgacatgcctgtttgagaagaaactggagttcgatcttgtccgcatcgatacattcaagacgcatcacaagcttcccgagttcatcaggcttcgggatcctaatgggcaagtgaccttgaagcacggcgacaanactctcgttgattcgagggacatctgccggtacgtct

SEQ ID NO: 42357 - DNA, 277 bp, Zea mays
ctctcagcatttcccaaagcctactcatacccccgccgccgccgccatgccgcccaagttcgactcgtggcaggtggtggaggtcttcgtccgggtgacgggcggcgaagtcggcgcggcgtcgtccctggcgcccaagatcggcacgctcggtctctccccgaagaagatcggcgaggacattgccaaggagacggccagggactagaagggcctgcgcgtcaccgtcaagctcactgtccagaacgacaagccaaggtctccgtcgtccccaccg

SEQ ID NO: 42358 - DNA, 186 bp, Zea mays
  unsure (1)..(186): unsure at all n locations
gtcagggtcttgcctgccaatctctacacagcataggccgcgcnacacgtgctctggtctccangtccgattcctcaggctggccttgtngccatgggggcaatgccaacccccacaagtgggtgcgacacctaagccacagcgacgcctatgtcattcggatctgaggctccccaaacgaggaca

SEQ ID NO: 42359 - DNA, 278 bp, Zea mays
ggaacgcacacacagcccggtccccgatctccgatcccctcgtcgatccaagatgcagatcttcgtcaagaccctcactggaaagactatcaccctcgaggtggagtcttctgacaccattgacaagctcaaggccaagatccaggacaaggagggcattcccccggaccagcagcggctcatcttcgctggcaagcagctcgaggacgggcgcacacttgccgactacaacatccagaaggagagcaccctccacctggttctccgcctcaggggag

SEQ ID NO: 42360 - DNA, 258 bp, Zea mays
caatgagtggactgtgaagactgtgatagcagaaagctctgttcctgcctcagctgatgcctatccagaaatagataaattctttcccttcaatcctctagactttgagtgtggtgtcctgtctgaagagcaccagattgcgcacctccccttgagtggagtgcctctcatgatccttgacgaggagagagagcttgaaaagctgtttcagctgggccccccttcacctgtgaagatgccctctccaccatgggaatc

SEQ ID NO: 42361 - DNA, 180 bp, Zea mays
ggagatgctgtccggcgacatccccccgagccagaccatctacctcaacaacctcaacgagaaggtcaagaaagaagaattgaagagatcgctttatgccttgtgctcacagtatggaaggatactggatgtggtggccctgaaaacacaaaaactgagagggcaagcatgggtggcgtt

SEQ ID NO: 42362 - DNA, 283 bp, Zea mays
ccagagggagcgaggcatggcagcaggcttgcaggtgtttggccagccggcgtctactgatgtctccagggttctgacatgcctgtttgagaagaaactggagttcgatcttgtccgcatcgatacattcaagacgcatcacaagcttcccgagttcatcaggcttcgggatcctaatgggcaagtgaccttgaagcacggcgacaaaactctcgttgattcgagggacatctgccggtacgtctgcacccagtttccacacgatggaaacaagagcctttac

SEQ ID NO: 42363 - DNA, 247 bp, Zea mays
ggggaagatgtctgttctcactatccaagctggagtcgaaggataccatatcaatgtgggaggccgccacgttgcctcatttcctcataggatgggatttgccctcgaagacgcaacaggtttagccgtgacagggggcatagatgtacactctgtgtacgcaacagcgcttccaaaggcacatcctagcttttctctccagcaagtcttggaaatgtctgaacggtggaatgctcgccctgtgcca

SEQ ID NO: 42364 - DNA, 277 bp, Zea mays
cctctacctacgatacgttgcagaaccgaagacactttggacttggtatgaaccctatatcaaggatgacgaggagtttgcacctggatcaaatcgtaaagtgactacaatgggcgtttatgtgcgtgatctcctccttggtcagtactatttcgacagtctccttccacgagtgcctctcccaatcctccgacaggtcactagccaccttgagaagctaaagcttcaaacaaagcagtcaggaatgactggggattccaacaggcttgaatcaaat

SEQ ID NO: 42365 - DNA, 270 bp, Zea mays
tgggatcatatgcagttcaaggatgtttgcgttaaagttgcgaatgttgagctatactacaaggcagttcacttctatttgcaggagcatcctgatctcatcaatgatatgctgaatgtgcttgcacttcgtttagatcataccagagttgtagacataatgcgcaaggctggtcaattgcatcttgtgaaaccatatatggttgcagttcagagtaacaatgtctctgctgtgaatgaagccttgaacgaactttatgttgaagaagag

SEQ ID NO: 42366 - DNA, 269 bp, Zea mays
tatctggtcactcatgccgttactttgggtatcttgtctcacgcaagaagtatgtgatttcaattgatgacaattgcctcccagcgaaggacactgctgggtcgactgttgatgttgttgcacagcacatggtcaatctgaaaacacctgctacacctttctttttcaacacactctatgatccatacaggaaaggtgctgactttgtccgtggttacccattcagcctgcgtgagggggttgagtgcatgctctcgtgtggtttgtgg

SEQ ID NO: 42367 - DNA, 281 bp, Zea mays
  unsure (1)..(281): unsure at all n locations
gtcacagctcacagcaaacaccgcgaagcgcccccgctcccaaacccgaccgagcaaagcgcaaagccccccaaccgcggatcaatccgcagcatcgatggcgcccaaggcggagaaaaagccggcggcgaagaagcccgcggaggaggagcccgcgaccgagaaggcggagaaggctccggcagggaagaagccgaagggntagaaacgcctccccgcgggcaagtccggcgccggcgagggcaagaagggcaagaagaaagccaagaagagcgtggaga

SEQ ID NO: 42368 - DNA, 270 bp, Zea mays
catggcatggatgctggatgagtactcgaaatttcatggtcactccccagcagtcgtcactgggaagccaatagatcttggcggatcactgggcagggatgcagcaacagggcgaggcgtaatgtatgctaccgaggccctactcgctgaatatggaaaatgcatttctggatcaacttttgtgatccaaggttttggcaatgttggttcatgggctgctcgacttattcacgagaaaggtggtaagattattgcaattggggatgtgac

SEQ ID NO: 42369 - DNA, 316 bp, Zea mays
agaagccaaccggctcgtccgcccgttgcctgtcgtcgctatggccgccgtggaggtgtgcgtgaaggccgccgcggggaaccccgacacgctcggcgattgcccgttctcgcagagggtgctgctcacgctggaggagaagaaggtcccgtacgaggtgaagctcgtcgacctcggcaacaagcccgaatggtttctgaacatcagcccagagggtaaggtgcctgtgttcaacggtggagatggcaaatgcattgctgattctgatgtaatcatccaagtcattgaggagaattcccgactcctctctggtcac

SEQ ID NO: 42370 - DNA, 305 bp, Zea mays
ttcactggtaatgtctccatccgaggacggatcctgtctggtgttgtgacgaagatgaagatgcagaggaccattgtcatccgccgggactatctccattatatccgaaagtacaaccgctttgagaagcgtcacaagaacatgtctgtgcacctgtccccctgtttcagggacgtccagattggcgacattgtcactgttggagagtgcaggcctctgagcaagactgttcgattcaatgtgctcaaggtcaccaaggctgctggcaccaagaagcagttccagaagttctgaagggggactgt

SEQ ID NO: 42371 - DNA, 106 bp, Zea mays
ccgaccccaagctcatcacctggtctccggtgtgtcgcaacgatgttgcctggaactttgagaagttcctggtgggccctgacggtgtgcccctacgcaggtacag

SEQ ID NO: 42372 - DNA, 297 bp, Zea mays
gttccctgggagcatggcaagtgtggtgatgctgattatattgctgcatgggaccatgtactgcttcctgtcactaaagtttttgatcctgatataattctggtatcagcggggtttgatgcagcattgggtgatcctctcggtgggtgctgtattacaccaaatggatatgcactgctactaacaaagttgttaggatttgctcaaggaaggatagtgatggcccttgaaggaggttataaccttaggtccatagcgaactcagtttgtgcttgtgcaaaagttctcttgggagac

SEQ ID NO: 42373 - DNA, 303 bp, Zea mays
gcaatgatggcatcgagtattggattgtccgcaattcatgtggcgagccctggggtgagcgaggctggatgagaattgtgaccagcacctataagggagggacaggttccagctacaacctcgccattgaggaggcctgcatgcatttggggaccccattgtctaggtagatgtccctggaagcaacactgtgaaccatgatgaggaggggtgattatcgacactggatatgtccattcagctagaaacagtggccctcatgtggacacgaggaccagagtgtgggctgcaccccgagaggtg

SEQ ID NO: 42374 - DNA, 238 bp, Zea mays
ctggactacagcagatatccagatgttgacgagcagaagcgttttgttaagacctacctgaacatttctggtgaggaacctgatgcggaagttgtggagaacctgctccaaagcattgagaagcacacgctcgccagtcatctagtatggggcctctggggaataatttcggaccatgttaacgacattgacttcgactacaaggagtatgcgaggcagagattcgagcagtactggc

SEQ ID NO: 42375 - DNA, 299 bp, Zea mays
gcttctcaaccggataggtagcaccggagcaggtagaacgctgcacaatccccttcgccgccgccaagatggtgaacgttcctaagaccaagaagacgtactgcaagaacaaagagtgcaagaagcacacactccacaaggtgactcagtataagaagggcaaggatagcctgtctgcccagggaaagcgccgttatgaccgcaagcagtcaggatatggtggtcagaccaagcctgtcttccacaagaaggccaagaccaccaagaagattgttctgaagctgcagtgccagagctgc

SEQ ID NO: 42376 - DNA, 290 bp, Zea mays
  unsure (1)..(290): unsure at all n locations
ggctcgaggtccgtcctaccaccacagctagccgcggtttggcttactcccctcttccgcaccgctatctcgctccggattccggattccctctgcactttacccaacgaaggtagccatggcggggagaggtaaggtgatctgttcatgtgccgccaagatggccacgtccaggagctccaaggctggcctccagttccccgtgggaaggatcgccaggttcctcaaggccggcaagtatgccgagagagtcggcgccggcgcncctgtcatactcgctgccgtgctcg

SEQ ID NO: 42377 - DNA, 298 bp, Zea mays
gatggatgctactacacccaagtattcaaaggcccgttatgatgagattgtgaaggaagtctcttcctacctgaagaaggttggatacaaccctgataagatccacttcgttccaatctctggtaaggaaggtgacaacatgattaagaggtccaccaaccttgactggtacaagggcccaaccctacttgaggctctggacttgatcaatgagccaaagaggccttcagacaagcccctgcgtctcccccttcaggatgtgtacaagattggtggtattggaactgtccctgttgga

SEQ ID NO: 42378 - DNA, 263 bp, Zea mays
  unsure (1)..(263): unsure at all n locations
ggcggagctgcggcggctcctggaggtgctctctagggagctgagtgggcgggtggagaccacccagagctcncggcgctcgtggaggtggtcatggacctcggccggccccggctcggagcttcccgtccggagacttcctcctctcccaaggccccatctccttcgacgacctccgtcacgctacctcccaggttggggactttggagcggataatcgtgctggaatcagccgaacgctgcaccggatcagcgccattagg

SEQ ID NO: 42379 - DNA, 292 bp, Zea mays
ctccaaggtggccctcacaaccaccagattgctgcacttgctgatgctctacagcaaactatgtcgcctggcttcaaggcctatgcaaagcaagtgaaggccaatgctgttgcaattggaaactatctcatgagcaagggctacaaactggtgactgatggaactgagaaccaccttgttctctgggatctccgcccccttggcttgactggaaacaaggtcgaaaagctatgtgatctttgccacatcacattgaacaagaatgctgtcttcggtgacagcagtgcattgt

SEQ ID NO: 42380 - DNA, 285 bp, Zea mays
aagaaagttgggtacaaccctgataagattgccttcgttcccatttctggttttgagggcgacaacatgattgagaggtccaccaaccttgactggtacaaaggcccaaccctgcttgaggctcttgaccagatcaccgagcccaagaggccttcggacaagcccctgcgtctgcccctccaggatgtgtacaagattggtggtattggaactgtaccggttggtcgtgtggagactggtgtcatcaagcctggtatggtagtcactttggtccactggcctgac

SEQ ID NO: 42381 - DNA, 168 bp, Zea mays
  unsure (1)..(168): unsure at all n locations
gtggctgctgcaccacagctgctcctgctgctgctgcagccccagctaatgttgaagcttangaagagtcggaggagtcggacgaggatatgggatttggtctctttgactaatcaccaaaaagcaaccaacttagccagttttatttgcaaaacaaggaaataaagg

SEQ ID NO: 42382 - DNA, 304 bp, Zea mays
ggcggcgcgggcggacaaggagcaggcggaggaggagttgtgccaagccacaatgggtatctcgcgtgactcgatgcacaagcgccgagccaccggtggaaagcagaaggcctggaggaagaagcgaaagtatgagcttggtcgccagccagccaacaccaagttgtcaagcaataagacagtgaggagggtccgtgttcgtggaggtaatgtgaaatggagggctcttcgccttgatactggtaactactcatggggaagtgaagctgttacccgcaagacccgtatcctcgacgtggtctac

SEQ ID NO: 42383 - DNA, 303 bp, Zea mays
aaaggtatcttttaagacgaaggtcttccatccaaacatcaatagtaatggaagcatatgtctcgacattcttaaggagcagtggagccctgctttgacaatctctaaggttttgctttctatctgctccctgcttactgatcccaacccagacgatcctcttgtccctgagattgctcacatgtacaagacggatcggcctaagtacgaggcaacagcccgcagctggacccagaaatatgccatgggatgaaaatgaaatgaagtcgaaactccatattcggcattactgcttaaatgcag

SEQ ID NO: 42384 - DNA, 294 bp, Zea mays
gcgagcgtctctcctctcccacgcatcgcgccaaggaagagagagagatcgccgctccccttctcggcgtcggtggtgcgggtgctctccctcctcgagcgagatctgtctggtcacagatctatctgacaaaatggtgaagatctgctgcatcggtgctggctatgtcggtggcccaaccatggccgtcattgccctcaagtgcccagacattgaggtcgtcgtcgttgacatctccaagccccgcattgaggcctggaacagtgacaccctggccatctacgagcctggtct

SEQ ID NO: 42385 - DNA, 296 bp, Zea mays
gccgccgccgctgcagtgtccatagccaccgcaggagactgagatggggggttttgtcaagacccacaagagcaatgcatacttcaagcgtttccaggtgaagttcaagagaaggcgcgcaagcaagacagactacagggtcaggataaggctgattaaccaagacaaaaacaagtacaatacacccaaatacagatttgttgtgcgatttaccaacaaggacatcacagcacaaatcatatctgctagtatagcaggtgatatcgttcttgcatctgcttactcgcatgagttgc

SEQ ID NO: 42386 - DNA, 286 bp, Zea mays
gggggcaaaagtcctcaggtgctgttccattcaccaccatgtttgctcttgtcctcctttggttcggtatttcagtacctttggtttttgttggaagcttccttggcttcaagaaacctaccattgaagatccagtgaagacaaacaagataccaaggcagatccctgagcaggcctggtacatgaacccaatcttctcgattctaatcggagggatccttccatttggtgctgtcttcatcgaactcttcttaatccttacttccatctggctgcacgagttcta

SEQ ID NO: 42387 - DNA, 285 bp, Zea mays
cttcatcaacacctggaggaaggtggactggctctccgagaagatcgcatgctcgagatttcactgtatccgccatgcatggagatatggaccaaaaggaacgagacgtgattatgagggagtttcgttctggctctagcagagttttgattaccactgacctgctggccagagggatctatgtgcagcaggtttctttagtcatcaactatgaccttcccaccaacagggaaaactatatccacagaatcggtcgatgtggacggctcggccgtaaaggtgtgg

SEQ ID NO: 42388 - DNA, 287 bp, Zea mays
ctcccatccagccgccaccaggtgcagagtctttcgtcatctcttctctggcgaagaacccccagtcgcccaccagatcacttgttaaactttgttgaggggtgatggcggtttctttcgcaaacctcaactccgaggcagggcttaaaaagcttgatcgagtaccttctcactcgcagctacatcactggctaccaagcttccaaggttgatctggctgtctacacttcgttttcggctgctccctcgtccaagtatatcaacgtagcaaggtggtttaaccacat

SEQ ID NO: 42389 - DNA, 280 bp, Zea mays
cgtttctccgagaaccgggaaggacgttggtatagaggacattggctaccatgagttccggtgctctgttgccgaaaccacagatgcgtggtcttctggccaagcgtctgcgggttcatattgttggcgcattcgttgtggccctaggagttgctgctgcctataagtttggcgtggctgaaccaagaaagaaggcttatgcagatttctacaggaattatgactccatgaaagattctgaagagatgaggcaggctggtgtctttcagagtgcgaagtg

SEQ ID NO: 42390 - DNA, 287 bp, Zea mays
gttaacccgattggtgttaggagttgttatgatgagggtaagcgtgtagcagagacattgatgttcgactatcacaggcagcatggcattgaaatccggattgccaggattttcaacacctacgggcctaggatgaacattgatgatggccgtgttgttagcaacttcattgctcaggctgtgcgcggtgagcccctgactgtccagaggccaggaacacagactaggagtttctgctatgttgccgatatggttgatggtcttattaagctgatgaatggaaacag

SEQ ID NO: 42391 - DNA, 296 bp, Zea mays
cgacctacgcacacgagaacatgcctctcgcaaaggatctccttcatccctctccagaagaggagaagaggaaacacaagaagaaacgcctggagcagagccccaattcctacttcatggatgtgaaatgcccaggatgctataaaatcaccacggtctttagccatgcacaaacggtagttttgtgtgttggctgctccactgtcctctgccagcctacaggaggaaaagcaaggcttacagaaggatgttccttcaggaggaagcagcactaaaagcactctgagtcaagatga

SEQ ID NO: 42392 - DNA, 293 bp, Zea mays
cgaggccatctcctgggccgcctggcggcatccgtggctaaacaggtactgctgggccggaaggtggtggtcgtacgctgtcgaggcatcaacatttctggcactttctacagaaacaagttgaagtacctggctttcctccgcaagcggatgaacaccaacccttcccgaggcccctaccacttccgggcccccagccgcatcttctggcggaccgtgcgaggtatgctgccccacaaaaccaagcgaggccaggccgctctggaccgtctcaaagtgtctgacggcatcca

SEQ ID NO: 42393 - DNA, 277 bp, Zea mays
cactacatggcttgctgcctgctataccgtggtgacgtggttctcagagatgtcaatgctgccattgccaccatcaaaaccaagcgtaccatccagtttgtggattggtgcaccactgtcttcaaggttggcattaattaccagcctcccactgtggtgcctgacggagacctggccaaggtacagagagctgtgtgcatgctgagcaataccacagctgtcagcgaggcctgggctcgcctggacaacaagtttgacctgatgtatgccaagcgtg

SEQ ID NO: 42394 - DNA, 248 bp, Zea mays
gcattggtatctattgccgaaccccttctgtctgacattcccagtgtatctggaacaacaaggccaaaatcaacctacattggtggagaatacagaagaagtgcagattcatcgaacacagacgttgcattggcattcgaggtcccaagtggttggctcaaagaaaaagattgtgtcactgtatcagttcttcaggcacttctgggtggtggtggcaattttcttggggaaggcaggaaaggggtaca

SEQ ID NO: 42395 - DNA, 279 bp, Zea mays
gaaggaggctgagacccgagcagagtttgctgaaagatctgtggcaaagttggagaaaaccatcgatgacctggaagatgaagtctatgcacagaagatgaagtacaaggccatcagcgaggagctggacaacgcgctcaatgacatcacttccctctgagttcccactgtggccatcgcaggcccctttcttgtttttccattctctctgaggggagggggcagccaggaggagcacaaactggccatgttgcacagccagtctgagggcagcctgag

SEQ ID NO: 42396 - DNA, 286 bp, Zea mays
atcccgtcgcatcccatcccactaccactcatctcgtcgtccgccgattcgatccggttcttccaacccaggtgatggcgacgaagaggagcgtgggcaccctcggcgaggcggatctgaaggggaagaaggtgttcgtgcgcgccgacctcaacgtcccgctcgacgatgcccagaagatcaccgacgacacccgcatccgcgcctccgtccccaccatcaagttcctcctcgagaagggcgccaaggtcatcctcgccagccacctgggtcgtacaaaaggtgt

SEQ ID NO: 42397 - DNA, 271 bp, Zea mays
gaagtttaaggaagtgggagaggcctttaccatcctctctgatcctaagaaaaagactcgttatgacagtggacaggatctggatgaggagggcatgaatatgggcgattttgatgcaaacaacatcttcaaggcattctttggtggtcctgggggcttcagctttgaagcatctggcccaggaaatttctactttcagtttggctaatgaaggtcaactacttagaccccagaaaatgcagacttggtttacccatgagtgtggacagtt

SEQ ID NO: 42398 - DNA, 285 bp, Zea mays
ccgccaaaggtggcaccaatccaggtaatcgtgatttcagtgccttataaggacgctgacacaactgccataaagggagcctgcgaatcaactgtttacacactcaatcaatctgggattcgagcggatcaggacacccgtgaaaattactctccaggttggaagtattctcactgggaaatgaaaggtgttccattgagaattgagattggtccaaaagatctggcaaacaaacaggtacgcattgtccgccgggacaacggtgcaaaggttgacattccggtg

SEQ ID NO: 42399 - DNA, 283 bp, Zea mays
ttcgactcctttctggagcagctagggttccgtcctcgatccgatccgccgagtgcacaccacctttccccactccgatcgaatcgatggccgccgagggcgagaagaagatgataaccctcaaaagctccgatggcgaggagttcgaggtggaagatgcggtggcgatggagtcgcagactttccgccacatgatcgaggatgactgcgccgacaacggcatccctcttcctaacgtcaactccaagatcctatccaaggtaatcgagtactgcaacaagca

SEQ ID NO: 42400 - DNA, 274 bp, Zea mays
ccgtcctcgatccgatccgccgagtgcacaccacctttccccactccgatcgaatcgatggccgccgagggcgagaagaagatgataaccctcaaaagctccgatggcgaggagttcgaggtggaagaggcggtggcgatggagtcgcagaccatccgccacatgatcgaggatgactgcgccgacaacggtatccctcttcctaacgtcaactccaagatcctatccaaggtaatcgagtgatgcaacaagcacgtacatgccgccgccgccg

SEQ ID NO: 42401 - DNA, 283 bp, Zea mays
cgatcggcaacgccgggtcagccctcgggatcctggcggccgacggcgtagtcctggtcggcgagaagaaggtgacctccaagctcctccagacctcccgctccgccgcgaagatgtacaagatcgactcccacctggcgtgcgctgtggcagggatcatgtccgacgccaacatcctcatcaacaccgcccgcctccacgcccagcgctacgcgctctcctaccaggagcccatccccgtcgagcagctcgtccagtccctctgcgacaccaagcagggtta

SEQ ID NO: 42402 - DNA, 275 bp, Zea mays
ggcggaccaggtaagcagcagcaggaaccctagcaccgccgcatccgcagccatgggtatcgacctcgttgccggtgggaggaacaagaagaccaagcgcacagcgccgaagtccgacgatgtttatctcaagctccttgtcaagctctaccgtttcttggtcaggaggaccaagagcaacttcaatgctgtcattctcaagaggctcttcatgagcaaaaccaatcgcccaccaatctccatgcgccgccttgtcaagttcatggaaggaaagg

SEQ ID NO: 42403 - DNA, 276 bp, Zea mays
ggttgatacccactcaaaaaggacacttctgattaagacggttgaaactagagatggacaggttatcaacgaaacttctcagcatcacgatgaccttgaataaaaattgcacaaactcagtgcagacatatattaccagcaagaataaaaaagaaatccatatcttaaagaaacagctttcaagtgcctttctgcagtttttcaggagcgcaagatagatttggactaggaataagctctagttcttaacaaccgacactcctacaagatttagaa

SEQ ID NO: 42404 - DNA, 302 bp, Zea mays
ggccacgggctgcgctcgcggacgcgcgacctgttcgcgcgccccttccgcaagaagggctacatcccgctcaccacctacctccgcacctacaagatcggcgactacgacgacgtacaaggtgaacggcgccgtccacaaggggatgccgcacaagttctaccacggccgcaccggtcgcgtctggaacgtcaccaagcgcgccatcggcgtcgagataaacaagcaggtgaatggtcgcatcatcaggaagcgtatcgatgtccgcgtggagcatgtgcagccgtcccgctgcacagaag

SEQ ID NO: 42405 - DNA, 284 bp, Zea mays
ggcacgtggcgccgacaggatgggcaagtgtcgtggacttcgtactactaggaagctccgtaaacaccgacgagaccagaagtggcatgatatacagtataagaaagctcatttgggcacagaaattaaggccaacccttttggaggtgcttctcatgcaaaaggaatcgtgctggaaaaagtacgagttgaagccaaacagccagattctagccattaagaagtgtgtaagggtccagctgatcaagaatggcaagaaaatcacagcctttgtacccaatgac

SEQ ID NO: 42406 - DNA, 299 bp, Zea mays
cacgccgccgacaacgaggacctgccggagtccgtcgactggagggccaagggcgccgtcgccgaggtcaaggaccagggcagctgcgggagctgttgggctttctcaacaatagcagctgtggaaggcatcaaccagattgttacaggtgacttgatctccttgtctgaacaagagcttgtcgactgtgacacttcgtacaatcaggggtgcaatggaggtctgatggactatgcatttgagttcatcatcaacaatggcggaatcgacaccgagaaggattacccttacaagggcac

SEQ ID NO: 42407 - DNA, 305 bp, Zea mays
gattcagatccactcgtcacacatccgcgttaccccctctcccttggtttcctctcccaccaccaacccccatcccggttatctccgccgccgcccgctttgggaaggcgcgacgaaggcaggcgagaggctccagccggacgaggaggaaagaggagcagcagggccggaggagagatgttcctgtgggactggttctacggggtgctggcctccctcggcctgtggcagaaggaggcgaagatcctcttcctcggcctcgacaacgccggcaagaccacgctgctccacatgctcaaggacga

SEQ ID NO: 42408 - DNA, 302 bp, Zea mays
  unsure (1)..(302): unsure at all n locations
ggcggacacggaggcgaaggaggagtagcagcagcagcaggcggcgccgnaggagcggcatcccatctcagtgcttgcaaccatggctaggggattgaagaagcacttgaagaggctcaatgcgcccaagcattggatgctcgacaagcttggcggacttttgctcccaagccatcttctggacctcacaagtccagggagtgccttcctctgatcctcatcatcaggaacaggctcaagtatgctctgaactaccgtgaggtcatttctatcctgatgcaacgcgatgtacttgttgatgg

SEQ ID NO: 42409 - DNA, 298 bp, Zea mays
gtgcgaatgaatgttctggcagatgctctcaagagcatcaacaacgcggagaagaggggcaaacgccaggtcctcatcaggccgtgttccaaagtcatcgttcggttcctaactgtgatgatgaagcatggctacattggtgaattcgagtccattgatgatcacagagctgggaagattgttgtgaacctcacaggaaggttgaacaagtgtggagttataagccctagatttgatgttcaactcaaagacctagagaagtggcagaacaatctgctcgcatcacggcagtttggtt

SEQ ID NO: 42410 - DNA, 297 bp, Zea mays
tgcaccacaggaaagcgctgccaccggcaccatgccccacccatacccagcactgaccccggaccatataaaggagcttgctgacatcgctcaccgcattgtagctccgggcaagggcatcctggctgcagacgagtccactggaagcactgccaagcgcctgcagtccattggcagcgagaacaccgaggagaacaggcgcttctaccgccaactgctgctgactgccgatgaccgtgtgaatccctgcattggaagggtgatccttttccacgagacactataccagaaggcaga

SEQ ID NO: 42411 - DNA, 298 bp, Zea mays
gtcgccatccaggctgtgctttccctgtacgccagtgggcgtacaactggtattgtgttggactctggtgatggtgtcagccacaccgtgccaatctacgaaggttatgcccttcctcatgccatcctgcgtcttgaccttgctgggcgtgacctgactgacagcctgatgaagatcctcaccgagagaggttactccttcaccaccacggccgaacgggaaatcgtacgggacatcaaggaaaagcttgcatacgtggctcttgactatgatcaggagctggagaacgccaagagca

SEQ ID NO: 42412 - DNA, 296 bp, Zea mays
cctcgacgcctctctctctttccacgagctctcgaaaccctaggtgcgtgccgaccggcggcggcggcgaggtgatggcgatggaccggacgcggtggcgaaacactcgtggagcactactaccggacgttcgacaccaaccgcgcggcgctggtggggctgtatcacgagatctccatgctcaccttcgagggccagaagttccagggcccatccgccattgccggcaagctcggatctcttctcttccaggcctgcgagcaccagatcgtcaccgtcgactgtcagccgtcggg

SEQ ID NO: 42413 - DNA, 294 bp, Zea mays
gtactgtgtggaccaccctgaggaggttagcaagcttgctaaggtgaaggcccaagtctctgaagtcaaaggagttatgatggaaaacattgagaaggttcttgaccgtggtgagaagattgagctgctagttgacaaaactgaaaatctgcgttctcaggcacaggatttcagacagcagggcaccaacgtgcggcgaaagatgtggctccaaaacatgaagatcaagctgatcgtcctgggcatcatcatcgcgctgatcctcatcatcatcctgtcggtgtgccagggttc

SEQ ID NO: 42414 - DNA, 267 bp, Zea mays
ggacaatctgcctgtaaattttgaactgtgtgaccccgactcccaattgcctcacagatttatttgtaaatgcaaaatcgggcagactacgtatggtactggtttcggtgctaacaaaaaggaggcaaagcagttggctgccaaaaatgcgtatcagaagctgtcagagaaaagcccatcgaaaactggctttgtcatatctttatccagtgacttttccagcagctcgtctataacaagtaactctgcttctcagtcataatctgg

SEQ ID NO: 42415 - DNA, 293 bp, Zea mays
ggcggcgcgggcggacaaggagcaggcggaggaggagttgtgccaagccacaatgggtatctcgcgtgactcgatgcacaagcgccgagccaccggtggaaagcagaaggcctggaggaagaagcgaaagtatgagcttggtcgccagccagccaacaccaagttgtcaagcaataagacagtgaggagggtccgtgttcgtggaggtaatgtgaaatggagggctcttcgccttgatactggtaactactcatggggaagtgaagctgttactcgcaagacccgtatcctcg

SEQ ID NO: 42416 - DNA, 292 bp, Zea mays
gaggccgccaaggacatcgccgaggagaaggccgtcgtgccgttgccactgtcgcccgccaagccggccgacgacgactccaaggccatcgtcgctcttgtcgtcaaggacgctgctgctgggaaaccttctacagctattattggaggctcaactgaaagagatgcttacctcgccaagatcgtgtccgagaagaggctgagtctgatcaccgcctgggaggagagccagaaggcgagagccgacaacagggctgccaagaagcttgccttcatcacgtcctgggagaacg

SEQ ID NO: 42417 - DNA, 281 bp, Zea mays
  unsure (1)..(281): unsure at all n locations
ggcggcggctgttccgcagcgtgcatggacgctggagcagctgcgcaggagcagctgcccaagaaggacattatcaagtttctgcaggatcacggttcagattcgtttcttgcagaacataaattactgggaaacatcaagaacgtagctacctctgncaataaggaccatttggttactgcctacaaccatctttttgaaagtaagcgcttcaagggtactgaaactataagtagagtatctgaacacgtgaacaacgtgaagcttaatgacgataaaca

SEQ ID NO: 42418 - DNA, 290 bp, Zea mays
  unsure (1)..(290): unsure at all n locations
ggcttctatcccttcgtaaacccttctctcttcttcccgcggcctgctcgttctatctgtccagcagacttgaggttccgagcggccggaaaccagcggcaaccgtcggcatggcgctcgtattgcattctggggctggtaacaaaaatgccttcaaggcacttattgctgcagaatacagtggggtcaaggttgagttgaccaaggattttgagatgggtgtctcgaacaagacccctgagtttctanagatgaacccccttgggaangtttctgttctggagactctg

SEQ ID NO: 42419 - DNA, 298 bp, Zea mays
gagatcaaagaaaccagagggagcgaggcatggcagcaggcttgcaggtgtttggccagccggcgtctactgatgtctccagggttctgacatgcctgtttgagaagaaactggagttcgatcttgtccgcatcgatacattcaagacgcatcacaagcttcccgagttcatcaggcttcgggatcctaatgggcaagtgaccttgaagcacggcgacaaaactctcgttgattcgagggacatctgccggtacgtctgcacccagtttccaaacgatggaaacaagagcctttacgg

SEQ ID NO: 42420 - DNA, 269 bp, Zea mays
ctggcagcagccattgctggctatgtgtttagagataaggtgatgtcagcgtttaataacaacttccggcagcagatggagaattacccgaaaaacaaccacactgcttcgatcctggacaggatgcaggcagattttaagtgctgtggggctgctaactacacagattgggagaaaatcccttgcatgtcgaagaaccgagtccccgactcctgctgcatgaatgttcctctcggctgtgggattaatttcaaccccgaggcgatcca

SEQ ID NO: 42421 - DNA, 287 bp, Zea mays
ggatgcatgcagaggaacgagaggagagcaaggataagcgccgggacagtgcgccctatggggagtacggcagctggtacaaagcctgtaaagttgacagtcccacagtcaacaccactctgcgaacttcgggcgccctgtaccggcgccagggcaagctggaagctgcacacacactggaagactgtgccagccgcagccgcaaacagggcctggatcctgccagccagaccaaggtggtgacactgctaaaagatggtagtggtggacgacgagaccgccgtggc

SEQ ID NO: 42422 - DNA, 308 bp, Zea mays
agaccgttaggatacttcttgtcacgaggacaaaaagtatcctaacgggtctaggacaaatcgtgccacaccaaatggttactggaagactagtggaaaggatagaatacttatgcttaactcccgcaccgttgggatgaagaaaacattgatatttcatgaaggcaaggcccctaagggcgacagaactgattgggtgatgtatgaatacagaatggaagatgaggatttggtttctgctggtttctcaaaggatgcttatgtactctgcaaaatcttcagagaagtggctttggccaaaatcggaa

SEQ ID NO: 42423 - DNA, 313 bp, Zea mays
tggtgtcctccgtgccgcgccatggctccaatttttgctgatatggccaagaagtccccaaatgttgttttcctgaaagttgatgtggatgaaatgaagaccattgctgagcaattcagcgtagaggccatgccaacattcctgttcatgagggagggcgacgtcaaggacagggtcgttggcgcacaaaggaagagctagcaaggaagcttgaactacacatggcctcgtagatcagtgatgccgtaatgtagtattcgcctaaataagaggacgcctcgcctcaactctgagaaaactagtgcttctgtga

SEQ ID NO: 42424 - DNA, 273 bp, Zea mays
ctcagacgctgcagaatggctcccgcaaacatcggtggcgagaagaaaaagggccgttctgccatcaacgaagtgataacccgagaatacaccatcaacattcacaagcgcatccatggagtgggcttcaagaagcgtgcacctcgggcactcaaagagattcggaaatttgccatgaaggagatgggaactccagatgtgcgcattgacaccaggctcaacaaagctgtctgggccagaggaataaggtgctaaagttatctgtattcgaag

SEQ ID NO: 42425 - DNA, 300 bp, Zea mays
accgcgtgcgaaccaagcagaccccagcagaagaagcgaagtcgtcgccggagcaggaggaagagcgagcagcaagatgtcgtggcaggcgtacgtcgatgaccacctgctgtgcgacatcgaaggccagcacctcagcgccgccgccatcgtcggccacgacggcagcgtctgggcacagtccgagaacttccccgagttaaagcctgaggaggttgctgggatgataaaggactttgatgaacctggaactcttgcaccaactggtctttttgttggaggtacgaatacatggtgatc

SEQ ID NO: 42426 - DNA, 257 bp, Zea mays
actaatctcgccttccgaggaaactcaccagcccaccacagacccgagcggaagaagccatgtccgggcgcggtaagggtggcaaggggctcggcaagggcggcgcgaactcaccggaaggtgctgcgcgacaacatccagggcatcaccaagccggcgatccggcggctggcgaggaggggcggcgtcaagcgcatctcggggctcatctacgaggagacccggggcgtgctcaagatcttcctcgacaacgtcat

SEQ ID NO: 42427 - DNA, 253 bp, Zea mays
ggaggagataagcttgtcactgtcgaagatattgtccgtcagcactgggccacatatggtcgccattactacacacgctatgactatgagaatgttgatgcaggggctgctaaggagcttatggcaaacctagtaagcatgcagtcatcactttctgatgttaacaagttggtcaaggagatccggtctgatgtttctgaagtagttgcagctgacgagtttgagtacaaggatcctgttgatggctctgtgt

SEQ ID NO: 42428 - DNA, 246 bp, Zea mays
gacagcaagaggatgctccatgcggtttaccgtgttggggatctggaccgcacaatcaagtactacacggaatgctttgggatgaaactgctgaggaaaacggcgctctcgatcagactactccaatgccttccttggctttgggccagagaacaccatctttgcacttgagttgacatacaactatggcgttgacaagtatgacattggaacgggctttgggcatttcgcaattgctaatgatga

SEQ ID NO: 42429 - DNA, 297 bp, Zea mays
ctgatctacaagcttggaggcattgacaagcgtgtgattgagaggttcgagaaggaagccgctgaaatgaacaaacggtccttcaagtacgcttgggtgcttgacaagctcaaggctgagcgtgagagaggtatcaccattgatatcgctctgtggaagtttgagaccaccaagtactactgcactgtcattgatgcccctggacatcgcgacttcatcaagaacatgatcacgggtacctcccaggctgactgtgctgtcctgatcattgactccaccactggtggttttgaggcc

SEQ ID NO: 42430 - DNA, 293 bp, Zea mays
ggcggaccaggtaagcagcagcaggaaccctagcaccgccgcatccgcagccatgggtatcgacctcgttgccggtgggaggaacaagaagaccaagcgcacagcgccgaagtccgacgatgtttatctcaagctccttgtcaagctctaccgtttcttggtcaggaggaccaagagcaacttcaatgctgtcattctcaagaggctcttcatgagcaaaaccaatcgcccaccaatctccatgcgccgccttgtcaagttcatggaaggaaaggagaagaacattgctgtga

SEQ ID NO: 42431 - DNA, 294 bp, Zea mays
aagcgattcccaacacttcaatcagatatagctgctgctgcaaatgatagcttggaaagattccgtgaggatggacgaaagactgttcttcgtctagttgagatggaagccagctacctaacagtagagtttttccgtaaacttcctactgaaccagagaaagcagctgataagaacactccagtgagtgataggtatcaggacaatcatctcagaagaatcggatcgaatgtgtcatcttatattaacatggtctgtgagactctgaggaacacggttccgaaagccatcgtg

SEQ ID NO: 42432 - DNA, 220 bp, Zea mays
ggagaaaggagaaaggaaggaggggacgcggtcgtcgggcgagatgagcgactccttctgccccgactgcaagaagcatacggaggtggcgttcgaccactcggcgggggacatggtgtgcaccgagtgcggcctcgtcctcgaggcgcactctgtcgacgagacctccgagtggcgcaccttcgcgaacgagtccaacgacaacgacgccgtccgtgtt

SEQ ID NO: 42433 - DNA, 293 bp, Zea mays
aatctacaaaccaccagggcattctgctccggatatggtgtacttgggagctatgacaaattttgatgtgacttacaattggattcaagataaatgtgttcctcttgtccgagaaataacatttgaaaatggagaggaattgacagaagaaggactgccttttctcatactctttcacatgaaagaagatacagaaagtttagaaatattccagaatgaagtagctcggcaattaataagtgaaaaaggtacaatagactttttacatgccgattgtgacaaatttagacatc

SEQ ID NO: 42434 - DNA, 296 bp, Zea mays
ctcagcttggtacacacccacctgatgtttgtgttggaacaccttgttggatggctccagaggttgttaaggccatgcatgaaaaacaccactatggactggaaatagatatctggtcatttggatgttttttattggagatgcttacgcttcagatgccttaccagggactttctgacactgaaatatatgatctgatactgaggaagaaacagaggccaaggctaactcaggaactagaagcattctggacaatggatgagccagctacgagactcaagttagggatcacatct

SEQ ID NO: 42435 - DNA, 292 bp, Zea mays
agtcaacatatagaaaagggtaatgatgacgggctttacgttagttgtgtggcttcctcggcaaacctttgggcactcatcatggacgctggaactggtttctgttctcaagtttacgagctctcaccagtttttctccacaaggactggataatggagcagtgggagaaaagttactacataacagcaattgctggatcaaccaatgggagttcattggttgtcatgtccaaaggaactccttacacacagcaatcatacaaggttagcgaatcgttcccttacaagtgga

SEQ ID NO: 42436 - DNA, 208 bp, Zea mays
agcgtgctctcacctttggtatagagaacgtatcctcgcaaccatcaatccttaagttattgaaggaggcagctgcaagttgcttgatcagtcctaatcaaatctcaaagggtttttctagactagctgagggtgttgacgacttgagtcttgatattccttctgctaaagttctttttgacaagctggtttcaacagctatatctga

SEQ ID NO: 42437 - DNA, 292 bp, Zea mays
cgacggagcacgacgcacgcagagccgcagagatccgtcacactgcaagttttgaaaactgaactgtaagatggcatcagcagagctttcccgtgaggaaaatgtgtacatggcgaactcgccgagcaggcagagaggtacgaggaaatggttgagttcatggagaaggtagcgaaaactgttgactcggaggagctcactgtggaggagcgcaacctcctgtctgttgcatacaagaacgtcattggagcccgccgtgcctcatggcgcatcatctcctccatcgagcaga

SEQ ID NO: 42438 - DNA, 291 bp, Zea mays
aaggactggagaggtggcagggctgccagctttaacatcattcgcagcagcaccggtgctgccaaggctgtcggtaaggttcttcctgaattgaatggcaagctcactggcatgtccttccgggttcccaccgtggatgtgtcagttgttgacctcactgtcagaatcgagaagggggcctcttacgaggaaatcaggaaagctattaaggctgcttctgagggcccactcaagggtattatgggctacgtggatgaggatctagtttccagcgacttcaacggtgacagc

SEQ ID NO: 42439 - DNA, 292 bp, Zea mays
gtgagaaatgcagcccagcgcaaactatttgatgagctgggaatagtggctgacgaattacctgtcgaccagttcattccgcttgggaggatgctttacaaggctccttcagatggaaaatggggcgaacacgagtgtacatacttgattgcctcttgccattacatgatgggttcccagttcccatactatttgtgtttgctgtactctgcatgtttcaagggtctgctttgcagttgcgggctttaaaacctttcctatccttgttatttcagtggattacctcttgttc

SEQ ID NO: 42440 - DNA, 262 bp, Zea mays
cgcaaccggtccaacactttcacgctcaggcgctcagctctagcaatggctgcctccaccatggcgatctcctccacggcgatggccggtacccccatcaaggtgggctccttcggcgagggcgcatcaccatgcgcaagaccgtgggcaagcccaaggtggcggcgtccggcagcccctggtacggccccgaccgcgtcaagtacctcggccccttctccggcgagcccccgagctacctcaccggcgagttccccggcga

SEQ ID NO: 42441 - DNA, 299 bp, Zea mays
  unsure (1)..(299): unsure at all n locations
tanacacacccacccggtcgctccgctccaccgttccgccctcgaccgcgcgcggacctcctcaacccttcggacctccgcctcccaccgcttccgtagcctcgcgccctcgcctcgcctcgcctcgtccttctcctccgtcccaaccatgagggagatcctgcacatccagggcgggcactgcgggaaccagatcggtgccaagttctgggaggtgatctgcgacgagcacggcatcgaccacacgggcaagtacgccggcgactccgacctccagctcgagcgcatcagagtctact

SEQ ID NO: 42442 - DNA, 291 bp, Zea mays
gggacttccacattggctggtttgttgatccattgataaacggacactatccacagataatgcaagatctcgtgaaggagaggctgcccaggttcactcctgagcaggctaaactggtgaagggctcggcagactacatcggtatcaacgagtacacatccagctacatgaaggggcagaagctggtccagctggcgcccagtagctactctgccgattggcaggttcaatatgtttttgcacgcaatggcaaaccgattggaccacaggcgaattctaagtggctctaca

SEQ ID NO: 42443 - DNA, 291 bp, Zea mays
cgttcggagcgcacacacacacaaccagatctcccccaaatccacccgacggcacctccgcttcaagatgcagatctttgtgaaaaccctgaacggcaacactatcaccctcgaggtggagtcgtctgacaccattgacaacgttaaggccaagatccaggacaaggagggcatccccccagaccagcagcggctcatctttgctggcaaacagcttgaggacgggcgcacgcttgctgactacaacatccagaaggagagcaccctccaccttgtgctccgtctcagggg

SEQ ID NO: 42444 - DNA, 291 bp, Zea mays
aaaaccctctcctctctcatccgccttcctggcgattgcggcgacgaggtgacgatagagctgcccccgcaaggagaacggacaagagaggcggaggctgatagggagaggagacggaggacgcagagcggcgtcgatctaaaagcgttggcggcggccatgggcaccgcggaccggacccggactttcatgaaggacgtcaaacgcgtcatcatcaaggtgggcactgcagtcgtcacgaggggtgatgatgggcgactggctgtgggccggttagagtgtctttgtgag

SEQ ID NO: 42445 - DNA, 287 bp, Zea mays
aacgcagacgccttgttcaccatggtgttcgaaaccgacaggctaaagggctccacgctcgtcatcaacggaatggtcacggatgggtcagacgaatgggcgatctacggcggaaccggggtgttcgccatggccaccggtgtcatgaagagaagaaaccttgccggcggtagcaacgacgggaactctgacgagcttgccctggaagttttctgcccggtgtttggcgcatcacagcaaccaattagcaagcagcaggagtccatctcctccgtcaccaagatcgg

SEQ ID NO: 42446 - DNA, 286 bp, Zea mays
caggaagctgtgcaagacagggatcacaaattcttgacaaaagcagtggaagaagcatatcgaggagtcgattgcggtgacggaggtccattcggagcagttgtcgtctgtaatgacgaagtagtagtcagctgccataacatggttctgaagcacactgaccctactgcgcatgctgaagtaactgcaattagagaggcttgcaaaaagcttgggaaaattgagctctcagactgcgaaatttacgcgtcctgcgagccatgcccaatgtgctttggtgcagttc

SEQ ID NO: 42447 - DNA, 288 bp, Zea mays
aagacgtgctaggttagaacgtcatcagaggactcgtgaacgagcggcaaaagctctggctgagaagaatgaacgtgatatgcaagttcagagggagcaggcagagagagatagaattggagacactctagacttcgaaatcaagaggtggtctgctggtaaagagggcaacttgcgtgctttgttatcaactttacaatatatactttggccagaatgtggatggcaagctgtatcattgactgatttaattactggagctgctgttaagaagcagtacaggaaggc

SEQ ID NO: 42448 - DNA, 294 bp, Zea mays
caggtaaggaagaggaggagggcaggatgtcgcaccgtaagttcgagcacccgaggcacggctccctcggcttccttcccaggaagcgctcctcccgccaccgcggcaaggtgaagtcattccccagggatgaccccaagaagccttgccatctcactgcagtccttggctacaaggctggcatgactcacattgtccgtgaggttgagaagccaggatccaaactccataagaaggaaacttgtgaggctgttaccatcattgaaactcctctcttgtcattgttgggctcgt

SEQ ID NO: 42449 - DNA, 293 bp, Zea mays
cggcggcggtggcggacgtaaggcgaaggagtagcagcagcaggcggcgccgagtagcggctccccatctcgagcttgccaccatggctagaggattgaagaagcatttgaagaggctcaatgcccccaagcattggatgctggacaagcttggcggagcttttgctcccaagccatcttctggacctcacaagtctagggagtgcctgccactgatcctcatcatcaggaacaggctcaagtatgctcttacataccgtgaggtcatttccatcctgatgcaacgccatgta

SEQ ID NO: 42450 - DNA, 288 bp, Zea mays
caccccgcctccccgtcttgctgatttgtatgttactgctgacacatttgaaaaggacacggaaatgtggcagcaacgagtagaaaaatattggagtttgttgggcccaaaggtaaaaccagacactattagaaacatcatggacatgaaagcaaatttttgggtcatttgctgctgcactcaaggaaaaagacgtatgggtgatgaatgttgtgccacatgatggaccaaacaccctcaagataatctatgatagagggctgataggcagcaatcatgactggtgtg

SEQ ID NO: 42451 - DNA, 289 bp, Zea mays
cggccacgtcacactggcgtgatggttggcatggggcagaaggatgcgtatgttggcgatgaggctcagtccaagaggggtatcctgactttgaagtacccgatcgaacatggcattgtcaacaactgggatgatatggagaagatctggcaccacaccttctataacgaactccgtgttgcgcctgaagagcaccctgtgctgctgaccgaagccccacttaacccaaaggctaacagggagaagatgacccaaatcatgtttgagactttcaatgttcctgccatgt

SEQ ID NO: 42452 - DNA, 285 bp, Zea mays
  unsure (1)..(285): unsure at all n locations
ctcgccgagtcgcgcggttgtcgaggcttgggtgcgttcaagattcagcttcacccgtaacccaccgccatggccgaggaaggcattgctgctggaggtgtaatggacgttaatactgctttacaagaggttctgaagactgccctcatccacgatagnctagcacgtggaattcgcgaactgccaaagccttagacaagcgccaagcccatctttgtgtgcttgcatccaactgtgatgagcctatgtatgtcaagttggtggaggccctttgagctgaacacc

SEQ ID NO: 42453 - DNA, 284 bp, Zea mays
  unsure (1)..(284): unsure at all n locations
gaccactgaacagggtgactgctcaaagttcaagggcaacaccccccattgctgcaagaaagatccaacaattgttgatttacttccaggcactccatacaacatgcaagacgncaattgctgcaaggcaggagttataaatacctttaaccaggacccagcaaatgctgcttcctccttccagatcagtgttggtcttgctggaactaccaataaaactgttaaggtgccgaagaatttcactcttaagactccaggccctgggtacacatgtgggcgtgcta

SEQ ID NO: 42454 - DNA, 235 bp, Zea mays
agaccacagcgaggaggaagaggaggaggaggaggtgctggaggaagatgagccccgcttcaccatcatccccaacccactggacaggagagaggaggctggaggtgcctccagcgatgaggaaagcggtgaggacacaggtccacaggatgctcaggagtatgggaactaccagccagggtccctgtgtggctactgctccttctgcaatcgatgcactgaatgtgagagctgt

SEQ ID NO: 42455 - DNA, 290 bp, Zea mays
gactcaccgcgctgtctctgaccatgaagccaccctgaggtgctgggccctgagcttctaccctgcggagatcacactgacctagcagcgggatggggaggaccagacccaggacacggagctcgtggagaccaggcctgcaggggatggaaccttccagaagtgggcggctgtggtggtgccttctggacaggagcagagatacacctgccatgtgcagcatgagggtttgcccaagcccctcaccctgagatgggagccgtcttcccagcccaccatcgccatcgtgg

SEQ ID NO: 42456 - DNA, 299 bp, Zea mays
aagacgtgctaggttagaacgtcatcagaggactcgtgaacgagcggcaaaagctctggctgagaagaatgaacgtgatatgcaagttcagagggagcaggcagagagagatagaattggagacactctagacttcgaaatcaagaggtggtctgctggtaaagagggcaacttgcgtgctttgttatcaactttacaatatatactttggccagaatgtggatggcaagctgtatcattgactgatttaattactggagctgctgttaagaagcagtacaggaaggcaacactgtgca

SEQ ID NO: 42457 - DNA, 286 bp, Zea mays
agcagctattgtggtcgtccctcagccgcgtcgcaccgcatcgcattctacgattcgaagctctacctgctcgcagccatggcgaagaattacccaaccgtgagcgccgagtacagcgaggccgtcgagaaggccaggcgcaagctccgcgccctcatcgccgagaagagctgcgcgcccctcatgctccgcctcgcgtggcactccgcggggacgttcgacgtgtcgtcgaggaccggcggtcccttcggtactatgaagtgcccggcggaactggctcacggcg

SEQ ID NO: 42458 - DNA, 283 bp, Zea mays
gatgaccacctgctgtgcgacatcgaaggccagcacctcagcgccgccgccatcgtcggccacgacggcagcgtctgggcacagtccgagaacttccccgagttaaagcctgaggaggttgctgggatgataaaggactttgatgaacctggaactcttgcaccaactggtctttttgttggaggtacgaagtacatggtgatccaaggtgaacctggagttgtcatccgaggacagaagggcactggaggcattactatcaagaaaactggcatgtccttga

SEQ ID NO: 42459 - DNA, 273 bp, Zea mays
cgcggatcgaattaggctctccgagtctccggttccctcctctcggcggcggctcaggtccctctccatctccggcgtggcgcttggcgtctgacctcaacaagcaagaaagcaaatggcaggcggcagggttgcgcatgccaccctcaagggcccgagtgtggtgaaggagatcttcattggactgaccctgggtctgatcgcgggaggcatgtggaagatgcaccactggaacgagcagaggaagactaggtccttctatgacatgcttga

SEQ ID NO: 42460 - DNA, 279 bp, Zea mays
  unsure (1)..(279): unsure at all n locations
gggaagatggcggacattcagactgagcgtgcctaccagaagcattctancatctttgagaactagaagagggtcctgctgggagaaactggcaaggagaagctcccgcggtactacaagaacatcggtctgggcttcaagacacccaaggaggctattgagggcacctacattgacaagaaatgccccttcactggtaatgtgtccattcgagggcggatcctctctggcgtggtgaccaagatgaagatgcagaggaccattgtcatccgccgagac

SEQ ID NO: 42461 - DNA, 287 bp, Zea mays
ggagcacgacgcacgcagagccgcagagatccgtcacactgcaagttttgaaaactgaactgtaagatggcatcagcagagctttcccgtgaggaaaatgtgtacatggcgaactcgccgagcaggcagagaggtacgaggaaatggttgagttcatggagaaggtagcgaaaactgttgactcggaggagctcactgtggaggagcgcaacctcctgtctgttgcatacaagaacgtcattggagcccgccgtgcctcatggcgcatcatctcctccatcgagcag

SEQ ID NO: 42462 - DNA, 285 bp, Zea mays
tttatttgaatgcttatgcttatgatgctcaaattgctggtttgttctattcaatatatcttacttctgctggattccaggtttctttaggtggttacaatgacaaaatgagagctctcttaaatgccatactagtgcaaattgcgagttttgaagttaagccaaacagattttctgccctaaagatttgaattgttgacatgatattttagaagtcctgaaaaagtaccaaggttccatgcaccttgtgcgctgcatgtgttgataaatttgctgaccaactac

SEQ ID NO: 42463 - DNA, 269 bp, Zea mays
actcaagatgaagggtgattactacagatacctttctagctgctccagtcttgaactcagcaaggtatctgtagtaatcacccttcatcttgagaatagaagactggagctgagagaaaggacgccgctgagaacacgatggtacgctacaaggctgcccaggacattaatctggctgagcttgctccaactcaccctattaggcttggactggcacttacattctcagtgttctactatgagattctgaactcacctgatcgcgcctg

SEQ ID NO: 42464 - DNA, 227 bp, Zea mays
tcgagtgcaacgcaacgttggcgcttggcggccagtagtagcagcaaacttagcgtcgctccttcctactagacgagagatcgagaaaccatggccaagctccaagtcactcctggcgccgcgttcaccgagtgcaatgaactcaacttccagggcctgtacatgtaccacacgcccctgggtcccaaggccaaccaagctgcgatcctagagagcaaggccaagat

SEQ ID NO: 42465 - DNA, 282 bp, Zea mays
gctggttggcccttccagctaagttcaccatcttcaactttggtactcagaaggatgtctccaactggggcttgttcttctgtgttgcaattggcctgtgggctggtctgattattggttttgtcacagaatactacactagcaatgcatacagtcctgtgcaagacgttgcagattcctgcagaactggtgctgccactaatgtcatttttggtcttgctcttggatacaagtcagttatcatcgcgattttcgctatcgctgttagcatctatgtcagtt

SEQ ID NO: 42466 - DNA, 282 bp, Zea mays
ccagccgccgccatgaagcgcaacccccgcgtcacgagctcccgccggaagtgccgcaagggcacttcacggccccgtcctccgtccgccgcgtgctcatgtccgcggcgctatcgacggagctccgccacaagtacatgtgcgttccatcccgatccgcaaggacgacgaggtgcaggtcgtgcgcggcacctacaagggccgtgagggcaaagtggtgcaggtgtaccgccgtcgctgggtcatccacgttgagcggatcacccgcgagaaggtgaacgg

SEQ ID NO: 42467 - DNA, 279 bp, Zea mays
tgtgcaccaagggcggttttccctagcattgttggccgtcctcgccacactggtgtcatggtagggatgggacagaaggacgcatatgttggcgatgatgcacagtccaagagaggtattcttacgctcaagtacccgattgagcacggtattgtgagcaactgggatgacatggagaaaatctggcatcatactttctacaacgagcttcgtgttgccccagaggagcaccctgtgttgctcaccgaggctcctttgaacccaaaggccaacagggag

SEQ ID NO: 42468 - DNA, 283 bp, Zea mays
atataataataagctaatagcagcgccacgcaccgacaccaatacgccatgggttccatcatggagcaacgctgcaacaacgatccgcaggcgctgctcgacgctcagctcgagctctggcacagcacgttcgcgttcatcaagtccatggcgttcaagtcggcgctggagctcggcatcgcgacgccatccactgccacggcggcaccgcacgctcacccagatagccaccaaggccgcgctccacccgtccaagacaccgtgcctgcgcaggctcatgcgc

SEQ ID NO: 42469 - DNA, 279 bp, Zea mays
gtcctgggtgactttggaagtccgtagtgtctcattgcagataatttttagcttagggcctggtggctaggtcggttctctcctttccagtcggagacctctgccgcaaacatgctccgccagatcatcggtcaggccaagaagcatccgagcttgatccccctctttgtatttattggaactggagctactggagcaacactgtatctcttgcgtctggcattgttcaatccagatgtttgttgggacagaaataacccagagccctggaacaaactg

SEQ ID NO: 42470 - DNA, 280 bp, Zea mays
attctccgatccgcccaggccaccatggcggaggatgctacgagcagccacccgtcacgctacgtcaagctcaccaaggaccaggacgcccccgccgaggacatccgccccggcgagctcaaccagccagttcacgtcccgcagctcgaaggccggaggtgtagcgagtgcggtcaggtcctgcccgagagctacgagccgcccgccgacgagccctggaccaccgggatcttcggatgcaccgatgacccagagacctgccgaactggattgttttgcc

SEQ ID NO: 42471 - DNA, 278 bp, Zea mays
ccactcatcttttctcgtttagaacctctaaaatttcccccactcgccagtcgcagcagcacctgtagcagccatggacgccagcggagccggtagcaaggggaagaagggggcggccgggcgcaaggcaggcggccccaggaagaagtcggtgacgcggtccgtcaaggccgggctgcagttacccgtcggccggatcgggcgctacctcaagaagggccggtacgcgcagccgtgggcactggcgcacccgtctacctcgccgccgtcctggagta

SEQ ID NO: 42472 - DNA, 281 bp, Zea mays
caagaaaccaccgccgagcccaaccgcacaagcgcgcgaggcaggagagagagagaggcggggagcaaaacaatggaggggaaagaggaggacgtgcgcctgggcgccaacaagttctcggagcgccagcccatcgggacggcggcgcagggcgccgttgacgacaaggactacaaggagcccccgccggcgccgctgttcgagcccggggagctcaagtcctggtccttctaccgcgcgggcatcgccgagttcgtcgccaccttcctcttcctctacat

SEQ ID NO: 42473 - DNA, 253 bp, Zea mays
cgcgacatcacactcaaggactccaagacccttctcttcggtgacaagccggtcaccgtctttggcatcaggaaccctgaggaaatcccgtggggtgaggctggcgctgagtatgtcgtggagtccaccggcgtcttcactgacaaggacaaggctgctgcacatctcaagggtggtgccaagaaggttgttatctctgccccaagcaaagatgcacccatgtttgttgttggtgtcaatgaggacaagtaca

SEQ ID NO: 42474 - DNA, 281 bp, Zea mays
ctcctcgcgccgctgccgcatctcctctacaggtaagaaggagagaaagagggcgaaatggtgaagcacaacaacgtcatccccaacgggcacttcaagaagcactggcagaactatgtcaagacatggttcaaccagcccgcccgcaagcagaggcgccgcatcgcacgtcaaaagaaggctgtgaagatattcccacgaccaactgctggccctcttcgtcccattgttcaatgccagactctcaagtacaacatgaagtcaagggctgggagaggctt

SEQ ID NO: 42475 - DNA, 299 bp, Zea mays
catcctgcagcgtagtagctcggattcgctcacactgtacaagggacatcactcgctactgagcactcatgggtttgaggagaagtaccaggaggcgttggccaagggagatgttacagcccagatagctcttcagcctgcactgaagttcaatggtggtggtcatatcaatcatagcattttctggacaaacctcagccctaacggtggtggagaacccagaggggagttgctggaagccatcaaacgtgactttggttcctttgttaagtttaaggagaagctgacggctgcatctg

SEQ ID NO: 42476 - DNA, 276 bp, Zea mays
agtgaggccacccaagaagggttcagctgttctgcgccctcgcaccaggactctgactgctgttcacgatggcatcttggaggatgttgtctacccagctgagattgtggggaagcgtgtcagataccgtctggatggttccaagattatcaagattttcttggacccaaaggagaggaacaacactgaatacaagctggagacctgcactgcggtctaccgcagctgtgtgggaaagatgtggtccttgagtacgctatgaccgaaaatgcataa

SEQ ID NO: 42477 - DNA, 275 bp, Zea mays
ctaagtgacaagttcctcatgccgacgccgatgaaggaggagaccgccgacgtcgagttcatccagaagaggaacgccccctctcctgctgagccagagctaatgctaaacaaccgggtgtacacctgcaacaacgtccagtgcccgcacagtgactacagctatggattccttgaccggaatgcccgcaacagccaccagtacacctgtaagtacaacgatccgatcactcagagcgccgagaacaagcctctgccagcaccgccgcaaccaca

SEQ ID NO: 42478 - DNA, 275 bp, Zea mays
agcgagaatgaagactattctcagcaatcagactgtcgacattccagaaaatgtcgacattgatctgaagggacgcacagttatcgtgaagggccccagaggaaccctgcggagggacttcaatcacatcaatgtagaactcagccttcttggaaagaaaaaaaagaggctccgggttgacaaatggtggggtaacagaaaggaactggctaccgttcggactatttgtagtcatgtacagaacatgatcaagggtgttacactgggcttccgtt

SEQ ID NO: 42479 - DNA, 276 bp, Zea mays
cccaaggacttcaagggcagcgtgcccggcttcaaggtcgacaccgtcgacaccaccggcgccggcgacgccttcgtcggctccctcctcgtcaacgtcgccaaggacgactccatcttccacaacgaggagaagctccgcgaggccctcaagttctccaacgcctgcgggccatctgcaccaccaagaagggcgccatcccggcgctgcccacggtcgccaccgcccaggacctcatcgccaaggccaactagatggccgcacgccccgccgttc

SEQ ID NO: 42480 - DNA, 271 bp, Zea mays
ccgccgacgcctcaagtccctcgaggctcacctcgccggcaaaacctatgtgtctggtgactccattactaaggatgacattaaggtcttcgccgcggtgccgtcgaagcctggcgctgagtttcctaatgccgcccgctggtacgagaccgtctctgcggctgtagcctcaagattccctggtaaggctgttggtgtaaatctgcctgctggatcagctcctgcggcagccgctcctgcggatgaggctgaggatgatgatgaccttgat

SEQ ID NO: 42481 - DNA, 268 bp, Zea mays
ggagaagccgccgcaccagcaatcacagcagcccggagaacgccctggtccaacaagatgcagatcttcgtgaagacgctgacagggaagaccatcaccctcgaggtcgagagcagcgacaccatcgacaatgtcaaggccaagatccaggacaaggaagggatcccgccggaccagcagcggctgatctttgccgggaagcagctggaggatggccgcacccttgcggactataacatccaaaaggagtctacgctccacctcgtgc

SEQ ID NO: 42482 - DNA, 265 bp, Zea mays
ccgctcgagcgcccgcatacccgatcccgctcgctcgccgccagttgtcccgcagctcagatcgtctcatacctcggcgaaaatgagagagatcttgcacatccagggagggcaatgtggcaaccagatcggtgccaagttctgggaggtcgtgtgtgacgaacacggcattgacactacaggtcggtacactggcacttctgaccttcagttggagcgcgtcaatgtctactacaatggaggctcctgtggacgctttgtgccc

SEQ ID NO: 42483 - DNA, 273 bp, Zea mays
agcccgagcccgacgaagaagggacaccggaaggcgtgcccaccgcctccgtctcccccgacgcccacgcccacgcccacgccgtcctcggacaagtgccccatcgacgcgctgaagctcggcgcctgcgtggacgttctcgggaacgtaggtgcacgtcggcgacgccaacgtccagtgctgcccgctcgtgaagggcatcgcagggctctccgcggcggcgtgcctttgcaccgccatcaaggcaaagtgctcgacatctccgtctacgtg

SEQ ID NO: 42484 - DNA, 273 bp, Zea mays
gaaggcaggccgtggatatctcacccctgaggagggtgaaccaggccatctacctcctcaccactggtgccagggagagtgctttccggaacatcaaaaccattgccgagtgccttgcagatgagctgatcaacgctgccaagggctcatccaacagttacgccatcaagaagaaggacgagattgagcgtgttgccaaggccaaccgttgaacggagcttgtatcctggtgcactctgcgctggaaacttttatgttgctggcagtcgtatc

SEQ ID NO: 42485 - DNA, 273 bp, Zea mays
gacttccctgttcagtacgatgctgcaaagttctttgtcattaaatcgtacagcgaggatgacatccacaagagcgtacagtacaatgtgtgggcaagcacaaccaacggaaacaagaagcttgatgctgcttaccaagaagctcagtcaaagggatctgcatgccctatattcatgttcttctcagtgaatacaagtgggcagtttgttggtgttgctgcaatgactggcgccgttgattttgagcaaaccctagagtattggcaacaggac

SEQ ID NO: 42486 - DNA, 270 bp, Zea mays
ctaccaccaccgcaagcgacgacggggagatgtttctgcgacggatcctgaccggcggaggtggcctggcggcgctgagggcggcgcgcgccgtgaaggagacgacggggatcgtcggccttgaggtggcgcccaacgcgcgggaggttctcatcgggctctacacgcgtacgctcaaggagatcgaggccgtccccaaagacgagggctaccgcaaggccgttgagtccttcaccaatcaccgcctccagatctgccaggaggaggacg

SEQ ID NO: 42487 - DNA, 274 bp, Zea mays
gaaaccgaaagcacccgcaccaatctctgcgtctcttcgtcttcggctgcgcggcggcggcagcagcggaggaggttgaggagatgctgtccggcgacatccccccgagccagaccatctacctcaacaacctcaacgagaaggtcaagaaagaagaattgaagagatcgctttatgccttgtgctcacagtatggaaggatactggatgtggtggccctgaaaacacaaaaactgagagggcaagcatgggtggcgtttagcgaaattacagc

SEQ ID NO: 42488 - DNA, 199 bp, Zea mays
ggcccaaacaccaagttctcctatgcttctcacaaggctgttaacgaatataaggaggctaaggcgctcggtgttgataccgtgctagtacttgttggactagtcttgtacctgttcctctcaaagcctgtcaagggtgtggagaacggattggctcttgcttcccttcttaggaagatactcccagtctacaaggaag

SEQ ID NO: 42489 - DNA, 263 bp, Zea mays
ggttctccatccggtcagaccaatcaacaaagtgacgcgagcacgagcatccatcgtttccccttcttccccatcgcgtgccctcgccgcagccatcttccatggcggaccagctcacggacgagcagatcgcggagttcaaggaggccttcatcctcttcgataaggatggcgacggctgcatcactaccaaggagcttggaactgtgatgcgctcccttggccagaaccccactgaagcagagctgcaggacatgatcaac

SEQ ID NO: 42490 - DNA, 255 bp, Zea mays
gatgactacaaagaggcccacctcaagctctccgaactggggtatgctgatgcttaaatggtccatatcctggagcgggacacaaactgctgcctgtatggactcgtgcgattcagggtgaaccatcagattgtctagtgtcttctttgtaataaatttatctgttcttggtactttgtctatggttgaatcggaacccattttccgtttgcctagattcctaatttctggtgctgtatccagtgaaactagtag

SEQ ID NO: 42491 - DNA, 267 bp, Zea mays
tacacactaagagatactgaaaaccccataatgttgcatagggtatttttccgaactattgtcaggcaacccaatgcaggctacaagtttacgtcggcacaggtcagcgacactggattaggatgtcctgaagaatctctgtcatttacatcgaatagcatcttaagatcactgatgactgctatagaagaattagagcttcatgcgattaggacaggtcattctcacatgtttttgtgcatactgaaagaagcaaagcttcttgat

SEQ ID NO: 42492 - DNA, 266 bp, Zea mays
gccaacaacttcgctcgtggtcactacaccattggcaaggagattgttgacctgtgccttgaccgcatcaggaagcttgcagataattgcactggtctccagggcttcctcgtcttcaacgctgttggtggaggaacgggctctgggcttggttctctcctcctggagcgcctgtctgttgactatggcaagaagtccaagctcggtttcaccgtgtacccacccccccaagtgtccacatccgtggttgagccatacaacagtgt

SEQ ID NO: 42493 - DNA, 268 bp, Zea mays
gccaagtgcaacacacagatggtcattcctcacttaacagaaaactatggggcatccagagatccaccagaaaagcaggcacctatgtgcactgtacattcatttcctcacaatattgatcactgcctgacatgggccagatctgagtttgagggtctacttgagaagactcccactgaagtaaatgcttttctgtcgaaccctggtggatatgccaccacagcaagaactgctggtgatgcacaggctaagaccaacttgagcgagt

SEQ ID NO: 42494 - DNA, 291 bp, Zea mays
gtaagcgcggcttggaatgatggtggctggttgctatggtctgccacagttcaggatgcgtgtgttcctctggggtgctctttcttccatggtgctccctaagtatcctctgcccacctatgatgttgtagtacgtggaggagcccctaatgccttttcgcaatgtatggttgcatatgacgagacacaaaaaccatccctgaagaaagccttgcttcttggtgatgcatttcagatttaccaaaggttcaaaatcaccagcctaacgatgtgatggagtatggtggttcc

SEQ ID NO: 42495 - DNA, 287 bp, Zea mays
cgcccaagtcatcgtctggtcgtcgcccgcagaggcgcagacgcccaaaaccggaaggtgcgccatggccgcgtcggatctggagagcaaggccaaggaggccttcgtcgacgacgacttcgagctggccaccgagctctacagccaggccatcgacgccgggcccgccaccgccgacctctatgccgaccgcgcccaggcgcacatcaagctcggcaactacactgaggctgtggcggatgctaacaaagcaattgagcttgatcctatgatgcatacagcttact

SEQ ID NO: 42496 - DNA, 287 bp, Zea mays
ccaacaccagccgccgccatgtcgaagcgaggcaggggaggttcggcggggaacaagttccgcatgtcgctgggtctgccggttgccgcgacggtgaactgcgcggacaacacgggcgccaagaacctctacatcatctccgtcaagggcatcaagggccgcctcaaccgcctcccgtccgcctgcgttggcgacatggtcatggccaccgtcaagaaggggaagcccgacctcaggaagaaggtgatgcccgccgtcatcgtccgccagcgcaagccgtggcgccg

SEQ ID NO: 42497 - DNA, 289 bp, Zea mays
tgtcaccaatatcattcgctatgttgctggaaacagtgcgctgatttcggctctctcccctgtagcaaatccttgttcctgaagagcgtgccccggggggctgcaactacttgttacttggcattgcaccctaatgtcaaaggtgtatctggtaaatacttcgctgattgcaatgaagcaacaccgactgctgtcgcgagagactcagagctggcgaagaggctatggtcgttcagcgaagaccttgtcaagatctatgctgatatgtcacagacgacacaggcaagcg

SEQ ID NO: 42498 - DNA, 286 bp, Zea mays
gaaagggctgaggaacaagctaggcatgaggcattgctcagaaagagatccaaagtgttgcagaggagtctgcctaggccaccggctgtttcagtagagattatccggcaatctcttattagaagtggagaaagcagaagcagaagcacctttatgcctcctacatcacttgaacaagctgatgaactaataaatgaggaactccttaggcttcttgagcatgataatgcaaaatatcctcttgatgaaaaaactcaaaaagagaaaaagaaaggaagcaagcgtc

SEQ ID NO: 42499 - DNA, 287 bp, Zea mays
gagagattagagggagcgccctgcccaagctaagagaaaccgcggcgcgagatatagggaggaagggcagacgggcgagcaggatgagagagatcatcagcatccacatcggccaggccgggatccaggtcggcaacgcctgctgggagctctactgcctcgagcacggcatcgagcccgatggcaccatgcccagtgatacctcggttggcgtcgcacatgatgccttcaacacgttcttcagcgagaccggttctggcaagcatgtgccgagggccatcttcgtc

SEQ ID NO: 42500 - DNA, 283 bp, Zea mays
cggaacagaagctaaccggcacgtcgtgaagctaaccgggattccgggaagcagagacgtccgcccgtcgcccgtcgtccgtcgtcatggccgccgtggaggtgtgtcgtgaaggccgccacggggaagcccgacacgctcggcgactgcccgttctcgcagagggtgctgctcacgctggaggagaagaaggtcccctacgaggtgaagctcgtcgacctcgacaacaagcccgaatggtttctgaagatcagcccagagggtaaggtgcctgtgttcaacg

SEQ ID NO: 42501 - DNA, 219 bp, Zea mays
acgaggcagaggcatcttcgttttgacgtgcgcttcctcttcctcgctcgctctcggtcgcagtgatggctgatgtcgacgagtaccgttgcttcattgggaccctgtactggtcaacgactgatgaaagcctcaaggatgcgttcagcaaattcggcaacctcactgaggcaaaggtggttcttgacaaattttccaggcgttctcgtggtttcggct

SEQ ID NO: 42502 - DNA, 289 bp, Zea mays
cagcaagagggctccactaccttcacaccggttttgcccagtcaatcatacaccgtgacgtcaagtcagcaaacatactactcgatgaaaatctcttggccaaggtttctgattttggcctctcaaaggttgggcctgaattcgaccagacgcatgtgagcacagcagtgaaagggagcttcgggtaccttgatcctgagtacttccggagacagaagctgactgacaaatcagatgtgtactcttttggtgtggtgctgcttgaggtgatttgtgcgaggccggttat

SEQ ID NO: 42503 - DNA, 288 bp, Zea mays
tattaatgcagacaattgacagttctgcacgggagttcctacggaaggacaagtcaactacacttgtcgctagtgctaactttgttgatctagcaggaagtgagcgtgcatctcaggcgttgtctgctggcacgaggctaaaagaaggctgccatattaacagaagtttgcttgcccttggcactgtcattaggacactaagcatggggagtaatgcacacataccatacagcgattcatagctcacacgcatattacaaccatctttaagaggtaaatgtggtcatg

SEQ ID NO: 42504 - DNA, 288 bp, Zea mays
tggagagtctagtagggttctaagcctcggccgtttcttcgtctccacagctcccgccgccgcggaccagcgcgtcactctaccgggttccggcgtctccccgtagcgcggcatccatggcggagcagacggaaagggctttcttgtcgcagcccaaggtgtttctctgttccaagaaggccaccaaggggaacaaacctggcaagggaggaaacaggttctggaagaacattggccttggtttcaagacacccagggaagccattgaaggaacctacattgataaga

SEQ ID NO: 42505 - DNA, 289 bp, Zea mays
  unsure (1)..(289): unsure at all n locations
atggcgcacagaatctggtgtctcttgctccgaccccgttggcgactgagacgcgatccccttctcctgcactgccgtcctccgtcgctgcgatgcctcggtattactgtgactactgcgacacctacctgacccatgactcgccatctgtccggaaacaacataatgctggatacaaacacaaggcgaatgttcgaacctactatcagcaatttgaggagcagcanactcaaagtttaattgatcaaagaatcaaggagcatcttggacaagctgcagctttccaagc

SEQ ID NO: 42506 - DNA, 276 bp, Zea mays
tctcatcactgcactggtggtgtccgtggtgctccacagagtgaagcgatagccaggagaggcgacgatgcgcaagtgggcgctctcctccgcgctcctcctcctctttctcctcaccacactccccgacccatctaagaagctacaagtgaatgccgaggagagcagcgatgacttggctaacccacccaaggtagaggagaagcttggtgctgtccctcatggactgtccaccgactctgaggttgcccagagggaagccgagtctatctctag

SEQ ID NO: 42507 - DNA, 284 bp, Zea mays
gagcgacagagagagagagaccgacgcgccggcagatcccaagctcaccggagagggggaagagggcgaccgaaggcggcgatgggtttcatcatggacttcgcggagaatctgatcctccgtctgatggaggacccggacaagcgcgaccaggttcggcgggagcatgtctacaagatgaaggagcggtgcgagcgcactaaggcggcgtggagcctccctctgcgcccctacggcttctggaccttcgaccgcttcaactcgcagctctcctgggatcccca

SEQ ID NO: 42508 - DNA, 275 bp, Zea mays
ctcccaacaccacctcgcctgcgatcttcgtagcctccgtcgcgtcgagcatcgatcatgtcggcctactgcggaaagtacaaggatgagctcatcaagaatgctgcctacattggcacccccggcaagggtatccttgctgctgatgagtccactggcaccattggcaagcgcctttccagcatcaatgtcgagaacgttgaggagaaccgccgtgccctccgtgagctcctattctgctgccctggtgctctccagtacatcagcggtgtgat

SEQ ID NO: 42509 - DNA, 282 bp, Zea mays
tgcgggagacgtcctccggcgagcggtagtcccggaagacgtcctccggcgagcgggagaccggctgcgtgcccggccggcctgatcagggcgctcaccaccgatgtggagaagttctacgtgatgtgcgacccagagaaggagaacttatgtttatatggacttcctaatgagacatgggaaataaacttgcctgctgaagaggtccctcctgaactgccagagccagctcttggaattaattttgctcgtgatgggatggatgaaaaagattggctatca

SEQ ID NO: 42510 - DNA, 277 bp, Zea mays
gaggagcagcagcagcaggcggcgccgaggagcggcatcccactcagtgcttgcaaccatggctaggggattgaagaagcacttgaagaggctcaatgcgcccaagcattggatgctcgacaagcttggcggagcttttgctcccaagccatcttctggacctcacaagtccagggagtgccttcctctgatcctcatcatcaggaacaggctcaagtatgctctgaactaccgtgaggtcatttctatcctgatgcaacgccatgtacttgttgat

SEQ ID NO: 42511 - DNA, 277 bp, Zea mays
attgcttgagatgaggaggattgctgcctacatttacaagaaggctggcaggtggaagcaatccattgctctatcaaagaaagataacatgtacaaggattgtatggagacatgctcacaatctggtgaccgtgaactgtcagaggacttgcttgtgtattttatcgagcagggtaagaaagaatgctttgcttcttgcctcttcatttgctacgacctgatccggccggatgtcgctcttgagcttgcgtggatgaacaacatgttggactttgcc

SEQ ID NO: 42512 - DNA, 162 bp, Zea mays
gtgctacctacttcaggtgaaagatcgccacaatgggaatcttctaattgatgaggaaggacatattattcatattgattttggtttcatactgtcgaactctcctggaggtgtaaacttcgagagtgcaccatttaagctaacgagggaactccttgaagt

SEQ ID NO: 42513 - DNA, 274 bp, Zea mays
gttccttagcttactggataatactgtaactaagcagccagattacaggctgtatgtgatccataaattgaagcatttgcgtttgctggatttcaagaaagtgaaacaacaggagagagttgcggcagcgaaaaagttccactcaaaggaagcagaggaggaggcaaagaaggtgcctgccaaaacgtttactcctggtctgcctgatgctcaggacatcacaatggagccacaaggtcctaaagtagttgctccaactcctgaacaaatcaca

SEQ ID NO: 42514 - DNA, 146 bp, Zea mays
ctcgcatttccttgcaaccgattgccttcccccctcccaacccaagaccgatggcgcccaaggccgagaagaagcccgcggcgaagaagccggcggaggaggagcccgcggcggagaagacgaccgccgggaagaagctcaaggcg

SEQ ID NO: 42515 - DNA, 276 bp, Zea mays
atgatatcaaggagaacccagtcttgatctacatgaagggttttcctgagtctccaatgtgtggcttcagtgcactggctgttaaggtcttccagcaatatggcgtccctgtctgtggtagagacattcttggggatcttaagctcaaagagtgtgttaaagcccacactaactggcctacatttccacaaatatttatcaaaggagagtttgttggggggtctgacatcatattaagcttgcaccagaagggtgagcttaaggatcttcttgggg

SEQ ID NO: 42516 - DNA, 274 bp, Zea mays
gacggcacagagcatgacgtctcgcccaatgaaggggatgctgtagtggccagtcacaatcctcaactggtccttcgtccggaatgaccagccgaggtttgagacttgctaccagatcgctcttgcgatcaagaaggaagtcgaggatcctgaggctggtggtattcaggttatccaaatcgacgaggctgcactgagagaagggctgccgcctcgcaaggctgagcatgcattctacttggactgggctgtccactccttcagaattaccaat

SEQ ID NO: 42517 - DNA, 272 bp, Zea mays
gatggcttacgtgatctagtgaggcatacaatgtttgagaagggacagagcaaaagaatctggggtgaactatacaaagttattgactcttcggacgttgttgtgcaggtgttggatgccagggatccaatgggcactcgatgctaccatctagagagacatctaaaagagaactgcaagcacaaacacttggttttcttactaaataagtgtgatctaatccctgcttgggctacaaaaggatggttaaggacactttcgaaggactatcc

SEQ ID NO: 42518 - DNA, 272 bp, Zea mays
ctcgagccgttgcggaggcaggaagagagacgacggcggccatggcgacctccttccaagggacgaccaccaagtgcaccgcctgcgacaagactgtgtaccttgtggacaagctcaccgccgacaaccgcatctaccacaaggcctgcttccgctgccaccactgcaagggcaccctcaagctcgccaactacaactccttcgagggagtgctctactgcaggcctcacttgcgacagctgttcaagaggacagggagcttggacaagagc

SEQ ID NO: 42519 - DNA, 248 bp, Zea mays
ccacaaacaactgctcctcctgcattccccatccgtccgctgcattcctgctctctcgctctcctcgctctcagaccacagttgccgccgccgccgccctaagccagggtgctgaggctttcgttggcctcttcgccggcagcgagcacccaccagcagttctgtagaaatggctgatggtgaggacatccagcctcttgtctgcgacaatggaaccggaatggtcaaggctggttttgcggcgatga

SEQ ID NO: 42520 - DNA, 240 bp, Zea mays
gagccgattcaggtcaggttctgcagaagatggtttcttaaatgtatgggaccatgagaaggttgggaagaagaaaaattctaatgtcccagctgggcttttctttcagcatgctggtcatagggataagatcgtagacttccactggaattcgtcagatccttggacaattgtcagtgtctcagatgatggtgagagcaactggtggaggtggaacactgcagatatggcgaatgagtg

SEQ ID NO: 42521 - DNA, 150 bp, Zea mays
actggtacacaggcccaaccatgcttgaggctcttgaccagatcacagagcacaagaggcattcagacaagcccatgcgtctgcacctccaggatgtgtacaagattggtggtattggaactgtaccggttggtcgtgtggagactggtg

SEQ ID NO: 42522 - DNA, 305 bp, Zea mays
ttcaagtccatggctctcaagtctgcagtggaccttggcatagccgacgccatccacagccacggtagcaacgacaccctgccccagatagtttccagggccgcgctccacccgtccaagatcccctgcctgcgtcgccacatgcgggtgctcacagccgccggcatcttcagcgcagaataccgctcgccggacgacggcggcggcgagctcgtctatggactcacaccggcgtctcagctcttggttggcggctcttcaagcctggctcccttcatgtacctggtgttacacagtctacgtgt

SEQ ID NO: 42523 - DNA, 161 bp, Zea mays
aggtccccgatctccgatcccctcgtcgatccaagatgcagatcttcgtcaagaccctcactggaaagactatcaccctcgacgtggagtcttctgacaccattgacaacgtcaaggccaagatccaggacaaggagggcattcccccggaccagcagcgg

SEQ ID NO: 42524 - DNA, 94 bp, Zea mays
  unsure (1)..(94): unsure at all n locations
ctacagnactggctttggcatgatttatgattccctggattatgcaaagaaaaatgaacccaaacatagacttgcaagagatggcctgtatgcg

SEQ ID NO: 42525 - DNA, 297 bp, Zea mays
agccgatccgagcgcgcagatcgcggaagcccagcggctcagagtccagggggagggagctcgcggcggctgaggaaggcgttcaccaccgtcgcggtgagtgctcccagtcaagcgcctcttccttcgtagtgtcaacaattccgccccgcgcccgcgcggatctgattgtctcgatcgtccaatcgagcggatttcattgaggaagagatggggctctcctttgggaagctgttcagccgcctcttcgccaagaaggagatgaggattctcatggtcgggctcgatgccgcggta

SEQ ID NO: 42526 - DNA, 290 bp, Zea mays
agcggctgacacgcctgggtggtactgtggaccgaacttctacaccatagaagtcctccgcaagtttgccaggtcacagcttgactacatccttggaaagaacccattgaagatgagctacgttgtgggtttcggaaacaagtacccgaagcgccctcaccacagaggtgcgtcgatacctcataacggcgtcaagtatggatgcaaaggagtttacaaatggagggacacgaagaaggcaaaccctaacatccttgttggagcaatggtggctggccctgacaggcgtg

SEQ ID NO: 42527 - DNA, 295 bp, Zea mays
agcccgagcccgacgaagaagggacaccggaaggcgtgcccaccgcctccgtctcccccgacgcccacgcccacgcccacgccgtcctcggacaagtgccccatcgacgcgctgaagctcggcgcctgcgaggacgttctcgggaacgaggtgcacgtcggcgacgccaacgtccagtgctgcccgctcgtgaagggcatcgcagggctctccgcggcggcgtgcctttgcaccgccatcaaggccaaggtgctcgacatctccgtctacgtgcccatcgcgctcgaggtgctgt

SEQ ID NO: 42528 - DNA, 301 bp, Zea mays
ggacagcgtaacggaagcatttttcaaggaatatcgaggataatgtaggtgctgagacacaccaaggaggccccagtgagaatcatggaatccacagtgtatctgcttcatcatatgacgataaggatgcgctgaagagtgtatacacacatgagttccatttctgcgagaaggtgaaggaaaagctggagcatgaagcttaccaagagtttttgaaatgtctacacatctatagccaagagattatcacaagaagtgacctgaagaacttggtgaatgatatactccacattatccagat

SEQ ID NO: 42529 - DNA, 276 bp, Zea mays
ccaccgcgtcatccccgagttcatgtgccagggcggcgacttcacccgcggcaacggcaccggcggcgagtccatctacggcgagaagttccccgacgagaagttcgtgcgcaagcacaccgcccccggtgtgctctccatggccaacgccgggcccaacaccaacggctcccagttcttcatctgaaccgtcgcgaccccttggctcgacggcaggcacgtcgtcttcggccaggtcgtcgagggcatggacgtcgtcaaggcaatcgagaaggt

SEQ ID NO: 42530 - DNA, 300 bp, Zea mays
agcaaatacccacagtccacactccacagcaagaaccgaagatgttcggaaacatcggaaagatcccgatcattggcgacctgacgggcagcaacaagaatgcgcacctcaagggcaacctggtgctcatgcgcaagaccgtgctcggcttcgacgtcaccagcatcgccggctccctcatggacggcctcggcgagttcctcggccgcggcgtcacctgcaaactcgtcagctcacacgtcgtcgaccccaacaacgggaaccgcgggatagtgggtcaggaggcgagccggagcagtg

SEQ ID NO: 42531 - DNA, 274 bp, Zea mays
agactatggcctccttgttagtgagaaggcaaggaaatacgccataatcaaggagcttgatgagccagttaccttgaaggatgggacagtggtcctgcagtatgaagtgagacttcagaatggccttgaatgcggaggtgcctacattaagtacatccgccctcaggatgctggatgggatgccaaggagtttgataatgagactccatacactattatgtttggtccagataagtgtggatcaaccaacaaggttaatttcatccttaagcac

SEQ ID NO: 42532 - DNA, 278 bp, Zea mays
ggagttggaggctttggaaaggtctacaagggggtgatgagggatgagagcaaggttgcagtgaagcgtggaaacccaaagtctcagcaaggtctcaacgagttccgtacagagattgagctcctctcacgtctgcgccaccgccatttggtgtctctgattgggtactgtgatgaaaggaacgaaatgatcctggtctacgagtacatggagaaaggcactctcaagagccatctctatggctccgataaccactcgctcaattggaagcagaggct

SEQ ID NO: 42533 - DNA, 270 bp, Zea mays
ggaaagtgttcgtcctcatggcgccgccgcagccgaagtcgggcctcttcgtgggcatcaacaagggccatgtcgtcaccaagcgcgagctgcctctgcgcccgtaccaccgcaaggggaaagcaacgaagagggtgtacatggtcaggggcctgatcagagaggttgctggctttgctccttatgagaagcgtatcaccgagcttctgaaggttggcaaggacaagcgcgctctgaagcttgccaagagaaagcttggaactcacaaga

SEQ ID NO: 42534 - DNA, 270 bp, Zea mays
ggcgaccccaactacctgcaccgactccctacgctcttctgcatgcctgtgccgcacgacgtctgtgcacaggatatcaccaccacgcacatgctacccacggttctgcgcatggctgcggcaacggttgcaaatgtcacgcttcaatgtggcccagtctctgcagaagatagaggccatcctggacaacagcccattgccgagtgaagtcaagcacatcctagagtagctgacacaggaccaggatgtggacgtcaaatactttgccca

SEQ ID NO: 42535 - DNA, 295 bp, Zea mays
gtgcggctgaggaagccaatgtgtacaatgatttagtgaagtaccttctgatggtaaggcaaaaggcacgggaacctaaagtcgacggagcttaatctttgcatacgctaagattgacagactcagtgacattgaagaattcatacttatgccaaatgttgccaaccttcaaaatgttggtgaccgtctatatgatgaagaactatatgaagctgcaaagatcatatatgctttcatctcaaactgggctaagctggctgttaccctggttaagctgaagcagaccaaggtgctg

SEQ ID NO: 42536 - DNA, 230 bp, Zea mays
cgaacataaaccctagagccgccggcccggtcgcgctagcgcacaaatctcaaatcacccggagagaactcgctcgcgaaggctgaactcatggctcgcgtcttcgttgggaacctggatccgcgtgtcacggcgcgggagattgaggacgagttccgcacgtttggggttctgaagagtgtatgggttgctaggaaaccaccagggtttgccttcattgacttcgatga

SEQ ID NO: 42537 - DNA, 248 bp, Zea mays
cgacagcaccactgctgctgcatctatgagtacggcaagtactgcttcgcctggggctgctgcccgctcgagggcgccacctgctgcgacgaccactacagctgctgcccccatgactaccccgtctgcaacgtcaagcagggaacctgcctcatgggcaaggacagcccactgtcactgtcagtgaaggctacgaagcgcaccctggccaagccgcactgggctttccctggcaacacagctgctga

SEQ ID NO: 42538 - DNA, 235 bp, Zea mays
aggcctctgtccttgcaagttcaatctcacctccaaccatgggtaaagagaagtcccacatcaacattgtggttattggccatgtcgactctggcaagtcgaccaccacaggacaccttatctacaagcttggaggcattgacaagcgtgtgatcgagaggtttgagaaggaggctgctgaaatgaataagcggtccttcaagtacgggtgggtgctcgacaagctcatggctga

SEQ ID NO: 42539 - DNA, 213 bp, Zea mays
gcaccatagcggtggcaagaacaagcgccttacgaaaggcggcaaaaagggagccaagaagaaagtggttgatccattttactaagaaagattggtatgatgtgaaagcacctgctatgttcaatataagagatattggaaagacgctcgtcaccaggacccaaggaaccaaaattgcatctgatggtctcaagggtcgtgtgtttgaagtga

SEQ ID NO: 42540 - DNA, 271 bp, Zea mays
aaccaactttctgtccgtcacctgactcacacctccactcacctccggtccaccaacctctgccggccatggcggctgcggcggcgcagaagctcctcgaggcgagcacgaagatcatcggcgtcgggcgcaactacatcgcccacgccgaggagctcggcaacccgatccccaaggagcccgtactattcctgaagccgacctcgtcgttcctccacgctggcgtggccaccgccgccgtcgagatcccggagccgctcgaatcgctaca

SEQ ID NO: 42541 - DNA, 208 bp, Zea mays
acagagatagcgtcttcgtactcgcctacctccgcggctcaaacctttcccccttctcccaattccctccgtcggccgccgctccatcccgtacgacgacaccatgagggagtgcatttcgatccacatcggccaggccggtatccaggtcggaaacgcgtgctgggagctgtactgccttgagcatggcattcaggctgacggtcag

SEQ ID NO: 42542 - DNA, 195 bp, Zea mays
  unsure (1)..(195): unsure at all n locations
cgcttcttgagccgtcgccgcgaagcntccagagaacttccgtcaacatggggaagacacgtggtatgggagccgggcgcaactcaagacccaccgcaggaaccagcggtgggctgacaaggcatacaagaagagccatttgggcaatgagtggaagaaacccttcgctgggtcatcccatgccaagggcattgt

SEQ ID NO: 42543 - DNA, 270 bp, Zea mays
ctgctccattccagccgccgccaatcccttcccgtgctccgcaaccgctgagtgagaagacgagatggccggcaagggcgatggcccggctatcggcatcgatctcggcacgacgtactcttgcgtcggcgtgtggcagcacgaccgcgtcgagatcattgccaacgaccagggtaaccgcaccacgccctcgtacgtcgccttcaccgactccgagcgcctcatcggagatgcggccaagaaccaggtcgccatgaaccccatcaacac

SEQ ID NO: 42544 - DNA, 215 bp, Zea mays
aggatgctgcgcctctccgaacgcaacatgaaggtgctccttgccgccgccctcatcgcggggtccgtcttcttcctgctgctgccgggaccttctgcggccgatgagaagaagaaggggcccaaagtcaccgtcaaggtgtattttgacctacgaattggagatgaagatgtaggccgggtgatctttggtctcttcggaaagactgttccaaa

SEQ ID NO: 42545 - DNA, 269 bp, Zea mays
tacccggcgcagctcaccaccaccaccaaccaaccaacccacagttcccatataggcagccatcggctacacagcctcgcctccgtaagcagagtgtgtcgttggaagagagacgacggcggccatggcgacctccttccaggggacgaccaccaagtgcaccgcctgcgacaagacggtgtaccttgtggacaagctcaccgccgacaaccgcatctaccacaaggcctgcttccgctgccaccactgcaagggcaccctcaagctcg

SEQ ID NO: 42546 - DNA, 257 bp, Zea mays
  unsure (1)..(257): unsure at all n locations
cgaaatgcagcacctgtgcatcttcctcccgctggtggcggctcccagatgggtcctgtcccagctgcctctccaggactcgagcccaagactggtgaagccttcggagaccctgcccctcagcggctctgcctctggcggctcctttannaggagtagtttctacggtgggtgaatcggtaattccctaggtaagagactgcagtggattcggagtatctattatagtggcacaacttattacactccgtccctca

SEQ ID NO: 42547 - DNA, 247 bp, Zea mays
tagtgacaccctgccaatctacgagcctggtctcgatgatgttgtgaagcagtgcaggggcaggaacctcttcttcagcactgatgttgagaagcacgtcgctgaggctgacattatctttgtctcggtgaacacccccaccaagacccgtgggcttggagctggcaaggctgccgacctcacctactgggagagcgctgcccgcatgattggggatgtctccaagtctgacaagattgttgtggag

SEQ ID NO: 42548 - DNA, 254 bp, Zea mays
ctcaactgtctggcgtgcaagtcggggccgactggacttccatcctcaagaaaagacacgtctacagggaggcgttctccggcttcaacgtggatgcggtcgccaagtacaccgagaagcagatggcgtcgctgagcgccgactacgggctggatttgggcaccgtcagaggaaccgtcaacaacgactgccggattatcgaggtgcggatggacttgggctcgctggacaggtacgtgtgggcgttcgtaaac

SEQ ID NO: 42549 - DNA, 257 bp, Zea mays
ctcgagcccagctttgaccgcctcccctccccagcgctcctgtagctccatacaccacccccccgcaggagcggcgcggcggcggcggcggcaaagccaaaggcaagatgttcgggcgcgcgccgaagaagagcgacaacaccaagtactacgagatcctcggggtgcccaagtcggcgtcccaggacgacctcaagaaggcctaccgcaaggcagctatcaagaaccaccccgacaagggcggtgaccccgagaag

SEQ ID NO: 42550 - DNA, 251 bp, Zea mays
cacatctaggaggcttcttccgctcgctcaggtccctccgcctccgccgtatcggagggagaggaagcggaaggcttggaaggagaagagaatggcggggcggcgcgcggaggaggagtacgactacctgttcaaggtggtgctgatcggggactcgggcgtcggcaagtccaacctcctctcccgcttcacccgcaacgagttctgcctcgagtccaagtccaccatgggcgtcgatttcgcaacaggga

SEQ ID NO: 42551 - DNA, 157 bp, Zea mays
aaagcttacgaaaggcggcaaaaagggagccaagaagaaagtggttgatccattttctaagaaagattggtatgatgtgaaagcacctgctatgttcaatataataaatattggaaagacgctcgtcaccaggacccaaggacccatgattgcatct

SEQ ID NO: 42552 - DNA, 274 bp, Zea mays
acttgtgttgctgcatcttattctaggcatctacgctccgacatccgccacatcagacaatcctcctctgcaggatgtatgccccatggctccccagggcgagcggcgagagttgtccatgaacgggttcctctgcaagcatccgagcaccatcctggcgtccgacttcaagactctgatgctaaaccacgccggagacctggacagcatagctcggtcgtcggtgagcatggtgaccgctgccgagttcccaggcctgaacaccctgggcctg

SEQ ID NO: 42553 - DNA, 270 bp, Zea mays
tgcgtctgaaaggggagagagagagagagaagagagagagaagagagagagagagagaggagtgggagacccgcgagaggctgccgtgtagggaccgtagactcagcgactgcgaaggagggataaggggatggccgggatcggaccgatcaggcaggactgggagccggtcgttgtgcggaagaaggcacccaccgccgccgccaagaaggatgagaaggccgtcaacgccgcgcgccgcgccggtgcggagatcgataccatgaagaa

SEQ ID NO: 42554 - DNA, 153 bp, Zea mays
catctcagccgccgccaatcccttcccgtgctccgcaaccgctgagtgagaagaagagatggccggcaagggcgatggcccggctatcggcatcgatctcggcacgacgtactcttgcgtcggcgtgtagcagcacgaccgcgtcgagatcat

SEQ ID NO: 42555 - DNA, 154 bp, Zea mays
agattgcgggggataaatgagcttagttccgtagcaagagcgctggttcggttgatatagacagcaacagtacccatatttgcactagatactgatgggtgtataaatggttggaatgcaaagattgctgagttgacagggcttccagttgagg

SEQ ID NO: 42556 - DNA, 262 bp, Zea mays
agcttgtatggtaacattgttctcagtggtggcacaaccatgttccctggcatcgctgaccgtatgagcaaggagatcaccgctcttgccccgagcagcatgaaaatcaaggtggtggctccacccgagaggaaatacagtgtctggataggagggtccatccttgcctccctgagcaccttccaacagatgtggatctcaaaggctgagtacgatgagtcaggaccagcgattgttcaccggaagtgcttctaagctcaag

SEQ ID NO: 42557 - DNA, 261 bp, Zea mays
ctcgctccagcgccatgggccctccaggaagttcttcgttgggggaaactggaagatgaacgggcggaacagagtctgggggagctcatcggcactctgaacgcggccaaggtgccggccgacaccgaggtggtttgtgctccccctactgcctatatcgacttcgcccggcagaagctagatcccaagattgctgtggctgcgcagaactgctacaaagtgactaatggggcttttactggggagatcagccctggcatg

SEQ ID NO: 42558 - DNA, 253 bp, Zea mays
ccgcatggcgtctgtgtcgctaagcgaggatgtgaacgtctacatcgtgcatggcgtgcaggcagaccttcgggtggatggccgtggctgtgcggactaccgatgcgttgaagtagcgactgccgtggcgtctaacaccagtgggtctgccagagtcgagctgggtcatacagtcatcttggtgggagtgacagcagagatggggacaccgcagctgcagagacgacgcgcaggctacctctagtcctctgtg

SEQ ID NO: 42559 - DNA, 256 bp, Zea mays
ctcaacccaagtcgtgcctccgctccggtcacccgtcgctccacgcaaccatgtcgaggaggaagaccagggagcccaaggaggagaacgtcacccttggacccactgtccgtgaaggagagtatgtctttggtgttgctcacatctttgcatccttcaatgacaccttcattcatatcactgatttgtctgggagggaaactctggttcggatcaccggtggcatgaaggtgaaggctgaccgtgacgagtcgtc

SEQ ID NO: 42560 - DNA, 258 bp, Zea mays
cgctcgcctctccgccccgcgtccagctcgcccagctcgcccagcgtccgccgcgcctcggccaaggcttcaacggaccacaccaaaatgccatctcaaatggaacacgccatggaaaccatgatgtttacatttcacaaattcgctggggataaaggctacttaacaaaggaggacctgagagtactcatggaaaaggagttccctggatgtttggaaaatcaacaagaccctctgtctgtggacagaataatgaag

SEQ ID NO: 42561 - DNA, 174 bp, Zea mays
ggagtgctcacaccgccgtctcccacggcctgtggctgaacatccctgactatgatgctcccacacagctggtcaagcccaaggagaggaatgagaggtatgttgatgctgtcatgacaatccccaagggaaccttgttccccatgtgtggcatgaaccttgccttcgacaggg

SEQ ID NO: 42562 - DNA, 134 bp, Zea mays
  unsure (1)..(134): unsure at all n locations
gccaatgttgcagacaatggcattgttcttcatcttcctcatgtggtcaaccatgatgaagatgaagaacaatgccagtgtctgcancttggcacctttgacgatgaaattgctatgctcggccttgagaccta

SEQ ID NO: 42563 - DNA, 184 bp, Zea mays
agaaacagcagttcttcagctaggcaggagggcacaggaaggaggagatggcgtcaaagaggattcagaaggagctcaaggatctgcagaaagaccctcccacctcgtgcagtgcaggtcctgttggtgaagacatgttccactggcaggcaacaataatgggtccatctgatagcccatattc

SEQ ID NO: 42564 - DNA, 119 bp, Zea mays
caagcaagctcgatctactactactactagctggtacacatactagccagcctgccagccagcttgcgatggcgcccaccgtgatgatggcctcgtcggcaaccgccgtcgccccgttc

SEQ ID NO: 42565 - DNA, 144 bp, Zea mays
gcaaagatgcacccatgtttgttgttggtgtcaatgaggacaagtacacctccgatgttaacattgtttccaatgctagctgcaccacaaactgccttgctccccttgctaaggtcattcatgacaactttggcattattgagg

SEQ ID NO: 42566 - DNA, 123 bp, Zea mays
gctggctctgatgggacacatcagggcaggaagactatgatcgactgcggcctctctcctacccggacactgatgtcatcctcatgtgcttgtccatcgacagccctgacagcctggaaaaca

SEQ ID NO: 42567 - DNA, 145 bp, Zea mays
gcagcccccaactacccccagcctcggaaggaaccttccagaagcgcaagactctaaggccgtcgccttcccattcttcctcgccgcgggggtcgcctgagatcacatgaacaatggtgaaggctgttgctgtgcttggtagcag

SEQ ID NO: 42568 - DNA, 120 bp, Zea mays
gcaaagcctctgtggaaacctagcattggcattcttgaactgggtatattgacagcacagggcctgttgccaatgaagaccaaggatgggcgtggcacaactgatgcatattgtgttgca

SEQ ID NO: 42569 - DNA, 123 bp, Zea mays
aagaaaactagaaaagcctcctcccgaccgcaacgcccctcatctccctcgaccccgacatccccgacccgatggcgcccaaggcggagaagaagccagcggagaagaagccggcggccgagg

SEQ ID NO: 42570 - DNA, 288 bp, Zea mays
gttaggagtgtccagatggaagggttgctctggggcgcatccaagcttgtcccagttggatatggtatcaagaagctgcaaatcatgatgaccatcgtcgacgaccttgtctctgtcgacactctcattgaggactatctgtgcgctgagccagttaacgagtacgtacagagttgcgacatagttgccttcaacaagatctaggcgtgactttcgatcagtccttcccctggggtgctggcgatggtggtagctgggcaatgcaccagcctaatttatccatagcta

SEQ ID NO: 42571 - DNA, 114 bp, Zea mays
ggcgaggcaaaagcgcaaacaagaccacagacagagcgcgcttcaaggccttttttttttgagataacaaggaggagaggaggagatggcggtcacgatcaccagggtgaaggc

SEQ ID NO: 42572 - DNA, 283 bp, Zea mays
ctttagaaggcagacgatggtggcttggggctgaagatccataccagtgcctggcagtatgcatgaatctcactggagctttaagaagctcgtctccagaaacagcaatctcacatattcctgtgcaaccaggatggctcttgtaatggtctgcaacactatgcggcacttggaaaggataagttgggagccattgctgttaacttagtcgctggagaaaagcctgcagatgtttacaccggaatagctagcagggtgatggaaattatggagatggatgcac

SEQ ID NO: 42573 - DNA, 113 bp, Zea mays
aacgacatacgtttgctaggaagtggtcctcggtgtgatcttggtgaactaatcctaccagaaaatgaccctgggagcagcattatgcctgggaaagttagtccagcccagtg

SEQ ID NO: 42574 - DNA, 280 bp, Zea mays
gatcctcttcgaggagaccctctaccagaagaccaaggatggcaagccttttgtcgatgtactcaaggacggaggcgtcctccctggcatcaaggtcgacaagggcaccattgaggttgttggcaccgacaaggagaccaccacccagggccacgatgacctcggcaagcgctgcgctaagtactacgaggccggtgcccgctttgccaagtggcgtgctgttctcaagattggacccaacgagccgtcacagcttgccattgacctgaatgctcagggt

SEQ ID NO: 42575 - DNA, 280 bp, Zea mays
gcaacgtcgcatcagatggctcatttgtcacgccagaactggcagtatctgactggagctacgccatagagtctgtaggtatcacagaggacaatgcacttacaaaggctggactgatggagcagataaacaccacagcagatgccagtgctttcctctggtactcaacaagcatcacagttaaaggtgatgaaccctatctaaatggcagacactctactctggcagtcaactcacttggacatgttcttcaggtctacatcaatgggaaaattgcagg

SEQ ID NO: 42576 - DNA, 111 bp, Zea mays
atcaatgccccatgatgctcaccccatgggtgttcttgccagtgcaatgagcaccctttctgtctttcatccagatgcaaaccctgctctacaaggtcaagatctttataa

SEQ ID NO: 42577 - DNA, 164 bp, Zea mays
ccagcaccatggcggttggcaagaacaagcgccttacgaaaggcggcaaaaagggagccaagaagaaagtggttgatccattttctaagaaagattggtatgatgtgaaagcacctgctatgttcaatataagaaatattggaaagacgctcgtcaccaggacc

SEQ ID NO: 42578 - DNA, 286 bp, Zea mays
gtcaaggaccccgtctgggacatgaacgtcgtctcctcctacggcccaaactccctcggcgtcgtctacgacagagggctcatcggcgtcaaccacgactggtgtgaggcgttctcgacatatccacgcacctatgacctgttgcatcttgatggcctgttcacagcagagtctcacaggtgcgagatgaagtacgtgctccttgagatggaccgtatccttcgtcccacgggctacgccataatccgggagagcacctacttcctcgattctgtggcacccattg

SEQ ID NO: 42579 - DNA, 164 bp, Zea mays
tttacgcctccagaatacatgaggactggacgtatcactccagaaagtgtcatatacagctttggaaccttgctgattgatgttcttagtgggcagcatattcctccgaaacatgcccttgaactgattcgggaccgaaacttcaatatgctcttagactcatg

SEQ ID NO: 42580 - DNA, 281 bp, Zea mays
cattgatatcactaagatcacaccttcaacaagagttgctcttcggaatgacagttatatgctccatctgatcctaccaagcaaagttgatccattggtcaatctcatgaaagttgagaaggttccggattctacctatgatatgattggaggccttgaccagcaaattaaagagatcaaagaggtcattgagcttccaatcaaacatccggaactgtttgagagccttggaattgcacaaccaaagggtgtccttcttaatggacctccgggcacaggaa

SEQ ID NO: 42581 - DNA, 288 bp, Zea mays
cagatccaccgactcgctctgagtctctgaccgccccttccgtcgtccccgttcgaaggcgcggcaagcgagcgattcagccagattcgattcgacatgaatcccgagtacgactaccttttcaaacttctgcttattggtgattctggtgttgggaaatcatgcttgcttctcagatttgcggatgattcatatttggacagctacatcagcacaattggggttgattttaaaattcggacagtagagcaagatgggaagaccataaaacttcaaatttgggatact

SEQ ID NO: 42582 - DNA, 164 bp, Zea mays
gctcctcccacagtgagatcgatcgagcttccacctcctgtcatcctcctcctcttcctcctcttgcaggtcgcagctgagcagcaacaaggccggaaaggatgtcgtggcagacctacgtcgacgcgcacctcatgtgcgaggtcgagggccaccaccacctc

SEQ ID NO: 42583 - DNA, 187 bp, Zea mays
tatctcctcgcattttccttgcaaccgattgcctatccccctcccaaccaaagaccgatggcgcccaaggccgagaagaagcccgcggcgaagatgccggcggaggaggagcccgcggccgagaagacgaccgccgggaagaagcccaaggcggagaagcgggtccccgcgggcaagtccgccggca

SEQ ID NO: 42584 - DNA, 276 bp, Zea mays
ccgcggcgagttcaaatcccacaatcttcttgtagcacaccactgtcttcgtccaactcggcggcgatgtctgggcgcggcaagggcggcaaggggctgggcaagggcggcgcgaaacgccaccgtaaggttctccgcgacaacatccagggtatcacgaagccggcaatccggaggctggcgaggaggggcggcgtgaagcgtatctccgggcttatctacgaggaaacccgcggcgtgctcaagatcttcctcgagaatgtcatccgcgacgcg

SEQ ID NO: 42585 - DNA, 286 bp, Zea mays
cgctctcgtcgcctcgttcgcttcgcctccgccccgccccgccccgagcagagcgcagccctagtccggagctgggatggcggacgcgaagagacagcagcagcagcagcagcagccacagcaggcggcagcggcatccaccggcgtgtggaagacggtcaagcacttcgttaacggcgcggcctctgggatgctcgcgacctgcgtcatccagcctatcgacatggtcaagatgaggatccacttgggtgagggctctgctggtacagtcacaaggacaatgctt

SEQ ID NO: 42586 - DNA, 253 bp, Zea mays
gcctcagccgcagcccgagttcgactacctcttcaagctactccttatcggcgactccggcgtcggcaagagcaacctcctcctccgcttcaccgtcgactccttcgatgacctctcccctaccataggtgttgacttcaaggtgaagatggttaacattggtggcaaaaaactcaagcttgccatctgggacacacctggacaagagaggtttaggaccttgaccaggtcttactacacaggggcacagggg

SEQ ID NO: 42587 - DNA, 266 bp, Zea mays
gcctaccacaatggcagatccttctccacctttgacaaggacacagattcagccatcaccaactgtgctctgtcctacagaggggctttctggtacaggaactgtcaccgtgtcaacatcctggggagatatggggacaataaccacagtcagggcgttaactggttccactggaagggccacgaacactcaatccagtttgctgagatgaagctgagaccaagcacagcagacatcttgaaggcaggcgcaatcaggcataaatt

SEQ ID NO: 42588 - DNA, 275 bp, Zea mays
cagcacatgcagatttagcaaactctgattctcttcaaatggctctggttgctgatcctgatggttctcgagcaattggtgttatcacaaagttggacataatggacaggggcactgatgcccggaactttctgctgggaaatgtgatccccttaaagcttggctatgttggtgtcgtcaaccgcagccagcaggatatcaactctgacctcagtatcaaggatgctctggctcgtgaagaaaaattcttccgtactcagccagcatatcatggt

SEQ ID NO: 42589 - DNA, 203 bp, Zea mays
cagtcgcctgcgccgccgcttcgttcgtgtggaggggagaagacaggaaatggcggcgactgagggcgtgctcttggggatgggcaaccccctcctcgacatctccgccgtcgtcgatgacgccttcctgacaaagtatgacatcaagctgaacaatgctattctcgctgaggagaagcacttgcctatgtatgacgagttgg

SEQ ID NO: 42590 - DNA, 271 bp, Zea mays
agcagagcggcagccggcaccggacctccaaggagcgcaccgcagaggccagcgaagatgcccgggctcacggcaccgtccgactacgcggaggagccgccgcgtcacccggccctcaagatcaactccaaggagccattcaatgctgagcctcaccgatcagagctagtcgcatcttacatcaccccagtggatttcttctacaagaggaatcatggacccatccctaaagtcgaggacctctcaagatacgctgtatccatttctggtc

SEQ ID NO: 42591 - DNA, 271 bp, Zea mays
cacaaaccaacctcatctcttttctcggcctctaccgccccctcgatcggtcggccggtcagctatgacgccgggaagctcggccgccggatccggcgtcgtcgttcctcggaacttcaggctcctagaagagcttgaacgtggagagaagggcattggagatgggacagtgagctatggaatggatgacgcagatgacatctacatgcgaacatggactggcactattattggccctcataataccgtccatgagggtcgcatctaccag

SEQ ID NO: 42592 - DNA, 122 bp, Zea mays
gttcaaagatggctgctgtaatggctttgactgtcctgcgaagtcggataacgcgatggccgcagtgggcctgcgaggggccggccccgtactgcgcggtcagaaggagcgtctttgggttt

SEQ ID NO: 42593 - DNA, 151 bp, Zea mays
gaaagggaagggaaaggtgaccttgtgctgacaggacagcttggagatgtaatgaaagagagtgctcagattgcgcacacagttggcagaactgtattactggagaaagagccagataatcattgttttgcaaactcgaaggtgcacttgc

SEQ ID NO: 42594 - DNA, 201 bp, Zea mays
  unsure (1)..(201): unsure at all n locations
gcgcgtccgcctcgccaagcgcagggcncgccgcagcacatcgctctcttgatctcagccatggcggaggtggagcagcaacaggacacgccgaagctcttcaaccgctggaccttcgatgatgtccaggtgaacgacatctcgctgaacgactacctcgctgtgaacgcgacgaagcacgcgatgtacctgccgcacacc

SEQ ID NO: 42595 - DNA, 268 bp, Zea mays
ggagcacgacgcacgcagagccgcagagatccgtcacactgcaagttttgaaaactgaactgtaagatggcatcagcagagctttcccgtgaggaaaatgtgtacatggcgaactcgccgagcaggcagagaggtacgaggaaatggttgagttcatggagaaggtagcgaaaactgttgactcggaggagctcactgtggaggagcgcaacctcctgtctgttgcatacaagaacgtcattggaacccgccgtgcctcatggcgcat

SEQ ID NO: 42596 - DNA, 200 bp, Zea mays
gggatctgttcccgctgttaccggaggccttcaagggaatcaaacagatcggtgtaatcggctggggctcgcagggtcctgcgcaactcagaacttgagagactcacttgttgaggcaaagtcagatattgttgttaagattggtctccggaaaggttctaaatcttttgaagaagcccgagcagcaggattcaccgaag

SEQ ID NO: 42597 - DNA, 199 bp, Zea mays
ctcggcacatggttacagcacgagcgctcagacccgaccctgtttgagatgacgcatgggctcactgcctgggacctgaatgaccacaagccagccttcggcgagctcttcaaccaaggtatggtctgcgacagcagcttcgtcatggacattgtcgtcaaggagtgcggcgacgtcttccggggtctgagctcccttg

SEQ ID NO: 42598 - DNA, 193 bp, Zea mays
gatacacacacacacacaaaccccaatcccctgcggcggcgatggacccgtcatcggcgggctccggcggcaactccctcccgtccgtcggccccgacgggcagaagcggcgcgtgtgctacttctacgacccggatgtgggcaactactactacgggcagggccatccgatgaagccgcaccgcatccggat

SEQ ID NO: 42599 - DNA, 221 bp, Zea mays
agcagctgtagctggcggtggcgcagacctgctgaagaggcaaagaaggaagaaaaggttgaagagaaggaagagtctgatgaagatatgggtttcagcttgttcgattaaaacagcactaccagtttacagtttcttcgcgaatggtctcataatattggccggtttccacaaaataagattgtcaatagctactacgtacttatgctattctgcatgtg

SEQ ID NO: 42600 - DNA, 250 bp, Zea mays
atcttcgaagatttggaaggtttgatcgggaaattgacattggagttactgatgaagttggccgtctcgaggttatccgcattcacactaagaacatgaaactagctgaagatgttaatttggaactcatttcaaaagatacccatggatatattggtgctgatcttgctgccctttgcaactgaggctgctcttcagtgcattcgtgagaagatggacatcatagatcttgaggaagagacaatcgatg

SEQ ID NO: 42601 - DNA, 307 bp, Zea mays
agactttatggaagtaaatacaaaggcatatggatctcactgactgttctttcaagggctttgtgtgggaattatgtcaattttggcgtatttgagctctatggtgacagagcacttgctgatgcccttgatatgtctctgaagatgaccctctcagttccattatctgatatattggcattcaaaaagctgtcgaaagcgtactttgggtatatggaagttctgttcaacaaccatatcaagtctgttctcaagttggacacaaacacattcatacatattgtcagctcactcgaatctggcttaa

SEQ ID NO: 42602 - DNA, 243 bp, Zea mays
gcacaccagtgtggtataacatggtgaaacaaggtctcatcagcgaccctgttttatctttctggtttaaccgacatgctgatgaaggagaaggtggtgaaattgtgtttggtggaatggattctagccactaaaagggtgatcacacgtttgtcaccgtcactcggaagggatactggcagttcaacatgggtgatgtcctggttgatggaaagtacactgggttttgtgcaggtggctgtg

SEQ ID NO: 42603 - DNA, 302 bp, Zea mays
gtaaccccgtttccacaacgtcaccgcaccgccgtcatgccgaccgtaagcgtgaaatggcagaaggagctctttccaggcatagagattgacactagccagactccgattgttttcaagactcagttgtacacactaactggtgtgccacctgaacgccagaaaattatggtgaagggaggaatattgaaggacgatgcagattggtctactttgggagtgaaagatggccaaaagttgatgatgataggcacggctgatgagattgtgaaagctccggagaaaggtccagtgtttgttga

SEQ ID NO: 42604 - DNA, 302 bp, Zea mays
cacagactcagagagaacccaccatggtgctgtctcctgccgacaagaccaacgtcaaggccgcctggggtaaggtcggcgcgcacgctggcgagtatggtgcggaggccctggagaggatgttcctgtccttccccaccaccaagacctacttcccgcacttcgacctgagccacggctctgcccaggttaagggccacggcaagaaggtggccgacgcgctgaccaacgccgtggcgcacgtggacgacatgcccaacgcgctgtccgcactgagcgacctgcacgcgcacaagcttcgg

SEQ ID NO: 42605 - DNA, 126 bp, Zea mays
gtgagtcttgctgacttgcagaatgatgaagttgcattcagaaaattcaagctgattactgaagatgttcagggtaaaaactgcctgactcacttccatggcatggatcttacccgtgacaaaatg

SEQ ID NO: 42606 - DNA, 295 bp, Zea mays
ggcgaacgcggagagcacgccatgaaggcctcgggcacgctacgagagtacaaggtagtgggtcgctgcctgcacacccccaaatgccacacgccgcccctctaccgcatgcgaatctttgcgcctaatcatgtcgtcgccaagtcccgcttctggtactttgtatctcagttaaagaagatgaagaagtcttcaggggagattgtctactgtgggcaggtgtttgagaagtcccccctgcgggtgaagaacttcgggatctggctgcgctatgactcccggagcggcacccaca

SEQ ID NO: 42607 - DNA, 223 bp, Zea mays
gctacaagggcatacttgtgctcgtataaaattgagaaagacatcaaatgatctgtacatcttgatcaactttgcagaatctgaatgaacatactgatgcttggccattcaaagagcctgtggattcacgggatgttccagactattatgatatcatcaaagatcctattgatttaagacaatgttaagaagagtcgctcggaacaatattatgtgacctaga

SEQ ID NO: 42608 - DNA, 225 bp, Zea mays
agaggccagaacgacatcttctacatcactggtgagagcaagaaggctgtggagaactccccgttccttgagaagctgaagaagaggggctatgaggtgctgttcatggtggatgccattgacgagtattctattggacagctgaaggagtttgagggcaagaagctcgtctctgccaccaaggagggcctgaagctggacgagagtgaggatgagaagaagcgc

SEQ ID NO: 42609 - DNA, 182 bp, Zea mays
atgcaccctgttcaacgtggtaggacagcaactgcaatttccagagtcgccgtcaacaagctactcgagcagagacctcatccgtaggctcttggtcaaggagcagcagagccgcctgggcgtgaagcggggagcgacagagataaagcagcatgcattcttcgagggtgtgaactgggctc

SEQ ID NO: 42610 - DNA, 214 bp, Zea mays
tgcgaagtcgtcgccggagcaggaggaagatcgagcagcaagatgtcgtggcaggcgtacgtcgatgaccaactgctgtgcgacatcgaaggccagcacctcagcgcagccgccatcgtcggcacatacggcagcatctgggcacagtccgagaacttccccgagttagagcctgaggaggttgctgcggatgatacaggactttgatgaacct

SEQ ID NO: 42611 - DNA, 220 bp, Zea mays
cgcccacacgaactcgagacctcgcccgcccaaatacgaaagcctcagatctcagtgaccagcgccgccgcttcgttcgtgtcgaggggagaagaggaaatggcggcgagcgagggcgtgctcctggggatgggcaaccccctcctcgacatctccgcagttgtcgatgacgccttcctagcaaagtatgacatcaagctgaacaatgccattctcgctg

SEQ ID NO: 42612 - DNA, 294 bp, Zea mays
cacacagaagcggcggcggcggagcaaacgcaggcgaaggcgagggtgtgagggaaggagcaccagccatggtgcacgtcaacttctaccgcaactatggtaagacgttcaagaaaccaaggcgtccttatgagaaggagcgtcttgatgctgaactgaagctggttggtgagtatgagctgaggtgcaagcgtgagctttggagggtccagtatgcactgagcaggatccgtaatgctgcaaggcacttgctcacccttgacgagaagacccccgtcgtatctttgagggtga

SEQ ID NO: 42613 - DNA, 297 bp, Zea mays
gctgctgtgaactggatcgatggccgtgggaagtcggtggtttgcgaggcggtaatcaaggaagaagttgtgaaaaaggttctcaagacaaacgtacaggctctcgtagaattgaacgtgatcaagaaccttgccggttcagctgttgctggagctcttgggggtttcaatgcccatgcaagtaacattgtggcagccatcttcattgctactggtcaggaccctgaacagagcgtggacacttcacagtgcatcaccatgttggaagctataaatgatggcaaacatctccacatc

SEQ ID NO: 42614 - DNA, 300 bp, Zea mays
accgagcacacactcgagaactccatttcgatcccatttgaaatcaacccatcatcgtttcctacgtctagaagcctctcaccctcatggccaagatcaagatcgggatcaatgggtttggcaggatcggaaggctggtggccagggtggccctgcagagcgacgacgtcgagctcgtcgccgtgaacgaccccttcatcagcaccgattacatgacctacatgttcaagtatgacactgtgcaaggacagtggaagcaccatgaggtcaaggtgaaggactccaagactcttctctttg

SEQ ID NO: 42615 - DNA, 260 bp, Zea mays
aattggaggaaggaattcggagtcgacaaaatagaggaatttgactacaccgagttagatgaagtgacagagtattacccacaattttatcatggagtagataaagagggaagacctgtctacatagaattagtaggaaaagttgatgcaaacaagctaatacaagtgacaaccctagataggtatgtacaatcacatgtcaaagaatttgagaagtgattccagatgaaatttccagcttgcaccattgctgctaaaaa

SEQ ID NO: 42616 - DNA, 150 bp, Zea mays
gaagagttggatgaccataaaattcaggtgactcctccaggcttccagctggtctttttaccctttgatgatgagagaaggaagatgccctttactggaaaaatcatggcaaatcgagagcaggtgggcaagatgagggctatcgttgag

SEQ ID NO: 42617 - DNA, 172 bp, Zea mays
cgctcacgcaagcatggttaacgtccctaaaacccgccggactttctgtaagaagtgtggcaagcaccaaacccataaagtgacacagtacaagaagggcaaggattctctgtacgcccagggaaagcggcgttatgacaggaagcagagtggctatggtgggcaaactaag

SEQ ID NO: 42618 - DNA, 295 bp, Zea mays
gcaaggaagatgaaggacaccgactccgaggaggagcttaaggaggcctttagcgtcttcgacaaggaccagaatggtttcatctcggctgctgagctccgccatgtcatgaccaacctcggcgagaagctgactgacgaggaggtcgacgagatgatccgtgaggccgatgttgacggcgacggccagatcaactacgaggagttcgtcaaggtcatgatggccaagtgaagagccgtcaccgttatctatgaattgaagttaaatatcaggcacacagctgtactttgccatg

SEQ ID NO: 42619 - DNA, 280 bp, Zea mays
cgggcagtgaggaggaggatatggatgcacttttgaacaacagcctgcccccaccccacccagaaaatgaagaggacccagaagaggatttgtcagaaacagagactccaaagctcaagaagaagaaaaagcctaagaaacctcgggaccctaaaatacctaagagcaagcgccaaaaaaaggagcgtatgctcttatgccggcagctgggggacagctctggggaggggccagagtttgtggaggaggaggaagaggtggctctgcgctcagacagtga

SEQ ID NO: 42620 - DNA, 207 bp, Zea mays
ataatagtcaccgtatgtgtcactattgtgggtacttatttcttgttgaatgctgagaactatcattggcaatggacatcattcttctctgctgcttctaccgccttgtatgtgtatctatactctatatactattatcatgtgaagacaaagatgtcaggatttttccagacaagcttctactttggttacaccttgatgttctgt

SEQ ID NO: 42621 - DNA, 234 bp, Zea mays
ggagaacacgctattggatggcagcccggcgccgcggctaaagatctgcgactttggctactctaagtcatcgctgctgcattcaaagcctaaatccaccgttggaactccggcgtacatagctccggaggtgctctcccgccgggaatatgacggcaagatggcagacgtttggtcttgtggagtgactctttacgtgatgctggtcggtgtgtaccctttcgaggaccccga

SEQ ID NO: 42622 - DNA, 266 bp, Zea mays
ctgaaaatcagctcgaagtttgaactaagaaggttctgccgtactactggggctgttgcaattttgaaacttagccaacccaatgcggacgaactaggatacgcagattctgtttctgtagaagaaattggtggtactcgggttactgtcgtcaagaacgaatatggtgaatatacagtgactactgttgtcctgagaggcagtactgccatattccaagttgatcttgaaagagctgttgatgatggcgtcaatacatacaggtc

SEQ ID NO: 42623 - DNA, 268 bp, Zea mays
agaatgggcgccccaccaccgagggtgaggtaaccgggctacttatcgcagcgctctttgctggacagcataccagctcaatcacctcaacctggactggagcgtacatgcttcgcttcaagcagtactttgcagaagccgtagaggagcagaaggatatcatgagacggcatggcgacaagatcgatcatgacatcctggcagagatggatgtcctctaccggtgcatcaaggaggcccttcgtctccacccgccgctgattatgtt

SEQ ID NO: 42624 - DNA, 267 bp, Zea mays
ggcgagggcaggcggtggtcgcgatggcgtccgccgacgcgcgcttggcggggattgcctcctccatccgcgtcatccccgacttccccaagccagggatcatgttccaggacatcacgacactgctgctcgaccccaaggcgttccgtgacaccatcgacctcttcgttgagcggtacaaggaccaagggatcaccgtagttgctggtgtggaagctagagggttcatttttggtcctcctatcgctctagccatcggtgctaaat

SEQ ID NO: 42625 - DNA, 267 bp, Zea mays
cgaacaactgcggcatgcttcattacacctcaggcggccagttcaagatcccggtcgtgatccgaggccccggcggtgtcggtcgccagctcggtgccgagcactcgcagcggctagagtcgtacttccagtcgattcctggccttcagatggttgcctgctccactccttacaacgcaaagggcctgatgaaggcggccataaggaccgagaaccccgtggtgctgtttgagcacgtcctcttgtacaacctgaaggagaaaatcc

SEQ ID NO: 42626 - DNA, 267 bp, Zea mays
gaagtaccagaggaaacttggtcacagacagccaaacacaaggttaagaatcacaggcataagtggatacgaagagtaccctgctgacccaatacttgaccctgctgcagctttaaattaaactgtaagttatgtagttacaaaacggctggtagtagagtagcatgctagttttcttgtttctttctttacttactgctctgtcttgaaaaaggatcacttttcatcacaattttccttgtttttgtgtgttccaaatgctgccag

SEQ ID NO: 42627 - DNA, 267 bp, Zea mays
caaggacattattgttgcgaatataacattgaggaactcacctttctggcacttgcatccttatgattgcacaaatgtgactgtttcgaatgttactatcatgtctactgtttctggtgctccaaacacagatggcatagatccagattcttgtcaggatgtgcttattgagaattgctacatatcggttggcgatgatgcaatagctataaagagtggttgggatcagtatggtattgcatacggtcgtccatcttctgacatttt

SEQ ID NO: 42628 - DNA, 226 bp, Zea mays
attgctgctgggtgctggccgttgcgggcgaaccgaaaatcacgggcgcgagagatcggagcacggcatgtcggaggagcagttcctcgccgtggcggtggaagccgccaagagcgccggcgagattattcgcaagggattctaccagaccaagaacgtcgagcacaagggccaggtggatttggtgacggagacggacaaggcctgcgaggtcctcatcttcaac

SEQ ID NO: 42629 - DNA, 262 bp, Zea mays
ccgacattcacgtgcagctgtcgggagcaggcaatggcgccggatctaagcgaactcgccgccgccgctccagcccgtggcgcctacctcgccggcgtcggtgtcgcggtcctcctcgctgcctccttcctcccagtagccgagtcgtcctgcgtgcgagataactcattggtgagagacataagccaaatgccgcaaagcagctatgggattgaaggtttgtcacttataccattggctggtgcgctcattcatgggatga

SEQ ID NO: 42630 - DNA, 248 bp, Zea mays
ggagtcattgtatttcatggagacctctgcactcgagtcgactaacgttgaaaatgcattcgcagaggtcttaactcacgatctaccgtattgtgagcaagagagcagttgaagctggcgaagatgcagcatctgggcctggcaagggcgagaagattaacataaaggatgatgtttcggcggtgaagaagggtggctgctgctctagctgacctgccctgctgaatttttttgggacctgtggtgat

SEQ ID NO: 42631 - DNA, 263 bp, Zea mays
ggtcatgcttcgtgttggtgaccttgagcgttctatcaagttttatgagaaggccctagggatgaagctcctaaggaagaaggatgtacctgattacaagtataccattgccatgttgggctatgctgatgaggacaagacaactgttctggagctgacgtacaactatggagtcacggattacagcaagggcaatgcatatgctcaggttgccattggcaccaatgatgtgtacaagagcgccgaggcggttgatctggcga

SEQ ID NO: 42632 - DNA, 261 bp, Zea mays
ccgatctcttcggtgctagagaaatataggccgccgcctcctcctcattcggtgaaaggtgggcggttagggttgggagatctcttgactcacgacacgagcagcagaattcgtcgagggccgctggttgctgcgagaggtccgggccttcgtgggatcttgaaaattgaatgttctaatggagtccacgggtggcaagaagaagtctagcagtagtcgttcctccctgatgtacgaagctccccttggctacagcatcga

SEQ ID NO: 42633 - DNA, 157 bp, Zea mays
accgccgccgcgccgccatcatggacaccagccgtgtgcagcctatcaagctggccagggtcaccaaggtcctgggcaggaccggttctcagggacagtgcacgcaggtgcgcgtggacttcatggactaagacaaccgatccagcatccggaatgt

SEQ ID NO: 42634 - DNA, 254 bp, Zea mays
cataaccacaacctcttctcccctgtttcctctcgtgcgttctccgcaggacgaggagggctcgcggcagcggcagggtctccggtgtttttgttccagaatctgtagcaaatggctgacggcgaggacatccagcccctatgtttgtgacaatggtactggcatggtcaaggctggttttgctggtgacgatgcgacaagggctgttttcccaagcattgttggacgcccacgtcacactggcgtgatggttg

SEQ ID NO: 42635 - DNA, 246 bp, Zea mays
cttggataatagcttgtgcaggttgccagcaacccctcaggcccttttggaggctgtgggttctaacggcgtgacaggatcagaagcacttgcagctgcagagaaacatgcagctttgttgactgcaagagctggtgccagagatccatctgctgtgccgtctatatgccgcatctctgctgctcttcagtataactttgtttcaccaggtacagaaggcacagattctggcttggcttcagtatt

SEQ ID NO: 42636 - DNA, 239 bp, Zea mays
ctcttccgccccaccccggtgaggcgctgatccatcgcctcggaaggcggctccagaacctccgcgttgccgtaacacagtagcgagaactattcggtggggccgaagatggtgtcgccgaaggtgccaaagcgactcgccgcaagcgttctcaagtgtgggaaaggcaaagtgtggcttgaccccaatgaagttagtgagatctccatggcgaactcccgccataacatccggaagtt

SEQ ID NO: 42637 - DNA, 112 bp, Zea mays
gtccatttgatttgcgttcactgcgttgcgtttccttggaggggattgttctctcctctccatgggattggaggtccctccttcttctcctctctctctcagatgaacgcct

SEQ ID NO: 42638 - DNA, 249 bp, Zea mays
gtctgacaagatcgttgtcgagaagtccaccgtccctgtcaagaccgctgaggctattgagaagatcttgacccacaacagcaagggcatcaactaccagatcctttccaacccggagttccttgcagagggcactgctattgaggacctgttcaagcctgacagagtgctcatcggtggccgggagacccccgagggcaggaaagccgtccaggctctcaaggatgtgtatgctcactgggttcccga

SEQ ID NO: 42639 - DNA, 214 bp, Zea mays
gaccgtcacaacccacgacggcagatccttcacttgcactcttcgcttggacacacagcttgaggtcacatacttcaaccatggaggcatccttccctacatggtccgcaacctggcagcacagatgaaataagttaaaaagcaagctagcttattggcgcggtgggaataaattaaaaaggtactcagtgcaccacgtatttgacgtatgtct

SEQ ID NO: 42640 - DNA, 285 bp, Zea mays
cggggagagattggagggaggcccctgcccaaggcaagagaaaccgcggcgcgcggagagggaggaagggcagacgcagacgggcgaacaagatgagggagatcatcagcatccacatcggccaggccgggatccaggtcggcaacgcctgctgggagctctactgcctcgagcacggcatcgagcacgatggcaccatgcccagtgattcctcggttggcgtcgcacatgatgccttcaacacgttcttcagcgagactggttccggcaagcatgtgcccaggg

SEQ ID NO: 42641 - DNA, 125 bp, Zea mays
cggatattctgttggaaaatctctcgtggaagaggataaacttgagctcgcaacttctcttattgagcaggcgaaggcaaagggggtttctcttttgcttcccactgatattgtagtagcggaca

SEQ ID NO: 42642 - DNA, 263 bp, Zea mays
gggagcatagatctgaatgggccgattacaatattgatgtgtatttggcttcatcactgaagaccagtgcgtgctcacttcctgggttgcgacccatgagattttctggggggcagatgatcatgccacttgctcacacagtggagaacgaggagattcttgaagttgtccgccttgaaggacaacctcttactcatgatgaagcccttctttcaagggacatccaccttctccagcgttgcactggaatagatgagaaatct

SEQ ID NO: 42643 - DNA, 111 bp, Zea mays
gagctgtgcaagaacatcaatcctgatgaggccgttgcctatggtgctgccgtccaggccgctatcctcagtggtgagggcaacgagaaggtgcaggacctgcttctgctt

SEQ ID NO: 42644 - DNA, 98 bp, Zea mays
agatagttctgtctcggctagctattggtgatcttggaacacagtattttgcagatcgagacattttctgtgctggccgtgtcactgaagaagatttg

SEQ ID NO: 42645 - DNA, 222 bp, Zea mays
cggatcccaatcgcacagtggtgaacccctacgtgcacttcggccagcggtcggtctggccaagggggctgccgctcgataaggttagggaggtcgcccatgaggtgttctacaccgaggtcttcagtggccggcaattcattcagcaggggctgtcggacgggttgccagatgtagatgcggtgttctacttcactagaaaaccaccaatttcggcgttcg

SEQ ID NO: 42646 - DNA, 87 bp, Zea mays
gccatggcggcggccgccgactcgctggactacatcatcgacacggtgcacgtgcaccacccgctggagccgtacctggcgctgctg

SEQ ID NO: 42647 - DNA, 232 bp, Zea mays
gcttccagagctccccgccgccgctgcgccctcctctcggtcctgccgtccgtcgaggtaaaaggacagcatggtgagggtcagcgtgctcaatgatgctctcaagtccatgtacaatgctgaaaagatagggaaacgtcaggtcatgatcaggccgtcatccaaggtgatcatcaagttcctgacggtcatgcagcgccatggctacattggcgagttcgagtacgtggat

SEQ ID NO: 42648 - DNA, 216 bp, Zea mays
ccgccaccggcgagggcgagtacgagaggtacaagaaggaggagaaggagcacaagcacaagcagcacctcggcgaggccggcgccatcgccgccggcgccttcgcactctacgagaagcacgaggcgaagaaggaccccgagcacgcgcacagggccaagatcacggaggaggtcgctgccgcggcggccgtcggcgccggcggctacgtattcc

SEQ ID NO: 42649 - DNA, 279 bp, Zea mays
acgcagacgggcgaacaagatgagggagatcatcagcatccacatcggccaggccgggatccaggtcggcaacgcctgctgggagctctactgcctcgagcacggcatcgagcacgatggcaccatgcccagtgattcctcggttggcgtcgcacatgatgccttcaacacgttcttcagcgagactggttccggcaagcatgtgcccagggccatcttcgtcgaccttgagcccactgtcatcgacgaggttcgcactggctcgtaccgccagctctt

SEQ ID NO: 42650 - DNA, 281 bp, Zea mays
  unsure (1)..(281): unsure at all n locations
cctcactgccctctcactcccgatccctgcaccactaccgcctcctccgcgtcacccctctcgtcgcctcttgcggcgaccggcggcggatcgtccgcagcgcaagcgcaaccatggggctcttcaccgtgacgaagaaggccaccacccccttcgaaggccagaagcccggtacctccggcctccgcaagaaggttactgtattccagcagcctcattatctgcagaactttgtccagtcaacattcaatgcccttcctgcagaccaagtanaaggtgca

SEQ ID NO: 42651 - DNA, 264 bp, Zea mays
ttctgatcatgcaatagttgggatcttttactttgtcggatttgccttgttttgcttggagacacttgtgagcatatgggttcttcagaaagtatacatgtacttcagagggcacaagtaggctatggaagcacttgcaatagtcaaccaactaccatctcatctgattgccatgtggttttgtatgttaggacaacgtatcgttttccgtttgcattgtggagggtaagtacgactatatgtataattttcggtttgcatggt

SEQ ID NO: 42652 - DNA, 167 bp, Zea mays
cggagttccttgcagagggcactgctattgaggacctgttcaagcctgacagagtgctcatcggtggccgggagacccccgagggcaggaaagccgtccaggctctcaaggatgtgtatgctcactgggttcccgaggacaggatcctcaccaccagcctgtggtcc

SEQ ID NO: 42653 - DNA, 277 bp, Zea mays
agcagccttatctatcccctcagctctgcagctcagtgtccagcaccgccgcctccttccagctgggtggaagaaacatgtcgcgaatggcgcccccgtctccgcctcagtccctgaagcccccgacgctgcccttctccccgcccaaaaagccaccgccgatgccggtgtacaaggacctagctattcaaccgcgacctatccgccaccaagaagctccaggccggtctggacctggtggcacggttgttgggggtcacctggggcccaaggggag

SEQ ID NO: 42654 - DNA, 275 bp, Zea mays
agcttcgagtttttttttcttccttttggcttactgcgcaagaagaagggtaacaagaggacggcggcgatggcgaagaggctgctcccatctctgaaccgggtgctggttgagaagctggtgcagcccaagaagaccgccggcggcatcctcctcccggaaacatccaagcagctgaatgctgctaaagtggtggctgttggccctggtgagcgcgacaaggcaggcaatctgatcccagttgctctgaaggaaggtgacactgttctcctgcc

SEQ ID NO: 42655 - DNA, 273 bp, Zea mays
cacatttcctttgcttgttttgggaggtattgctggcaaaaacagcaaaagtgaattccaagctccttgccgtaccacaaaataccccagggagattcctccacttccgtggtaccggagaactattccacagatggctatggccgggtttttgcctttcagtgccatatacatcgagctgtactacatctttgctagtgtttggggccacaggatttacacaatctacagcattctgtttattgtctttatcatcctccttattgtcactgc

SEQ ID NO: 42656 - DNA, 241 bp, Zea mays
gtaatgggtggcattgctgattattcagggagtcttgttttgcagatgcctcttcgggaagcttgccatgttgctgttcagagaaaccatcccagcaagcagaagctttggaaacatacaaaagcaagacagcttgttaacggaggcttggtacctgtgatacaaattgtatcatttggttctgatttgagtaaccgtgcaccaactttcgatatggacctgtcagattttatggatgatg

SEQ ID NO: 42657 - DNA, 222 bp, Zea mays
gtctttccaacaaccattggtaataacgtcacagtaggtcatagtgctgtgttacaaggatgcacggttgaggatgaggcttttgttggcattggggcaaccctattagatggtgttgttgttgaaaagcacggaatggtggctgctggagccctcgtacggcagaatactaggatcccttgtggagaggtatggggagggaacctgccaatttctgaggaa

SEQ ID NO: 42658 - DNA, 170 bp, Zea mays
cccagatcatgcctggcaagtcgtgacgatggactttatttctgggctgcctgtgtcccacaagtacaattgtatcatggttgtggtggataagttttcgaagtatgcacatttcctagcactagctcatccgttcacagctttaaccgtagctaggctttatctgtcag

SEQ ID NO: 42659 - DNA, 286 bp, Zea mays
ctgtggagtctgctaaagcttatgggaatgacaatttcaagaaacaggactacaaggcagctctcagaaagtacaggaaagctctgcgctacttggatctttgctgggagaaagaagagatagatgaagataagagcacagcactgcggaagaccaagtcaataatactcactaatagctccgcatgcaaattaaagttaggagattcaagtggggctttattagacgcagattttgcactgcgtgaaagggagggaaatgctaaagcttttttccgacaaggaca

SEQ ID NO: 42660 - DNA, 275 bp, Zea mays
cattgagcgcccaacctacaccaacctcaacaggcttgtctcccagatcatctcatccctgacggcttccctgaggttcgatggtgctctgaacgttgatgtgaacgagttccagaccaacctggtgccctacccgaggatccacttcatgctttcgtcctacgctccagtcatttctgctgagaaggcctaccacgagcagctgtccgtggccgaaatcaccaacagcgccttcgagccatcctccatgatggccaagtgcgacccccgcaatg

SEQ ID NO: 42661 - DNA, 275 bp, Zea mays
ccgcaacctcgtcgccaccgtcgtcatggcccccttcgccctcctcttcgagaggcgagtgaggcccaagatgacgccgctcatcttcctcaagatcatggggctcgccgtgctcgagcctgtgctcgaccagaacatgtactacctcggcgcgaactagacgtccgcgaccttcgcctcggcgctggtcaacatcctccccgccatcacgttcctgctggccctcgccctgaggatggagaggctgaggctccggagcctccgcagccaggcca

SEQ ID NO: 42662 - DNA, 201 bp, Zea mays
aaataaggtggatccaagactagcagttgaacagaatggacaaaatgctgatgcaacaacaaatggtgcttctgcaacaacacttgaagctacacagcctgttagtccatggggtgatgttgatcatctccttgatggatatgatgaccagcaaaaggctctgatacagaaggaaagggcaagacgaataacagaacaaca

SEQ ID NO: 42663 - DNA, 118 bp, Zea mays
caagatcatcgcgcacatcatcaccttctcgttctactgcgtcatcatcccggcaaccatcttcgtccccgaggtccgcatacccaagtggggctgcgtctacatcccctcggcaata

SEQ ID NO: 42664 - DNA, 269 bp, Zea mays
gcaaggccaatccgaaatctcgagctttcgcgccggcgaccacagcaaagaggaggccacagcacgacagcgccccagggttcctactctcgtcgcagcggcagcagtgaggggaagatgtcgtcggtgttcagcggcgatgagaccgcccccttcttcggcttccttggcgccgccgccgctctcgttttctcatgcatgggggcggcgtacgggacggccaagagtggcgtcggcgtggcgtccatgggtgtcatgcgcccagagct

SEQ ID NO: 42665 - DNA, 270 bp, Zea mays
ggatctgattatcttggcaagggtgttcttaaggctgtcagcaacgtaaacaacattattggaccagcgattgttggaaaggaccccactgagcaggttgagattgacaacttcatggtccaacagcttgatggaacctccaatgagtggggctggtgcaaacagaagcttggagcaaatgccatccttgcggtttcacttgctgtgtgcaaagctggagctatggtgaagaagattcctctttaccagcacatcgcaaatcttcatggg

SEQ ID NO: 42666 - DNA, 272 bp, Zea mays
agaatctgagactaaggttagattatcaatcaagggaaccattgttactctttcattgatgactggctttctgtggtatgaatacatatacaagctagacaaagttacatacaacaagtaccatccctacacgtcatggatccctataactgtttatatctgcctgcgcaattgctcccagcagttgaggagtgcctctttggtccttttcgcatggcttggcaagattacactagagacttatatctctcagatccatatttggcttaggt

SEQ ID NO: 42667 - DNA, 212 bp, Zea mays
atccaatctagaagctcccctctccctccctccctctctctctctctcttcgccgtccgaagctccgcacccaatctaatcgacacctcaccgagatgggccgcaagttcttcgtcggtggcaactggaaatgcaatggaaccacagatcaggtcgagaagattgtcaaaaccctgaatgaaggacaggttcccccttcagatgttgtcgag

SEQ ID NO: 42668 - DNA, 279 bp, Zea mays
tggaattcattgaaaggacggccagttctgggtcgtatataccaagggaaggagccaccacagtttgttgctcttttccagcccatgattatcttgaagggtggaattggatctggattcaagaagctcatagaagaaaagggtgcgacgggtgagacttatactactgaaggcatagctctaattcgagtatctgggacatctatccacaacaacaagactcttcaagtcgatacggtggcaacgtctttaagctcaatggagtgtttcatactgcaa

SEQ ID NO: 42669 - DNA, 279 bp, Zea mays
aaacgctgttgtatattactctacatcggtgttccgtagtgcaggcattgcatctgatgttgctgctagtgctcttgttggagcagccaatgtttttggtactatggttgcatcttctctaatggacaaacaaggaaggaaaagccttctgataacaagcttttctggaatgggtgcttcaatgctactcctagcattgtccttcacctggaaagctctggcaccttattctggtactcttgctgttgttggcactgttctgtacgtgctgtcatttgc

SEQ ID NO: 42670 - DNA, 266 bp, Zea mays
tgttcgagcgcacctcaaagggtggaagtttctctttctaaacgatgtcgagtgtcagtgtgaattgccagaatcgtatgaagcgtacagaaagcagcagcaccggtggcactcaggtcccatgcaattgtttaggctctgctttgtggacataatcaaatctaagatcggtttctggaagaagttcaacctgttattcctcttcttcctgctccggaagctgatactacccttctactccttcaccctcttctgcgtcatcctcc

SEQ ID NO: 42671 - DNA, 271 bp, Zea mays
gaaacacacagaagcgaggagcactacttgttggttggattctcttcagtctagcagctagtccagttaagtttcagacacacatggggagcattggcagaggcacggccaactgcgcccacgtgccgcagccgccgccgtcgacagggaagctcatcacgatcctgagcatcgatggcggcggcatccgcggccttatcccggcgaccatcattgcgtacctcgaggccaagctccaggagctggacggtccggacgctcggatcgccga

SEQ ID NO: 42672 - DNA, 267 bp, Zea mays
ccgccaccggcgagggcgagtacgagaggtacaagaaggaggagaaggagcacaagcacaagcagcacctcggcgatgccggcgccatcggcgccggcgccttcgcactctacgagaagcacgaggcgaagaaggaccccgagcacgcgcacaggcacaagatcacggaggaggtcgctgccgcggcggccgtcggcgccggcggctacgtattccacgagcaccacgagaagaagaaggaccacaaggacgccgaggaggccagcg

SEQ ID NO: 42673 - DNA, 266 bp, Zea mays
atctccttttttttcttcaatctttggcgatggtggtccccttggcgccggtgatctgcatgtgcctgtgatctactgctggctgcatcacctcaatagtctacctgggggcgtatgacagcgaggaggcagctgctcgtgcctatgacctcgcagctctcaagtactggggtcctgagactctcctcaacttccctgtggaggattactccagcgagatgccggagatggaggccgtgtcccgggaggagtacctggcctccctc

SEQ ID NO: 42674 - DNA, 152 bp, Zea mays
cttcccccggcgctactctcccgctccacgttccaaaggaaagatggcgtcccatattgttggataccctcgcatgggccccaagagagagctcaagtttgccttggagtctttctgggatgggaagagcagcgccgatgatttagagaaag

SEQ ID NO: 42675 - DNA, 232 bp, Zea mays
agaggaggaaggatgcccgctcagtgaagatcaagaggagtaaggatgttgtcaagttcaaggtgcgctgctccaagtacttgtacacgctctgcgtcttcgatgctgagaaggcacacaagttgaagcaatctcttcccccaggtttgaccgtcgaggaggtctgattggatacatggcaacgccgagttgaactacccaagcttctttatcagtagcagagcatgctact

SEQ ID NO: 42676 - DNA, 309 bp, Zea mays
agctcctcctcgcgattccaatccacgcacgccatctccgactccgcgtccgcctcgcgcaggacatatattcagtgatggaacacaaggaggccggctgccagcagccggagggcccaatcctatgcatcaataactgtggtttctttggaagcgctgccaccatgaacatgtgctccaagtgccacaaggagatgataatgaagcaggagcaggcccagttggctgcctcctccatcgatagcattgtcaatggcggtgataatgggaaaggacctgcaattgctgcaactgtaggtgtggcagttc

SEQ ID NO: 42677 - DNA, 304 bp, Zea mays
taaagaaagggtgaagatctcttttatgagcacaccctgtctctgaccgaagctctatgtgggttccaatttgttcttacacatctggacaacaggcagcttctgatcaaatcaaaccccggcgaagttgttaaacctgaccaattcaaggcgataaacgacgaggggatgcctatttaccagaggcccttcatgaaggggaagctctacattcatttcacagtggagttccccgactcgctggcgccagagcagtgcaaggctctcgagtcggtacttccgccaaagccttcgtccaagctga

SEQ ID NO: 42678 - DNA, 302 bp, Zea mays
cacaaccacttactctcgtgcgctctccgtgggagcgaggactcgcagccggcgcacggcaggttctcctagatctccggcatcatcagtaacaaatggctgacggtgagaacattcagccccttgtttgtgacaatggaactggcatggtcaaggctggttttgctggtgacgatgcgccaagggctgttttcccaagcattgtcggacgcccccgtcacactggtgtgatggttggcatggggcagaaggatgcgtatgttggtgacgaggcccagtccaagaggggtatcctgactttg

SEQ ID NO: 42679 - DNA, 243 bp, Zea mays
atcgaagcgaggtaggggaggttcggctgggaacaagttccgcatgtcactgggtctaccggtggcggccacggtgaactgcgcggacaacacgggcgccaagaacctctacatcatctccgtcaagggcatcaagggccgcctcaaccgcctcccgtccgcatgtgtcggcgacatggtcatggcaaccgtaaagaagggaaaccccgccctccaggaaaaatgtttccccgccgtcatcgt

SEQ ID NO: 42680 - DNA, 302 bp, Zea mays
attgcacaaagactatcgatggagatctgaaatgtaaggaggtaccaacaagctttggatttgatactgcttgcaagatatactccgaaatgattggcaatgttatgactgatgcaagatccacaggaaaatactaccactttgtgaggcttatgggtcgtgctgcttctcacattacattggaatgcgctttgcaaacacaccccaatgctgcactcattggggaagaggttgctgcgaagaaagaaacccttaagaatgtcacaaactacattactgatatcatctgcaagcgtgcagat

SEQ ID NO: 42681 - DNA, 307 bp, Zea mays
tctccatccagtggaaaaaaaaaacaaaaagggtaccggaagcagcgaaacatcgcctcccgcagctctcgcatcgtctccagagcgcacgtcagatcaggtgcgccgcgcccccctcgcctaagctgcgacgaccatccatcgaacaggaaggatgacgggctccatggatctcccggccaagggcgggttcagcttcgacctgtgtcgccggaacaacatgctggagaagaacggactcaaggtcccgggattcaggaagaccgggacaaccatcgtcggcctcgtctttcaggatggggttgtt

SEQ ID NO: 42682 - DNA, 244 bp, Zea mays
atatcttctatgtttggttgttccctaacgattcctataactgatggacgtctcaatacgggcacttggcagggcatatggctgtgcgaacatcgagaccatgccagccctcgcaaaattgtgattactctcaacggtgtttaacttgaagatcttatatgctgccaggaaatagggccaatgcattttggacctgaatgtgtttcagttaccatgtactatgttgagttgtaatgtatgctat

SEQ ID NO: 42683 - DNA, 298 bp, Zea mays
agcagtctcgtacaacgaactatcctgttagccagccctaaacacttctatcccgatgacatcatcatcgtcgccgccgccgccgcagctgacgattcccggccgccgcaacatactcatcactagcagcattccgtacgtcaataatgtcccgcacctagggaacatcatcggcagtatgctaagcgcagacatgttcgagcggtactgccggctccggggttacaacgctatctacatatgcgggacggacgagtatggcaccgccaccgagacgaaggcatggaggagaagtgca

SEQ ID NO: 42684 - DNA, 213 bp, Zea mays
agccttcaccgccgaatccgagactccgatctcgggttcaccgcagcgcacagagcagccccgacatccggcccgatccgcgctctcctctccgtcgcttcagtcatagcaggaatggcacctgagggttctcagttcgatgctaagcactatgattctaagatgcaggagctgctgagcaccggtgagactgaggagttcttcacttcatat

SEQ ID NO: 42685 - DNA, 306 bp, Zea mays
atagggttttgctgctctccgaccccgagctccgaaagccgcagcatcaggcgcggcccccctcgcgtatgaccgagatggcgctgccgaatcaggggaccgttgattaccccagcttcaagctcgtcatcgtcggcgatggtggaaatgtgtaaaactacatttgtgaagaggcatctcactggagagtttgagcagaaatatgaaccaaccattggtgtggaagttcatccgttggatttcaccactaactgtggtaagatcaggttctactgctgggatacagcaggcaagagaatttggtgg

SEQ ID NO: 42686 - DNA, 208 bp, Zea mays
atccggctgccgaaaccctagccgcctccgccgtcatggcgagcagcaacgtctccaacgtctacatctccgtcatcgatgacgtcatctccaaggtccgcgaggacttcatcacctacggagtcggcgacgccgtcctaaacgagctccaggctctctgggagatgacaatgctgcactgtggcgcgatctcggggaacatagagcg

SEQ ID NO: 42687 - DNA, 301 bp, Zea mays
tgagcactatgcgtgcatggttgacatgtttgggcgagcaggccttcaaactgaggcaaagcgattcattcaccagatgggacctaagcaagatgcatcagtccttggggcactcctttgggcttgcatgaactgcagggaccttgagatgggtaaggaggttgccaagaagctttttgtgattgagccaagtaataccgggaactatgtcctgcttgctaatatctatacgtcacatggaagattggaggaggcaaaggaggtgcggaggtggatgatgtttcaggagttaaggaaggaa

SEQ ID NO: 42688 - DNA, 297 bp, Zea mays
  unsure (1)..(297): unsure at all n locations
agaagcttctagtcagggtagtcccaagaagaaaaggcataagtttgatagtggtgatggcacttcatgcaagcattgtagttgtaagaagtccaaatgcctgaaactttactgtgagtgctttgctgctggagtctattgttctgagccttgttcgtgtatcggctgtatgaacaaccagagtcatacggaaactgttctatctacgcggcaacagattgaatctcgcaatccattagcatttgctcctanagtaatcataccttctgagcctggtctggtactaagggacttctc

SEQ ID NO: 42689 - DNA, 194 bp, Zea mays
ggagaccccaagcaaacaaacagggtagaggtagagggagaggagaggagaggagaggagaggagaggttgggtctgggacaccatggctccgatgaagctgtacggggcggtgatatcgaggaacgtgacgaggtgcgcaacggcgctggaggaggctggctccgactacgatatcgtgcccatcatcttcgc

SEQ ID NO: 42690 - DNA, 205 bp, Zea mays
agctaatagcagcgccacgcaccgacaccaatacgccatgggttccatcatggagcaacgctgcaacaacgatccgcaggcgctgctcgacgctcagctcgagctctggcacagcacgttcgcgttcatcaagtccatggcgttcaagtcggcgctggaactcggcatcgcagacgccatccactgccacggcggcaccgccacg

SEQ ID NO: 42691 - DNA, 303 bp, Zea mays
aaccgctccgccacctcgccactcgcctcttctcgctctcgccaccgggccagggaagggaccatccgatcggatccgtcatggctggagctgctgctctcaatgagggtatcctttcttccgtgtccgagaaaaatgttgctgctcacccatggcatgatttggagataggaccagaggctcctgcagtgttcaattgtgtggttgagattcctagaggcagcaaggttaagtatgagttggacaagatatctggtctgatcaaggtggatcgtgtcctttactcctctgttgtttacccac

SEQ ID NO: 42692 - DNA, 210 bp, Zea mays
atgaatctagctacgtaccatctctttcaaatcgcgatcacatatatttggtgcagggtcggaacaggaagatgggtaaaacatgggcgctcatcacccacctccacgctctcgcagggccgagtctcactctgatataccctctgtacgcgtcgatctgcgcgatggagagcgcgaccagggtggacgacgagcagtggctggcctact

SEQ ID NO: 42693 - DNA, 205 bp, Zea mays
tctgaaccgttggaggagagggacggcgtcaagctgccaagctacaggggcgacaacgtcaacggcgacgacttcaccgagaagagccgcgtgccagacccgcagaggatgatccgcgcctactcgcagtcggtggcgacgctcaacctgctccgcgcgttggcgaccggagggtacgctgccatgcagcgcgtcacacagtgga

SEQ ID NO: 42694 - DNA, 298 bp, Zea mays
cgaacaaaccacacaccccacctaccccggccggaccggcaggcagcacagcatggacctcgttctcctagagaacgccctgctgggcctgttcgccgcggctgtggtggccatcgccgtggccaagctgaccggcaagcggtaccgcctcccaccgggcgccccgggagcccccgtggtgggaaactggctgcaggtgggcgacgacctgaaccaccgcaacctgatggccatggcgaacggttcggcgacatcttcctgctgcgcatgggcgtgcgcaacctggtggtggtgtcga

SEQ ID NO: 42695 - DNA, 274 bp, Zea mays
cagaatactctgaggatcagcttgagttggtcttagaagcatgcgaaaggatgaatgcgcatctgacagctgcagttgtctcaaacgacccgctattcctgcaggatgtacttgggagatccgttaacgggacaacctacgccggaattcgagcgaggaccacgggcgctccacagaaccactggtttggcacggccggtgatccgcgaggcgcagggatcgggactccggaagccataaaacttgtctggtcctgccaaggggagtcatatat

SEQ ID NO: 42696 - DNA, 187 bp, Zea mays
actctccccggctctccgccttcctcttccagtccccgcgcgcgagatcgccgccccgtgtgggtactagatcccgatggcctcgcgccgccgcaccctgctcaaggtcatcatcctcggcgatagtggggttgggaagacttccttgatgaaccaatatgtgaacaagaagttcagcaatcagtac

SEQ ID NO: 42697 - DNA, 295 bp, Zea mays
gggaggcccctgcccaaggcaagagaaaccgcggcgcgcggagagggaggaagggcagacgcagacgcagacgggcgaacaagatgagggagatcatcagcatccacatcggccaggccgggatccaggtcggcaacgcctgctgggagctctactgcctcgagcacggcatcgagcacgatggcaccatgcccagtgattcctcggttggcgtcgcacatgatgccttcaacacgttcttcagcgagactggttccggcaagcatgtgcacagggccatcttcgtcgaccttga

SEQ ID NO: 42698 - DNA, 291 bp, Zea mays
cacatacacaagcacaagcgcactctagcaatggcttctgaggttgtccgccctagcgacgccgagctactaaaggcacaagccgacatatggcggctcagcctctcctacctcacgcccctgtcactgaggtgcgccgtggagcttggcatccccacggcgatctaccgccatggcggggctgcctcagccgctgagctggtcacggcgctgtctctccactccactaagctgccgttcctccgcagcctgcagcggctcctcgccgcgtcgggcgtgttcaccgtcgac

SEQ ID NO: 42699 - DNA, 295 bp, Zea mays
gagaagcacgcccaaaaattccgaggttttcacctcttggagcgcaccaacaccacccggagaccggagcgactcgccaccggcgcggaaaaggagggcggaggctcgatggcggatgagaatcaggctggaaagaaagaggaggaggaatttagcacaggccctctgtcagtcctaatgatgagtgttaagaacaacacccaggtcctcatcaattgccgcaacaacaagaagctgcttggccgtgttcgtgcttttgatcgccactgtaacatggtgctcgagaacgtgcgtg

SEQ ID NO: 42700 - DNA, 225 bp, Zea mays
attcaaggaaaaggaggggtagctgctgatatgggcatccacgcgattatcgtccccatacgggaccttgaaactcacgctgttcttcctggaatcgagatcaatgactgtgggcacaagatcggcctaaatggtgtagacaatggtgcgctgaggttccgctcagttaggatacccagagacaatcttcttaatcggttcggtgatgtgtcacgggatgggaaa

SEQ ID NO: 42701 - DNA, 204 bp, Zea mays
agtcgctcgcgcgccagatgagaccggtgtccagggtactggctcctcatctcaatcgggcttatgccaaagatgtaaaatttggtgcagatgcccgagcattaatgcttcaaggtgtagacttttagccgatgctgtggccgttacaatggggccaaagggaagaacagtgattattgagcagagttgggggagtcccaacgt

SEQ ID NO: 42702 - DNA, 228 bp, Zea mays
atgataattacggaacatatccccataacaaacttgtttacatgcatttggttcaatgaagttgaccgcttcacgtccagagatcagctaagcttcagcacagttagggataaaataaggtggcgagttaattggactgcagacatgttcctggattgtgaaaggcgtgattttattgttcagtcgtaccaccgagaactgttggaacagaggcagtctgccttacga

SEQ ID NO: 42703 - DNA, 294 bp, Zea mays
acaccatccgcacctctctccatctccctgctcctccgccttcttcatgatccaaccaagcaaggaatcgccatgtaggagtcggaggagcaccacttcgaatcgaaggccgacgccggagcgtccaagacctacccgcagcaggctggcaccgtcactaagaacggcttcatcgacatcaagaacggcccctgcaaggttgtggaggtttctacctcaaagactggtaagcatggtcatgccaaatggcactttgttgccatagatatattcaacgggaaaaagctcgaagat

SEQ ID NO: 42704 - DNA, 283 bp, Zea mays
ggtcgctgatggtatccagatcactggtatggcagttgttacaattgtgtttgctgccctgggatttctctcacctgcttccaggggaatgctcctgaccggaatgatcattctctacctcttccttggtatcattgctggatacgttggtgtccgtgtctggaggactatcaagggaacctcggaagggtggaaatctgttgcttggctgactgcatgcttcttccccgggattgtgttcatcatcctcactgtgcttaaatccattctgtggggcaagaag

SEQ ID NO: 42705 - DNA, 282 bp, Zea mays
ggccaaaagaaggcaagaaggcgggcaagcgacaggaaggaggaggaggaggaggaggagaagccatggcgagcgacggcgacgggaagggccgggaagcgacggcgccgggggcaggagggtacggctacggctacggctacgcaggcttcgagggggaggaggaccggaagtggtggccgtggctggtgcccaccgtgatcgtcgcatgcatcgccgtcttcgtcgtcgagatgtacgagaacaactgccccaagaaccggaccagctcggcggcgactg

SEQ ID NO: 42706 - DNA, 287 bp, Zea mays
gaaggaggttcatcaaagaactttacattgattaagaaaatggccttctcagaaccagcgattctacacaatttgctacagaagttcacaacatcaatggctaactatattaaataccaagcggacaatggggcgcaggctgtccaaattttcgattcatgggctactgaactcagcccgactgattttgaggagtttagcctgccttatctaaagcagatagtggatagtgttagggaaacacatcctaacttgcctctgatactctacgcaagtggatctggggg

SEQ ID NO: 42707 - DNA, 315 bp, Zea mays
atctcctcgcatttccttgcaaccgattgccttcccccctcccaacccaagaccgatggcgcccaaggccgagaagaagcccgcggcgaagaagccggcggaggaggagcccgcggcggagaagacgaccgccgggaagaagcccaaggcggagaagcggatccccgctggcaagtccgccggcaaggagggcggcgagggcaagcgtggcaagaagaagggcaagaagagcgtggagacgtacaagatctacatcttcaaggtgctgaagcaggtgcacccggacatcggcatctcctccaaggccatgtccat

SEQ ID NO: 42708 - DNA, 302 bp, Zea mays
gtgagggaggcgccgacgccgagtcctttctccatcctgcatctgccgctgtttccgacaggatgtttctcacgaggacggagtacgaccgtggggtgaacaccttctctccggaggggcggctgttccaggtcgagtacgccatcgaggccatcaagttgggatccactgcgatcggtttgaagacaaaggatggtgttgtcctcgccgttgagaaacgtgtgacctcaccactgctggaaccaagcagtgtggaaaaactaatggaaattgatgagcactaggctgtgccatgagtggac

SEQ ID NO: 42709 - DNA, 290 bp, Zea mays
gtcaaacccaacctcatctcttttctcggcctctaccgccccctcgatcggtcggccggtcagctatgacgccgggaagctcggccgccggatccggcgtcgtcgttcctcggaacttcaggctcctagaagagcttgaacgtggagagaagggcattggagatgggacagtgagctatggaatggatgagcgcgatgacatctacatgcgatcaagtgatggcactattattggcgctcataataccgtccatgagggtcgcatctacgagctgaagttgttctgcgac

SEQ ID NO: 42710 - DNA, 318 bp, Zea mays
caggtgattccgcatcccgttcgcgagcgcgacacacgctgacagctcacggctgaccttctcgacggcctccagctccatcttgattcttgaggcgaagcccggtgcgtaagagtctgccatggccagcgagaataaggtctttgggttcgaggaagtcgccaagcacaacgtcaccaaggactgctggatcatcatcgccggcaaggtgtatgacgtcactccgtttatggatgagcatcctggtggagacgaggttttgctagctgtaactgggaaagatgctacagctgatttcgaagatattggccacagtga

SEQ ID NO: 42711 - DNA, 317 bp, Zea mays
agctcagatctcagtcacctgcgccgccgcttcgttcgtgtggaggggagaagagaggaaatggcggcgaccgagggcgtgctcctggggatgggcaaccccctcctcgacatctccgccgtcgtcgatgacgccttcctgacaaagtatgacatcaagctgaacaatgctattctcgctgaggagaagcacttgcctatgtatgacgagttggctagcaagagcaatgttgaatatattgccggaggagccacccagaactctatcagggttgcccaatggatgcttcaaactcctggtgcaacaagttacatggg

SEQ ID NO: 42712 - DNA, 202 bp, Zea mays
gaggctgttaccatcattgaaacccctcctcttgtcattgttgggctcgtggcatatgtgaagactcctcgtggcctccgcacactcaactctgtttgggcccaacatcttagtgaagaagtgaggagaaggttctacaagaactggtgcaagagcaagaagaaggctttcacaaagtatgctctcaaatatgaaaatgatg

SEQ ID NO: 42713 - DNA, 310 bp, Zea mays
gtagggaggaggtgagccaccggaagcggagacgtgagcactcgaccaaccccgtcgatccggctgcggcgcggcgtgctagatcgctaccggccatggtggtggaggagatcgccgagggggtgaagaacctaaccgtcaccggagatgcggcggcttcaggcggagaggggcagaggaggggcggcggcggcagcagcaaccgcatccaggtgtccaacaccaaaaaacccctcttcttctacgtcaacctcgccaagaggtatatgcaacagcacggcgatgtagagctatccgctcttgggatggc

SEQ ID NO: 42714 - DNA, 275 bp, Zea mays
gtaaatcaagaacccgaactaccagggtaaatggaaggcacctatgattgacaacccagattttaaggatgatccatacatttacgccttcgacagcttgaagtacatcggcattgagctgtggcaggttaaatcgggcactctgtttgacaacatcatcatcactgatgaccctgcgttggccaagacttttgcagaggagacttggggcaagcacaaggaggcagaaaaggctgcttttgatgaggccgagaaaaagaaggaagaagaggatg

SEQ ID NO: 42715 - DNA, 122 bp, Zea mays
ctgtgttcttgggcgtacgcggacacagccccgatccgaatcgtcctcctcgcgagcctcgtcgatcgccgactcccctcccctcgcgtcaagatgcagatctttgtgaagaccctcaccgg

SEQ ID NO: 42716 - DNA, 267 bp, Zea mays
gttttcttcctgaaggaaaggctgtttgaccagagtgacgcatacagagtccatgtatgcgagaaatgtggtctcatcgcaattgctaacctaaagaacaactcgttcgaatgcaggggctgcaagaacaagactgacattgtccaagtacacatagtctatgcttgtaagcttctgtttcaggagcttatggcaatggccattgctcccagaatgcttacccatgatatgaagacagggaaggatcagaagaagcgctgaacgtgt

SEQ ID NO: 42717 - DNA, 276 bp, Zea mays
gtgacacccccaccaagacccgtgggcttggagctggcaaggctgccgacctcacctactgggagagcgctgcccgcatgattgcggatgtctccaagtctgagaagattggtgttgagaagtccactgtccctgtcaagaccgctgaggctatcgagaagatcttgacccacaacagcaagggcatcaactaccagatcctttccaacccagagttccttgcggagggcactgacattgaggacctgttcaagcctgacagagtgcttatcggtg

SEQ ID NO: 42718 - DNA, 300 bp, Zea mays
gctccatctctaccccttcctcaagggtctcatgggaaggcagaaccgcacaccaacaatcgtcattgtctggtccatccttcttgcatctatcttctccttgctgtgggtgacgatcgatcctttcatctccccgacacagaaagctgccgccttggggcaatgtggcgtcaactgctgatcgagaccgtgactcttatttgaagaggctcaatcaagatctgccccctcgtgtaaatacctgaggaggctagatggagattcttttgttgtaggtgaggatggatttgcatctaagtt

SEQ ID NO: 42719 - DNA, 120 bp, Zea mays
gaccagccgccgtcatgtcgaagcgaggtatgggaggttcggctatgaacaagttccgcatgtcactgggtctaccggtggcggccacggtgaactgcgcggacaacacgggcgccaaga

SEQ ID NO: 42720 - DNA, 297 bp, Zea mays
ccttgactggtacaagggcccaaccctacttgaggctttggacttgatcaatgtgcttacgaggccttcagacaagcccctgcgtctccccctacaggatgtgtacaagattggtggtattggaactgttcctgttgggcgtgttgagactggtatcatcaagcctggtatggttgttacctttggtcctagtggccttactactgaggtgaagtctgttgaaatgcaccatgaggctctccaggaggcccttcctggtgacaatgttggcttcaatgttaagaatgttgctgtgaa

SEQ ID NO: 42721 - DNA, 279 bp, Zea mays
gatttatccgctgcagccatgagtaagttgcagtctgagtctgtcaaggatgccatctcccagattgttggggatgccaaggagaagaataggaagttcactgagactgtggaacttcagattggtctgaagaattatgatccacagaaggacaagcgtttcagtggctctgttaagttgccccatatccctcgtcccaagatgaaggtgtgcatgcttggtgatgccagcatgttgaggaggccgagaagacgggacttgactacatggatgttgagg

SEQ ID NO: 42722 - DNA, 298 bp, Zea mays
tgcaatcacaacgaacaaaagctctcgatctcaccgacaccgaggaagaagagatcaatggcgtccgagcagggagtcgtgatcgcgtgccacagcaaggctgagtttgacgcccacatgaccaaggcccaggaagccggcaagctggtggtcatcgacttcactgccgcctggtgcggtccatgccgcgccatcgccccactgttcgtcgaacacgccaagaagttcactcaggtcgtcttcctgaaggtggacgtggacgagtgaaggaagtcaccgcggcctacgaggtcgaggc

SEQ ID NO: 42723 - DNA, 248 bp, Zea mays
cggcgatggaggagaaggcgtcgtcgccgctggttccgccgccgtcggagatcgacctcgaggcgggcggcggcggggagcagctccagagccggatctgcctcgagaccgacgggagggacttcatcgcgccctgcaagtgcaaggggacgtccaagtacgtgcaccgcgactgcctcgaccactggagggcggtgaaggagggttttgcattttcccattgtaccacctgcaggctccatattatt

SEQ ID NO: 42724 - DNA, 199 bp, Zea mays
cgagagatcaagttgctgctgcggtagtccccaaccatcatcatgcagaacgaggagggtaagacggtggacctctacgtccccaggaagtgctcggccacgaataggatcatcactgccaaggatcatgcctctgtccagatcaacattggccacttggatgcgaatggcctgtacgatggtcacttcaccacgtttg

SEQ ID NO: 42725 - DNA, 252 bp, Zea mays
gtacgacaaggagtgcactgtcagctctagcttgctgcagaacaagggcaagatggcaagaggtggtcggctactgatcctctccctggggcttgtgctcctctacttcgtctcaggaagtgttgctgctgctgctgcacagaaaacgtggtgcgttgccaagccgtcggcgtccaacgatatcctgtctctgaacctcaactacgcgtgctcccaggtgagctgcggcgtgatccagaagggtcgggcgtg

SEQ ID NO: 42726 - DNA, 285 bp, Zea mays
gaggatattctgactgggtttaaaatgcatgcaagaggctggcaatcaatctactgcatgccaccacgaccttgtttcaagggttctgcaccaatcaatctttctgatcgtcttaatcaggtgctccgttgggctcttgggtcagtggaaattctgcttagcagacattgtcctatatggtatggctacaatgggcgattgaagcttttggagaggctggcttacattaacaccattgtttatcccatcacatctgttccgcttatcgcctattgtgtgcttcct

SEQ ID NO: 42727 - DNA, 110 bp, Zea mays
gtcgaggcgaccctccctccttcgctccttccgcgccgcctcccggccgtcgccgccatggtgaagtactcgcaggagccgggcaaacctaccaagtcggctaaggccat

SEQ ID NO: 42728 - DNA, 141 bp, Zea mays
tggcacactggaccctgtagagaaggcccttcgagatgccaaactagacaagtcacagatccatgatattgtcctggtgggtggttctaccagaatccccaagatccagaaacttctgcaagacttcttcaatggaaaaga

SEQ ID NO: 42729 - DNA, 216 bp, Zea mays
atcgcgtgccctcgctgcagccatcttccatggcggaccagctcacggacgagcagatcgcggagttcaaggaggccttcagcctcttcgataaggatggcgacggctgcatcactaccaaggagcttggaactgtgatgcgctcccttggccagaaccccactgaagcagagctgcaggacatgatcaacgaggttgatgctgatggcaatggga

SEQ ID NO: 42730 - DNA, 312 bp, Zea mays
ctatgagcagcataggcacagggtatgatctgtctgtcagcaccttctctcctgatggccgcgtctttcaggtcgagtatgccaccaaagctgtcgacaacagcgggactgttgttgggatcaagtgcaaagatggcattgttctgggtgtcgagaagctggtaacctcaaagatgatgctggaggggtcaaatcggaggatccattcagtgcaccggcattcgggcttggttgttgctggtttggcagcagatggcagacaattgtttccagggccaaatcagaagctgccagttatgacaaggtctatgg

SEQ ID NO: 42731 - DNA, 147 bp, Zea mays
gtcacctacagatcgtgtacgaggttttcttgagatttgtagcttcacaggagacagatgcaaagttggccaagagatatatggggcgggcctttatccttaggctgctagacctttatgactctgaggaccccagggaaagggaca

SEQ ID NO: 42732 - DNA, 290 bp, Zea mays
tgagattacccgcaagttcatgaacaagccagtgagaatcctcgtgaagagagatgagctgactcttgagggtatcaagcagttctatgtgaatgtggataaggaagactggaagctggacacactgtgtgacctgtacgagacccttgccatcacccagagtgtcatctttgtcaacacccgccgcaaggtggactggctcactgacaagatgaggagcagggaccacactgtttctgccactcatggtgacatggaccagaccactagagactcatcatgagggagtt

SEQ ID NO: 42733 - DNA, 290 bp, Zea mays
cggctcgagaatcttcaatggaccctttgtgaagctcaacaaggcttcgattaacatgctgaagcttgtagagccatatattcgctgggggtaccccatctgcagtcactaaatgaactaatctacaagcgtggttctggcacaatcaataagaagcgaattgctttgacagataacgccttgattgctcgatctcttggtaaatacggcatcatctgcatggaggatttgattcctgagatctatactgttggaaaacgcatccaagaggcaaataacttactgtggcc

SEQ ID NO: 42734 - DNA, 327 bp, Zea mays
aactatcaccgagaggtcgatcggctcgagcagggtattccatggcaacagggctgttgatgctgtattaggtccccggaccattcagcatgagactgttgcctcagaagctgctgctgctgcccctgcccctccagtgatgaatgctgatgcttgcagcatccattctaaggctttccaagattgtctcaacaactatggcagcgagatcagcaattgccagttctacctagacatgctgaacgagtgccgccgtggtggtgtgtctgcctaagctgcctctgggattattcatggattttctttcggtgatgttatctcattaat

SEQ ID NO: 42735 - DNA, 263 bp, Zea mays
caatcacctaatgctcataaggtactctgtggatatctccttggacaaaactgtcgtcagtaacgatgtcttcagagatcctgctcttaaacgcaaggcccgacgggacgccaaggtcaagtttgaagagagatacaagatcggcaagaacaagtggttcttccagaaactgcggttttagatgctttgtctcgatcattagaaattatgtagagaagcggaaaaaatcgagtgccgcaagatccagacccctacggccgggg

SEQ ID NO: 42736 - DNA, 297 bp, Zea mays
ggcaataccttttgcgctttcaaaggatggaattgagatgcagtttgcaactaatcatgttgggcatttcctgctcacacaccttctattggataccatgaagaggacctctcatgaatcaaatttggaaggaagaattgtcaacgtgtcatcagaggggcacagacttgcatatcgggaaggaatccgttttgacaagatcaacgatgaatcagtgtatagtagcattggtgcatatgggcaatcaaagcttgcaaacatattgcatgctaatgaacttgccaggcgatttgagga

SEQ ID NO: 42737 - DNA, 299 bp, Zea mays
ggccagggtcaccaaggtcctgggcaggaccggttctcagggacagtgcacgcaggtgcgcgtggaattcatggacgacacgagccgatccatcatccgcaatgtacaaggccccgtgcgcgagggcgacgtgctcacccttttggagtcagagcgagaagcccggaggttgcgctgagcttggctgctcgctgggtcttggatgtcgggttcgaccacttggccgatgggaatggtctgtcacagtctgctccgtttttttgtccgccacacgtaactgagatgctcctttaaataaa

SEQ ID NO: 42738 - DNA, 334 bp, Zea mays
ggatctcgtgcagcgtcagcagctcgcattcggctcgaggcgggaacttcgcatccgcaaactctgtctcaccatctgtgttgaggagaatggagacagcctgacgcgagcagccaaggtgttagagcagctcacagggcagacccctgtgttttccaaagctagatacactgtcagatcctttggcatccggagaaatgaaaagattgctgtccactgcacagttcgaggggccaatggcagaagaaatcttggagacgggtctaaaggtgcgggagtatgagttaagaaaaaacaacttctcagatactggaaatttggttttgggatccag

SEQ ID NO: 42739 - DNA, 298 bp, Zea mays
ctcgagccgctctgacagtgagatggcgagcgtgaaggttttcgggtcacccacctcggcggaggtcgcccgcgtgctcatgtgcctcttcgagaaggaggtggagttccagctgatccgcgtcgacgcctaccgcggcaccaagcgcatcacccagtacctcaagctgcagccgcaaggcgaggcgctcaccttcgaggacgagagcctcaccctctccgactccagggggatcctccgccacatctcccacaagtacgcgaagagggcaacccgtacctgattggcacgggcgcgc

SEQ ID NO: 42740 - DNA, 294 bp, Zea mays
accgtagccatcatgaatgacacggtaaccatccggaccaggaagttcatgaccaaccgtctgcttcagaggaaacagatggtcattgatgtccttcatcctgggaaggccacagtaccaaagacagacattcgggaaaagctggccaagatgtacaaaaccacaccagatgtcatctttgtatttggattcagaacccactttggtggaggcaagacaactggctttggcatgatctatgattctttcgattatgacaagaagaatgagcctaaacacagacttgcgagacat

SEQ ID NO: 42741 - DNA, 275 bp, Zea mays
caccatggtgctgtctcctgccgacaagaccaacgtcaaggccgcatggggtaaggtcggcgcgcacgctggcgagtatggtgcggaggccctggagaggatgttcctgtccttccccaccaccaagagctattcccgcacttcgacctgagctggggctctgcccaggttaagggccacggcaagaaggtggccgacgcgctgaccaacgccgtggcgcacgtggacgacatgcacaacgcgctgtccgccctgagcgacctgcacgcgcacaa

SEQ ID NO: 42742 - DNA, 296 bp, Zea mays
gacacgcctgggtggtactgtggaccgaacttctacaccatagaagtcctccgcaagtttgccaggtcacagcttgactacatccttggaaagaacccattgaagatgagctacgttgtgggtttcggaaacaagtacccgaagcgccctcaccacagaggtgcgtcgatacctcataacggcgtcaagtatggatgcaaaggaggttacaaatggagggacacgaagaaggcaaaccctaacatccttgttggagcaatggtggctggtcctgacaggcgtgacggctacaaaga

SEQ ID NO: 42743 - DNA, 279 bp, Zea mays
tccagatccgtcgagcccctacaaggtgcggctgctgatcgaggactacccgtacgcctcggacgggctggccgtgtggcacgccatcgagcagtgggtgacggagtacctggccatctactaccccaacgacggcgtgctgcaggccgacgtggagctgcaggcgtagtggaaggaggcgcgcgaggtcgggcacgccgacctcaaggacgagcactggtggcccaagatgcagacggtgccggaactcgtgaaggcctgcaccaccatcatctggat

SEQ ID NO: 42744 - DNA, 272 bp, Zea mays
caacgagaagagcggcggcgcgggcggacaaggagcaggcggaggaggagctgtgccaagccacaatgggtatctcacgcgactcgatgcacaagcgccgtgccaccggtggaaagcagaaggcctggaggaagaagcgaaagtatgagcttggtcgccagccggccaacaccaagttgtcaagcaataagacagtgaggagggtccgtgttcgtggaggtaacgtgaagtggagggctcttcgccttgatactggtaactactcatgggga

SEQ ID NO: 42745 - DNA, 289 bp, Zea mays
gcgacatcaaagagaagctgtgctacgtggccctggacttcgagaatgagatggccaccgctgcctcttcctcctccctggaaaagagctatgagctgcctgacgggcaggtcatcaccatcggcaatgagcgcttccgttgcccggagacgctcttccagccttcctttatcggtatggagtctgcggggatccatgagaccacctacaacagcatcatgaagtgcgacatcgacatcaggaaggacctgtacgccaacaagtcatgtcagggggagctaccatgtac

SEQ ID NO: 42746 - DNA, 258 bp, Zea mays
gttgctgggactgcagcgttggcgggccttgtagcgaggagggggtgcggaggcgcggcgactgttcgcgggatgagcttcggcggcagcagctccctcgcatcaggtgcgaagaggccgttcgagtacgggagaacgcatgtggtgaggcccaagggcacgcacaaggccaccattgtctggctccatggacttggggacaatggagccagctggtctcaactactggaaactcctccccttcctaatataaaatgg

SEQ ID NO: 42747 - DNA, 294 bp, Zea mays
gtcaaagaacacaaaaattgctttcatgttcttaacacccagtttaatgccatttgagaagctatgggatgaattcttcatgggtcatgaagacagatacaccatatacgtgcatgcatcaagagatataccgagtcattcaagtccaatattcgctggcagggatattcgaagcgaaaaggtgatatggggcacgatttctatgcttgatgctgaaaagaggctcttggcccatgccctacaagatcctgaaaaccagcattttgtcttgctttctgagagttgtgtgccact

SEQ ID NO: 42748 - DNA, 220 bp, Zea mays
ataaccactttatggatcttcactgattgattatgcccatattgagcaatggattgactttgctgcaacagagattgatgcaaacattggaaagtggttgtacccacggatggggttttatccccatgctggtgtggtagaagaatcaactattgctgccttgaagagagcattgggttctctgagcacccatcttgcatcaaacacattccttgttggg

SEQ ID NO: 42749 - DNA, 290 bp, Zea mays
caacatgacggtcgccagaagctgggtttgtcgcaaaacctatgtgaccccacggagacccttcgcgatatcgcgtctcgaccaggagctaaagttgattggagagtatgggctccggaacaaacgtgaggtgtggagggtcaaatttaccctggcgaagattcgtaaggctgcccgggagctgttgacgctggacgagaaggatcctcggcgtctgtttgaaggcaacgctctgctgagacgacttgttcgaattggggtgctggatgagggcaagatgaagctggatt

SEQ ID NO: 42750 - DNA, 274 bp, Zea mays
atcgcgtgtccacgccgcagccatcttccatggcggaccagctcacggacgagcagatcgcggagttcaaggaggccttcagcctcttcgataaggatggcgacggctgcatcactaccaaggagcttggaactgtgatgcgctcccttggccagaaccccactgaagcagagctgctggacatgatcaacgaggttgatgctgatagcaatgggaccattgacttcccagagttcctgaacctgatggcaaggcagatgcaggacaccgactc

SEQ ID NO: 42751 - DNA, 257 bp, Zea mays
gtgcttcggtatgagccaagcaaaagaatcacagctaggcaagcacttgagcacgagtacttcaaggaccttgagatggtacagtgacctgctaaatgtgcttggcgctgctttggcatttgtaattgtatgagctgagtcgctcattcctttttatgggcgtctgtactctctcattctctctgcatttttgtcgttcagctggatattttgaatctggtgtgttttgagatgtattaaggaatatcaaatagatt

SEQ ID NO: 42752 - DNA, 287 bp, Zea mays
ctcacaaaattcacagctccaatcctggtgcaagcgcacagtagcggagcaagatgcggggaggagaccggccatctgcgtcgctccagctcctctcgctggggctcgtgctcctctacttcttcacctcaggcagcaccgttggtctcgtggagggacagaagacgtggtgcatcgccaagccgtcggcgtcgaacgagatcctggcgcagaacctggactacgcgtgctcccaggtgagctgcgccgtgatccagaagggcgggccgtgctactacccggacagc

SEQ ID NO: 42753 - DNA, 261 bp, Zea mays
gaatgttgccctggatttagctcgaagagaggctgagatggctatccgtgctcgcaatgatttcctagctgttatgaatcacgaaatgagaacacccatgaatgcaataatagccctttcctccttgcttttggaaactgagcttactcctgagcagcgtctaatggtggaaacagtactgaaaagcagcaatttgttagcaacactcatcaatgatgttctggatctttccaaactcgaggatggaagccttgaactgga

SEQ ID NO: 42754 - DNA, 283 bp, Zea mays
gtcgacttcttgccccggacggctactcctcttgaagacattttcaagtcgatcctctgcttgccttgcctcctaggtttgagatgtttgagggatacatgtatacctgaagacgctatgcttaaggatccaaggaggctttatgcaccaggccggatttatcacatagtcgaaagaagaacgtgcaggtgcggaagatatccaccggtagtcaaaacagctgtgccggtggatggtagatttgagcacatagttctttcctgcaatgccacagcggaccatg

SEQ ID NO: 42755 - DNA, 284 bp, Zea mays
cgaattcaccaaccaaactccactgtctccaactctccatcgcgtctgctacgcctctcctgcaggacgaccaatggcttccaggaagttcttcgtgggtggcaactggaaatgcaacggtactggcgaggacgtgaagaagatcgtcaccgtgctcaaccaagccgaggtgccctctgaagacgtcgtcgaggtggtggtgagtccgcctttcgtttttctgcagcaggtcaaggggctgctgcggctggacttcgccgtcgcagcgcagaactgctgggtgc

SEQ ID NO: 42756 - DNA, 274 bp, Zea mays
cgccggcgcctccacttcgttttcctcactctctcctccagctcagggtccggcggcgaagggaaggcaagatgtacaccgcgaggaagaagatccagaaggagaagggtcttgagccctccgagttcgaggactccgttgcccaggctttctttgatctggagaacgggaaccaggagctcaagagcgacctcaaggacctgtacatcaacaatgctatccagatggatgttaccgggagtaggaaggctgttgtcattcacgtcccataccg

SEQ ID NO: 42757 - DNA, 282 bp, Zea mays
ctcggcagtcggcacgcaggctagcagcacagcagcagccagagccatcccctctcctcgctacgcttcgcttcctcggcgccgattcctcctcctcctcctccaccctcgtccgtcccgttccggcgcgcgagctcgcccgagatggcgaacgcgagatcgggtgtcgctgtgaacgatgagtgcatgctgaagtttggcgagctgcagtcgaagaggctgcaccgcttcataactttcaagatggacgacaagttcaaggagatagttgtggaccaggtc

SEQ ID NO: 42758 - DNA, 243 bp, Zea mays
  unsure (1)..(243): unsure at all n locations
ctctgtaagcagctcatctgtgaccccagctacgtaaaatatctggtagaaaaagtgggccaggtgatcagagttatttgcatcctcagccaccccaccaagaacaccaatgatgccaactcctgccagatcattattccacacaacatatcctgtccagtnnnantntgnnntatnntcttgcttgggattgnacccagagcttcatatatactgggcaagtgctctaccattgatctatat

SEQ ID NO: 42759 - DNA, 278 bp, Zea mays
gctgagtatcggatatctatttatgggaggtagaaaagcgaatgggaccaaatggcaagttggatagtgaacaatgaattatatagcgagaatgttgtttggttaattcagattcctcggatatacaatgtatacagggagatgggcacaatcaattctttccaaaacctccttgacaatatttttctccctctttatgaagtaactgttgacccagcttcacatcctcagctccatgttttcttaaaacaggttgttgggttggattggtggatgat

SEQ ID NO: 42760 - DNA, 275 bp, Zea mays
gtctgcacagccccgcctcatggagcctatctacctggtggagattcagtgtcctgagcaagtggtgggcggaatctatggtgtcctgaacaggaagcgtggccatgtctttgaggagtcccaggtcactgggacccccatgttcgtggtcaaggcctacctgcctgtcaatgaatcctttggcttcactgccgaccttcgatccaacactggtggccaggccttcccccagtgtgtgtacgaaccatggcagtcctgcctggggaccctttgac

SEQ ID NO: 42761 - DNA, 258 bp, Zea mays
gactagttctagatcgcctgcaacagcctggaccatgacccggacctccagcacatgccgctcttccatgtctcccccaagctgttcggcaacatatggtcctacttctaccagcggaccctggccttcgacgccgcctcgaaattcctcatcagctaccagcactggaccttctacccggtaatgtgcatcgctgggataaatcttctggcgcagtcggctgtcttcgtcctgaccgagaagagggtcccaagcggc

SEQ ID NO: 42762 - DNA, 272 bp, Zea mays
tttgagctactagcccgcctgtgtccaaatcggatgtctctttccacactacttatgcgaaaatgagatctaaagatgtggaaagagacatccgatttgagctacttgcccgcctgtgtccaaacagtactggagcggagattagaagcgtttgcacagaggctggtatgtttgcactccgagcctggagaaagattgctacagagaaggactcttagaagcgtaaataggtcacaatcgtatgcaatttagtgctactcccgctactgaca

SEQ ID NO: 42763 - DNA, 270 bp, Zea mays
ctgcgggcaccagctattgttcaaggacggcaagggatgcggctcctgctacaagattcggtgcaggaaggacccgtcctgctccgggcggacggagacggtgatcatcaccgacatgaactactacccggtgtccaagtaccacttcgaactcagcggcacggcgttcggcaggctggccaattccggcctcaacgacaagctccgccactgcgggcatcatcgacatcgagttcaccagggtgccgtgcgagttccctggcatcaaga

SEQ ID NO: 42764 - DNA, 211 bp, Zea mays
gccgaaagcgaagaaggaagctcctgcccctcctatatctgaagccaaagcgaaggctttaaaggccaagaaggcagtgttgaaaggtgtccacagccacaaaaagaagaagatccgcacgtcacccaccttctggcggccgaagacactgcgactccggagacagcccaaatatcctcggaagagcgctcccaggagaaacaagcttgac

SEQ ID NO: 42765 - DNA, 283 bp, Zea mays
cggtcgaggtcgagcgaattcggctcgaggatgctgccatggttcacccatttgaggtagctgccagtggttcacgttggaaagatatgtttgaacctggagtgaggcgtgccctgttagtcggtgttggaattcagatccttcaacagtttgctggaataaacggtgttctgtactataccccacaaattcttgagcaagctggtgtggcagttattctttccaaatttggtctcagctcggcatcagcatccatcttgatcagttctctcactaccttact

SEQ ID NO: 42766 - DNA, 184 bp, Zea mays
ctgcgtgcgaaccaagcagaccccagcagaagaagcgaagtcgtcgccggatcaggaggaagagcgagcagcaagatgtcgtggcaggcgtacgtcgatgaccacctgctgtgcgacatcgaaggccagcacctcagcgccgccgccatcgtcggcaacgacggcagcgtctggcgcacatccg

SEQ ID NO: 42767 - DNA, 267 bp, Zea mays
gtcttggtgatgattatggagaagcttagtcatatatatgaggttaaaatggatgggagtcacactttacatataattccagattctagacaagtcaatgctgatgagttgcagcctggcgtctgctatttacagatcactgctgttgatcctgtaatggaggatgaggacttgggtagcaggagggaaaggattttttctttatctactggtactgtacgtgcacgtgtttttgaccgttttcttttcgatacaccattcacaaaa

SEQ ID NO: 42768 - DNA, 234 bp, Zea mays
atcatgtggctactaaaccatatgccattgttggcacgaagcccagaatatttccaggtgatacaattctggagactggagaagtaattccacacatcatagacttaaccgataaacatcattgaagagctcttaaaaatttaaaaaacttgtgtaacagcacatgtatgttccataatgctgtatttactgaatctatttcctagaaaagtaattaataaaacttattcctgt

SEQ ID NO: 42769 - DNA, 244 bp, Zea mays
atcagtgcgaaatttgtacttcttaggcttcctcaaaggtgatctccgaagaatattctctggaatacggaactgacaagatagagatgcatgttggagctgtacaggccaacgatcgggctcttgtagtcgatgatcttattgccaccggtgaaacactctgtgcagctgtcaaacttattgaacgtgttggagcaaaggttgttgagtgtgcttgcgtcattgaattggcagaactgaaggg

SEQ ID NO: 42770 - DNA, 285 bp, Zea mays
tggaaaagattgttcgctgctctaccaaagaacacatatacacacacactaaacacgaattctgatgatgataccactggtagatctagtacctgacaagcccatgtgtgttgagagcttctcagactatccacctttgggtcgctttgctgttcgtgatatgagacagacagttgcggtggagtgtcatcaaagcagtggacaagaaggctgctggagctggcaaggtcaccaagtctgcccagaaagctcagaaggctaaatgaatattatccctagtacctg

SEQ ID NO: 42771 - DNA, 239 bp, Zea mays
gtccaatatcttctacagtatgtctgctgctcggctctccgcggtggcacagtcgaccgtgtatgccttctccgcgcgcccgctggcgggcaggggagcccgtgagcctgggctccctgcggggcaaggtgctgctcattgagaatgtcgcgtcactctgaggcatcacgacccgggactagaccgatatgaatgatctgcagaagcgtctggagactcgatagctggtggtgctcgtt

SEQ ID NO: 42772 - DNA, 274 bp, Zea mays
ggccatgttcttctccgcggcgctccgggcccgggcggctggcctcaccgcccactggggaagacatgtaaggaatttgcataagacagctatgcaaaatggagctggaggagctttatttgtgcacagagatactcctgagaataaccctgagactccatttgatttcacaccagaaaactataagaggatagaggcaattgtaaaaaactatccagaaggccataaagcagcagctgttcttccagtcctggatttagcccaaaggcagaat

SEQ ID NO: 42773 - DNA, 241 bp, Zea mays
gggagaattcaaggctgaaggaaatagcaaattcacttacacagttctagaggatggctgcactaaacacactggtgaatggagcaagacagtctttgaatatcaaacacgcaaggccatgagactccccatcatagatatcgcaccctatgacattggtggtcctgatcaagaatttggtgtggacattggccccgttggtttttaaaagccaaatctccgaaaacccgggaaaccaaaa

SEQ ID NO: 42774 - DNA, 274 bp, Zea mays
  unsure (1)..(274): unsure at all n locations
ggcagagaatccccaagcaaacaaacagggtagaggtagagggagaggagaggagaggagaggagaggagaggttgggtctgggacaccatggctcagatgaagctgtacggggcggtgatgtcgtggaacgtgacgaggtgcgcaacggcgctggaggaggctggctccgactacgagatcgtgccgaccantttcgcaaccgcggcccacaagagccccgagcacttcgtcggaaacccgtttggtcaggttccactctgcaggatggtgat

SEQ ID NO: 42775 - DNA, 271 bp, Zea mays
caggcgtacgtcgatgagcacctgatgtgcgagatcgaaggacaacatctcagcgccgccgccatcgtcggtcacgacgcagcgcttgggcgcagtccgagagcttccccgagttaaagcctgaggaggttgctggtatcataaaggactttgatgaacctggtactcttgcaccaactggtcttttcgttggaggtacaaagtacatggtgatccaaggtgaacctggagttgtcatccgaggaaagaagggcatgggggcattatatca

SEQ ID NO: 42776 - DNA, 265 bp, Zea mays
agaagatcatgttcgccatgacctccataaagggtgttgggcgccgcttctccaacatcgtctgcaagaaggccgacatcgacatgaacaagagggccggtgagctgacgcctgaagagctggagcgcctgatgacggtcgtggccaaccctaggcagttcaaggtgccggactggttcctcaacaggaagaaggattacaaggatggaaggttctcacaggtcgtgtccaacgccctcgacatgaagctcagggacgacctcga

SEQ ID NO: 42777 - DNA, 255 bp, Zea mays
cacgccgccgacaacgaggacctgccggagtccgtcgactggagggccaagggcgccgtcgccgaggtcaaggaccagggcagctgcgggagctgttgggctttctcaacaatagcagctgtggaaggcatcaaccagattgttacaggcgacttgatctccttgtctgaacaagagcttgtcgactgtgacacttcgtacaatcaggggtgcaatggaggtctgatggactatgcatttgagttcatcatcaac

SEQ ID NO: 42778 - DNA, 272 bp, Zea mays
ggatgaacgagaagagcggcggcgcgggcggacaaggagcaggcggaggaggagctgtgccaagccacaatgggtatctcacgcgactcgatgcacaagcgccgcgccaccggtggaaagcagaaggcctggaggaagaagcgaaagtatgagcttggtcgccagccggccaacaccaagttgtcaggcaataagacagtgaggagggtccgtgttcgtggaggtaacgtgaagtggagggctcttcgccttgatactggtactactctggg

SEQ ID NO: 42779 - DNA, 278 bp, Zea mays
gatactatggatgaaattcttgctaggatacaacaacgggaagaagcagcagtaaagcgtgagcgagccatggcgtacgcgttcaaccatcagtggagagcaaggtctgccacaagtctaggaaacttcagctatgaagtcggtaagggtggctggggctggagctggatggaccgctggatcgcagcacgaccatgggagccgcgatccatggtgcaccctgagaacccgaagaaagcacaggcaaagaaggagaacaccacaaaccatcagctctc

SEQ ID NO: 42780 - DNA, 316 bp, Zea mays
catcgcttggagtcaggatcagcccgccgccaggagagccggatcggtcggttcgtcgcagatcccggatctgctctgtcacgaggtctttcggcgggtgctgtctcgcgaggtgtagcgagccaagttcaggagagtttcgagaagctgaaatggctcctaaagctgctcctgccaagaagggtgatgccaagacccaggccttgaaggttgccaaggctgtgaagtctgggtcagtaaagaagaccaagaagatccgcacgtccgtgacatttcaacgccccaagaccctgaagaaggctagggaccccaagta

SEQ ID NO: 42781 - DNA, 307 bp, Zea mays
gcaccgcgcgctgttgtccatccttgtgcagcaaaaatgacggctggctacattgttggctcactggtcggatcctttgccattgcatacctgtgtgacacatttatctctgacaagaaggcatttggaggtagcacccccaagactgtttctgagaaggagtggtggcaagccacagacaccaagttccaggcctggcctcgcactgctgggccaccggttgtcatgaaccccatcagccgccagaacttcatcgtcaagtccactgagtaggtttgggctggagaagtggttctgcgacttggtg

SEQ ID NO: 42782 - DNA, 308 bp, Zea mays
acaacaccgagcccatggcggaccagctcaccgacgaccagatcgccgagttcaaggaggccttcagcatcttcgacaaggacggggatggttgcatcacgaccacggagctgggcactgtcatgcgctcgctggggcaaaatcctacagaggctgagctccaggacatgatcaacgaggtcgatgctgatggcaacggcaccatcgatttcccagagtttctcaaccttatggctcgcaagatgaaggacaccgactctgaggacgagctcaaggaggccttccgtgtgtttgacaaggaccagaac

SEQ ID NO: 42783 - DNA, 279 bp, Zea mays
aacgtaaagcacaccaggtattcgtactcgactatggccttgcgaagaagtatcgagatctccaaactcataagccaataccatacagggaacacaacaatctcacaggaacagcacgatatgacagtgtaaatacccatcttggagttgagcaaagcagaagagatgatctggaatctcttggttatgtgctcatgtatttcttaagaggaagtctcacttggcaaggcctgaaagctggcacaaagaagcagacgtatgataggatcagtgaaaaga

SEQ ID NO: 42784 - DNA, 305 bp, Zea mays
ggccacctgtcagagtcccctcttggggactggaagacaatgttgtctgcatacagcctgctcgaaactttagtcggcctgatggcttagaggactctgaggatagcaaagaagatgagaatgtgcctactgctcctgatcctccaagtcaacatttacgtgggcatgggacaggcttttgctttgattccagctttgatgttcacaagaagtgtcccctctgtgagttaatgtttcctcctaactatgatcagagcaaatttgaagaacatgttgaaagtcactggaaggtgtgcccgatgtgc

SEQ ID NO: 42785 - DNA, 302 bp, Zea mays
tatgctgttggtgcatctggtgattaataatactactatgacagagccatgctctgtgaagagtattagtagcagcgctcatacaagctacagttccgtctcttttctcagctatgtaaaacttccaaactgttcatgcttaaaactgagagttttcttggtgtgaggtgtgcatgtcgttgttgaggccattgctgcacattccacctattgaggccctcctcaaattaagcctcgaaaaagctgatatcttttcgtagaactctagactccggtgaatgcaactggctggtttgcttccg

SEQ ID NO: 42786 - DNA, 297 bp, Zea mays
tgacaattcttaagaatctctcttggtggtgtaaaagatgaagctgatattaggggccaccgcaggacatacattggacgcatgccagggagacttattgatggactaaagagggtatctgtgagcaatccagtgatgcttctagatgaaattgacaagactggttctgatgtacgtggtgatccagcatcagcactactggaagttcttgatcctgagcagaacaaagcattcaacgatcactatttgaatgtgccgttcgcactgtcgaaagtcatatttgttgcaactgccata

SEQ ID NO: 42787 - DNA, 306 bp, Zea mays
gcgccatcttccttgagactcctgcgccatgagagcgaagtggcggaagaagagaatgcgcaggctgaagcgcaagagaagaaagatgaggcagaggtccaagtaaaccatcttgtgcacccacgaagcctgcgggagcagaagtaagggatgctgaagcccggaacaagtggttggactgtatgctgctgtcggtaataagtctcagtagacccggaatgtcacctcgccgagatcagctgggaaaatgactaccttcctcacaaccacaacagtccccgctggcctctgccctggacctttggc

SEQ ID NO: 42788 - DNA, 209 bp, Zea mays
atcggcagtcggcacgcaggctagcagcacagcagcagccagaaccatcccctctactcgctacgcttcgattcctcgtcgccgattactcctcctcctcctccaccctcgtccgtcccgttccggcgcgcgagctcgcccgagatggcgaacgcgagatcgggtgtcgctgtgaacgatgactgcatgctgaagtttggcgagctgca

SEQ ID NO: 42789 - DNA, 228 bp, Zea mays
cccaattatttggcctccgtcagagaggggagaaagacccgttcgaggcggcggcgatgtcggggcgcggcaagggcggcaagggtctgggcaagggtggagccaagcgcccacggaaggtgctccgcgacaacatccagggcatcaccaagcccggcgatccgcaggctggctcggatgagcgccgtgaagcgatctcggggatcatcctacgagagacccgcgcgt

SEQ ID NO: 42790 - DNA, 311 bp, Zea mays
gacagcctgggtggtactgtggaccgaacttctacaccatagaagtcctccgcaagtttgctaggtcacagcttgactacatccttggaaagaacccattgaagatgagctacgttgtgggtttcggaaaaaagtacccgaagcgccctcaccacagaggtgcgtcgatacctcataacggcgtcaagtatggatgcaaaggaggttacaaatggagggacacgaagaaggcaaaccctaacatccttgttggagcaatggtggctggccctgacaggcgtgacggctacaaagatgtccgcacgaactac

SEQ ID NO: 42791 - DNA, 304 bp, Zea mays
aaccagaagagaggcggcgcgggcggacaaggagcaggcggaggacgagttgtgccaagccacaatgggtatctcgcgtgaatcgatgcacaagcgacgagccaccggtggaaagcagaaggcctggaggaagaagcgaaagtatgagcttggtcgccagccagccaacaccaagttgtcaagcaataagacagtgaggagggtccgtgttcgtggaggtaatgtgaaatggagggctcttcgccttgatactggtaactactcatggggaagtgaagctgttacccgcaagaccctatcctcg

SEQ ID NO: 42792 - DNA, 305 bp, Zea mays
gtcagagcatgcattctacctggactgggctgtccactctttcaggatcaccaactgcggagtccaggacaccacccagatccacacccacatgtgctactccaacttcaacgacatcatccactccatcatcgacatggatgccgatgtgatcacgatcgagaactcccgatctgacgagaagctactgtccgtcttccgtgagggtgtgaagtacggagctggcattggccctggtgtctacgacatccactctcctaggattccctccaccgaggagatcgcagaccgcgtcgagaagatgc

SEQ ID NO: 42793 - DNA, 301 bp, Zea mays
gcgaaggcgaccctccctccttcgctccttccgcgccgcctcccggccgtcgccgccatggtgaagtactcgcaggagccgggcaaccctaccaagtcggctaaggccatgggcagggatctgagggtccacttcaagaacacaagggagacagcctttgcgcttcgcaagttgtctttgaccaaggctaagcgataccttgaggatgttattgctcacaagcaggcaattcccttccggagatactgtgggggtgttggtcgcaccgcgcaagctaagtcgcgccactcaatgggcaggg

SEQ ID NO: 42794 - DNA, 300 bp, Zea mays
gtcgtggacttcgtactgctagcaagctccgtagtcaccgacgagaccagaagtggcatgatacacagtataagcaagctcatttcggcacagccctaaagcgccaacccttttggaggtgcttctcatgcaaaaggaatcgtgctgtaaaaagtaggagttgaagccaaacagccacattctgccattaggaagtgtgtacgggtccagctgatcacgaatggcaagaacatcaaagcttttgtacccactgacggttgcttgaactttactgaggaaaatgatgaagttctggttgct

SEQ ID NO: 42795 - DNA, 304 bp, Zea mays
cggttctccattttcaactctttcatgatggttattttcctaactggtttggtttcgatgatattgatgcggactttgagaaacgattatgccaaatatgctcgtgaagatgatgatctagagtccctggagagagatgttaatgaggaatcaggatggaagcttgtacatggcgatgtatttcggcctccccaaagtttgatgtttctttctgcacttgttggtatcggtacccaattggcagctcttatcctacttgtgatcgttttggccatcgttggcatgctatacattgggcgagggg

SEQ ID NO: 42796 - DNA, 298 bp, Zea mays
cttttctcgtttagaacctctaaaatttcccccactcgccagtcgcagcagcacctgtagcagccatggacgccagcggagccggtagcaaggggaagaagggggcggccgggcgcaaggcaggcggccccaggaagaagtcggtgacgcggtccgtcaaggccgggctgcagttccccgtcggccggatcgggcgctacctcaagaagggccggtacgcgcacgcgtgtggcactggcgcccccgtctacctcgccgccgttctggagtacctcgccgccgaggttctggagttggc

SEQ ID NO: 42797 - DNA, 288 bp, Zea mays
gaccgagtacccgacgcgctagctagttctattgccgcacctcacatctccaggagggactcgttcgttcagctaactacactgcaagcactggccaccacggcgaccgaggcggcgccgccgcaggaccagcacgccaacggcaacggcgagcagcagacgcggcactccgaggtcggccacaagagcctgctcaagagcgacgacctctaccagtacatcctggacacgagcgtgataccgcgggagccggagagcatgaaggagctccgcgagatcaccgccaag

SEQ ID NO: 42798 - DNA, 303 bp, Zea mays
gcaggtgacatacataaggtgcgagcaacggcagacggaagcaccggtgacgacgacttccgtgtcatcaggatcgcagggttttgtttcgtttcgcgggcgttcggaatcacatccatggcgaggaagatgctcatcgacggggaggtggcggcagtcgcggatggtgggcactatgactacgatctcttcgtcatcggggcgggcagcagcggtgttcgcggctctcgcaccgccgcatccttcggagctaaggttgcagtttgtgagctcgcattccaccccatccagctcagagtggct

SEQ ID NO: 42799 - DNA, 302 bp, Zea mays
acgacccaggtctcggactcgggctcggccccggaagacgacgaactccgcactcgacgccccagggctcggactcgggatcagcccggaagacgacgatctccgcctcgcccgaccccagggctcggactcggcctcggcctcagccgacggtatccgtctcgcccgacccaagggctcggactcgacctcgacctcggaagacagatttgacctcgacctcggaggagcctccgcctcgccctacccagggctcggaccaaccagtcacatgaggcgccatcattaccctaccccaagct

SEQ ID NO: 42800 - DNA, 298 bp, Zea mays
atggaaattatgtaatagtagtgcctcaacagattacataccttgacttgacaacgagaaggctatcaagaagcttcgaactaccaaacattatgaacatcgtgagaggcattgccctgaggagcctcctacctgcattgttccactcccagaaggatataaacggccaattgagtggccaaagagcagggacaaggtatggtacagcaatgttcctcacactaggcttgcagagtacaaggggcatcaaaattgggttaaggtctcaggtgactatctcttgttccctgggggtggg

SEQ ID NO: 42801 - DNA, 283 bp, Zea mays
agagagcgataggcatctctcgggcacactggcacaagcgccgcaagaccgggggtaagagcaaaccctaaccacaagcaagcggaagtactcactgggacggccggccgccaacactaagatatggccctcgccgcatacatacagtccgagttcgaggaggcaataagaagtatcgtgctctgagattggatgtggggaacttttactggggctcagaatgttgtactcgcaaaacaaggatcattgatgttgctcacaatgcatccaataacgagcttgt

SEQ ID NO: 42802 - DNA, 298 bp, Zea mays
aggcggcgccgcgccgccagctgctgccaggagccaagcccaagcatgagcgtaaaccatgcggattggttctctattcgtctcgaggctggccaggtctagccatgccctccccgctgccgccgccgcggccatctctcaggcgcccaggccccagcacatcgaaaatacccaactctccggccttggagcagcggctcgtgatttcagctcaagggctctatggaagggagcattcgtcgatgctttcctggctagaataaagaagaacagggaaaacatgaatgggaagaagatt

SEQ ID NO: 42803 - DNA, 298 bp, Zea mays
atccagaaggctgcagctgctttgaggggatctgaccaccgccgttctaccactgtttctgctagattggatgctcagcagacaaagctcaaccttcctgtccttcccacaaccacaattgattcattccctcagactgtggaactcaggagggttcgccgtgaatacaaggcaaagaagatcaccgaggacgaaaatatcagtgccatcaaggaagaaatcagcaaggttgtcaagatccaagaggagcttgacattgatgtgcttgtgcatggagagccagagagaaatgacatgg

SEQ ID NO: 42804 - DNA, 304 bp, Zea mays
accttctcagaatagtggcagcttggtccatacttgctgcctacaccatacccttcttcatcatcccaaggaccgtgcatccgctgcttggctggcccctctacttgctcggttctttctcactttcctccattgtgatcaacattttcttcctccacccgatcaccgtcctcacgacatggtttggattcatcggcgcgctcgtggtgatggccttcccttggtatctaaatggcgtcgtcagggcctaggcagtgtttgcgtatgcgttctgctgcgcgcccttgatctgggcttctctggt

SEQ ID NO: 42805 - DNA, 300 bp, Zea mays
atccctctcgcggaggcctcgctctggttggaaggtttggagaaaatccccggctcgacgagatcgtgacattgagaggacgatcagacggcgcgcgctcctcctcctcctcctggtctcggcgttggtctttcagatccacgcctccgacccgctgctgtacgagccgttcgatgaggactttgaggggagatgggtcgtctccaagaaggatgaataccaaggtgtgtggaggcatgacaagagtgatggtcatgacgactatggcctccttgttagtgagaaggcaaggaaatacgc

SEQ ID NO: 42806 - DNA, 299 bp, Zea mays
gtcaggcaggcaggtcggcgaggagggcaggaagaccgaagaccgagccgtgcggaggatcgggacgggaacgggacaggaccccaaaatctcagatccttcctgcacgcacgcccgtgcccgatgacgcgtcgttcttgccggccgcgcctcacctccgccctctcctcctccagggggatcggatacgccacaggctgcgcgatggtgctgtgggtcttcggctacggctccctcatctggaaccccggcttcgacttcgacgacaaaatcctcggcttcatcaagggctacaagcg

SEQ ID NO: 42807 - DNA, 284 bp, Zea mays
ttgcgatctgaagtggcttctgatcactcgatatttgttggcgatctagctgctgatgtcactgatgaaatgctgctggagcttttctccagcaagtaccgctcggtgaaaggagctaaagttattattcgttgcaaacacaggccgttccaggggctatggatttgtcaggtttggagacgatcttgacaaatctcatgccatgtctgaaatgaatggtgtatattgctctacgaggccaattcgtataggacctgcgactcccagaagatcttcaggtgatt

SEQ ID NO: 42808 - DNA, 283 bp, Zea mays
cactcacacagcaaatacccacagtccacagcaagaaccgaagatgttcggaaacatcggtaagatcccgatcatcggcgagctgacgggcagcaacaagaatgcgcacctcaagggcagcctggtgctcatgcgcaagaccgtgctcggcattcgagtcaccagcatcgccggctccctcatggacggcctcggcgagttcctcggccgcggcgtcacctgccaactcgtcagctccaccgtcgtcgtccccaacaacgggaacgcgggaacgtgggtcagg

SEQ ID NO: 42809 - DNA, 287 bp, Zea mays
cgtccacccgtcgtcctcctagctcctctactcgccagtcgccatgggcaagattaagatcggaatcaacggcttcggaaggatcggcagagctcgtgagccagtcgtcgccctccagagcgacgatgtcgagctcgtggccgtcaacgaccccttcatcaccacggactttatgacctacatgttcaagtacgacaccgtccacggccactggaagcacagcgacatcacactcaaggactccaagacccttctcttcggtgacaagccggtcaccgtctttggca

SEQ ID NO: 42810 - DNA, 271 bp, Zea mays
cgcatcaccctggccagattggcaatggctatgccccagttctggaatgacacacctcacacattgctgtcaagtttgctgagctcgttaccacgattgatgggcgatccggcaaggagctggagaaggagcccaaatttctcaagaacggtgatgctggtatggtgaagatggttcccactaagcccatggtggtgcagaccttttctcagtatcctcctcttggtcgatttgctgtccgtgacatgaggcaaaggtggctgtcggagtc

SEQ ID NO: 42811 - DNA, 271 bp, Zea mays
tggtacacctgctatgacctcaaggggtttggttgacaaggacttcgtgcagattgccgagtaccttcaccgagctgtgaccatctgcttgagcatccacgcggagcatggcaagattctcacggacttcaagaagggcttggtgcagaacaaggacatagagaacctgagggcggaggtcgagatcgttcgccacttcatttgacatgcctggcttcagggtgtctgacatgacgtacacagactagactgctgctgacttgggtgcaaa

SEQ ID NO: 42812 - DNA, 279 bp, Zea mays
agatcctcaaattgatgggtggcgaggtccaatacatcagagagtcagagcggagtttcttcctcatcgtcctcgagcagccccaacctcgtccagcagctggtagagaatcgtctgatatgttaagatccgtgctgaccccacctaactttctcggccgattacataacttagccccctgataagagggtgcctactttacgagaagcctggaaacaaatcaaagctgccatggcaattcaatgactgaagtgttgttgatgaggctgttttcagtgc

SEQ ID NO: 42813 - DNA, 276 bp, Zea mays
ttagaaccagacgctaaaggagttccagacttttggcttactgccatgaaaacaaacgaggttttgtctgaggagatacaagagcgcgatgaagccgctttgaaatatctacaagatatcaagtggtctagaatcgaggatcctaagggtttcaagctggattttatgctttgataccaacccattcttcaagaattctgtcctgacaaaaacgtaccacatggttgatgaagatgacccaattttggagaaagtattggaactgaaatcagtggt

SEQ ID NO: 42814 - DNA, 274 bp, Zea mays
ggaacaatcccttctgagcttggcaacttgaagaatctaataagcttcgacttgtacaagaacaacatttcggggacaatacctcctgcccttggaaagttgaagtcccttgtattcttgtaagtttaattctgtaaattctgtttacatattataaatacttgtcagattgtcacatcttagcagctaaaagtggatttgaatttgatactagttttgctgaagatgatcattctgtcttctttaaattgtgttaggatgtggtaggtcaagc

SEQ ID NO: 42815 - DNA, 276 bp, Zea mays
cacattccggccagagattgctaaagtggctgataagatatatgccgtgagatacaagaatagggtgagcaacatcgacgtggtgtccaaggaggaggccctggacttcatcgagcgtgatcagacgtacaatgctagctgaggctgctgctgctgctgctgctgctgtgtattgattgatcgcagatgctaacgcagacaggatagttcttgttgtgttatggatattctggcctattgttgtagctgtgtatatgtgtgatgcagttaggtagc

SEQ ID NO: 42816 - DNA, 274 bp, Zea mays
gtctaatgccgaaaatgaggggttgaaaatgtatagagatactgcagaagctgtcatctgtggtctgattccagattcgcctcaagccactgccagcagaactggaggaggcttggtgtggataagcgggtggaattctctccagcatgccaccaatgctgcgttcctatctgttgtgtacagcgactacatgctctcgacgcggacagcggcagtgcagtgcagcgggaagtactacagccctaccgatatacgcaactttgctgcatcacag

SEQ ID NO: 42817 - DNA, 276 bp, Zea mays
taccactcaccgatatgggcctaataccttcaagttgcacaggttgcctgtcccaaggcctggtcaggttttgggccttgttggaacaaacgggattggaaagtcgacagctcttaaagtgttggctggcaagctgaaacctaacttggggcgcgtcaaaaacccacctgattgacggtctacttcttacatactttcgtgggtctgaacttcagaactacttcacacgcatattggaagataacctgaaggcaatcatcaaacctcagtatgttg

SEQ ID NO: 42818 - DNA, 276 bp, Zea mays
gtgaatctgagaactccaaaaaatatgcagtacagaacttctctaagagcctgctagatgttgctgacaatttggctagggcatcatctgttgtcaaggaaagcttctcgaaaattgatacctcaaaagattctgctggagctgtcccactactgaaaaccctgctggagggtgtggacatgactgagaagcaacttgcagaggtcttcaagaagtttggagtcgaaaatttgacccgctgaatgaggaatttgatcctaacaggcattgtgcagt

SEQ ID NO: 42819 - DNA, 276 bp, Zea mays
gctactgtcacacacacacacacacacagacaagtggtttccaacgccaagtgtgtgtactagcaaccagctagctcgggcggcagcaggcagccatcatgtcggaggagaagcaccaccacttcttcaaccaccacaagaaggacgaggagcagcccgccggcgagtacgggtactccgagatcgaggtggtcaccgccaccggcgagggcgagtacgagaggtacaagaaggaggagcaggagcacaagcacaagcagcacctcggcgaggccg

SEQ ID NO: 42820 - DNA, 273 bp, Zea mays
gtgaccggcgggaggtcaccgggcgtgtaggtgtgatcaagaacagggagaagcacaagggcggcttcgataccatccacgtcgaggactccatgggccaccagttcgccacccgcatgggcaacgtgttcaccatcggcaagggcaacaagccgtgggtgagcctgcccaagggcaagggtatcaagctcagcatcatcgaggagcagaggaggcgcgactttgctgcccaggctgctgccaaggcataagttctctgaatgtgctgcttgg

SEQ ID NO: 42821 - DNA, 110 bp, Zea mays
ttattattgcgctgtcacatacatgtaccctgcctgctacctgaagatggatgtgtatcgagttatcaaattaaggcacagcagcagaaactatatgtattgcataaaaa

SEQ ID NO: 42822 - DNA, 261 bp, Zea mays
tgaggttgttcataccaagctaagacaattggtgatcatgatgtgatgtacaagtacttgtcaaagaatttagtttttgttgctactttgtctcctaaagctgctggtgatattggatctgtgctacctgaagaagcttcacttgttgcatatcttattgatgcagtcactggacgcatacttcatcgtgtaactcatcatggtgcacaaggccctgtacatgcagtcttgagcgagaactgggttgtttatcattatttt

SEQ ID NO: 42823 - DNA, 134 bp, Zea mays
agtcagtggtgacgaccacaccgtttctgccactcatggtgacagtgaccagaacactagagacatcatcatgagggagttccggtctggctcatcccgtgtgctcatcaccactgaactgcttgctcgtggta

SEQ ID NO: 42824 - DNA, 266 bp, Zea mays
cttggataatagcttgtgcaggttgccagcaacccctcaggcacttttggaggctgtgggttctaacggcgtgacaggatcagaagcacttgcagctgcagagatacatgcagctttggctcactgcaagagctggtgccagagatccatctgctgtgccgtctatatgccgcatctctgctgctcttcagtataactttgtttcaccaggtacagaaggcacagattctggactggcttcagtattaaattcactggagttctgc

SEQ ID NO: 42825 - DNA, 284 bp, Zea mays
cacacactcgagaactccatttcgatctcatttgacatcaacccatcctcgtttcctccgtctagcagcctctcaccctcatggccaagatcaagatcgggatcaatgggtttggcaggatcggcaggctggtggccagggtggccctgcagagcgacgacgtcgagatcgtcgccgtgaacgaccccttcatcagcaccgattacatgagctacatgttcaagtatgacactgtgcacggacagtggaagcaccatgaggtacaggtgcaggactccaagacc

SEQ ID NO: 42826 - DNA, 282 bp, Zea mays
cttgagagactggactctgaatttttgaagaccttacagtgcacagatccatacacaaaagattatgttcagaggctcagagaggaacccctgtatctggttgtcgcacagaacgtccaagattatcttgaaagggttggaaacttcaaagctgctgccaaggttgcactgcgccgtgttgaactagtttactacaagccccaagaagtgtacgatgcaatgagaaaactcgcagagcagcctgaggactgtgtggatgatgatgatgcagaggctggtgat

SEQ ID NO: 42827 - DNA, 280 bp, Zea mays
gtgaacattgaatatgaagcttctgagatgtttgatctgcacaatgttgtcatatctatacctctgcctgcagttcgggaggctccaagtgtcagacagatagatggagagtggaagttggactcaagaaactctgtgttggaatggtctagtctccttattgatcagtcgaatcgcagtggttccatggaatttgttgttcccccagctgatccgtcatcatttttccccatctctgttggattttctgcatcgagtactttcagtgatctgaaggtta

SEQ ID NO: 42828 - DNA, 198 bp, Zea mays
catcatcctagaagaaggtgcggagaggccaaaagtcggcctgatggtgatgcctggtttcctgatcgggaccagcgtcatacagtcccgtgtgtacctttcagatgcaaagtgtgctgactgactgaagattgcacaaggagcttgagggggtgactttgctccttgggagagataacagcagcataagtttatggt

SEQ ID NO: 42829 - DNA, 119 bp, Zea mays
agacattcctcccaacaccacctcgccgcgatctccgtagcctccgtcgcgtcgagcatcgctcatgtcggcctactgcggaaagtacaaggatgagatcctcaagaatgctgcctaca

SEQ ID NO: 42830 - DNA, 279 bp, Zea mays
tgacgcatcgaggttagcacgcgaagaagcgatcatgagggccaagttgaagaagaagcgcatgaggaggctcaagaggaagcgcagaaagatgaggcagagatccaagtaggcagatcgagatggaatgtggacctgatgacatgcgtgggtacatacatttcttcggatgcgttggtgtgcctgtggagagatgtcaacctgccatggtgtcacggtccgccatcagttgaacgtcttgcctgcacttcagtaggccatttttcatggttctagttg

SEQ ID NO: 42831 - DNA, 278 bp, Zea mays
agaaccttgagaagctgaagaaggtgctagaggtgtacgaggcacgcctgaccaagtgcaagtaccttgctggagacttcctcagcctcgccgacctgaaccatgtgtctgtcactctctgcctgttcgctacgccctacgcatctgtgctcgacgcctacccgcatgtgaaggcctggtggtctggtctgatggagaggccgtctgtccagaaggtcgctgccctgatgaagccatctgcttgaaacggttgccctgtcaatcggtgaatggaataa

SEQ ID NO: 42832 - DNA, 280 bp, Zea mays
agtcacaaagcctcagatctcagtcgcctgcggcgccgcttcgttcgtgtggaggggagaagacaggaaatggcggcgactgagggcgtgctcttggggatgggcaaccccctcctcgacatctccgccgtcgtcgatgacgccttcctgacaaactatgacatcaagctgaacaatgctattctcgctgaggagaagcacttgcctatgtatgacgagttggctagcaagagcaatgttgaatatattgccggaggagccacccagaactctatcaggg

SEQ ID NO: 42833 - DNA, 284 bp, Zea mays
gacgagcccgacggccgtgaagcaggtgagctgcgtgtgggacgcgtacgaggccaccaagggcgcccacgggctgtgcatcctgaccgagtgggacgagttcaagaccctggactaccagaagatcttcgacaacatgcagaagcccgccttcgtcttcgacggccgcaacatcgtcgactccgagaagctgggggagatcggcttcatcgtctactccatcggcaagccgctcgacgcctggctcaaggacatgcccgcggtcgcctaatcccaacccctca

SEQ ID NO: 42834 - DNA, 268 bp, Zea mays
  unsure (1)..(268): unsure at all n locations
tgacctccaattttttgttggtgagtccatgaaggatgatgcgtctgtggtattcgcctattacaaggatggtgccactaatccgacattcctctatttctctcatggtcttaaggagatcaagtgctaggcgtgcggcgaaattagttacccatgttgggtactatctatgtactattattatatccanaactatagttgtcctggctgaattgaactcaaaagggtttgtttgagaaaaaattgtcccaagattggattgcttgtt

SEQ ID NO: 42835 - DNA, 276 bp, Zea mays
ccgctggatgagccgccagctcgacgccgccgagtggggcaccgtcgcctgggccaggcagaaatacatgcactacaactactgcgacgacggctggcgcttcccgcagggcttccccgccgagtgctcccgcaactgattcattggtttgtatgttatccccgatccgttcgcgcggtcgccgtccgtctcacacagtgccctgccctgcccccccgacgatttcttgcttcctgttcctcatctaattaatcatccatggtgtttgttcgtcac

SEQ ID NO: 42836 - DNA, 279 bp, Zea mays
atggaacacttttcgaagctgagcaccgttccaccttctacatcccctattggaatcttcctttgacaaaatggatagttccaaggcagcgcaagttccatagtgacctcaaagtgatcagcgccggccttgataaccttataaaaaatgcaaaggagacgagacaggaagctgatgtggaaaagctccagcaaagggactactcttctctgaaggatgccagcttgctgaggttccctgttgacatgaggggagctgacgctgatgatcgccagcttc

SEQ ID NO: 42837 - DNA, 281 bp, Zea mays
tgtaccagaagagcactgagctgctcatccgcaagctccccttccagcgcctcgtccgcgagatcgcgcaggacttcaagactgatctgaggttccagtcctccgccgtcgcggcgctgcaggaggccgccgaggcgtacctggtggggctcttcgaggacaccaacctttgcgccatccacgccaagcgcgtcactatcatgcccaaggacatccagctcgcgcggcgcatcaggggcgagagggcttgagcgcccgtcgtgctgctcgtcgttgtagtg

SEQ ID NO: 42838 - DNA, 279 bp, Zea mays
gatgaagctgtacggggcggtgatgtcgtggaacgtgacgaggtgcgcaacggcgctggaggaggctggctccgactacgagatcgtgcccatcaacttcgccaccgccgagcacaagagccccgagcacctcgtccgcaacccgtttggtcaggttccagctctgcaggatggtgacttgtacctcttcgaatcacgcgcaatctgcaagtacgctgctcgcaaaaacaagccagagctgttgagggaaggaaacctcgaggaggcagcaatggtgga

SEQ ID NO: 42839 - DNA, 216 bp, Zea mays
  unsure (1)..(216): unsure at all n locations
catntgaaggcccttgccccagtctatgtgggaacaaaattcgtcaagcttgatgctgaaaatgctccattctttgtggccaaactggcaatcaagacactgccatgtgtaatattgttcaagaagggtattgctgttgaccgattagttgggtttcaagatctcagaagtaaagacgattttccgacaagagcgttggaaaatattctcaagacg

SEQ ID NO: 42840 - DNA, 276 bp, Zea mays
gtcggaacaacaagaagttgcttagttacgtgcgagccttcgatcggcactgcaacatggttcttgagtacgttagggagatgtggaccgaggtaccgaagaccggtaaaggcaagaagaacgctctcccggtgaacaaggacaggttcataagcaagatgttcctccgcggggattcggtcatcatcgtcctcaggaacccgaaatgagtagactgtacacgtagagagtctgtttgctagcagtaacgttgtgctattgggtgtaaggtgtatg

SEQ ID NO: 42841 - DNA, 278 bp, Zea mays
ctggaacgtctgacgttatcaataagctcctagtccagacgccatgggtcatttcacagaggaggacaaggctactatcacaagcctgtggggcaaggtgaatgtggaagatgctggaggagaaaccctgggaaggctcctggttgtctacccatggacccagaggttctttgacagctttggcaacctgtcctctgccttcgccaatcatgggcaaccccaaagtcagggcacatggcaagaaggtgctgacttccttgggagatgccataaagcac

SEQ ID NO: 42842 - DNA, 244 bp, Zea mays
tgagctaaaacgataaaccagagcccggcctaaatgtgacggccgctctagtggaagcgcgtataaattgggggaaggaaaattccagcggacgagcgctctagccgtttttcctcgtcctcgatccagcccctgccgcttccagctccgatcgatctgatccctccccatcaccacgcccatggcggaccaactcaccgacgatcagatcgccgagttcaaagtcgccttcagcctcttcgac

SEQ ID NO: 42843 - DNA, 256 bp, Zea mays
cgctcctcggtggccttgccgtccgcagggcttgctacggtgttcttcgttatgttatggagagtggtgccaagggttgtgaggtgatcgtgagtggaaagctcagggcccaaagagccaagtccatgaagttcaaggatggctacatgatctcatctggtcagccagtgaacgagtacattgactcgcctgtgagacacgttcttctcagacagggtgttcttggcatcgaggtgaagatcatgcttgactggga

SEQ ID NO: 42844 - DNA, 169 bp, Zea mays
gtgacctccaattccctcgtagcagcagcaccagtagagtctccttcctctccggcggcgatgtctgggcgcgacaagggcggcaaggggctgggcaagggcggcgccaagcggcaccgcaaggtcgtccgcgacaacatccaagggatcacgaagccggcgatccgga

SEQ ID NO: 42845 - DNA, 278 bp, Zea mays
atacaatcaaccagcaacactcttctcgtataacataatacagcgaaggtaactcacatggcaacttccatgggttgtctcgtcttgctctgccttgtttcttctctccttcccagtgccgtccttggccacccatggggtggcttgttcccacagttctatgaccattcgtgccccaaggcgaaggagattgtgcagtccattgtggcacaggctgtggccaaggagaccaggatggcggcatctttggtcagactgcatttccatgactgctttgt

SEQ ID NO: 42846 - DNA, 276 bp, Zea mays
tagggtttttgattttagccgccgtcgctgctcatctcacatccctcgagaagacgcctgctcctcgccgatcgatacgatggccgtcttctccgacctccacaccgccgacggcctcaagtccctcgaggctcacctcgccggcaaaacctatgtgtctggtgactccattactaaggatgacattaaggtcttcgccgcggtgccgtcgaagcctggcgctgagtttcctaatgccgcccgctggtacgagaccgtctctgcggctgtagctca

SEQ ID NO: 42847 - DNA, 98 bp, Zea mays
  unsure (1)..(98): unsure at all n locations
cctcgagcgaattcggctcgagagagcagccagcacccctggacctacgagtcgtaaaactgganagtttcacatcaaaccttgagagccagaggaag

SEQ ID NO: 42848 - DNA, 271 bp, Zea mays
ccggcgcctgcacccggacgtaaccatcgtctacgccgactggtacgaggccacgatgagcatcttccaggaccccgggaagctagggttcacaaacgctctgcggacttgctgcgggaaccagaccgtgccgtgtggcaggcccgggtgctccgtctgcacggacccgtccacgtacgggtcctgggacgggacgcacccgacggaggcggtgtacaaggtgatcgccgacggggtgctgcacgggccgcacgcgtcccctgttcctctc

SEQ ID NO: 42849 - DNA, 197 bp, Zea mays
cttacttcagatggcaacactaaggatgatcttagactcccaagtgatgagactcttgtggcccagattaaggaagggttcgaaagcgggaaggatcttgttgtgactgtccagtctgcgatgggggaggagcagatctgcgcgctgaaggatgttggccccaagtaacttccttggctttggagacggaacctact

SEQ ID NO: 42850 - DNA, 268 bp, Zea mays
cttctcccttttcagttctatcgataccatcgaatgggaatgcacatatgtttgacatatttatcttcctgtttcccatcacccgcaggattatactgccaaactgtctgactttggcctcgcaaaagatggccctgaaggtgatcagacgcatgtgtcgacacgggtgatgggaacctacggttatgctgcccctgaatatgtgatgaccggtcaactgactgctcggagtgacgtgtacagcttcggcgtggtcctgatggagctc

SEQ ID NO: 42851 - DNA, 268 bp, Zea mays
gtgaaaagaagcgtctggaggatctgagtggggatctcgtgagataagagcgtgaaagtaatgatgagctacaagaagcccgaaaagaactgataaagggtttggaggaagagctaaatggacggacagctatcgggatcaaaagaatgggggaactcgatgaaaagcctttccaaaatgcatgtaagacaaaatacggaaaggatgagtacgagatcaaagcagcagagctacgtcacaagttggcaggatgaactaaagaagccat

SEQ ID NO: 42852 - DNA, 116 bp, Zea mays
atcacggatttctggaaagaagctctgatcctaagctcacttcatcatccaaatgtggttgcattttatggtgtagttcgtgatggtccagatggaagcttagcaactgttactga

SEQ ID NO: 42853 - DNA, 143 bp, Zea mays
gttccccatccgctcaggccaatcaacagaagtgacgcgagctagagcacacatcccctcccttcttcggttattcctctgtcggtgcactcgccgcagacctctgccatggcggaccagctcaccgacgagcagatcgcgga

SEQ ID NO: 42854 - DNA, 298 bp, Zea mays
gaggtgttgatggagctatacatcaagctgctggacagagctagtgtaagcatgccggaaagttccagaggtcaaaccaggagttcgtgtctctactggagaagctaggattactcctgcttttgagcttcctgcctctcgggtgattcacactgttggccctatatatgatttggacaagcatcctcgaggtgtcattaaagaaggcctatgaaaatagcttgaagcttgctaaagataatggcattcagtacatcgcattccctgctatatcttgtggtgtttatcgctatcctcc

SEQ ID NO: 42855 - DNA, 266 bp, Zea mays
aaccagcaaaaattgacgagcaaaaagtagcagttgtcactgatgcaccaacatctgaggaggaattgcaacccgtacactatatttccccccaccagaggaaaacttcaaggttcgaccagaaatatttttcagtgatgggaacatatggagagcgcataacacaaaggaaattttagaaaaacatcttaaagcaactggaggcaaagtgatgactcgttttccaccagaacctaatggatatcgtcatattggtcatgccaagg

SEQ ID NO: 42856 - DNA, 274 bp, Zea mays
ctccaaggcccttggagtatttcgaataggaatgagccaattcgaaatactccaaggcccttgaacgtatttatgagaagtttgatccagatttcattgatattaggacaaaagctcgtgaggtgttgcagagggaggacgatctaaatgaaattgtgcagcttgttggtaaagatgcgctggcagaatctgacaagattacactggagacagcaaagctactgagagaagattatttggcacaaaatgcatttaccccatatgataagttctg

SEQ ID NO: 42857 - DNA, 283 bp, Zea mays
cctagctgaagatctcgagtgcaacgcaacgttggcgcttggcggccagtagtagcagctaatttagcgtcgctccttcctactagacgagagatcgagaaaccatggccaagctccaagtcactcctggcgccgcgttcaccgagtgcaatgaactcaacttccagggcctgtacatgtaccacacgcccctgggtcccaaggccaaccaagctgcgatcctagagagcaaggccaagatcggcatcggtgccaccgtggttaacaactgggcagtgtatga

SEQ ID NO: 42858 - DNA, 294 bp, Zea mays
ggcaagtgtcgtggacttcgtactgctaggaattgtgatctcaccgacgagaccagaagtggcatgataaccagtataagaaagctcatttgggcacagcctaaaggccaaccctttttgaggtgcttctcatgcaaaaggaatcgtgctggaaaaagtaggagttgaagccaaacagccaaattctgccattaggaagtgtgtaagggtccagctgatcaagaatggcaagaaaatcacagcctttgtacccaatgacggttgcttgaactttattgaggaatatgatgaagt

SEQ ID NO: 42859 - DNA, 297 bp, Zea mays
  unsure (1)..(297): unsure at all n locations
cgnacttgagtctttctgggatgggaagagcaccgctgaggatctggagaaggttgctaccgacctcagggccagtatctggaagcagatggctgatgctgggatcaagtacatccccagcaacactttctcgtactatgaccaggtccttgacaccactgccatgctcggcgctgtccccgaacgttactcatggactggaggagagattggatttgacacctacttctccagtggccaggggcaacgccactgttcctgctatggagatgaccaagtggtttgacaccaactacc

SEQ ID NO: 42860 - DNA, 290 bp, Zea mays
acttttgtgaaagccattcggcacccctgggaggaaaagaagatctatttcacgcagatgcaggaaagtcaccggaaagatatcgagcgcgcattcagtgtgcttcaagcacggtgggcagtgcttcgtggtcttgcttacagacgggatcgtaaccgtctaaccgagatcatcactgcttgcataataatgcacaacatgatcattgaagatgaaggggagtttgctgccaacaccgactttggagacaatgcttctgccactgcacattgcgaactcatacaagaggg

SEQ ID NO: 42861 - DNA, 284 bp, Zea mays
cgagtacatcgggatggtcaggcgcgaggtgccgacgcctacctccgctcacgggcacagtccgtcggcgcggaggtcgtcaacggcctcttcctaaggtacgaggcgcccaaagagccgaacggctcgtacgtggtgcactacaaccactacgacggcagcaacggcaaggtcggcggcgagaagcggtcgttcgaggtggacgcgatcgtgggcgcggacggcgccaactctcgcgtggccaaggacatgggcgcgggcgactacgagtacgccatcgcgtt

SEQ ID NO: 42862 - DNA, 296 bp, Zea mays
ctttgaggggttaatgcctgaagatctaaatattatatcacaacagcctcaaatccagttgaaaatagttggggaacttactgccctgggatggaaccatcaccccctcctgagtacattacctgtttaggtgatttgtacagtgtttcttggatggaagacagtgaaacccacaatctaacagaaggaaacatcaaggatcagtatgaagtggtgaaaacaagaacctcaaactcaaataagtacaaagagggttctcatgttatggagtatggtgataagacttcaaggatgag

SEQ ID NO: 42863 - DNA, 295 bp, Zea mays
gattcagcataggccatatgaccagaaagttgatgtctacagctttggcattgtgctgtgggagctcataactggcatgctcccttttgctaacatgacagcagtgcaagctgcttttgctgtggtgaacaagggtgtccgcccagctataccccaggactgcctgcccaccctcggtgagatcatgaccaggtgctgggatccaaatcctgatgtccgtccgccgttcactgaagttgtgaggatgctggagcatgctgaggtggagatcctgagcactgtccgcaaggcccga

SEQ ID NO: 42864 - DNA, 274 bp, Zea mays
agtcgttcctcgacgaggcgctggtagtgccgggtacgcgctcacctgcgtcgcgtacccgacgtccgactgcgtcatccagacgcacagggaggaagacttgtactagaccgagctggtccccgtgcatggatcaaccttgcacttccattcagattcgatctttgagttattgacaaaaaaaaaaaaaaaggggggccgccgattagccccatcatcgaccggggatttaattcgggacgggtacctacaggggtacaagttttccctaaag

SEQ ID NO: 42865 - DNA, 289 bp, Zea mays
tgctttgaagatctctcaacttcctttggcttcaggcaagcaaaagaggattgctgtgattactcaaggtgctgatccagtggttgttgctgaggatgggaaggtgaaaacgttccctgtgatcctattgcccaaggagaagcttgttgacaccaacggcgcaggtgatgctttcgttggaggcttcctctcacagttggttctaggcaagggcattgaagactgcgtgagggcaggttgctatgccgcaaacgttatcatccagcgcccgggctgtacttacccggag

SEQ ID NO: 42866 - DNA, 269 bp, Zea mays
caggaatgttatggtgtgaggggtaagaagactttacttcatgggtttgtcgggcttgtgaaaaacctgagcaaaagagggagtgctgtctttgccctgtaaaaggtggtgctttgaagccaacaaatgttgataacttgtgggttcacgtgacatgtgcatggtttcagtcacaggttgcttttgctagtgatgagctcatggaacctgctattgggatattgaacattcaacctttgttatttatgaagatgtgtgtgatttgtaag

SEQ ID NO: 42867 - DNA, 290 bp, Zea mays
ctatttgtgcgaatggtggtaaatggaccatcagctgtgacagaggaaaatctgatacgttttggctttacactctgctggctatgattggtgaacaattcgactatggtgatgaaatttgtggcgcagttgtcagtgtgcgtgggaagcaggaaagaattgctatttggacaaaaaatgctgccaatgaagctgctcaggttagcatcgggaagcagtggaaggaacttctggactacaaggactccattggattcattgttcatgacgatgcaaagaagatggacaaa

SEQ ID NO: 42868 - DNA, 280 bp, Zea mays
cgagcaaacgtctgccatacctggttggatgatcgagtcaaaccgcgccgtccgctacatagactctgatgagtacaaggttccccagggaaagcgtgccattgagcttctgtcaggcaaggaaggtatcatctcccagatggttgagaccacccctcagaaggtttacagcctgacgttcacactgggcacggcgggggactcgtgccaaccaccaatagccgtcatggcattcgcgggggatcaggcccagaacttccatactccccaatgggcaacg

SEQ ID NO: 42869 - DNA, 284 bp, Zea mays
ggctctcggaaacaattattattattattattggaaggtgaggtgatctccgagaagtacgttctcgagtacgggactgattgcctggagatgcgtgtcggggccatcgagcgatccggcgagcgggtgctggtcatcgacgacctggttgcgaccggagggacactctgtgctgcgatcaggcttctagaacgtgctggagccgatgtggtcgagtgcgcgtgtgtcattgggctcccgaaattcaaggatttgtacaagttgaatggaaacctgtatacgtg

SEQ ID NO: 42870 - DNA, 281 bp, Zea mays
  unsure (1)..(281): unsure at all n locations
ggcagacttatgagcgggggtacatagagatgtggctggaggctggccatgatacctgtccgaagacacaacagaagcttgccaataaatccctgaccccaaattatgtcttacgtaccctcataactcaatggtgcgaggcaaatggtattgagcctccanaacgccctgctcaaattagggatgcaccactgtcatgtagtgctgctgagcatagcaatgttcttgagcttcttcagaaattgtcttcccaaaaccttgaagatcaacgtggctctgct

SEQ ID NO: 42871 - DNA, 285 bp, Zea mays
agcaagcaagcaagcagcgagtacatacatactaggcagccaggcagccatggcgcccaccgtgatgatggcctcgtcggccaccgccgtcgctccgttccaggggctcaagtccaccgccagccggcccatcgcccgccgctcctccagaagcctcggcaacgtcagcaacggcggaaggatccggtgcatgcaggtgtggccggcctacggcaacaagaagttcgagacgctgtcgtacctgccgccgctgtcgacggacgacctgctgaagcaggtggacta

SEQ ID NO: 42872 - DNA, 186 bp, Zea mays
agagaatcgagcagagccacccggctgctcctcatttccactttccactccgcctccgctgccgatcgccgtccccgaccgcagtgcaggactgaggatgagtgaagaggataaggctgcagcttctgctgagcagcctaagagggcccctaagctcaatgaaaggatcctctcctctctgtccag

SEQ ID NO: 42873 - DNA, 176 bp, Zea mays
cgcacggatcgagttccgcaagaacacccaggacgacccgcacaagcgcaagcccgacatcaaccgcgccaaggagttcctcgggtgggagccgaagatccacctgcgtgagggccttcccctcatggtctccgacttccgcaagcgcatcttcggcgaccaaggcgctgctgcca

SEQ ID NO: 42874 - DNA, 270 bp, Zea mays
acccaaagttgtgcaccgtgacatcaaatccagcaatattttgattgatgatgagttcgagtccaaagtatcagattttggtttagccaagcttcttggtgctggaaagagtcatgtcgacactagggttatgggtacctttgggtatgtggcaccagagtatgcaaatactggactcttgaacgaaaagagtgacatttacagctttggagtcgttctccttgaagcaattaccggaaggaatcctgttgactatggacgcccaccaac

SEQ ID NO: 42875 - DNA, 249 bp, Zea mays
accggaccagcagcgcctgatcttgctggcaagcagctggaggatggccgtaccctcgccgactacaacatccagaaggagagcaccctccacctggtgctccgcttgcgaggtggtatgcagatctttgtgaagaccttgactggcaagaccataaccctggaggttgagagctccgacaccatcgacaacgtgaaggcgaagatccaggacaaagagggcatccccccagaccagcagcgtctgatc

SEQ ID NO: 42876 - DNA, 182 bp, Zea mays
actctctctctcttcgccgtccgaagctccgcacccaatctaatcgacacctcaccgagatgggccgcaagttcttcgtcggtggcaactggaaatgcaatggaaccacagatcaggtcgagaagattgtcaaaaccctgaatgaaggacaggttcccccttcagatgttgtacaggtcgtt

SEQ ID NO: 42877 - DNA, 188 bp, Zea mays
aggacgaggaggtcaagaagaaggtggacgccaagaacgcgctcgagaattatgcctacaacatgaggaacaccatcaaggacgacaagatcgcctccaagctccccgctgaggacaagaagaagatcgaagatgccgttgacggcgccatcagctggctggacagcaaccagctggctgaggtggag

SEQ ID NO: 42878 - DNA, 294 bp, Zea mays
  unsure (1)..(294): unsure at all n locations
acccaaccccatgaccgttttcaggtcgaagaggcacagagcatgacgtctcgcccaatgaaggggatgctgactggcccagtcacaatcctcaactggtccttcgtccggaatgaccagccgaggtttgagacttgctaccagatcgctcttgcgatcaagaaggaagtcgaggatcttgaggatngtggtattcaggttatccaaatcgacgaggctgcactgagagaagggctgaangtccgcaaggctgagcatgcattctacttggactgggctcatccttcagattac

SEQ ID NO: 42879 - DNA, 237 bp, Zea mays
cagttcggtagtccctctcctctcgaggtattagcagtcgaccggttcctcggagcacgatgaagtttgttgctgcctacctgcttgctgtcctcgctgggaacgccagcacctccgctgacgatttgactgccattctggagtcagttggctgtgaagttgacaatgaaaagatggaactcctgctgtcccaactgagcggtaagacatcaccgagctcattgccgcggcaaggga

SEQ ID NO: 42880 - DNA, 181 bp, Zea mays
gaaggatatcactggcaacccgagggctctccggaggctgaggacctcttgtgagagggccaagagaactctgtcttccactgcccagaccaccattgagattgactcgctgtacgagggcattgacttctactccaccatcacccgtgcaaggtttgaggagctcaacatggacctgttc

SEQ ID NO: 42881 - DNA, 219 bp, Zea mays
acctccctacctcgccgtcgccgtcgcatctgccatgggggcgtacaagtacgtctcggagttatggagaaggaagcaatccgacgtgatgcggttcgttcaacgcgtgcgctgttgggagtacaggcagcagccggccatcgtccgcctcacaaggcccacccgccccgacaaggcacgccgcctcggcttcaaggccaagcaggggtatgttgttta

SEQ ID NO: 42882 - DNA, 224 bp, Zea mays
aatgaaccaccctgggcagattggcaacggctatgccccagtgctggactgccacacctcgcacattgctgtcaagtttgcggagtcattaccaagattgataggcggtctggcaaggagctcaagaaggagcccaaatttctcaagaatggtgatgctggtatggtgaagatggttccactaagccatggtagtgagacttttctgaatacctcctcttggtc

SEQ ID NO: 42883 - DNA, 302 bp, Zea mays
  unsure (1)..(302): unsure at all n locations
naggacatcactcccatgggtggattcccccactatggtatcgtgaagggtgactacctgatgatcaagggatgctgtgtgggtccaaagaagagggtggtgaccctccgccagtccctcctgaaacagacttcacggctggcgctggaggagatcaagctcaagttcatcgacacatcgtccaaatttgggcatggtcgcttccagactaccgatgagaagcagaggttctttggtaagctcaaggcgtaaggtactgcggtgcagcgacaagtcccatttgtcaaaatcatcaaactgtg

SEQ ID NO: 42884 - DNA, 167 bp, Zea mays
ccagcctcggaaggaaccttccagaagcgcaagactctaaaggccgtcgccttcccattcttcctcgccgcgggggtcgcctgagatcacataaacaatggtgaaggctgttgctgtgcttggtagcagcgatggtgtcaagggaacaatctttttaacccaggagg

SEQ ID NO: 42885 - DNA, 239 bp, Zea mays
agcgccgcttgtgctgcagccatgtctctagtgatccctcaaaagttccagcatattttgcgagtactcaacaccagcatcgatgtgcggcggagaatagcctttgccatcactgccattaagggtgtgggccgaagatatgctcatgtggtgttgaggaaagcagacattgacctcaccaagagggcgggagaactcactgaggatgaggtggaacgtgtgatcaccatatgcagatc

SEQ ID NO: 42886 - DNA, 223 bp, Zea mays
cctcaagacattcaattcgtctgccgacacgatagacaggatcgtcgctcaggtgggtgtaggtgacacctctaaaggcagcagtcagcctaacgaccattactgctggatgaggccagaggacatcgactacaagaggccggttaccgagtgccactactgctcagatctagcgtcggaaatggctgccgcactggccgcagcttccatagtgttcaaggac

SEQ ID NO: 42887 - DNA, 302 bp, Zea mays
gggacatggatggagttacccatgtgatatctggagtgttggttgtattcttgttgagctttgcacgggtgaggcgttattccagactcacgaaaacttggaacatctggctatgatggagagagttcttggacctttgccgtaccatatgcttaagaggaaagatcggcactctgacaaatacatcagaaaaggacgcctgaattggcctgagggttgcacctcgcgggagagcatgaaagctgtgatgaaattgtccaggcttcagaatctggtgatgcaaaatgtggaccaggctgcgg

SEQ ID NO: 42888 - DNA, 233 bp, Zea mays
acagaagcggcggcggcggacaaacgcaggcgaaggcgagggtgtgagggaaggagcaccagccatggtgcacgtcaacttctaccgcaactatggtaagacgttcaagaaaccaaggcgtccttatgagaaggagcgtcttgatgctgaactgaagctggtcggtgagtatgggctgaggtgcaagcatgacttttgagggttcagtatgcactgaacaagatccgtaatgc

SEQ ID NO: 42889 - DNA, 297 bp, Zea mays
accaggctgactgtgctgtccttatcattgactccaccactggtggttttgaggctggtatctccaaggatggccagacacgtgagcatgctctccttgcgttcacacttggagtgaagcagatgctttgctgctgcaacaagatggatgcagccactcccaattactccaaggaacgtaatgatgagattgtgaaggaagtctcatcttacctcaagaaagttgggtacaaccctgataagatagaatttgccaccatgtttgcaggtgacaacatgattgggaggtccaccaact

SEQ ID NO: 42890 - DNA, 231 bp, Zea mays
aatctgggatggtggcaatgattatgctccgcaccctgtatagagatatctctaggtacaatcagcttgaaactgaagaagaaacccaagaggagacaggatggaagcttgttcatggagacgtattcagccctcctgcaaactctgacttactctgtgtctgtgttgggactggtgttcagaccttcggtatgctgctagtaaccatgatctttgctgttctgggtttcc

SEQ ID NO: 42891 - DNA, 297 bp, Zea mays
gcaattgcttctgacaagatccttttattggactcttattttactgttgtcatattccatggggtaaccattgcgcagtggcgaaatgctggctaccaagatcaagaaggtcacgaggtgtttgctcagttgttaaaagctccacatgaggaagctaatttaataataaaggagcgatttcctgtaccccgtttggtagtctgtgatcaatatggatctcaggctcgatttatactggcgaactaaatccatcggtgacatataactcggacaacccctccactggtggagacgtca

SEQ ID NO: 42892 - DNA, 294 bp, Zea mays
gagatacagagtcttcgagatctggatctatacgacaaccagatcaagaagattgagaatctggaggcagctaacagagctggagattctagatatttcttttaatctgctgagaaacatcgaaggggttgaaaagttgacacgactgaaaaaactcttcttggtcaacaataaaatcagtacaattgtgaacttaagcaacttacatcagctatagatgctagagctgggatctagccgcatcagggcaatcgcaaatatcggcaccttaagcatcctggagagtttgttttt

SEQ ID NO: 42893 - DNA, 299 bp, Zea mays
gtgtcctgcacctgcaagggtagctcgcgcagtccaactgttgtggtccttcacggcggcccacactcggtgtccgtatcaagctactcaaaatcctcggcgttccttgcttcgcttggattcaacctgcttgttgtaaactaccgaggcacgccaggttatggagaggaagccttgcagtcgctccctggaaaagttggatcccaggatgttcaggactgccttgcagcgctagacttcgccgtcgaggaagagctggttgatgcgtctagagtattctggatctcgcatggtggctt

SEQ ID NO: 42894 - DNA, 178 bp, Zea mays
cggaacagccaagcccgactacgcaacctgtgtgaagatctccactgatgcttccatcaaggagatgattcctccgggcgctctggtcatgctgactcccctcatcgttggaaccctctttggcgtcgagactctctccggcgttcttactggtgccctggtttctggagtacagatc

SEQ ID NO: 42895 - DNA, 298 bp, Zea mays
atcaccccggagcctctccttcccggtctcctccgcacgttgccttcgtaccctccatctccggctgcatcgccggcgagcccgacaccgcgaatcggatccgccgacaaggcgagagggaaaagatggggcttacgttcaccaagctgttcagcaggctgttcgccaagaaggagatgcggatcctgatggtgggactcgacgccgccggaaagaccaccatcctctacaagctgaagctaggcgagatcgtcaacaccatccccaccatcggattcaatgttgatactgtggagta

SEQ ID NO: 42896 - DNA, 226 bp, Zea mays
agtacacaccgcccgtacccgatctccgatcccctcgtcgatccaaagatgcagatcttcgtcaagaccctcactggaaagactatcaccctcgaggtggagtcttctgacaccattgacaacgtcaaggccaagatccaggacaaggagggcatccccccggacgagcagcggctcatctttgctggcaagcagctcgaggacgggcgcacacttgcagactaca

SEQ ID NO: 42897 - DNA, 297 bp, Zea mays
atcagccagagaactacctgcatcgtattggtcgtagtggtcgttttggtaggaagggtgttgccatcaactttgtgacccgcgacgacgaacgtatgctgtttgacattcagaagttctacaacgtgttgattgaggagctgcctgccaatgttgctgaccttctgtgatcaatttcaagaaaaaacaaaacaaaaaagggtggtgaggaacctggtaaggcttggtttgtcgaaataccgttgggagagggggtgataaggacggtggggtttctatgttgaagtcggggtcatc

SEQ ID NO: 42898 - DNA, 221 bp, Zea mays
agaacgtctgaggttatcaataagctcctagtccagacgccatgggtcatttcacagaggaggacaaggctactatcacaagcctgtggggcaaggtgaatgtggaagatgctggaggagaaaccctgggaaggctcctggttgtatacccatggacccagaggttctttgagagcttgggaaacctgtcctaggatctgccatcatgggcaacccaaagt

SEQ ID NO: 42899 - DNA, 297 bp, Zea mays
cgcaaggaagctggctggtgatccgaaccttcactttgttgaagctgttgctcttaagcctccggaagttaccatcgacatggctatgcagcagcagcatgaagctgagcttgctgcagcagctgcacaacctcttcctgatgacgatgatgatctgattgagtagaaaggatcatgagtcttgaacttgagcaggagttgtgccttgcgtgttttaagttgttctagggtgaactcatgagttctcatggtcgagatcatcttctcactgatgtgtgcatcttttgagtgtggaaa

SEQ ID NO: 42900 - DNA, 292 bp, Zea mays
aaccctcagatctcagtcgcctgcaacgccgcttcgttcgtgtggaggggagaagacaggaaatggcggcgactgagggcgtgctcttggggatgggcaaccccctcctcgacatctccgccgtcgtcgatgacgccttcctaaaaaagtatgacatcaagctgaacaatgctattctcgctgaggataaccacttgcatatgtatgaccgagttggctagcaagagcaatgtcgaatatattgccggagtaccacccagaactctatcagggttgcccatgggatgcttca

SEQ ID NO: 42901 - DNA, 190 bp, Zea mays
gataaatgatggaattatcaaccttgttgataagttttttgagatgccaagacatgaagcacataaagctcttgaaatatacagaagggctggccaacaggctggaaatctatctgatttctacgagaattgccggggtttagaacttgcgaggaattttcagtttcccactctgagggagccgccacaa

SEQ ID NO: 42902 - DNA, 274 bp, Zea mays
ctcgcctagcctccggcgccgccgcgcgtctccctgagaggtgccgggaccgaggaactggccgagtactaggtagagaatcggtttttcttgtctcagcccggggtctgctgcgtctggtggtggtgaaggggagaaattcgtgagatctgttccggatcaggcgtgcgagctcgggaatcaggggtttcacacatagcttcgtcgatttgaatgtgatgtactaatggattctaagggtggcaaaaagtctagcagtagtcgttctatgatg

SEQ ID NO: 42903 - DNA, 278 bp, Zea mays
ggcgtgcgtgctgcggcctgcggcctgcaggaccagagaccgcggactgagctagggtctgggactgggaggcggagatgtcgacgccggccgggaagcgcctgatgcgggacttcaagcggttgcagcaggacccgcccgccggcatcagcggcgcgccgcacgacaacaacatcatgctctggaacgccgtcatattcgggccggatgacacgccgtgggacggaggcacgttcaagctgactctgcaatttacagaagattaccccaacaaacct

SEQ ID NO: 42904 - DNA, 169 bp, Zea mays
cacacagcaaatacccacagtccacactccacagcaagaaccgaagatgttcggaaacatcggaaagatcccgatcattggcgacctgacgggcagcaacaagaatgcgcacctcaagggcaacctggtgctcatgcgcaagaccgtgctcggcttcgacgtcaccagc

SEQ ID NO: 42905 - DNA, 169 bp, Zea mays
caagcaagaaaactagaaaaggctcctcccgaccgcaacgcccctcatctccctcgaccccgacatccccgacccgatggcgcccaaggcggagaagaagccagcggagaagaagccggcggccgaggagaaggcggagaagacgaccgcaggaagaagcccaaggccg

SEQ ID NO: 42906 - DNA, 222 bp, Zea mays
ctcttccccacgaacgcttgcggcggcggcggaattaggaggcgatggggcactccaacgtctggaactcgcaccccaagaactacgggcccggatcccgcgtctgccgtgtctgtgcgaaccctcatggactgatcaggaagtacgggctgatgtgctgcaggtggtgcttccgcagcaatgccaaggacattggcttcatcaagtaccgctgaaatcagg

SEQ ID NO: 42907 - DNA, 272 bp, Zea mays
gtgccaatctacgaaggttatgcccttcctcatgccatcctgcgtcttgaccttgctgggcgtgacctgactgacagcctgatgaagatcctcaccgagagaggttactccttcaccaccacggccgaacgggaaatcgtacgggacatcaaggaaaagcttgcatacgtggctcttgactatgatcaggagctggagaacgccaagagcagctcatctgtggagaagagctacgagctgcctgatggccaggtgatcaccattgggggcgg

SEQ ID NO: 42908 - DNA, 209 bp, Zea mays
cctgactgtgaagtatcccatcgagcatggaatcgtaagcaactgggatgacatggaaaagatctggcatcacaccttctataatgagcttcgtgtagcaccagaagagcacccagttcttcttacagaggctcctcttaaccctaaggctaacagggaaaagatgacacaaatcatgtttgaaactttcagtgttcctgctatgtatg

SEQ ID NO: 42909 - DNA, 179 bp, Zea mays
cgagcgcctttcagttgattatggcaagaagtctaagcttggtttcaccatttatccttccccacaggtgtcaacagctgttgtagagccatacaacagtgtcctctcgacccactccttgctcgagcacactgatgttgcagtcctcctggacaacgaggctatctatgacatatgca

SEQ ID NO: 42910 - DNA, 275 bp, Zea mays
tgccagccatgtctgccacccatcacaagacccctctgcctcagggtgtccgcctgggcaccgtcatgagaattcgaggcgtggtccctgaccaggctggcaggttccatgtaaacctgctatgcggcgaggagcaagaggcagacgccgccctgcactttaacccgaggctggacacatccgaggttgtcttcaacaccaaacagcaaggcaaatggggccgtgaggagcggggcaccggcatccccttccagcgtgggcagccctttgaagtg

SEQ ID NO: 42911 - DNA, 207 bp, Zea mays
caaaggccttgcccctgatcttcctgaggatctctaccatttgatcaagaaagcagttgctgtcagaaagcaccttgagaggaacagaaaagataaggatgctaaattccgcctgattctaattgagagcagaattcaccggctggctcgatactataagactaagcgggtgctcccacccaactggaaatatgagtcatccacagc

SEQ ID NO: 42912 - DNA, 121 bp, Zea mays
ctgcttccgatatctctccccacctcccggtccgctagcagataacgtgggccagacagatcgagatccggaggcgctagcggcacccatcagcgtctgctgcaatggcgggcacggtgac

SEQ ID NO: 42913 - DNA, 185 bp, Zea mays
ggagctactgccttgccctcagaggatctaagacatggcacccaagaaggccaagagaagggcagcagcagaagggagctccaatgttttctccatgtttgaccagactcagatccaggagttcaaggaggctttcactgtaattgatcagaacagggatggcattattgacaaggaggatcttc

SEQ ID NO: 42914 - DNA, 244 bp, Zea mays
tgacatacaaagtcaacctgagtcacagctgaagttcattatagaggcatggttacagattgtcgaatgcagaagggtattgaagtggacttatgcctatggattttacctgccagagcatgagcatgccaaaagacagttctttgaatatctgcaaggtgaggcagaatcaggattggagcggctacatcaatgtgcagagaaagaacttcaaatataccttgatgcagaatctccctcgaaa

SEQ ID NO: 42915 - DNA, 195 bp, Zea mays
cgaaactgaactggagaagagaaaagctgacgggagatactctgcacatttcagaggacaagctcatttctttgggtacgaaggaagatgcggccttcctactaattttgattctaactattgctatgcattaggctatggtgctggtgccctggtccagagtgggaagacaggacttatttcgtcggttggcaa

SEQ ID NO: 42916 - DNA, 196 bp, Zea mays
cactcgatagaagacgtccgggtcaaagtagaattacaaccccaagaaaggagactgatacatgcaaaattctatcagggacacatgatgggatgactactggtacaccaattcacgtctttgtcccaaacacagatcaaaggggtggtgattacagtgaaatgtctaaggcgtacagaccatcccatgcagatgc

SEQ ID NO: 42917 - DNA, 142 bp, Zea mays
ctccgaaatgattggcaatgttatgactgatgcaagatccacaggaaaatactaccactttgtgaggcttatgggtcgtgctgcttctcacattacattggaatgcgctttgcaaacacaccccaatgctgcactcattggg

SEQ ID NO: 42918 - DNA, 171 bp, Zea mays
ctttgcttgaatctgttgttgacgctgtcaacggctccctggttgcagctccaaactatgggctgagatcccctgagaaagagctcagagctcaggatgttattcaagccatacggaaatgcagctctactggaggcccgataggaagattttgggtgcttgatcctgtcg

SEQ ID NO: 42919 - DNA, 201 bp, Zea mays
  unsure (1)..(201): unsure at all n locations
gtcactactggaactgcacaaactggccactgacaaaaatgacccccatttgtgtgacttcattgagacacattacctgaatgagcaggtgaaagccatcaaagaattgggtgaccacgtgaccaacttgcgcaagatgggagcgcccgaagtgtgcntgccggaatatctctttgacaagcacaccctgggagacagtga

SEQ ID NO: 42920 - DNA, 280 bp, Zea mays
tacttgctgatgataatggctatggatgggcaattgcgaaggcacttgctgcggctggtgctgaaattcttgtgggtacatgggtgccggcacttaacatatttgagacaagtctgaggcgtggaaagtttgatgaatcacggaagctgccagatggatctcttatggatattgttaaagtctatccacttgatggacacctacgattcgcctgatgaggttccggaagatggcaaatcgaacaagagatatgcaggggcatcaaactggacagtaaagg

SEQ ID NO: 42921 - DNA, 202 bp, Zea mays
cttcacgtccgctacataccggcgaggagacgaaaggagggagttttgagaagcataaatggctcctaaagccgctcctgtcaagaagggtgatgccaaggcccaggccttgaaggtggccaaggctgtgaagtctggggcaggcaagaagaagaccaagaagattcgcacatctgtaacatttcaccagcccaagaccctg

SEQ ID NO: 42922 - DNA, 284 bp, Zea mays
atggtgtgagtgtgcctccactgatggtggagaatgctggacgtccggcagtttcaagtttgaactgcccaccatttcttgctgttgaggcctgcagggagcgcttgggtgtccatccttgtgacaagaggaggagcatcacagagtaccgtgctctcttccctgccattgatttttcgctgatagagagtgacgaagatgttctctgggtaccagatgtcagagaaacctttgagtcactcgcagaaaggggtatgaagttcattgactggctatggacaaga

SEQ ID NO: 42923 - DNA, 201 bp, Zea mays
cacacatacacaagcacaagcgcactctagcaatggcttctgaggttgtccgccctagcgacgccgagctactaaaggcacaagccgacatatggcggctcagcctctcctacctcacgcccctgtcactgaggtgcgccgtggagctttgcatccctacggcgatctaccgccatggcggtgctgcctcagccgctgagc

SEQ ID NO: 42924 - DNA, 172 bp, Zea mays
caaggttccactccctcctgttgatgagaagaaaaaggttgttgaagatgttgacaaagacaggaggtatgcaattgatgcatcaattgtgcgcattatgaagagccgcaaagttatgggtcatcaacagctggttgctgaatgtgttgagcagctgagccgcatgttcaag

SEQ ID NO: 42925 - DNA, 167 bp, Zea mays
attacagggtcatgatggccgatattctatctatatccatgcatctcgtgaaaaacctgtacattctagctctctttttgttgggcgtgaaattcacagtgaaaaggtagtatgggggaggatttcaatggttgatgcagagaagaggctgttaggaaaggcttggg

SEQ ID NO: 42926 - DNA, 147 bp, Zea mays
ctatgacatctgcaggcgctccctcgacattgagaggcccaactactccaacttgaatcgccttgtgtctcaggtgatctcatcgctgactgcttctctgaggttcgatggtgccctcaatgtggatgtgaacgagttccagaccaa

SEQ ID NO: 42927 - DNA, 166 bp, Zea mays
cgatctgcctggtgctgaccatctttgctaacctcttcccctcaggcctccgaagagctactgcgggagcattatgtcgagctgcgggagagacctttctacagccgattagttaaatacatgggctctggtcccgtggtggccatggtgtggcaagggctggatg

SEQ ID NO: 42928 - DNA, 196 bp, Zea mays
cgaccggcagagcacttcgtcgaacagtgcgccctgccgtccctggggtcactttgcctgtctggagggcagattgaggaagaggcatccatcaacctcaatgctatcaacaagtgtcccctgcggaagccatggtccttgactttctcctatggccgagccctgcaggcctctgctctaaaggcttggggtggga

SEQ ID NO: 42929 - DNA, 212 bp, Zea mays
gactactacaagatcggcggcgtcttctccgtgggcaccatcgccgacagcccccccgcctacggcgcgccgcctacctgcggacgtcggtcatgggcgccactacagggactacgtcgaggtcgtgttcgagaacggcgaggacgaggtgcagtcgtggcacatcgacggatacgccttctgggtcgtcgggatggatggagggaaatggt

SEQ ID NO: 42930 - DNA, 191 bp, Zea mays
cagagagagaagctgcatatgcaccttttatttctcaagcgggcttgccacagagctacaactcaagtgaagtgaataatggtgctgataggttggcagagcagcgcacacagcttctagaatctagaaggcaggagttggtcttcttggataatgaaatcgtgttcaatgaggccatcattgaggagagg

SEQ ID NO: 42931 - DNA, 159 bp, Zea mays
cgcagctgctagggatccaccgtggcgtgcttcctgctccgcttctcgacgggcgggcaggccacgggcaccttcgggctgacgggcgtgtcggtgtgggaggcgctggtgctggagatcgtgatgaccttcgggctggtgtacacggtgtacgccacg

SEQ ID NO: 42932 - DNA, 142 bp, Zea mays
caacggtgcaactttcttcggtcgtcccgaatccgggttcatccgacaccagccacctccaccatgccgcccaagttcgagcccaacgagagcaaagtcgtgtactttaggtgcacctgaggcgaggtctgcgccacatccg

SEQ ID NO: 42933 - DNA, 193 bp, Zea mays
tcttggcttctcctccccctccggttcgggttcgggttcgtgaggttctccggggttcgctttcgtgggtgggcggatcgagatggcggcgtcggatgttgattaccgctgcttcgtcggcggcctcgcctgggccacggacgaccactccctccacaacgccttcagcacctagggcgaggtcctcgagtcc

SEQ ID NO: 42934 - DNA, 148 bp, Zea mays
cacccttcatgtggaacgagcacctgggctacgtgctcacctgcccctccaacctgggcaccgggctgctcggaggcgtgcacgtgaagctggcgaacctgagcaagcaccccaagtttgaggagattctcacccgccttcgtctgca

SEQ ID NO: 42935 - DNA, 150 bp, Zea mays
ctcacttcttgacatagttgtttttggcagagcttgtgcaaacagggtagcagatatttctaaaccaggtgagaagcagaaacctctggaaaaagatgctggagagaagaccatagcctggttggacaagctgaggaatgcgaatgggtc

SEQ ID NO: 42936 - DNA, 147 bp, Zea mays
cggcggcggaggcaacggcaatggggccaccaacggcagttccgcggtcgacaaacgcttcaagacgttgccgacgagcgagatgctgccgaagaacgaagtccttggtgggtacatctttgtctgcaacaacgataccatgcagga

SEQ ID NO: 42937 - DNA, 132 bp, Zea mays
cgcagtgttgttcttgcagccatatgtacctccacaaacacatcaaatcgcagcggcatgattggtgctggccttgtggcaaagaaagcctgcgaattgggccttgaggtgaagccatgggtagagacaagc

SEQ ID NO: 42938 - DNA, 141 bp, Zea mays
agccaagtacgtgcccgacgcactcatcgtccatatcggcgatcagatcgagattttcagcaacggggcatacaaggcggtgctgcaccgtacgacggtgaacaaggagaagacgcggatgtcatggccgatgttcgtgga

SEQ ID NO: 42939 - DNA, 139 bp, Zea mays
ctggatgctcagattcaagaaattaaagaggcagttgagcttcccttgactcaccctgagctgtatgaagacattggtattaggcctcccaagggagtcatattatatggagaacctggaacaggaaaaactcttcttg

SEQ ID NO: 42940 - DNA, 142 bp, Zea mays
ggctccaatatgaccaaaaaaaggagaaacaacggtcgtgccaaaaagggccgcggccatgtgcaaccaattcgctgcacgaactgcgcccggtgcgtgcccaaggataaggccattaagaagtttgtcattcggaacattg

SEQ ID NO: 42941 - DNA, 137 bp, Zea mays
gtctcatcatgttgctactgttgttctgattgttctatcttacgtgttcagatttgctagagttggctctatagtattggcaattcatgatgcaagtgacgttttcctggaagtagggaagatgtccaagtacagcc

SEQ ID NO: 42942 - DNA, 316 bp, Zea mays
ggtgcgtgctgtggagccttgtcaagtctgctctgtcctgactcaccgctgttcgctcctgctgaggaacaagtcggtcaggaagctacgcctcagccatggcatttaaagataccgggaagactcccgtggagcccgaagtggcgattcaccggattcgaatcacgctcaccagccgcaacgtgaagtcgctggaaaaggtttgtgcggacttgatcagaggcgcaaaggagaagaatctgaaagtgaaaggaccagtgcgcatgcctaccaagacactgagaatcactaccagaaaaaccccttgcggtgaagg

SEQ ID NO: 42943 - DNA, 297 bp, Zea mays
aggcgtctgaaggcaagatgggtcaccagcagctctactggagtcacccgcggaagttcggccagggttctcgctcttgccgcgtctgctctaaccgccacggtctgatccgtaaatacgggctgaacatgtgccgacagtgcttccgtcagtacgcgaaggacataggcttcattaagttggactaagcgacctgaatggatgattcgactgtctacccaatgaaaccaactgtctaccctgtgataccaatcatgctagtctttgtgcacacagaataaaaaactgaaggcctct

SEQ ID NO: 42944 - DNA, 310 bp, Zea mays
  unsure (1)..(310): unsure at all n locations
atcaacaggtcncctagaaatgcctatgttgaaggtgatgcctcaagcgcaagtaatttcttggctggtgctgcaattactggagggactgtgactgtggaaggttgtggcaccaccagtttgcaggatgatgtgaagtttgctgaggtactggagatgatgggagcgaaggttacatggaccgagactagcgtaactgttactggcccaccgcgggagccatttgggaggaaacacctcaaggcgattgatgtcaacatgaacaagatgcctgatgtcgccatgactcttgctgtggttgcactctttg

SEQ ID NO: 42945 - DNA, 236 bp, Zea mays
caagaaggccgacttcaagagcgcggagaacctgccgtcgccgttcgacaacctgacggtgctggagcagaagttcgcggccgtgggcctccacaccgtggacctggtggccctctcgggagctcacacgttcgggcgggtccagtgccagttcgtcacggggcggctgtacaacttcagcggcacgaaccggccggaccccacgctcaactccggctaccgggcgttcctggcca

SEQ ID NO: 42946 - DNA, 252 bp, Zea mays
tatggatcaaataattcaagagatttcagtgatgaagttggtaaaacatccaaacattgtccaattgtatgaagttatggctaccagaaccaagatatattttgtgatagagtatgtcaagggaggagagttgttcaaaaaggttcaacgtggaaggttagaagaagatgttgctcgtgcatatttccaacaattgatcagtgctgttgaattctgccatactagacaagttatcatagagatctaagcccg

SEQ ID NO: 42947 - DNA, 175 bp, Zea mays
acgactagggttcttggaacgttcggataccatgcgcctgaatatgcaatgaccgggcaactcagctccaagagcgatgtatatagttttggagtcgttcttctcgagctattgaccggaaggaaacctgtggaccatacattaccaaggggacaacagagtcttgtgacttggg

SEQ ID NO: 42948 - DNA, 121 bp, Zea mays
acaccttccagcagatgtggatcaccaagcaggagtacgacgaggccggcccctccattgtgcaccgcaaatgcttctaggcgcacccgcgtctgtgtacgcgctgtctctcctcatgacg

SEQ ID NO: 42949 - DNA, 227 bp, Zea mays
agcacaccaatcgcccacaagcgctcgcaggagaggtcgaaaccctagcttttgcagcggcggcgagataagatgatctacgacgtgaactcccccctcttccgttccttcctcagccagaagggcggcgccgacaagaggaaaatggaggagcataaaccaaaggagcagaggcccaaggctaacgagaacaagcctgtgatgaacgatgaatatctccagaagct

SEQ ID NO: 42950 - DNA, 304 bp, Zea mays
atgcaagctcccctggtaaaagggcatccatggaagacttctatgagacaaaaattgattgtattgatggtcagatagttggtctttttggagtttttgatggtcatggtggtgctaaggtagcagagtatgttaaagaaaacctgttcaaaaatcttgttagtcatccaaagttcatcagtgatactaaagtcgctatagatgatgcttataaaagcaccgacagtgaattcttagaatctgacagtagtcaaaatcaatgcgggtcaactgcatcaactgctgtacttgttggtgatcgtct

SEQ ID NO: 42951 - DNA, 301 bp, Zea mays
gggtttttgattttagccgccgccgctgctcatctcacatccctcgagaagacgcctgctcctcgccgatcgatacgatggccgtcttctccgacctccacaccgccgacggcctcaagtccctcgaggctcacctcgccggcaaaacctatgtgtctggtgactccattactaaggatgacattaaagtcttcgccgcggtgccgtcgaagcctggcgctgagtttcctaatgccgcacgctggtacgagaccgtctctgcggctgtagcctcaagattccctggtaaggctgttggtgt

SEQ ID NO: 42952 - DNA, 118 bp, Zea mays
gttactttgagacggatgcaccaaaagatgcacctggtgcaccaagacaatggtggttcggcggaggtactgacttgactccttcatacatcattgaagaggacgtgaagcatatcca

SEQ ID NO: 42953 - DNA, 301 bp, Zea mays
cagagaaatgggctgagcctcatctggaaactgctaagacaaaatggatgcctgttgctaaagaaaaatgggttaccttgaagaaacatgcaaagccctatgtccaatgatttctctgagaccatttggaggcttatcaaacatcaagtgactttgtcaggcctcatcttgtaaatgcacatcaagttgttgatccctatttccaggaagccaagaaattatccaagccatatgttgatcaaattgctacagctactaaaccacatgtcgagaaagttagaactgctctcaagccttatac

SEQ ID NO: 42954 - DNA, 273 bp, Zea mays
gacttatattagttgtaatgcgtgaaggcagcttcttagttgatggcaaaggtatcttaggagatactgttcactaaactgttttcatgttcttttctccaggagagtatgttggtcttgctggtgccagattggatggtggggaaatgcttgcatgtggtctggcaactcattttgtacagtcaaatagtctgctatcgctggaagaatcacttaaaaaggtggatacttccaatgcttttgcagtgtgtggtatcaccgatcatttggctc

SEQ ID NO: 42955 - DNA, 294 bp, Zea mays
aacattcctcgacgcgaacccggcgcaagtagtcacgatcttcctagaagactacaccgcggtagggtccttgccgagagtgttcaacgcctccggcctcacgaagtactggttcacggtggcaaagatgccgaagagcggcggcgactggcctctgctcaaggacatgatcagccagaaccagcgcctgctagtcttcacctcaaagagagccaaggaggcgagcgaggggatcgcgtatgagtggaactacgtcgtggagaaccaatacggagatgagggcatggtaacagc

SEQ ID NO: 42956 - DNA, 173 bp, Zea mays
atgcgtctcctgcccaccatggccacccaccgcctagtaatggaccgccacggtgagagctcatggaaccaagagaaccgtttctgtggctggtttgatgcagaactgagtgagaaggtgtcagatgatgccaagcggggggccactgccatcaaagatgccaagatagagtt

SEQ ID NO: 42957 - DNA, 300 bp, Zea mays
gcacggggcgactctgttccacgagagcatggggagcctcgacgcagatttccgcgacatggcgagcgaggccttggacgcccacgacaacttcggcatcgagatagctatgcgggagttcagggacttgttcgatgggatccagtccatgacctactgctgcggtaacttcggtgatgacaagggtgccagggccattgtcaaagccttcccacacataaaatgcactgtgctggcccctcccaagatcattgccaccaaaccggccgatggagcgaagataaactatgtcgaaggtga

SEQ ID NO: 42958 - DNA, 282 bp, Zea mays
caactctgcaggctgctcgtcgccctccctccacgccggacgcgccccgatccagatccaggggcgtaacatggcatcaacacgtatcctcaaggaattaaaggacctgcaaaaggaccctccaacgtcatgcagtgctggtcctgctggtgaggatatgttccactggcaggcaaccatcatgggtcctcctgatagtccatatgctcgaggtgttttcttagtgaacattcatgtccccacggactaccctttcaaggctcaaaggtatctttaagacga

SEQ ID NO: 42959 - DNA, 280 bp, Zea mays
acccctccaagtgtacaacctcaggctgctccagctgctacggttgctgctactgatgatgctgatgtgtacattcaggcagcttcaaacgcttgtatctggcaacaatctagaacagactatccaacaaattcttgacatgggtgttggtacatgggaacgtgatactgttgtgtgagctctacgtgctgcatacaataaccccgagagagctatagactacctgtattctggaattcctgagaatgtggaggctcagcctgttgcacgagaactgctg

SEQ ID NO: 42960 - DNA, 274 bp, Zea mays
acggccgagatgggccgcaagttctgcgttggtggcaactggagatgcaatggaaccgcagatcaggttgagaagattgtcaaaaccctgaatgaaggaaatgttccctcttcagatgttgttgaggttgttgtcagtcctccttatgtgttcctcccggtggtcaagagccagctgcgccaagagttccaagttgctgctcagaactgctgggtgaagaagggatgtgcattcactggtgaaattagtgctgagatgctcgtcaaccttggcg

SEQ ID NO: 42961 - DNA, 272 bp, Zea mays
cagaaggacatcctgaacctggtgtacatctgcgagtgcaatggcctgcccgaggtggccaactactggaagcaggtgatcaagatcaacgactaccagaagagccggttcgtgaaccgcgtcgtgtcgtccatgttcaacaccgttgccggcaagaagatcgccgtcctcggcttcgccttcaagaaggacaccggcgacaccagggagaccccggccatcgatgtctgcacaggcctgctgggtgacaaggcccagatcagcatctacga

SEQ ID NO: 42962 - DNA, 279 bp, Zea mays
agaggaggagcagcagcagcaggcggcgccgaggagcggcatcccactcagtgcttgcaaccatggctaggggattgaagaagcacttgaagaggctcaatgcgcccaagcattggatgctcgacaagcttggacgagcttttgctcccaagccatcttctggacctcacaagtccagggagtgccttcctctgatcctcatcatcaggaacaggctcaagtatgctctgaactaccgtgtagtcatttctatcctgatgcaacgccatgtacttgttg

SEQ ID NO: 42963 - DNA, 264 bp, Zea mays
caccgctgttgaggttctaccaggagaccttcggcgtccctccggccacgcgagctcgccgaaatggtcgcccacaggttccatcagtaccaggtggtgggtcgcgcgctgccgaccccaaccgatgagcaccccaagatctaccgcatgaagctctgggccaccaacgaggttcgcgcgaagtccaagttctggtacttcctgagatagctcaagaaggtgaagaagagcaatggccagatgcttgccatcaacgagatcttt

SEQ ID NO: 42964 - DNA, 264 bp, Zea mays
cctcctagctcctctactcgccagtcgccatgggcaagattaagatcggaatcaacggcttcggaaggatcggcaggctcgtggccagggtcgccctccagagcgaggatgtcgagctcgtcgccgtcaacgaccccttcatcaccacggactacatgacctacatgttcaagtacgacaccgtccacggccactggaagcacagcgacatcacactcaaggactccaagacccttctcttcggtgacaagccggtcaccgtct

SEQ ID NO: 42965 - DNA, 268 bp, Zea mays
ccatatccgctcgcctacctctccagcatctcccgcctccgccgtctcgtctctgctcctcacctcgccgcgatccatgggcaatatcaagatcggaatcaacggtttcggaatgatcggcaggctcgtggcgagggtcgccctggagagcgaggatgtcgagctcgtcgccgtcaacgaccccttcatcaccacggattacatgacctacatgttcaagtacgacaccgtgcacggccaatggaagcagagcgagatcagcctcaag

SEQ ID NO: 42966 - DNA, 264 bp, Zea mays
ctcaggggaggcgccaagaagcgcaagaagaagacgtacaccaagcccaagaagatcaagcacaagcacaagaaggtgaagctccgactacaacatccagaaggagtcgacgctgcacctggtgctccgcctcaggggaggcgccaagaagcgcaagaagaagacgtacaccaagcccaagaagatcaagcacaagcacaagaaggtgaagctcgccgtgctccagttctacaaggttgacgacgccaccggcaaggtcacccg

SEQ ID NO: 42967 - DNA, 187 bp, Zea mays
ctcgatcctcaccgtcatgggcgtctccaagtccacctccaagtacgccaccgtcggcatccagggcatcgcctggtccttcggcggcatgatcttcgccgtcgtatactgcaccgccggcatctccggcgggcacatcaacccggcggtgaccttcgggctgttcctggcgaggacgttgtccctc

SEQ ID NO: 42968 - DNA, 153 bp, Zea mays
acgtcaacgcgagatagatactaattcaagtgccccaaccgcctcaacctggaggccatcaactacatggcagctgacggtgactgcagtagcaaatgtgcggctgttgactgaaatcagccagcccatggcccccaataaaggcagctgcct

SEQ ID NO: 42969 - DNA, 279 bp, Zea mays
agtcactgcaggccaacgtgcagcgcctgaaggagtaccgctccaagctcatacttttccccaggaagccttctgctccgaagaagggagacagttctgctgaagaacttaaattggccacgcagctaacaggacctgtgatgcccatccggaatgtgtacaaaaaggagaaggccagagccatcacggaagaggagaagaactttaaggctttcgccagccttcgcatggcccgagccaatgcccggctcttcggcatccgagcaaagagggcgaaag

SEQ ID NO: 42970 - DNA, 187 bp, Zea mays
atggagctcgccggcaacgctgccaaggacaacaagaagacgcgcatcgtcccgcgccacgtgctgctggcgatccgaacgacgaggagctcgggaagctgctgaccggcgtgaccatcgcccacggcggcgtgttgcccaacatcaacccggtcctgctgctcaagaagacggtcgagaaggcgtc

SEQ ID NO: 42971 - DNA, 260 bp, Zea mays
  unsure (1)..(260): unsure at all n locations
ctcatcgatctcgtttcagatccatccatcctcgtttcctccgtcccgcagcatctcaaccccatggccaagatcaagatcgggatcaatgggttcggcaggatcggaaggctngtggccagggtcgccctgcagagtgacgatgtcgagctcgtcgccgtgaacgaccccttcatcagcaccgactacatgacctacatgttcaagtacgacactgtgcacggacagtggaagcaccatgaagtcaaggtgaaggactc

SEQ ID NO: 42972 - DNA, 270 bp, Zea mays
ccacctctagcccgacaggtgaagccgccgccgctgcagtgtccatagccaccgcagagactgagatggggggttttgtcaagacccacaagagcaatgcatacttcaagcgtttccaggtgaagttcaagagaaggcgcgctggcaagacagactacttggccaggataaggctgattaaccaagacaaaaacaagtacaatacacccaaatacagatttgttgtgcgatttaccaacaaggacatcacagcacaaatcatatctgcta

SEQ ID NO: 42973 - DNA, 272 bp, Zea mays
acactctctccttttgtcctctttagaagccaccatggggctcagtgatggggagtggcagatggtgctaaacatctgggggaaagtggagggcgaccttgctggccatggacaggaagtcctcatcagtctatttaaggctcaccccgagaccctggaaaagttcgacaagttcaagaacctgaaatccgaggaagagatgaagagttcagaggacctgaagaagcacggctgcaccgtgctcacagccctgggtaccatcctgaagaaga

SEQ ID NO: 42974 - DNA, 155 bp, Zea mays
accgatctatgctggccggtacgtcttgtcgagctcttgcatgtcgtggattctaaattcttcttctgcgtcgaattgtctctgccatgtgcgagtaataacaatcaaggttatacttaccatacaattacatggcggtttaattgctctctttt

SEQ ID NO: 42975 - DNA, 278 bp, Zea mays
cactcctagctgaagatctctagtgcacgcaacgttggcgcttggcggccagtagtagcagctaatttagcgtcgctccttcctactagacgatagatcgagaaaccatggccaagctccaagtcactcctggcgccgcgttcaccgagtgcaatgaacttgacttccagggcctgtacatgtaccatacgcccctgggtcccaaggccaaccaagctgcgatcctagagagcaaggccaagatcggcatcggtgccaccgtggttaacaactgggca

SEQ ID NO: 42976 - DNA, 288 bp, Zea mays
cgaccaaccataccagcggcgccgcaggctgacgaggaggcggagtagagtggccggactacctcgacacctccactgcaaccatgggtatctcacgtgattcgatgcacaagcgccgggccaccggtggaaagcagaagacgtggcgcaagaagcgaaagtatgagcttggccgccagcctgctaacaccagactgtctagcaataagacagtgaggagggtccgtatccgtggaggcaacgtgaagtggagggctctccgattggatacaggtaactactcgtggg

SEQ ID NO: 42977 - DNA, 270 bp, Zea mays
agaaccatggaggctgtaccagagaagaaaaagaaggttgccgctgctccaggaacccttaagaagaaaaaggttcctgcggtgccataaccccttaagaaaaagcgaaggaatttcgcagagtttaaggtcaagcgcctgaggaagaagtttgccctgaagacactgcgagatgcaaggacgaagctcatctatgagaaggcaaagcactatcacaaggagtacagacagatgtaccggactgagattcgcatgggctagtatggcgag

SEQ ID NO: 42978 - DNA, 264 bp, Zea mays
cgcccacgggctggagagctccggccaccggttcctgtgggccgtgaggaccccgccggaagaaccggacacggacctggggaagctgcttcccgaagcttcctggacaggaacagagacagaggcatggtggtgaaggactgggtgccacaggcagaggtggtgcggcacgaggcggtcggcgcgttcgtcacgcactgcggctggaactccacgctcgaggccatcatgtctggcctgcccatgatatgctggccgctgtac

SEQ ID NO: 42979 - DNA, 232 bp, Zea mays
  unsure (1)..(232): unsure at all n locations
gggtcgtcacgctcattcangcgtactgatctcggatatcggctctagctcgataagctctaaaatttgccccactcgccagtcgcagcatcacctgtagcagccatggacgccatctgacgcggtaccaattattatataggggcggctgtgctcaacgcaggctgcctctatgaataattcgggtacgcggtccgtcaaggccgtgctgcagttccccgtctgccggatc

SEQ ID NO: 42980 - DNA, 287 bp, Zea mays
attcctccttcggatctcgcattcagcgcaggcagagtgtgaaggaagggggacgcggaggaagatggggctcgcgttcgggaagctcttcagccggctcttcgccaagaaggagatgcggatcctcatggtcggcctcgacgccgccggtaaaaccaccatcctctacaagctcaagctcggcgagatcgtcaccaccatccccaccatcggtttcaatgttgaaactgttgagtacaagaacattagcttcactgtctgggatgtcgggggtcaggacaagatca

SEQ ID NO: 42981 - DNA, 281 bp, Zea mays
ctgttgtgttgactcgcaacctcatgaacagacaccatggtgcacctaactgatgctgagaaggctactgttagtggcctgtggggaaaggtgaaccctgataatgttggcgctgaggccctgggcaggctgctggttgtctacccttggacccagaggtacttttctaaatttggggacctgtcctactgcctgctgctattatgggtaacccccaggtgaaggcccatggcaagaaggtgataaatgccttcaatgatggcctgaaacacttggacaac

SEQ ID NO: 42982 - DNA, 279 bp, Zea mays
ccggtccgtgcctccaagatgacaaagaaaagaaggaacaatggtcgtgccaaaaagggccgcggccacgtgcagcctattcgctgcactaactgtgcccgatgcgtgcccaaggacaaggccattaagaaattcgtcattcgaaacatagtggaggccgcagcagtcagggacatttctgaagcgagcgtcttcgatgcctatgtgcttcccaagctgtatgtgaagctacattactgtgtgagttgtgcaattcacagcaaagtagtcaggaatcga

SEQ ID NO: 42983 - DNA, 187 bp, Zea mays
atccacagccgccggggcgccgccgacgaggacagcgccgccacgatgttggagttgcgtctggtgcaggggagcctcctcaagaaggtcttggaggcgatccgcgagctggtcacggacgccaacttcgactgctccgggaccgggttctcgctgcaggccatggactcgagccacgtcgcgctcg

SEQ ID NO: 42984 - DNA, 280 bp, Zea mays
ctggcggcaccatcaggtaagccaagatgggtgcatacaactacatccaggagctatggagaaagaagcagtctgatgtcatgcgctttcttctgagggtccgctgctggcagtaccgccagctctctgctctccacagggctccccgccccacccggcctgataaagcgcgccgactgggctacaaggccaagcaaggttacgttatatataggattcgtgttcgccgtggtggccgaaaacgccaagttcctaagggtgcaacgtacggcaagcctgt

SEQ ID NO: 42985 - DNA, 281 bp, Zea mays
caaagaccaatttgcaggagaactggagaatagtagatttcttctctcaccagccagagagcctacacatgttcaccttcctctttgacgatgttggcatcccactcaactacaggcacatggagggctttggtgtcaatacctacaccttgatcaccagggatggaaagcctcaccttgtgaaattccattggaagcctacttgtggtgtgaaatgcttgctcgacaatgaagctgtgactgttggaggcacctgccacagccatgcgacgaaggatcta

SEQ ID NO: 42986 - DNA, 274 bp, Zea mays
ggccaacctacaccaacttgaacaggctgatctcacagatcatatcatctctaaccacctccctgaggtttgatggtgctatcaatgtggatgtcaccgagttccagaccaaccttgttccatacccacgtatacatttcatgctttcctcatatgcccctgtaatctctgctgagaaggcttaccatgagcagctctctgttcctgaaatcaccaatgccgtctttgagccctcaagcatgatggccaagtgtgacccaaggcatgggaagta

SEQ ID NO: 42987 - DNA, 276 bp, Zea mays
aggctcggaggaggccaaggtgcaacttccttcggtcgtcccgaatccgggttcatccgacaccagccgcctccaccatgccgccgaagttcgaccccaacgagatcaaagtcgtatacctgaggtgcaccggaggtgaagtcggtgccacttctgccctggcccccaagatcggccccctgggtctgtctccaaaaaaagttggtgatgacattgccaaggcaacgggtgactggaagggcctgaggattacagtgaaactgaccattcagaaca

SEQ ID NO: 42988 - DNA, 235 bp, Zea mays
gccgccaaggtgctcggtccttccgaggaagctaaggctgcgttggggtgaggccctcacttcatccggcgactagcaccgcgtccggcagcgcagccctacactcgcccgcgccatggcctctgtctccgagctcgcctgcatctactcggccctcattctgcacgacgatgaggtgacagtcacggaggataagatcaatgcactcattaaagcagccggtgtagatgttgag

SEQ ID NO: 42989 - DNA, 231 bp, Zea mays
tcctcgccgacagggaaagccgtgttgcaagaaggggaattccgctgcgagatccgtgaacggttcagagatggcacagacggtgttcaccccctctttggaagcgatgaagcatgtcaaggcagagaacggagtcattctcaccaagcccttccttgatgtctgcaagcaaatattgcctgtactcgataaatttggaggtgctatggcaattgtaaagagtgatatcgg

SEQ ID NO: 42990 - DNA, 155 bp, Zea mays
gatctgccaaatgtggtggagctgtacatgaaaaaggagctggaggtggagaagttcatcacgcacagcgtcccgttcgccgagatcaacaaggcgttcgacctgatggccaagggggagggcatccgctgcatcatccgcatggagaactagat

SEQ ID NO: 42991 - DNA, 284 bp, Zea mays
cgcacgcaggctagcagcacagcagcagccagagccatcccctctcctcgctacgcttcgcttcctcggcgccgattcctcctcctcctcctccaccctcgtccgtcccgttccggcgcgcgagctcgcccgagatggcgaacgcgagatcgggtgtacgtgtgaacgatgagtgcatgctgaagtttggcgagctgcagtcgaagaggctgcaccgcttcataactttcaagatggacgacaagttcaaggagatagttgtggaccaggtcggggatcgcgct

SEQ ID NO: 42992 - DNA, 113 bp, Zea mays
gccatcggcaccgtactggatcctggccaccgactatgagaactatgccctcgtgtattcctgtacatgcatcatccacctttttcacgtggattttgcttggatcttggcaa

SEQ ID NO: 42993 - DNA, 270 bp, Zea mays
ctcagcatcctccttgctgctgaggccaatcaggaccaggggatcctgtacgtcacggtcaacatggactggcgcgccgtacatcaagaagattgacctcaagacttacaggtccttgtagttcttgtaagtcttgaggtcaatcttcctgaggtacaaggacctgtcgactgcgcttgagaagatgttcagtggcttcagtactggcaaggatggcttatctgagtaccgcaagtatggtagatatgttctgacttacgaggacaagga

SEQ ID NO: 42994 - DNA, 275 bp, Zea mays
ggctgcggcggagacggaggcgaaggaggaggagcagcagcagcaggcggcgccgaggagcggcatcccactcagtgcttgcaaccatggctaggggattgaagaagcacttgaagaggctcaatgcgcccaagcattggatgctcgacaagcttggcggacttttgctcccaagccatcttctggacctcacaagtccagggagtgccttcctctgatcctcatcatcaggaacaggctcaagtatgctctgaactaccgtgaggtcatttcta

SEQ ID NO: 42995 - DNA, 273 bp, Zea mays
agcctccgctgccggtcgccgactccgaaactccgacagtccgaccacaagcaggatgagtgaagaggataagactgctgcttctgctgagcagccgaagagggcccctaagctcaatgaacggatcctctcttctctgtccaggaggtccgtagctgctcatccatggcatgatcttgagatcggtcctgatgctcctgctgttttcaatgttgttgttgagatcacaaagggaagcaaagttaaatatgagcttgacaagaaaactggact

SEQ ID NO: 42996 - DNA, 265 bp, Zea mays
gagactgacatggccaagctcgaggaagctgttaggagtgtccagatggaagggctgctctggggcgcatccaagcttgtcccagttggatatggtatcaagaagctgcaaatcatgatgaccatcgtcgacgaccttgtctctgtcgacactctcattgaggactatctgtgcgctgagccagtgaacgagtacgtgcagagctgcgacatagttgccttcaacaagatctaggcgtgacttccgatcagtccttctcctgggg

SEQ ID NO: 42997 - DNA, 277 bp, Zea mays
tgggacttgttcgaggggatccagtccatgacctactgctgcggtaacttcggtgatgacaagggtgccagggccattgtcaaagccttcccacacataaaatgcactgtgctggcccctcccaagatcattgccaccaaaccggccgatggagcgaagataaactatgtcgaaggtgacatgttcagtttcattccacctgctcaaactgtcgtgctaaagcttgtgctgcaccacctgaccgatgaggagtgcgtcaagctcctggctcaatgcc

SEQ ID NO: 42998 - DNA, 158 bp, Zea mays
tgtggaccgtgtgctccagccgtttgaccctgccaagttcaatttcacaaaagttggccaggaagaggttctcttccaatttgagaatagtggtggtgatgacagctatttcctgaacaacgctccaatcattgctgttgatcgggctccaaatgtaa

SEQ ID NO: 42999 - DNA, 183 bp, Zea mays
gtctgctataggacttttgatgaatcttggattaattgaggagtccaaggtttcaaggccattaccttggaggccagcgactaatgttttccgtgttaaagaggatgttcgacctatattctgggccaacagaccaaagagctatcttaaaaggacattaggttgggatcagtatccccatgg

SEQ ID NO: 43000 - DNA, 270 bp, Zea mays
gttcctcttaagactgtacacaggcagtgctcttctggccttcaggcagttgcagatgtagccactgctattaaagcagggctctatgacattggtattgctgctggtttggagtccatgacagtgaacaaagttagtcttgatggccaagcgaatcccaaagttgagctgttttctcaagcacgcgattgccatctcccaatgggcctcagatctgagaatgttgcacaccgttttggcataacacgactggagcaagagcaagctgct

SEQ ID NO: 43001 - DNA, 269 bp, Zea mays
ctcagagagaacccaccatggtgctgtctcctgccgacaagaccaacgtcaaggccgcctggggtaaggtcggcgcgcacgctggcgagtatggtgcggaggccctggagaggatgttcctgtccttccccaccaccaagacctacttcccgcacttcgacctgagccacggctctgcccaggttaagggccacggcaagaaggtggccgacgcgctgaccaacgccgtggcgcacgtggacgacatgcccaacgcgctgtccgccctg

SEQ ID NO: 43002 - DNA, 248 bp, Zea mays
cccaaagtacagcttgaagcctcttgttccacgcttgtctgagcttcttggagttgaagtcgtgatggccaatgattgcattggtgaagaagttgagaagttggctgcacgtttgccagaaggtggagttctgctcctagagaatgttagattctacaaggaggaagagaagaacgaacctgagtttgctaagaagctagcatctgttgctgaccttatgtcaatgatgctttggcacggcacacaga

SEQ ID NO: 43003 - DNA, 204 bp, Zea mays
gaaactcgggctaaggagttcaatctgaaacacatgtggaagagcccaaatggcacaattaggaacattataaatggcactgtgttcagagagcctattatatgcacaaacgttccaagacttgttccaggatggactaagcccatctgcattggaaggcatgccttcggtgatcaataccgagctaccgcatgcagttctgaa

SEQ ID NO: 43004 - DNA, 288 bp, Zea mays
tttataatgcaaacttgggaataaccaagaagccaatagcatatttcagcgtctatgaccgttctgctccaatctatacacaacctcgacatctgccaccttcaaaggttcttgatgctgatgtgacagacagtgttattggtgagggatgtgttattaaaaactgcaagatacaccattctgtagttggactccgttcttgcatatctgaaggtgctatcatagaggacactttactaatgggtgcggactactatgagactgaagctgacaagaaactccttgccg

SEQ ID NO: 43005 - DNA, 207 bp, Zea mays
ctgcgccgccgcctccgacatcgtcccttcgtcaccacgagcaaacgataatccgccggcgttgagatgttggtttatcaggatctcctatctggcgacgagctcctgtcggattcattcacctacaaggagctcgagaacggcgtcctgtgggaggtcgagggaaagtgggtcacccaaggtcctgttgatgtagacattggtgcc

SEQ ID NO: 43006 - DNA, 274 bp, Zea mays
acatgctgtcggcaatgtgttgaaacgtgtttttgtcatcggtttctcaatcattgtatttggcaacaaaattagcacacaaactggaattggcacgtccattgccatagctggtgttgctatgtactcttacattaaggctaagattgaagaggagaaaaggaaaaagagcgcatgactgctgtgaataatattatcgggaccttcctcggacacaacatcgtcgacaatcacgacctacttctataccttgttttgttttcatcttgagtca

SEQ ID NO: 43007 - DNA, 274 bp, Zea mays
cggacgaggagcacccggagaggagggaggaggcctccgagcttgccccctttgatccaaccaagaagaagaagaagaagaaggttgtcatccaagagccttctgatgaagtggacaagcttgcagagaagacagaatcgctagcagttgcagaacctgctgaacttaacttcactggaatgaagaagaaaaagaagaagcaggtggatcttgattcatctattgatgaccttggagatggggaggacactcaaggtgatcaagttgtagagga

SEQ ID NO: 43008 - DNA, 271 bp, Zea mays
cggaggtctcactgagcaccgtcccagcatccggacaccacagcggcccttcgctccacgcagaaaaccacacttctcaaaccttcactcaacacttccttccccaaagccagaaggcgcacaaggaggaccatgaggtggctgtactgggggcacccccagcacgatccttccaaggtccaccgtgatcaacatccacagcgagacctccgtgcccgaccatgtcgtctggtcactgttcaacacctcttcttgaactggtgctgtctgg

SEQ ID NO: 43009 - DNA, 268 bp, Zea mays
cttgcattctgccgcagatggctggatcgcttgggagagagtaaatacttgatggctctgaagaatctgtgtgacttgggcattgtagatccatatccaccattatgtgacattaaaggatcatatacagcgcaatttgaacataccatcctgttgcgtccaacatgtaaagaagttgtcagcagaggagatgactattaaacttagtccagagccacctcaacacctttattttctgagctttgttggaaaacatgataccagaatt

SEQ ID NO: 43010 - DNA, 250 bp, Zea mays
ggcgaggcaaaagcgcaaacgcgaccacagacagagcgcgcttcaaggcctttttttttgagataacaaggaggagaagaggagatggaggtcacgatcacctgggtgaaggcgaggcagatcttcgacagccgcggcaaccccaccgtcgaggtggacgtgggcctcagcgacggcagctaagcgaggggggccgtacccagcggcgcatccactggaatatatgaggccttggagttgagggatggag

SEQ ID NO: 43011 - DNA, 279 bp, Zea mays
ttatgcttatggtttcgagaagccatctgcaattcagcagagaggaattgttcccttctgcaagggtcttgatgtcattcagcaagcacaatctggtacaggaaagacagcaaccttctgttctgggatcttgcagcagctggactatggcctggttgaatgccaggccctggtccttgctcccacccgtgagcttgcacagcaaatcgagaaagtcatgcgcgcgcttggtgattaccttggtgttaaggtccatgcatgtgtgggaggaactccgtc

SEQ ID NO: 43012 - DNA, 215 bp, Zea mays
ctgtgaagaagatagacagcgcttcgctgtctactgtacgaagaagacaactttctcgcggttgtgtcgaacgtgtcacggctcaggcatccaaacatcgtgccccttgcaggctactgcgtggagcacgggcagaggctccttgcgtacgagtacggcgggaacggaacgctgcatgacatgctgcacttctctgacgacgacgggatgacgat

SEQ ID NO: 43013 - DNA, 198 bp, Zea mays
tgctccgcaaaccagcgcaacccttcctgacagcggcggcgacatggtgctcgaggcgacgatgatctgcatagacaactcggagtggatgcggaacggcgactacgccccgtcgcggttccaggcgcaggccgatgccgtcaacctcatatgcggtgccaagacccagtcgaacccggagaacacagtaggcgtgat

SEQ ID NO: 43014 - DNA, 302 bp, Zea mays
agaaggaagagttggcgttcatcatatcgatgacgcacagcaaagcaaaaacttcacattcaaatgccacagggaaggaaatgatatattctctgtcaattcactcaacttccaccctgtccatcacacatttgcaactgctggatctgacggtgctttcaacttctgggataaggatagcaagcagaggctaaaggcttttagtagatgcccccttcccattccttgcagtaccttcaacagtgatggttccatatttgcttatgcggtttgctatgactggacccgtggggccgaaaatc

SEQ ID NO: 43015 - DNA, 289 bp, Zea mays
acagctgtgactttcgggctgttcttagccaggaagctgtccctgactagggccctcttctacatcatcatgcaatgcctgggtgccatctgtggagctggagtggtgaagggcttccagcagggactttacatgggcaacggtggtggcgccaatgttgtcgcacctggctacaccaagggtgatggccttggcgctgagattgttggcaccttcatcctagtctacaccgtcttctcagccaccgatgccaagacgaatgccagggactcccatgttcctatccttg

SEQ ID NO: 43016 - DNA, 239 bp, Zea mays
catcaacgagctacagattagagatgataacgaagttgaagcgaccataattaatgggagagggaccgaaactgggcacataattgtcaccactactggtggcaagaatggtcaaccaaaacagacagtgagctacatggctgagcgcattgtaggtcaacgttcttttgggattgtcttccaggccaagtgtttggaaacgggtgagactgttgccataaagaaggttcttcaagaca

SEQ ID NO: 43017 - DNA, 191 bp, Zea mays
gtggaggggagaagagaggaaatggcggcgaccgagggcgtgctcatggggatgggcaaccccctcctcgacatctccgccgtcgtcgatgacgccttcctgacaaagtatgacatcaagctgaacaatgctattctcgctgaggagaagcacttgcctatgtatgacgagttggctagcaagagcaatgt

SEQ ID NO: 43018 - DNA, 295 bp, Zea mays
cgacactgtcactagctagttgcctactagacggcgggtatagagctgcctgcaatccgccgctgagaagggaggatcggaagcgacgatgaggtcgtttgctcctgtctttctgtcggcggtcgtggcctggctggagctggcgggcacgcgcagggcggcaacttctaccaggacacagagatgacctggggcgatggccgcggcaacgtagtggacggcgggcgcggtctggacctgacgctggaccgcacgtccggctccgggttccagtccaagagcgagtacctgttcg

SEQ ID NO: 43019 - DNA, 206 bp, Zea mays
ctctccgcttcccgctccgatcgacctgctccctccccaccaccgagcccatggcggaccagctcaccgacgaccagatcgccgagttcaaggaggccttcagcctcttcgacaaggacggggatggttgcatcacgaccaaggagctgggcactgtcatgcgctcgctggggcaaaatcctacagaggctgagctccaggacatg

SEQ ID NO: 43020 - DNA, 181 bp, Zea mays
ctcgagcctaaaatttcccccactcgccagtcgcagcagcacctgtagcagccatggacgccagcggagccggtagcaaggggaagaagggggcggccgggcgcaaggcaggcggccccaggaagaagtcggtgacgcggtccgtcaaggccgggctgcagcgcgccgtcggccggatcgg

SEQ ID NO: 43021 - DNA, 238 bp, Zea mays
tacccgcgcggccaagttatcctgttcgctaccgtgatgtttaccctagtccagagggtttatcttcgttcgtctcgtttgttgttgcccatctgtgtttttgattgcaaggtcgctctgtgtcagttgttagtgctgtgttcatcctcagctccagcagacccatgcatcaaccagcatggactgtggatcgatggatgctgttactcctgtcaggatttgttctaagttaacccta

SEQ ID NO: 43022 - DNA, 290 bp, Zea mays
agctcctctccccatcctgcacgctcctccgcctgattcccagcgcgtcgcacatctgctgctcgtcgcacttcaagagattcgatcgggttcgccggttcgcgcccgccgccatggcgacttcctcaggaccaaaggaggcgccacgaataaccctgggctccagaccgaggtcgaccccgccaccaaaggctacttcttgcaacaaacgatgttacgtgtgaaggaccaaaagtgaccttgacttctctcacgtgtgatgggatgtcgttgctgaaaggttggatttg

SEQ ID NO: 43023 - DNA, 291 bp, Zea mays
acaagttcgactgggaccaccgatgcacctgcagccgacgagcccgacggccgtgaagcaggtgagctgcgtgtgggacgcgtacgaggccaccaagggcgcccacgggctgtgcatcctgaccgagtgggacgagttcaagaccctggactaccagaagatcttcgactccgagaagctgagggagatcggcttcatcgtctactccatcggcaagccgctcgacgcctggctcaaggacatgcccgcggtcgcataatcccacccccctcacccatggattggattccg

SEQ ID NO: 43024 - DNA, 214 bp, Zea mays
atggcatatgtgaagactctcgtggcctccgcacactcaactctgtttgggcccaacatcttagcgaagaagtgacgacaaggttctacaagaactggtgcaagagcaagaagaaggctttcacaaagtatgctctcaaatatgaaaatgatgctggcaagaaggaaattcagctgcagcttgagaagatgaagaaatatgcttctgttatccg

SEQ ID NO: 43025 - DNA, 190 bp, Zea mays
accatgggttccatcatggagcaacgctgcaacaacgatccgcaggcgctgctcgacgctcagctcgagctctggcacagcacgttcgcgttcatcaagtccatggcgttcaagtcggcgctggagctcggcatcgccgacgccatccactgccacggcggcaccgccacgctcacccagatagccacca

SEQ ID NO: 43026 - DNA, 179 bp, Zea mays
agccaccgccgaggaaaacgtgtactattagccatggtcaaccccaccgtgttcttcgacattgccgtcgacggcgagcccttgggccgcgtctcctttgagctgtttgcacacaaggtcccaaagacagcagaaaattttcgtgctctgagcactggagagaaaggatttggttataa

SEQ ID NO: 43027 - DNA, 287 bp, Zea mays
aagagaacccaccatggtgctgtctcctgccgacaagaccaacgtcaaggccgcctggggtaaggtcggcgcgcacgctggcgagtatggtgcggaggccctggagaggatgttcctgtccttccccaccaccaagacctacttcccgcacttcgacctgagccacggctctgcccaggttaagggccacggcaagaaggtggccgacgcgctgaccaacgccgtggcgcacgtggacgacatgcccaacgcgctgtccgccctgagcgacctgcacgcgcacaagc

SEQ ID NO: 43028 - DNA, 283 bp, Zea mays
cagcaaaggatgttgctaagcagctcaaggaacaacaaatggtgatgccaggacatcgtgagtcaaacttgcagaaggaactgaaccgatacatccccactgctgctgcatttggtggagtatgcatcggcgcattgactgtcctggctgatttcatgggtgcaattggttcaggaactggaatactgctggctgtgacaatcatatatcaatacttcgaaaccttcgagaaggaaagggcaacagagcttggtttccttgagttttgattagtaactgtgga

SEQ ID NO: 43029 - DNA, 237 bp, Zea mays
agcccgcggaggccgcacgatgcctggagttactgtaagagacgtgaaccagcaggagttcgtcagagctctggcagccttcctcaaaaagtccgggaagctgaaagtcgccgaatgcgtggataccgtcaagctggccaagcacaaagagcttgctccctacgatgagaactggttctacacgcgagctgcttccacagcgcggcacctgtacctccggggtggcgctggggttgg

SEQ ID NO: 43030 - DNA, 228 bp, Zea mays
tccgacgttttgcatctcaagcagcatcgtctcctccccagatccatcaattcgttcggaccgcccttctcgtgtccccgttccaaagcgcggcaggctgagcggttccgtcagatttgagtcgtcatgaatcccgagtatgattaccttttcaaacttctgcttatcggtgattctggtgttggaaaatcatgcttgcttctcagatttgcagatgattcatatctg

SEQ ID NO: 43031 - DNA, 253 bp, Zea mays
tgaagccatctatgacatctgtcgtagaaacctcgatatcgagcgctcaacctacactaaccttaaccgccttattagccagattgtgtcctcgatcactgcttccctgagatttgatggagccctgaatgttgacctgacagaattccagaccaacctggtgccctacccccgcatccacttccctctggccacatatgcccctgtcatctctgctgagaaagcctaccatgaacagctttctgtagcagag

SEQ ID NO: 43032 - DNA, 127 bp, Zea mays
attccaggtgctcacgcctggacgacgccgtacggggccagcattttccagtccaaggagtcgtcctcagtcctgagttgtgacatctccagaaatagcaaatacatcgtgacaggctcgggggaca

SEQ ID NO: 43033 - DNA, 218 bp, Zea mays
atcaggccaagaacagaacttgaaggaacattcaggttcatgcactcgagactgcggacacatgctgaatcaattgctttctttggtggtggttcaagagaaaaagcgatggatcaggctaaattcgtcaagttaattaaccactcaaagattcttttgaggaaacagtggctttatggtattgttgatgattttgtaacaaagcaacttccacacaa

SEQ ID NO: 43034 - DNA, 287 bp, Zea mays
gctcgaggccgctcgccaccccgcactcgcctgtagcctcttctcgctttcgccaccggggcagcgctccgccatggctggacctgctgttctcaatgagcgtatcctttcttccatgtctcagaaacatgttgctgctcacccatggcatgatttggagataggaccaggggctcctgaattcttcaattgtgtggttgagattcctagaggcagcaaggttaagtacgagttggacaaggcatcttgtctgatccaggtcgacgtgttctttattcctctggtgg

SEQ ID NO: 43035 - DNA, 215 bp, Zea mays
ctaggaagtatatggatagccacttcgtctccaagctgctcgatctgtttgattcggatgacccgagagaaagggactgcttgaagacaatattgcataggatatatggcaagttcatgggaaaccgaccgttcatccgtaaggctgtgagcaacatcttctataggtatgtgttcgagacggatcaccacaatgggattgccgaactattggag

SEQ ID NO: 43036 - DNA, 313 bp, Zea mays
agctaaccagtacaccgctgcactgaatcccatcctcttccaggtcctcatcagtccgatgcttgggggaagcaccgaccaaaaagttgtggatgagaaccttgagaagctgaagaaggtgctagaggtgtacgaggcacgcctgaccaagtgcaagtaccttgctggagacttcctcagcctcgccgacctgaaccatgtgtctgtacatctctgcctgtttgctacgccctacgcatctgtgctcgacgcctacccgcatgtgaaggcctggtggtctggtctgatggagaggccgtctgtccagaaggtc

SEQ ID NO: 43037 - DNA, 310 bp, Zea mays
cctctctcctcagcgcttcttctttcttggtttgatcctgactgctgtcatggcgtgccctctggagaaggcctggatgtgatggtgtccaccttccacaagtactcgggcaaagagggtgacaagttcaagctcaacaagtcagaactaaaggagctgctgacccgggagctgcccagcttcttggggaaaaggacagatgaagctgctttccagaagctgatgagcaacttggacagcaacagggacaacgaggtggacttccaagagtactgtgtcttcctgtcctgcatcgccatgatgtgtaacg

SEQ ID NO: 43038 - DNA, 295 bp, Zea mays
ccgcttgcacctcggcgatccccgactcccttctttatggcgtcgctcctgtgctgtgggccgaagctggccgtgtgcggcatcgtcctcagcgcctggggagtgatcatataatgctcggaatatttttcaatgtccattccgctgtgttgattgaggacgttcccttcacggagaaagattttgagaatggcccctagaacatatacaacctttacgagcaagtcagctacaactgtttcatcgctgcaggcctttacctcctcctcggaggcttctctttctgccaagttcg

SEQ ID NO: 43039 - DNA, 305 bp, Zea mays
cggctcgagctgagcctgggcggaacccccgagggggactctgcccaggctacactgagactgaccacggcctgtttgaggacccccacgtgcctttccacgtccggtgtgagaggaggacttcgaaggtggaagtcattgagctgcaggacgtggaatgcgaggagaggccccggggaagcagctccaactgagggtgattaaaatctgaagcaaagaggccaaagattggaaaccccccacccccacctctttccagaactgcttgaagagaactggttggagttatggaaaagatgccctgt

SEQ ID NO: 43040 - DNA, 298 bp, Zea mays
ccttttctcagtatcctcctcttggtcgatttgctgtccgtgacatgaggcaaacggtggctgtcggagtcatcaagagtgtggagaagaaggacccaactggagccaaggtgacgaaggctgctgccaagaagaaatgatctatctggctggtgctgtgcttgcttgttggttacctcgtggaagcttaaaatatctcgtcttgttgacatccttgcagttgtcgcgtgaacaagtaatctatgatggcaatgtttgcctggtcatgaagtattattactttcgttgaaaccgtgat

SEQ ID NO: 43041 - DNA, 224 bp, Zea mays
taaaagaatgcagcgtagtagtcggaatcggctcgaggggatctgggccaggggctctgattgccgtatcatccgagtccagatggagttgggggaagatggcagtgtctataagagcattttggtgagggagccttgggatggagttagggtgaaggatggtgtcttgttggactataaatgttgtctgaggtttgggcagccaaatggaattgaatgtagtt

SEQ ID NO: 43042 - DNA, 308 bp, Zea mays
  unsure (1)..(308): unsure at all n locations
gtaaaatttatattgcaactgatagtactccggtggatatgcagacctatgatgttgctgtgattctcagncgtggttattgacatctcctgtatttatggtctcaaagaagatggagcaggaaccccctatgacaaggaatccacagccatcataaagcttaataatacaaccgtgctttatttaaaagaggtgacaaagttcctggctctcgtttgctttgtcagagaggaaagctttgaaagaaaagggctaattgactatagttttcattgcttccggacagccattcatgaagtttttgaggt

SEQ ID NO: 43043 - DNA, 300 bp, Zea mays
accgcatggaaattttagatattcaaagaatatgttacctgaggtcacagaggctgattttaggaagggttcacagtggttctcagttaagcgccacatgcgttgatgatcattgcagatagtctttactataccaagttcaagcttcattgcaggcctgggatggaagatggtcgcaactgctatgctgatgaacattatttgccaacagtattccatatgatggacccagatggaattgctaattggtctgtaacccatgttgactggtctgaagggaagtggcacccgaaagcttac

SEQ ID NO: 43044 - DNA, 300 bp, Zea mays
cacagactcagagagaacccaccacggtggggtctcctgccgacaagaccaacgtcaaggccgcctggggtaaggtcggcgcgcacgctggcgagtatggtgcggaggccctggagaggatgttcctgtccttccccaccaccaagacctacttcccgcacttcgacctgagccacggctctgcccaggttaagggccacggcaagaaggtggccgacgcgctgaccaacgccgtggcgcacgtggacgacatgcccaacgcgctgtccgccctgagcgacctgcacgcgcacaagcttc

SEQ ID NO: 43045 - DNA, 299 bp, Zea mays
caggacatagccgcacaaagggaaggagaccctcgccaacctcgaagctagtccaaactagtgggaggttgagtgcagggatcgatcgaggaagacgagacaagcttcttcttctgctgccgccgccgccagctctagctcaccacgagttactagccaatctgacaccgaccgtccatggcgcggggcaaggtgcaacttcggcgcgtcgagaacccggtgcaccggcaggtgacattctgcaagcgccgcgctgggctgctcaagaaggcccgggagctctccgtcctctgcgacgc

SEQ ID NO: 43046 - DNA, 298 bp, Zea mays
cctgaaggagagcagcccggaggagggggagcaagcagcagccgtccgtggaagaagatgtcgtacctgctgccgcatctgcactcggggtgggcggtggaccaggccatcctcgccgaggaggagcgcctcgtcatcatccgcttcggccatgactgggacgagacctgcatgcagatggatgaagtgctggcagcagtagctgagaccataaagaactttgcggtcatctaccttgttgacatcacagaggtccctgatttcaacaccatgtatgagctgtacgacccttcgacag

SEQ ID NO: 43047 - DNA, 294 bp, Zea mays
ctgcgctcatttctgcatccccctcccgccgcgccgcctcaccgccgccggagaagatgggtcgcgtgatccgcgcgcagctaagggtgcggggtccgtgttcaagtcccacacccaccaccgcaagggccccgcccgcttccgctccctcgacttcggcgagcgcaacgggtacctcaagggcgtcgtcaccgacgtcatccacgaccccggccgtggcgcgccgctcgccaaggtcactttccgccacccattcaggtacaagcaccagaaggagctctttgtcgcagccga

SEQ ID NO: 43048 - DNA, 301 bp, Zea mays
gtagccgcctcgctttctcctcttccgccccaccctcgtgaggcgctgatccatcgcctcggacagcggctccagaacctccgcgttgcagaaacacagtagcgagaactattcggtggggccgaagatcgtgtcgctgaaggtgccaaagcgcctcgccgcaagcggactcaagtgtgggaaaggcacaagtgtggcttgaccccaatgaagtaagtgagatctccatggcgaactcccgccataacatccggaagttggttaaggatgggtttatcatcaagaagcctcagaaaatcca

SEQ ID NO: 43049 - DNA, 166 bp, Zea mays
agcagacggttgctgttggagtcatcaagagcgtggagaagaaggacccaactggtgccaaggtgaccaaggctgcaataaagaagaaatgatgcgtcctcccatgtgccctcgtttattttgtacttgtgcccgtatacttcgatctgtaaaactctatgggttg

SEQ ID NO: 43050 - DNA, 294 bp, Zea mays
agctgctctcgtccctagaaataaagcagctcctccgcggggcggcgaactactacgcatcgccaaaaccctagccccgatccggtcgaggagcactacttcttggcatggcgggcacccctagccaggcaagcctcctgctccagaagcagctcaaggatcttgcgaagaaccccgtggatgggttctccgcagggcttgtagacgatagcaacgtcttcgagtggcaggtcagcatcatcggcacgcccgacaccctatatgatggaggctacttcaatgcaataatgacct

SEQ ID NO: 43051 - DNA, 295 bp, Zea mays
ctcttcaaggtggtgatcatcggcgacacgcggtggggaagagcaacctgctgtcccgctacgcgcgcaacgagttcaacccccactccaaggccaccatcggggtggagttccagacgcagagcatggccatcgaaggcaaggaggtcaaggcccagatctgggacaccgccggccaggagcgcttccgcgccgtcacctccgcctactaccgcggcgccttcggcgcgctcctcgtctatgacattacccgccgctccaccttcgacaacgtcggccgctggctccaggagct

SEQ ID NO: 43052 - DNA, 295 bp, Zea mays
agttccgatatgtctgcatttaaagctgcaaacccagattgtgtctttgaagattttattcggtggcattcacctggtgaatggttgagcgaggacaaaacagatggtaatgcaggctggcctcccaaaggaaagctttctcaccgtatgtcccaacatgggaatgtgtggcgcaaaatctggaatgatgctctgccattgcctgtttctgaacagaagtctttgcttgaccctgttcgggaaggagaaaaggtgcttcattaccttgaaactttaaggccacagcagctccttg

SEQ ID NO: 43053 - DNA, 289 bp, Zea mays
cagcggacgggacctgtcaggacgcggccatcgtgggctacaaggagtcgccctccgtctgggccgccgtccccgggaaaacgttcgtcaacatcacgccagctgaggtggctgtcctggttggcaaagaccggtcaagtttttacgtgaatgggctgacacttgggggccagaaatgttcggtgatccgggactcactgctgcaggatggggaatttagcatggatcttcgtaccaagagcaccggtggggcccccaccttcaatgtcactgtcaccaagactgacaa

SEQ ID NO: 43054 - DNA, 276 bp, Zea mays
cgcatgactaggttctgcaaaactaagataccttctgagatcactgctgcactagatcctatcaaagacaatgaggaggctgttagacaatatggaatccaccttggaactgagatgtgcaagaaaattcttgctactggcattaagactttgcactttcacacactaaacatggaccagtctgctataggaattttgatgaatcttggattaattgaggagtccaaggtttcaaggccattaccttggaggccagcgactaatgttttccgtgtt

SEQ ID NO: 43055 - DNA, 275 bp, Zea mays
ggcatgggcagtatccgccgccatcctcttccgtgaggcgcgctgagacccggaccggccctcctgagaggatgccggtgcgggcgcccgcggagagggacccgtcgccatgggccgtgtgatccgtggacagaggaagggcgccgggtctgtgttccgcgcgcacgtgaagcaccgtaaaggcgctacgcgctttctacgccgtggatttcgctgagcggcactgctacatcaagggcatcgtcaaggacatcatccagggcccgggccgcggc

SEQ ID NO: 43056 - DNA, 290 bp, Zea mays
cactcacccacccactcacggactcatctactgagcagcgcggtgggcatccgagcgagagggcgagcgcggaaggatcggaattccgaaggttgggcatggaggcgagcggcgagaaggctgcggtggtgcgacggctgatggaggcgaaggaggtgtccgggaagaccttctcgggaatcgccgccgagacgggtctcaccaacgtctacgtggcgcactgctgcggcgccaggcgcagctcaaggccgacacggtgcccgcgctgagggcggccctgcccacgctca

SEQ ID NO: 43057 - DNA, 293 bp, Zea mays
gctccccccgcaaaaaccctagctttacctccccacaagcgcctccaagatgaagctcgtcaggttcttgatgaagctgaacaacgaaacggtgaccatcgagcttaagaacggcaccgtcgtacacggaaccattaccggtgttgacatcagcatgaatactcatctgaagactgtgaagctgacactaaaagggaaaaatcctgttacccttgatcaccttagtgtgaggggaaacaacatccgctattatatccttcctgacagcctaaacctggagactttgctggttg

SEQ ID NO: 43058 - DNA, 290 bp, Zea mays
caaggactggtctttctatctcttgtactacactgaattcacccccactgaaaaagatgagtatgcctgccgtgtgaaccatgtgactttgtcacagcccaagatagttaagtgggatcgagacatataagcagcatcatggaggtttgaagatgccgcatttggattggatgaattccaaattctgcttgcttgctttttaatattgatatgcttatacacttacactttatgcacaaaatgtagggttataataatgttaacatggacatgatcttctttataattct

SEQ ID NO: 43059 - DNA, 288 bp, Zea mays
gagaaaaatagtgttcacaaattctgacaaagctcacgcggaggaagctctgtgcagacttggtttacagggttgcttcgatggcgtgatctgcttcgagacactgaatccttgctgtggtccgagcgcgttccgagacggcaacggcatgctgttcccagatgaaacgtcccccgacttggctgatctgaatgaatccgatgggctcagacccatatcacccatcctctgcaagccctccattgaagccatggaagctgtaactcggattgcaaacgttgatcccaa

SEQ ID NO: 43060 - DNA, 289 bp, Zea mays
aaagagttctgctgcaatggtacagtggtccaggacccagaacttggacaggtcattcagctccagggtgatcagaggaagaacgtctcgaatttcctcgtccaggccggcattgtgaagaaggagcacatcaagattcatggtttctgaggcaccgccgggtccatagcaaaccaaccctgcatgcagggccagcttattatatataatatctgaggtggagcatatctatctggctgtgtactgcaagcaggcctagtacgccgcctgcgcgttcctcctattacac

SEQ ID NO: 43061 - DNA, 288 bp, Zea mays
caggaaggaggtcaccagctactggctgggcctcaacgccttcgccgacctcacgcacgacgagttcaaggccacatacctgggcctcctgccgaagaggaccagcggtggccggttcaggtacgacggcggcgaggtgcccgcgtccgtggactggcggaagaagggcgccgtgacggaggtcaagaaccaggggcagtgcggcagctgctgggccttctcgacggtggcggccgtggaagggatcaaccagatcgtgacgggcaacctcacgtccctttcggagca

SEQ ID NO: 43062 - DNA, 159 bp, Zea mays
ctgctagtgctacgcttcgtgccgccgccgcaacctattccttcccgttccagattgcagatcatttaacataaatggctgacgcagaggacattcagcccctagtctgtgacaatggaactggaatggtcaaggctggctttgctggaaatgacgctc

SEQ ID NO: 43063 - DNA, 289 bp, Zea mays
cgaatcctcctcgcgattccaatccacgcacgccatctccgactccgcgtccgcctcgcgcaggacatatattcagtgatggaacacaaggaggccggctgccagcagccggagggcccaatcctatgcatcaataactgtggtttctttggaagcgctgccaccatgaacatgtgctccaagtgccacaaggagatgataatgaagcaggagcaggcccagttggctgcctcctccatcgatagcattgtcaatggcggtgataatgggaaaggacctgcaattgctg

SEQ ID NO: 43064 - DNA, 166 bp, Zea mays
cacgaattcaccaaccaaactccactgtctccaactctccatcgcgtctgctacgcctgtcctgcaggacgaccaatggcttccaggaagttcttcgtgggtggcaactggaaatgcaacggtactggcgaggacgtgaagaagatcgtcaccgtgctcaaccaag

SEQ ID NO: 43065 - DNA, 286 bp, Zea mays
atgcaacgcaacgttggcgcttggcggccagtagtagcagctaatttagcgtcgctccttcctactagacgagagatcgagaaaccatggccaagctccaagtcactcctggcgccgcgttcaccgagtgcaatgaactcaacttccagggcctgtacatgtaccacacgcccctgggtcccaaggccaaccaagctgcgatcctagagagcaaggccaagatcggcatcggtgccaccgtggttaacaactgggcagtgtatgacgggccatggccaggcgctat

SEQ ID NO: 43066 - DNA, 272 bp, Zea mays
caggccgtcgccttcccattcttcctcgccgcgggggtcgcctgagatcacataaacaatggtgaaggctgttgctgtgcttggtagcagcgatggtgtcaagggcaccatctttttcacccaagagggagatggccctaccgctgtcaccggaagtgtctctggcctcaagcctggcctccatgggttccatgtacatgcacttggtgacaccaccaatggatgcatgtcaactggaccacactacaatcctgcgagcaaggagcatgggg

SEQ ID NO: 43067 - DNA, 247 bp, Zea mays
cgccggagcacgacgcacgcagatccgcagagatcagtgacactgcaagtattgaaaactgcattgtaagatggcatcagcagagcttgtcccgtgatgaaaatgtgtacatggctgagctcgcagagcaggccgggatgtacgagcaaatggatgagttcatggataatgtacagagaactgttgaatctgaagaggtcactgtggatgaacgcaacctcctgtctgatggatacaagaacgttta

SEQ ID NO: 43068 - DNA, 277 bp, Zea mays
  unsure (1)..(277): unsure at all n locations
cgcgcgtcncctcgccgagtcccctcgccagattccctccgtcgccgccaagatgatgtgcggggcgccctccgccacgcagccggccaccgccgagacccagcacatcgccgaccaggcgaggtcccagcttgaagagaaagaaaacaagaagttccctgtgtttaaggccgtgtcattcaagagccaggtggtcgcggggacaaactacttcatcaaggtgcacgtcggcgacgaggacttcgtacacctgcgagtgttccaatctctccctcat

SEQ ID NO: 43069 - DNA, 270 bp, Zea mays
tgaacgtgcagcagcccgctgatgttgccggacccagcgagggggtggcggcgatctccaaaggggggaaggtagggccgaaccggtgcagcgcctgcaggaagagggttggacttacgggattcaactgccggtgtgggaacttgtactgcgcactccaccgctactccgacaagcacgactgcaagttcgactaccggactgctgccagggacgccattgccaaggctaatccggtggtgaaggcagacaagctcgacaagatctagg

SEQ ID NO: 43070 - DNA, 267 bp, Zea mays
acctagtccagagggtttatcttcgtagcgaactggaggaactgagcggtggggcccgcgcggccaagttatcctgttcgctaccgtgatgtttaccctagtccagagggtttatcttcgttcgtctcgtttgttgttgcccatctgtgtttttgattgcaaggtcgctctgtgtcagttgttagtgctgtgttcatcctcggctccagcagacccatgcatcaaccagcatggactgtggatcgatggatgctgttactcctgtca

SEQ ID NO: 43071 - DNA, 288 bp, Zea mays
tcggctcgagcacctccctcgctctcccacaccactggcaccaggccccggacacccgctctgctgcaggagaatggctactcatcacacgctgtggatgggactggccctgctgggggtgctgggcgacctgcaggcagcaccggaggcccaggtctccgtgcagcccaacttccagcaggacaagttcctggggcgctggttcagcgcgggcctcgcctccaactcgagctggctccgggagaagaaggcggcgttgtccatgtgcaagtctgtggtggcccctgc

SEQ ID NO: 43072 - DNA, 272 bp, Zea mays
caacggcagcgtgcccggcttcaaggtcgacaccgtcgacaccaccggcgccggcgacgccttcgtcggctccctcctcgtcaacgtcgccaaggacgactccatcttccacaacgaggagaagctccgcgaggccctcaagttctccaacgcctgcggcgccatctgcaccaccaggaagggcgccatcccggcgctgctgcaggtcgccaccgcccaggacctcatcgccaaggccaactagatggccgcacgcaccgccgttccaccac

SEQ ID NO: 43073 - DNA, 270 bp, Zea mays
agcggcgacgccagcccgtcgagcttgtccagcgaccgccggcgggtcggcttcaacatcctgtcggggacgtccatgtcgtgcccgcacgtcgccggcgtggctgcgctgatcaaggccagccacccggactggagccccgcgaagatcaagtccgcgctgatgaccaccgcgtacgtccacgacaacacgtaccggtcgctgaaggacgcggccaccggcaaggcgtccacgccgttcgatcacggagctgggcacatacacccgctg

SEQ ID NO: 43074 - DNA, 270 bp, Zea mays
aaagcacgtgaggtgttgcagagggaggacgatctgaatgaaattgtgcagcttgttggtaaagatgcgctggcagaatctgacaagattacgctggagacagcaaagcttttgagagaagattatttggcacaaaatgcattcaccccatatgataagttctgcccattctacaaatccgtttggatgatgcgcaacattattcacttcaacacattggcaaatcaggctgtggagcgggcagctggtactgacggccataagataaca

SEQ ID NO: 43075 - DNA, 273 bp, Zea mays
cggagagaaggatgatgaagggctttggcaatcgccgctgcactcaacccacttaccgctgttaattttgcactggatattgcaagagcaatggcatatcttcataatgagcctaatgttgtgattcaccgagatttaaaaccaagaaacattcttctggtgaattctgctgccaaccacttgaaggttggagacttcggccttagcaagatcatcaaagctcagcatgcgaatgatgtatacaagatgactggagagacaggaagctatcgg

SEQ ID NO: 43076 - DNA, 281 bp, Zea mays
aattctagggttttgctgctctccgaccccgagctccgaaggccgcagcatcaggcgcggcccccctcgcgtgtgaccgagatggcgctgccgaatcaggggaccgttgattaccccagcttcaagctcgtcatcgtcggcgatggtggaactggacaaaactacatttgtgaagaggcatctcactggagagtttgagaagaaatatgaaccaaccattggtgtggaagttcatccgttggatttcaccactaactgtggtaagatcaggttctactgct

SEQ ID NO: 43077 - DNA, 274 bp, Zea mays
gccagctgacccctcacactcacctagccaccatggacatcgccatccaccacccctggatccgccgccccttctttcctttccactcccccagccgcctctttgaccagttcttcggagagcacctgttggagtctgatcttttcccgacgtctacttccctgagtcccttctaccttcggccaccctccttcctgcgcgcacccagctggtttgacactggactctcagagatgcgcctggagaaggacaggttctctgtcaacctggatgt

SEQ ID NO: 43078 - DNA, 268 bp, Zea mays
cgcaaagaagctcaagatgttcacattaagtttgcagagaaagcttttgtgcaacacgcggaagtaattcttgctgatgggaaattaacagaggctaaggctgaccagcttgctaagattcaaaagcaggtcggtttgcctactgaacatgcacagaaaatcattaagggtattacaactacaaagttatcttctgcaattgaagcctctgttgctcggggtcagatcggtatacagcaggtccgaggattgaaggaagcaaacttcc

SEQ ID NO: 43079 - DNA, 270 bp, Zea mays
gtgaagactctgacggggaagaccatcactttggaggtggagtcctcggacaccatcgacaatgtgaaggccaagatccaggacaaggagggcatccccccggaccagcagcggctcatcttcgccggcaagcagctcgaggacggtcgcacccttgccgactacaacatccagaaggagtccaccctccacctggtgctccgcctccgcggcggcgccaagaagcgtaagaagaagacgtacaccaagcccaagaagatcaagcacaag

SEQ ID NO: 43080 - DNA, 268 bp, Zea mays
gggccacctctgtggaaaccaaagagttctcaccaagcataaacatattcctgggctgatccacaacatgactgcccgctgctgtgacctaccatttccagaacaggcctgctgtgcagaggaggagaaattaaccttcatcaatgatctgtgttgtccccgacgtaacatctggcgagaccctgccctctgctgttacctgagtcctggggatgaacaggtcaactgcttcaacatcaattatctgaggaacgtggctctagtgtct

SEQ ID NO: 43081 - DNA, 259 bp, Zea mays
cttctactgccacatcctgctgcggaacctcaggagcccaagcggcacggcgggtaccagatcccccgcggtttcttgttcaacatcgtgacctgcgccaattacaccaccgagatctatcagtgggtcggcttcaacatcgccacgcagaccgtggcaggttacgtcttccttgtcgtggcggcaggcatcatgaccaactgggcgctcggcaagcacagccgtctgaaagagctgtttgacggcaaggatgggaggc

SEQ ID NO: 43082 - DNA, 265 bp, Zea mays
gctgaagatctcgagtgcaacgcaacgttggcgcttggcggccagtagtagcagctaatttagcgtcgctaccttcctactagacgagagatcgagaaaccatggacaagctccaagtcactcctggcgccgcgttcaccgagtgcaatgaactcaacttccagggcctgtacatgtaccacacgcccctgggtcccaaggccaaccaagctgcgatcctagagagcaaggccaagatcggcatcggtgccaccgtggttaacaa

SEQ ID NO: 43083 - DNA, 260 bp, Zea mays
  unsure (1)..(260): unsure at all n locations
ganaactcctgtctcactcgatatgcttgggcgcatttttaatggttctggaaaacctattgacaatggccccccgatattacctgaagcctacttggatatctctggaagttctattaatcccagtgagagaacctatccagaggagatgatccaaactgggatatccaccattgatgtgatgaactccattgctcgtgggcaaaaaatccccctattttctgctgctggactccctcacaatgaaattgctgctcaga

SEQ ID NO: 43084 - DNA, 109 bp, Zea mays
ccgagattagagggagcgccctgcccaagcaaagagaaaccgcggcgcgagaagagggaggaagggcagacgggcgagcaggatgagagagatcatcagcatccacatc

SEQ ID NO: 43085 - DNA, 260 bp, Zea mays
tccatctattccagagaagaacgttacttgcctgacccgtctggaccacaacagggctcttggccagatttctgagagacttaatgtccaagttagtgatgtgaagaatgttatcatctggggtaaccactcgtcctctcagtaccctgatgttaaccatgccacagtgaagacttccactggggagaagcctgttcgtgagcttgtctctgatgacgagtggcttaatggtgaattcatcacaactgtccaacagcgtg

SEQ ID NO: 43086 - DNA, 261 bp, Zea mays
caactcctgagcactttctcctcgtccccgacaagccaatcgaagccgagatacggccatggactccaccggcaccggagcagggggtaaggggaagaagggagcggccgggcgcaaggtcggcgggccaaggaagaagtcggtgtcgaggtccgtgaaggccgggctccagttccccgtcggccgcatcgggcgctacttgaagaagggccgctacgcgcagctggtcggcaccggcgcccccgtctaactcgccgctgt

SEQ ID NO: 43087 - DNA, 262 bp, Zea mays
ggccaacatcgcggactacttcgttggccctggactggatgatcttatcgagcagttgacccagaatgatcgccgaggaccaccacctgctgcacagtcctcgatcgacgctatgcccacagtgaagatcacccagaggcatctcagtggggactcgcattgccctatctgcaaggagaagttcgagatgggatccgaagaagcaagagagatgccatgcaagcacctgtaccactccgactgcatagttccttggttagag

SEQ ID NO: 43088 - DNA, 261 bp, Zea mays
cgctatgggctgcttgctgagggtcagaacaagcttgattatgttcttgccctcaccgctgagaacttcctcgcaaggcggcttcaaacacttgtcttcaaggctggcatggccaagtccattcaccatgctcgtgtcttgatcaagcagcgtcacatcagggttggcaggcaaattgtcaacgtcccatcattcatggtgagggtggagtctgagaagcacattgacttttcactgtcaagcccattcggtggaggcccc

SEQ ID NO: 43089 - DNA, 269 bp, Zea mays
ccatgaatcacactgtccaaaccttcttctctcctgtcaacagtggccagccccccaactatgagatgctcaaggaggagcacgaggtggctgtgctgggggcgcccacaaccctgctcccccgacgtccaccgtgatccacatccgcagcgagacctccgtgcccgaccatgtcgtctggcccctgttcaacaccctcttcatgaacccctgctgcctgggcttcatagcattcgcctactccgtgaagtctaaggacaggaagatgg

SEQ ID NO: 43090 - DNA, 300 bp, Zea mays
gtgaacaacggctgctcgtctacgagtatgtgcccaacaagaccctcgagttccagcttcacgggagtggcaggccaacattggactggccgaggcggtggaagatcgcggtcggctcggccaagggcctcgcctatctgcacgaagactgtcatcctaagatcatccatcgtgacattaaggcggcgaacatccttctggattataactacgagccaaaggttgcagattttgggttggccaaataccaagcagctgaagtaacctctgtttctacgcgtgtaatggggactttcggat

SEQ ID NO: 43091 - DNA, 311 bp, Zea mays
ttcaatgttcctgccatgtatgttgcaatccaagcggtgctctcactctatgctagtgggcgtactactggtattgtactcgactctggtgatggtgtgagccacactgtgcccatttacgaaggatatgcccttcctcatgccattcttcgtttggatcttgctggtcgggagctcacagactccctcatgaaaattctcactgagaggggttactccttcacaacctcagccgagcgagaaattgtaagggacatcaaggagaagctagcatatatagcccttgactatgagcaagagttggaaactgc

SEQ ID NO: 43092 - DNA, 296 bp, Zea mays
cctggatatgttatatcctctgatatagcaggttccattctatcggaatttttaaagcataaattaaggcttttcaaaatggaggatgtgagcatgggcatgtgggtagagcggttcaacaacaccagacttgttaaatatgtccacagcatcgaattttgtcaatttggatgcatagatgattattacactgcacactaccaatcaccaaggcagatgttgtgattgtgggacaaatagcaggctggaaaagcccaatgctgcaatatgagatagcaagaatggatgtggtggta

SEQ ID NO: 43093 - DNA, 298 bp, Zea mays
gacctggcaatttgttattgttaggccagtatgttccattctgattattgcactccagcttcttgggctgtaccccagctgggtcagctggacgtttagtattatactgaacttttcagtctccatggccttatatgcattggttctcttctaccacttgtttgctaaagagctggcacctcacaagcctcttgcaaagttcttgtgcatcaaagggattgtcttcttctctttctggcagggttttgcgctcgatgttttaacccaagcaggcgtgatcaaatcccaccatttctgg

SEQ ID NO: 43094 - DNA, 299 bp, Zea mays
ccaagatccactacgagaatatcaagatggaggactcagccaaccccatcttcatcgacatgaagtactgccccaacaagttgtgtaccgccaacggcgcctccaaggtcaccgtcaaggacgtcaccttcaagaacatcactggcacctcctccaccccggaggccattagcctgctctgcactgccaaggtcccatgcaccggcgtcaccatggatgacgtcaacgtcgagtatagcggcaccatcaacaagaccatggctatatgcacgaacgccaagggcagcaccaagggttgc

SEQ ID NO: 43095 - DNA, 279 bp, Zea mays
  unsure (1)..(279): unsure at all n locations
cacagctctagcattctctctcccatcggcacacccgagcacgctacctccttccacacaacaaaaaaagagtnnntggagantgttggcaatatggacnggatcggggagatgtacgagacggacattgccaacgtgacccctgcagaggagaagagttactggcagaggtacatatacctctggattaactatgcactgctatgaggagctagacgcacaagacagagaacggacaagagaggtttacaaggaatgcctgaggttgattcctcacaa

SEQ ID NO: 43096 - DNA, 289 bp, Zea mays
caataagatggcgtgtatagacaatgcaatgagagccttgttccttttagcgctctgctgtgtcgtgcatgtcgagaaggcaaagtcaaaggacaacgatgcaaaagcgtccgggcccggtgggtccttcgacatcaccaagttgggcgcctccggcaatggcaagacggatatcacgaaggctgtgcaggaggcgtgggcatcagcgtgcggcggcaccgggaagcagacgatcctcatccccaagggcgacttcctcgtcggaccactcaacttcacaggcccatgc

SEQ ID NO: 43097 - DNA, 290 bp, Zea mays
gcacggaatagcctacgttgccctccatgggctcctggcggcgctcaaggtggtcggcgggacacttgcggaccacacttacctgttcctcggcgccggcgatgccggaaccggcattgctgagctcatcgctctcgagatgtcgaaacatactgggtctccgatcgaagagtgccgcccgaagatctggctgatggactccaagggcctgatcgtagcgtcacggaaggactcgctgcaggcgttcaagaagccatgggcgcacgagcacgagcccgtggcgaccctgc

SEQ ID NO: 43098 - DNA, 291 bp, Zea mays
atcgagcgaattcggctcgaggcgagacggcctcactagaacaaacagctgatagactgctgatgggtctaatttagtgacactaagggtgatcacgaagctgccctggagcatctagtgatggccagcatgtccatggtagccaatggtcaggagacagaggtggcctcagtggattgcagcattggtgatatctacctctccctgggccggtatgatgaggctgtgtttgcttaccagaaagctctcactgtattcaagaccagcaaaggggagaaccatgcaactgtg

SEQ ID NO: 43099 - DNA, 292 bp, Zea mays
cgcagagccgcagagatccgtcacactgcaagtattgaaaactgaactgtaagatggcatcagcagagctttcccgtgaggaaaatgtgtacatggcgaactcgccgagcaggcagagtcgtacgaggaaatggttgagttcatggagaaggtagcgaaaactgttgactcggaggagctcactgtggaggagcgcaacctcctgtctgttgcatacaagaacgtcattggagcccgccgtgcctcatggcgcatcatctcctccatcgagcagaaggaggagggtcgaggc

SEQ ID NO: 43100 - DNA, 291 bp, Zea mays
atggcaagtcaaagcaaagcaggagtgagaagaagagccgcaaggccatgctgaagcttggcatgaagcccatcactggtgtcagccgcgtcactgtaaagaaaagcaagaatatactctttgtcatctccaaaccagatgtgttcaagagtccgaattccgacacgtatgtcatattcggcgaggctaagatcgaggacctcagctcccagctgcagacccaggcagcagagcagttcaaggctcctgacttgagccagatgatctcgaatccagagacgtctggcccgg

SEQ ID NO: 43101 - DNA, 285 bp, Zea mays
cggacacaccatgataaggacgctgctgctgtccactttggtggctggagccctcagttgtggggaccccacttacccaccttatgtgactagggtggttggcggtgaagaagcgaggcccaacagctggccctggcaggtctccctgcagtacagctccaatggcaagtggtaccacacctgcggagggtccctgatagccaacagctgggtcctgacggctgcccactgcatcagctcctccaggacctaccgcgtggggctgggccggcacaacctctacgt

SEQ ID NO: 43102 - DNA, 288 bp, Zea mays
  unsure (1)..(288): unsure at all n locations
caaagcttccggagaattcctcccttgccccgccgtcgcatcctcttcgaagttcgaatcgaatcgcgccgcgatcacccacctcatggcggacaaggagcctgtcgtggagcggccagaggcgggtgaggaggaggaggacgcctcagccgccgccgccgcgggggaggaggaggacacgggcgcccaggtggctcccatcgtgcggcttgaggaggtagccgtcaccaccggcgaggaggacgaggacgtcctgctcgacatgaaggcgaacntgtaccgattcga

SEQ ID NO: 43103 - DNA, 298 bp, Zea mays
ttctcctcgaggctcgagcattcgtgctgctccgaccccaccgccacatggctcggcggtccggcgatctcgcacaccggcgggaacatgactacttcaaggcgcctcgctgacaggaagaccgcaaagttccagaagaacatcaccaggaggggttctgtgcctgaaaccactgtcaagaagggaaatgactaccctgttggccctctagtgcttgggttcttcatctttgtcgtcattggatcatcgttgtttcagatcatcaggacggcaaccagcggcggggtggcttgagaga

SEQ ID NO: 43104 - DNA, 298 bp, Zea mays
gtggttattgactttgaagcaacctgtgacaaggtgaacaatccatttccacaagaaatcatcgagtttccatctgtcttggttaacagtgcaactggaaaactcgaagaatgcttccaaacatatgttcggccgacgtatcatcaatttttgactgatttttgcaaggagcttactggcatacaacagattcaggtggacagaggtgtgcctctaggtgaagccttactcatgcacgataaatggctagaggacaagggcatcaagaacacaaactttgctattgtgacctggtcta

SEQ ID NO: 43105 - DNA, 297 bp, Zea mays
cgagcacctagtagcgacctgctcgatcatcagtgtagcgtgtcggtatgtgtctgtcactcgtggtgcgaggttgcaacggtcatggcgacgtcgtctcgtcgggtgcccttgctgctgctgtgcctgggcgtgctggtgtcctgctccttcgcggcgggcagcgtggaccaggagctggacatcacgtggggcgacgggcggcggcaagtccttgacaacgggcggctgctgacgctgtcgctggaccgcacgtccggctccgggttccagtcccggcacgagtacctgttcggc

SEQ ID NO: 43106 - DNA, 299 bp, Zea mays
agcccatgcagctcccaactgcaaggttctggtggttgccaacccagcaaacaccaatgctcttatcttgaaagaatttgctccatctattccagagaagaacgttacttgcctgacccgtctggaccacaacagggctcttggccagatttctgagagacttaatgtccaagttagtgatgtgaagaatgttatcatctggggtaaccactcgtcctctcagtaccctgatgttaaccatgccacagtgaagacttccactggggagaagcctgttcgtgagcttgtctctgatgacg

SEQ ID NO: 43107 - DNA, 296 bp, Zea mays
  unsure (1)..(296): unsure at all n locations
tgataaaaagagtatttcagtatgttttggacaagaatgatgcaggtgaaccatttcctttgtttgcccaatgtcttggctttgagcttgtaagcatgattgtcagcaaggacaataatatcttggaggcatttgacgcccaggatcaagcatcaactctccagtttcccagctatgctttggagggttcagtttttcaaaggtttgacactgacctcatcaagaaagtcagcaccaactgtcttgtcatgcanaatcacagatatggtatatcaccaaggcgatatcgagagaac

SEQ ID NO: 43108 - DNA, 283 bp, Zea mays
atacccgagtacccgacgcgctactagttctattgccgcaccccagatctccaggagggactcgttcgttcagctaactacactgcacgcaatggccaccacggcgaccgaggcggcgctcgcgcaggagcagcaggccaacggcaacggcgagcagaagacgcggcactccgaggtcggccacaagagcctgctcaagagcgacgacctctaccagtacatcctggacacgagcgtgtccccgcgggagccggagagcatgaaggagctccgcgagatcacc

SEQ ID NO: 43109 - DNA, 291 bp, Zea mays
cgcctagcgccagtcaccaaccttccactccctccctccgtcgccatggcgcgcaagaagatccgggagtacgactccaagcgcctcctcagggagcacctcaagcgcctcgcgggcatcgacctcaccatcctctccgcccagatcacgcactcaacggacttcgcagagcttgtgagccagcagccatggctgtcaaccatgaagctagtggtgaagcccgatatgctgttcgggaagcgtgggaagagcggcctcgtggctctcaacttggatttcgatcaagtcaag

SEQ ID NO: 43110 - DNA, 293 bp, Zea mays
aattggttatatcttgcggactttgcatcattcaagccaacgtatatcccggatgacgacccatctgatttctcattctacttcgacaccggaggaagacgaagatgctatctagcacctgaaagattctacgaacacggtggtgagtcccaagttgcagcagatgcacctctgcaaccatctatggatatattttctcttgggtgcgttcttgctgaacttttccttaaaggtcagccactttttgagctttcccaacttctggcttatcggcgtggtcaatatgaccccaa

SEQ ID NO: 43111 - DNA, 293 bp, Zea mays
gagagagtaaggcggaggaggagaagccatggcgagcgacggcgacggtaagggccgcgtcgctacggcgccgggggcagggtacgggtacgcggcgtacggcggctaccagggggcggaggagcggaagtggtggccgtggctcgtgcccaccgtcatcgtcgcctgcatcgccgtgttcgtcgtcgagatgtacgagaacaactgccccaagcacgggagccagctcggcgactgcggcgccggcttcctccgccgcttctccttccagccgctccgcgagaacccgctgc

SEQ ID NO: 43112 - DNA, 293 bp, Zea mays
acaccagccgccgtcatgtcgaagcgaggtaggggaggttcggctgggaacaagttccgcatgtcactgggtctaccggtggcggccacggtgaactgcgcggacaacacgggcgcgaagaacctctacatcatctccgtcaagggaatcaagggccgcctcaaccgcctcccgtccgcctgcgtcggcgacatggtcatggccaccgtcaagaagggaaagcccgacctcaggaagaaagtgatgcctgccgtcatcgtccgccagcgcaagccgtggcgtcgcaaggacgg

SEQ ID NO: 43113 - DNA, 299 bp, Zea mays
gagggagagattggagggaggcccctgcccaaggcaagagaaaccgcggcgcgcggagagggaggaagggcagacgcagacgggcgaacaagatgagggagatcatcagcatccacatcggccaggccgggatccaggtcggcaacgcctgctgggagctctactgcctcgagcacggcatcgagcacgatggcaccatgcccagtgattcctcggttggcgtcgcacatgaagccttcaacacgttcttcagcgagactggttccggcaagcatgtgcccaggggcatcttcgtcgac

SEQ ID NO: 43114 - DNA, 300 bp, Zea mays
cgacctgagccacttcctcctcggcacaactacaggcatcatcgacgacggccaaaggcgcactcaatgtgcgtgtgcaccatgctccgcaaccaggcgaggttcctcagggaatggatcatctaccactcgcgcatcggcgtggatgggtggttcatctacgacaacaacagcgacgacggcatcgagcaggtcctcggcaccatggacccgtcgacgcacaacgtgacgcgccacctgtggccgtggacgaagtccaggaggctggcttcgcgcactgcgctctgagggcccgggaga

SEQ ID NO: 43115 - DNA, 253 bp, Zea mays
tgagagtttcttggcgaccaagtggacaactgcaaaacggttcggtcttgaaggtgctgagactctgatccctggcatgaaggagatgtttgacagggcagctcatcttggtgtagagagtattgtcattgggatgccacacagaggcaggttaaatgtcttgggaaatgttgtgaggaagcccttgcgacagatatttagcgagttcagtggtggcaccaagcctgtcaatgaaggcgaggggttgtataca

SEQ ID NO: 43116 - DNA, 275 bp, Zea mays
agtcaaacctctatagtcttaatgcaggatctcggacaatgagtgacaagcgggaatttcctacagtgcccttggttaaattaggcagttcttttacgaaggttcaagattatctacgaagatttgaaagtataccagatatgcttgaattggatcacctcacagtctcaggagatgtgacatttggaaaaaatgtttcattacagggaacggttatcatcattgcatatcatggtgacacttttgatatccctcctggagcagtattagagcac

SEQ ID NO: 43117 - DNA, 284 bp, Zea mays
aaggacaccgtggggcagtacgagtcccacatcgcgttcactcttcctgggctctaccgtgtcgtccatggcatcgatgttttcgatcccaagttcaacattgtctcccctggagcagacatgagtgtttactacccgtatacggaaaccgacaagagactcactgccttccatcctgaaatcgaggagctcatctacagcgacgtcgagaactccgagcacaagttcgtgctgaaggacaagaagaagccgatcatcttctcgatggcgcgtctcgaccgcgt

SEQ ID NO: 43118 - DNA, 283 bp, Zea mays
ctcgagtgcaacgcaacgttggcgcttggcggccagtagtagcagagaacttagcgtcgctccttcctactagacgagagatcgagaaaccatggccaagctccaagtcactcctggcgccgcgttcaccgagtgcaatgaactcaacttccagggcctgtacatgtaccacacgcccctgggtcccaaggccaaccaagctgcgatcctagagagcaaggccaagatcggcatcggtgccaccgtggttaacaactgggcagtgtatgacgggccagggcca

SEQ ID NO: 43119 - DNA, 272 bp, Zea mays
gttaaagtccatgcatgcgttggaggaacatctgttcgtgaggaataaaggattctcgccagtgctgtgcatgttgttgttggtacacctggtcgtgtgtttgacatgctgcgtagacagtccctccgccctgcgcatggcaagatgtttgttcttgatgaagctgatgaaatgctttctcgtggtttcaaggatcagatttatgacatcttccggcttctgccatccgggggttcaggttggagtcgtctctgctaccatgccacctgaag

SEQ ID NO: 43120 - DNA, 303 bp, Zea mays
accaaaccctagatccgccgcactcagttccggtgagaccctcctttccagcgaaaatgccgaacctcgagtgccggatgtatgagcagcggttcccggaggtggacgccgcggtgatgatccaggtgaagcacatcgctgacatgggcgcgtacgtctcgttgctcgagtacaacaacatcgagggcatgatcctcttctccgagctctcccgccgtcgtatccgctccatctcctccctcatcaaggttggccgccaggagcccgccatcgtgctccgtgtcgaccgcgacaagggctaca

SEQ ID NO: 43121 - DNA, 298 bp, Zea mays
gcacggttgaactcatttcagcaggccaacaccagggtggcatgatcctgattgttccacagggggaccatgcagtaaggctagggaatgatgctagcgttgggcaggtggtggacgttgagaagggttcggagtatgctatcacattcagtgctgcccggacatgtgcacaactggaggcactgaatgtttccgtgctaggtggcgtgtctcagacagtagacttgcagacgttgtacaacatagaaggctgggatgcgtacgcgttggcttttcaggcgacggaagagcaggcaca

SEQ ID NO: 43122 - DNA, 301 bp, Zea mays
agcccaccgaattccctgcgattcctctcccctcgcctcctcgtctccccctaggggatagtcggagaggaatcgcaaagagggccgtctcatccgagttaaggaagccatggagcacaaggaggctgggtgccaggcccccgagggacccatcctctgcatcaataactgtggcttcttcggcagcgcggcgaccatgaacatgtgctccaagtgccacaaggagatgataacgaagcaggatcaggccaagctggctgcctcctctatcgacagcatcgtgaacggcagcgacgccgtc

SEQ ID NO: 43123 - DNA, 300 bp, Zea mays
ctccaagaagagcttgacattgatgtgcttgtgcatggcgagcctgagagaaacgatatggttgagtacttcggtgagcagctctccggttttgcgttcactgccaatggctgggtgcagtcttatgggtcaaggtgcgtcaagcctccgatcatctacggtgacgtgagccgccccaaccccatgaccgttttctggtcgaagacggcgcagagcatgacgtctcgcccaatgaaggggatgctgactggcccagtcacaatcctcaactggtccttcgtccggaatgaccagccgagg

SEQ ID NO: 43124 - DNA, 299 bp, Zea mays
gcgggcagcagcacacagccccatcccaatcctagtcgatcttcttcccctcctcaaggaagaaaagaagctgaaccatggggaagagaaagtcaactgctaagccacctcctaagaagcggatggacaagcttgacactgtcttttcctgcccattctgcaaccacgggagtagtgttgagtgccgaattgacatgaagaatctgattggcgaacatcttgtagaatctgtcaggaaaacttcagcacaactgttaatgcactcactgagcctattgatatatatagtgaatggattg

SEQ ID NO: 43125 - DNA, 297 bp, Zea mays
gcagcccccaactacccccagcctcggaaggaaccttccagaagcgcaagactctaaggccgtcgccttcccattcttcctcgccgcgggggtcgcctgagatcacataaacaatggtgaaggctgttgctgtgcttggtagcagcgatggtgtcaagggcaccatctttttcacccaagagggagatggccctaccgctgtcaccggaagtgtctctggcctcaagcctggcctccatgggttccatgtacatgcacttggtgacaccaccaatggatgcatgtcaactggaccac

SEQ ID NO: 43126 - DNA, 298 bp, Zea mays
cgcacccggacattggcatctcgtccaaggccatgtccatcatgaactccttcatcaacgacatcttcgagaagctggcggcggaggcggccaagctggcgcggtacaacaagaagcctaccattacgtcccgcgagatccagacctccgtccgcctcgtcctccccggcgagctcgccaagcacgccgtctccgagggcaccaaagccgtcaccaagttcactagctcctaggcgagcgatgcgacgtgcactcgtctcctcttcttgcagtagtgcaatagtagtacggttaggtg

SEQ ID NO: 43127 - DNA, 298 bp, Zea mays
tgagagagagagggagagattagagggagcgccctgcccaagcaaagagaaaccgcggcgcgagaagagggaggaagggcagacgggcgagcaggatgagagagatcatcagcatccacatcggccaggccgggatccaggtcggcaacgcctgctgggagctctactgcctcgagcacggcatcgagcccgatggcaccatgcccagtgatacctcggttggcgtcgcacatgatgccttcaacacgttcttcagcgagaccggttctggcaagcatgtgccgagggccatcttcgt

SEQ ID NO: 43128 - DNA, 282 bp, Zea mays
gcaacgctcactcggcagtgtcagtagctagttgctctactagatggcgggtatagagctgcctacaatccgccgctgataatggaggatcggaagcgacgatgaggtcgtgtgctcctgtctttctgtcggcggtcgtggcctggctggagctggcgggcacccgcagggcggcaacttctaccaggacacagagatgacctggggcgatggccgcggcaaggtagtggacggcgggcgcgggctggagctgacgctggaccgcacgtccggctccgggtt

SEQ ID NO: 43129 - DNA, 290 bp, Zea mays
ctcgagccgcaatgatattgttgtggcaggtggcatggaaagcatgtccaatgccccaaactacattgctgaagctaggaaagggtctcgttttggacatgacacacttgttgatgccatgcttaaggatggactttgggatgtatacaatgactgtgccatgggaatgtgtgccgaactttgtgctgacaatcatgccctcacaagagaagaccaggatgcttttgctatccaaagcaaccagcgtggaattgctgctcgtgacagtggtgcttttgcatgggagattg

SEQ ID NO: 43130 - DNA, 293 bp, Zea mays
cggaggcacgcggaaaaattggtgacttcattaaaggagtgtttgccgtcttcctagacttggatttctcatttcttgagatgaatccgttcaccatggtcaatggggagccatatcctctggacatgagaggagaactagatgacacagcagctttcaagaacttcaagaagtggggaggtatagaatttcctctaccttttggaagagtactcagccctacagaaagtttcatccatgaactagatgagaagacaagtgcctctctgaagttcacggttttgaacccgaaa

SEQ ID NO: 43131 - DNA, 291 bp, Zea mays
cccacccatggcttcaatcaacacagtcctcggtgcaatcttcgttgcttccttctacttctgtggctcccttgccttcttccctcctggtcctggtcaccaccacgagggagcccaccaccctccaatcggaagtgctccaatcccaggtctttctacagactactacaggttgacatgcccgcaagctgacgagactgtggcgcccatactgaagaaggctatcgcaaaggaaccacgggtagctgcctcccttctcaggctcctcttccatgactgctttgtccaggg

SEQ ID NO: 43132 - DNA, 291 bp, Zea mays; identical to SEQ ID NO: 2282

SEQ ID NO: 43133 - DNA, 289 bp, Zea mays
cttattctactcctctgcagcctggtggccaaagtggatttctcccttcaggggccgctgcgcatgagatgcttctacccatggtagactcacagctgcctgtggtgaactttggctccctgccgccagcaccacctcctgccccgcctcccctttctctgttacctgtgggccctgctctgcagccccccagcctggctgtgcggcccccacctgctcctgctactcgggtgctgccttcacctgccaggcccttccccgctagcttggggcgagcagagctgcatcc

SEQ ID NO: 43134 - DNA, 287 bp, Zea mays
tgatcttcttgaacagcttatttggttacctgtccttgcttattattattaagtggtgtacggggtcaaaagcagatctataccatgttatgatctacatgttccttagcccaacagatgagcttggtgaaaaccagttgtttagtggccagaagacagtgcagcttgttctacttctgcttgctctggtgtctgtgccttggatgttgattccaaaacctcttctattgaagaagcaacatcagcaaaggcatcaaggtcaccagtacgcaatgcttcagggcgtt

SEQ ID NO: 43135 - DNA, 296 bp, Zea mays
tccgtccagttgagtcgagaaaaggcgacggtgcaatgagtgcatgcgaggtgctcttgttccaccacgaggacagggggattccatgggagatcgcgaacttggcgtccggcaggggatgtggggctgcgtcaagaggatagagcctggccttcgggcgtaccaggttgggaggaccgccggagaggctgtttccaagtgtgctgccatggcacaggtcaccaccaggttcagtgccgacgagctcgtcatcgcagggccgggcaacacggaggccagttcttcttcgtccggcg

SEQ ID NO: 43136 - DNA, 295 bp, Zea mays
ctcatgccagacaggtttcattcttgatggctttcctagaactgtcactcaagcacagaagcttgatgaaatgttggcaaagcaaggtgccaatgttgacaaagtcctgaactttgcaattgatgatgctgtattggaagaacggattactggtcgttggatccactcagccagtggtaggacttaccactcaaaatttgcacctccaaagtctccaggagttgatgatgtaactggagagccattgattcaaaggagagatgacaccgctgaggtcttgaagtcaaggcttgaa

SEQ ID NO: 43137 - DNA, 302 bp, Zea mays
gtagtggacagcctcctgtcgtcgatggtgaggacggggaagccgccggacttcgtgctgtgcatcggcgacgaccggtcggacgaggacatgttcgagagcatcgtgtgcccggcctccaacagcggcgtgaagctgccggccagcagcgaggtgttcgcgtgcacggtgggcaagaagccgagcatggccaggtactacctggacgacacggtggacgtggtcaagatgctggacggcctggccagcgcgccgtcgcagcagcggcccaggccggcggtgcagctgcgggtctcgttcga

SEQ ID NO: 43138 - DNA, 304 bp, Zea mays
ctagtcccctgctccattctcagccgccgccaatcccttcccgagctccgcaaccgctgagtgagaagaagagatggccggcaagggcgatggcccggctatcggcatcgatctcggcacgacgtactcttgcgtcggcgtgtggcagcacgaccgcgtcgagatcattgccaacgaccagggtaaccgcaccacgccctcgtacgtcgccttcaccgactccgagcgcctcatcggagatgcggccaagaaccaggtcgccatgaaccccatcaacaccgtctttgatgccaagcgtctcatc

SEQ ID NO: 43139 - DNA, 303 bp, Zea mays
gtacccaatcagaagagcggcggcgcgggcggacaaggagcaggcggaggaggagttgtgccaagccacaatgggtatctcgcgtgactcgatgcacaagcgccgagccaccggtggaaagcagaaggcctggaggaagaagcgaaagtatgagcttggtcgccagccagccaacaccaagttgtcaagcaataagacggtgaggagggtccgtgttcggggaggtaatgtgaaatggagggctcttcgccttgatactggtaactactcatggggaagtgaagctgttacccgcaagacccg

SEQ ID NO: 43140 - DNA, 295 bp, Zea mays
attgtaagagacatcaaggaaaagcttgcatatgtggctcttgaatacgaccaggagctcgagaatgccaagagcagctcatctgtggagaagagctacgagctgcctgatggtcaggtgatcaccattggggcagagaggttcagatgccctgaggtcctcttccagccttccttcattggtatggaagctcctggcatccatgagaccacctacaactccatcatgaagtgcgatgtcgacatcaggaaggacttgtatggtaacattgtgctcagtggtggcacgaccatgt

SEQ ID NO: 43141 - DNA, 300 bp, Zea mays
  unsure (1)..(300): unsure at all n locations
tcgtccgcagcttgatgcccttctctccgtaccggnccctgaacttccacgccatgcccgacccgatcnttgagatgatacacgaggctcagcaggccatggacatccacttccacagcccggccttccagcacccgccaacagaattcatacgagaaggcgacgatgaccggactgtgtgccgggagatccgccacaactccacgggctgcctgcggatgaaggaccagtgtgacaagtgccgggagatcttgtctgtggactgttccaccaacaacccctcccaggctaagctgcggg

SEQ ID NO: 43142 - DNA, 299 bp, Zea mays
catggtgttcgaaaccgacaggctaaagggctccacgctcgtcatcaacggaatggtcacggatgggtcagacgaatgggcgatctacggcggaaccggggtgttcgccatggccaccggtgtcatgaagagaagaaaccttgccggcggtagcaacgacgggaactctgacgagcttgccctggaagttttctgcccggtgtttggcgcatcacagcaaccaattagcaagcagcaggactccatctcctccgtcaccaagatcggactatggggcggacagggagggtcggcacagg

SEQ ID NO: 43143 - DNA, 225 bp, Zea mays
ctcgagccggttactcctgtcaggattaacagcatccatcgatacacagtacctgctgactgatgcatgggtctgctggagccgaggatgaacacagctctaacaactgacacagagcgaccttgcaatcaaccagcatggactgtggatcgatggatgctgttactcctgtcaggatttgttctaagttaatcctaaggaaaaaatggtgcttcttggtgctgc

SEQ ID NO: 43144 - DNA, 304 bp, Zea mays
  unsure (1)..(304): unsure at all n locations
cacacacacacacacacagacaagtggtttccaaagccaagtgtgtgtactagcaaccagctagctcgggcggcagcaggcagccatcatgtcggaggagaagcaccaccacttcttcaaccaccacaagaaggacgaggagcagcccgccggcgagtacgggtactccgagaccgaggtggtcaccgccaccgngcgagggcgagtacgagaggtacaagaaggaggagaaggagcacaagcacaagcagcacctcggcgaggccggcgccatcgccgccggcgccttcgcactctacgagaa

SEQ ID NO: 43145 - DNA, 299 bp, Zea mays
agacaagaaatttgggcagtcttctgtttttgtcgcatcaacacttcttgagaacggagggaccctgaagagcgcaagtccagcttctcttctgaaggaagctatacatgttatcagctgcggctacgaagacaagaccgactggggaaaagagattggctggatttacggatcgatcacagaggatatcttgactggatttaagatgcactgccatggctggcggtctatttactgcatcccgaagcggcctgcattcaaaggttctgcgcctctgaacctttccgaccgtcttcacc

SEQ ID NO: 43146 - DNA, 295 bp, Zea mays
ctgcgtcgaccagcgacctggctagctagctctccagctgcgcgacgccatggccaacccagcagctaccgagcatgctttcaatcgtattttgacgagcctgcttaagcctggcgctggtgcatacggcaagttcttcagccttccggcgctaaatgatccaaggatcgataagcgtccctactctatacgtgttctcctggaatcagctatccgccattgtgataacttccaagttacagagagtgatgttgagaaaatcattcattgggcgaacacatctccaaagctggct

SEQ ID NO: 43147 - DNA, 290 bp, Zea mays
cgcttctcggcggcggcggagaggagggggatggcgcaccggctgctgcgggacgcgcaggcggacgggtgggagcggtcggacttccccatcatctgcgagtcatgcctcggcgacaacccctacgtccggatgttaagagctgaatatgacaaagaatgcaaaatttgtgcacgtccttttactgtattccggtggcgtcctgggcgagatgcaaggtacaagaagactgagatctgccagacatgttgcaagctaaagaatgtctgccaggtctgcctgctggatct

SEQ ID NO: 43148 - DNA, 284 bp, Zea mays
gcggaaagtacaaggatgagctcatcaagaatgctgcctacattggcacccctggcaagggtatccttgctgctgatgagtccactggcaccattggcaagcgcctttccagcatcaatgtcgagaacgttgaggagaaccgccgtgccctccgtgagctcctattctgctgccctggtgctctccagtacatcagcggtgtgatcctcttcgaggagaccctgtaccagaagaccaaggatggcaagccttttgttgatgtcctcaaggagggaggcgtcttc

SEQ ID NO: 43149 - DNA, 291 bp, Zea mays
caccggtcactcggcagtcggcacgcaggctagcagcacagcagcagccagagccatcccctctcctcgctacgcttcgcttcctcggcgccgattcctcctcctcctcctccaccctcgtccgtcccgttccggcgcgcgagcacgcccgagatggcgaacgcgagatcgggtgtcgctgtgaacgatgagtgcatgctgaagtttggcgagctgcagtcgaagaggctgcaccgcttcataactttcaagatggacgacaagttcaaggagatagttgtggaccaggtc

SEQ ID NO: 43150 - DNA, 290 bp, Zea mays
agcgaagaaagaagagaaggtggaggagaaggaagaaagtgatgacgacatgtggttcaaactcttcgactaagtctgtgcaatacccttggctattgcacagacttagtcgaagaggctgaagccaagggtattgtttttgagtcgaggaagcagagggaagaaaaatagtagtcatgtttggactttaactttgttttatgttggaaagtacttgaaagacttttactgtggtaattctaggcgtaggttgctgtgctggttggggtttactggtgaaccagagtttt

SEQ ID NO: 43151 - DNA, 289 bp, Zea mays
cccctgatgaagctgcatttgttattgcggcaagacaactagggtttgagttttacaagaggtcactggcaactataattattcgtgagcaggatccaagttggaatgttgttgagaaaaggtacagaaagtatgaactcttaaatatattggagttcagtagctcaaggagacggatgtccgtgatagtcaaagaaccagagggaaggatattacttctcagcaagggtgctgatagtgtgatgttcacaaggcttgcaccaaatggaagaaaatatgaagaagaaac

SEQ ID NO: 43152 - DNA, 293 bp, Zea mays
catgcccatcaaatcgttaaacttgttagatcggtaggcagagagaggccagactgatgggaatggcagcgaaggagcactttgtgcttgttcatggtgaagggcatggagcctggtgctggttcaagctccgctggctccttgagggtgctggctaccatgttacatgcattgacctagccggaggggccgtcgatcctactgaccccaacacaatccggtcgttccagcagtacgacaagccactcatagacctcatttcaaccttgccggagggggagaaggtgattcta

SEQ ID NO: 43153 - DNA, 292 bp, Zea mays
atgccgcctccgacatcctactttcgtcctcacgagtgaccgataatccgccggcgctaagatgttggtttatcaagatctcctatctggcgacgagctcctgtcggattcattcacctacaaggagctcgagaacggcgtcctgtgggaggtcgagggaaagtgggtcacccaaggtcctgttgatgtagacattggtgccaatccatccgccgagggtggtgaggacgaaagcgttgatgacacagccgtgaaggtggttgatatcgttgacacattccgtctacaggag

SEQ ID NO: 43154 - DNA, 292 bp, Zea mays
actgaacagatcagatctggagaaactgcgagagccggctgaagttgacgtcgctcctgttcaggccatcacgtcaagcaaccggtcacagatctatctgacaaaatggtgaagatctgctgcatcggtgctggctatgtcggtggcccaaccatggccgtcattgccctcaagtgcccagacattgaggtcgtcgtcgttgacatctccaagccccgcattgaggcctggaacagtgacaccctgccaatctacgagcctggtctcgatgatgttgtgaagcagtgcaggg

SEQ ID NO: 43155 - DNA, 287 bp, Zea mays
  unsure (1)..(287): unsure at all n locations
aaaagagcagattttagcagagcagcgagggtcggagaagcctccccaagcttcgaatcgctatgcagcccgtcaaggtgtacgccgaccggcggtcgcaaccctcccgagctgtcatcatcttctgcagggtgaaccagatcgatttcgaggaggtcacggtggatctgttcaagtctcagcacctcacacccgaattcannaaaanaaacccaatgggacaggtctttcaggattgnnganggaanattcaaactatttnaaagtcattngattttgaggtatct

SEQ ID NO: 43156 - DNA, 285 bp, Zea mays
  unsure (1)..(285): unsure at all n locations
gaaaaagaagaccccaaaggaattccagaatatacgctcactgttttttcanatgttgacttgctcagtgatatggttcaggaacacaatgaacctattctgaagcacttgaaagatattaaagtgaagttctcagatgctggccagcctatgagttttgtcttagaatttcactttgaacccaatgaatattttacaaatgaagtgctgacaaagacatacaggatgaggtcagaaccagatgattctgatcccttttcttttgatggaccagaaattatgggt

SEQ ID NO: 43157 - DNA, 285 bp, Zea mays
gaggatgaggaggacgacgacgatgaggacgatgaggatgatgatgaacttgacggacaagaaggggatgccagcggcaagtcaaagcaaagcaggagtgagaagaagagccgcaaagccatgctgaagcttggcatgaagcccatcactggtgtcagccgtgtcactgtgaagaaaagcaagaatatactgtttgtcatctcgaagccagatgtgttcaagagcccgaactcagacacatacgtcatattcggcgaggccaagatcgaggacctcagctcccag

SEQ ID NO: 43158 - DNA, 279 bp, Zea mays
caaatggctgatggtgaggacatccagcctcttgtctgcgacaatggcactggaatggtcaaggctggttttgctggcgacgatgcaccaagggctgttttccctagtattgttggccgtcctcgccacactggtgttatggtagggatgggacagaaggatgcgtatgttggcgacgaggcacagtccaagagaggtattctcacgctcaagtatccgatcgagcatggtattgtgagcaactgggatgacatggagaaaatctggcatcacactttc

SEQ ID NO: 43159 - DNA, 302 bp, Zea mays
aaatgcttgcggaaatatggaaatgcaaatgtgtggaagtactttacagacttgtttgattatttgcctctcacagctcttatagaaaatcagatcttctgcctacatggtggtctctctccatcactggatactttggataatgtccgctcccttgatcgcatacaagaggtcccgcatgaaggacctatgtgtgatcttttgtggtctgacccggatgacagatgtggatggggaatttcaccaaggggtgctggatacacatttggccaagatattgcacaacaattcaaccatacaaa

SEQ ID NO: 43160 - DNA, 304 bp, Zea mays
aagtctcttccactctcccttgacctgtctcctctcacctgctgactgctgtgccgctccgctccggtggcatctgcatctgcatctccatccctcgatctgtcttctctcagggtggaagaagcgtgacaatggaggctccacccgtggcgctgttcgacaccctcaaggcagccaaaccgttcttcttgttggctggtcccaacgtgattgaatcggaggagcacgtcctgaagatggccaaacacatcaaagcaattacgaccaagcttggaattccactcgtgttcaagtccagctttga

SEQ ID NO: 43161 - DNA, 302 bp, Zea mays
gtggcgccgggcaacttcgagcggcactggggcatcctccggtacgacgggcagcccaagtacccgatggacctgagcgggcaggggcagaacgcgatgctggtgccggcgcgcggcgtggagtacctgccccggacgtggtgcgtcgacaacaccaacgccggcaacatggacaagctcgccgacaacatcaactacgcgtgcacgttcgccgactgcaccgcgctgggctacggctccacgtgcggcggcatggacagcaacggcaacgcgtcctacgcattcaacgccttcttccaggt

SEQ ID NO: 43162 - DNA, 306 bp, Zea mays
agacccatagctgacgacaccaccgtgtggtcgacaaaataaaaaggagagagagagagatggctctgtcgtctcgccgtatgtccgccgcaccattctacgtcgtcgtccttctcgtcctcgtggcggcagagaggacgatgggcagggtggtggtggaagagacgctctgcttgtcgcagagccatgccttcaaacacgtgtgcctcagcaacaccaactgcgacaacgtatgcaagacggagaagttcacaggcggcgagtgcaagatggacggcgtcatgcgcaagtgctactgcaagaagg

SEQ ID NO: 43163 - DNA, 305 bp, Zea mays
atcgcgtctctcgtccccctcagatccaccgactcgctctgagtctctgaccgccccttccgtcgtccccgttcgaaggcgcggcaagcgagcgattcagccagattcgattcgacatgaatcccgagtacgactaccttttcaaacttctgcttattggtgattctggtgttgggaaatcatgcttgcttctcagatttgcggatgattcatatttggacagctacatcagcacaattggggttgattttaaaattcggacagtagagcaagatgggaagaccataaaacttcaaatttgggat

SEQ ID NO: 43164 - DNA, 304 bp, Zea mays
taacgaaagatgactgtcgtgagcatcatgtggtcattagtgcaggtgcaggtgctggtggcggtggcactatcatttctagtaggcggtgcctggtgtggtcctcccaaggttcccccaggaaagaacatcacagccaactatggcagtgattggctagatgccaaggcaacatggtatggcaagcctacaggtgccggccccgacgacaatggtggcggatgtgggtacaaggacgtgaacaaggccctttcaacagcatgggcgcatgtggcaacgtccccatcttaaggatggtctgggt

SEQ ID NO: 43165 - DNA, 310 bp, Zea mays
aaagctccgtagctaaattcaaatattacaaacacaaaagtggagtgcagaaccaaaatggctgcctcgacggtccttctcgttgcttttctagcattggtcacttctcatgccattgcctctgatcctagcccgctccaagacttctgtgttgccgacaaagactctccagtgaaggtgaatggatttgtttgcaaagaccctatggctgtgaacgctgacgacttcttcaaggctgcaaaacttgatcagccaagggacaccaccaaaagcaaggtgggatccaacgttactttgatcaatgtcatgc

SEQ ID NO: 43166 - DNA, 310 bp, Zea mays
ttcatttcctccactctctaaaaagtagaccagccaggggagagaagtgaggcatcgaaggaagccccaccatggcggccaacggcaagagcagcttggcgaacggcgcctccaccgggggaaagcccatcaaatgcaaagcggcggtggcgtgggggcccggcgagccgcttgtgatggaggaggtggaggtggcgccgccggggcgcctggaggtgcgcgtgaagctgctcttcacctccatctgccacaccgatctcagtttcttgaagggagagaacgagctgcaccgcaagttcccccgcatcct

SEQ ID NO: 43167 - DNA, 280 bp, Zea mays
gagacgatctccgccaccatggcctccagcaccttcctctccctcagcttgcacgcctcgtccccctcgtcctcgtctcctggactccgccgaccctccctcgcctcctcctcgtcctccaggtccaagagaacgcgcaagatcacggccaaggcggtcagggaggactggacgcagaaatccaagcccatccctcctggcgacgcctaccctgccaacgaccactgcagccgttgtgggctctgcgacacatactacgatgcgcatgtcaagactgcct

SEQ ID NO: 43168 - DNA, 301 bp, Zea mays
agcaaggtgtccgggatcaagaagaactccgccgcaatcaccaagttcttcgaggagctggccaagatcgaattccctggagccaagcaagtgagcgacggcatctccaaggccggcccggcccagctgtccggccccatcttcgccacgttcgagaaggtctccacgctgctccctgtcgtcgctgccgaggagccggccaaggaggccccggccccgcccgccactgaggaggcagccacgaaggaagcgcctgttgacgagaagaaagaggaagcccctgcccccgccgccgccgtcg

SEQ ID NO: 43169 - DNA, 300 bp, Zea mays
aggcaagctatttcatccaccggctcttcctccattcagttgcagagtttaccggtactacctgtcgtatttctgggcaaacgacaggcgcacccgggatgctcttgggatcaaggagggcaccgtggatgagtgggtcagatgccacaacgacgaccaagagttgccttacgagagcgagctgaagagtgtcgtcaagtaccaccggaacctgacgtccagaggctaccgagccatggtatacagcggcgaccatgacctgctggtgccacatctgggcacccaggcctgggtcaggtc

SEQ ID NO: 43170 - DNA, 298 bp, Zea mays
aagtagtagaaactaggaagggccgttcgtgtcttgcggagaagatggagaacctgaggaggttcctgaacccgctggtgctcaacctgcagaagatggagctggagctcacctgccccgtctgcctgaagttgctcacctcgcccacaacgctgccgtgttaccacacatcctgcagcaagtgtgcccttacaccgacttcaaaaggctacagctgtgccatttgcaaatcaggctattgttctcaagatttaaggccagcttctcaccttgagtcgatagtgagcattcataggag

SEQ ID NO: 43171 - DNA, 305 bp, Zea mays
agtttccctcgcaatcgaccatcacagatcaaatcgctgcaactagctagggtttcgtcgcctcatctctcgtcgatccatcgatggcgtccgagggcgaaaacaagaggatgatcacgctcaggagctccgacttagaggagttcgaggtggaggaagcggtggccatggagtcgcagactctccgccacatgatcgaggacgactgcgccgacaacggcatcccgctccccaacgtcaactccaggatcctctctaaggtcatcgagtactgcaacagtcacgtccacgccgccgccaaaccc

SEQ ID NO: 43172 - DNA, 304 bp, Zea mays
atttataggacaactatggctacaattcaagatataggactctctgcggctatcaacataatgggtgctgtactgttcctagttgcatttgctttccttcgactgcagccaatcaatgatagggtttacttcccaaaatggtacctcaaaggtgcaagagagagtccaagtcatgggggtacatttgtccggaagtttgtcaatttggacatgcgttcatacttaaaatttgtaagttcggtgcctgctgctctcaaaatgcctgaggatgagttgattagcgatgccggtctggattcagctg

SEQ ID NO: 43173 - DNA, 290 bp, Zea mays
acaacccgcagccgcccacgcagccgcctgtaccagcggcgtcaagatgagtcggcaccctgaagtgaagtgggctcagaggatcgacaaggtttacatcactgtacagttacctgatgccaaggacgctaaggtcaatttggaaccagatggtgtcttcacattctctggcagtgttggtacaaacttatatgaattgaaactagatctgaatgacaaagtaaacgttgaggctagcaaaataagtgtgggtgtcaggtccatattctgtattgtagaaaaagctgagg

SEQ ID NO: 43174 - DNA, 292 bp, Zea mays
acaagttcaatctcacctccaaccatgggtaaagagaagtcccacatcaacattgtggttattggccatgtcgactctggcaagtcgaccaccacaggacaccttatctacaagcttggaggcattgacaagcgtgtgatcgagaggtttgagaaggaggctgctgaaatgaataagcggtccttcaagtacgcgtgggtgctcgacaagctcaaggctgagcgtgagagaggtatcaccattgatattgctctgtggaagtttgagaccaccaagtactactgcacggtca

SEQ ID NO: 43175 - DNA, 294 bp, Zea mays
acgaagccgacgagcagccgacgctaaagcttggtccggtgagcttcagagaaggggcgggtacgtcaagatgcagatcttcgtgaagaccctgacgggaaagaccatcaccctcgaggtcgagagcagcgatacaatcgacaatgtcaaggccaagatccaggacaaggaaggtatcccgccggaccagcagcgactaatcttcgcggggaagcagctcgaagacggccgcaccttggccgactacaacatccagaaggagtccacccttcaccttgttcttcgacttcgcgg

SEQ ID NO: 43176 - DNA, 261 bp, Zea mays
agcaagcagtacttcaccaggctcggtaagttcctcggcggctccggcgaaccgtcctaacccggcgggcccctattcaaaccgctcggcttcggcaagaccgagaaggagatgaatgagctcaagctcaaggagaacaagaacggcaagctcgccatgctcgccatcctcggttacttcatccaggggctcgtcaacggcgtcggcccgttccagaacctgctcgaacaactcggcgaccccgtcaacaacaacgtgctc

SEQ ID NO: 43177 - DNA, 296 bp, Zea mays
atagctggtcgccagataaccgcaaggtcactgctgggagcgcagaccgcatggtctacatctgggacacaacatcaaggcgcatcctgtacaagcttcccgggcacaatggttctgtcaatgagactgctttccatcccacagagccgatcattggatcttgcggcagcgacaagcagatctatcttggggaactttaagtgactatcagttccttttcagctagatgttcttgtgacactttgatgaggagaggaggcactgacaccctgttcctttgcctgagaattggaaca

SEQ ID NO: 43178 - DNA, 298 bp, Zea mays
aagggatcgccatgtcggactcggaggagcaccacttcgaatcgaaggccgacgctggggcgtccaagacctacccgcagcaggctggcaccgtccgtaagaacggcttcatcgtcatcaagaaccgtccctgcaaggttgtggaggtttctacctccaagactggtaagcatggccacgccaaatgccactttgtcgccatagacatattcaatgggaaaaagcttgaagatattgttccttcatcacacaactgtgacattccgcatgtgaaccgtactgagtatcagctgattga

SEQ ID NO: 43179 - DNA, 300 bp, Zea mays
acgagtgcaacgcaacgttggcgcttggcggccagtagtagcagctaatttagcgtcgctccttcctactagacgagagatccagaaaccatggccaagctccaagtcactcctggcgccgcgttcaccgagtgcaatgaactcaacttccagggcctgtacatgtaccacacgcccctgggtcccaaggccaaccaagctgcgatcctagagagcaaggccaagatcggcatcggtgccaccgtggttaacaactgggcagtgtatgacgggctagggccaggcgctaagctggtcggc

SEQ ID NO: 43180 - DNA, 319 bp, Zea mays
cagcaactgagacaaaacagaaatccattctgtatgatgagcgaagtgtacacaaagtataaccaattaccaagcatatatgtttggtgtacagtggcatgggccccgattacagagtgcttgtgcacagagctcgaaaactagctcaacaatactatcttgtgtaccaagaacccattgcctacagctcagctggtacagagagtagcttctgtgatgcaagaatatactcagtcaggtggagttcgtccatttggagttgctttacttatttgtggttggaatgatggacgaccatatttatttcagtcagatccat

SEQ ID NO: 43181 - DNA, 309 bp, Zea mays
aagcgatttgctgaatcaaagaaagagctcgatgctctcctgtctgatgattctttggccaatgttccatttctcatccttggcaacaagattgatatcccatatgctgcctctgaagaggagctacggtatcacctaggccttagcaacttcacaaccgggaagggcaaggtcaaccttggcgactccaatgtccgtccacttgaggtcttcatgtgcagtgttgttcgcaagatgggctacggtgatggtttcaagtgggtctcccagtacatcaagtagggccctcgctgagggcgcatgctcagc

SEQ ID NO: 43182 - DNA, 305 bp, Zea mays
ctcgagccgcttgcctccgatccccaattcctccttcggatctcacattcagcgcacgcaactgtgaaggaagggggacgcggaggaagatggggctcgcgttcgggaagctcttcagccggctcttcgccaagaaggagatgcggatcctcatggtcggcctcgacgccgccggtaaaaccaccatcctctacaagctcaagctcggcgagatcgtcaccaccatccccaccatcggtttcaatgttgaaactgttgagtacaagaacattagcttcactgtctgggatgtcgggggtcaggac

SEQ ID NO: 43183 - DNA, 296 bp, Zea mays
atggtaacaatgtattggagaagtctgatctgcagcctgcgctcaaagctctcaaagataggctgatggcaaagaacgtggcagaggaaattgcagagaagctttgtgaatctgtcgcagctagccttgagggcaagaagctaggatctttcactagaatatcatcaacagtccagacagctatggaggatgcgcttcttcgtatcttgaccccaaggcgctctattgacatactgagggatgtgcacgctgccaaggagcgtgggaggccatatgtcattgtttttgttggggtg

SEQ ID NO: 43184 - DNA, 302 bp, Zea mays
ctaggttttttgattttagccgccgccgctgctcatctcacatccctcgagaagacgcctgctcctcgccgatcgatacgatggccgtcttctccgacctccacaccgccgacggcctcaagtccctcgaggctcacctcgccggcaaaacctatgtgtctggtgactccattactaaggatgacattaaggtcttcgccgcggtgccgtcgaagcctggcgctgagtttcctaatgccgcccgctggtacgagaccgtctctgcggctgtagcctcaagattccctggtaaggctgttggt

SEQ ID NO: 43185 - DNA, 293 bp, Zea mays
ggtctgccaatgatcaccctaccactagagaaaatggcaaccagagtagctggttccctctgcgtagctactgggcttggggaggagatgattgttagcagcatgaagaagtatgaagatagagcagtagaactagcgctgaatccggtgaagcttcaagcgctgactaacaagctcaaggaagttcgtatgacctgcccgttgtttgatacagctcgatgggtgcgcaaccttgaaagggcatactacaagatgtggaacctttactgctccagtcgccacccggagccatt

SEQ ID NO: 43186 - DNA, 290 bp, Zea mays
gcacacacagcccggtccccgatctccgatcccctcgtcgatccaagatgcagatcttcgtcaagaccctcactggaaagactatcaccctcgaggtggagtcttctgacaccattgacaacgtcaaggccaagatccaggacaaggagggcattcccccggaccagcagcggctcatcttcgctggcaagcagctcgaggacgggcgcacacttgccgactacaacatccagaaggagagcaccctccaccttgttctccgcctcaggggaggcatgcagatcatcgtc

SEQ ID NO: 43187 - DNA, 291 bp, Zea mays
gcagaaaaacttagcacagctcaatctgctgttttgatggctacagggtttatttggtcaagatactcacttgtaattattccaaaaaattggagtctgtttgctgttaatttctttgtgggggcagcaggagcctctcagctttttcgtatttggagatataaccaagaactaaaagctaaagcacacaaataaaagagttcctgatcacctgaacaatctagatgtggacaaaaccattgggacctagtttattatttggttattgataaagcaaagctaactgtgtgt

SEQ ID NO: 43188 - DNA, 291 bp, Zea mays
acaactcgtaggcagcgagcgtctctcctcttcctctcccacgcaccgcgccaaggaaggcagagagagatcgccgctcctcttctctccgtcggtggtgcggttgaccgccctcctcgagcgagatctcgctgcagtccctcgagatctggtcacagatctatccgacaagatggtgaagatctgctgcatcggtgctggctatgtcggtggcccaaccatggcggtcattgccctcaagtgcccagacattgaggttgtcgttgttgacatctccaagccccgcattga

SEQ ID NO: 43189 - DNA, 293 bp, Zea mays
acaactcgtaggcagcgagcgtctctcctcttcctctcccacgcaccgcgccaaggaaggcagagagagatcgccgctcctcttctctccgtcggtggtgcggttgaccgccctcctcgagcgagatctcgctgcagtccctcgagatctggtcacagatctatccgacaagatggtgaagatctgctgcatcggtgctggctatgtcggtggcccaaccatggcggtcattgccctcaagtgcccagacattgaggttgtcgttgttgacatctccaagccccgcattgagg

SEQ ID NO: 43190 - DNA, 311 bp, Zea mays
agcaaagcaaagcagctcaaaaaactttagccagctatcaagacatggctccacttgttgctgctgccacgaatcacactgcccatagaagccacatagtaggacccaacaatgagaattttccaaggcaccaaccttgttcatcacaaaacagaaacaagagactcaggcttaggtcacgagcacaaaggataagcagtcagctgcttgcaagccgaaagcttatgccatggcaaatccctaaaagggactggtttcctcctagcttcatctttggtgccgccaccgcagcataccaaattgagggcgcc

SEQ ID NO: 43191 - DNA, 291 bp, Zea mays
tgaagagcaggatcttctatatcctatggaccccatcctccgccaaggtgaagagcaagatgctttatgcaagctcaaaccaaaaattcaagagtgggctcaatggcattcaggtggaactgcaggctactgatgcaagtgaaatcagccttgatgagatcaaggatcgggctcgctaggcatcatcatgatcatgcatcatggacttggcctactactgtggatttgtatgccattatagacttggtgctgtgaaagactgcttgatgatttgcgggtttgttgctgtgt

SEQ ID NO: 43192 - DNA, 301 bp, Zea mays
cgcgcaactagtgccgcacccagaccagatctccgcgacatatcagtcgttcgtccagctaactgcactgcactgcactgcacgcaatggccaccacggcgaccgaggcggccaaggctgcaccggcgcaggagcagcaggccaacggcaacggcaacggcgagcagaagacgcgccactccgaggtcggccacaagagcctgctcaagagcgacgacctgtaccagtacatcctggacacgagcgtgtacccgcgggagccggagagcatgaaggagctgcgcgagatcaccgccaagca

SEQ ID NO: 43193 - DNA, 302 bp, Zea mays
ccggagcctctccttcccggtctcctccgcccgttgccttcgtcccctccatctccggctgcgtcgccggcgagcccgacaccgcgaatcggatccgccgacaaggcgagagggaaaagatggggcttacgttcaccaagctgttcagccggctgttcgccaagaaggagatgcggatcctgatggtgggactcgacgccgccggaaagaccaccatcctctacaagctgaagctaggcgagatcgtcaccaccatccccaccatcggattcaatgttgaaactgtggagtacaagaacatc

SEQ ID NO: 43194 - DNA, 257 bp, Zea mays
agttcctgcatctgaggccactatcgatgccactgcacaaggcattgcttctttgttgtgtgctcatggccctgatgttgagtggagaatatgtaccatctgggaagctgcctatggtttgctcccgctaagttcatcagcagttgatttgcctgaaattgttgtagctgccccgcttcagccacctacactgtcatggagcctgtacttaccattattaaaagtatttgagtatctacctcgtggccgtccatctg

SEQ ID NO: 43195 - DNA, 299 bp, Zea mays
gtacaaacatatatcgtgccctgaagtgccgtgagccagagagtaatgaactcttgtcttacatgaagattttgtataacatctgtccgtacttgaagtttggctatatggctgccaatggggcaattgcagaggcattaagaaatgaggacaggatccatattattgatttccagattgcccaagggacacagtggataacactgatacaagcgctagctgcaaggcccgggggtccaccacacgtgcggatcactggaatagatgacccagtgtcagagtatgcccgtggtgaaggt

SEQ ID NO: 43196 - DNA, 304 bp, Zea mays
ctcgggtcaagaagatgtatgacattcaggccaagaaggtcaacaccctgatcaggcctgatggaaagaagaaggcttacgtgaagcttatgcctgactatgatgctcttgatgtggccaacaaaatcggcatcatctaaagttaccgcgtcaggcatctgctgtgctctatttccatgtgaaaccagagtttttgtagctatggctcagtggctccatgaccatgtcttatgcacacttacgaatttgatatcatccaagtcacaggttgtgctcatcaatacttggatactatcacttattc

SEQ ID NO: 43197 - DNA, 295 bp, Zea mays
gagggagagggagcgatatggggttcgtcggagacacgatggagtcgatccgctccatgcagatccgccaagtgctcatgcagatcatcagcctcggtatgattgttacctctgcattaatcatatggaagggtttgatagttttcacggggagcgagtcaccagttgtagtggtgctctcgggtagcatggagcctggatttaaaaggggtgatatcctgtttttgcatatgagcaaagatcctattcgcacaggagaaatagttgttttcaatatcgatggtcgtgagattcc

SEQ ID NO: 43198 - DNA, 275 bp, Zea mays
cggcgcgggcggacaaggagcaggcggaggaggagttgtgccaagccacaatgggtatctcgcgtgactcgatgcacaagcgccgagccaccggtggaaagcagaaggcctggaggaagaagcgaaagtatgagcttggtcgccagccagccaacaccaagttgtcaagcaataagacggtgaggagggtccgtgttcggggaggtaatgtgaaatggagggctcttcgccttgatactggtaactactcatggggaagtgaagctgttacccgc

SEQ ID NO: 43199 - DNA, 298 bp, Zea mays
atcctgtacccgcagccatcttcaaggacccattcaggaggggcaacaacatccttgtcatgtgcgattgctacaccccagctggcgagccaattcccaccaacaagaggtacagcgccgccaagatcttcagcagccctgaggtcgctgccgaggagccctggtatggtatcgagcaggagtacaccctccttcagaaggacaccaactggcccctcgggtggcctattggcggcttccctggccctcagggtccttactactgtggaatcggcgcggagaaatcgttcgggcgtga

SEQ ID NO: 43200 - DNA, 297 bp, Zea mays
atcctgtacccgcagccatcttcaaggacccattcaggaggggcaacaacatccttgtcatgtgcgattgctacaccccagctggcgagccaattcccaccaacaagaggtacagcgccgccaagatcttcagcagccctgaggtcgctgccgaggagccctggtatggtatcgagcaggagtacaccctccttcagaaggacaccaactggcccctcgggtggcctattggcggcttccctggccctcagggtccttactactgtggaatcggcgcggagatatcgttcgggcgtg

SEQ ID NO: 43201 - DNA, 296 bp, Zea mays
gttgtactgagctgagcttccggaggcagaataggagaggcaggcgatgacgatggcgacgaaggcggcgtgcgtgctggcggtgtgggtgctcgtcgccttgggcctgtgcgacctgggctcaacgcgcgcgcccctgggcagcaagccgcagcgggagttcgactacttcgcgctctccctccagtggcccggcaccatctgcgcctccacccgccactgctgcgccaccaacggctgctgccgctcggagcctctccagacgttcacgatccacgggctatgtgcggaccacg

SEQ ID NO: 43202 - DNA, 296 bp, Zea mays
gtcagaaaacagtgggatcgagttgtttcactgcacgagcacatcctccggcgaccaccggcctccctctccgtcctctagcgaccgaccaacgcgccgagcgaagatgtcgtggcagacgtacgtggacgagcacctgatgtgcgagatcgagggccaccacctcacgtcggcggccatcgtcggccacgacggcgccacctgggctcagagcaccgcattccccgagttcaagcccgaggagatggctgccatcatgaaggatttcgacgagccgtggcactcgccccgaccgg

SEQ ID NO: 43203 - DNA, 295 bp, Zea mays
gcaagatgtcggacggcacggcgacctgcatcgacatcatcctcgccattatcctgccgccgctcggggtcttcttcaagttcggctgcggggttgagttctggatctgccttatcctcaccttcttcggctacctccccggcatcatctacgccgtctgggccatcaccaagtagccggccggtgcgttacatgcaatgcgcgcgcagggtgatctcgtggcgggggacgcggtgtgcgcgtgtcttgagatgtgattccttccttccttgtttagttgctgctgctcctgctg

SEQ ID NO: 43204 - DNA, 293 bp, Zea mays
acggggaggtcatgccggggcagtgggagttccaggtcggaccgtccgtcggcatctcttcgggcgatcaggtgtgggttgctcgctacattcttgagaggatcaccgagatcgccggcgtggtggcgacgttcgacccgaagccgatcccgggcgactgcaacggcgcgggcgcccacaccaactacagcaccgagtccatgaggaaggagggcgggtacgaggtgatcaaggcggccatcgagaagctgaagctgcggcacaaggagcacatcgcggcctacggcgagggc

SEQ ID NO: 43205 - DNA, 296 bp, Zea mays
gagatctctccccacctcccggtccgctagcagatagcgggggccagagagatcgagatccggaggcgctagcgccacccatcagcgtctgcggcaatggcgggcacggtgacggtcccggggtcgtcgaaaccctccacgccgctgctcaaggacgagctcgacatcgtgatcccgacgatccgcaacctcgacttcctcgagatgtggaggcccttcttccagccctaccacctcatcatcgtgcaggacggcgacccgaccaagaccatcaaggtccccgagggcttcgacta

SEQ ID NO: 43206 - DNA, 285 bp, Zea mays
gcaagaacaaatatctcgagggactgcaggccaatgtccagaggcttaagacgtacaaggccaagctggttatcttcccaaggcgtgctcgcaaggccaatgccggcgactctactccggaggagattgccacggccacccaggtccagggcgactacatgcctattactcgtggtgagaagcgctcagtcgaggttgtgaaggttactgatgagatgaagtcgtttgcagcctacggcaagctccgtcttgagcggatgaacaagaaacaccttggtgcccgcc

SEQ ID NO: 43207 - DNA, 297 bp, Zea mays
gaagagcaagaagaagactcgaaaggcaaggtctgagttgggacataacgccggcaccctgcccgagcttgttgccgagccaacatcagctcggtcgatgtcatttgtcgggacccatgaatacttggcccctgaaatcatcaaaggcgaagggcacggaagcgctgtcgactggtggaccttcggcatcttcctgcatgaactgctgtacggcaagaccccgttcaaggggtcagggaaccgcgccaccctgttcaacgtggtaggccagcaactgaaatttccggagtcgccgtc

SEQ ID NO: 43208 - DNA, 297 bp, Zea mays
gtcagagcaaccctatctcttccccactccgctcctcgctcaccctctcaccaaatccttctcctccgcgccgccacagccgggcgcgcctctcgatcgagatccaggagatatgcctcgttatgatgatcgccatgggaatacacgcttgtatgttggaagattggcccctcgcacccgttcccgcgacctagaatatcttttcagcaaatatggaagaatacgtgaagtggagttgaagcgtgactatgcattcattgaattcagtgacccccgtgatgctgatgatgcgcagta

SEQ ID NO: 43209 - DNA, 224 bp, Zea mays
accacatacttacatgaaagtgaatgtgcctgaggagtctcggaacggagaaaccagtccccgaaccaaaatcacgtggatgaaagcagaagactcatctaaagttagtggtggaacacctatcaaaattgaagatccaaatcagtttgtttcttgaaacacaaacccgaatgaggtactagaaaagagaaataagattcgggaacaagatcgatatgacttga

SEQ ID NO: 43210 - DNA, 302 bp, Zea mays
ctatccttggttgccgcttcctccaaagccactccaaaccccagcttccagaaccttctcgaaactctccgcctcctcctctactcgctccgatggcgaaggaaccgatgcgcgtgctcgtcactggcgccgcagggcaaattggatatgctcttgttcccatgattgctaggggagttatgcttggtgcagaccagcctgttattctgcacatgcttgatattccgccagcagctgaagcccttaatggtgttaagatggagttggatgatgctgcatctcctcttctgaggggagtcgtt

SEQ ID NO: 43211 - DNA, 302 bp, Zea mays
attgaatggtgctgttagaaagggagaacgcttagttccccctgtttcatttgacttgttcatgagagccacatttcctgtttctaatgctcgagtgaaggctacagaaaggtttgaagcagcctacccaatgatcaaggagttggctcttgccggtcctcctggctcaaaaactgtgaaacaagcatcacaacagcttttacctttgtgtgcaaaagcaatgcaagaaaacaacgcagagctcaccagggaggctgttgatgttttcatttggtgcttaactcaaaatgcagagtcgtaca

SEQ ID NO: 43212 - DNA, 293 bp, Zea mays
atcacaagaatactcttttgagcattgcaaaacattatgaaaccggtgaaacccttccagaggaaatttatgcgaagcttgtagctgcaaagaatttccgtgctggcaccttgagcctgcgtcagatacgatttgccagtgtagatatggagcttcatacaagttatgaccccaatggctcagtgtccatatatgatgtggaccaaagagttgcagaacggacacaagttcttgctcctctgccggaggacagattcctgtgcagctttagccatatttttgcaggtggctat

SEQ ID NO: 43213 - DNA, 290 bp, Zea mays
gatgggcatctctcgggacaactggcacaagcgccgcaaaaccgggggcaagagaaagccctaccacaagaagcggaagtatgagttggggcgcccagctgccaacaccaggattggcccccgccgcatccacacagtccgtgtgcggggaggtaacaagaaataccgtgccctgaggttggtcgtggggaatttctcctggggctcagagtgttgtactcgtaaaacaaggatcatcgatgttgtctacaatgcatctaataacgagctggttcgtaccaagaccctgg

SEQ ID NO: 43214 - DNA, 298 bp, Zea mays
  unsure (1)..(298): unsure at all n locations
gctcctgggagttaaagctgtaattgccaagagctttgagcgtatccacagaagcaacttggtggggatgggaatcattcctctgtgcttcaaagctggtgaggatgctgattcgcttggcctcactggacatgagcggtacagcatcgatctccctaccaacctcagtgagatccgtcccggccaggatgtgactgttactaccgacaatgggaaatctttcacttgcatcgttcgctttgacactgaggtggagctggcgtacttcaaccatggaggcatcctcncttatgtcatc

SEQ ID NO: 43215 - DNA, 284 bp, Zea mays
cagtattcttgagtgcattcgcttgctccattcagtcagagcatttcttgtgcaaaattcaaatacctgtcacaccaaccatgtctaggtctgtggagcctctcatagtcgggcgggtgattggagaagttctcgactcctttaacccatgtgtcaagatgatagtaacctacaactcaaacaaacttgtattcaatggccatgagatctacccatcagcaattgtatctaaacctagggtagaggttcaagggggtgatttgcggtctttcttcacattggtt

SEQ ID NO: 43216 - DNA, 280 bp, Zea mays
agactatcaagaagaagctgatccgcaaagctcttgacatgattaggcaaccccctgaagaagaccctgatgagtacagcaacaaggataagacagatgaagagaaaaatgagatggaggagaagaagggccagtacgccaagttctggaatgagtttggcaaatcaatcaagctgggtatcattgaagacgcaactaacaggaaccgccttgcgaagttacttagatttgaaagtaccaagtcggatggcaaacttgcctcccttgacgagtacatttc

SEQ ID NO: 43217 - DNA, 281 bp, Zea mays
gttccttgaaaatgaacttctttatggtgaatcatttcctgtatctgctgaggtacttgattctagcttctgccttccgattggaaaggctaagatagagcgacaagggaaagatgtcactatcactgcattctccaaaatggtgggatatgcccttcaggccgctgatatactggccaaggaaggtatcagtgccgaggtaatcaatcttcgctcaattagaccgctggatagagctactattaatgcatctgtgaggaaaaccaatagattggtaaccg

SEQ ID NO: 43218 - DNA, 280 bp, Zea mays
ggggagacccgtttatattgaaaggcttggaaaggttgaccctagcaaacttatgaatgtcacaacgatggatcgatatgtgcgataccatgtgaaggagtttgagaggagcttcttgattaaatttccagcttgctctgttgctgcaaaaaggcacattgattccagcacatcaattctggatgtccagggcgtgggtttgaaaaatttcagcaaaactgcacgtgaattaattcagcgactgcagaaaattgacaatgataactacccagagactcta

SEQ ID NO: 43219 - DNA, 304 bp, Zea mays
atgagggtcgcactaggtgcggctgtgattttaaattattgcctgcaaggtctcttccatccagcaaggaaagtacgagaagtgtattggaagatatacaactctttgtacatcggcgcgcaggatgcacttgttgcttcttatcctgccctggaagacgatggggataacatctttagtcgtccagagttggcaatgtttgtctgattaacgctggatgtgcatgtccatgtgtcttcatccatattcttatgaagcttgaactggggtactcatgttgcactgctgaagcgtacactggatt

SEQ ID NO: 43220 - DNA, 286 bp, Zea mays
atcgagccgtgtttgtagttgcccatctgtgtttttgattgcaaggtcgctctgtgtcacttgttagtgctgtgttcatcctcggtttcagcagacccatgcatcaaacagcatggactgcggatcgatggatgctgttacccccgtcaggctttattctaagttaatcttaaggaaaaaatggtgcttcttggtgctgcaaaatgagttgtgctcatctgaaaagctacttactctcaaaaaaaaaaaatgctagaaacaccaacaagtgtaaaaactgtaggtg

SEQ ID NO: 43221 - DNA, 304 bp, Zea mays
agagaggtcgtttgctgagaagcactacgccgatctcgcctccaagcccttcttccagggcctcgtggactacatcatctctggccctgtggtggccatggtctgggagggcaagagcgtcgtcacaactggccgcaagatcattggcgccaccaaccccctggcttctgagcccggcaccatccgtggcgactttgctgtcgacattggcaggaatgtcattcatggaagtgacagcattgagagtgctaataaggagattgccctgtggttccccgagggccctgctgattggcagagcagc

SEQ ID NO: 43222 - DNA, 294 bp, Zea mays
agttgctgctattgctgtatctgaagaatgtcgaggccaaggtcaaggagacaaattacttgattacgttgagaagaaggctttgtcccttggacttgagaaactattcttgcttaccacaaggacagcggattggtttgttcgtcgcggctttaaggagtgctcgttcgattccctgcctttggtgaggagaaaacgtatcgacctctcgcgcttgtcaaaatattacatgaagtggctccaggcagcagaggttgggcatatggctgccgacggttttgccatgagatgatg

SEQ ID NO: 43223 - DNA, 296 bp, Zea mays
gcgggcagcagcacacagccccatcccaatcctagtcgatcttcttcccctcctcaaggaagaaaagaagctgaaccatggggaagagaaagtcagctgctaagccacctcctaagaagcggatggacaagcttgacactgtcttttcctgcccattctgcaaccacgggagtagtgttgagtgccgaattgacatgaagaatcttattggcgaacatcttgtagaatctgtcaggaaaacttcagcacaactgttaatgcactcactgagcctattgatatatatagtgaatgga

SEQ ID NO: 43224 - DNA, 293 bp, Zea mays
aatattgctgctatatgccaagaggctggcatgcatgctgtccgcaaaaaccgatatgtcatcctccccaaggactttgaaaagggctaccgaaccaacgtgaagaagcccgagacagactttgatttctacaaatgagtcaacccagagtgttgaactcgtttctttctgcaaatgagtcaacccagagtgttgaactcgtttcttgtttatcaattgattatcttttaccatcagctgagtttatggatagttgccattacaaatattcaagttcctcaatgatgatgtgt

SEQ ID NO: 43225 - DNA, 294 bp, Zea mays
agtgagagtcgactgcaaatcgaagaccaccggggcaaatacatgcagcttcgaggggcatactgaccgcaccggcacctacaacatccttgtcattgatgagcatgagcatgagctctgcgagtccgtccttgtgagcagcccggacaaggggtgtgccaatgttgtggctggtcgtgagagggcccccgtcttccttaccagcaacaacggtgttgcatccaacgttcgtttggcaaatgctctggggttccagaaggacgttgcccttcctagatgcgcgcagatcctcaa

SEQ ID NO: 43226 - DNA, 306 bp, Zea mays
actgagacccgctacaggtgcatctggggcaaggtcacccgtccgcacggaaactcgggcgtcgtccgtgccaagttcatgtccaacctcccgcctgagtccatggggcgcaaggtcagagtgttcatgtacccgagcagcatctaaggttttgttacgagtaaagatggactagaaatggccatgtgtttatttctcacttttctctgaacttaaaatgccttgtgttggtaacttagattgttcaagtgctgaacctgtggaagttgtgccaaaatttgttgtcgaacggatgaactattgtcg

SEQ ID NO: 43227 - DNA, 211 bp, Zea mays
atttatcttcgttcgtgtcgtgtttgtagttgcccatctgtgtttttgattgcaaggtacgtctgtgtcagttgttagtgctgtgttcatcctcggtttcagcagacccatgcatcaaacagcatggactgcggatcgatggatgctgttacccccgtcaggctttattctaagttaatcttaaggaaaaaatggtgcttcttggtgctgc

SEQ ID NO: 43228 - DNA, 294 bp, Zea mays
agccatcgcgcaggctgagtccctccgctacaagctcctcggaggccttgccgtccggagggcctgctatggtgttcttcgctttgttatggagagtggtgccaagggttgtgaggtcattgtgagtggaaagctcagggctcaaagagccaagtccatgaagttcaaggatggctacatgatctcatctggtcagccagtgaatgagtacatcgactcagctgtgagacacgtcctcctcagacagggtgttctgggtatcaaggtgaagatcatgcttgactgggacccgaa

SEQ ID NO: 43229 - DNA, 293 bp, Zea mays
aagctgaggaatgcgaatgggtcattgccaacttccaagatccgtcttaacatgcagcgtgttatgcaaaataatgctgctgtattccgtacacaagaaacacttgaagaaggttgtgagctgattagcaaaacatgggaaagtttccatgatgtgaagctcagtgaccggagtctcatttggaactctgacctgatagagacccttgagctggaaaatcttttgataaatgcaagcataaccatgtattcggcagaggctcggaaggaaagcagaggagctcatgctcgtga

SEQ ID NO: 43230 - DNA, 288 bp, Zea mays
agagccgccatatctcacgatccactcgagcaccaagccgagggaataggatcagcgatggcgcgcggcgtggtgtcggcgaagggcggcgcggtcgcgggcaagaataaggggtcggtttccttcacgatcgacttcaccaagccagtggaggacaacatcatggaggtcgcctcgctcgggaagttcctgcaagagcgcatcaaggtcgccggcggcaaggctggcaacctcggcgaatccgtcaccatctctcgcgagaacaccaaggtcacagtcacctctgac

SEQ ID NO: 43231 - DNA, 246 bp, Zea mays
attgagtagctggctaataagtagttctctggtggttaatggttgggttattttgagtatatactctatggttccactccattggatactgctgctgtgtgtttccattttgtactatgtagtaaattgttcgtagccccctattggccatgattgttcatatcatccttctttgtattgcaacgctattcgtccaatttcggtgtatatgctataatgctattatgttgcaagtgtgctgtgctc

SEQ ID NO: 43232 - DNA, 312 bp, Zea mays
caagaactcgtgggggcaggggtggggcgacggcggatacatcaggatgaagaaagacgtcgccggcaagccggatgggctctgcggcatcgccatccgcccgtcctatccactaatgtgacatggtggtgtgcatctgttactcgttttaattattattttattttattaattaaacaataaataagtagtcaacatatggatcgactcaaacttttgcagttacgtgtaccagtacacttgttgtatccatggcatctcgcgtgtaaactttattctggtgcaaaaacgacttctgcaaatgaaggtttg

SEQ ID NO: 43233 - DNA, 310 bp, Zea mays
ccaacacaacagctgcttccacctacctcaacaacccgtacccccactaacgccctcaacatcccggagcagctgccacaatgggacatgtgcaactttctggtaaacttacagtaccgccgtctctaccgaagcatgaactcccagtatctgaagctgcttagctcacagacataccagatcctattatataatggagatgtagacatggcctgcaatttcatgggggatgagtggtttgtggattccctcaaccagaagatggaggtgcagcgccggccctggttagtgaagtacggggacagcgggg

SEQ ID NO: 43234 - DNA, 305 bp, Zea mays
aagatcttcctcgagaacgtcatccgcgacgccgtcacctacactgagcacgcccgccgcaagaccgtcaccgccatggacgtcgtctacgcgctcaagcgccagggccgcaccctctacggcttcggcggctaggctgatgggctcctcgcgatgttctccccttctgcagatgcgacgttttctggccgtgcccacaagtcttgcggtcaagaaagtttcaggaactcttgttagttcatctctggctgtggtaggtttatctgaatcgtgagactagtaggtttatctgaatcgcgaggcta

SEQ ID NO: 43235 - DNA, 302 bp, Zea mays
agataagcagaacaatgttccccctgaaaaatcactgaagcttccctacaagattgatggtgacaaagtagggagccacacgatcgtccttagtttcaataagaatgaaaactggaccaaggctctaaagtacatgctgtgcaatctgaagtgggttctctactggtttattggcaatacaagttttgctgcaccgtctgtatcactgcacacacaatctctgaagaacaagagttgatgctgttctctctctgcaacaactgtacatagtttgtgtactcgacccaattggttggatatag

SEQ ID NO: 43236 - DNA, 305 bp, Zea mays
actacatcacacaccttctggaagaagaacctgaaaaacttgctggacccttattagctgacacttatgtcacattgttgaaaggtcgtaatgcatggtatgggcagaagttagctaaaggtgaattgacattagaaatgggtgacagtattaaaggaaaagggaccattcagggtgtctctgcagttgatgcgttttatgagcttcttagtcaggatagcttaagtgtcatgcatccagaagccaacagatctgttgcgccggttgagatgtgcccgatcctaaaagcactacataggattctg

SEQ ID NO: 43237 - DNA, 299 bp, Zea mays
cttctattcagtccctgctgtgtgatccaaacccgaactcccatgcaaactcagaagccgcaagactgttcagcgagaacaagcgggagtacaaccgcaaagtccgcgagattgtggagcagagctggacagccgactagtgcaggaggaggatgctcatcgtgcccgaaagggccaataaggaaccatgaaaaaccatccttgtgtttgtggttcgccagacctgtcgaaacattgaagaactctagttctagtctgtcgtcgtcatggtttggtctgatcagagcaccggttgtcat

SEQ ID NO: 43238 - DNA, 294 bp, Zea mays
accaaatgggaagctgcagccaggcttcctggagattctacacgccaggtggtggtgcgctcaggggttgtgctgggccgtgggggtggtgccatgggccacatgctgctgccctttcgcctgggcctggggggccccatcggctcaggccaccaattcttcccctggatacacatcggggacctggcaggaatcctgacccatgcccttgaagcaaaccacgtgcacggggtcctgaatggagtggctccatcctccgccactaatgctgagtttgcccagaccttcggtgct

SEQ ID NO: 43239 - DNA, 301 bp, Zea mays
cgtgctcaggctccgcggtggcatcattgagccctcgctgcaggcgctcgctcgcaagtacaaccaggacaagatgatctgccgcaaatgctatgcacggctgcaccctagggctgtcaactgccgcaagaagaagtgtggtcacagcaaccagctgagggccaagaagaagatcaagaactgaggtgttgctgctagtcagtttcatggacaatgttgtttggttgttgaaccgtgtttgtttacgaactgtatttttgtttggttgttgaaccgtgtttgtttaccgaacatattggct

SEQ ID NO: 43240 - DNA, 301 bp, Zea mays
aggtctgtgaccgagagtatcgaagctgtcaggatgtccaagcgcgccggatggggagtgatggcaagccacaggagtggcgagacagaggacaccttcattgctgacctctcagttggcctgtctacgggccaaatcaagacgggagctccttgccggtctgagcgcctggccaaatacaaccagctgctcaggatcgaggaagagctcggtgatgccgcggtctacgccggagcaaagttcagggcaccagtggagccctactaagaaaggaagaggatggggatgttttcttgtggac

SEQ ID NO: 43241 - DNA, 298 bp, Zea mays
atttgattcaagctatgaaagaagtgacccgattgaatttgaattgggcactggacaagtgatcaaaggatgggatcagggtctcctgggaatgtgcgttggtgaaaagcggaagttgaagatcccatcaaagcttggctatgggcctcaaggctcgccacctactattcctggtggagcaaccctcatatttgacacggagcttgtcgctgtcaatggagaaccaaccaaccaatctgacgagctttagattcatcaaacaaatgaatccattcacctttttactcggaactcagca

SEQ ID NO: 43242 - DNA, 268 bp, Zea mays
cgccaacgcgccttcgtgcactggtacgtcggtgagggtatggaggagggcgagttctccgaggctcgtgaggatctggcggcgcttgagaaggactacgaggaggtcggtgctgagtttgacgagggtgaggacggcgacgagggtgtcgagtactagacgctctactggcgcggcgtcgtcgggcttgtgtgccactgctatcctgtgatctgcactgagtagctcctatcgtgttatgtctctgtcggttcttatctatctgtcg

SEQ ID NO: 43243 - DNA, 215 bp, Zea mays
atttgctaagtctaaaagcatactgatcaccatgaggctgagcccgcgtcttcttctgatcattctggttgtttgttgctatgaaactaatgctggcaatgtctgtgatgctgttttgcgtgaaagcgcggccttcgttctaggaagtaaggaaaacctgaggaaggaacttgagcaatattctgtccctgccgaggctgttaaagcaaaactgg

SEQ ID NO: 43244 - DNA, 117 bp, Zea mays
tacttgttgccgtcgtgtcgaatcttgtactacgaggctccgtcgaacctcgatggcttgcttctttatcagaacatgtttgaataaacgctatttggtaaaaaaaaacaaccaaaa

SEQ ID NO: 43245 - DNA, 293 bp, Zea mays
atccagcaatttatgttactgagaatggcatggatgaagaggacgatcaatccgcaacgcttgaccaggtcctaaacgacacgacgagggtcggttacttcaaagggtacctcaattcagttgcgcaacgatcaaggacggagctgatgtccgcgggtactttgcgtggtcgttcctggacaacttcgagtgggcaatgggctacaccaagaggttcggcatagtctacgtggactacaagaacgggctgtccaggcacccgaaagcatcggcgctgtggttctcgcgcttgc

SEQ ID NO: 43246 - DNA, 283 bp, Zea mays
gtcgggcctgaaggtgaagagcacgagtttgatgctccagacgacgcctacatccttgacgcggccgagactgccggtgtggagttgccatactcgtgccgtgctggggcttgctccacctgtgccggcaaaatcgagtctggttcggttgaccagtcggatgggtccttccttggtgacgggcagcaggaggaaggttatgtgctgacatgcgtctcctacccaaagtcagactgcgtcatccacacccacaaggaaggcgacctgtactagggctagggct

SEQ ID NO: 43247 - DNA, 288 bp, Zea mays
atcaaaggatgggacgagggagttatgaccatgcaagtgggtgaagttgctcgtatccagtgcacgcctgattatgcttatggagccggcgggttcccagcctggggaattcaaccaaactcagtgcttgtgttcgagattgaagtcctcagtgcccagtaattcgcatctgtcagctatggaaacgttggccatgcttctcaagtaatgaaataattccgttgtcacctcatgctacatacagcagattggtgttacgagttaaatcctgtgaaactttagcattct

SEQ ID NO: 43248 - DNA, 289 bp, Zea mays
gagaagatgtccgcagacgatgtcgcgttgctggctaatatggttgaagatatgagcatggagactggctatgataaggaagatgatgaaatggaaatggatgatgcagacatggctggagatggtgctgcaagctttaaagaaaagattatgggtatattgcagcagggcgattttgcagaaaagagaggttccaagctgagccaagttgatttcttatacctgctgtccctcttcaacaaagctggtatacatttctcgtgattggtggtccagcttctcttcagta

SEQ ID NO: 43249 - DNA, 282 bp, Zea mays
caaataatgaacgtgaacccatagcacaacctatctcaaaacttgaatttgagtttgagaagcggaaactggccaaagatgatgtccgagaattgatttaccgagagattttggagtaccatcctcaaatgctacaagaatacctacaaggagcagaccacaatcagatgaccttcatgtattcaagtggggtggatcgcttcaggcgccaatttgctcatttggaagaaggtactgcaaagggtgaaaaacacagtccacagctgcgacagaatgtttctt

SEQ ID NO: 43250 - DNA, 279 bp, Zea mays
caactgccttcgatcccttcgctgaggccaatgctggggactctggtgcggcacagggtcaaaggactacgttcacgtgcgcatccagcagcgtaatggtcgcaagagcctgactaccgtccagggattgaagaaggagttcagctacagcaagatcctcaaagatctcaagaaagagttctgctgcaatggtacagtggtccaggacccagaacttggacaggtcattcagctccagggtgatcagaggaagaacgtctcgaatttcctcgtccaggc

SEQ ID NO: 43251 - DNA, 289 bp, Zea mays
cttcctgggcacgctgctgcacgcgttcgactggcgcctgcctgacggcgatgagaagctggacatgagcgagacgttcggcctcgcgctgcccaaggcagtgccgctccgcgccgtcgccacgccacggctcgtgccggaagcctatgcctgagcctgagttagctgtcagagttcttcacgcgtgctgtcccaacaagcatggtttggcttggatggtctactctgttggtgttgctgccttcctgcatgcgtgcgcatacactagtattctgtgttgatcctacac

SEQ ID NO: 43252 - DNA, 317 bp, Zea mays
agatcaaggctatggaggaagctgatgtgaagacgaagtgggagaacagctcatggggcaagaagctgattgtccagaagaggagggctgcgctcagtgactttgacaggttcaaggtcatgctggcaaggatcaagaggggtggtgctatcaggcaagagctcgccaagctgaagaaggcgtccacggcttaagtccattttggtggatgacatgttagtttttggtttcatgttggatcagcaatttgttttgagtgttgtcaaagccagaattagtaatatgtttcctgtgtacccgtttcaaacttcatcaag

SEQ ID NO: 43253 - DNA, 311 bp, Zea mays
ctcgagccggggcaacaagccgtgggtgagcctgcccaagggcaagggtatcaagctcagcatcatcgaggagcagaggaggcgcgactttgctgcccaggctgctgccaaggcataagttctctgaatgtgctgcttggagctttttgctatgtctagttttatttttatctgcaaggatatagagctaccttcccaagacgttttatcatcatgttttgttgcttttggttcttgaacagcgtttgcagctagctgtaatgctttaattcgactttctatatattgttgaaccgtgttgtcgacaccaa

SEQ ID NO: 43254 - DNA, 314 bp, Zea mays
atgacttcccagagttcctgaacctgatggcaacgaagatgaaggacaccgactccgaggaggagcttaaggaggcctttcgcgtcttcgacaaggaccagaatggtttcatctcggctgctgagctccgccatgtcatgaccaacctcggcgagaagctgactgacgaggaggtcgacgagatgatccgtgaggccgatgttgacggcgacggccagatcaactacgaggagttcgtcaaggtcatgatggccaagtgaggagcgatccccgttatctatgaatgaattgaagtgaaatatcaggcacacaag

SEQ ID NO: 43255 - DNA, 310 bp, Zea mays
acataatgatgagttctatatggatgaggctggaaatgtgaggacacgaactaatcgctcaggcggtgttcagggagggatatcaaatggtgaaattatttacttcaaagtggcttttaagccaacagcaactatcggaaagaagcaaaatactgtgtcaagggagcatgaggatgttgaacttttggcaagggggcgccatgacccctgtgttgtccctcgagctgttcctatggtggtatccatggctgctctggtcctgatggaccagctcatggcgcatattgcccagtgtgagatgtttccgctg

SEQ ID NO: 43256 - DNA, 313 bp, Zea mays
ctcgagccgcaaattcgttccgtccaggcaaggaagaaatcgagcagccaaggagaggagcagatggctcgtacgaagcagaccgcccgcaagtccaccggaggcaaggccccgcgcaagcagctcgccaccaaggcggcgaggaagtcggcgccgacgaccggcggcgtgaagaagccccacaggtacaggcccgggacggtggcgctgcgcgagatccgcaagtaccagaagagcacggagctgctgatccggaagttgcccttccagcgcctggtccgtgagatcgctcaggacttcaagacggatctgc

SEQ ID NO: 43257 - DNA, 302 bp, Zea mays
agggaattgatttggcttctgttcatatttattctgacaattggttgactcactctgaagaggtcagtcacctccattttgtgaaaacctggatgcaacagcatattgatgatgcagccaacttgcttgggatgccaattctgatcggggagtttggggtatcgcttaaggatggaaagtttggccataagtttcgtgaagctttcatggatacagtctacaacattgttatatgctcttggaagactggggtgattggaggaggctgccttgtttggcagcttttccctgaaagcgctgag

SEQ ID NO: 43258 - DNA, 305 bp, Zea mays
agcctgttaagtcagccaggttcatattggatttgctgaagaatgctgagagtaacgctgatgtgaaaggcttggacgtggacaacctctatgtttcacacatccaggtgaaccaagcccagaagcagaggcgccgcacctaccgtgctcacggacgcattaacccttacatgtcctccccttgccacattgagctgattctgtcagagaaggaagagcctgtgaagaaagaggctgacaacattgtcgcggcaaggaagcagtgaagtatgttagcctgctgataatggcatcctttcgaagca

SEQ ID NO: 43259 - DNA, 306 bp, Zea mays
aaacttttctggcttgacaggaaggttgataaggctaggagttggttaaacagggctgttactcttgctcctgatattggtgatttattgggcattgtactacaaatttgaacttcagcatggaaatgtggacacacaaaaggatgttctgaaaagatgtgttgcagcagaaccaaagcatggcgaaaaatggcaagcaataaccaaggctgttgaaaactcacacctgcctgttgaggctcttctgaagaaagctgttgtcgtgcttgatgtagaagaaaacgccaatccgggatgagcctagac

SEQ ID NO: 43260 - DNA, 303 bp, Zea mays
gagaatttatgagaagtacacctggaagctctactccgagaggctgatgaccctgaccggcgtgtacgggttctggaagtacgtgagcaacctggagaggcgcgagacccgccgctacatcgaaatgttctacgccctgaagtaccgtagcctggcaagccaggttccgctgtccttcgattagtacggggaaagaagaagcccaggccggagaaccatcgcctgcatttcgatctgtttcaccgcaattcgcattgttagtcgtgtattggagttatgtgtacttggtttccaagaactttg

SEQ ID NO: 43261 - DNA, 310 bp, Zea mays
caggcacaacttgctcagatgataaatgagaagccacaggtgattcaggagtatgaatcaggcaaggcaatccccaaccagcagatcattagcaagctcgagagggccctgggaaccaagttgcgtggcaagaaatagctttcctacgagtttgactcccggagcatcataatagggggaagacaaggcaagctgtctgcttatttgtctatgtttggtatctcaagtcctgcggactgtttctgttggcacaagagggaataaatgtgttcacggacctgtaatgcttgctccttgtcatatgaccttg

SEQ ID NO: 43262 - DNA, 306 bp, Zea mays
ataatggacgatgctgatgttgaccatgctgttgagcttgcgcactttgccctgttctttaaccagggacaatgctgctgcgctggatctcgcacgattgtacatgagcgtgtttatgatgagtttgtggagaaggccaaggctcgtgcattgaagcgcgtcgttggtgatccgttcaggaaaggtcttgaaacgggcccgcagattgacgacgagtaattcaacaagatcttgcgctacattaggtatggtgttgacggtggagctacccttgtgacgggtggtgataggttgggtgacaagggt

SEQ ID NO: 43263 - DNA, 298 bp, Zea mays
ccgatcccctctagtctccgcggcgaagatgtcggggcgcggcaagggcgggaagggcctgggcaagggcggacgaacgccaccggaaggtgctccgcgacaacatccaggggatcacgaagccggcgatccggcggctggcgcgcaggggcggcgtgaagcgcatctccgggctcatctacgaggagacccgcggcgtcctcaagatcttcctggagaacgtgatccgcgacgccgtcacctacaccgagcacgcgcgccgcaagaccgtcacagccatggacgtcgtctacgcgct

SEQ ID NO: 43264 - DNA, 298 bp, Zea mays
ctaccatgctggtttttggggtgtcatgggacgggaatgtattacgcattgtccctccatttattagagaatttaattatccgatggccaaatattgtgccggtggggatacaggtgtttttgtcaatggcagagaactgcatcaaagagatttagatttacttgtaggaagaggactaccacggacatctggcatgtcatattctattgagatgtcaggcaatgtaatcgatgaagcaactgggaaaaaactgcgcagtcttggaaaacttgctcctacgattgagaagttgaagcg

SEQ ID NO: 43265 - DNA, 296 bp, Zea mays
aattttgcgctatttggatgaactaactctgtctgatcatatgtgggatgatggaaactcgctgggccccaaagagatccacagctatttgacaagagtgatgtacaaccggcgcaacaagtttgatcctctctggaactcacttgtacttggtggggtgaaaaagggtccaaagggtgatgagaagtatcttgggatggttaacatgattggtacccacttcgaggaaaaccatgtcgctactggatttggaaatcatatggcaatcccgatactccgtgctgaatggcgcgatg

SEQ ID NO: 43266 - DNA, 303 bp, Zea mays
cccctggcttctgagcccggcaccatccgtggcgactttgctgtcgacattggcaggaatgtcattcatggaagtgacagcattgagagtgctaataaggagattgccctgtggttccccgagggccctgctgattggcagagcagccagcacccctggatctacgagaagtaaacatggaaagtttcacatcaaaccttgagagccagaggaagcatgtcaccatttgtgctttagcaatgttttcgaaaagattatgatctgtatcttggaaccttatttcaatggaccaaatttctttct

SEQ ID NO: 43267 - DNA, 296 bp, Zea mays
aatccgaaagtacgggctcatgtgctgcagacagtgcttccgcagcaacgccaaggacattggcttcatcaagtaccgctgaaacttggggagctccaaagcatggcaataatggaagcatggatggggacctaaaagatagcctgtactcttattcttatgataaaaccatgtaatgaattgtttggctttgtgtggacgaagttggtgtattctagatggtactcttgaatcttgatgcttccctgctatgctagctgagcatgtcgaaccgctatgaatcagacaatacagta

SEQ ID NO: 43268 - DNA, 288 bp, Zea mays
agagagtgttcccggagaagaagattggcaaggtcatcgagacaagcttatcggcaaaccaagaacgcgcaccatggagaagaagcgtttgaaatggaaggcgcaaggttctgcggctgacgagaaggtggttcggggtggccctgtggatccttcgaagctcgtcgttgagctggggccaatggagatccgcacattcatcgtcagctttgatcacatcagtgacaagcaacagctataatcgtctccgactagacgactatgtctggatgaagttgtcttgcggct

SEQ ID NO: 43269 - DNA, 128 bp, Zea mays
aggaaattttgatcctgaaattcagagtcaatgcttactgactggagcattaagaatttattatgttgacacatctagagcttgttgtttggtgatcagccgtagctaaaaacctagcgtttcagtgc

SEQ ID NO: 43270 - DNA, 287 bp, Zea mays
cctcagaacaacccctcccagctcctcccctcagagctgatcgatcggtgcatcgggtccaagatctgggtgatcatgaagggggacaaggagctcgttggcaccctctgcggctttgatgtctacgtcaatatggtgctggaggacgtcaccgagtatgaatacactgctgaagggcgccgcattacaaaacttgaccagatcctcctaaacggcaacaacatagccattttggttcctggtggttcaccaccgatgtgtaatgagcttttgctccccagagtaac

SEQ ID NO: 43271 - DNA, 290 bp, Zea mays
  unsure (1)..(290): unsure at all n locations
caacggtcncagttcttcatctgcaccgtcgcgaccccttggctcgacggcaagcacgtcgtcttcggccaggtcgtcgagggcatggacgtcgtcaaggccatcgagaaggtgggcacccgcaacggctccacctccaaggtggtcaaggtcgctgactgcggacagctctcctagatctctctgatctggtctgttcggccgcctccctccgtcatcgtcgactccccctgcgtccgttcctttggatctgaataagatggtggtgatctgagtggcggtcttagttt

SEQ ID NO: 43272 - DNA, 280 bp, Zea mays
cattgctacatcaaccaaggttgacatctctggtgttgatgtcgcgaagtttgatgacaagtactttgccagggagaaaaagcagaaggtgaagaagacggagggtgagctttttgagacagagaaggaggcgtccaagtctctgcctgatttcaaaaaggatgaccagaaggccgtggatgctgctctgatcaaggctattgaggctatcccagagctgaaggcctatcttggcgctcggttctcccttagggatggtgacaagccccacgagatggtc

SEQ ID NO: 43273 - DNA, 166 bp, Zea mays
aagtcgtgtgctctcaagtctgatgtattatatacatatatatgtattgtaatgtgattatgcagaaaaaaaaaaaaaaaaaaaaaaaaatggaaaaaaagaaaaaaaagaaaaaggagataaagaaaaagagtaatgtaaaagggtaaagaaaaagagaatggga

SEQ ID NO: 43274 - DNA, 277 bp, Zea mays
aggaaaggcggagaaaggacaaccctgaggcgatggaggaagacgaagtggatgagatcgctgagatcagggcccctcacttcgaggagtcgatgaagtatgctcggcgtagtgtcagtgatgctgatatccgcaagtatcaggcgtttgcccagacattgcagcagtcccgggggttcggcagtgagttccgcttctcggatcagccggcgacagctggtgctgctgctgcagctgatccgtttgcttctgcgggtgctgcggctgatgatgacga

SEQ ID NO: 43275 - DNA, 290 bp, Zea mays
acgatgagaaggttgccacctccattctggagaagacctggaagcccaagtatgatgttgagaaggaaaaggagaaggctgaggaggaggctgctgctggtgcagatggtctttctgagttccagaagaagatttttgacgtcctgtacaagattgctgatgttccgttcttggcaccctacaaaaccaagatcattgatgttatcgagaagggagagaagcagcccaacatcactattggcattctggtctccgttgtcgtcgtgttcgttaccgttctcttcaagatc

SEQ ID NO: 43276 - DNA, 211 bp, Zea mays
gaagatgagaagaaggctgctgaagagcgtgctgcagctgccaaggcttctggcaagaagaaagaatctgggaagtcatcagttttacttgatgtgaagccatgggacgatgagactgacatggccaagctcgaggaagctgttaggagtgtccagatggaagggctgctctggggcgtatccactcttctcagattgggataggatctcg

SEQ ID NO: 43277 - DNA, 281 bp, Zea mays
gcggaaggaacactggccgtgtgggtgttatcaagaacagggagaagcacaagggcagctttgagaccattcacgtggaggactccctgggccaccagttcgccacccgtatgggcaacgtgttcaccatcggcaagggtaataagccgtgtgtgagcctgcccaagggcaagggaatcaagctgagcatcatataagagcaaaggaagcgggatgccgctgcccaggctgctgccaacgcataaatcctctgaatgtgctgtgttgagagttttttctag

SEQ ID NO: 43278 - DNA, 277 bp, Zea mays
gaccaagcctgtcttccacaagaaggccaagaccaccaagaagattgttctgaagctgcagtgccagagctgcaagcactactcacagcacgccatcaagagatgcaagcattttgagattggtggagacaagaagggcaagggcacatctcttttctaagtttctcgtccacctgtctggttgttgagttgaagctgtgggtctactactactgttataaaaacatgtcgccaaatttcaatgttaatgtagcaatgaaagcagaccatgctatgt

SEQ ID NO: 43279 - DNA, 276 bp, Zea mays
gtaaggttggactggccagagggagcggcctcacgagagagcatgaaggcagtctggaaattgcctcgtctgcagaaccttgtgatgcaacatgttgatcattctgctggagatctaattgatcttcttcaaggacttcttcggtatgatcctaatgagcgcctgaaagcacatgaagctctacaacaccctttctttaccagatgcatcagaagatgtggtttctgaggctacactgagattgaaaatgtcaatgctgtatttcttcattttgat

SEQ ID NO: 43280 - DNA, 275 bp, Zea mays
atcgcgtcgcacaccttctggaagaagaacctgaaaaacttgatggacccttattagctacgcacttaatgtcacattgttgaaaggtcgtaatgcatggtatgggcagaagttagctaaaggtgaattgacattagaaatgggtgacagtattaaaggaaaagggaccattcagggtgtctctgcagttgatgcgttttatgagcttcttagtcaggatagcttaagtgtcatgcatccagaagccaacagatctgttgcgccggttgatatgt

SEQ ID NO: 43281 - DNA, 275 bp, Zea mays
tgtcgcggagaggccgaaagttggcctgatggtgacgcctggtttcctgatcgggaccagtatcatacagtcccgtgtgtacctttcaggtgccaagtgtgctgactgactgactgactgaagatgcagcagctacacaaggagctagatagagggtcatttgcttcttggaatcttgggagagcttcagagctaccagctgcataagtttaaggtggactgtgctgtcctgtatgtaacgcgtgagagacctgttgtttatctgccgtgctggg

SEQ ID NO: 43282 - DNA, 274 bp, Zea mays
cgatggtatggttaacagcaacgcaccctttgcaaggaagtttggaagagaggatcctgtgctggacaagattgaccaggaactgttggcccgccgacctgatggatttgtgcctggtggatggacagacctactgaacacaactgagaaagggaaacccttcacggttgagcgcgtgcaagatctccgcccaggtcctggtgtggacagattaaagaaactcgtcacaggattgctcacccaagaaggttttgatgacaagcattgcctgtga

SEQ ID NO: 43283 - DNA, 138 bp, Zea mays
aatgctcaggctccgcggttgcatcattgagccctcgctgcaggcgctcgctcgcaagtagaaccaggacaagattatctgccgcaaatgctatgcacggctgcaccctatggctgtcaactgccgcaagaagaagtg

SEQ ID NO: 43284 - DNA, 252 bp, Zea mays
cacttactgacatcaagattgacatcaaacgtgtcgccaagaagacagccctgatcaaggcgatggacgaagctgatgtgaagaccaagtgggagaacagctcatggggcaagaagctgattgtccagaagaggagagcatcgctcaatgactttgataggttcaaagtcatgctggcgaagattaagaggggcggtgctatcaggcgagagctcggcaagctgaagaaggcgtccacggcttagagagtct

SEQ ID NO: 43285 - DNA, 244 bp, Zea mays
attcatcgccgctccaggtcgtagatgtgaatatactttgctaggggaataagtgataagtctgtctggaaggtaatgtttgagctttgctagtgtggctgggcactctggtcactggttgtgttgtgcatgcatcagctgtatgatcgtcgtctgttgtggaaaattggtcaatgtattctcttgctgaataatttgtgacatctaattgttaaaaaaaaaaaaaagaatagaaatgaaaatg

SEQ ID NO: 43286 - DNA, 263 bp, Zea mays
ctcgagccgctcttatggagttttagcgatatcagtttcaaagccaacatctcaaccttacataaccatgaataatatccttgctggattggggtatgatggactgggtagactccttggtatggcgaaaacaactggaactgttccagatggactacctcctccaagatctgcactgctgtcatcttgtatgggactggttcaaccaaatgagtaggaaaggatggtggggcagctttaatgggagtggtaaagataaagtc

SEQ ID NO: 43287 - DNA, 301 bp, Zea mays
taaaaatctttcagaggatgagatccggagctctctcgaacaacattttagtgattgtggtgagatgacaagggtctctatcccgactgatcatgaatctggtgcaataaaaggaatggcttacatagacttcaaggatcaggactctgtgtctaaagcccttgagctcagtggctctgacattagtggtggctatgagctttatgttgatgaagccacaccaagaggcgatggccagcgtggtggtggtagatctggtggccgttctggtgggagattggtgaccgttctggtggccggc

SEQ ID NO: 43288 - DNA, 300 bp, Zea mays
tgttgaggcagcagctgaggaaacgaaaaagagcaaccatgtcacgaggaagcttgagaagcgcaaggagggacgtacccttgacccacacattgaggagcaatttggcagtggacggttgctggcatgcatttcttcccgtcctggacagtgtggccgagctgatgggtacatccttgagggtaaagagcttgcattctacatgaagaagctacagaggaagaagggcaagagcgctgtagcttagagcattctcatggattgtcttgcaccgaaatgtgtgtcctgatgagtacactt

SEQ ID NO: 43289 - DNA, 215 bp, Zea mays
tccgaatcgactatatgtatgcaaagttctttgttatcaagtcaattggtgaggcagatgtgcacaaatcgataaaatatggtgtatggtcaagttcctccagtggaaacagcaagctagatagcgcattcagggatgctgacaggatatcgaggaggcattctactaagtgtccggttttcttgttctaaaaaaaaaaaaaaaaaaaaaacaac

SEQ ID NO: 43290 - DNA, 303 bp, Zea mays
atgacacttaagggaatatactgattctgtctccatgctctcctcaccactttctgcacagtggaccctggaaaaaaagcattcatcaacaaatatcacaagttcacggcgatcatttcatatttgttacatacttacatgaacacccaatctaccagttgttatgacaaataccaaatggaaacagaaggactgtttggtttgttgcctaacttgccacactttaactaactttttctgcctaaggttagttcttcaatacgagcgactaaccttagccaaagtgtggcacagttagccgcg

SEQ ID NO: 43291 - DNA, 273 bp, Zea mays
tactaagaaaggaagaggatggggatgttttcttgtggagctatactagctcgctgctgccttttgttacaatgtttgtacggtcgcaataaatgtatggtcgtgtttgctcgagagctactcaggtgattttgtcgtgggagcaccaaaagcagaaaagaactgtttttttcttctctctctctagattctgacgagtggtggtctgcactcgtcgtaatgtcgtttgcctaaactgattttgatggaacaggaaatcttgctggtcttgcc

SEQ ID NO: 43292 - DNA, 299 bp, Zea mays
ggcgagtgggtggtgttcttgctgtctctcgcgcatttggtgataaactcttgaagcagtatgttgtcgctgaccctgaaatcaaggaggaggtggtcgacagctcccttgaattcctcatccttgctagtgatggactctgggatgttgtcactaatgaggaagctgttgccatggtcaagcctattcaggacccccaggaagcagcaaacaagcttctcgaagaagcgtcccgaagggaagctctgataacatcaccgttgtcatcgtccgcttcctatatggaactaccggtgata

SEQ ID NO: 43293 - DNA, 238 bp, Zea mays
ctttcacttgcatcgttcgctttgacactgaggtggagctggcgtacttcaaccatggaggcatcctcccttatgtcatccgcaacttggcagctgcgcataactgaggcaagatcacacaccgtttcatccacaatggcagtggcaggctccatgttcccagggctagcgacctggttctcaatgtagtgacatttgtgatggatctaggggtctctttgtcgattcagcccataaa

SEQ ID NO: 43294 - DNA, 283 bp, Zea mays
gtcgggacaagatgatctgccgcaaatgctatgcacgactgcacccaagggctgtcaactgccgcaagaagaagtgtggtcacagcaaccagctgagagctaagaagaagatcaagaactgaggtgctgctcctagtcagtttcatggacaatgttgggctgtattgctgtgtggttgttgaaccgtaattgtttacccaacatttgggccttctgttatgttttaccttgttgtcgatgacacaatactatatgacaatagcaactctgttattgtagtttt

SEQ ID NO: 43295 - DNA, 298 bp, Zea mays
catggtttcccagcacggggtgactgcccctgccgggatccacaacctgttctccttgataagcaagaggatagcgatgaaggggttcatccagagcgattacgtgcacctgttcccgcagttcgtcgatgacatcaccaggcattacagagacgggaagatcgtgtatgtggaagacatgagcgttgggctggagagtgggccggcttccttcgtcggtctgttcagcggtaaaaatgttggcaagcaggtcgtctgtgtgtcgcgggattgaaaggcctggattttgttccctact

SEQ ID NO: 43296 - DNA, 297 bp, Zea mays
tgccctcacaagccagaaggttccatgtttgtcatggtgaaactaaatttgtatcttttggagagcatccatgatgatattgatttttgttgcaagctggcaaaagaagagtccgtgattttgtgtccagggagtgttttgggaatggaaaactggatccgtatcactttcgccattgattcatcttctcttcttgatggtcttgagaggctgaaatctttctgccaaaggcataagaagaagaatttgcttaatggccattaactatatacgacttcagagttgttacccacttcc

SEQ ID NO: 43297 - DNA, 295 bp, Zea mays
catgactataaaggtttcacggtaagtactgttgaagaggaggctgcctataatgctcgactcacgatagataaggaaactttcaagacgatcatgaataacttgaatttgtcatatccaaagatgatggatgtagctgtacctgccaatttggtctgcggtatccaggatccagcaccgaagatctgagctgttccagtggaagcctgcaactgcacttctggttgtttatgaactctggatcgccaccagaggcttgcagctgagttgttcattaaataatttgtttgctgca

SEQ ID NO: 43298 - DNA, 204 bp, Zea mays
gggtggtggttttggcggaggttcaggtggtggcttcggaggtggtggaggttcgggtggtggcatcggtggtggactgtagaggtggcgggagcttggtgcgtgcacgttgagtgtgtgcatgccatgaaattaaaaagcgatacatggagtgtgtggtacggtatggacattgctagagttacattacatcatcactagtat

SEQ ID NO: 43299 - DNA, 293 bp, Zea mays
caccatccgcgggatgattccgcacaagaccaagaggggggaggcggctctggcgaggctcaagacgtacgatggcgtcccgccgccgtacgacaagaccaagcgcctggtcatccgtgacgctcttaaggtcctgaggctgcaacctggacacaagtactgcctccttggtgagcgttctaaggaggtcggatggaactaccatgacaccatcagggagcttgaggagaagaggaaggagaaggccaaggtggcctatgagaggaggaagcagctggccaagctgcgcctaa

SEQ ID NO: 43300 - DNA, 291 bp, Zea mays
cggaggtcaagcccgccctgaccaacatggtctccgccgctaagctcatccgcacccagctcgccagcgccaagtgagcaccttttttttgcctttttcgtttccgaggagggcgtcgtcgatgccaatttgtttccaataaacagggctgtgcccgccgttctgttgtactccgtctgtggttaggttagtagttttcttgatctcgcccccacgcggtacctgttttactactctctgtttggtggtttctgaggaagttgcccgtgtacttgtatcgtaaaaaccgag

SEQ ID NO: 43301 - DNA, 291 bp, Zea mays
cagtcttgtgtcttaccactgtcaagaacgaggataagcttgagttcagcaagattttggaggctattaaggcaaacttcaacgacaagttcgatgaggtcaggaagaagtggggaggtggcatcatgggatccaagtcgcaggccaagaccaaggcccgggaaatgctgctcgccaaggaggctgcgcaggcgatgacctagattgtctactgctgtgtctgccctgtagtttaacggggaagaactgatgaactcgtattgtggttttccgaatctagtttcatatgtt

SEQ ID NO: 43302 - DNA, 171 bp, Zea mays
tgccttgcgagagagaagagttgcttaacgccgctgtgcgtcgtgtcgatgcattggaagccgaactaattgtaacaaagaaggctttgcacgaggctcttatcaggcaagaggaactgcttgcgtacatcgaccgcaaagagattgccaaggctccagagaaagaggaaa

SEQ ID NO: 43303 - DNA, 266 bp, Zea mays
gaaagaaggcagggtcctgaagacctacagaggtactgggggcatattcgaagtgtgctggaacatagaaggcaccaagattgctgcctgtttctccaacaacaccgtctgcgtcatggatttccggatgtagcccaaccagtaggggtagcgacgtagtgcagatcaagcctaaaacaagtctggatcacaagcccttcccatggaaacgtgtgaagagagcggaattgttagcagaatgcagatcttaggtggtggtttttttt

SEQ ID NO: 43304 - DNA, 213 bp, Zea mays
gtgtcgtgcctgctggtgatgtgcagcgccgacgacgagtgcgtcgcggcggtgctccgggaaggggtggtcccgtccctggtctccgtctcggcggccgggacggggcggggcagggagaaggcccagaagctcctcaagctgttcagggagcagaggcagcgggacaccgcgccggcgccgcaaccccagcagcagctgctgcagagccag

SEQ ID NO: 43305 - DNA, 283 bp, Zea mays
cagaacgtttgtgtcatctatccttaattcgcttcctggtgttgatcccaatgatccatctgttaaagatttgctggcatcattgcacagccagggagagcaagagaagaaggaagacaagtcagacaaaacagaagacgagaagaactgatgtagccatgttcatgcttccatgctcacaaagaaattgaacattggtctgcattggctgcgcttactctcttggctatgaaatttgcttatcctcatgtaacagtgctttgtttataacttaatgccgagg

SEQ ID NO: 43306 - DNA, 238 bp, Zea mays
gcgaaatgaagagtatgataccaaagtggatgtcttctcattcgctctgatacttcaggagatgattgaaggatgccttccttattatgataagaaaaatgatgaaattgagaaggcacataattctaaagaaaggcctaccttttcgagctcctccaaagcattatgcccatgggttaagagagttgattgaacagtgctggagcgaaaattctgcagacaggcctgattttagagt

SEQ ID NO: 43307 - DNA, 232 bp, Zea mays
gaagaaggcagttcacaagaccacgaccaccgatgacaagcggcttcagagcaccttgaaaaggatcggggggaacaccattcctggtatcgaggaggtcaacatcttcaaggacgatgttgttatccagtttcagaaccctaaagtgcaagcatccattcctgcaaatacatgggtggttagtggagtaccccagacaaaaagtctgcaagaccttctgccatcatttatc

SEQ ID NO: 43308 - DNA, 316 bp, Zea mays
tcgtagatggtgtttgtgatgaaccggccagtgagaatactgttgagggaaaagaaccagacgctaaaggagttccagacttttggcttactgccatgaaaacaaacgaggttttgtctgaggagatacaagagcgcgatgaagccgctttgaaatatctaaaagatatcaagtggtctagaatcgaggatcctaagggtttcaagctggattttttctttgatacaaacccattcttcaagaattctgtcctgacaaaaacgtaccacatggttgatgaagatgacccattttggagaaagctattggaactgaa

SEQ ID NO: 43309 - DNA, 311 bp, Zea mays
agacaaccatgcatgatgtgaacaacatcgaggaagagatgcgcaggaagcaggctcatgctgctcaggaggcgtacgaggaggacgacgagatgcctggcggagccaaagagtgcagtgcgctcaacagtaagcagactaccaaaatgggattcaaggcactttggttgctcttcaattatgcgagtgcgcctgtggactgtatggttctatggttttgctgtcgctgagctacaaagtaggaagctgatgcgcccctggctctgcaagcgggggaatgtatccttttttgctgcaactgaaaaatgcta

SEQ ID NO: 43310 - DNA, 308 bp, Zea mays
gtgccgacctcccctcggcgcccagccgtcgctggccgtcctgagcctgcggaacaccacgttccagggcgtcgtaccggagtccctgggaagcgccccctcgctgcggtcgctcgttctcgcgtccaacaacctgtccgggaacctgccggacatgagccagcaggccaacctccaggtgctcgacgtcggcggcaactcgctcgagccggcgttccccaagctcgggaggaaggtggtcaccgtggtcctggctaggaaccggttcgtcgccttcctccagaacccgcagctcgtgcaggagttca

SEQ ID NO: 43311 - DNA, 309 bp, Zea mays
gcttagaaaaagtacaatactttatgtatgaattcagaaatcccaatgatattcattctgaatatgtgcaaatgcagaatgttgcatttgacaaatgactactctcaggcctgcaaactgcacattacaacgtgaagttggttattgaaagggcgcccatagctgcaaacatagctgtgaccacatgatgatgacgatttactccagcaggcacttgcaatgtcaatggagggtggtgcttcaggatctgcagctgtgactgactctgctatggcagaagctagtgcagttgaccctgacttagcgttg

SEQ ID NO: 43312 - DNA, 303 bp, Zea mays
aagaacttatttcacaaccggagacaaggaaacaaaagcttggactattctttcaggcatgactgcgccacaagcagctggagttattcatagtgacttccagaaaggattcatcagagctgaaactgtatcctatgatgattttgttgcagctggttctcttggagtagcaagggagaaagggctgctgaggttggaagggaaggattatgttgtgcaggaaggagatgtcatgcttttcagattcaacgtgtgacagcaatagtagcaaaaggcttcaaaaacaccggaatttgtactagg

SEQ ID NO: 43313 - DNA, 299 bp, Zea mays
gagatgagctccacaggatgctgaatgaggatgagctgcgtgacgctgtgctgcttgtatttgcaaacaaacaagatcttcccaatgctatgaatgctgctgaaattactgacaagcttggtctgcattccctgcgacagcggcactggtacatccagagcacttgtgctacatctggtgaagggttgtatgaggggcttgactggctttccagcaacatctccagcaagtcttgaagcttttcggcagggctcctagcgagaggatgtctgaacaacttatggctgctttttttttac

SEQ ID NO: 43314 - DNA, 300 bp, Zea mays
ggttttagtatccagcacaccactttaccatgcttgcaagtgggcaatcaacaaagaccaaattatctgcctatggaggtttgcaagatagttgaaggacagcattactcaaagagactcaatgagaaacaaatcactgctctactgaaagtgacctgccagcgccctcaaaagcgtgagctggacatcttagaggattccggctctcatcaagtgactcctccccctcacgatgactttgcggacaaatgtctccattctagtggtggagctatgaacaacaatccgatgtcctgatcg

SEQ ID NO: 43315 - DNA, 272 bp, Zea mays
acgagaagggggcctcctatgaggatatcaagaaagctattaaggctgcttccgagggtccactcaagggtatcatgggttatgcggaggaggatctggtttctaccgacttccttggtgacagcaggtcgagcatcttcgacgccaaggccgggatcgctctgaacgaccacttcgtcaagctcgtctcgtggtacgacaacgagtggggctacagcaaccgcgtcgtcgacctgatccgcacatgtccagacccatagagggtttttccc

SEQ ID NO: 43316 - DNA, 226 bp, Zea mays
cagcggcaaggatgtggtaattgttgctacaaggaggattgtgaggccacccaagaagggttcagctgttctgcgccctcgcaccaggactctgactgctgttcacgatggcatcttggaggatgttgtctacccagctgagattgtggggaagcgtgtcagataccgtctggatggttccaagattatcaagattttcttggacccaaaggagaggaacaacact

SEQ ID NO: 43317 - DNA, 299 bp, Zea mays
agagatcaacactaagatcgcctcttttgttgatccagatggctggaaagtggttctggttgacaacaccgacttcctcaaggaactccactgaaggctcgggatacccaggtgctgtgctaggatgtagtaatgcttgtctgtggtgtaataagatgtgggtggtttgtttctgccctgatgaacttataatactgaatgttgctacagaggttgtgcttctgccagtgaggtttgggatttgctatgtaactgtgcctgcgggctccgattctggcgctgttcgtacactgtagaag

SEQ ID NO: 43318 - DNA, 296 bp, Zea mays
gccgtcgtgccgggggtctcgttcgcgcccgtcgggctgctcgacatgttcaacgccgggagcgccgttgaggagtgcgacgtgatcagcgatgacggcggcaaggccatggctctcagggttcgcgggtgcggtcggttcggcgcttactgctcgcgggagccggcgaggtgcctattggactcggcggaagtggagttcagctacgatgccgacaccgggctcgtgtccgtcgacctgcccgtgccggagcaggagctataccggtggacgctggagattatggtctaggccgt

SEQ ID NO: 43319 - DNA, 295 bp, Zea mays
ggtacccgctctacaacatcaaggctttcctccctgtcatcgagtcctttggtttctccagccaactgagggccgcaacctctggtcaggcgttcccccagtgtgtctttgaccattgggacatgatgggctcagatcctttggaggccggctcccaggctgctcagctggtgctggatatccgcaagaggaagggtctcaaggaacagatgacccctctttctgagtttgaggacaagctctaaaatttttggctgttggtgatactgtttcatctgccggtttaatcatcaat

SEQ ID NO: 43320 - DNA, 294 bp, Zea mays
acacggcatccttgtttatgaacagacatttggccatcaagcgggtggtagttaatcacctagggattttgtccagacaaaagcttattgagatttgacccatgcatttctttaagagcatcatcgaataaaagatgactgcatcagattgctttcttttgttaccgtatggccatcgggtgtgatggacatgtaatattcagtcatggaatggaacagacccatttctttattcagtgtgctggggaatttgcaaaaggtctcctatatctcttacaagtttcaagccagagg

SEQ ID NO: 43321 - DNA, 298 bp, Zea mays
ggtggtcgtcgtccgctgcgaggagatctgtatgtccggtgggctcgtacgccagaagatgaagtacctccgctttctccgcaagcggatgaacaccaagccatcccatgggcccatccacttccgcgccccgtccaagatcctgtggcgcaccatccgcgggatgattccgcacaagaccaagaggggggaggcggctctggcgaggctcaagacgtacgagggcgtcccgccgccgtacgacaagaccaagcgcctggtcatccctgacgctcttaaggtcctgaggctgcaacct

SEQ ID NO: 43322 - DNA, 288 bp, Zea mays
atcgagccgcagaactatcccaacagcccgccatcagtaagatttacttctgggatgtggacatccgaatgtttatccggatgggcgtgtttgcatttctattcttcatccacctggtgaagatcccagtggttatgagcttgcaagcgaacggtggacaccagtgcacacggttgaaagtatagttctgagcatcatttcaatgctctctagtccgaatgacgagtctccagcaaatattgaagctgccaaggattggagagagaagcgggatgagttcaagaagaa

SEQ ID NO: 43323 - DNA, 319 bp, Zea mays
ctcttgctgatctggccccaacccaccccatcaggctcgggcttgctctcaacttctcagtgttctactacgagatcctcaactcccctgaccgtgcttgcaaccttgcaaagcaggcctttgatgaggcaatctccgaactagacagcctgggagaggagtcctacaaggacagcactctgatcatgcagctcctgcgtgacaacttgaccctatggacttccgacaccaacgaggacgccggagatgagatcaaggaagcagctgctgctcccaaagaatccgcccccgagggccagtaagacggatccgatctccc

SEQ ID NO: 43324 - DNA, 301 bp, Zea mays
atcagcaacttcttgtcggaccctgtccatggtgccattgaggtctgcgccgagctgaggcccaccgtcgacatctctgtgcctgccaacgccgactttgtgcgcccggagctccggcagtcttcctagattgaggcagtgagcggagagggagagggagagagaaagagaggatttcgtgtcccgagttagaacagagtgctgtatgttttgtgcgactgtttgtaagtcaagtctgaactgtgaacctatgtttgcttctatcagaggacccggagaaagcctgggcatctgtttccgg

SEQ ID NO: 43325 - DNA, 307 bp, Zea mays
agaagccatgggagaacttcaaggagctgcaggaattcaagcctgttgaagagggtgctagcgcctaaggatctctccttctccatgtgcgagcctgaagctcaaagcaaagttgcagaataaggagccacctcccaacatgctagaccatgctcccttgtgtaatttcataagactacaacccttttagggcttgttcgtttgtgtctgtgtctaagggaattgaaggtgattaaatttccttctatacaaatagaggggctttaatccactccaatacttttcaatccacgcctaaccgaacaag

SEQ ID NO: 43326 - DNA, 312 bp, Zea mays
taagctgttgacttctgcatattccacaattagagttgctgatgtggctcatttcatggggatgagtgaggaggatgcgacaaactatgctgtgcaaaacggttggagtttggatgcagcgtccaagatgcttactgtcaaaaagccaaagtctcagaccaaccagaagcttgatgctagcaaactgcagcgtttgactgagtgtgttttccaccttgagaactgatgttcactgtcaatcgtgttgtgtccctgtttcttctctgctccacattgtaagaagcatgtttaccatgtgacagctatatgcct

SEQ ID NO: 43327 - DNA, 305 bp, Zea mays
agctggatgaccccaacaccttcggcaaccggatccaccgcatgctcaaactcggtctgagcatcgatgaggacgagcctgttgaggcagaggctgagatgcctcagcttgaggacgacgctggtgaaagcaagatggaggaggtcgactaagtgtcgcatcgcatgcttgccgtttatcttatccctagctaagctacctgtgatagcttaattttcactattgttcgaggtttttggcacgttatcggttgtcctgctggccaggctataagtctggtttatctgttatgtttacccttttta

SEQ ID NO: 43328 - DNA, 303 bp, Zea mays
agagattctggctcagattaggaagaagaaggcattacttatccaagaacatagaatgaagaagagaactgcagaaagccgtcctattgtccctagaaagtttgacaaagataggaaattcacaactaataggatgggacggcagctttcctctatgggtgtggatcctattgctgccatcaatagagctcgtagccagtctaggggccgcaagcgtgagaggtcagtgagcagagctgcagctgatggtgacggtatggagatagatggccagcaatccaacaagaaactgcgtcgtacatc

SEQ ID NO: 43329 - DNA, 300 bp, Zea mays
tactgggtacgcgctcacctgcgtcgcgtacccgacgtccgactgcgtcatccagacgcacagggaggaagacttgtactagacagggctggtccccgtgcatggatcaaccttgcacttccattcagattcgatctttgagttattgacactgtccttggcacacgctgttgcggttgcagcttgctagaactaatcgtcgtccagataatttggcatgatgaccaagtgcaggttcttgtgaaaaaaaaaaaaaaaaaaaaaaaaaaaaaaagaaaaaaaaaagaaagaaaatagagg

SEQ ID NO: 43330 - DNA, 90 bp, Zea mays
tctcgacggccgtaacatcaccgttaaccaggcccagtcccgtggcggtggctgtggcggctgtggctacggcggctgctgtgtgtactg

SEQ ID NO: 43331 - DNA, 299 bp, Zea mays
atgcatcgcattggtcgtagtggtcgtttcggtaggaagacgtgttgccatcaactttgtgacccgcgacgacgagcggatgctgttcgacatccagaagttctacaacgtgttgattgaggagctgcctgccaacgtcgctgaccttctgtgatcattttgaagaaaaacagaactaaaagaacggtggtgggggtgatctggtaaggcttggttttgccgaaatattgtgggggaggagtgataaggtcggtggggtttctatgttaaagtcgtggtctcgggcaatatgcgatttt

SEQ ID NO: 43332 - DNA, 295 bp, Zea mays
gtccgtgacatgaggcaaacggtggctgtcggagtcatcaagagtgtggagaagaaggatccaactggagccaaggtgaccaaggctgccgcaaagaagaaatgatgtgtctggctggttctgtgtttgcttgagggatacctagtggaaacgtaaaatatctcgtcttgttcacgtcattgtctgaactatgctcgcaacgtttgcctggtcgatttagaactgttattttcgttaaaaccagagtgttatttaagacttatccgaacatctggtgagccatatatggttacta

SEQ ID NO: 43333 - DNA, 299 bp, Zea mays
gtacttcgacgacacctacgagtacaggcacgtcgtcctcccgccagagcgtcgccaagctcctccccaagaaccgcctcctgtccgagaacgagtggcgcgcgatcggagtgcagcagagccgcgggtgggtgcactacgcgatccaccgcccggagccgcacatcatgctgctccgccgcccgatcaactaccagcagcagcaggaggcggctgccgcgcagatgctggccaagtgagcccccggtggccagggcggcgaccaggaacgtttaaaaccctaaccccctttccatctc

SEQ ID NO: 43334 - DNA, 287 bp, Zea mays
cgaccggcaacctgcggcggagatgtcaggcaggggcaagggcggcaaggggctcgggaagggcggcgcgaagatcaccggaaggtgctgcgcgacaacatccaggggatcacgaagccggcgatccggaggctggcgaggaggggtggcgagaacgcatctccgggctgatctacgaggagacccgcggcgtgctcaagatctttctcgagaatgtcatccgcgacgctgtgacctacacggagcacgcccgtcgcaaaacgtcaccgctatggacgtcctgtacg

SEQ ID NO: 43335 - DNA, 293 bp, Zea mays
agctgatcttgtcagagaaggaagagcctgtgaagaaagaggctgacaacattgtcgcagcaaggaagcagtgaagtatatcagcatgctgatcgaggccattttgtcgaagtattatagccgtagctcttttatgtaccttttcaggcagccttgcctctcgagacgtttccggcaccgatgttttaaatctggattatctatgttctgtactgaactactgtgttggactgtaagttcagctcgtaatacaatagctcttaagatatctgggcacttaatctgcatggact

SEQ ID NO: 43336 - DNA, 303 bp, Zea mays
caatgtctctgagctggagttgctcatgatgcacaacagaacctactgtgccgagatcgcccacaacgtttcaaccaagaagcgcaaggagattgttgaacgtgccgcgcactcgacattgtggtcaccaacaagctcgccaggctccgcagccaggaggatgagtagtctggtttcttgtcacaacggccaaatagatcctgccattcccggctgtaggaaactactctgctttgtgccttgttagtacttagaataccagacatttctacatttttggtaccagtagcgacttctatgtgg

SEQ ID NO: 43337 - DNA, 297 bp, Zea mays
cgcaattaagaggtgcaagcattttgagattggtggagacaagaagggcaagggaacatctctcttctaagtttctcatcgcccatctcgatgttggatcgaacctgtgggtctactactgttctaaaaactcgtcaaatttcaatgttactagtagttctgaaagcaggtcatgctgtgtatcaaattccaatgcctgacatttgcgctgagtgtgggttgtcttttggctaaatgaagttttgcaccctgaatcttcattgaatgtgttgtgtgtttgtttgattttgttctgcg

SEQ ID NO: 43338 - DNA, 296 bp, Zea mays
ctcacttactgacatcaagattgacatcaaacgcgttcccaagaagtcaaccctgatcaaggctatggaggaagctgatgtgaagacgaagtgggaaaacagctcatggggcaagaagctgattgtccagaagaggagggctgcgctcagtgactttgacaggttcaaggtcatgctggcaaggatcaagaggggtggtgctatcaggcaagagctcgccaagctgaagaaggcgtccacggcttaagtcccttttggtggatggcatgttagtttttggtttcatgtttcatcag

SEQ ID NO: 43339 - DNA, 300 bp, Zea mays
  unsure (1)..(300): unsure at all n locations
gtggaaccaaccaccgaggaccaagctgtggatagggcacaccgtattggtcaaaaacggcctgtcacggtatcaagattaactataaaagacaccgtggaagatcgtattcttgctctccaggagaaaaagcgggagatggttgcttctgcgtttggagaagacaaatctggttcccgacagactcgattgaccgttgaagacctgaattatctgtttatggtgtagaatcgctcctgagagtgaacagttttgctcattggattggtgttagacgtggtagatanaaatgttctctga

SEQ ID NO: 43340 - DNA, 292 bp, Zea mays
ggtacccgctctacaacatcaaggctttcctccctgtcatcgagtcctttggtttctccagccaactgagggccgcaacctctggtcaggcgttcccccagtgtgtctttgaccattgggacatgatgggctcagatcctttggaggccggctcccaggctgctcagctggtgctggatatccgcaagaggaagggtctcaaggaacagatgacccctctttctgagtttgaggacaagctctaaaatttttggctgttggtgatactgtttcatctgccggtttaatcatc

SEQ ID NO: 43341 - DNA, 296 bp, Zea mays
gtcaaggatgtgatagatggtgatctctgcgagcagtatccctacctcccagccgatatgcaaaggaagattgctgatgagctggacagaactccgggtgaaatcctgaagaagctataagacatcaggaacaaaatcatctgaaacagcggcttagtgtgaagaaattatgcagggcaatgccggtgctctttgcattaagactatccagttcgagctgttgccgcacttcaagatgtgacagcagcgcatccaacaagtttggagcacgctgatctgtacaatctctactgatg

SEQ ID NO: 43342 - DNA, 289 bp, Zea mays
ttgcaatcacaacgaacacaagctctcgatctcaccgacaccgaggaagaagagatcaatggcgtccgagcagggagtcgtgatcgcgtgccacagcaaggctgagtttgacgcccacatgaccaaggcccaggaagccggcaagctggtggtcattgacttcactgccgcctggtgcggtccatgccgcgccatcgccccactgttcgtcgaacacgccaagaagttcactcaggtcgtgttcctgaaggtggacgtggacgaatgaaggaagtcaccgcggcctacg

SEQ ID NO: 43343 - DNA, 279 bp, Zea mays
gtttctggtgatgatgaccttccgaagagagataatatcggagaaagacggagaaaacatgagcttcgcgtcctatcaagagtaggggctaactcagcagaggatcatgagctgccagatggtgacgcttctgaagaggaggaccaccatgagttgccagaaggtggtgatgaatctgaagacgacatccatcgggatgtcaaaagaaagaggactgataagctatcacccaagaagctctgtactcgccactcggggggttgacatctggaggaagaa

SEQ ID NO: 43344 - DNA, 292 bp, Zea mays
gtacattgccctgatgatggctcagattgagatcctgaggaagaaggggcactcctactctgagatcatcaacgagagcgtgattgagtcggtggactcgctgaacccgttcatgcacgcccgtggggtcgccttcatggtggacaactgctccacaacggctcgcctgggatccaggaagtgggcgcctcgcttcgactacatcctgacgcagcaggcctttgtggcggtggacaaggacgccccgatcaaccaggacctcatcagcaacttcttgtcggaccctgtccat

SEQ ID NO: 43345 - DNA, 290 bp, Zea mays
ctgaaatcaggcgcttcttcgaggactacaagaagaatgagaacaaggaggttgctgtgaatgactttctaccagcgagcgccgcttatgaagccatacagcactctatggacctgtatgctacatacatcgttgagggcctgaggaggtaggattctgatggctaggaaaggtggggaggatgttgacgaaaaactgggagaccatttaccgcatggaacgagtaccgttattattttatttgtgtcgtgtatactgctagtagtgaaccctcaatcaaagaccgaaat

SEQ ID NO: 43346 - DNA, 141 bp, Zea mays
gagaaacagagttcttcagtttgctatctctctctgcatgtttggcgtcagtctttgtgctcatgtacgtacgtgtgtctacctgcatgttggttgatccgattgcatctgctgtaaccatatattaattggtccacgatg

SEQ ID NO: 43347 - DNA, 316 bp, Zea mays
ggcacgcaagatgaaggacaccgactctgaggaggagctcaaggaggccttccgtgtgttcgacaaggaccagaacggcttcatctccgctgctgagcttcgccatgtcatgaccaacctaggcgagaagctgacggacgaggaggtggacgagatgatccgtgaagccgacgtggacggtgatggccagatcaactacgacgagttcgtgaaggtgatgatggccaagtgagatatgcccgccgtttttaagctagttcctctcctgatggtagtaactagtactagtttggagactgactgcgtttgggtgtgt

SEQ ID NO: 43348 - DNA, 141 bp, Zea mays
ctcggctctcgcatcgatgaagaacgtagcaaaatgcgatacctggtgtgaattgcagaatcccgcgaaccatcgagtttttgaacgcaagttgcgcccgaagccttctggcgtagggcacgtctgcctgggcgtcacgcc

SEQ ID NO: 43349 - DNA, 132 bp, Zea mays
gcctggcatcgcgattggccgcctttgcgagaaatgtgatggcaagtgtgttgtctgcgactcgtacgtgcgcccatgtacgcttgtccgggtctgcgacgagtgcaattatggttcgttccagggaaggtg

SEQ ID NO: 43350 - DNA, 278 bp, Zea mays
aacagcaacacagccatcgagattaggaacttcctcggcgagaagaaggtcaggaaggtggacatgcttgatggcgtgaccatcctccggtccgagaaggtcaaggatgagctcatccttgacggaaacgacgtcgagctcgtatctcgctccgccgccctcatcaaccagaaatgtcatgtgaagaagaaggatatccgaaagtttttggacggtatctatgtgagcgacaagggcgtcatcgaagaggagcagtgagcgacagagtcgccgaaatg

SEQ ID NO: 43351 - DNA, 294 bp, Zea mays
accgccgacgaggagggcgagtactaggacgaggaggagggagatctccaggactagaataggctgcttcacattcagtcaccgtcagtctatgaaaaactaatcatttgctgcttttcgtcgtcgtcgtagtagtagtaggtcggtaatcatctgtcgtgggtgtgtttcgtttctatcattaatcaggattagtagtagctgctgctgctgcgggcacaacacaaggggggataggaactgcaataccctgttgcgctttggttgtttcttggaaccgatgttatgttaaat

SEQ ID NO: 43352 - DNA, 171 bp, Zea mays
cgacgccaccggcaaggtgacccgcctccgcaaggagtgccccgacaccgagtgcggtgcgggtgtcttcatggccaaccacttcgaccgccactactgcggcaagtgcggcctcacctacgtctacaatcagaaggcgtaatcccatgcgccgctttgcttcacccgcct

SEQ ID NO: 43353 - DNA, 285 bp, Zea mays
aagaatataaaggccaaggaagttgatcttggaaagacaactgaactctcaaggcgtgaaagggaggagcttgagaaacaaaaagctcatgaacgttatatgaaacttcaggagcaaggaaaaacagaacaagcacggaaagatttggaacgtcttgctttaataagacagcaaagggctgatgctgcaaagaaacgcgatgaggagaaagctgccaaggagcagaggaagtcggaagcacggaagtaactgcaatatcatggacgatgagaccacgaaggcatg

SEQ ID NO: 43354 - DNA, 298 bp, Zea mays
tttaactatctcaaaggttctcctgtcaatctgctcactgctcacggacccaaaccctgatgatcctcttgtccctgagattgctcacatgtacaagaccgacagggccaagtatgagtccaccgcacgctcctggacacagaagtatgccatgggctagaagcaaggctaaaagctggccaaactggtgaatgtgccggaccccaaatcgttatcacctaaataaccagtcaagtcgcaagtatgaatggacttttgaggaccattgtgccctgttgaactcatgtattaccttgtg

SEQ ID NO: 43355 - DNA, 270 bp, Zea mays
agtgattgtgaacccaaagggagagatgaaaggctctgccatcactggacccatcggaaaggagtgtgctgatctgtggcctaggattgccagcgcggcaaatgcgattgtctagtggaatcagttgatcgaaatttacttcaaataacatttgtttgtgttgcgaattgggaagagagtttttagttagacgagcttttgacggccctaaagatgtcttcccggatgatgtttgtgctgctggaccgtttcctgttagcttcgatggca

SEQ ID NO: 43356 - DNA, 180 bp, Zea mays
aaagcaacaaggcttcattgaaagacaggaggtaaagcaaatggttgttgctacacttgcggagtcaggaatgaatcttttagatgaggtcatagagagcatcattgataagacttttgaggaggcagacacaaagcatgatgggaaaattgacaaagaagaatggcgcaatttagtagt

SEQ ID NO: 43357 - DNA, 285 bp, Zea mays
agacgaaacatgtagggaattcaggaatgcagcttccatcatggggaactctgcgctgttcaagaagatggaggtcgcgtctaacgctattaagcgtgacattgtgtttgcagcaagtttgtatgtcacaggaatctgatgcatgtaacctcgtagtctcccttgcttcttttgttagagaaatcgttgtgctggtggaatgctactaacctaaccttagctagaacaaatgttgtggtatttttttttcagttctggattattgcttttgctagttttgcgaag

SEQ ID NO: 43358 - DNA, 98 bp, Zea mays
atcctcggtttcggcagacccatgcatcaaacagcatggactgcggatcgatggatgctgttacccccgtcaggctttattctaagttaatcttaagg

SEQ ID NO: 43359 - DNA, 277 bp, Zea mays
atggcacagaagttgtggaggcaaaggctggatcaggctccgcgactctgtcaatggcttttgctgcttctaaattcgctgacgcatgcttgcgagctatgcggggcgaactggaatcgtggaatgctcatatgttgcatccgaggtgacagaactgccgttctttgcaacgaaagtgaggcttggccgtggtggagccgaggagatcctcccgcttggccctttgaatgatttcgagagagctggtctggaagcggcaaagaaggaactgggcgag

SEQ ID NO: 43360 - DNA, 58 bp, Zea mays
gtgttgtgtgtgcgtactacccagaactatgacaaatcatgaataagtttgatgtttg

SEQ ID NO: 43361 - DNA, 291 bp, Zea mays
aagaaggccctattcagagcactgaaaactcgagggaatactccaaagtatgggcttatattccactcctcctttattggccgtgcttcaaccaagaacaagggcagaatggctcgttacctggcaaacaaatgctcgattgcttcacgcattgactgctactcggaggctagtacccctgtctttgggcaaaagttgcgcgacaagtcgaggagagactggaattctatgacaagggtgttgcgcctcgtaaaaaccttgatgtgatgaaagctgctattgacagtatgg

SEQ ID NO: 43362 - DNA, 244 bp, Zea mays
aaggcggaaggtgtatacagcgccttggagaagcttggcattgactgggccgaggtcggaaagcagcttgagctggaaggtgtggactccttcaagaagagctttgacagcctactcgtgagcctgcaggagaagggcaacagcctcaagacggcaactgtgtaaaactgagaagattgggtaccggcgggtgaacgattttactaaataaaatgctagcttgctggctctcctaatttttacg

SEQ ID NO: 43363 - DNA, 270 bp, Zea mays
aagaaggccctattcatagcaatgaaaactcgagggaatactccaaagtatgggcttatattccactcctcatttattggccgtgcttcaaccaagaacaacggcagaatggctcgttacctggcagacgaatgctcgattgctacacgcattgactgctactcggaggctagtacctctgtctttgggcaatagttgcgcgagaagtacgaggagcgactggaattctatgacaagggtgttgcgcctcgtaaaaaccttgatgtgatg

SEQ ID NO: 43364 - DNA, 288 bp, Zea mays
ggagttgtgagtttccaagccccagctcactctgaccacttctctgcctgcccagcatcatgaagggccttgcagctgccctccttgtcctcgtctgcaccatggccctctgctcctgtgcacaagttggtaccaacaaagagctctgctgcctcgtctatacctcctggcagattccacaaaagttcatagttgactattctgaaaccagcccccagtgccccaagccaggtgtcatcctcctaaccaagagaggccggcagatctgtgctgaccccaataagaagt

SEQ ID NO: 43365 - DNA, 293 bp, Zea mays
acgaactggaggaactgagcggtggggcccgcgcggccaagttatcctgttcgctaccgtgatgtttaccctagtccagagggtttatcttcgttcgtgtcgtgtttgttgttgcccatctgtgtttttgattgcaaggtcgctctgtgtcagttgttagtgctgtgttcatcctcggtttcagcagacccatgcatcaaacagcatggactgcggatcgatggatgctgttacccccgtcaggctttattctaagttaatcttaaggaaaaaatggtgcttcttggtgctgc

SEQ ID NO: 43366 - DNA, 292 bp, Zea mays
actgaatcagtccactgacagaattaaagagagccgaagaactatgttggagacagaagaacttggtgtctcgattcttcaggaccttcaccaacagaggcagtcactactacatgctcatactactttgcacggagttgatgataacattggcaagagcaagaagatcctggctgcaatgtcaaagaggatggataggaacaagtggatcattgggggaatcatcacggctctcgctctggccatccttttcatactctacttcaagctcgctcattaagcttgcctgcag

SEQ ID NO: 43367 - DNA, 292 bp, Zea mays
acccagattgttggggatgccaaggagaagaataggaagttcactgagactgtggaacttcagattggtctgaagaattatgatccacagaaggacaagcgtttcagtggctctgttaagttgccccatatccctcgtcccaagatgaaggtgtgcatgcttggtgatgcccagcatgttgaggaggccgagaagatgggacttgactacatggatgttgaggctctcaagaaaatgaacaagaacaagaagcttgttaagaggcttgccaagaagtaccatgctttcttgg

SEQ ID NO: 43368 - DNA, 285 bp, Zea mays
agagggagttatgaccatgcaagtgggtgaagttgctcgtatccagtgcacgcctgattatgcttatggagccggcgggttcccagcctggggaattcaaccaaactcagtgcttgtgttcgagattgaagtcctcagtgcccagtaattcgcatctgtcagctaaagaaacgttggccatgcttctcaagtaatgaaataattccgttgtcacctcatgctacatacagcagattggtgttacgagttaaatcctgtgaaactttagcattctgtaaccgtgga

SEQ ID NO: 43369 - DNA, 285 bp, Zea mays
ctgtggatcttgcaacggtggtcccgacactcgaaccgtcgggaatcgatctcctatctaagatgctgcgtctagatcccagcaagaggatcaccgcccgcgccgccctcgagcacgactacttcagggacctcgagcacgcctagcaggatatggatggatggatgaaccgtttcccctcccctgctccctctgtaaattacggtagcagccgcgatgcttggggccggcgagtacccccgtctgggcggccgttgagttatgtgtgttactctatagtatgac

SEQ ID NO: 43370 - DNA, 283 bp, Zea mays
aaaaggttctgcaatcactggacctatcggcaaggagtgatgtgacctttggcctaggatcgctagtgcagcaaatgccatcgtttgagagcttgttggaatgtgtttagacttgagtatgatcatctcaattgtgtgttgcagctgttgtaagggtgctattggacttgatggctccttttatgtttggtcactcaattttgtagtgaacagaaatttgtctaccctggttgcctcaagtttgctgtctgagatggttatattatttattttgttctaaaaa

SEQ ID NO: 43371 - DNA, 304 bp, Zea mays
ctaccatgctggtttttggggtgtcatgggacgggaatgtattggcattgtccctccatttattagagaatttaattatccgatggccaaaaattgtgccggtggggatacaggtgtttttgtcaatggcagagaactgcatcaaagagatttagatttacttgtaggaagaggactaccacggacatctggcatgtcatattctattgagatgtcaggcaatgtaatcgatgaagcaactgggaaaaaactgcgcagtcttggaaaacttgctcctacgattgagaagttgaagcgtggtttt

SEQ ID NO: 43372 - DNA, 299 bp, Zea mays
gccctccaggcgagcaccctcaaggcctgggctggcaaggtggagaacgtggagaaggctagagcggccttcctcgccaggtgcaaggccaactccgaggctaccctcggcacctacaagggtgaggctgccgccgacaccgagagccttcacgtcaaggactacaagtactgagttgcttctctttgcgatcccgttgttttggaactcctgcctgcgagtaggttgctgagtgttgtttgcttgttagagctttctatattcggacatgaaaaaaacatgcttcctatgtggatgat

SEQ ID NO: 43373 - DNA, 299 bp, Zea mays
gaagcagtagatcttgttgacaagtgcatcaaggagattcggctgcgattggttgtcgcgcctcagaactttgttatcaagattgtcgacaaggacggggcgagggagtacgccaggcgtgaactcgtcggtgacaatgcacctgctgaagctgcaaccgcagttgttgctgcctgaggcatgaactcgtttgaggttgaaatgtgttagttgtttctcagcgatgctacttatgcgatcacaggatactggtggggggcccacaactgttttatcaattttagcacagtcgtgtaatt

SEQ ID NO: 43374 - DNA, 299 bp, Zea mays
caagaagccatgggccctgtccttctccttcggccgtgccctccaggcgagcaccctcaaggcctgggctggcaaggtggagaacgtggagaaggctagagcggccttcctcgccaggtgcaaggccaactccgaggctaccctcggcacctacaagggtgatgctgccgccgacaccgagagccttcacgtcaaggactacaagtactgagttgcttctctttgcgatcccgttgttttggaactcctgcctgcgagtaggttgctgagtgttgtttgcttgttagagcttttatatt

SEQ ID NO: 43375 - DNA, 299 bp, Zea mays
gtggcacagaagttgtggaggcaaaggctggatcaggctccgcgactctgtcaatggcttttgctgcttctaaattcgctgacgcatgcttgcgagctatgcggggcgaactggaatcgtggaatgctcatatgttgcatccgaggtgacagaactgccgttctttgcaacgaaagtgaggcttggccgtggtggagccgaggagatcctcccgcttggccctttgaatgatttcgagagagctggtctggaagcggcaaagaaggaactgggcgagagcattcagaagggcatcgctt

SEQ ID NO: 43376 - DNA, 289 bp, Zea mays
ggaagaggaaaatctgatacgttttggctgcacactctgctggctatgattggtgaacaattcgactatggtgatgaaatttgtggcgcagttgtcagtgtgcgtgggaagcaggaaagaattgctatttggacaaaaaatgctgccaatgaagctgctcaggttagcatcgggaagcagtggaaggaacttctggactacaaggactccattggattcattgttcatgacgatgcaaagaagatggacaaaggcctgaagaaccgttacacggtttgatcctgatgct

SEQ ID NO: 43377 - DNA, 283 bp, Zea mays
gtggttctgtgactacaagtacaatgatgagaacaccgtctcctttgtgaccctgaacaaggttggtggattcctgcagcggatggacctgtgccgcaagtacgcctttgggaagatgctcgtgataggctctgagccacccttcaagctgaagggcctttggctcttccgtggccaggatgttcccaagtttgtaatggacgaggtctatgacatggagctctacgagtggaccaaggtggacatctctgatgaggcccagaaggagcgtgtcaatgcgatg

SEQ ID NO: 43378 - DNA, 292 bp, Zea mays
ggtattttcaagcagctgacgatgcgtattcagtggcacctcatcaatgactggctttgaggtcaggttccagatagaagcaaatctgtctgcttcagcaatctgtccatcacttgtgaagcctcctgaatacatgcccgagaacctagcaaggtactcggcttggttgggtggtgcgatattggctaaggtcgttttccctcaaaaccagcatgtgaccaagggcgagtatgatgagacggggccgtccattgtgcacaagaagtgcttttagagacaaatgccttgaact

SEQ ID NO: 43379 - DNA, 155 bp, Zea mays
gtctagtttaataattatctgcaaggatatagagctaccttcccaagactttatcatcatgttttgttagttttggttcttgaacagcgtttgcagcttagctgtaatgctttaattcgactttctatatattgttgaaccgtgttgtcgacacc

SEQ ID NO: 43380 - DNA, 308 bp, Zea mays
cagaaaaatccccagttctttggtccgcgtcagagaggcggcggcgatgtctgggcgcggcaagggcggcaagggtctgggcaagggcggcgcgaagcaccggaaggtgctccgcgacaacatccagggcatcaccaagccggcgatccggaggctggctaggaggggtggcgtgaagcgcatctcggggctcatctacgaggagacccgcggcgtgctcaagatctttctcgagaacgtcatccgcgacggcggtcactacaccgagcacgcgcgccgaaagaccgtgaccgccatggacgtcgtct

SEQ ID NO: 43381 - DNA, 293 bp, Zea mays
ggctgaacaaggctgcagaggtgactctactgaacatcaagtgcgtaaacaagaagacaggggagccgtgccagggggcaagggtggagaagtacagggagatgctggtgaagaaggcggaggagcagggcgcagagtttgtgtccttcgacgctgtcaagggagagtggaagttcagggtgaagcacttcagcgcctacgggctttggtgaaatcctggggagttaagtagtttgtttgttctgatagagcaacgctttacgctcttgtcaaataccatgcttggatctgtt

SEQ ID NO: 43382 - DNA, 290 bp, Zea mays
ggtaaacctgcaggtgccctgggtcattttgggacattctgagcgcagagctctgttgggtgaatccagtgattttgttgctgataaagttgcatatgcactcactcaaggtctcaaggtaattgcttgcattggtgagacccttgagcagagagaggcaggaacaacaatggatgttgttgctgcacaaacaaaggctattgctgaaaaaatatcagattggacaaatattgtgttggcatatgaaccagtttgggctattggtaccggcaaagttgcaactcctgctc

SEQ ID NO: 43383 - DNA, 292 bp, Zea mays
gattgttcctgatcgaaacccgaactttttggcaaatgagtgccggtggtgcttttggcggaaataggggggtgaggcctgtacctcctgaaaaaggtgtgttcccattggatcacttacatgagtgcgacttggagaagaaagattatcttggctgcctgaaatctacaggattccagtctgaaaaatgtcggaagttctcaaagaagtatttggagtgtcggatggagagaaacttgatggccaagcaagacatgtcagagcttgggttcagaattgtggatgaagcggg

SEQ ID NO: 43384 - DNA, 288 bp, Zea mays
gctgatgacatggaagctctgtacaagaaggtccatgctgccatccgtgctgatccttctgtggtcaagtcaaccaagcagccaccaaaggagcacaagaggtacaaccccaagaaactgacatacgagcagaggaaggccagtctcattgaaaggctcaaccaactcaactcctcgggcggcgcagatgacgacgatgaggatgacgagtaaagtttggtcccatcgaagtagtgctatcttatgcggcgatcagtatttgtgctatggcatttatcgctacctgta

SEQ ID NO: 43385 - DNA, 275 bp, Zea mays
gtcgagggtgcaaccaagtttctccttagcaagctgaaggacctccaattttttgttggtgagtccatgaaggatgatgcgtctgtggtattcgcctattacaaggatggtgccactaatccgacattcctctatttctctcatggtcttaaggagatcaagtgctaggcgtgcggcgaaattagttacccatgttgggtactatctatgtactattattatatccaaaactatagttgtcctggctgaattgaactcaaaagggtttgtttgag

SEQ ID NO: 43386 - DNA, 286 bp, Zea mays
cgaacataatatcttggttgtatccaagtactatgcaagggttaccctcgagaggcttgctgatcttctttgcctgactttgcaggaggcagagaagcatctctcagacatggttaactcgaaatctctagtggcaaagatcgacaggccgatgggagttgtcagcttccggacgacccaagacagcaatggcacactgaactcatgggccacgagccttgagaacttctggacctcgttgagaagagctgccacgagatacataaagagaccatgatccacaaga

SEQ ID NO: 43387 - DNA, 202 bp, Zea mays
ggttattatggcttaggtacagcacctttatgttgttgtatcctactggtatctctagtgaagttggtctgatctacattgccttgccttacatgaaggcatcggagaaatactgtattaggatgcccaacaaatggaacttctcatacgattacttctattcatctgtccttggcctcctgatctatgttccaggaagcca

SEQ ID NO: 43388 - DNA, 180 bp, Zea mays
actgtgtttttgattgcaaggtcgctctgtgtcagttgttactgctgtgttcatcctcggtttcagcagacccatgcatcaaacagcatggactgcggatcgatggatgctgttacccccgtcaggctttattctaagttaatcttaaggaaaaaatggtgcttcttggtgctgcaaaaa

SEQ ID NO: 43389 - DNA, 305 bp, Zea mays
aacaaaagctggtgttcactttgttcaactactcgatgatgacggtgtggctttcgataaccttttctgtgtagcatttcaggtgcttgattctcaatggcttgcaaggcgagcgagttatatggaattcaatgaggttctgaagtctacacggggtcagttagagcaagagcttactatcggaggtatttctcgcattcaagacatgccatcattcagaatgctgagaaggtagcgctgtttgtacttcacaggaaaagagatacattttagattccaatatattgtttaaatttgttgtccgt

SEQ ID NO: 43390 - DNA, 303 bp, Zea mays
ctcaagaatgcagagagcaatgctgaggtgaaaggacttgatgtggataccctctatgtgtcgcacattcaagttaatcaggctcagaagcagcgacgcaggacataccgtgctcatggacgcatcaacccttacatgtcctccccatgccacatagagctcatcttgtcggagaaggaagaaccagtgaagaaagaggccgagtctcagatcgcaaccaggaaggcttagagaaggggctctatcttctgtgattggcttagtacaagttttggctgattatttgttgtctcatactgttta

SEQ ID NO: 43391 - DNA, 302 bp, Zea mays
cctagcgccgccgccgccccagctcgccttgcgtgactgagagctcgtcggcttccgtccacgcgtgaagcgagagcatggacacccaggtgaagcttgctgttgtggtgaaggtgatgggcaggaccggctccaggggtcaggtgacccaggtcagagtgaagtttttggatgaccagaaccggctcatcatgaggaatgtcaaggggcccgttcgcgagggtgacatcctcaccctgctcgagtccgagagggaggccaggaggctgcgctgaagccctagcgttcttggtgggctcttg

SEQ ID NO: 43392 - DNA, 288 bp, Zea mays
aagccatggaggttctccgctcagcccagcatctccagcagagcaatgcctccaccgagcagcagctggctaatctatcactgaatgatggcgtcctctccagctgaatgtttctgatgattcagaaattgctggcaatttttgcttgatacctatctctagaatgcaattactttgtttactttattggaattttaggtgctgctctataattagctgaactagggggtggatttaattgccttgaattggttattttggttatatgaatatgttatgtcggagctc

SEQ ID NO: 43393 - DNA, 299 bp, Zea mays
aactgagtgcagtgttgagcactctgtcattggtatccgctcaaggttagaaccgggagtgcagctcaaggacaccatgatgatgggggcagattactaccagactgaagctgagagattatctgagctgtctgttggaaaagtcccagtcggtgttggagagaacactaaaataaggaactgtatcattgataaaaatgctcgaattggaaagaatgtagtcattatgaactctgagaatgtgcaagaagcagacaggccagctgaaggatattacattcgttctgggataactgtgg

SEQ ID NO: 43394 - DNA, 302 bp, Zea mays
agattttctcgataagctcctgcgctatgatcaccaagacaggcttactgcacgggaagctatggcacatccctacttccttcaagtcagagctgtggagaacagtaggacgagagcacaataatcatggtctgcactcttgaaatggagttgttgctagttcgtgaaaatcataggcttaaatccatgttcagtattcacatcgctccaggaatctgggccatgactccatggcaatgaatcaaaatagtacgagccgcatcatgtggacaaccttggcagatctttttattcttgtcttt

SEQ ID NO: 43395 - DNA, 296 bp, Zea mays
agagaaacatcttgagactagttattcataccttgacgttgttggaaggacgacggttgtactgaagaagaaaaatgttgtaggggagcacaacgttcctttccaggtgtactatgaatttcaatccgatcttcatgctggcggaaccattgatgctgatatctgcagtgttgctgtttttcgttgccttcattgcgatatcttcacatggatctttccatcagaaaatcatcataggcctgttggcaattctgtccaccacagtattttttgaggcacatgttctgctaactgtg

SEQ ID NO: 43396 - DNA, 297 bp, Zea mays
ctcgcattcggcggcacatggtggcgcgccttgctccacgttctcggcatatgctatggcccacaaggggaaggcgacgtccgacgtcacctacaacccgaatgacgggcccgaggcgtacaccaaccccgccgtccacaaccgcctcagtgagtacaccgccatggccaaggaagtccacgggccagattacgatccgaggaccgaggacatcgacggagatgtcctcatgagggtcggaggaggcaagaggcatgggcggtactggattgccgacggggcaatcgactcgtcctc

SEQ ID NO: 43397 - DNA, 295 bp, Zea mays
catggtggagcaggagctgcctggaggcgggctcctcgtgtaccagagcttctgtgctgctgaagacgctgttgctacctcgcccaaatctgttttccactgctttgacggcgagaacgtggagagtgctcctcctcctatgaagaaggactacaagctggctaatcttctctgctgggaggaggaagcggatgccatggaggagaaggcgggagtgcttgatgagtaagacgggcttctggggtcgatttgcttctgagttgtttattttatatcgtcgcaatttcgtggttgt

SEQ ID NO: 43398 - DNA, 294 bp, Zea mays
tacatgtgaggatttcttttgcttgagtggacagtagcacctgtatcattgaactcattttgtatcagagcaattttgcttgcagaaagctatgaaataaaacacgtcccttaactgcaaaaaaaaagaaaaagaaagacaaaaaaattggagttcaaattatcaagaattctttgaagggtcacttgatgaccatagctgcaaatgctggcattgatggagctatagtcataaggaagctgattgaacaagaggacctcagtttgggctatgatgcagcaaaatgggagtacg

SEQ ID NO: 43399 - DNA, 296 bp, Zea mays
acgatggtcgcaccctcgcggactacaacatccagaaggagagtacccttcaccttgttctccgcctcaggggtggtatgcagatctttgtgaagaccctgactggaaaaaccataaccctggaggttgagagctcggacaccatcgacaatgtgaaggcgaagatccaggacaaggagggcatccccccggaccagcagcgtctgatcttcgccggcaaacagctggaggatggccgcaccttagcagactacaacatccaaaaggagagcaccctccaccttgtgctccgtctc

SEQ ID NO: 43400 - DNA, 292 bp, Zea mays
cttctacaactacgatatggagaaggcagaatttgcacggcctctttgcgaagttcacccaggatttggcgctgatcggagctctgctcttctttctgggcatgaagaactccatcccgaagcggcagggcggcaagaagaaggcccccaaggcgaagacgaactagggctgcttagatagctgcacgcctcaggcggggtgtatcaggagacaggtctatttcgaagcaggcccagcgcgatgcagcgaatgccatcgagctgcgcttttacatgtttatcatcagattcc

SEQ ID NO: 43401 - DNA, 127 bp, Zea mays
actctgtgtcagttgttagtgctgtgttcatcctcggtttcagcagacccatgcatcaaacagcatggactgcggatcgatggatgctgttacccccgtcaggctttattctaagttaatcttaagg

SEQ ID NO: 43402 - DNA, 291 bp, Zea mays
caagatcagcggcacccactaccgctgcatctggggcaaggtcgcccgcccgcatggcaactccggcgtcgtccgcgccaagttcaggtccaacctgccgccggaatccatgggccgtaaggtcagggtgttcatgtaccccagcagcatctaaagataatctgaatgtgtggaggacccttttcttctagattttatcttcagctgtccttgtaagggttgtgttcaggttgagagttagcaggttgagctgtctatctgagaaccatttaaagttctctgagttttggt

SEQ ID NO: 43403 - DNA, 279 bp, Zea mays
cttgatgtaggtgttaaggagatcgagggatggacggcgaggcttcttccatctcgccagtttggctacatcgtcctaacaacttctgctggaattatggaccatgaggaggcccgccgtaagaatgttggtggcaaggttctaggtttcttttattgaaaatgtgtttttttgagccacagatgcgtccaagaactcgtctgatgttttgaggtttgttaagactgggtgtccgagcctttgtggtttgttaagacagcgatgtgtcatgtatttcag

SEQ ID NO: 43404 - DNA, 283 bp, Zea mays
caaatgtatcaagcttggcttcaaaatgttcttgggcgtgactgcaaccgtgaccaattgggatgctgagggtacaagttgcagccttgtcctggaagacaaccctcttgttgatttcgttgagctccctgacacttgccaaggccttcagtattgcaatttgttaagtggagttattaggggggcattggaaatggtgtctatgaaggcggaggtgacatgggtgcgtgacatgcttcgcggggacgatgcctatgagatgcgggtgaagcttatcaagcaa

SEQ ID NO: 43405 - DNA, 284 bp, Zea mays
attcctcgtctgaagacaaaccaactgagatggagtttcactggtgcttttgaggcaagacagtcgctgatagttagaggcctctttccgatgcttgcagatcctcggcatccagccgaatcaaccagtaatacaaatgagtcagttctgaaggttgctctagaccatggcaaggcatgtggtgtgatcaagtcccatgaccgtgttgtcgtttgccagaaggtgggagattcatcggttgtgaagatcattgagctggacgactagggcatactttgccgatt

SEQ ID NO: 43406 - DNA, 288 bp, Zea mays
actccgtggtgcggacgcgctgaagcccatgatgtcggaggtgcccttctgcctcttcctgctcatggacatctactggaagtacgagacgcgccccacctgcgacgacgagcacgcctgcaccccctccgagcacctccgccaccagaagtccatcatgaagtcgcagcggaacgcgctcctcatcgccgccgcgctgctcctctactggatcctcttctccgtcacccagctcgtcgtcaggctcgagcagatgcagcagcgcgtcgacaagctcaggaagcgcga

SEQ ID NO: 43407 - DNA, 288 bp, Zea mays
tgtgcagcaagctgctgcagtacgtgtactggtccaacggccgcgagaccgacaaccccagcgtcgacaacaagcagtgccccgggaagaacttcgtggtgctcgtcggcaggctcctcctcgtcgagctcttcctccgctacgacacattcaccgccgaggtcggcaaggagctgctcggcaccagcgtcatcttcaccggtgtcacgaaagctacctccggtccgggcagcgagtaaaccgcccggccggcgcgcgtcgttggatatatgatgagtggacgtgaca

SEQ ID NO: 43408 - DNA, 287 bp, Zea mays
gtctctcgtgcagatcgagggggtgaacaccaaggaggatgtcgcgtggtacgctggcaaggcatggcgtacatctacaaggccaagaccaagagcaatgagacccgctacaggtgcatctggggcaaggtcacccgtccgcacggaaactcgggcgtcgtccgtgccaagttcatgtccaacctcccgcctgagtccatggggcgcaaggtcagagtgttcatgtacccgagcagcatctaaggttttgttggagtaaagatggactagaaatggccatgtgttta

SEQ ID NO: 43409 - DNA, 312 bp, Zea mays
gttgccggcttcaccacccacctgatgcgccgcatccagcggggccccgtccgtggcatctcgctcaagctgcaggaggaggagcgggagcgccggatggacttcgtcccggagaagtcagcgctcgaggtcgaagagatccgcgtcgacaaggagaccatggagatgctcgcggcactcggcatggccgatctcccgggcgtagagcgccaggctgaggtctccagcgtccccgcctacggccgcccgcagtacggaggtccccgccgtgaccgcgtctaggtttaccgccgatcgcagtggttgcgtcgt

SEQ ID NO: 43410 - DNA, 291 bp, Zea mays
caagaagctggccaagaagatgcgccagaaccgccccatcccctactggatccgcatgcgcaccgacaataccatcaggtacaacgccaagcgcaggcactggcgacgcacgaagctcggcttctgagcggtggaagagatgatggccaacgatgcttgtggaggatagagctctgcaaaagctaggaagctcttgtttaagattttgttgtgttaaagggagctgactgagaatattgttctctctgatggttaaagaactgccttttatgttatgctgaatttatcgtg

SEQ ID NO: 43411 - DNA, 166 bp, Zea mays
agtgcctgcgtcgtctggtgccctctctccatatgcacgttgtcaaagtatctgctgttcgtgtcatgagtcgtgtcagtgttggtttaataatggaccggttgtgttgtgtgtgcgtactacccagaactatgacaaatcatgaataagtttgatgtttgaactt

SEQ ID NO: 43412 - DNA, 305 bp, Zea mays
cgcttgatgctccctcttccttcacctaaacgaatgtggattggagctagactgatttctggtgcatgcggcatcatcctccctatcatcaaagctgaaggcgtgagacagatgttcttccctgctacagtacccgcatattaccgggccgcacctacgggagaaaaggcatgaacagagaaccgattccgtgctgctggtccgaccatgaatgatctcatggcaactgatgtttcacggatgacatttttcctttgctagtggttagttattggttattgttagaccgtcgatggaacgaggaa

SEQ ID NO: 43413 - DNA, 300 bp, Zea mays
cgagacaaggaacttcctcggcgagaagaaggtcagaaaggtggacatgcttgacggcgtgaccatcctccgctccgagaaggtcaaggacgagcttattctcgatggcaacgacgtcgagttagtctctcgctccgccgccctcatcaaccagaaatgccatgtcaagaagaaggatatcaggaagttattggatggtatctatgtgagcgacaagggtgtgatcgaagaggagcagtgaaggacaagttatcgtttgagttggaatatcgtttggtttcaatttctcagggtgacttt

SEQ ID NO: 43414 - DNA, 311 bp, Zea mays
cgccaagaagttcactcaggtcgtgttcctgaaggtggacgtggacgaagtgaaggaagtcaccgcggcctacgaggtcgaggcgatgccgaccttccacttcgtcaagaacggcaagacggtcgcgaccatcgtgggtgccaggacaggacgagctcctggcccagatcgagaagcatgccgcgcctgcgcctgcgtctgcgtctgcctaaaggagatcagatcagtcgtcgccgtcaataagggccagcacgtatggctgtaaatgttgtcgttatcagttctggctttgtcgtttgtgggcgattgtg

SEQ ID NO: 43415 - DNA, 313 bp, Zea mays
ttctgccgtgtcgcaggctgcaacggcactgtggccactgctgcattcgcggccagtgctggccaccatgtgtttgttcatgatgctatgtttgaggatccatcacaggcactgccattctcttggcagtaggattgttttgttgtcctgtttttatgtgctcctgttgtgttctcgatcgatactctagtgtctgatggctgggaattcggggtacctgtgcacttgcagactcaggttgtggtccgtcagagatgtatacaagtgacacgacgactagtgctggcatctgataagaagtggtagctgctgt

SEQ ID NO: 43416 - DNA, 297 bp, Zea mays
gtgctcctcctcctatgaagaaggactacaagctggctaatcttctctgctgggaggaggaagcggatgccatggaggagaaggcgggagtgcttgatgagtaagacgggcttctggggtcgatttgcttctgagttgtttattttatatcgtcgcaatttcgtggttgtcgtttggttattctgtgaagcagccaagccaggctattgttatgaaaatttgtcgtctgtaagcatgtgaacttccgatgttgccacatgctggatcagtctgaataagtaagtatgcagctctagg

SEQ ID NO: 43417 - DNA, 103 bp, Zea mays
ctcgagcgctcggtttcagtagacccatgcatcaaacagcttggactgcggaacgatggatgctgttacccccgtcaggctttattctaagttaatcttaagg

SEQ ID NO: 43418 - DNA, 296 bp, Zea mays
  unsure (1)..(296): unsure at all n locations
gccgaattagcgcgacgggctatttatggggcaacattccgtgatgcagcaagtggtggttgtgttagtgtttaccacgttggccctgatggttggacgaagctttctggggatgatgtcggggagctgcactaccactactacccggttcagaaaactccggttgaacaggagatggccgatgcgcctactgcttctgcttaaacctgttgctgagaagaccttgagcggaccgcatgtatccatgaaccatgaattgtagaagcgccatgtntatgaacgaacttggacatgtt

SEQ ID NO: 43419 - DNA, 289 bp, Zea mays
  unsure (1)..(289): unsure at all n locations
gctgtgttggagccagagaaagcggatgagttcaaaaagggtgtcgagggtgcaaccaagtttctccttagcaagctgaaggacctccaattttttgttggtgagtccatgaaggatgatgcgtctgtggtattcgcctattacaaggatggtgccactaatccgacattcctctatttctctcatggtcttaaggagatcaagtgctaggcgtgcggcgaaattagttacccatgttgggtactatctatgtanctatgatatatccgaaactatagttgtcctggct

SEQ ID NO: 43420 - DNA, 319 bp, Zea mays
cgaagggcgccgccgtccatgtggcaactccacacccagcaaaaggcaagaccattgtaaacaatgacaaatcggtcaagtctccaaaatctgcgccgaaatctggtgttcctttgaaaatcgtgcagcaagtcattcatcagtgagacggcacttcaggctcactcgaaggcgaacatgggggcaagtgagtcgcaggtccaatagagtcaacaacaaatgcggaacatgggagaggagtgtaagcgagagtctcgaaagagtgtcggtggaagtaggcctaaccttattttgtttagagacgggctatgcgttcgat

SEQ ID NO: 43421 - DNA, 311 bp, Zea mays
gagattgagaagtctacctccagcatcttcccacttcaaaacgtcttcatccgcaaggtgaagatactcaaggcccccaagttcgatcttgggaagctcatggaggttcatggcgactacaaagaggatgttggtgtgaagcttgagaggcctgtcgagggagatgaggctgtgcaggaggttgctgctgccgagtagtttgtttgctacttctatatctaggcgagtctggacatgaggttgcttatgacgtgaacttagagttgtctacttgttttcatctgcccctaagattttgtctggaaacaagt

SEQ ID NO: 43422 - DNA, 328 bp, Zea mays
cagaccgacccaccacgcgcggaagcaactacgcggcagccatggtgaacgttccgaaaaccaagaagacctacttgaagaaccagggattcaggaagcaaaaccttgaacaaggttccccagtccaggaaaggtaaggatagcctttcagctcaagggaagcgacgttatgaccgcaaacagtctggatatggtggtcagacaaagcctgttttccacaagaaggcagaaacaacaaagaagattgtgctgaagctgcagtgccagagctgcaagcactactctcaacacccgatcaagaggtgcaagcactttgagatcggtggtg

SEQ ID NO: 43423 - DNA, 311 bp, Zea mays
ggaaacctcgaggaggcagcaatggtggatgtttggatcgaggtggaggctaaccagtacaccgctgcactgaatcccatcctcttccaggtcctcatcagtcctatgcttgggtcaaccaccgaccagaaagttgtggatgagaaccttgagaagctgaagaaggtgctagaggtgtacgaggcacgcctgaccaagtgcaagtaccttgctggagacttcctcagcctcgccgacctgaaccatgtgtctgtcactctctgcctgttcgctacgccctacgcatctgtgctcgacgcctacccgcatgt

SEQ ID NO: 43424 - DNA, 309 bp, Zea mays
ggcttggctggaatagaagctgccgaggcctcagcagatctaatgaaggccaatatggcccgcaaggaggctgcagaagatgaacctgtacagcatgaagagaagcgactagccacttggggaaccgacgtgcctcaggatcttgttcttaatgagaagaagctggaggaatctctcaagaaggagactgcaaggagaaaagaggagaaggatgaaagaaagaggaagtataacgtgaagtggaacgacgaggtgactgcagaagacatggaggcttaccgaatgaagaggattcaccatgacgatcct

SEQ ID NO: 43425 - DNA, 315 bp, Zea mays
caagctctgtacaagaaggtccatgctgccatccgtgctgatccttctgtggtcaagtcaaccaagcagccaccaaaggagcaccagaagtacaacccccaggaacctgacgaccgaccagaggaaggccagtctcattgaaaggctcaaccaactcaactcctcgggcggcgcagatgacgtggatgaggatgacgagtaaagtttggtcccatcgaagtagtgctatctaatgcggcgatcagtatttgtgctatggcatgtatcgctacctgtagtcgtgcacatgcatgtaggttaagttgtcgatcgaac

SEQ ID NO: 43426 - DNA, 242 bp, Zea mays
atgatggccaagtgagatgatgtgcctgttttgaagctagttcctctcttgatggtagtagctagtctagtgttggagactgactgcatttggtccgccctgttcctcctcgttgaatcattggacatatcggtttgtttcctcccaagggattttaccatgtcggtaattccgttcaatgttgtttatggttgtattaacatttgtgtaatcttggtacaatgatcatgcctttcccttct

SEQ ID NO: 43427 - DNA, 304 bp, Zea mays
ctccttcaacaaagttcaacagtagctgactcatcattgtttacgtttgctgatggaataactgaatctattcctcgatcatacattgaatttgctgaacgtctcctgttaccacagttcaaagatttacaagatgaagaggtgaaagaataccacaggcgtgatggttttgaggtgggcaatgcggacaagatattcgaaagtacatcgaaggatcagctgacgcggagatctgcatgaacagtgaactctagatctgcatatgaccccgtgaactctctagatctgcaaacaacccagtgtg

SEQ ID NO: 43428 - DNA, 293 bp, Zea mays
cggcgacaaggcaccgcagatcgacgtcacgcagttcggctacttcaaggtgctcgggaagggggtgctgccgcccaagcccattgtcgtcaaggccaagctcatctccaaggtcgccgagaagaagatcaaggcagcaggcggcgccgtcgtgctcaccgcctaggtttcagtccttgttcgcctcctggttttgaaatctatatctgaactgatagtgctttcctgtctcagcaatttgtgttaagaaaacctgtagttttaaaatatgtggttcctgcctgttgggcagt

SEQ ID NO: 43429 - DNA, 217 bp, Zea mays
gaaaagagggccgagttcgtccggattgttgagtcaattggacgggaaaatttcgtggggcacaaggaggcccaggttctagatgatgacgatttcgtgttgatcagtaggtactaggaaaatgagtttgctagtctatgtatcttggcgaataaactactagtttgtaccttgcgttcagacttcgttctgttgttcatcagtcgttggtttcgtc

SEQ ID NO: 43430 - DNA, 284 bp, Zea mays
ctttgagaaacctttcctgtaccttgcaaggaagctggctggcgatccgaaccttcactttgttgaagctgttgctcttaagcctccggaagttaccatcgacatggctatgcagcagcagcatgaagctgagcttgctgcagcagctgcacaacctcttcctgatgacgatgatgatctgattgagtagaaaggatcatgagtcttggacttgagcaggagttgtgccttgcacgatttaagttgttctagggtggactctctcttgagttatcattgtctgg

SEQ ID NO: 43431 - DNA, 291 bp, Zea mays
ccggaacatcaccggcaacccggaagtcagggtaaacaaggcagggagggcagctggtgtgcttgagaaccatgaggaggggaggcgttacgccatgcatggcctaagaagctttgtgcacgacaagactcctgagatcatgcctgcagttaacaagttcttcactgaccctaagtgaagcatgttgattggcatactactactactacttgctactggggattttacactttgctggcaactcaatatgttggggacatccctgacctctaaaagtacttttgagtgctt

SEQ ID NO: 43432 - DNA, 289 bp, Zea mays
attgaaagggttagaaagttgcttttggctcacgacttggcaactgctgctgagctcaaggatatggagaaagaaatcaggaaacaagtagatgacgccattgcaaaagcaaaggaaagttctatgcctgatacttctgagctcttcacaaatgtttataagaagggattcaacgtggagtcatttgggcccgacaggaaggagttgagagctactcttccgtaggttgggagaatggcagtcctcaatatgatatgatatccaggagaaataaacattgatgaagaag

SEQ ID NO: 43433 - DNA, 255 bp, Zea mays
gcagtacgtgtgggagtcccaagcgggcgggtcgttcactgttactcgtgacacgtcaggggagcagcttggcaggggcactaagatcacactgttccttaaggacgatcagctggagtaccttgaggagcgtcgcctcaaggatctggtcaagaagcactctgagttcatcagctaccccatctccctgtggactgaaaagacaacagagaaggaaatttctgacgacgaagacgaggaagagaagaaagatgc

SEQ ID NO: 43434 - DNA, 275 bp, Zea mays
acgaaaaagagcaaccatgtcacgaggaagcttgagaagcgcaaggagggacgtacccttgacccacacattgaggagcaatttggcagtggacggttgctggcatgcatttcttcccgccctggacagtgtggccgagctgatgggtacatccttgagggtaaagagcttgagttctacatgaagaagctacagaggaagaagggcaagagcgctgtagcttagagcattctcatggattgtcttgcaccgaaatgtgtgtcctgatgagtaca

SEQ ID NO: 43435 - DNA, 298 bp, Zea mays
atgggagaatcagccgtggactgtggcagtcttgcgtccatgcctgacattgcgttcaccattggaggcaagaagttcaagctgaaaccagagcagtacattctgaaggttggtgaaggacaggctgcccagtgcatcagcggattcacagctatggatatcccaccaccccgtggccctctctggatcttgggtgatgttttcatgggagtctaccacaccgtcttcgactatggcaagctgagggttggcttcgcagagtcggcctagggatatggtttggcagcaccgtccagag

SEQ ID NO: 43436 - DNA, 285 bp, Zea mays
gctgcctggaggcgggctcctcgtgtaccagagcttctgtgctgctgaagacgctgttgctacctcgcccaaatctgttttccactgctttgacggcgagaacgtggagagtgctcctcctcctatgaagaaggactacaagctggctaatcttctctgctgggaggaggaagcggatgccatggaggagaaggcgggagtgcttgatgagtaagacgggcttctggggtcgatttgcttctgagttgtttattttatatcgtcgcaatttcgtggttgtcgttt

SEQ ID NO: 43437 - DNA, 291 bp, Zea mays
cggctcgaggtttcaaggacagttgatgcgaacgtgtctgaggcggaaggtgtatacagtgccttggagaagcttggcatcgactgggaagaggttggaaagcagcttgagctggaaggcgtggactccttcaagaagagctttgacagcctactcgtgagcctgcaggagaagggcaacagcctcaagatggcgagtgtgtaaagctgagaagattgggtacctgcgagtgaacgattttactaaataaaatgctagcttgctggctctcctcttagtttttacgctgta

SEQ ID NO: 43438 - DNA, 286 bp, Zea mays
gcacgagggaggcgtggtgatcaaccctggctctgccacgggcgcctacagcagcatcacttacgacgtgaacccaagctttgtgctgatggacatcgaaggactccgtgtggtggtgtacgtctacgagctgattgacggcgaggtgaaggtggacaagatcgacttcaagaaagcagcgacgattcaagcctagcactactatccttccacggtgtgattggtttcaagacacgtctaggttctgtttttattttctcttcttgattcagagctccctcaacac

SEQ ID NO: 43439 - DNA, 287 bp, Zea mays
tgcaaagtgataactctgtagctgatccatctacagaggcattcttttctagcactttgcggtacattgaatttcagaagcagaaaggtgggagcataggcgaaaaatatgaacagataaagacgagttcatgagtcagaactagcgcggcgccacgactggtttcgattttgttgagaattgggtcgtttgtttggcatggttcagtgaaatagaaaccataagttttagctcgctccatgtaaaagatgtttatacgagctgttaattctcaaatctcacggtct

SEQ ID NO: 43440 - DNA, 65 bp, Zea mays
gtagcgtgctaggagatgatatattaaatataatcgagtagtagagccacccgctgtgtgacgct

SEQ ID NO: 43441 - DNA, 293 bp, Zea mays
gaagattgacaagcacatgtatcatgacatgtacatgaaggtcaaaggtaacgccttcaagaacaagagggtgcttatggagagtatccacaagtccaaggctgagaaggccagagagaagacactttctgaccagtttgaggccaagcgcgccaagagcaaggcgagccgtgagaggaagatcgctaggagggaggagaggttggcccagggtccacgagaaataacaccacctgtctcatccacagctccagctactggggcaccgaagaaagcaaagaagtgaagtattg

SEQ ID NO: 43442 - DNA, 281 bp, Zea mays
aagccatggcgccgaaaggatggtgtctacatgtactttgaagacaatgctggagtgattgtgaacccaaagggagagatgaaaggttctgccatcactgggcccatcggaaaggagtgcgctgatctctggcccaggattgctagcgcggcaaatgcgatcgtctaaaggaagcagtttgtcgaagtttcatttaaaatggggacttgagaagggagttcttagttagacgagcctttgattgccctgaatatgtttcccgggctaaatgctgtgctgct

SEQ ID NO: 43443 - DNA, 313 bp, Zea mays
  unsure (1)..(313): unsure at all n locations
cggctcgagtggcgaacatcttgtagaatctgtcaggaaaacttcagcacaactgttaatgcactcactgagcctattgatatatatagtgaatggattgatgagtgtgagcgtgtcaacactgttgaaggcgacgatgatgcgtgagcttgccccatgcgatgaaactgttacctacaatcgtaatgtaatgtgctggtattctcgaatgccatagcccatagtcagccatggcttggaataacgtagtggctgactgatatgccagtagcaactgtctagtacttacagaactacnanaagtttgtactat

SEQ ID NO: 43444 - DNA, 312 bp, Zea mays
ctggatttcccaggtttgatctccagcttctgggaatgggacatgatggccacattgcgtctctcttccctggccaccctcttgataacgagaaagagaggtgggtcacatacattaaggattctccaaagccacctccagagagaattacgattcacgtttccagtaatcaactcatccgcatacgttgcgatggtggtgactggagctggaaaggcggcacggtgcagaaggcgctctcagacaagcaaacctcgtcagacctgctgcctgttgagatggctgtgctacaagatggagaattcacctggt

SEQ ID NO: 43445 - DNA, 305 bp, Zea mays
aagcttcgtgccaccggaggcaacaagaccaagacccccggacctggtgcccagtctgccctcagggcgcttgctcgttctgggatgaaaatcggacgcattgaggatgttaccccggtccccacggacagcactcgcagaaagggcggtaggaggggaaggaggctgtaggcatctctggctggtcttgcctgctcttggcggtatgaagctagtcctctctgggtggtgtggctgtttccgggtttgcaagacgagcttaattttgcctatgtggagaccgtttacagtactcgacctatatg

SEQ ID NO: 43446 - DNA, 308 bp, Zea mays
gtagatggcggcttcggaggcggcacggcggcggcaacaccggtgacgccgacagaggggacggtgatcgcgatccacagcctggaggagtggagcatccagatcgaggaggccaacagcgccaagaagctggtggtgattgacttcactgcaacatggtgtcctccgtgccgcgccatggctccaattttcgctgatatggccaagaagtccccaaatgttgttttcctgaaagttgatgtggatgaaatgaagaccattgctgagcaattcagcgtagaggccatgccaacattcctgttcatgag

SEQ ID NO: 43447 - DNA, 224 bp, Zea mays
acttgagcttactccgaccctttggtgtggagtgcatgtcagaaacaggattatgaatgctgtgttcagtgcttttcacaaattgttgtattttcaccagaacaatttgccctcaattggaagtgaggaaatccataacgatctataagttatttgatcaaaaaaaaaaaaagaaaaaaaaaaaaaaaaaagaaaaaaaaaaataaaaaaaaaaaaaaaaagta

SEQ ID NO: 43448 - DNA, 303 bp, Zea mays
ggcaaaatttacacaaggtgtcaaggttgaagtctgcagcgacgatgaaggttttcgtggagcctggttcgaggcgactgttgttaaagctgtcggcagcaagttcctcgtggagtatgctacgctgaaggccgatgacgggaccaagcctctgaaagaatctgtagaagcacggcacatcagaccttgccctccagatatccctgccactgatggattcaaactacttgacgaggtcgatgccttctgcaacgacgcgtggtgggtcggtgtggtatccaaggtcctcggcgagaagaggtg

SEQ ID NO: 43449 - DNA, 342 bp, Zea mays
agcaacagcatcttatccgacgtaagctcggcgagtttgctgacgcgagcccgcatccgccgcgcaccagctgttggagaacgtgtttgccgaccccaaaggctttggtatcggccccgatggtaagtacaggtgcgaggatcccaagttcacccaaggcaccgcccaagtttaaggaggttaatctgcgctctgtaccactgtacttgggttctctagttttgtcgatccagtgtaaatctaaggatactgtatgcataaggtggtccatttctttggctcttaggattgtgtctgatactgttgtgtaatttattcgaatgctcaactgatgcccaggtt

SEQ ID NO: 43450 - DNA, 245 bp, Zea mays
cagaaccctactgaggctgagcttcaggacatgatcaacgaggttgatgctgatggcaatggaaccatcgacttccctgagtttctcaacctgatggcacgcaagatgaaggacaccgactctgaggaggagctcaaggaggccttccgcgtgttcgacaaggaccagaacggcttcatctctgctgctgagcttcgacatgtcatgaccaacctaggtgagaagctgacggacaaggaggtgga

SEQ ID NO: 43451 - DNA, 295 bp, Zea mays
atcacttcccttgcaccaagcagcatgaagatcaaggtcgtcgcaccacctggagaggaagtacagtgtctggataggatggtcgatcctagcctcgctcagcactttccaacagatgtggatatccaaggaggagtatgatgagtctggcccggcaatcgtccacaggaagtgcttctaggtaccgcaagttcctcattgttatctagtctcaagtgatgcccccgtcatttctcgagatatgtgtggcagatgtgcctgcgacgattattatcatcggacctgagtcttctcg

SEQ ID NO: 43452 - DNA, 288 bp, Zea mays
cagcagtaccaggacgccactgccgaggatgaggagtacgaggaggaggaagaagaggaagagacctaagtcattctccgcagtgcttggtacagatatgatattccttgtatcgctgttagtactcgtcagtttgaggttcgtgtggtgatgcttgctaggtactagatgggtggtattgcttatgaatgcgatgttgtcgtgacagaactgcatttcattttgtattatggttgttcaagatgttatattaccatgaggcgaggtagcttgactgagtgttgctat

SEQ ID NO: 43453 - DNA, 270 bp, Zea mays
tcactatgcagttctaggtcttgacagatcacgagcgacaccatatacagatgcagaagtgaagactgcttttagaacaaaagcgatggaagtgcatcctgaccaaaatcaaaatgatagagatgctgcagaagagaagttcaaggaggttgtcaagtcttacgaagcaattaaatcggagagaaaaaacggtgtaagttgatgcaaacttccagtgtggtcggatcaagtggtaaagactgggaccggatcacgcgggaatcagttgtg

SEQ ID NO: 43454 - DNA, 280 bp, Zea mays
cttctctgctgggaggaggaagcggatgccatggaggagaaggcgggagtgcttgatgagtaagacgggcttctggggtcgatttgcttctgagttgtttattttatatcgtcgcaatttcgtggttgtcgtttggttattctgtgaagcagccaagccaggctattgttatgaaaatttgtcgtctgtaagcatgtgaacttccgatgttgccacatgctggatcagtctgaataagtaagtatgcagctctaggtggtcagctgcgtctaccacaatg

SEQ ID NO: 43455 - DNA, 168 bp, Zea mays
tggtggctgtcggagtcatcaagagtgtggagaagaaggacccaactggagccaaggtgacgaacgctgctgccaagaagaaatgatctatctgtctggtgctgtgcttgcttgctggttacctcgtggaagcttaaaatatctcgtcttggtgacatccttgcagtt

SEQ ID NO: 43456 - DNA, 286 bp, Zea mays
ggagaggctctcaagcattcccttggccagtcacaccctgttcttctgacccgccataatccagactccctggacgagtctgtcctgtggacagagagcagggacgttggggatgggttccgctgcattaggatggtcaacaacatctacctgaactttgatgctttacatgcagacaaggaccatggtggtgtgcgcgacgggacggcccttgtgctgtgggagtggtgcgagggagacaaccagcgctggaagattgttccctggtgaacaaggaaatgtgtga

SEQ ID NO: 43457 - DNA, 312 bp, Zea mays
accggaccagcagcgcctgatctttgctggcaagcagctggaggatggccgtaccctcgccgactacaacatccagaaggagagcaccctccacctggtgctccgcttgcgaggtggtatgcagatctttgtgaagaccttgactggcaagaccataaccctggaggttgagagctccgacaccatcgacaacgtgaaggcgaagatccaggacaaagagggcatccccccagaccagcagcgtctgatcttcgccggcaagcagctggaggatggccgcaccctagcagactacaacatccagaaggagag

SEQ ID NO: 43458 - DNA, 294 bp, Zea mays
gctaaggctgggtttaacattaaggcgctgttccgtaaaattgctgctgcacttcctggaatggagacgctctcatcagcgaaacaggaagacatggttgatgtgaacttgaggtccggcaatgcaaactcgtcccagtctcaggctcaggctgggggatgcagttgttagttgcagtctctgacacttgcttgctcatgatctttgggactctgagcatcagaaggcgttatcactgatgcttctctcgggaagaagagttgattgcctctcgccagtgaacacaccatagtc

SEQ ID NO: 43459 - DNA, 295 bp, Zea mays
cgcacggatcgagttccgcaagaacacccaggacgacccgcacaagcgcaacccgacatcagcagcgccaaggagttcctcgggtgggagccgaagatccccctgcgtgagggccttcccctcatggtctccgacttccgcaagcgcatcttcggcgaccaagacgctgctgccaccaccaccggaaaccagcaaggttaggatgaaggagcgcacatgacatggaaatttttggtggccctgcttctagctgcttggttgctctctccttactgacaaaagctatgggccacgt

SEQ ID NO: 43460 - DNA, 292 bp, Zea mays
ctgaaggtgatgggcaggaccggctccaggggtcaggtgacccaggtcagagtgaagtttttggatgaccagaaccggctcatcatgaggaatgtcaaggggcccgttcgcgagggtgacatcctcaccctgctcgagtccgagagggaggccaggaggctgcgctgaagccctagcgttcttggtgggctcttgtatggtctttggtgtcttggaatttgtgctatgtttgaacttctgtgaccctgttttaagagtagtaagcctggttataagattgcagttttgttta

SEQ ID NO: 43461 - DNA, 292 bp, Zea mays
agctctcggaaacaattattattattattattggaaggtgaggtgatctccgagaagtacgttctcgagtacgggactgattgcctggagatgcgtgtcggggccatcgagcgatccggcgagcgggtgctggtcatcgacgacctggttgcgaccggagggacactctgtgctgcgatcaggcttctagaacgtgctggagccgatgtggtcgagtgcgcgtgtgtcattgggctcccgaaattcaaggatttgtacaagttgaatggaaaacctgtatacgtgctggttg

SEQ ID NO: 43462 - DNA, 287 bp, Zea mays
  unsure (1)..(287): unsure at all n locations
ccatccgatgcgtcgtcctcgacatgggcgccgtcgcggcgatcgacacgagcggtctagacgcgctgtccgagctcaagaaagtcctggacaaaagaaacatcgagctggtgcttgccaacccggtggggtcggtggcggagaggatgttcaactcggcggtgggcgagagcatcgggtcgggccgcctcttcttcagcgtacgnaggccgtcgcggcgggggcgtgcaaagcggcgcagcctgacgacgacgacaggctgatccctgaggtgccgcacgggagca

SEQ ID NO: 43463 - DNA, 288 bp, Zea mays
ctatttgtgcgaatggtggtaaatggaccatcagctgtggaagaggaaaatctgatacgttttggctgcacactctgctggctatgattggtgaacaattcgactatggtgatgaaatttgtggcgcagttgtcagtgtgcgtgggaagcaggaaagaattgctatttggacaaaaaatgctgccaatgaagctgctcaggttagcatcgggaagcagtggaaggaacttctggactacaaggactccattggattcattgttcatgacgatgcaaagaagatggaca

SEQ ID NO: 43464 - DNA, 294 bp, Zea mays
cgaaaagtaaagggactattccgtcacgggatgcagtgcaaaacccgtgcttcgggaggatgcgtcctctgcaagaagatgtggtacatgctccaactccacgcccgggcttgcaaagattcagagtgcaaagtgccacggtgcagggatctgaaggagcatctcagaaggttgcagcagcagtctgattcccggaggagggctgctgtgaatgagatgatgaggcagagagcggcggaagtggccaaactgatagtgccgcctctgtacggggggtatatatctttgtggaaa

SEQ ID NO: 43465 - DNA, 181 bp, Zea mays
gttttgcgtcatggacaaggagagacttcaacacatttattcgtgcatgtgagaaatatggtcgcaatgatattaaaagtatatcatctgaaatggagggtaagacagaagaggaagttcaacgttatgctagagttttcaaggagagatacaaggaactgagtgattatgatagaattat

SEQ ID NO: 43466 - DNA, 112 bp, Zea mays
cctatatattgtgcaatttggttgctcccttttattttgtttctttttgataagactgttctagcaacggatatgcagagttcattatgaaaatgcatttgttagtgtcttt

SEQ ID NO: 43467 - DNA, 178 bp, Zea mays
agtcgttcctcgacgaggcgcaggtcggtgctgggtacgcgctcacctgcgtcgcgtacccgacgtccgactgcgtcatccagacgcacagggaggaagacttgtactagaccgggctggtccccatgcatggatcaaccttgcacatccattcagattcgatctttgagttattgac

SEQ ID NO: 43468 - DNA, 281 bp, Zea mays
caatctccccagcaatccctagcagaagccttccatcctcactcgctcgatggcccgcacgaagcagacggcgaggaagtccaccggcggcaaggcgccgaggaagcagctggcgactaaggcggcccgcaagtctgcccctgcgaccggcggagtgaagaagccccaccgcttccgccccggcaccgtcgcgctccgggagatccgcaagtaccagaagagcacggagctgctgatccgcaagctgccgttccagcgcctggtgcgggagatcgcgcagg

SEQ ID NO: 43469 - DNA, 308 bp, Zea mays
atgatgtagctgcgatactcacgtcaatccagtcattgttgtgcgatccaaacccgaattcgcccgctaactctgaagccgcccgcatgttcagcgagaacaagcgagagtacaaccgcaaagttcgggaggtcgtggagcagagctggacggcggactgatgatgccctgtgttgcgtcgcgctgtgctgcgcactgctcactgcgccccgcgtccgtccattccataccaaaaaaagaaaatggcaaagccgaacttagctgttgctgctttcgttgccctgtgtcaagacgactggttctctatg

SEQ ID NO: 43470 - DNA, 310 bp, Zea mays
acttttgtgaaagccattcggcacccctgggaggaaaagaagatctatttcacgcagatgcaggaaagtcaccggaaagatatcgagcgcgcattcagtgtgcttcaagcacggtgggcagtgctacgtggtcttgcttacagacgggatcgtaaccgtctaaccgagatcatcactgcttgcataataatgcacaacatgatcattgaagatgaaggggagtttgctgccaacaccgactttggagacaatgcttctgccactgcacattgcgaactcatacaagagggaaggtccgattgggtcatcg

SEQ ID NO: 43471 - DNA, 295 bp, Zea mays
gcccactcatttggggtgtctgcaaccatgcttatcatcttcactgcattctgaagtgggtcaattctcaaacatccacacccctttgccccatgtgccgtagagagtggcagtttaagggctaaggtactatggacatctagaactgcaccaagcgactctcagttctcagagaaggctgatgtttttctggtacttctgtgatgctttattttaactactacatattgttttccgtatcataaatcctgatgtcagtgcctgatcctgtgtatgcttccgagcttgtagtgga

SEQ ID NO: 43472 - DNA, 299 bp, Zea mays
  unsure (1)..(299): unsure at all n locations
ggccaagcaggttgctgctggggttaccagccaaaccaataactaccacagggctgatggtcagaacactggcaacttccttacggaccgtccttcaaccaaggtccacgctgctcctggcggtggctcttccctgggctacctgttcggtggcaactgatgcccngtttggtgcgctcaccaaagttatcctcccctgcctgctgcgtgctatgtctgaatcgtgaacaaccgttgtcatttcatgtgtgtaccccgtgcaatgctttgtgcgcatggttgatttctctgtggcaaac

SEQ ID NO: 43473 - DNA, 189 bp, Zea mays
cacagactcagagagaacccaccatggtgctgtctcctgccgacaagaccaacgtcaaggccgcctggggtaaggtcggcgcgcacgctggcgagtatggtgcggaggccctggagaggatgttcctgtccttccccaccaccaagacctacttcccgcacttcgacctgagcgacggctctgcccagg

SEQ ID NO: 43474 - DNA, 310 bp, Zea mays
cgcaaggaagctggctggtgatccgaaccttcactttgttgaagctgttgctcttaagcctccggaagttaccatcgacatggctatgcagcagcagcatgaagctgagcttgctgcagcagctgcacaactccttcctgatgacgatgatgatctgattgagtagaaaggatcatgagtcttgaacttgagcaggagttgtgccttgcgtgttttaagttgttctagggtgaactcttgagttctcattgtctggatcatctttttctccttggatgtgttgcacttttgagtgtggaaatggatggta

SEQ ID NO: 43475 - DNA, 303 bp, Zea mays
accagccagagaactacctgcatcgtattggtcgtagtggtcgttttggtaggaagggtgttgccatcaactttgtgacccgcgacgacgaacgtatgctgtttgacattcagaagttctacaacgtgttgattgaggagctgcctgccaatgttgctgaccttctgtgatcaatttcaagaaaaaacaaaacaaaaaagggtggtgaggaacctggtaaggcttggttttgtcgaaataccgtgggagagggggtgataacgacggggggttctatgttgaagtcgtggtcatggacaattt

SEQ ID NO: 43476 - DNA, 295 bp, Zea mays
atgaaggagatcttcattggactgaccctgggtctgatcgcgggaggcatgtggaagatgcaccactggaacgagcagaggaagactaggtccttctatgacatgcttgacaagggccagatcagcgttgtcgtcgaggagtaaagagttcttcccagttattttcaaagaactctctcgagagcatgacaaagtgattgcttgctgtggagatttgtcctggaattagcccaaccatttgggaacaccagattttggcgaatttttctttcccttttgatgaatatttgagcac

SEQ ID NO: 43477 - DNA, 302 bp, Zea mays
tatggaaatcaacccggagaacccaatcatggatgagctccgtaagcgcgccgaggctgacaagaatgacaagtcagtcaaggatcttgtgatgttgctgttcgagacagctctcctgacctccggcttcagcctggatgaccccaacacctttggcacccggatccatcgcatgctaaagctcggtctgagcatcgatgaggacaagtctgctgaggccgaagctgagatgcctccgctggacgatgacgccggcgaaagcaagatggacgaggtcgactaagcttcggatcactgtcgtt

SEQ ID NO: 43478 - DNA, 300 bp, Zea mays
agacaccctggcacgtggcctccgtaacgttgccaagctgattggggatggttccctagatgatcttgtccgcaagcggtaccagagctttgatagtgagattggtgccttgatcgaggctgggaaaggagactttgagacgctagaaaagaaggttctagagtggggtgagcccactgttgcatccggcaaacaggaactggcggagattctgttccagtctgccctatagatgatggtgccatgtccataggtccaggaataagcaagggtgcgccctcctccgatcacgcactcgtc

SEQ ID NO: 43479 - DNA, 301 bp, Zea mays
aacattccggccagagattgctaaagtggctgataagatatatgccgtgagacacaagaatagggtgagcaacatcgacgtggtgtccaaggaggaggccctggacttcatcgagcgtgatcagacgtacaatgctagctgaggctgctgctgctgctgctgctgctgtgtattgattgatcgcagatgctaacgcagacaggatagttcttgttgtgttatggatattctggcctattgttgtagctgtgtatatgtgtgatgcagttaggtagctattggaccagcttgtttggcgcat

SEQ ID NO: 43480 - DNA, 245 bp, Zea mays
agaagctccagtcgacccttgtgaagtacataaagggcgtcggaaacctgagccacgagcaatggcggtccttccataacgacaagaagacggcggaggctcggaacttcctcgacggtgacctgatcgagtctttccttgaccttagccggagcaagatggaggaggtgtccaaggcgatgggcgtccccgtggacgagctgtcaaagagggtggaagactgacgaagcttcactagtgtagat

SEQ ID NO: 43481 - DNA, 264 bp, Zea mays
attcaagctgaagggcctttagctcttccgtggccaggatgttcacaagtttgtaatggacgaggtctatgacatggagctctacgagtggaccaacgtggacatctctgatgaggcccagaaggagcgtgtcaatgcgatgattgaggaccaggagccctttgagggcgaggcctttcttgacgcgaattgcttcaagtgagtgtccttcccggaaacagaactggttagcccttgaatttgcctatggaagagttccccttt

SEQ ID NO: 43482 - DNA, 294 bp, Zea mays
gcagagacttatgcttggtgagaacctgtatcctcttgttgaacagctggaacgtgagcaggctgccaaggtcactggcatgcttttggagatggatcagacggaggttcttcacctgctggagtcgccagatgctctgaaagccaaggttgctgaagccatggaggtcctccgctctgcccagcatctccagcagagcaatgtttctactgagcagcagctggctaatctatcattgaatgatggcgtcgtctccagctgaacgttaatgtttctgatgtttcggaagtgctg

SEQ ID NO: 43483 - DNA, 295 bp, Zea mays
cgcatcatcaggaagcgtatccatgtccgtgtggagcatgtgcagccctcccgttgcacagaggagttccgcttgaggaaagccaagaacgatcagctcaaggttgatgccaaggaccgtggcgaggtgatcagcaccaagaggcagcctgtgggacccaaacctggcttcatggttgagggtgctacacttgagaccgttactcctattccctatgatgtggtaaatgatctcaaggggggttactagagagaattatgtatcttgagcagttcaagcgagctggcataaatac

SEQ ID NO: 43484 - DNA, 299 bp, Zea mays
gtggttgttgctgaggatgggaaggtgaaaacgttccctgtgatcctattgcccaaggagaagcttgttgacaccaacggcgcaggtgatgctttcgttggaggcttcctctcacagttggttctaggaaagggcattgaagactgcgtgagggcaggttgctatgccgcaaacattatcatccagcgcccgggctgtacttacccggagaagcctgacttcaactagtgcaaaaactgaggcacgtcatgagagggactgttatcggcacactattgttaaccagtgcgtggttcggt

SEQ ID NO: 43485 - DNA, 293 bp, Zea mays
aggacatggatggagttacccatgtgatatctggagtgttggttgtattcttgttgagctttgcacgggtgaggcgttattccagactcacgaaaacttggaacatctggctatgatggagagagttcttggacctttgccgtaccatatgcttaagagggcagatcggcactctgacaaatacatcagaaaaggactcctgaattggcctgagggttgcacctcgcgggagagcatgaaagctgtgatgaaattgtccaggcttcagaatctggtgatgcaaaatgtggacc

SEQ ID NO: 43486 - DNA, 294 bp, Zea mays
aaggacatcactcccatgggtggcttcccccactatggtatcgtgaagggtgactacctgatgatcaagggatgctgtgtgggtccaaagaagagggtggtgaccctccgccagtccctcctgaagcagacttcccggctggcgctggaggagatcaagctcaagttcatcgacacagtgaccaaatttgggcatggtcgcttccagactaccgatgagaagcagaggttctttggtaagctcaaggcgtaaggtgctgcggtgcagcgacaagtcccatttgtcaaaatcatc

SEQ ID NO: 43487 - DNA, 285 bp, Zea mays
aggaccagttcaagtgtgccagatgtgggcagcggaagacgacttactaccagctgcagactcggagtgctgatgaaccgatgacgacgttcgtcacatgcgtgaactgcaacaatcactggaagttctgctgagtgttcagccttgctaaagtgtttacttagttgtgctgagcacactatcctgctgtgatgtgtgtgctctgttagttgtgactggaagttcgacagggcaggctgaacaactcaacttttttccccttttttaccccccgtaaactaggag

SEQ ID NO: 43488 - DNA, 285 bp, Zea mays
aagttcggtagtccctctcctctcgaggtattagcagtcgaccggttcctcggagcacgatgaagtttgttgctgcctacctgcttgctgtcctcgctgggaacgccagcccctccgctgacgatttgactgccattctggagtcagttggctgtgaagttgacaatgaaaagatggaactcctgctgtcccaactgagcggtaaggacatcaccgagctcattgccgcgggcagggagaagtttgcttcagtcccatgtggtggcggcggtgtcgctgttgcgg

SEQ ID NO: 43489 - DNA, 278 bp, Zea mays
agtgctttcatctctgaatgacatgctcgcatgtaatgctgcggtccctgcatcacgacccttgtcatggcccacaccaggagagctagatgatctatttgccatctacctacaagagcattcctaagcctgagaagctatcaaggttgcagtacctgctcggcattagcaacgagaaggctaacgagatgcaggacgcagcctcggagggatcgctgccggttgcagctgaagagaaagaggagttggcgttctaggaaggggtacagtttgttagg

SEQ ID NO: 43490 - DNA, 282 bp, Zea mays
agtcgctgatggagcagaggacgtgactattaagattactgatgaaggtggtggaataccaaggagtggtctctcaagaatttttacgtagctctatagtacagcagaaaaccctcctgatcttgatgtacataatgaaggagtaactatggctggatatggttatgggattcctattagtcgtctttatgctcgatatttcggcggggacttgcagatcatctctatggaaggatatggaactgatgcatacctccacttatcacggctgggagattcgga

SEQ ID NO: 43491 - DNA, 111 bp, Zea mays
cgtggagagtgctcctcctcctatgaagaaggactacaagctggctaatcttctctgctgggaggaggaagcggatgccatggaggagaaggcgggagtgcttgatgagta

SEQ ID NO: 43492 - DNA, 280 bp, Zea mays
agctggtatggtgaagatggttcccactaagcccatggtagtggagaccttttctgaatatcctcctcttggtcgctttgctgtccgtgacatgaggcaaacggtggctgtcggagtcatcaagagtgtggagaagaaggatccaactggagccaaggtgaccaaggctgccgcaaagaagaaatgatgcgtccagctggttctgtgtttgcttgagggatacctagtggaaacgtaaaatatctcgtcttgttcacgtcattgtctgaactatgctcgc

SEQ ID NO: 43493 - DNA, 280 bp, Zea mays
aacgccgacaggatcatctccgagctcgccgctctgcttgaccagcccatcgtggactttgataaggtggacgcctacgtgcatcagctcaaagggagcagcgccagtgttggcgctcagaaagtgaagtttacttgcatgcagttccgtcagttatgtcaggataagaacagagacgggtgcatcatggcattggctgttgtgagaaatgagttctatgatctgcgcgataaattccagactatgcttcagcttgagcagcaaatccaggctcaacaat

SEQ ID NO: 43494 - DNA, 279 bp, Zea mays
gtttgctgtgaagaggaaagcagttggaatttgggggtgcaaggactgtgggaaggtgaaggctggtggtgcttacaccatgaacactgctagtgcggtcaccgtcaggagcacgatccgccgcctgagggagcagactgaagcatgatatagctctttatattattggggtttcctgtagttgctcttgtcaggcatgttgtgggggccttatctagtggaaatgtggaatcactgtactggctgttttgccgagacaatgctccttatatttggttt

SEQ ID NO: 43495 - DNA, 283 bp, Zea mays
gtgaccggcgggaggaacaccgggcgtgtaggtgtgatcaagaacagggagaagcacaagggcggcttcgataccatccacgtcgaggactccatgggccaccagttcgccacccgcatgggcatcgtgttcaccatcggcaagggcaacaagccgtgggtgagcctgcccaagggcaagggtatcaagctcaacatcatcgaggagcagaggaggcgcgactttgctgcccaggctgctgccaaggcataagttctctgaatgtgctgcttggagctttttg

SEQ ID NO: 43496 - DNA, 293 bp, Zea mays
tacaagaagtggtcattgagaagattgtccgtaacaagcgcaaatgtgttactgtggtgaaagggcttgaattgtttggtgtagagcttagtgatgcttcgaagaacttgggaagaagtttgcaaccggagcttctgttgttaagggccctacggagaaggagcaaatcgacgtacaaggggacatctcatatgatattgtggagttcattacagatacatggcctgatgtacctgagtcggccattttcttcattgaagatggaaggaaggttcctgctgcttgatgccata

SEQ ID NO: 43497 - DNA, 262 bp, Zea mays
agcaggaatgtcattcatggaagtgacagcattgagagtgctaataaggagattgccctgtggttccccgagggccctgctgattggcagagcagccagcacccctggatctacgagaagtaaacatggaaagtttcacatcaaaccttgagagccagaggaagcatgtcaccatttgtgctttagcaatgttttcgaaaagattatgatctgtatcttggaaccttatttcaatggaccaaatttctttctttgccatgtt

SEQ ID NO: 43498 - DNA, 95 bp, Zea mays
atttcattgactttttgtactctgaagaaagtttttccagtacagaaccgagaacaaactaaatgcactctatcatgaatgaatgcatgattgag

SEQ ID NO: 43499 - DNA, 274 bp, Zea mays
atgaatctgagaactccaaaaaatatgcagtacagaacttctctaagagcctgctagatgttgctgacaatttggctagggcatcatctgttgtcaaggaaagcttctcgaaaattgatacctcaaaagattctgctggagctgtcccactactgaaaaccctgctggagggtgtggacatgactgagaagcaacttgcagaggtcttcaagaagtttggagtcgaaaaatttgacccgctgaatgaggaatttgatcctaacaggcattgtgc

SEQ ID NO: 43500 - DNA, 183 bp, Zea mays
aacattccggccagagattgctaaagtggctgataagatatatgccgtgagacacaagaatagggtgagcaacatcgacgtggtgtccaaggaggaggccctggacttcatcgagcgtgatcagacgtacaatgctagctgaggctgctgctgctgctgctgctgctgtgtattgattgatcg

SEQ ID NO: 43501 - DNA, 272 bp, Zea mays
atggattgctgacaaagctcaagtttacacgcagcatccatacatgagaccccttggagtagttgctatggtcttgggctacgatgaagagaaaaatgcccaactattcaagtgcgaccctgctggtcacttctttggacataaggcaactagtgccgggctcaaggagcaggaagcaataaattttctggagaagaaaatgaaggatgacccgaaattcacctatgacgaaactgtgcagattgcaatatctgcgttgcaatcagttctcc

SEQ ID NO: 43502 - DNA, 272 bp, Zea mays
aaagaacggtgatgctggtattgtgaagatgataccgaccaagcaagtggtggtggagacgttctcagcgtatcctccccttggtaggtttgctgtccgtgacatgaggcagacggttgctgtaggagttatcaagagtgtggagaagaaggacccgaccggcgccaaggtgaccaaggcggctgccaagaagaaatgatgagatcctgcgcctgctttagcaatacctagttttcatcatcacaagttttgtttgtgatcgttgctgttat

SEQ ID NO: 43503 - DNA, 275 bp, Zea mays
agtacacctgctatgacctcaaggggtttggttgagaaggacttcgtgcagattgccgagtaccttcaccgagctgtgaccatctgcttgagcatccaggcggacatggcaagattctcaaggacttcaagaagggcttggtgcaaaacaaggacatagagaacctgagggcggaggtcgagaagttcgccacttcatttgacatgcctggcttcagggtgtctgacatgaagtacacagactagactgctgctgacttgggtgcaaaccgttgc

SEQ ID NO: 43504 - DNA, 276 bp, Zea mays
attcaaacagcttcagacatgttcgcttgctaaactgttgacaatgtatccttgttctttgttgaaaagttttgtacttgtagtgtcaatcatatttcacaaagtggttgtcatataatactgagaggttttggacccttgatctgcagaagttcaataccatagtagcaagaataagtttatttttaaatgttgtccaatgtaactttcagcagtaatgtttgtgtgctaaatgctctcccggagaaatgtacacgctgcccacgtgtgatgtaa

SEQ ID NO: 43505 - DNA, 282 bp, Zea mays
aaaccaccctggccagattggcaatggctatgccccagttctggactgccacacctcacacattgctgtcaagtttgctgagctcgttaccaagattgataggcgatccggcaaggagctggagaaggagcccaaatttctcaagaacggtgatgctggtatggtgaagatggttcccactaagcccatggtggtggagaccttttctcagtatcctcctcttggtcgatttgctgtccgtgacatgaggcaaacggtggctgtcggagtcatcaagagtgt

SEQ ID NO: 43506 - DNA, 270 bp, Zea mays
aaaagattggctcgtgaggatctggcggcgcttgagaaggactacgaggaggtcggtgctgagtttgacgagggtgaggacggcgacgagggtgacgagtactagacgctctactggcgcggcgtcgtcgggcttgtgtgccactgctatcctgtgatctgccctgagtggctcctatcgtgttatgtttctgtcggttcttatctatctgtcgttgtgtggtttacaacttacgttgtaagactttattcccccgctttgctactgggt

SEQ ID NO: 43507 - DNA, 279 bp, Zea mays
cttggccggcggaaagctgaaaacgcaatggcttggcgggcagtgtttacatcggccgggtttgctccggtaccgctcagcaacctcgcagaagcacaagctgactgcctgttgaagcgcgtgcaggtccgaggattccatgtggagaagtgtggaatgggtctagcactctactggcacacaggcgagctcgtgtctgtctcggcatggcggtgctgatcatacggaccccatccatcaaccatcatgacacctacaccaatttgcaggcatgtttaa

SEQ ID NO: 43508 - DNA, 305 bp, Zea mays
agtcaggtgccagattaacttcaaacggctctcacttactgacatcaagattgacatcaaacgcgttcccaagaagtcaaccctgatcaaggctatggaggaagctgatgtgaagacgaagtgggaaaacagctcatggggcaagaagctgattgtccagaagaggagggctgcgctcagtgactttgacaggttcaaggtcatgctggcaaggatcaagaggggtggtgctatcaggcaagagctcgccaagctgaagaaggcgtccacggcttaagtcccttttggtggatggcatgttagtt

SEQ ID NO: 43509 - DNA, 302 bp, Zea mays
ctcagaaaaatctgccattgaaaaagagctagagcagcttactagcatattgcctgatcttgagaagaagcttgaggacctgtctgaagcaaacccaagcgctgacatggatgagatggtgaaggcaatcgtgtccagggtaactgatgtgatgccaaaagctgcatcttttacttcttcccagatggcaacctcaagcaatggattcgactcctcggttatgtctacggcagcgacaaccggaagctctggaagcaccgtgactgaccttggggttgtaggcagaggcgtcaaacgagcta

SEQ ID NO: 43510 - DNA, 139 bp, Zea mays
cttacttcagatggcaacactaaggatgatcttagactcccaaatgatgagactcttgtggcccagattaacgaagggttcgaaagcgggaaggatcttgttgtgactgtccagtctgcgatgggggatgagcagatct

SEQ ID NO: 43511 - DNA, 195 bp, Zea mays
ggctcgagagagcagccagcacccctggaactacgagaagtagacaccgaaagtttcacatcaaacactgagagccagaggaagcatgtcaccatttgtgctttagcaatgttttctggaagattatgatctgtatcttggaaccttatttcaatggaccaaatttctttctttgccaaaaaaagaaaaagaaat

SEQ ID NO: 43512 - DNA, 299 bp, Zea mays
agctcctcggtggccttgccgtccgcaggcttgctacggtgttcttcgttatgttatggagagtggtgccaagggttgtgaggtgatcgtgagtggaaagctcagggcccaaagagccaagtccatgaagttcaaggatggctacatgatctcatctggtcagccagtgaacgagtacattgactcggctgtgagacacagtcttctcagacagggtgttcttggcatcaaggtgaagatcatgcttgactgggacccgaaggcaaggttggcccgatcactcctcttccggacctggt

SEQ ID NO: 43513 - DNA, 302 bp, Zea mays
cgtcggcgagcccggaacggctgccacggctctacgctggtggaggcgttcgcgggcaacgtcacgcagaaggtgccgttcgattccgccgggaaaggcgggttcaagacggcggcgttcaggttcgtggccggcggcgtccgcacccgcctcaccttctacagctcctactaccacaccaaggtcaccgacggcgtctcgctctgcgccccgtgctggaccaggtcaaggttgtgccggtcaaggcgtagtgaaatgaatcgtgagagcgccgctcctcgtcgtctctcgtctgtagctgt

SEQ ID NO: 43514 - DNA, 298 bp, Zea mays
accggaacaacaagaagttgcttggtcgcgtgcgagccttcgatcggcactgcaacatggttcttgagaacgttagggagatgtggaccgaggtaccgaagaccggtaaaggcaagaagaaggctctcccggtgaacaaggacaggttcataagcaagatgttcctccgcggggattcggtcatcatcgtcctcaggaacccgaaatgagtagcctgtacacgtagagagtctgtttgctagcagtacgttgtgctattgggtgtaaggtgtatgccaaatgctcaaagcatgggagt

SEQ ID NO: 43515 - DNA, 290 bp, Zea mays
  unsure (1)..(290): unsure at all n locations
caccgccgcaagaacaaatctctcgacggactgcaggccaatgtccagaggcttaagacgtacaaggccaagctggttatcttcccaaggcgtgctcgcaaggccaatgccggcgactctactccggaggagcttgccacggccacccaggtccagggtgactacatgcctattactcgtggtgagaagcgctcagtcgaggttgtgaaggttactgatgagatgaagtcgtttgcggcctcacggaagctccgtcttgagnggatgaacaagaaacaccttggtgcccg

SEQ ID NO: 43516 - DNA, 297 bp, Zea mays
aaagaaccagaagatcaggagggtggcggcgacgacgatgatgacgacgatgacgatgatgagaacggggatgacgaggacgacgacaatggggatgacgatgaggagggtgtagatgaagaagacgatgaccaggacgaggatgaggaggaagatgatgatgaagactcgctccagcccccaaagaagaggaagaagtgaagatcttctgccgctttagttaccgtgcgctgagttctgcctggcttttcgtcatatcctcgcatttcaactttcccatagagagttaagaaggat

SEQ ID NO: 43517 - DNA, 295 bp, Zea mays
agaagtaccatgctttcttggcatcagaggccatcatcaagcagattccccgtctccttggtcctggtctcaacaaggcaggcaagttcccgaccctggttactcaccaggaatccctcgaatccaaggtgaacgagactaaggcaaccgtcaagttccagctcaagaaggtcctttgcatgggcgtcgccgtcggcaacttggcgatggaggagaagcagatccagcagaacatccagatgagcgtgaacttccttgtttcccttctgaagaagaactgggcgaatgtgagatg

SEQ ID NO: 43518 - DNA, 274 bp, Zea mays
gacctccaattttttgttggtgagtccatgaaggatgatgcgtctgtggtattcgcctattacaaggatggtgccactaatccgacattcctctatttctctcatggtcttaaggagatcaagtgctaggcgtgcggcgaaattagttacccatgttgggtactatctatgtactattattatatccaaaactatagttgtcctggctgaattgaactcaaaagggtttgtttgagaaaaaattgtcccaagattggattgcttgttaaagctc

SEQ ID NO: 43519 - DNA, 294 bp, Zea mays
atgcttttgaggttgctgcaaagaagcatcttatcgacaatgtgaagaaaaccgtcaaaggacgagcacaacttggggtggaggcgtttgcggaagctcttcttgttatacccaagactttggctgagaactctggtttagatactcaagatgtgattgtttctctccagaatgagcatgaccgtggattagttgtggggtgaaccatcactctggggatccgattgatccccagatggaaggcatcttcgacaactactctgtgaagcgccagatcatcaactctggacccat

SEQ ID NO: 43520 - DNA, 293 bp, Zea mays
aacgcatcgaggttagcacgcgaagaagcgaccatgagggccaagtggaagaagaagcgcatgaggaggctcaagaggaagcgcagaaagatgaggcagagatccaagtaggcagatcgagatggattgtggacctgatgacatgcgtgggtacatacatttcttcggatgcgttggtgtgcctgtggagagatgtcaactgccatggtgtcacggtccgccatcagttgaacgtcttgcctgcacttcagtaggccatttttcatggttctagttgtatttgaatccagcgt

SEQ ID NO: 43521 - DNA, 214 bp, Zea mays
agattttcaatttggcgagggaccaaaaatgctctcgagtggtgctttgtcaagcaaagctccatctgcgcgccctaccccgttgtgcgaactgtttggcatcaaacttgtgtggttgctgtcttctatgttctgctagtttatgttcggagtccgtgggaatatactagctgattaataaaaagaaaaaactgatgtgatgccataatagtat

SEQ ID NO: 43522 - DNA, 287 bp, Zea mays
ccagcagcagctacaacatggtcatccgggaggacaaccagaccaaccgcctgcaggaggctctgaacctcttcaagagcatctggaacaacagatggctgcgcaccatctctgtgatcctgttcctcaacaagcaagatctgctcgctgagaaagtccttgctgggaaatcgaagattgaggactactttccagaatttgctcgctacactactcctgaggatgctactcgcgagcccggagaggacccacgcgtggaccgggccaagtacttcattcgagatgag

SEQ ID NO: 43523 - DNA, 303 bp, Zea mays
gtgatggatttatgactgtggtatactgactaactgtgtatgtctttatgacttgtgtataaaaatctgtgctttgtggtgcttaattaaatgtatatctcttattaataacaactataagacgagccccattgacaccgcaaccctgtccttggtcagagagcttggcaggtattcccgatctgccatgtattccagcaaaggccatgtacaagaggacgtactcagccgctacatccaaggttgcaaagaacaagaaggagcgggttctcgcaactgttaccaaaccgttggtggtgacag

SEQ ID NO: 43524 - DNA, 310 bp, Zea mays
ccaagatcgacaggcggtctggcaaggagcttgagaaggagccaaagttcctgaagaacggtgatgctggtatggtgaagatgataccgaccaagcccatggtggtggagacgttctcagcgtatcctccccttggtaggtttgctgtccgtgacatgaggcagacggttgctgttggagttatcaagagtgtggagaagaaggacccgaccggcgccaaggtgaccaaggcggctgccaagaagaaatgatgcgatcctgcgcctgctttagcaatacctaattttcatcatcacaagttttgtttgtg

SEQ ID NO: 43525 - DNA, 310 bp, Zea mays
ggtcattcccactgccaggagggtcatctatgcctctcagctcacggccaagccaaggctgctggagccagtctacctggtggagatccaggccccagaaaatgcacttggtagtatctacggtgttctgaaccagaagagaggtcatgtctttgaggagatgcagaggccgggtaccccgctctacaacatcaaggctttcctccctgtcatcgagtcctttggtttctccagccaactgagggccgcaactctggtcaggcgttcccccagtgtgtctttgaccattgggacatgatgggctcagatc

SEQ ID NO: 43526 - DNA, 295 bp, Zea mays
cggatcgtctcagccgccgttggattcaccctcctagcggtagggtatataacctggacttcaatcaacctcatgtacatggtattgatgacgtcactggtgaaccgttagtccagcaggaggatgataaacccgaagcagttgctgccaggctaagacagtacgaagacgtggcaaagccagtcattgaattatacaagagccgaggagtgctccaccaattttccggaacgagacgaacaaagctggcctacgtttacacattttctcaacagtagtcaactattagtccaag

SEQ ID NO: 43527 - DNA, 309 bp, Zea mays
gaaggagagctgaaaaagtatatgatggattggagaagtaggcagcaattcttacttgaagctgcccatcggtgtcaagaggctgggctctatgacaaagctgtggaaattcacaaaagagtaggagcctttgccatggctcttcagacaataaacaagtgcttgtctgatgcagtctgtgccatggcacggagtatgttagatggcgagagtcgtgctgctgccctaattcattctggcaatgaaattttggagacagctagatactcttctgaagccagcattcaagagaaggacctcatttctgag

SEQ ID NO: 43528 - DNA, 164 bp, Zea mays
gcaatgacagagatcgtgttgttgaagcaaaggatgagctccacaggatgctgaacgaggatgaattgacggatgctgtcttgctcgttttcgcaaacaagcaagatctaccaaatgctatgaacgctgctgagatcaccgataagcttggtctccaatccctg

SEQ ID NO: 43529 - DNA, 311 bp, Zea mays
ttgcaattgatgtgtcaacttcagttgagagcattggagctttgaggtccaaaattaaagggtacttggagagcaaaccaacgcattggcacccagtccacactgtaaatctcaaggacatcttggatgtgaacaagattaacatgtctctctcagtgcagcacaccatgaactttcaaaacatccgggagaagaacatcaggaggtctgagctcgttatggagttgaagaaaatattcgaggagatgtccatccggtaccaccttctaccccagaaagttgaactcacctacgtcggctcgaacccactg

SEQ ID NO: 43530 - DNA, 300 bp, Zea mays
gcgggagtgcttgatgagtaagacgggcttctggggtcgatttgcttctgagttgtttattttatatcgtcgcaatttcgtggttgtcgtttggttattctgtgaagcagccaagccaggctattgttatgaaaatttgtcgtctgtaagcatgtgaacttccgatgttgccacatgctggatcagtctgaataagtaagtatgcagctctaggtggtcagctgcgtctaccacaatgagcatgaacgtatggagaaatatctgtgaacccattttgtttatgaataagatttgtttttt

SEQ ID NO: 43531 - DNA, 300 bp, Zea mays
gaagccatgggccctgtccttctccttcggccgtgcgctccaggcgagcaccctcaaggcctgggctggcaaggtggagaacgtggagaaggctagagcggccttcctcgccaggtgcaaggccaactccgaggctaccctcggcacctacaagggtgatgctgccgccgacaccgagaatcctccacgtcaaggactacaagtactgagttgcttctctttgcgatcccgttgttttggaactcctgcctgcgagtaggttgctgagtgttgttgcctctgttagagcttttatattcg

SEQ ID NO: 43532 - DNA, 154 bp, Zea mays
gactttggaagttatgctatgtcagtggattgatcagtgagtgccgtaggtagaatgataagcctctacgatttgttcaccagtggggcggataatgtaggagtcacgtgctagcatttctggtcggagctatgcgtgcatgaagaattgcgca

SEQ ID NO: 43533 - DNA, 300 bp, Zea mays
ggcgaagatgatcgaggtggtgctgaacgaccgcctggggaagaaggtgcgggtgaagtgcaacgaggacgacaccatcggcgacctcaagaagctggtggcggcgcagacggggacgcgccccgagaagatccgcatccagaagtggtacaacatctacaaggaccacatcacgctcaaggactacgagatccacgacgggatggggctcgagctctactacaactaggcgccctgaccccaaccgtgccctgatgtaaggttaatccgaattctgaagtcatgggtgcgcttccagtc

SEQ ID NO: 43534 - DNA, 295 bp, Zea mays
gcgctgttctggctgttggctacggtgtcgaagatggtgtaccctactggctcatcaagaactcatggggcgctgactggggtgatgagggttacttcaagatggaaatgggcaagaacacgtgcggtgttgctacgtgtgcatcctaccctattgtcgcatgaggcccttacgaagtgttacatggtctgtttggcatcaataatgcatgtttaacctgagcttggcgatgggttatacagaacggaaactctgtttgtgaatagaaaatcatgaagggaaggagttgaccgga

SEQ ID NO: 43535 - DNA, 289 bp, Zea mays
tgttactgaagcgagggtgatcacagacagggagactgggaggtcaagaggctttggctttgtgaactactccgacagtgatgctgctcaggaagctatttctgcaatggatggcaaggtaattgatgggcggcaggtacgtgtcaacatggctaatgagagacctgctgggaacgtggtggtggtggctatggcggcggcggctatggaggtggtggctacggaggtggcggcggctacggaggtggtggctatggtggtggcagccaagctatgatgcttgaggggg

SEQ ID NO: 43536 - DNA, 170 bp, Zea mays
tgttaccgttcgcttctgtcaccgtgttagtgtccgttctacctttggattaggtgttggtaccctgttgttcgctttggttgctcccgctatctattgagacgagataagaatgagcaaggtttttgctcgcagcaatttttgtacaatgatatcgatatattgttccc

SEQ ID NO: 43537 - DNA, 287 bp, Zea mays
ctttgccaggtcatgcttcgtgttggtgaccttgagcgatctatcaagttttatgagaaggccctagggatgaagctcctaaggaagaaggatgtacctgattacaagtataccattgccatgttgggctatgctgatgaggacaagacaactgttctggagctgacgtacaactatggagtcacagagtacagcaagggcaatgcatatgctcaggttgccattggcaccaatgatgtgtacaagagcgccgaggcggttgatcctggcgaccaagaactaggtgg

SEQ ID NO: 43538 - DNA, 296 bp, Zea mays
ggttcaagtcggtggaccagctgcccatgaacgtgggcgacgcgcactacgacccgctcttcccgttcggcttcggactcaccaccaagggcacgaagtgagtgagtgtgaggcgctctgatgggatgtggcctgtgagtgagctgtgtattcgtgggcgggcgtgaggctctttggctttcgaattggttgggggtgacgggcggcgagtcgtgtacgccgcacacattgcgcacgtacgttaggttgggatgtttgcgtctgggtaataacagtgatgcattcttgagatggtt

SEQ ID NO: 43539 - DNA, 246 bp, Zea mays
tgtgaggacacaaacccttgtgaagagtgccattgtgcaagttgatgctgccccattcaagcagtggtacctcactcactatggagttgacattggtaggaagaagaaaacccctgctgcaaagaaggataatgctgagggacaagaggttgaggcagcagctgaggaaacgaaaaagagcaaccatgtcacgaggaagcttgagaagcgcaaggagggacgtacccttgacccacacattgagga

SEQ ID NO: 43540 - DNA, 292 bp, Zea mays
ctgtggatcttgcaacggtggtcccgacactcgaaccgtcgggaatcgatctcctatctaagatgctgcgtctagatcccagcaagaggatcaccgcccgcgccgccctcgagcgcgactacttcagggacctcgagcacgcctagcaggatatggatggatggatgaaccgtttcccctcccctgctccctctgtaaattacggtagcagccgcgatgcttggaggcggcgagtacccacgtctgggcggccgttgagttatgtgtgttactctatagtatgactaagctg

SEQ ID NO: 43541 - DNA, 264 bp, Zea mays
gattcctgcagcggatggacctgtgccgcaagtacgcctttgggaagatgctcgtgataggctctgagccacccttcaagctgaagggcctttggctcttccgtggccaggatgttcccaagtttgtaatggacgaggtctatgacatggagctctacgagtggaccaaggtggacatctctgatgaggcccagattgagcgtgtcaatgcgatgattgaggaccaggagccctttgagggcgaggccttgcttgacgcgaaat

SEQ ID NO: 43542 - DNA, 275 bp, Zea mays
ggccagtacaaggtcaagtgcccgcccacggactactccaggttcttcaagatgctgtgcccggacgcctaaagctacgccaaggacgaccagaccagcaccttcacctgcccatagggctccaactacgatatcgtgctctgcccgtgagccacatgttcgagagatcaacgaccatgcatttgcagctcgaaacaagtgcacactagtgccaacgatacacaacgaactaggagtcgcgatatttattattatcgcgcgtggagtagttggta

SEQ ID NO: 43543 - DNA, 285 bp, Zea mays
cggcacgaggtcggcggtgaagttgtctagtccacgctcggagccatgccgtccaagggcccgctgcagtctgtgcaggtcttcggacgcaagaagacagcgacagctgtggcgcactgcaaacgcggcaatggtctcatcaagctgctggagccagttctgcttctcggcaaggagcgatttgctggtgtagacatccgtgtccgtgtaaagggtggtggtcacgtggcccagatttatgctatccgtcagtccatctccaaagccctggtggcctattaccag

SEQ ID NO: 43544 - DNA, 288 bp, Zea mays
ggcgtcgggagtgggtcgctcatcttcaggctggtgcaggcattgttgccgacagtagcccagatgacgaacaacgtgaatgcgagaataaggctgctgcactagctcgggccatcgatcttgcagagtcagcttttgtagacaaagaatagtgtgctatggttatcgtttagttcttgttcatgtttcttttacccactttccgttaaaaaaagatgtcattagtgggtggagaaaagcaataagactgttctctagagaaccgaagaaatatggaaattgaggtta

SEQ ID NO: 43545 - DNA, 195 bp, Zea mays
ggctagagcggccttcctcgccaggtgcaaggccaactccgaggctaccctcggcacctacaagggtgatgctgccgccgacaccgagagccttcacgtcaaggactacaagtactgagttgcttctctttgcgatcccgttgttttggaactcctgcctgcgagtaggttgctgagtgttgtttgcttgttaga

SEQ ID NO: 43546 - DNA, 260 bp, Zea mays
aatggggggagcatgagcttgactacctgctgttcatcgtccgggacgtgaaggtgcagccgaacccagatgaagtcgctgacgtgaagtacgtgaaccgcgacgagctcaaggagctcatccggaagcctgacgctggcgaggacggggtgaagatctccccctggttcaggctggtggtggacaacttcctcatgggctggtgggaccatgtcgagaaaggcaccctcggcagagccgtggacatggagaccatccat

SEQ ID NO: 43547 - DNA, 261 bp, Zea mays
gaggatctggcggcgcttgagaaggactacgactaggtcggtgctgagtttgacgagggtgaggacggcgacgagggtgacgagtactagacgctctactggcgcggcgtcgtcgggcttttgtgccactgctatcctgtgatctgccctgagtggctcctatcgtgttatgtttctgtcggttcttatctatctgtcgttgtgtggtttacaacttacgttgtaagactttattcccccgctttgctactgggttattaa

SEQ ID NO: 43548 - DNA, 258 bp, Zea mays
tggtattagcagtcgaccggttcctcggagcacgatgaagtttgttgctgcctacctgcttgctgtcctcgctgggaacgccagcccctccgctgacgatttgactgccattctggagtcagttggctgtgaagttgacaatgaaaagatggaactcctgctgtcccaactgagcggtaaggacatcaccgagctcattgccgcgggcagggagaagtttgcttcagtcccatgtggtggcggcggtgtcgctgttgc

SEQ ID NO: 43549 - DNA, 258 bp, Zea mays
aggcttactgttttgctgcctttaaatgttaagttgtttcaaacatgtgtttatgaaggggatctattagtttcgcgatgtcgttagtttagtgcattagcaaagaaaaagccgaatgctgctagctgttctgttgcttttcttttgctaaccacttgtgtcacaactttctgtacctgcttcattgattaatctagtgactagtcagttattggttcaaaaaaaaaaaaaaaaaaaaaaaaaaaaaacaaaaaataa

SEQ ID NO: 43550 - DNA, 258 bp, Zea mays
  unsure (1)..(258): unsure at all n locations
taccttgcgctggtatacctgtcaagcatcacaaggacacaaatcagcatcgccgagaagttgaacactgctgctcaagtgctgtaggtttggcggtgtggcatctggtttggacgtggatggcttgatgctatctgtgatgcttggcgtaagtgtgattggtgacagaaatgcatttttgtactcattattattattgctanatgagagacctgatggaaagggttagccaacgatgagatcccataatgttgccag

SEQ ID NO: 43551 - DNA, 268 bp, Zea mays
tgacagaattgatgagcgaaagagaattgaaaatgctggtggtattgtcatttgggctggcacttggagggtgggtggtgtattggcaatgtcccgtgcatttggcaatcgtttactgaagccatatgtggtggcagaacctgaaattcaggaagaacaggtcagtggtgggctggaatgcctggttcttgctagtgatgggctttgggatgttgtggaaaatgaggaagctgttttccttgggagatcggaggacacgccagagtct

SEQ ID NO: 43552 - DNA, 250 bp, Zea mays
cagccatatcagttgttgctcccatctgctacgcccaccttgcagccgcccaggttgggcagttcataaagttcgacgagatgtcggagacttcatctagccatggggggcatacctcggcgggcagcgtccctgtacaggagctgccccgtctgcatgagaaagtgaggagctccatgttcttctgctgagcagcagggaatgtgtcccttggttttacctttttgggtgtatggtcgggggttctgaa

SEQ ID NO: 43553 - DNA, 252 bp, Zea mays
ggttgagcaggccattgaacttcttaagcagatgctagtgaatggatgcagtcccgacctgattagctacagcacagtgatcgatggacttggcaaggctggcaagacggacgaagcactggagctgttaaatgtgatggtcaacaaagggatgagcccaaacacaatcatttattcgtcgatagcttctgctctctccagagaaggcagaattaacaaagtaattcaaatgtttgataacatccaagatac

SEQ ID NO: 43554 - DNA, 249 bp, Zea mays
ggcaaggggcacggggtgtggcacttcgatcagatgctgcttgaggaagaggcctaaaaagaagaacggacagatgaatgaaggaaacaagtgtgtaatgttgatcaggcggaggaataatgggtcaactgacaactctgggtcggtggatttgtagttggtttgggttttttagttgtagaacggtgttgcccccctcctagagagggatgaacacattatgcatgcgatgtgtcagttcggtcggtg

SEQ ID NO: 43555 - DNA, 257 bp, Zea mays
gcaggaggtgctgatgcaggagatattcaagggtagtgtcctaaagaaggaagacgcacacgtcttgtttaaggttgatcctaccaaagtagatagtgtttatgatatggtaacaaaaaagctgggcaaccatgtggagttgcctacggtctagcttatgcctttgggcttgcctgctgtgacatgccgaagaaaacaagtcttggtttcgccccttgcagcgtgtctgaaccatagctgaaggtggaactgtacta

SEQ ID NO: 43556 - DNA, 264 bp, Zea mays
ggagaaggaggcggccaagaccgccgacatgaaggagaagggcgccgatccctacgacctcaaacagcaggagaatgttttggctgagtcaaggatgatggtcccagactgctacaagcgacttgaaactgcactggctgacttgaaagcaacactggctgaactgaaggagtcaaatgagcaaggtgccgagattggagaagctgagagtacaatcgcagaagttgaagcagttgtcaagccagcagaagattaaactaaaaa

SEQ ID NO: 43557 - DNA, 299 bp, Zea mays
ctcaagaaagagttctgctgcaatggtacagtggtccaggacacagaacttggacaggtcattcagctccagggtgatcagaggaagaacgtctcgaatttcctcgtccaggccggcattgtgaaggaggagcacatcaagattcatggtttctgagcaaccgccgggtccatagcaaaccaaccctgcatgcagggccagcttattatatataatatctgaggtggagcatatctatctggctgtgtactgcaagcaggcctagtacgccgcctgcgcgttcctcctattacacatat

SEQ ID NO: 43558 - DNA, 285 bp, Zea mays
ggcaagttcaagcatggtcacggccaccacggcaagttcaagcacgggcacggcaagttcaagcatggcaagcacgggcacggcatgtttggcggcggcaagttcaagaagtggaagtgatgtgccctccatggttgatcgtagctgaactcaggcttccaggacatgtgttgccagtaataccttttcagcgttactcatccttcatctgtatttccagtaatccagcttgtggcgagtgacataatgctaataagtgacataaatcattgctgatatgctgct

SEQ ID NO: 43559 - DNA, 301 bp, Zea mays
agctctgcgagtccgtccttgtgagcagcccggacaaggggtgtgccaatgttgtggctggtcgtgagagggcccccgtcttccttaccagcaacaacggtgttgcatccaacgttcgtttggcaaatgctctggggttccagaaggacgttgcccttcctagatgcgcgcagatcctcaagatgtaccaggatgaggatgaccgtgtctaattacgcctgagtttagatgtacttggcgagttacaatatatttatgtggtgtctgaaatgttctagaacctctaaatctattactaaga

SEQ ID NO: 43560 - DNA, 179 bp, Zea mays
gtattattactttcgttgaaaccgtgatgctattaagacttcatgaccaggtaaacattgccatcatagattacttgttcacgcgacaactgcaaggatgtcaacaagtaatctatgatggcaatgtcttcctggtcatgaagtattattactttcgttgaaaccgtgatgctattaag

SEQ ID NO: 43561 - DNA, 300 bp, Zea mays
cgctttagccattggcgcaaaatttgtgcctttgaggaagccgaagaagttgccaggcgaggtgatctccgaagagtattctttggaatatggaactgacaagatagaaatgcatgtcggagctgtacaggccaacgaccgggctcttgtagtcgatgatcttattgctaccggtggaacactatgtgcagctgtcacacttattgaacgtgttggagcaaaggttgttgagtgtgcttgtgtcattgaattgccagaactgaagggccgagacaagcttggggacaggccagtttttgt

SEQ ID NO: 43562 - DNA, 239 bp, Zea mays
gtgggcgtgctgcagtccgtggacgtgagcgccaagttcgtcaacggcaagccggcgcggatcgaggccaagtacgtcatgcgcacgccccgggactgggaccgcttcatgcgcttcatcgcagcggtactctcaggccaacggcctccagttcgtcaagaactgacgagccggctttgagatcgattgcctgcctgctgcgctacgttctgcttgcttgctagtgttcttttattttt

SEQ ID NO: 43563 - DNA, 293 bp, Zea mays
ggatgagtgtgtcaagatattgaagaattgcaagcaagccatatctccacgggatgcaggtgggaaggtaataatcttggatgtggtagttggatataaacagtcaaacataaagcatcaagagacacaagttatgtttgatttgtatatgatggcggttaacggagttgagcgtgacgagcaagagtggaagaagatcttcactgaagctggattcaaagactacaaaattctacccgtcattggtgatgtatcggtcatcatcgaggtctatccttgaatgctttgtgaac

SEQ ID NO: 43564 - DNA, 235 bp, Zea mays
tgcagagtgatttcttagctcaaggttttggatctttgggtttgatgacatcagtgttggtgtgccctgatggaaaaaccatcgaagctgaagctgcccatggcacggttacccgtcatttccgtgtccaccagaaaggaggcgaaaccagcacgaacagcattgcttcgatctttgcatggacaagtggacttgcccacagggcaaagctcgacgacaacgctagactactcga

SEQ ID NO: 43565 - DNA, 149 bp, Zea mays
gtccccccggaccagcagcgtctgatcttcgccggcaaacagctggaggatggccgcaccctagcagactacaacatccagaaggtgggcaccctccaccttgtgctccgtctccgtggtggtcagtaagtcatgggtcgtttaagctg

SEQ ID NO: 43566 - DNA, 294 bp, Zea mays
gacgcatcgaggttagcacgcgaagaagcgaccatgagggccaagtggaagaagaagcgcatgaggaggctcaagaggaagcgcagaaagatgaggcagagatcccagtaggcagcgacgagatggattgtggacctgatgacatgcgtgggtacatacatttcttcggatgcgttggtgtgcctgtggagagatgtcaacctgccatggtgtcacggtccgccatcagctgaacgtcttgcctgcacttcagtaggccacttttcatggttctagttgtatttgaatccagcg

SEQ ID NO: 43567 - DNA, 285 bp, Zea mays
ggagaaagtgtatctgcaactatacgaagcaatggaggcgttggtcaagatcaatctggagaccaacaagatcatggacttcatcaagtttgacgtcggcaacgtggtcatggtgactggcgggaggaacaccgggcgtgtaggagtcatcaagaacagggagaagcacaagggcagctttgagaccattcacgtgctgcttggagctttttgatatctatagttctctcctatttgttacagggaactctagatagtcttcaatttggtggtccaaagtgtgga

SEQ ID NO: 43568 - DNA, 284 bp, Zea mays
cagcagtaccaggacgccactgccgaggatgaggagtacgaggaggaggaagaagaggaagagacctaagtcattctccgcagtgcttggtacagatatgatattccttgtatcgctgttagtactcgtcagtttgaggttcgtgtggtgatgcttgctaggtactagatgggtggtattgcttatgaatgcgatgttgtcgtgacagaactgcatttcattttgtattatggttgttcaagatgttatattaccatgaggcgaggtagcttgactgagtgttg

SEQ ID NO: 43569 - DNA, 294 bp, Zea mays
ctcgagccgattctaatgatatcttcagcttgtaccaaaacaagtgccaatttgaagatagactcctggaaatggacagaatcttacgcccagagggtgcaatcataattcgtgacaaggttgatgttcttgtaaaagtggagaagatagccaatgccatgaggtggaagacaagattggctgatcatgagggtggccctcatgtacctgagaagatactcttcgcggtcaagcaatactggactgctgaaaaaacaagcagctaacgttgttcattttcatttttttctccag

SEQ ID NO: 43570 - DNA, 291 bp, Zea mays
gcgattgcccttggacaccctctgggtgcaacaggtgcccggtgtgtggctactcttctaaatgaaatgaagcgccggggcagagactgcagatttggtgttcccaccatgtgtatcggatctggaatgggggcagcagctgtgttcgagcggggagacgcggtggatggactctccaacgtgagggacatgcaggcacataattttctgtctaaggatgcgaagtagaggcgcagaaaaaccatccatcctagagcagcataagcctgctgcatttgtaatatattcgaa

SEQ ID NO: 43571 - DNA, 290 bp, Zea mays
ggacgtccttctcgtgggcgacgacccttggcaggaattcgtgagcacggtgtcctgcataaagatcctctccccgcaggaggtgcagcagatggggaagcagggcctggagctcctgagctcggcccccgcgcggaggctcggtagcagctgtgacgactacgtcagcaggcaggagtcgagaagcctgagcaccgggatcgcgtccgtcggttcggtcgagttgggatgagcagcaagatagcgcgcacgcagcagcagcagcagcaggttacgcatcctcagcctca

SEQ ID NO: 43572 - DNA, 291 bp, Zea mays
ggacgacgacgaggaggaggacgaggaggagggagaagaagggccggagggagaggaggagggcgatgaggatgatggagaggaagaagatgatgaggacggtgaaggggacgacgaagaagaaggtgatgaggaggctgaggacgaagacggcgaactgaaggatgacgagcttgacgcagacgcagaagacaaggagaacatcgaaagcaaggcaggatcttccctgccaaataagaggaaaaggaataacgaggatgatgccaatggatacaagtaaaacggtgaggg

SEQ ID NO: 43573 - DNA, 288 bp, Zea mays
gtgacgggaaatggggggagcatgagcttgactacctgctgttcatcgtccgggacgtgaaggtgcagccgaacccagatgaagtcgctgacgtgaagtacgtgaaccgcgacgagctcaaggagctcatccggaaggctgacgctggcgaggacggggtgaagatctccccctggttcaggctggtggtggacaacttcctcatgggctggtgggaccatgtcgagaaaggcaccctcggcgaggccgtggacatggagaccatccataagctgaaggagtgagggg

SEQ ID NO: 43574 - DNA, 290 bp, Zea mays
gtgaatagaatgaccaatgctatatgcagtagtataatgtgtactagtagttgaagtaatatatcaagctactcatcgttcttagatcttcttgtctgttgacttgtggtgtttgtgttcttcagctctccttgaagactgagagggaaaagaagcgtgagaagtattttcccatgcggaagtacgctatcatggcctagattagtgacagaacagcttttatcctatcaagttctgcccagaagtttcttgagtttgatgtaccgcacatctatcgtcattacaatgga

SEQ ID NO: 43575 - DNA, 165 bp, Zea mays
cagtacccaaccttcccctacaccagaaaaatccccagttctttggtccgcgtcagagaggcggcggcgatgtctgggcgcggcaagggcggcaagggtctgggcaagggcggcgcgaacaacccggacggtgctccgcgacaacatcaagggcatcaccaagcc

SEQ ID NO: 43576 - DNA, 289 bp, Zea mays
gtcctgcaaagcactatttttacacaacagtatgtggaacgtgttctagctaacgagagagacaagatgaaatgctgtagcattgaatatagtcatccaaagcagtcatcccaggcttttgtctatggagggatccttctggctggatttcttgtgtattcactggttattttcttctcttcacctgttcgctaattttatgtccagatgcagaaagtcttggatgctttatggtaggctaggtttgtctggggctgtcaatcttcatgagggaatggcctgaactgtc

SEQ ID NO: 43577 - DNA, 293 bp, Zea mays
ctcccgggtcatgttcttgtgtgccccaagcgtgaagtgaaaagattcgccgatctaagttctgatgagattagtgacttatgggttactgcaaaggaagttggtgcacgtcttgagcagtaccacaaagcatcttcacttacctttgctatccaggatggtcctcaagctggccaaacagttgcacatgtccacatccacctcatcccaaggaagaaaggggattttgagaaaaatgatgaaatatatgatgcgattgatgtgaaggagaaagaattgaaggagaagcttga

SEQ ID NO: 43578 - DNA, 239 bp, Zea mays
  unsure (1)..(239): unsure at all n locations
gtcgtctgtgtcagttgttagtgctgtgttcatcctcggtttcagcagacccatgcatcaaacagcatggactgcggatcgatggatgctgttacccccgtcaggctttattctaagttaatcttaaggaaaaaatggtgcttcttggtgctgcaaaaaaaaaaaanaaaaagtaaaaaaaaaaaaaaaaaaaaacaaaaaaaaggaaaaaaaaaaaggggggggcccccctttttttt

SEQ ID NO: 43579 - DNA, 277 bp, Zea mays
gcgggcgggtcgttcactgttactcgtgacacgtcaggggagcagcttggcaggggcactatgatcacactgttccttaaggacgatcaggcggagtaccttgaggagcgtcgcctcaaggatctggtcaagaagcactctgagttcatcagctaccccatctccctgtggactgaaaagacaacagagaaggaaatttctgacgacgaagacgaggaagagaagagtgatgctgaggaaggaaaggttgaggatgttgatgtagaggaagacgaag

SEQ ID NO: 43580 - DNA, 192 bp, Zea mays
gttggagccttgctacctatcttgcttttagctcatccctgatgctaatattctgtggattgtggttgaacaatcacacttgtaagactagcttgggaatactatttttctaagagattttcatttttccaaggaaaaataaactaattttctttggaaatttcaaatgaaaatactatgctaaaatgtggt

SEQ ID NO: 43581 - DNA, 294 bp, Zea mays
gcacatgtatcatgacatgtacatgaaggtcaaaggtaacgccttcaagaacaagagggtgcttatggagagtatccacaagtccaaggctgagaaggccagagagaagacactttctgaccagtatgaggccaagcgcgccaagagcaaggcgagccgtgagaggaagatcgctaggagggaggagaggttgggcccaggtccacgagaaataacaccacctgtctcatccacagctccagctactgggcgcccgaagaaagcacagaagtgaagtattgaaataaagcgtag

SEQ ID NO: 43582 - DNA, 294 bp, Zea mays
gagatagctagctagatcattcacaaaagctccagagatgatcagtcataaaagcaccacaacgacatcactccagcttgaagcagttcaaaagcccacaactacatcactaatgtttcatatcactccagctctggttcaaaagcccataactacatagttaacatataagcattccagaaattcagttacgggatccttgtagctatggtgctcctgttgaatgaccttaatcaactctttaagcatattccttctccgtttgttgacaacaactgcagtagctagatacct

SEQ ID NO: 43583 - DNA, 309 bp, Zea mays
tggagatcctgcgggagttcgcgagcgacgtcgcgcacgcccgctggtggaaggtgcacaaccggatgcccaggaagctccagagctactgccttctgaagtcgagcctgaaggccgggctggagtgggagcggcggcaggccgagaaggcgaacttcacggacgggcattggaagcggaacgtaacggacccgaggctgaagacctgcttcgagaagttctgcttctgggagagcatgctgtggcactggggcgagaagagcaagagcaactcgacgacgacgcggaacagcgccgtgccggcaacga

SEQ ID NO: 43584 - DNA, 293 bp, Zea mays
gttcgaattaccctcggtgccctccctctcggcggcggcgcaagttgccttcatctacggcgcggcaaatggcaggtggcagggttgcacatgctaccctcaagggcccagcgtggtgaaggagatcttcattggactgaccctgggtctgatcgctggaggtatgtggaagatgcaccactggaacgagcagaggaaaactagatccttctacgacatgcttgacaagggccagatcagcgtcgtcgtcgaggagtagttcccacgtgtcacctcagaagtttttttttcca

SEQ ID NO: 43585 - DNA, 291 bp, Zea mays
ctcatgcattacactgctacccgtgatgagctgctggagtcagccggcgaggtgtttgccaatgtcgctaacggggtgctgcacgtccgggtgaaccacacgtatccattgtcggaagctgcccaggcccatgcagatctggagggcaggaagacatcagggtccatagtgctcatcccgggatagactcaagggcatgtgaatgaataaatggggtgatctggttatgggaacggcgtaataataattatatctatgctgtttatgcggtatgttcgagtctgtttctga

SEQ ID NO: 43586 - DNA, 294 bp, Zea mays
gtttggaactgctggttgacaagactgcaaatatgcaaggaaatacagttcgattcaagagacaagctcggcggttcagaaacactgtttggtggagaaatgtcaaactcacggccgcattgatacttctcctcctggtaataatatatgtcgttctagtcttcgtgtgccatggtttcaccctaccaacttgcataaggtaaggcatgatgtgcacatagtgctttttgctgtgcatgtttgtgcctatcacggggtccggggggcagcagccattgcaattgtttcttgtgt

SEQ ID NO: 43587 - DNA, 121 bp, Zea mays
  unsure (1)..(121): unsure at all n locations
ggnaaaacagaacagtctgatttactgagtcatgcttcagtttgtttcctttcattttgaggaattgaaatcttacttatggaatagactatttttttgaaaaaaaaagaaaaaaaacaaa

SEQ ID NO: 43588 - DNA, 291 bp, Zea mays
ctcgagccgctcgagccgtggagatagatgaatgcgaggagacgactatgcatgatgtgagcaacatcgaggaagagatgcgcaggaagcaagctcacgctgcccaggaggcgtacgaggaggacgacgagatgccgggcggagccaagagagtgcagtgcgcgcaacagtaagcagactatcatcaaggcaattgggaggggtggtgcccttaaagcatgggagtgatctctggttttgctgtcgccgagctgggaaataggaagctgaatcgacctcgcaagcggggaa

SEQ ID NO: 43589 - DNA, 289 bp, Zea mays
ctccagaggaccgtccctgctgctgtgcctgctgttgtcttcctctccggtggacagagcgaggaggaggccaccctgaatctcaatgccatgaacaagctcagcaccaagaagccatgggccctgtccttctccttcggccgtgccctccaggcgagcaccctcaaggcctgggctggcaatctggagaacgtggcgcaggctagagcggccttcctcgccaggtgcaaggccaactccgaggctaccctcggcacctacaagggtgatgctgccgccgacaccgaga

SEQ ID NO: 43590 - DNA, 283 bp, Zea mays
ggccatcctgctggaccattggacagaaaaaagttttttggagattttaagtatatcattggtggatgtgcttattcactgtcagcaatccaaaatggcattctaagtggcaaccaaaggccaccatacaacattgccaaacctttcgggcagaaagaccgaagatccaaggtggcccttccataccatgaacctcttgttcactttgctttgatatgtggcaccaaatctggacctgcacttaggtgttactcaccaggggatatcgataaagcattgatgg

SEQ ID NO: 43591 - DNA, 220 bp, Zea mays
ggattggagagagaagcgggatgagttcaagaagaaggttaggcaatgtgtccgcaggtctcaggaaatgctgtgaaggaggaacatgggggagttgaatgagtctgcaatcggtgtgctgcaattcacaaccaattatctcatgtcagcattcttttgctttcccctgtatattttttcaaccgatgtcactcgtatagtggtgttgggtctcttaaga

SEQ ID NO: 43592 - DNA, 286 bp, Zea mays
gtggcggtggcggtgtggctgttgtggcagctgcccctgctgctggcggcgctcctgcagctgaggcgaagaaagaagagaaggtggaggagaaggaagaaagtgatgacgacatgggcttcagcctcttcgactaagcctgtgcaatagtcaagagtattgtttttgagtcgcggaagcagagggaagaaaaatcgtagtcatgtttggactttaatttgttttatgttggaaagtacttgaaagacttttcctgtggtaattctaggcgtaggttgctgtgctg

SEQ ID NO: 43593 - DNA, 234 bp, Zea mays
ggagggcgagttctccgaggctcgtgaggatctggcggcgcttgagaaggactacgaggaggtcggtgctgagtttgacgagggtgaggacggcgacgagggtgacgagtactagacgctctactggcgcggcgtcgtcgggcttgtgtgccactgctatcctgtgatctgccctgagtacctcctatcgtgttatgtttctgtcggttcttatctatctgtcgttgtgtggtt

SEQ ID NO: 43594 - DNA, 289 bp, Zea mays
gtaatcactatcacaaacttcaacttccgcatgaattacacgcagtggaacttagtagcccagcatccaaactttgataatatcactcagttgttcagcttcaactacaaaccacttactccatatggtggtggcataaatgatacggcaatgttctggggtgtaaaattctacaatgatctgctgatgcaagccggcaaacttgggaatgtgcaatcagagctgcttctcagcaaggactcccggactttcactttcgaaaagggatggcgcttcccacgccgagttt

SEQ ID NO: 43595 - DNA, 287 bp, Zea mays
cgaggtgcccaggtccttgttgacccagaacttgttgactatctgatttctacccttgaaaaggtggggaaagttggtgtttcatgcactcagattcctttgcttgctctagaatatgaaccaccaaggaccaattcatttaaaactgtagaatcatcgctcagggttgatgcccttgccagtgcaggatttaaaatctcacgcacgaagcttgctagcttgataagttctggtggatgttcgtgtgaattggacaccaacaacaaaaaatggagttaccctcaaat

SEQ ID NO: 43596 - DNA, 283 bp, Zea mays
ggcaaatccggaaccatgagactgttgaggagcggagatgttgtctttgagggtccatgcgagtctctgaagcgggagaagaaggacgcagaaacagtcgaaaagggtaacgactgtgggctggtgattcaggattgcgatgatttccaggtaggggatatcatacagtgcgtggagcaggtgattaggaagcccaagttcatctcgacgcagagtggttcggttcggattgaatgctgaaatgtagtaatggttgtggctgacactactgttccatttccct

SEQ ID NO: 43597 - DNA, 270 bp, Zea mays
ctcaaatttatttttatttgaagtgatattgcacttgttctagttgctttatgttgtgttggcataaatcaccaaaaagggggagattgaaagggaaatgtgcccttgggccatttctaagtattttggtgattgagtgccaacacaagtacttaaatgtgaatttatgcccatggatggacaaagtgcaaatcaagagtaaaggtatgtttctaagccttagtacattggttttgtgtactaatatacttgtctaagtgttagagacag

SEQ ID NO: 43598 - DNA, 246 bp, Zea mays
gtacttggagagaagagagtgtgagtacgaccagaaaatatccattgatttctacaaggaaggagatcccttgaaaccagctgtgacgggcgtcttagtgttcgtttccactccagatccaattggcaacaagtactatcttggccctgctcctctgcaggatatggcaaggcaaattgctacagccaatggccctactggctataatagggattacctgttctcaatggagaaggcattagccag

SEQ ID NO: 43599 - DNA, 288 bp, Zea mays
ctgaggtggaaatccatgacgggccatacaacgtcatcaagaactggaactacactggctttgtggacgccatccacaatggcgagggcaagtgctggacctccaaggtgaagagcgaggaggagctgacggctgctattgagacagcgctaggggagaagaaggactgcctgtgcttcatcgaggtgatcgggcacaaggacgacaccagcaaagagctgctggaatggggctctagggtttctgccgccaactcccggccaccaaatcctcagtagaagtcccgca

SEQ ID NO: 43600 - DNA, 280 bp, Zea mays
ggaacatggctgcgatcctcgaaattggcgagaacatggatcagaacttcctccaattcgacccagctccgcggcagattgagccggacatgacgcgcaagaccccagactactttttgtaatcagcatgctggctttctttcaacttgtctactgcagcgccagcacctgtagatctccttagaaaatggtgtttcctctagccgccttgtacccccatcattcttttggtgtggagatttattgccgcttctcagaacattgaggttgttgaaagtac

SEQ ID NO: 43601 - DNA, 282 bp, Zea mays
caggaaggccttcttgcactggtacacgggggagggcatggacgagatggagttcaccgaggccgagagcaacatgaacgacctcgtgtccgagtaccagcagtaccaggacgccaccgccgacgaggagggcgagtacgaggacgaggaggagggagatctccaggactagaataggctgcttcacattcagtcaccgtcagtctatgaaaaactaatcatttgctgcttttcgtcgtcgtcgtagtagtagtaggtcggtaatcatctgtcgtgggtgtg

SEQ ID NO: 43602 - DNA, 278 bp, Zea mays
gcgggctcctcgtgtaccagagcttctgtgctgctgaagacgctgttgctacctcgcccaaatctgttttccactgctttgacggcgagaacgtggagagtgctcctcctcctatgaaggaagactacaagctggctaatcttctctgctgggaggaggaagcggatgccatggaggagaaggcgggagtgcttgatgagtaagacgggctctggggtcgatttgcttctgagttgtttattttatatcgtcgcaatttcgtggttgtcgtttggtta

SEQ ID NO: 43603 - DNA, 90 bp, Zea mays
ctctgctggtgatagtgggattccctgcatatttatgtgaagccacctgtcggtatgtatgcacagatgcagcagcaacacaaatctggt

SEQ ID NO: 43604 - DNA, 277 bp, Zea mays
cagggatattctgttggaaaatctctcgtggaagaggataaactcgagctcgcaacttctcttattgagaaggcgaaggcaaagggggtttctcttttgcttcccactgatattgtagtagcggacaagtttgcagccgatgctgagagcaagattgtccctgccactgctatccctgatgactggatgggtcttgatgttggccctgatgccaccaaaacattcgacgaagcattggacaccaccaagactgttatttggaacggcccatgggagt

SEQ ID NO: 43605 - DNA, 279 bp, Zea mays
gcaaatacttactcaaagtctaagggatcggctgcaaccatatgttgatgggaagcaagatgagtttggtgattgggcaagtgcagaagctcagcgtttgtctcaagctgcttttggtgaggctatgcttcacacgattggctacatctatgttcggcaagcagcacgagaacttggaaaaagcaaactgtatatgggtgtaccttttattgctgagtgggtaagggacaagggccaccacgtaaaatcacaggttaatgctgccgcaggtgcaatttc

SEQ ID NO: 43606 - DNA, 113 bp, Zea mays
tcagactgggaggataggaattatagttgtatattacagtacgactgcttactgcatccagattgtgttgtcccttgtctggtgtagcttctgttgcttgctgcgttgcagtg

SEQ ID NO: 43607 - DNA, 273 bp, Zea mays
cagatagctagctagatcattcacaaaagctccagagatgatcagtcataaaagcaccacaacgacatcactccagcttgaagcagttcaaaagcccacaactacatcactaatgtttcatatcactccagctatggttcaaaagcccataactacatagttaacatataagcattccagaaattcagttacgggatccttgtagctatggtgctcctgttgaatgaccttaatcaactctttaagcatattccttctccttttgttgacaac

SEQ ID NO: 43608 - DNA, 274 bp, Zea mays
ctcgagccgtgcttcgcaaaaaacttcaggacattaagaatgatgataaactgattcaagctgagggagttgaatctctctctgaagaagagctccggcaagcctgccgggaacgtggtcatctaggcctgctgtcaactgaagagatgtgccagcagctccgagactggttggacctatcacttaatcatgctgtgccatcttcacttctcatactttcaagagcctttactgtgtctgggagaatgaagctagaggacgctgttgtagcaac

SEQ ID NO: 43609 - DNA, 278 bp, Zea mays
aagtggaggagattgatatggatgaagaaagtcttgcttatttaggcgagatcggacagcagacatctttgagacatgctattcaattgatatcacctgccagcgtggtctcaaagactaatggaagagagaaaatctgcaaggctgatctcgaggaagtcagtgggctctatttggatgccaaatcctcggctcggctgctccaggagcaacaagaaagatacatcacctagatttggatctcctgtcgtggaagtctcgaagagaatgtagttgcc

SEQ ID NO: 43610 - DNA, 279 bp, Zea mays
aaccctcgttcctgtcgcgcagcacgacctccacttccacatcttccccggcggcggcgcggtcagttgaaccatggcggactccaaggccacctcggcggtcaccctccgcacgcgcaagttcatgaccaaccgcctcttggcccgcaagcaattcgtgcttgaggtgatccaccccggccgcgccaacgtctccaaggcggagttgaaggagaggcttgccaaggcgtacgaggtgaaggaccccaacaccatctttgtcttcaagttccgcaccca

SEQ ID NO: 43611 - DNA, 273 bp, Zea mays
ccgagggcaaggcaaggaaggttgtaggctgctcctgtgtcgttgtcaaggactacggtgaagaatctgagggccttaacatagtgcaggagtatgtcaagtcgcactagatgtaacacgtttcagtaatactctacatttggatctgggcttaatattatgcttgcgtcttgggcttgctaggagattaggacaatttactacaagagcccatgaggatatgagcaatttggaattctaaatgttttgtttatggtgttgtcatctggtttt

SEQ ID NO: 43612 - DNA, 261 bp, Zea mays
aacagggcgatacagccctgtcgatctgttccttgttggatataagctggcactcctattgcagtgtcagcatcagtggactcgaacgccattatggcgttatccttgtgccacctttgtaacaagtagttcgttcttgttcttgaaccgtgtgttgtagttggccttggccgcatgctacctttgctctgtacggctgtgcctacaaagttgcggtggaacatgcagactcataataaagcatgcttgggctcttgtgat

SEQ ID NO: 43613 - DNA, 272 bp, Zea mays
gcgccaaggagagcccgcaaggaggcgactatgagggccaagtggaagaagaagcgcatgaggaggctgaagaggaagcgccgaaagatgaggcagagatccaagtaggctgatggggattgtggatggtggtgtcggcatagttgtgttacgtttcttcgatgcgtgagttcatggagagatgtcacatcctagttcgtcgtcaccgtttgccatgggtccaatggctcgtcttggaaacctgcacttcagtaggccatctatcgtggttt

SEQ ID NO: 43614 - DNA, 269 bp, Zea mays
ggccacccaagaagggttcagctgttctgcgccctcgcaccaggactctgactgctgttcacgatggcatcttggaggatgttgtctacccagctgagattgtggggaagcgtgtcagataccgtctggatggttccaagattatcaagattttcttggacccaaaggagaggaacaacactgaatacaagctggagacctgcactgcggtctaccgcaggctgtgtgggaaagatgtggtctttgagtaccctatgaccgaaaatgca

SEQ ID NO: 43615 - DNA, 104 bp, Zea mays
ctgatactaacaggtactcctgagggtgtgggtcctgtccgagtaggtcagaagattacagctggtataactgacctaattgatgttgagttcgatgttcagag

SEQ ID NO: 43616 - DNA, 262 bp, Zea mays
ggatgatgaagagggtagtgaggaggatgaagatgatgacgagtgatggagctcctcgagacaatggaccgtgcttcatccaacaatggagcggctacacaaggccccgtggcgatcacaaaaaaagagcctatatccatgtactagaattattcaatttcactccacatcgtgatgttttatttttacttttgtcgtgctataacggatagcgctcctcgttggcgccactggacggtggttctgcctctggtctggtgtg

SEQ ID NO: 43617 - DNA, 124 bp, Zea mays
caccgaccccctggcttctgagcccggcaccatccgtggcgactttgctgtcgatattggcaggaatgtcattcatggaagtggcagcattgagagtgctaataaggagattgccctgtcgttc

SEQ ID NO: 43618 - DNA, 339 bp, Zea mays
gctcgatgcagcgaagtagctcggatcgctcgagcatgctccaaggaggtgacttcactcttggggatgggaggggtggtgaatctatctatggcatgaagtttgctgatgagaacttcaagatcaagcacactggaccaggccttctgtccatggccaatgctgggagagatacaaacggatctcagtttttcatcaccaccgtgacaacaagctggttggacgggaagcatgttgtgtttggcaaggtgttgtctggaatggatgttgtgtacaaggtggaagctgagggccggcagagcgggcaaccatagagcaggttgtcatggcagatagcgg

SEQ ID NO: 43619 - DNA, 303 bp, Zea mays
ctcgagccgcacggtcctcttgaggggccccaagaatgcccatgaggcagtgaggcaacttggcaaggctcctggagtgccgcacagccacaccaagccgtatgtacgctccaagggaaggaagttcgagaaggctcgtggcaggaggaacagccgtggattcaaggtttaaaacaaattgaggccctccgtgttgccatcagcatagtgcaaccgttgtgtttgatcagtcgacagtaattagtcatcactctgtaccgagattagtagcacaatttgttgtcctggtttgaattttggaag

SEQ ID NO: 43620 - DNA, 241 bp, Zea mays
cagggctgcatccattgcaaggaagatctacctaaggcaaggcatcggtgtgggtggctttcagaagatctacggtcgccgccagaggaatggctcccgcccaccacacttctgcaagagcagtggtgctgttgcacgtaacatcctgcagcagctgcagattatgggcatcatcgatgtcgcatcccaagggtggacgactcatcaccaaccagggaaggcgtgatctggaccaagtggc

SEQ ID NO: 43621 - DNA, 303 bp, Zea mays
cttcaatggtgcatcaaacattgcgcaactggtggtttagcatgcctctctccagacggtctaaaggctatgcaagatgttgttggcttctacaaggagaacactgaaataatcgttgagacatttacatcactcggattcaacgtgtatggcgccaagaacgctccatacgtatgggtgcacttccctggccgcaattcgtgggatgtgttcgctgagatcctggagaaggccaatgtggtcactactcctggcactggatttggaccgggtggcgaaggctttgtgagggtcagcgcgttc

SEQ ID NO: 43622 - DNA, 300 bp, Zea mays
  unsure (1)..(300): unsure at all n locations
cgaccggctcatcatgaggaatgtcaaggggcccgttcgcgagggtgacatcctcaccctgctcgagtccgagagggaggccaggaggctgcgctgaagccctagcgttcttggtgggctcttgtatggtctttggtgtcttggaatttgtgctatgtttgaacttctgtgaatggtgnttaagagtagtaagcctggttataagattgcagttttgtttatcttggttgaaagtgcaattggtgttgagacatggttatccttgcgtatattatctataaaacgacgcatgcattgaat

SEQ ID NO: 43623 - DNA, 264 bp, Zea mays
atcagttaaagctgttttgtgatacagattatccagataaaccaccgactgtccgattccagactcggatcaatatgacatgtgtgaaccaagagactggattggttgaaccaagtctatttcctatgcttggaaagtgggaaagggaacatacgatggaggacattctgaccagcttaaaaagggagatgtcaactccacagaatcgcaggctgtaacaaactcctgaaggcaatgaagaccaaagagtaaagcagaaggggt

SEQ ID NO: 43624 - DNA, 298 bp, Zea mays
ctcgagccgtgctcaccaagtttgacaccatcgacgacaaggttcgagcagcgctttccatggtctacatatctggagctccagtcatgttcgttggctgtggtcagtcctacacggacctgaagaagctgaacgtgaaatccattgtgaagaccctcctgaagtgattgcaccatcgtgttgaagtgcagtctgttatctattgtatccccagtgacctttgtcatcctcatgttggacgtcgtcgtggatttgtaactggtcggattgcaacaagacttgtgtgcttgcgtcaacg

SEQ ID NO: 43625 - DNA, 229 bp, Zea mays
  unsure (1)..(229): unsure at all n locations
aanaaaaaaaatagccgttggctgccgcgaactagagtacatagctgcctatgtatctgatatcacaaatggggcgctggaatccattggcactttctgcaagaatctctatgatttccggcttgttctacttgacaaacagaagaaaaaaaaaaaaaaaaaaaaatacccgttggctcccgcaaactagagtaaatggccccctatttatctgattcccaaaatgggg

SEQ ID NO: 43626 - DNA, 289 bp, Zea mays
gccgcggtggccaccatcaagacgaagcgcaccatccagttcgtggactggtgcccgacggggttcaagtgcggcatcaactaccaggcgccgacactggtgccgggtgccgacctcgccaaggtgcagcgcgcggagtgcatgatctccaactccaccagcgtcgtcgaggtgttctcccgcatcaacagcatgttcgacctcatgtacgccaagcgcgcgttcgtgcactggcacgtcggcgagggcatggaggatgaggagttctccgaggcacgcgaggacctgg

SEQ ID NO: 43627 - DNA, 297 bp, Zea mays
gtgctcatgatggacttgtgaagggtcttcgcgaggctgccaaggccattgagaagcatgctgctcagctttgcgttcttgctgaggactgtgaccagccagattatgtcaagctggtgaaggcgctctgtgctgaacacaatgttcaccttgtcactgttcctgctgctaagactcttggcgagtgggctgggctttgcaagattgactccgagggcaaggcaaggaaggttgtaggctgctcctgtgtcgttgtcaaggactacggtgaagaatctgagggccttaacatagtgc

SEQ ID NO: 43628 - DNA, 299 bp, Zea mays
gtttgctcttcgtgagagaagggtgcacgttacccaggaggacttcgagatggcagtggccaaggtgatgaagaaagacacggagaagaacatgtccctgcgcaagtctggaagtgaggctcgtgcccacctttcacggcctccccgaagctagtggcagtgccttcatatccatatcttttaccaaagcagtggaatggtgtaacggcatgctctggacaatgttatctcaagttgcgccgcgcatgcttatgtttaaaattttccttataacggctgtagtgtgttgttgcaaagtt

SEQ ID NO: 43629 - DNA, 262 bp, Zea mays
caacagcaggacgcgagcatgacaggcaaagagcgaagaccatctgctcttttatcagtcagtcaggttgaatgagatgagtagccgttgggtcacttggcagaaaataaacaatagcggtagagcctgtactgtacgtaacgtaacctcctcgaggagttgtgaggtttgggacgtgattgcgaacatggtatattaatgattgttcatgtaaggtgctgtttggttcaagaaaaaaaagaaagaaaaaaaaaaaacacaa

SEQ ID NO: 43630 - DNA, 302 bp, Zea mays
ctcaaatcccttcatggtgtgatcctgagtggaagggattgatggaaagctgttggtccagtgatccagccgagagaccgtccttcactgatatatctcaaaggttgaggaaaatggccgctgcaatgaatgtgaagtgaaggttcggaagccatatttgtcttgattttccttagtcctggagtaacccggctgtcatttgccttgtgtcgaaaataagtatgctataaagcgttctgtcttgatgggaactgttgggctgtaattgtaaataagttttgacttgcttcatcttgctgtgc

SEQ ID NO: 43631 - DNA, 304 bp, Zea mays
ctgtgttgctctcgtggtggctgcacacattgagctggaaagctgggcttcgcagcaaggaatcaaatacaacgatttctcagatttgtgccagaagcaagaggctgttaaagaagtgcttggatctttagcaaaggctgcgaacaagcgcgacttgagaagtttgagataccagtcaatatcaagctgataccagagccatggacccctgagtcgggactcgtcactgctgccctcaaactcaagagggaggtgatcaggaagacgtacgagaacgatctggctgagttgtacgcatgatggt

SEQ ID NO: 43632 - DNA, 308 bp, Zea mays
ctcccgggtcatgttcttgtgtgccccaagcgtgaagtgaaaagattcgccgatctaagttctgatgagattagtgacttatgggttactgcaaaggaagttggtgcacgtcttgagcagtaccacaaagcatcttcacttacctttgctatccaggatggtcctcaagctggccaaacagttgcacatgtccacatccacctcatcccaaggaagaaaggggattttgagaaaaatgatgaaatatatgatgcgattgatgtgaaggagaaagaattgaaggagaagcttgacctggacattgagag

SEQ ID NO: 43633 - DNA, 309 bp, Zea mays
atgaccctgacctgatggcagcattcagtgacccagaggtcatggcggctttacaagatgtgatgaacaatcctgccaactttgctaagcaccaagcgaatcctaaggtgggccctatcatcgcaaagatgatggccaagttcaatgggtcccagtgatggttatgtcgcagtcaggttttgtgagcagcaagcaaaggtttgttggacagtgaacaggtgttcttttcgtgcatctggtctgggagtgtgtttagcttgtgatgaagaacatgagtgtgtgtgttggtcgtggtgcatctggaggtgc

SEQ ID NO: 43634 - DNA, 283 bp, Zea mays
  unsure (1)..(283): unsure at all n locations
gaagtattattactttcgttgaaaccgtgatgctattaagacttcatgacnaggcaaacattgccatcatagattacttgttcacgcgacaactgcaaggatgtcaatgtttgcctggtcatgaagtattattactttcgttgaaaccgtgatgctattaagacttaattttgtaattgaacatcgaatgtaaggcttacatggttatgagttttgtactaccctttgcaggctgttcctgtttaaagaaaagaatggtgtggagaaagcaggagacaaagaa

SEQ ID NO: 43635 - DNA, 297 bp, Zea mays
cttctttgacaaatgcaaggcagatccgagctactgggacaagatctcacagggcggcctgcagagaatctatgagaagtacacctggaagctctactccgagaggctgatgaccctgaccggcgtgtacgggttctggaagtacgtgagcaacctggagaggcgcgagacccgccgctacatcgagatgttctacgccctgaagtaccgtagcctggcaagccaggttccgctgtccttcgattagtacggggaaagaagaagaagaagaagcccaggccggagaaccatcgcctg

SEQ ID NO: 43636 - DNA, 298 bp, Zea mays
gtgaacctggccgagtgggggatgaagtggcagaagagaggagagctgcaccagatcatcgatcagaggatctcgggcacaatcaggccggactctctgaggaagtttggcgagaccgtggagatgtgcctggcagactacggcgtggagcggccgtcgatgggagacgtcctctggaacctggagtacgttctgcagcttcaggacgccgattcgacggtctcggatgtgaacagcatgaaccgtatcgtggaactcccgtcacaggtccagaacgtcggggccctcgagagcatca

SEQ ID NO: 43637 - DNA, 301 bp, Zea mays
ggatccgtaatgctgcaaggcacttgctcacccttgacgagaagaacccccgtcgtatctttgagggtgaggcgcttcttcgccgcatgaaccgatatgggctgcttgctgagggtcagaacaagcttgattatgttcttgccctcaccgctgagaacttcctcgcaaggcggcttcaaacacttgtcttcaaggctggcatggccaagtccattcaccatgctcgtgtcttgatcaagcagcgtcacatcagggttggcaggcaaattgtcaacgtcccatcattcatggtgagggtgga

SEQ ID NO: 43638 - DNA, 304 bp, Zea mays
agctcattaccaagattgataggcggtctggcaaagagcttgagaaggagcccaaattcctcaagaatggtgatgctggtatggtgaagatggttcccactaagcccatggtagtggagaccttttctgaatatcctcctcttggtcgctttgctgtccgtgacatgaggcaaacggtggctgtcggagtcatcaagagtgtggagaagaaggatccaactggagccaaggtgaccaaggctgccgcaaagaagaaatgatgtgtctggctggttctgtgtttgcttgagggatacctagtgga

SEQ ID NO: 43639 - DNA, 295 bp, Zea mays
agaccgtatacagggtcgcacggaaaggccgtggtctggtgattgctccaaaggactactccaccaagtaccgttactaagaaggcaggcattccccttatgcaatctattggggatgtttacacggacagttagtccgacaggtgatccctaactgtatcttggcataccctagtaattcaagttgctggctggagtgatgcttatccatgtcttggcatgccatagtgaacatgtaaacctgtgatttgaggtgattattcgagtgttgagaaaccaggattgctttcgccta

SEQ ID NO: 43640 - DNA, 293 bp, Zea mays
ctaagaagaagtctgaggctgctgagtaccagaagcttcttgcccagaggctgaaggaacagagagaccgccggagcgagagcttggccaagaggaggtccaagctttctgccgccgccatggcttctgctgccacctctgcttaagaatgttcagtgttttgggatctttgtaaggtctatcttgtaacggcaaaagtgttttgggatctttgtaagctccatagttcacatcacttaagtgtttctgctagtagtggatccacaactatttgcttgcttggctctgagtca

SEQ ID NO: 43641 - DNA, 287 bp, Zea mays
tgttgggtgtgaggacgaaaggtacagagaaggcagggaaggtgtcgaagctcaccaagggtgatatcctcatgcttaacatagggtccatgtcgacaggcgcccgtgtgctcgctgttaagagcgatcttgccgagctacaggtcaccgcgcctgtctgcacgagccgagaagagaaggttgctctgagccgtcgcgttgagaagcattgtcgcctcatcggatggggccagatccaggcaggtacaacacttgaagtaccagcgtgccaggtgtaacacgtcata

SEQ ID NO: 43642 - DNA, 301 bp, Zea mays
ggaggatctggtttctaccgacttccttggtgacagcaggtcgagcatcttcgacgccaaggccgggatcgctctgaacgaccacttcgtcaagctcgtctcgtggtacgacaacgagtggggctagagcaaccgtgtcgtcgacctgatccgccacatgttcaagacccagtagaggggttttttccccctgcttctcatggatggttgctgcttgtgtatgccgagaataaatgtggatggcgcgtgcctctgggtcgccaggttcatgctgagtctggacatgttttgcacttttgct

SEQ ID NO: 43643 - DNA, 303 bp, Zea mays
ggcgagttcgagtacgtggatgaccacagagctgggaagatcgtggtggagctgaatggaagactgaataaatgtggtgttattagcccacgttttgatgtaggtgttaaggagatcgagggatggacggcgaggcttcttccatctcgccagtttggctacatcgtcctaacaacttctgctggaattatggaccatgaggaggcccgccgtaagaatgttggtggcaaggttctaggtttcttttattgaaaatgtgtttttttgagccacagatgcgtccaagaactcgtctgatgtttt

SEQ ID NO: 43644 - DNA, 173 bp, Zea mays
gccaaaatggatggtactaccaatgagcatccacgtgcaaagtctgacggatacccaacaattctcttctatccagctgggaagaaaagctttgagcctgtcacgtttgagggggagcggacagtggtagatatgtacaggttcatcaagaaacatgctagcatccctttcaa

SEQ ID NO: 43645 - DNA, 175 bp, Zea mays
ctcgagccgtgcttcgcaaaaaacttcaggacattaagaatgatgataaactgattcgagctgagggagttgaatctctctctgaagaagagctccggcaagcctgccgggaacgtggtcatctaggcctgctgtcaactgaagagatatgccagaagctccgagactggttaga

SEQ ID NO: 43646 - DNA, 295 bp, Zea mays
ctcgagtcggtacttccgccaaagccttcgtccaagctgacagacatggagatagatgaatgcgaggagacaaccatgcatgatgtgaacaacatcgaggaagagatgcgcaggaagcaggctcatgctgctcaggaggcgtacgaggaggacgacgagatgcctggcggagccgaagagtgcagtgcgctcaacagtacgcagactaccaaaatgggcttcaaggcactttggttgctcttcaattatgcgagtacgcctgtggactgtatggttctatggttttgctgtcgct

SEQ ID NO: 43647 - DNA, 188 bp, Zea mays
aagcttttgggtctggatactggtgcgaggggtgccaaaagaatgactctgagtgctcgctgaggtacatcatggtgatcaagctctccgatcccactggtgaggcttgggtgtccgtgttcaacgagcatgcggagaagatcattggctgcagcgccgacgagcttgatcggatcaggaagaggagg

SEQ ID NO: 43648 - DNA, 287 bp, Zea mays
ggcacttatagctgattgtgaattatccgaggggatatactcctgtgcgaaaatcgaggatactgactcagtgtgcctgtggttgggtgcaaatgtgatgctggagtactcttgcgatgaggccaatgccctcttgaagaaaaacttggaaaatgctaaggccagcttagaagtccttgttgctgatcttcagttcttgcgagaccagcaaaccatcactcaggttacaattgctcgggtattcaactgggatgtacaccaccggagaagcaaacaggctgtaaagg

SEQ ID NO: 43649 - DNA, 284 bp, Zea mays
gcaccgggagctccgtggtctcacctccgcaggcaagaagttccgtggcctgcgtggcaagggacacactcaccacaagaataagccgtcgaggagggccacctggaagcgcaaccagaccctttccctccgccgcaaccgttaggcacatacaactggatgttctgctactgtggaacctacctcatgcatgctctgatagtatgtggtagttttgttgcatcgttaaattttgctacacatgttacgagctccatgaactctgttatcagtgaacatggaga

SEQ ID NO: 43650 - DNA, 298 bp, Zea mays
tgcgaacgtgtctgaggcggaaggtgtatacagtgccttggagaagcttggcatcgactgggaagaggttggaaagcagcttgagctggaaggcgtggactccttcaagaagagctttgacagcctactcgtgagcctgcaggagaagggcaacagcctcaagatggcgagtgtgtcaagctgagaagattgggtacctgcgagtgaacgattttactaaataaaatgctagcttgctagctctcctcttagtttttacgctgtacctttgctctcaattttctgagtcggctttgta

SEQ ID NO: 43651 - DNA, 87 bp, Zea mays
gcagagtcttgttacttgggcaacaccaaggcttggtgaggacaaggtgaaacaatgtgttgatccgagattgaatggagagtaccc

SEQ ID NO: 43652 - DNA, 297 bp, Zea mays
caagaaggtcctccagttcgccggcattgaagatgtctttacctcgtcccgtggctccaccaagacactcggtaacttcgtcaaggcaacctttgattgtctgatgaagacctacggcttcctcactcctgagttctgggccgagaccaagtatgccaagacaccgttccaggagttcaccgacctcttggctaagccgacaaagggtcttctgatcgaggctcccaccgagacagtggaagcttgaacgtcttagtttactgttccaagtgtcgcgaaaagagttttctgtactag

SEQ ID NO: 43653 - DNA, 292 bp, Zea mays
tgtaaatctgcctgcgggatcagctcctgcggcagctgctcctgcggatgaggctgaggatgatgatgaccttgatctttttggtgatgaaactgaggaggacaagaaggcagctgatgagcgtgctgccgctgccaaggcctcttctaaaaagacagcaagtggtaaatcctccgtccttatggatgtaaaaccatgggacgatgagactgatatgaagaagctggaggaggctgtccgcagtgtccagatggagggtctgacttggggagcatcaaagcttgtgcctgtt

SEQ ID NO: 43654 - DNA, 292 bp, Zea mays
ggcgaggaaggttgtaggctgctcctgtgttgttgtcaaggactacggcgaagaatctgaaggccttaacatagtgcaggagtacgtcaaatcgcactagatacagtctgtcagtatctggaagttgtgttcaacactacattttgcacctgagtttaaatatgtgtttggttcttgggctttgctaggagattagaacagttttcaagtgagcctaggatccatgtgaacgatttgaatatctcgcctcttgtcttgcaagtgatctcatctgctgttaatacaaaatcag

SEQ ID NO: 43655 - DNA, 267 bp, Zea mays
gctggatatcctggccttcatcgaagagtcctatgacattccacaaccagactcgaagtgagaattcagcaataacatggctctattactcttccttcaactggggtgtcaaactgcacctcgcaggcactcgggcggtagttgtgccattatggtgatgataataagggtgtgtttggtttggcttttggctttggctttggccccctaaaagccattgtcagaccaaagggctgaatctggaaagcagctttttctaaaagccga

SEQ ID NO: 43656 - DNA, 274 bp, Zea mays
cacgacctcaggaagaaagtgatgcctgccgtcatcgtccgccagcgcaagcgtggcgtcgcaaggacggtgtctacatgtacttcgaagataatgctggagtgattgtgaatcccaagggtgagatgaaaggttctgcaatcactggacctatcggcaaggagtgtgctgacctttggcctaggatcgctagtgcagcaaatgccatcgtttgagagcttgttggaatgtgtttagacttgaatatgatcatctcaattgtgtgttgcagctg

SEQ ID NO: 43657 - DNA, 298 bp, Zea mays
atttagtgaaggacaagattgagtcgcagaaggaagaaagagccaaagagaaggaggagaaagaccttgtggctcagcagaacatgtatgcacagctgcttcctctcgctttgcccgccccgccaatgcctggcatgggtggccctccacctccgatgggcggaatgggcatgcctccgatgggtatgccgccgatgccagcatttgggatgccaccgatgggaagctactgatttggttttgcagcatacctggaacttcattggagttgtagatggttgacagtttggaatcaata

SEQ ID NO: 43658 - DNA, 296 bp, Zea mays
ctccagtattacatcaacgagaagggtgacaaggtctacaccaccaagaaggagtcgcctcttggggtgccgacgcagtctgctcacccagctcgcttctcaccagatgacaagtactctcgccagcggtacctgttgaagaagagatttggtcttctgccagcgcagaagccagcactgaagtactgaagcttcaactttccaaccatggatgtgcagtttgcgtcactgcttaatgcttgttggctgggatgtagaaatcggtatctgaggaaacatatcaaacactgctaggc

SEQ ID NO: 43659 - DNA, 195 bp, Zea mays
gctaaattagtcactaactctttgttactgaactaaggttgctgatgtgtggtcatgcggagtgatgccatacgtgatgctgacgctcaccatacctgagatacgaaaccatccatggttcttgaaaaacctcctagctgaccaaatggatgacaatacgatgagtaagcagtacgaggagcctgaacaaccgat

SEQ ID NO: 43660 - DNA, 289 bp, Zea mays
gttcttcatctgcaccgtcgcgaccccttggctcgacggcaagcacgtcgtcttcggccaggtcgtcgagggcatggacgtcgtcaaggccatcgagaaggtgggcaccagcaacggctccacctccaaggtggtcaaggtcgctgactgcggacagctctcctagatctctctgatctggtctgttacggcgcacactctccgtcatcatcgactccccctgcgtccgttcctttggatctgaataagatggtggtgatctgagtggtggtcttagtttatcatgtat

SEQ ID NO: 43661 - DNA, 290 bp, Zea mays
tgggttgagaggcttcgagatgctgaaagcagtctacctggagccggtgcctttcagcatcgagaaggacctcaatactccaacctttaagctcaagagaccccagctgctcaagtattacaaggatcgggtcgaccaaatgtacaaggatgccaaggaggggagagctgcgccatgagcccatgacggcattgccaatttgccacgagtggctatgatcctgagcattgtgattcctcgaaagcgtgtacatattgattatcacaatttgtaagtttaaggcatgtgtg

SEQ ID NO: 43662 - DNA, 199 bp, Zea mays
tctgagtagtttccttgcaagtgtcgtcgcgtccctggagtgaggcagtttagtttgtagtttcttcgcttcatcggcactcgaccgttgttggattgggatgtttagcctgcagtctgtacttaccccaagcatctatgatgcctgttttaaaaaaaaaaaaaaaaaaaaaaaaaaaaaaaaaaaaaaaaaaataaaa

SEQ ID NO: 43663 - DNA, 283 bp, Zea mays
gtcccttgcaaatcatgcagcaagacattcaatagtgagatggctctgcaggctcactccaaggcgaagactggggccaaatgagttgcaggtccaactgagtccatgaaggagaagcatggtggccaagtgagtcgaaggtccattcgagtccatgaaggtgaagcatgggagatccaagcgagtctggaaagattgtcgatgttagtaggctgtccttattttgtttagagacttgtggctatgtgattgatgtagcgaaacaggctgtgatgtgttaact

SEQ ID NO: 43664 - DNA, 263 bp, Zea mays
cagcaacacagccatcgagattaggaacttcctcggcgagaagaaggtcaggaaggtggacatgcttgatggcgtgaccatcctccggtccgagaaggtcaaggatgagctcatccttgacggaaacgacgtcgagctcgtatctcgctccgccgccctcatcaaccagaaatgtcatgtgaagaagaaggatatccgaaagtttttggacggtatctatgtgagcgacaagggcgtcatcgaagaggagcagtgagcgacag

SEQ ID NO: 43665 - DNA, 289 bp, Zea mays
gctaaattagtcactaactctttgttactgaactaaggttgctgatgtgtggtcatgcggagtgatgccatacgtgatgctgacgatcaccatccctgagataagaaaccatccatggttcttgaaaaacctcctagctgaccaaatggatgacaatacgatgagtaagcagtacgaggagcctgaacaaccgatgcagagcatgaatgagttcatgcagatcctggttgaggcgaccattccagcagttggttcacgtggactcaatcagtttctgaatgatgacatt

SEQ ID NO: 43666 - DNA, 280 bp, Zea mays
cgtgctcctggcgatccgcaacgacgttgagctcggcaagctgctggctggcgtcaccatcgcgcacggcggtgtcctccccaacatcaacccggttctcctgcccaagaaggtggcggagaaggcgtctagcggcggcagcaaggagagcaagtcccctaagaacgccgccaagtccccaaagaaggcagccaagtccccgaagacggcttagaaattagtcactccactagcgctctgctgtagcatgttcgtgtttagatctgtggatgttatgtgt

SEQ ID NO: 43667 - DNA, 288 bp, Zea mays
caaggacaagcgcgctctgaagcttgccaagagaaagcttggaactcacaagagggcaaagaagaagagagaggagatgatgggcgtcctcaggaagatgagatcggctggtacgcacactgacaagaagaaataaagcatttcaagttcatgaatgtggcagccagagattatcaactgtgttttttccctacctctagaaactagacatggcaaagtatttttgaccgaaacattgtttgttagtaatgtattgaaccacctcgtggtattttgccccaacttcca

SEQ ID NO: 43668 - DNA, 284 bp, Zea mays
gagattgcaaagttttgaggaggaacacaagaatgctctccagagagcaaagaccctggatgttcctcatgctgcggacctgtctgaagaggagattcaggaggaggatagcactgcaccaccctctgatactcatagcgaaacaaccacggaaacaaaatctggaggtagaacgagttgggacgaactgatggagaagcttttcaccagggatgaagatgggagacttgtcgtgaacaaggacgcgatggcgagggaaattgttgtcctgtaacgagtgccga

SEQ ID NO: 43669 - DNA, 295 bp, Zea mays
tatttagtgaaggacaagattgagtcgcagaaggaagaaagagccaaagagaaggaggagaaagaccttgtggctcagcagaacatgtatgcacagctgcttcctctcgctttgcccgccccgccaatgcctggcatgggtggccctccacctccgatgggcggaatgggcatgcctccgatgggtatgccgccgatgccagcatttgggatgccaccgatgggaagctactgatttggttttgcagcataagtggaacttcattggagttgtagatggttgacagtttggaatc

SEQ ID NO: 43670 - DNA, 276 bp, Zea mays
gtaccgtactcttccctgagcccgctcgacatccccacgaccatcccgccatcgacagtcccggagtccgagatcctcgagcgcgtgtccaagttcttcagcgacattggggaggtgaacccgtcagaaggtccaatgaggcaaggcgagcccgatgactacgacgactacgagagggagcttcctgcgcggaagggaggcgcctgcatccctcccccgccgaatctgcttctgaaccctgagacagggatgcacgccgatggcagcatcgacagt

SEQ ID NO: 43671 - DNA, 285 bp, Zea mays
gtgagacacaagttatgtttgatttgtatatgatggcggttaacggagttgagcgtgacgagcaagagtggaagaagatcttcactgaagctggattcaaagactacaaaattctacccgtcattggtgatgtatcggtcatcatcgaggtctatccttgaatgctttgtgaacaaaggcctccataataaactgaagaccaagaaggtgttgatagtatattatgaattgttatttgtcctgtacacttgattctttgcgtatttgtaatgacaagttgagtaa

SEQ ID NO: 43672 - DNA, 282 bp, Zea mays
atgaccttgatctttttggtgatgaaactgaggaggacaagaaggcagctgatgagcgtgctgccgctgccaaggcctcttctaaaaagaaagaaagtggtaaatcctccgtccttatggatgtaaaaccatgggacgatgagactgatatgaagaagctggaggaggctgtccgcagtgtccagatggagggtctgacttggggagcatcaaagcttgtgcctgttggatacggcatcaagaagatgactatcatgttgacaattgtcgacgatcttgtgt

SEQ ID NO: 43673 - DNA, 283 bp, Zea mays
gctgagtttcgtttcaaatggggctatgagatgccagttgatgtgttagcaaaatggattgctgacaaagctcaagtttacacgcaacatgcatacatgagaccccttggagtagttgctatggtcttgggctacgacgaagagaaaaatgcacaactattcaaatgcgaccctgcgggtcacttctttggacataaggcaactagtgccgggctcaaggagcaggaagcaataaattttttggagaagaaaatgaaggatgacccgaaattcacctatgatg

SEQ ID NO: 43674 - DNA, 282 bp, Zea mays
gtaccaactgctggggaaacgcctggctatgcttcagaggtcattttcgccgacgggacattcatagatggaagcacaagcgaactgtcatgtgatgggcccttgagaagagaatatgccgtcttttgccagggaggaacacattggacgcagtgggcacttgtccttggtaatgttctgaaggtcatataaacgtgcggtgtgataatgttgtcacatttcttgatagggcatgctcttttcctatcctaactctgtactcgtttactaggaatggtggat

SEQ ID NO: 43675 - DNA, 280 bp, Zea mays
tagtgaagaagtggcagacattaatcgaagcccatgttgatgtcaagacaaccgacaactacatgttgcgtttgatctgcatcggcttcaccaagaggcgcccaaaccaggtcaagagaacctgctatgctcaggcatcccagatccgtcagatccgccgtaagatggttgagattatgatcaaccaggcttctacatgtgacctgaaagaacttgtttcgaagttcattccagaagttaatggtaaggagattgagaagtctacctccagcatcttccc

SEQ ID NO: 43676 - DNA, 294 bp, Zea mays
accatgctgtgaaatcgatccaagagaggtccaactccctgtttccctacgaacttctcgagatccttcgtgcccatgcacaggttgtggaagactttgcaaaatttgacattctgatgaaactgaagagaggcagcaaggaggagaagatcaaagccgaggtccataagagcctggaaggggcctttgtgctaaaccagcatcagccggcggagcatgatgagtcgagcagccagtgaactgacgtaactgtgtgagctgtagtagtaacgtacttcgtgttacgtagaagaa

SEQ ID NO: 43677 - DNA, 290 bp, Zea mays
gtcagcattagaaattgaggcagtactgttagagcatgatgctgtactggaatgtgctgtccttggcttgcctgatgaagcctatggggaggttatatgtgcaataattgtgcctaaggaggatgcaaagaaaaaggctggacaggactcaaagccagcgctaaccttggaagcattaacaagttggtcgaaagataagcttgctccatacaagattccaacaagactatacttgtgggattctcttcctcggaatgccatgggaaaggttaacaagaaggagctgaaga

SEQ ID NO: 43678 - DNA, 232 bp, Zea mays
gtatatgctggaaagaaggccttcacagcagcctgagtttatagactatgttccatgagtagtctatagaatgtctttttaattcaaaaactatctctcttctaggctggtgcttttcgactataatttggagattgttccatgtccgtgcaatcatctgaacatgttactacttattgtaccttgtcgtgcaaagttttgctaagatctctattgtttcatgtcttctgat

SEQ ID NO: 43679 - DNA, 292 bp, Zea mays
ctcgagcgcatgaggcaaacggtggctgtcggagtcatcaagagtgtggagaagaaggacccaactggagccaaggtgacgaaggctgctgccaagaagaaatgatctatctgtctggtgctgtgcttgcttgttggttacctcgtggaagcttaaaatatctcgtcttgttgacatccttgcagttgtcgcgtgaacaagtaatctatgatggcaatgtttgcctggtcatgaagtattattactttcgttgaaaccgtgatgctattaagacttaatttttttatggaac

SEQ ID NO: 43680 - DNA, 280 bp, Zea mays
  unsure (1)..(280): unsure at all n locations
gtcccttgcaaatcatgcagcaagacattcaatagtgagatggctctgcaggctcactccaaggcgaacantggggccaaatgagttgcaggtccaactgagtccatgaaggagaagcatggtggccaagtgagtcgaaggtccattcgagtccatgaaggtgaagcatgggagatccaagcgagtctggaaagattgtcgatgttagtaggctgtccttattttgtttagagacttgtggctatgtgattgatgtagcgaaacaaggctgtgatgtgtt

SEQ ID NO: 43681 - DNA, 283 bp, Zea mays
gcatgatctgctgacgaaacagtctttggctgggattcccttgcttgtacttggcaacaaaattgacaagtcagaagcgctttcgaagcaggccttggttgatcaacttggactggaattgataaaggaccgggaggtttgttgctacatgatctcgtgtaaggactctgtgaacatagacgtcgtcatcgactggcttatcaagcactctagaacagcgaagtaggctttctgtgtgtttgtatcgcttgatgcacggtgttttatcttttgtgaatctgcg

SEQ ID NO: 43682 - DNA, 289 bp, Zea mays
gagtctgtggactcgttgaacccgttcatgcatgcccgtggtgtggcattcatggtcgataactgctccacaactgctcgtttgggatctaggaagtgggcaccacgcttcgattacatcttgacccaacaggacgtttgtgactgttgacaagaaagcaccgatcaaccaagacctcatcagcaacttcatgtctgaccctgttcacggtgccatcgaagtctgcgctcagctgaggcccactgttgacatctcagtgaccgctgatgcagataacgtgcgtccagag

SEQ ID NO: 43683 - DNA, 287 bp, Zea mays
ttgttatccactgttaagtgtgagcctggatatggttttatgctgtacctttcccaggctgctcttggggaatcgaagaagagtgataatgccttgatgtatgtcaaaattgatgatcagaaacttgccattggaaccctctctgttgacaagaacccacacatacaatttgatctggttttcgataaagagttttagctgtcgcacacatcaaaaactacccgcgtcttcttcactggctacaaggttgagcagccattcgaggaagatggaatggatcttgattc

SEQ ID NO: 43684 - DNA, 185 bp, Zea mays
gtgaaagactgcttgatgatttgcgggtttgttgctgtgtaaaaaaaggtcccatggctcccagaagaccatgaaggttcggatctatcatgtaattccttgttatctgccaattatgtatggactatggacatgtgttgcgctgttcaacttactactacaaataagtaatcgatatgttccct

SEQ ID NO: 43685 - DNA, 259 bp, Zea mays
agcgattctgttatggctgaagcagaacttgcctcaaatgctgctgctggtgacaagcaagaacagccaaaggatgatgacgatctactacagcaggcacttgcaatgtcaatggagggtggcgcttcaggatctgcagctgtgactgactccgctatggcagaagctggtgcagttgaccctgacttagcgttggctcttcaaatgtctgtccaggatgcaaacatgtccagtgacactgatatgagtaaggtgtttg

SEQ ID NO: 43686 - DNA, 297 bp, Zea mays
tggatgcacaaattggaaaccgttggcagctgcttgatagggaccacgatggcaaggtgactcctgaggaggtggccgcagctgctgcctatctgaaggacaccatcgggaaggaaggcgtgcaagagctcatcaccaacctttcgaaggacacagaaggaaagatcctcgtggaagatatcgtgaggctagcatcgcaaacagaggaacacaacgacgacgaagagcaatcacggcagtaggtggtacttcccgagtatctagatgggtggcctattatttcaggaagaaaactac

SEQ ID NO: 43687 - DNA, 305 bp, Zea mays
gttttgtctcgctcacacctgtacaaactctgtgtttgtgcgagcaggaaacacagagtttgtacaggttttgtctcgctcacacctcgaaatgcgagtctgggaacgtggtgctggagcaactcttgcctgtggtactagtgcttgtgcggtggttgttgcagctgttcttgagggtcgagctgagcggaaatgtgtagttgatttgcctggcgggccattggaaattgagtggagggaggatgacatcatgtttacatgactggtcctgcagaggccgtcttttatggatctgttgttcacta

SEQ ID NO: 43688 - DNA, 306 bp, Zea mays
tctgaatccgagctgaagagcatcgagaagaagatcgacgatgtcgttgaggaggctgtcgagtttgctgacgcgagcccgcatccgccgcgcagcagctgttggagaacgtgtttgccgaccccaaaggctttggtatcggccccgatggtaagtacaggtgcgaggatcccaagttcacccaaggcaccgcccaagtttaaggaggttaatctgcgctctgtaccactgtacttgggttctctagttttgtcgatccagtgtcatgttaaggatactgtatgcataaggtggtccatttctttg

SEQ ID NO: 43689 - DNA, 306 bp, Zea mays
gcaggaggtggagatgatgatccagatcgcgctgctctgcacgcaggcgtcgcccgaggaccgcccgtccatgtccgaggtggtccggatgctggagggcgagggcctcgccgagaggtgggaagagtggcagcaggtggaggtgacgaggaggcaggactacgagcggatgcagcagcgcttcgactggggcgaggactccatctacaaccaggacgcgatcgaactgtccgccggcaggtgacgacgtcgggtcgtcacacggagcttgtcgtcgtcgacgtcgcagtgccgacatgtaactgt

SEQ ID NO: 43690 - DNA, 301 bp, Zea mays
tcgccgtgttccaggtgatcgtcggtgctgtcggtggtggtgcaatgatggtgagcggaggtggcggcggcggtgctgctgcatctggtggtgctgctgccgaggctcccaaggaggagaagaaggaagaggagaaggaagagagcgacgacgacatgggattctccctgttcgactagagttgtgtgtgtcatctggatctcagaagtggtggtttggtcctgttgccgatattaattttgctgtcctgtctgtgaacctgaagaactcttggtaattgttacaagcgacctgttccagt

SEQ ID NO: 43691 - DNA, 298 bp, Zea mays
ctcgaaagagaccgtgcgctgtgtcagtgtctgtaaatttgctgcaagttttgtatggggtgaccgagtcggtcgtgtgtgagaatcgaacggcgcagcatatccgccagtgctctgaggacgcaagccgtggatatctcacaatgtacctgagtgagctgtaacctgttgtgggcatattcggcaaccgattctgattcatcccgaaaatcaaaaccattgccgagtgccttgcagatgagctgatcaacgctgccaagggctcatccaacagttacgccatcaagaagaaggacga

SEQ ID NO: 43692 - DNA, 297 bp, Zea mays
gtccctggctcctagcagcatgaaggttaaagtgattgcgccacctgaaaggaagtacagtgtctggatcggtggctctattttggcttctctcagcacttttcagcagatgtggatctccaagggagagtatgacgaaactggtccgggcattgtccacatgaagtgcttctaagtttttttgggaaatttttccaataaaaaaaagaagtttctggggaagttcgacatggtacgtcaggcgttaccggctcattgtgaaccaatacatgaactgccatgataaggttataagca

SEQ ID NO: 43693 - DNA, 300 bp, Zea mays
ccaagctttcgaatgtgttcatgatggctggggtgttgctgtgctggtgggtgtgccacataaggacgctgagttcaagacccacccgatgaacttcctgaacgaaaggaccctgaaggggaccttctttggcaactacaagccacgcactgatctgccaaatgtggtggagctgtacatgaaaaaggagctggaggtggagaagttcatcacgcacagcgtcccgttcgccgagatcaacaaggcgttcgacctgatggccaagggggagggcatccgctgcatcatccgcatggagaa

SEQ ID NO: 43694 - DNA, 162 bp, Zea mays
ggggtttatcttcgtctgtggtcgtctcgtgtccgtttgtttcgtttcgtgttcattgttgttgttgcccatctgtgtttttgaccgcaagctcgctcctctgatgttgttagtgatgtctacaatcgtccaatcccgagcctgcattgagctccaccgatt

SEQ ID NO: 43695 - DNA, 298 bp, Zea mays
gtcgaccagaacagggcacttgtggacgcccctgatatggtcaggtgccagattaacttcaaacggctctcacttactgacatcaagattgacatcaaacgcgttcccaagaagtcaaccctgatcaaggctatggaggaagctgatgtgaagacgaagtgggaaaacagctcatggggcaagaagctgattgtccagaagaggagggctgcgctcagtgactttgacaggttcaaggtcatgctggcaaggatcaagaggggtggtgctatcaggcaagagctcgccaagctgaaga

SEQ ID NO: 43696 - DNA, 303 bp, Zea mays
catccacctgctcaccgatgccaaccccatccaggtcgtcgtcgacgcgatcatcaacagtggaccccgtgaggatgccacccgtattggttccgctggtgttgtgaggaggcaggccgtggatatctcacccctgaggagggtgaaccaggccatctacctcctcaccactggtgccagggagagtgctttccggaacatcaaaaccattgccgagtgccttgcagatgagctgatcaacgctgccaagggctcatccaacagttacgccatcaagaagaaggacgagattgagcgtgttgc

SEQ ID NO: 43697 - DNA, 294 bp, Zea mays
aaaccaactgctggggaaacgcctggctatgattcacaggtcattttcgccgacgggacattcatagatggaagcacaagcgaactgtcatgtgatgggcccttgagagatccatatgccgtcttttgccagggaggaacacattggacgcagtgggcacttgtccttggtaatgttctgatcgtcatataaacgtgcggtgtgataatgacgtcacatttcttgtatgggcatgctcttttcctatcctaactctgtactcgtttactaggaatggtggatactcactccgtc

SEQ ID NO: 43698 - DNA, 290 bp, Zea mays
gagcaatgagacccgctacaggtgcatctggggcaaggtcacccgtccgcacggaaactcgggcgtcgtccgtgccaagttcatgtccaacctcccgcctgagtccatggggcgcaaggtcagagtgttcatgtacccgagcagcatctaaggttttgttggagtaaagatggactagaaatggccatgtgtttatttctcacttttctctgaacttaaaatgccttgtgttggtaacttagattgttcaagtgctgaacctgtggaagttgtgccaaaatttgttgtcg

SEQ ID NO: 43699 - DNA, 287 bp, Zea mays
ggacttgcacacagggcaaagcttgatgacaatgctagactacttgacttcacccagaagcttgaggctgcctgcgttggagccgtcgagtctgggaagatgaccaaggaccttgcccttctcgttcacggatcttcaaatatcacgaggagccattacctgaacacggaggagttcattgacgctgttgctgatgagctcagatcaaggctggcagccaactcgaacctttgaaatccttgccgaagttgtggtgctttcctgcgcgacgctttcgaaccgttttt

SEQ ID NO: 43700 - DNA, 291 bp, Zea mays
ggtggctccgcggaaggaatctctcgagcgatgaccggattatgcgcctcaaagaagggtatatcaaggagggcagcaccgtgagcgtgatgggtgttgttcaaaggaatgagaacgtgctgatgatcgttcctccggctgaacccatctccactggctgccaatgggccaaatgcatcctcccgaccagcctcgacggtctggtcctgagatgcgaggacacgtctgacctggatgtggtaccagtctagttggttccggcgcggaggaggagaaaaagatgccttgact

SEQ ID NO: 43701 - DNA, 297 bp, Zea mays
caggggctggtgagcgacccgcgcacgagctggctcgtccagggcttcgccgacaaccactggtggttcttcgaccagttcaggacctccatgatcaagatgagccagctcaggggaccccaggggaacgtcggcgagatccgccgtaactgcttccgcccaaacaccaacggcatcgccgcctctgcttgagttgactgaccaggcaccgatccattacttcactttcactgtgtgtaataattaataattataaaacaaaaacaacgccagcccgtacgtgccgtgtgagggggg

SEQ ID NO: 43702 - DNA, 181 bp, Zea mays
gatcctttgaagacttctaaactgaagggtgttcttcactggattgctgagccagcacctggtgtagagccattgaaggtggaagtaagattattcgagaaattgttcatgtcagagaatcctgctgaattggaagattggcttggcgatcttaacccacactcgaaagaggtgataaagg

SEQ ID NO: 43703 - DNA, 299 bp, Zea mays
cgagggtgcaccaagtttctccttagcaagctgaaggaccttcaattttttgttggtgagagcatgaaggatgatgcgtccgtggtattcgcctattacaaggatggtgccactaatccgacattcctctatttctctcatggtcttaaggagatcaagtgctaggcttgcggcgagattagttacccatgttgggtactatctatgtactattgttatatccacaactatagttgtcctggttgaattgaactcaaaagggtttgtttgagaaaaactgtccaagttggatgcttgtt

SEQ ID NO: 43704 - DNA, 318 bp, Zea mays
gtggaagttggactcaagaaactctgtgttggaatggtctattctccttattgatcagtcaaatcgcagtggttccatggaatttgttgttcccccagctgatccgtcatcatttttccccatctctgttggattttctgcatcgagtactttcagtgatctgaaggttactggaatccttcctctgaaggaaggcaaccctccgaagttttcccagcgggctcgtttgctcacagctaactatcaagttgtttaatggttgtaccgttgtccgagtgttgatccacttaaatatattcgaatagcatatttttgtga

SEQ ID NO: 43705 - DNA, 286 bp, Zea mays
tatccctccgcgtggcctctccatggcctccaccttcattggcaactccacgtccatccaggagatgttccgccgtgtgagcgagcagttcactgctatgttcaggaggaaggctttcttgcattggtacactggtgagggcatggatgagatggagttcaccgaagctgagagcaacatgaacgatctggtgtccgagtaccagcagtaccaggatgccactgctgatgaggaggcggaatacgaggacgaggaggccatccaagacgagtaagggtggtttggg

SEQ ID NO: 43706 - DNA, 292 bp, Zea mays
actggatgctcgttggcgacgtcccgtgggagatgtttgtcgagtcatgcaggcgtctgaggatcatgaagagctctgaagccataggtcttgcaccaagaacgaaggacaagtgcaagaacaggagctgaagaagatacagcgttaaagacgctgcccgttgtgtcaaaagaatggtgcccttgcagtgtgctgcggtttttctagaaatataatgcgttttaattactagttggagggagactgtcttgttcatttgttcaggaccagagcatatctatcggtgtagctg

SEQ ID NO: 43707 - DNA, 187 bp, Zea mays
gccaagaggaggtctaagctttctgccgccgccaaggcttctgctgccacctctgcctaagaatgatcagtgctttgagatgttttcaaggcctattttgttacagcttataagtaccttatgctgccctggctgtgttgcatcagtcgaccctccctacttagacttatgagtaattgttgcaatt

SEQ ID NO: 43708 - DNA, 256 bp, Zea mays
gtggagaagtgaagccagagtatgcaggatctgcgttggatgaactcaagcatatcaggcaagctgtcggtttcttggtcatattcaaaaagttcaggatttcatatgatgagattgtcaatgatctctgcccagtactaagtgtgcagcagctttacaaaatatgcactcagtactgggatgataaatataacacagagagtgtgtcagaagaggtccttgaggagatgcgaacattgatgaccagggatcaagc

SEQ ID NO: 43709 - DNA, 182 bp, Zea mays
ggaaagagggaatgagccaggaagaggcagagaaatttgtggtgaaggtagtttcccttgctatggcccgtgatggtgctagcggaggggttgtccgtacagttacaataaatgcggatggcgtgaagaggaacttctaccctggcgacaagctacccctgtggcacgacgagctggagccc

SEQ ID NO: 43710 - DNA, 286 bp, Zea mays
gcctacgggggctgatgtggcgaagttgaaagagatgaagaggcaggaggagattgagaagaacaagcttgccttggagaggaagaagaggcaggctgagaagcaggcagcaaaagctgtggcccgagcacagaaggaagctgagaagaagctgaagaaagaggagaagaaagccaagaagaaatctggtgcagctgacactgatgagccctcagaatcggatgccaagtctgacgaagccatggaagccccagcggaacaagagtggccccagttccaccaggta

SEQ ID NO: 43711 - DNA, 291 bp, Zea mays
cacatgccctcacaagccagaaggttccatgtttgtcatggtgaaactaaatttgtatcttttggagagcatccatgatgatattgatttttgttgcaagctggcaaaagaagagtccgtgattttgtgtccagggagtgttttgggaatggaaaactggatccgtatcactttcgccattgattcatcttctcttcttgatggtcttgagaggctgaaatctttctgccaaaggcataagaagaagaatttgcttaatggccattaactatattcgacttcaaagttgtt

SEQ ID NO: 43712 - DNA, 291 bp, Zea mays
accaaagtatgggcttatattccactcctcctttattggccgtgcttcaactaagaacaagggcagaatggctcgttacctggcaaacaaatgctcgattgcttcacgcattgactgctactcggaggctagcacctctgtctttgggcaaaagttgcgtgagcaagtcgaggagagactggaattctatgacaagggtgttgcgcctcgtaaaaaccttgatgtgatgaaagccgctattgacagcatggtcaatggcacctcaatggatgatgatgatatcgagaagac

SEQ ID NO: 43713 - DNA, 287 bp, Zea mays
tcttagactcccaactgatgagactcttgtggcccagattaaggaagggttcgaaagcgggaaggatcttgttgtgactgtccagtctgcgatgggggaggagcagatctgcgcgctgaaggatgttggccccaagtaacttccttggctttggagacggaaccctactctatctcaacttaaatcggaaaagaagtgtatcaccaaaggattgctaccgagacattcacctggcttgagctggcttttgctatagcgtgcaaggggttgctgggtgtcgtacctac

SEQ ID NO: 43714 - DNA, 287 bp, Zea mays
ttcacccaatcagggatgaggatgctaagttcaagctttgcaaggttaggtctgttcagtttgggcagaagggcatcccttatctgaacacgtatgacggccgcaccatccgctaccctgaccccctcatcaaggccaacgacaccatcaagatcgatctggagaccaacaagattgtggacttcatcaagtttgatgttggcaacgtcgtcatggtgactggcggaaggaacactggccgcgtgggtgttatcaagaacagggagaagcacaagggcagctttgag

SEQ ID NO: 43715 - DNA, 261 bp, Zea mays
gcaagaaggggctggccaaggacgccaagaagaaggcgctgtgattgatgtttcagaatgcatgttcagattcgcacatttcctcatcacctgtagtagacacgtgccttgctgtagtcactttattagctaccattacctcctgagtctgttaagaatcgagaatgtcattgttccatccgcggttatgatgatgaaaaatacgattcttcaattcaaaatgtaacactaatacgagtaatgatgcatgaaattaacttg

SEQ ID NO: 43716 - DNA, 283 bp, Zea mays
cggctcgaggaagggggctgtgcctcaggactacgaggacttcaagagaatgctgacatccctatggtttgatttgtatggaagaggtggcaactctagctgctcttctgcctttgagcatgtgtttgttggtgagatcaaaggacggggacaaggggagagtgaggtatcaggcttccataactggattcagttttacctggaagaagccaagggaaatgtggattaccaaggttatatatttccaaggcgccgtggtgaatcgcctgattcagagatacag

SEQ ID NO: 43717 - DNA, 109 bp, Zea mays
gcggccgaggaagttgaggtggaggaggtggtggacggggacgaggcggtcgatggggagggcgacggtgacgaggacgacgatggggaaggcggtgacgaggaggatg

SEQ ID NO: 43718 - DNA, 277 bp, Zea mays
gctacacaaggccccgtggcgatcacaaaaaaggagcctatatccatgtactagaattattcagtttcactccacatcgtgatgttttatttttacttttgtcgtgctataacggatagcgctcctcgttggcgccactggcgggtggttctgcctctggtctggtgtgtttgtgtgtggtcacacttgccagccagcagaggcgcctgcttgtacctagattactgtttccattgtcgtcatcatcggctaacattgtcataatgtcagtttgggt

SEQ ID NO: 43719 - DNA, 278 bp, Zea mays
ggtttgccctcaatgtggtgatagaccggcgctgacaaaagagcccgaaaagaagaagggttccactgtcaaagacaaggagaagatcaagaggatgaggggccaatcgtcgcatgcgtcctggaagagcgaaaccgagatggctcttcgacaacatttcgactgataactagttagcgtggccaatatttagatggagtaccctgtaaactgtacgttggtgaaacttttttttgccctgtgtaatgtaccatgtgatggcccttgtgcctcacaca

SEQ ID NO: 43720 - DNA, 299 bp, Zea mays
catttcatcgtggagaagatcaaggacaagatcaccggcgagcacggcgacaagtccggcgaccacaaggaaaagaaggacaagaaaaagaagaagcacggcgagggccacgaccacgacggcggccacagtagcagcagcagcgacagcgactgagatctggtgtcgcagatgtcgatgctggcttataatgcagcacaggtgcaacacatgtatgcttgctggatggaggattcataccagctgatgctgatgtagtgtttcactggtgtcatgcatgtatcgtgctattataatca

SEQ ID NO: 43721 - DNA, 222 bp, Zea mays
ggatagcgctcctcgttggcgccactgggggtggttctgcctctggtctggtgtgtttgtgtgtggtcacacttgccagccagcagaggcgcctgcttgtacctagattactgtttccattgtcgtcatcatcggctaacattgtcataatgtcagtttgggtaatgttagattaagtaattattgtgttctgtaaaaaaaaaaaaaaggggcggccgccga

SEQ ID NO: 43722 - DNA, 307 bp, Zea mays
aggacatcacggctctgtactacgacgaggatcgcgacgagatctacactggcaaccggcacggccttgtccatgtgtggtcgagctgaaagctgaaactgcggggcggctttcaaccgtagcacggtgatctggtcttcacctgtgcgcgtattaacagctactagtgcctcacgtggcacgggggtggggggcacgaaagagggaccccccaagccactcaagtgacagttcttacttatctcagcatgccaagagcactgtccatcattctgaaatcagaggccccccagatctgttgtaacgg

SEQ ID NO: 43723 - DNA, 298 bp, Zea mays
ggaaagagggaatgagccaggaagaggcagagaaatttgtggtgaaagtagttacccttgctatggaccgtgatggcgctagcggaggggttgtccgtacagttacaataaatgcggatggcgtgaagcggaacttctaccctggcgacaatctacacctgtggcacgacgagctggagccccagaactcgttgcttgatattcttgctgccgggaaccctgatcacatggtgcagtgaatttgccctccacttccgttgtgaaattttcactatcactgcattgttcttgatttcaa

SEQ ID NO: 43724 - DNA, 105 bp, Zea mays
tgacatccttgcagttgtcgcgtgaacaagtaatctatgatggcaatgtttgcctggtcatgaagtattattactttcgttgaaaaaaaaaaaaaaaagggcggc

SEQ ID NO: 43725 - DNA, 298 bp, Zea mays
gcagactggatgcttgtcggtgatcttccctgggattattttacctctatctgccggaagctcaaaatcatgaggggctctgatgctgttggaatagctccacgaaccgtcgagcagacaggtcagaacaaataagctttggcctttgcctgcatccaaggaagacatctgagctagctgggagactatgttgaaggctgaagcctgaaatagttgccgggaatcgtcaaaacccgtcaagtgtttagtgtagttttcacgtgtccttgagacatgtgcatttgtatgtctgtgacgt

SEQ ID NO: 43726 - DNA, 293 bp, Zea mays
tcggcgagaagaaggtcaggaaggtggacatgcttgatggcgtgaccatcctccggtccgagaaggtcaaggatgagctcatccttgacggaaacgacgtcgagctcgtatctcgctccgccgccctcatcaaccagaaatgtcatgtgaagaagaaggatatccgaaagtttttggacggtatctatgtgagcgacaagggcgtcatcgaagaggagcagtgagcgacagagtagccgaaatgccaggagatgaatatgaatgtcgtttgagttgcaattttgtgagattgg

SEQ ID NO: 43727 - DNA, 291 bp, Zea mays
cacgagccaaaccaatttgcggtcgggctgtcagatgggtccgtcaaagtgctggagccattggagtccgaaggaaatggggagcgcccgctccggcagacaatggcatcattcccaatggcaagacgccagcttcgtcggctactagcaaccctgctgcggatcaaatccaaagatagattgtattccctaagcttttctttttctgcaaactttctaattacactgacttatttgtatgtggatgccgttaggatattatcgtcatttgttgtaaaaaggacagaatag

SEQ ID NO: 43728 - DNA, 289 bp, Zea mays
catgttatcaatggaaaaccggttgaaattaagagaacgatccctaagggagctgctcctttgaaagatttcaagacgaagaagatttttgttggtggattaccctcagctctaaaagaagatgaattcaaggaattcttttccaagtttgggaaggttgtggagcatgaaatcatacgtgaccatgcaaccaaccggtcacgtggatttggttttatagtctttgatgcagaaaaagcagtaaacaattcaaataacctaaaaaaaaaaaaaaaaagagagagaagag

SEQ ID NO: 43729 - DNA, 289 bp, Zea mays
atgaggcagacggttgctgttggagtcatcaagagcgtggagaagaaggacccaactggtgccaaggtgaccaaggctgcaataaagaagaaatgatgcgtcctcccatgtgccctcgtttattttgtacttgtgcccgtatacttcgatctgttaaaatctattggttgtgtgccctgtgtctgttgtttgggtatctatactgttattttgagacatgttgacttgcatggtcatctggattgggttcgcaaaaaaaaaaagaaaaaaaaaaaacaaaaagcgaaaa

SEQ ID NO: 43730 - DNA, 296 bp, Zea mays
ctgcggtggagccgccaccaaaatgcagattttcgtgaaaaaccttacggggaagaccatcaccctcgaggttgaaccctcggatacgatagaaaatgtaaaggccaagatccaggatatcataaaattcctcctgatcagcagagactgatctttgctggcaagcagctggaagatggacgtactttgtctgactacaatattcaaaaggagtctattcttcatcttgtgttgagacttcgtggtggtgctaagaaaaggtagaagaagtcttacaccactcccaagaagaataa

SEQ ID NO: 43731 - DNA, 299 bp, Zea mays
cccaagatcgacaggcggtctggcaaggagcttgagaaggagccaaagttcctgaagaacggtgatgctggtatggtgaagatgataccgaccaagcccatggtggtggagacgttctcagcgtatcctccccttggtaggtttgctgtccgtgacatgaggcagacggttgctgttggagttatctagagtgtggagaagaaggacccgaccggcgccaaggtgaccactgcggctgccaagaagaaatgatgcgatcctgcgcctgctttagcaatacctagttttcatcatcacaa

SEQ ID NO: 43732 - DNA, 288 bp, Zea mays
agacgtcaagaacctcgagaaagtctgcggggatctggtgaagggcgccaagggtaaggagctcaaggtcaagggccccgtgcggatgcctaccaaggtgctccacatcaccaccaggaagtctccctgtggcgaaggtaccaacacctgggatcgctttgagatgaggattcacaagagggtgattgatctcgtcagtacaccagacgttgtcaagcagatcacctcaatcaccattgaaccaggtgtcgaggttgaggtgactatcagtgacgcttaatatggtag

SEQ ID NO: 43733 - DNA, 293 bp, Zea mays
aaggaattggcgcgattgcatgagatggcatcacaaaacaggctaagcgctgcagatattgaaggtggcactataacacttagtaacataggtgccattggtggcaagtttggctctccacttctgaacctacctgaagttgccatcattgcccttgggcggattcaaaagcttcctcgcttcgatgatgacgaaaacgtttacccttcatccataatcaatgttactgttggagccgatcaccgagttgttgacggggccacggttgcaagattctgtaatgaatggaagag

SEQ ID NO: 43734 - DNA, 293 bp, Zea mays
gtgatgtgtgtcaaagagtcaaaactgaacatcaaattctagctggactactgcactcgataaagatacctaaatggaagtgggaagaaatcggcatggatatcattgtcgggttgcctcgcaccccgaaagggtatgattttatatgggtgattgtgcataggctaaccaaagtagctcacttcattctggtcaagactacttacaagggatctctgttggcagagttatacatgactcggattgtgtgtttacacggtgtaccaaagaagatcgtttctgatcgaggctca

SEQ ID NO: 43735 - DNA, 289 bp, Zea mays
gggcgacaaggtggagaaggtggtggtctccgaccgcgtggtggactccccctgctgcctggtgaccggcgagtacggttggaccgccaacatggagcggatcatgaaagcccaggcgctgagggactccagcatgtctgggtacatgtcctccaagaagacgatggagatcaaccccgagaacgccatcatggaggagctccgcaagcgtgccgaggctgacaagaacgacaagtccgttaaggaccttgtcatgctgctgttcgagacggcgctgctcacttctggc

SEQ ID NO: 43736 - DNA, 278 bp, Zea mays
cccacgtccagaacctcatcaagggggtcaccaagggctaccgctacaagatgaggtttgtctacgcccatttccccatcaacgcgtccatcaccaactccaacaccgccatcgagataaggaacttcctcggcgagaagaaggtcagaaaggtggacatgcttgacggcgtgaccatcctccgctctcagaaggtcaaggacgagcttattctcgatggcaacgacgtcgagttagtctctcgctccgccgccctcatcaaccagaaatgcccatgt

SEQ ID NO: 43737 - DNA, 289 bp, Zea mays
aaagaatcctcttgacttgctgccaccaagcaagatggtccttgatgactggaagaggctatactcaaacacaaagaccaacttccgggaggttgccatcaaaggtttctgggacatgtatgacccagagggctactctctgtggttctgtgactacaagtacaatgacgagaacaccgtctcctttgtgaccctgaacaaggttggtggattcctgcagcggatggacctgtgccgcaagtacgcctttggcaagatgctcgtggtaggttctgagaccaccttcaag

SEQ ID NO: 43738 - DNA, 289 bp, Zea mays
  unsure (1)..(289): unsure at all n locations
ggagacagcaagggccaggattgtcaatgctggtggcgagtgcctcacatttgaccagcttgctcttcgtgctccacttggcgagaacacggtcctcttgaggggccccaagaatgcccgtgaggcagtgaggcactttggcaaggctcctggagtgccgcacagccacaccaagccgtatgtgcgctccaagggaaggaagttcgagaaggctcgtggcaggaggaacagccgtggattcaaggtttaaaacaaattgtgngcctccgtgttgccatcagcatagtgc

SEQ ID NO: 43739 - DNA, 263 bp, Zea mays
ctcgagccgcttcattggactgaccctgggtctgatcgctggaggtatgtggaagatggaccactggaacgagcagaggaaaactagatccttctacgacatgcttgacaagggccagatcagcgtcgtcgtcgaggagtagttcccacgtgtcacctcagaagtttttttttccagttgtttttgaaaactcactctggagggcacgacaaagtgaatgctgtggagatttggcttgaaaataagcataaccatttgagaac

SEQ ID NO: 43740 - DNA, 290 bp, Zea mays
acctggcggaccttacgccctgttcgccggcaaagatgccagcagagctctagcgaagatgtcgttcgagccacaggacctcaccggcgacatctcgggcctaggtccgtttgagctcgacgccctgcaggactgggagtacaagttcatgagcaagtacgtgaaggtcggcacggtcaagaagagcgtccctgtggaaggcggcagcaccgcgagcaccactgaggctgataaggcaccgacaaccgaagagaagccaagcgaggcggtggttgaggagaaggaagccg

SEQ ID NO: 43741 - DNA, 266 bp, Zea mays
cgagacacaaggtgcggctggacaagaaggtggttgatgtggccagggaggtggccaagttggaggtgccttcctaccgccgccatctggacgttgttgtggcctgtgaggacgacgacgacaatgacgtcgacatcccgctcgtgtcaatttacttccggtaaagagggacacactgcccgttcctatacatgaatcttgtgcgatgtttgtcagaaggatcgtgtctataagttgcgcatgcaacctccaggactaagctttgc

SEQ ID NO: 43742 - DNA, 286 bp, Zea mays
attgacccttaccacagcgacaaggccgcggatatcctggtcaacttctttgacaaatgcaaggcagatccgagctactgggacaagatctcacagggcggcctgcagagaatctatgagaagtacacctggaagctctactccgagaggctgatgaccctgaccggcgtgtacgggttctggaagtacgtgagcaacctggagaggcgcgagacccgccgctacatcgagatgttctacgccctgaagtaccgtagcctggcaagccagggtccgctgtccttcg

SEQ ID NO: 43743 - DNA, 293 bp, Zea mays
tggaaggagaaggccaaggttgcctacgagaggaagaagcaattggccaagctgcgtgtcaaggccgagaaggcagccgaggagaagttggggtctcagttggagattcttgcccctatcaagtactgaggagctgtgctttgtcatcagttttggggaacatctagtctttgttttaagtgttcggtaacagtttgtgacagtataatctggtaaaccgtgttatttttctgccactcctatttgaacacattttctagctggtgaatgaactgtttggtcgacttgttcaa

SEQ ID NO: 43744 - DNA, 298 bp, Zea mays
caagatcgatctggagaccaacaaaattgtggacttcatcaagtttgatgttggcaacgttgtcatggtgactggcggaaggaacactggccgtgtgggtgttatcaagaacagggagaagcacaagggcagctttgagaccattcacgtggaggactcctgggccaccagttcgccacccgtatgggcaacgtgttcaccatcggcaagggtaataagccgtgggtgagcctgcccaagggcaagggaatcaagctgagcatcatagaagagcaaaggaagcgggatgccgctgccc

SEQ ID NO: 43745 - DNA, 296 bp, Zea mays
tgatgagctgaccagcctcaaggactacgtgaccaggatgaaggagggacagaatgacatatactatatcactggtgagagcaagaaggcagtggagaactcccccttccttgagaagctgaagaagaggggctatgaggttctgtacatggttgatgcattgacgagtatgctgttggtcagctcaaggagtttgagggcaagaagcttgtctctgccaccaaggagggtctgaagcttgatgagactgaggacgagaagaagaggaaggaggagctgaaggagaagtttgaggg

SEQ ID NO: 43746 - DNA, 295 bp, Zea mays
cgccgcggttccacccgatggcgcagatgtcgttcaacgacgactcgttcgtgttcgtcgggttcagcacccacatggggcaaaaccacccgcagttcctggccgggaagggctccgtgctgcaggccattgggaagaaggtgctcgcgctggcgctgggcagcgggacccgaccgccgtggacaagctgctgtccgcgcagcgcgagtcgacgatactgccgtgcgtatcgtgcgctgaggagctggcggagaaggccgaggaggagaggaagcgacgggaggaggaaggggga

SEQ ID NO: 43747 - DNA, 297 bp, Zea mays
tgggatgtatgccattcgtgcccgcaggaaaacggtgacagagaaggattttctcgatgctgtcaataaggtcatcaagggctaccagaaattcagtgcaacacccaagtatatggtgtacaactagagagtgtcttcatggaatatgttgattttagactccgggatcttttcggtgattgtgtcatcgtgaggttctatgcaaggattgttgtttgttttgaaatctggatccccagggattgcatcctgtaccacatgtttttaagacaaggttatccgcttggtggttcaaaa

SEQ ID NO: 43748 - DNA, 190 bp, Zea mays
  unsure (1)..(190): unsure at all n locations
gtagggcaagagcgctgtagcttagagcattctcatggattgtcttgcaccgaaatgtgtgtcctgatgagtacacttntctgtggttagtcgtctcaagttcagagcgttatgccatgttttcagtcctgattagtacactgttttctaaaagcgatgagctctagtccaatgtattgataatttctgc

SEQ ID NO: 43749 - DNA, 91 bp, Zea mays
tgctatgatggttgggcatttactcgtgaaccagagtttttctatcttatatcctgaattggttatcccaaagttttctggctttttaact

SEQ ID NO: 43750 - DNA, 292 bp, Zea mays
agacagaacgtttgtgtcatctatccttaattcgcttcctggtgttgatcccaatgatccatctattaaagatttgctggcatcattgcacagccagggagaggaagagaagaaggaagacaagttagacaaaacagaagacgagaagaactgctcaagctggagtgatgtcgctgtggtgcttttgtgactgatcatctctggagcttttgtgaatgatctagctagctatctgtaattgatctagttgtgaatgatattataattgtgatacttttgtgaatatataatt

SEQ ID NO: 43751 - DNA, 288 bp, Zea mays
ggaagcgtcttgggtgaggagaacgttaatgtcagtttcatgagtgtcggaagaattgctcctcgcaagcatgctgtcatggcaattggtgttgatgaggaatcaagcaagggcacactgacgaagatcggggagattccagcgatcgaagagttgttttcctcaagctctaggcgcgaatgtatgtttgaagttgcaagcatggtgtgcaattttgatgtagctagcaatccggaggacggatggttctccttgaaataagcttttaggagtatttttgtagtggcg

SEQ ID NO: 43752 - DNA, 289 bp, Zea mays
gaggctgatgacatggaagctctgtacaagaaggtccatgctgccatccgtgctgatccttctgtggtcaagtcaaccaagcagccaccaaaggagcacaagaggtacaaccccaagaaactgacgtacgagcagaggaaggccagtctcatgaaaggctcaaccaactcaactcctcgggcggcgcagatgacgacgatgaggatgacgagtaaagtttggtcccatcgaagtagtgctatcttatgcggcgatcagtatttgtgctatggcatttatcgctacctgt

SEQ ID NO: 43753 - DNA, 287 bp, Zea mays
gttcctcctgctgagtttgctaaggtagcacaagagtattctgaatgcccatcagggaagaaaggtggagatcttggttggttcccgcgtggcaagatggctggtcctttccaggaggttgctttcaacacacctgagggaactgtgaagcgaccattcaagtccacgcacgggtatcactttatcctctgcgaaggaaggaagaactgatctggaaatgtcggttggggagactgcatcatcaggttgtatgagacgcaatgcaaactactcaccttctctaataa

SEQ ID NO: 43754 - DNA, 286 bp, Zea mays
gggtgtcgacctgcccagatgggtgcagtcagttaaccgctcggagtggggttcactagtgtttgatatggagctcatgagacatcagactggtgaggagcccatggctcagctctcgctgcttgctatggactgcacagcacaagtcccaaagcccggccgtcaatggcgcatgctgtcatgcggatagaggagatcaagaagtcaagcgtgaccccgaacattgaacaagttgatgatcaatcttcaagggctgaatcggaggcggcgccgaccaatccgtttg

SEQ ID NO: 43755 - DNA, 287 bp, Zea mays
agagggacttgcaattacctttgtttcctctgcttcggattctgatgttcttaaccaggtgcaagaaaggtttgaggtagacataaaggaactgcctgagcaaattgacacctcgaagaacatgccatcataaatgggaaggacaactgaaagagaggaggataggggagtgagcagccgtactggagatggttacctttgaactatccgatctggaggatttgaattgcctcctttgtgtactttaaaaagggcagccaggatgatgatctgtattttaagacaat

SEQ ID NO: 43756 - DNA, 284 bp, Zea mays
cgcaacgggccgaggctgacaagaatgacaagtcagtcaaggatctcgtgatgctgctgttcgagactgctctcctgacctccggcttcagcctggatgaccccaacaccttcggcaaccggatccaccgcatgctcaaactcggtctagcatcgatgaggacgagcctgttgaggcagaggctgagatgcctcagcttgaggacgacgctggtgaaagcaagatggaggaggtcgactaagtgtcgcatcgcatgcttgccgtttatcttatccctagctaag

SEQ ID NO: 43757 - DNA, 285 bp, Zea mays
caacacttgaaggcaagatagagaagatggagatggataagaggataaaagaggatctgaagacagttgcacttggaacgtcaaagatcaactaccttgatcctagaataaccgtggcatggtgcaaacgccatgaagtccctattgagaagattttcaacaaatctctcctcgcgaaatttgtatgggcaatggacgttgacccggaattcagattctaggagaccattggctaccatgtgccagccagtttggtccagtttccagcccttctccctggacact

SEQ ID NO: 43758 - DNA, 281 bp, Zea mays
tggttctgttgggctgtatgtcccaggtggcactgcagtcttgccttcaactgcattgatgcttgctgtgcctgcacagattgctggatgcaaaactattgttcttgccacaccacctagccgtgatggcagcatatgcaaggaggtctttactgtgcaaagaaagctggcgtgacacacatattgaaagctggaggagctcaggcaatctcagcaatggcatggggaactgcatcgtgcccaaaggctgagaagatttttggacctggtaaccagtatgt

SEQ ID NO: 43759 - DNA, 283 bp, Zea mays
actatatccatggccagtgtgcgatcatcatgtttgatgtaacctcaaggcttacttacaagaatgttcctccgtggcatagggacctgtgcagggtctgtgaaaacatccccattgtcctctgcggtaataaggttgatgtgaagacaggcaggtcaaagccaagcaggttactttccacaggaagaagaatctgcagtactatgaaatttctgccaagagcaactacaactttgagaaacctttcctgtacctcgcaaggaagctggctggtgatccgaac

SEQ ID NO: 43760 - DNA, 283 bp, Zea mays
gttcgtgcggtgccgcggcggcatcagccactcgccggaggagtcggtgatggacgacgacgtgtgggccgcggggctcgcgctgttcaacttcatcgaccagaacgcggtgtcagaagaactggatgccgggcagaacgtggtggtgtggcgctggcggtggcagagtcgtgatggttcggtggcgattcttttcagtgggagtaggcctgtagcctgcaactgtacataagacttgttacattgcattaaacaggaataaaaaaaacgcttctcttcgttg

SEQ ID NO: 43761 - DNA, 280 bp, Zea mays
ccagctgaagaaggtgctttgcatgggtgttgctgttggcaactgcggcatggatgagaagcagatcttccagaatgtgcaaatgagtgtcaacttcctcgtgtcgctcttgaaaaagaattggcagaatgtgagatgcttgtactgaagagcactatgggaaaggtgtaccggctgttctaaattttccaattaggcttagaatttccaggagactcgagtgcttggacacttgccattttccctaccatccatttttttgagcaactatggattatct

SEQ ID NO: 43762 - DNA, 284 bp, Zea mays
gtggtcctcacgccggggctgctctgcacgctgccgggccggggccgcgtcgcagagttcggcagcatgcacaccagcggcctggccatcctcgtccacgccgtcctctacttcgcgctcatcaccatcttcctcatcgccatcggatccacgtctacgcgggctagtagccgcccggagcaggatgcgatatacggagtagtaggttgcgccgccgccgtgatccagatcaagatctgtttttttttctttgttccttttcgctctctctctctctctgccct

SEQ ID NO: 43763 - DNA, 278 bp, Zea mays
tgttttggatagattctgcccgtggaaacttcatttatttgagcttgaagaggagctgaagactgatcctctgaccaagtatgtgctgtatcaggatgagaggagcaagagttggcgagtccaagcagtcgcagttgctcctgacagttcgagagccgaaaggcctgccagagaagtggaggggcatgagagacgacgaactttcagcagaaaccggcatccctggctgtgtgtttgtccacatgagtggcttcattgggggcaacaagacctacgag

SEQ ID NO: 43764 - DNA, 284 bp, Zea mays
agcgatcgttttctgcctgacaaagccattgacttgattgatgaagctggatctcgtgttaggctgaggcatgcgcagtccctgatgaagccaaagagctggacaaagagctgcggcagataagcaagcagaaaaataaggctgtacgtggccaagattttgagaaggtatactattgtttggcacaccgccgatccgctcccacctctctagctacgtcgatctggttaataccaagcattatgttgtttccttttgagataaatattttgttactgatttta

SEQ ID NO: 43765 - DNA, 289 bp, Zea mays
cgcatcctgggtacacgagccttgcagataagcatgaatgctccagtcatggttgagcttgagggtgaaacatgaccctcttgagattgcaatgaaggagctgagagcgcgcaagatacccttcacgatcagacggtacttacctgatggaagctatgaagactggggagtagacgagctcattgtggaggactcctggaaacgccaggttggtggagactgaagacgcggatctacttggcatggaaagggtatgtggtgcagtgggtctttcctgtagttacaagtc

SEQ ID NO: 43766 - DNA, 295 bp, Zea mays
  unsure (1)..(295): unsure at all n locations
cggatcccgactgtcatggacagtgaccgtgtcctggtgttggacgcaggtcaagtggcagaattcgacgcaccctccaagttgatgacggaggccatcactctttggtgcgatggttcaggagtacgcaagtcgctcatctagcgtgaaggaaaccgttggatgagatgagagtatgagaccacttctcatggccanaagacgacggtatcggagaaatttaggcatacgcatgatgggctctgttcgcaagganaaataaattgtactaggactttctgtaagcttgcaagca

SEQ ID NO: 43767 - DNA, 293 bp, Zea mays
agattggatctccactctccaggactccaggtcttgtgatatgtgtggttagctaatctaaattatgtcattagcaactaaatgctaatttagcgattcttctctgctttggttgtagggtttgccgtttgcttgacgatcacacgtatcaaaaagggttctcaagtattattggttgatgctatgctccaagaattagaaaaggagattgatgatgtggatgcacaaattggaaatcgttggcaactgcttgataaggaccatgatggcaaagtgacccctgaagaggtggc

SEQ ID NO: 43768 - DNA, 289 bp, Zea mays
  unsure (1)..(289): unsure at all n locations
acagattcggcgatgaagaagattgaagataacaacactcttgtcttcattgtcgacctcaaggcagacaagaagaagatcaaggctgctgtcaagaagatgtatgacattctaggcaagaaggtcaacaccctgatcaggcctgatggaaagaangaggcttacgtgaagcttatgcctgactatgatgctcttgtcgtggccaacaaaatcggcatcatctanagttaccgcgtcaggcatctgctgtgctctatttccatgtgaaaccagagtttttgtagctatg

SEQ ID NO: 43769 - DNA, 287 bp, Zea mays
gaagttctccacatctggagaaattgggagtgcaaacattgtctgcaggcagaaccaaactattgacaagccagaagaggctaacattatagagatgcaggagccggtttccctgacctttgccctgcggtacatgaactccttcaccaaggcgtcttcactgtctgagcaagtcactatcagcctgtcgtccgagcttccagtggtggtcgagtacaagatcgctgagatgggttacattagattttacctggcccccaagatcgacgatgacgaggagatgaagc

SEQ ID NO: 43770 - DNA, 283 bp, Zea mays
ctgcgcgaaccctcacggtctgatcaggaagtacgggctcatatgctgcaggcagtgcttccgcagcaacgccaaggacattggtttcatcaagtaccgttgaagaggccactgtgctgctgtggagaacttcctacatcaaagaaatgggtccttcattagaaggcctaatttattcggtttagctttttgttcagaacttgagactcatgtgttaaactcgacttgttaaagttttgatggctactttgtgcttgttggaccagctataatcagaagattg

SEQ ID NO: 43771 - DNA, 287 bp, Zea mays
gtgagcagcccggacaaggggtgtgccaatgttgtggctggtcgtgagagggcccccgtcttccttaccagcaacaacggtgttgcatccaacgttcgtttggcaaatgctctggggttccagaaggacgttgcccttcctagatgcgcgcagatcctcaagatgtaccaggatgaggatgaccgtgtctaactcacgcctgagtttagatgtacttggcgagttacaatatatttatgtggtgtctgaaatgttctagaacctctaaatctattactaagagcaac

SEQ ID NO: 43772 - DNA, 281 bp, Zea mays
ctcgaccgcatcagggctgcatctgtagcaaggaagatctacatgagacaaggcattgacgttggtggcttccagaagatttatggtggccgccagaggaatggctcacgcccacctcatctctgcaagagcagtggtgccatttcacgcaacatcctccagcagctgcaggagatgggcatcattgatgtcgatcccaagggtggacggcgcatcacctcccagggaaggcgtgatctggaccaggtggctggaagggttgctgttgaagcttgagcaat

SEQ ID NO: 43773 - DNA, 278 bp, Zea mays
ctacaatgagctgagtgtagcacctgaagagcaccccaccctgctcacagaggctcccctaaatcccaaggccaacagggagaagatgacccagatcatgtatgaacccttcaatgtccctgccatgtacgacgcattcaagctgtgctctccctctatgcctctggccgcacgacatgcatcgtcctggattcaggtgatggctcatttaggaagttcccatctatgacagctatgactgcgccatgccatcatgcgcctggacttggctggtcgtg

SEQ ID NO: 43774 - DNA, 279 bp, Zea mays
ctcgagccgtgaggggatgagggtcgcactaggtgcggctgtgattttaaattattgcctagcaaggtctcttccatccagcaaggaaagtacgagaagtgtattggaagatatacaactctttgtacatcggcgcgcaggatgcacttgttgcttcttatcctgccctggaagacgatggggataacatctttagtcgtccagagttggcaatgtttgtctgattaacggtacctcatgttgcagctgctgaagcgttacactggatttaggaccaat

SEQ ID NO: 43775 - DNA, 279 bp, Zea mays
gaactgggcacttcaatccttttctttggatgcaggaaccgtaatatggactacatatatgaagatgagctgcaaactttccttgaggagggggcgctttctgagctaattgttgcattctctcgggaagggccaacgaaagaatatgtgcagcataagatggtggagaaggccacagaaatttggaacatcatctcacatggtggttacttatatgtatgcggtgatgccaagggaatggctagagacgtacacaggatgcttcatacagtagtccaa

SEQ ID NO: 43776 - DNA, 277 bp, Zea mays
ctcgcctttgccccttctgtctcccttcgtccgtagcagaccaggaacgcccaaggcgctagcgtctccaagatggtgctgcaaaacgacattgacttactcaatccaccggcagagcttgagaagctaaagcacaagaagaagcggctagtccagtcccccaactccttcttcatggatgtcaagtgccagggctgtttcagcataaccactgtgttcagccactcccagactgtggttgtgtgcccaggctgccaaactgttctgtgccaaccta

SEQ ID NO: 43777 - DNA, 276 bp, Zea mays
ctcgagccgcaagaaggtgagcaaggcacctaagatccagcggcatgtgacccccttgacactccagaggaagcgtgctagaattgctgacaagaagaagaggatcgctaagaagaagtctgaggctgctgagtaccagaagcttcttgcccagaggctgaaagaacagaggatccgccgcagtgagagcttggccaagaggaggtctaagctttctgccgccgccaaggcttctgctgccacctctgcctaagaatgatcagtgctttgagatgt

SEQ ID NO: 43778 - DNA, 275 bp, Zea mays
ctccgagctgtccatcgagacttccaactgcttatgagaggaacgggagatatcagggctcaagtcgcaatgtatcttcggaacaaaaggatgagaacagagaggccagacctcggaccctgcgcttcacctggagcatgaaaaccactagttccatggatcccagtgacatgatgcgggacatccgcaaagtgctgcaggccacgacccgcgactatgagcagatggagcgcttcctgctcttctgtgtccatggcgacgggcacgctgagagc

SEQ ID NO: 43779 - DNA, 164 bp, Zea mays
gattggaaaaaattgtgaaagattttgacttgtttgggattgaaacccatccaatcccacccaatccacatggattgagagcaaaacgaacaagccctaagaattgatgatgttgtagtacaaattccaggccttcggttgattttctaagagttagtatggtt

SEQ ID NO: 43780 - DNA, 278 bp, Zea mays
gacaaaggcctggtagcaactaggacagggttgagtcagtaccacctgtctcactggcctagaatgtttgaggtgatcaggatgctggaaggagacatgctcacagagagatgggaggtgtcgcagaacgtggacatgccagagttcgtctcatcggagctcctacttcaaaagtacatggattttgcagcggacgaatgctcgcttggtgtagaagccatggagctctctggactaaggtgaccatctgatcgatcgaatcggccatcacacaggtc

SEQ ID NO: 43781 - DNA, 201 bp, Zea mays
ggcgtttgtgactgttgacaagaaagcaccgatcaaccaagacctcatcagcaacttcatgtctgaccctgtccacggtgccatcgaagtctgcgctcagctgaggcccactgttgacatctcagtgaccgctgatgctgatttcgtgcgtccagagcttcgacagtcttcataagcttgtatggatccgcagtgtgactg

SEQ ID NO: 43782 - DNA, 230 bp, Zea mays
cggagatcacgctcaatcaggagctccgccatgagagggacgtcatagcagctcgtttgtgacagaaccttcgactcggcaaggaccgatcaaccctgcacggttgcggagctctgagcaccatcgacaacgtgaaggctacgatccaggacaaggaggggattcccccagaccagcagcgactgatcttcgccggcaagcagcaggaggatggtcgcacccttgcagac

SEQ ID NO: 43783 - DNA, 232 bp, Zea mays
caaggaagacggattaattcagcagcaggttctttttgtagattctttgttgttatgaagcaggcggtacttttgtagttcgatgaaggggatttgtcgccactgtcatttacataattcggataataatttatattgtgtaatcttgagaatcaaagcactgtttgtgttaaaaaaaaaaaaaaaaaaaaaaaaaaaagggcgccccccgcaaatgggccccttcaccccg

SEQ ID NO: 43784 - DNA, 288 bp, Zea mays
  unsure (1)..(288): unsure at all n locations
ccccccccacccacncacccagcagcgtacgagctcggcatcggctcgagacaaagctccgaccccttactctctccctccgcagccgatgcgcacgcagggaacaagcgacgtgcgcgtctacacctttgtgtgccgaaacaacggcggcgagtggaccgacaagcagcactccggcgagatcgaggattccgccgctaccccatacgagctgcagcgccgcgtcgtcgctgccgcatccgcggcatggactgcatacggcgtccagtcgtcgttgtccatggtcac

SEQ ID NO: 43785 - DNA, 284 bp, Zea mays
agacagggaaacgggtatcgactttgatttaatgccccctccaggtagcagcaagaaagcaggtacatctaacggatgtggaccaaacaattgatccaaatgaaccgacatacagtatatgccaccagatttcatatggtgacatcgattgcttgtgacaatgagaattgaggaggaggagaatggtttcattacacgtgagtgggtcatacaccagaaacgagattcaaggggaaatggttttgcccaacgtgcaggagacatcagtgagaggttctccaaaa

SEQ ID NO: 43786 - DNA, 197 bp, Zea mays
ggctgatgacatggaagcactgtacaagcaggtccgagcagccaaccgaggtgatccttctgaggtcagtacaccaagcaaccaccaaagggagcacaaagaggtacacccccagccactgccgtacgagcagaggaaggccagtatcattgaaaggaacgaccaactcaactcctcgggcggcgcgcatgacgacg

SEQ ID NO: 43787 - DNA, 310 bp, Zea mays
agaggacaatggcttcaagttaaattcagaaggagggattctgaaagtgagtcctgatggtctccttcaacaaagttcaacagtagctgactcatcatagctttacgtttgctgatggaataaatgaatctattcctcgatcatacattgaatttgctgaacgtctcctgttaccacagttcaaagatttacaagatgaagaggtgaaagaataccacaggcgtgatggttttgaggtgggcaatgcggacaagatattcgaaagtacatcgaaggatcagctgacgcggagatctgcatgaacagtgaa

SEQ ID NO: 43788 - DNA, 293 bp, Zea mays
caaagatgtcaggcttcttccagacaagtttctatttcggctacacgctgatgttctgccttggcctaggcatactttgtggagctattggctatctagggtcaaccctttttgtaaggagaatctacaggaatatcaaatgtgattaaatccctgctgcttaagctagcaacagaaaaatcatatgtattgtcaggaggcatggcctaaaaaaatggattttaatggtagaccctgattttggaactgctgaggacttgctcccctttgttcgttgttaaaaaaaaaaagag

SEQ ID NO: 43789 - DNA, 307 bp, Zea mays
gtggttcgcgccgcccgagtggaaggagtgccggctggggatccagctgctgcccgtgctgcccatcagcgaggcgctgttcccggacgtggcgttcgtcaaggacctggtggcgtggacgctgccggcgctggcgagggacggcgtgggcgaagggcagaaggggttcgtgtacgcgctggaggggatctacgacagggaggcagcgctgaccaagacccgcgccctcaaggggcatgatgatggcaactcgctgaccaacctgctgtggtggctccacagccgaggaagcgtcgtcggtgacggc

SEQ ID NO: 43790 - DNA, 306 bp, Zea mays
gagctgattagcaaaacatgggaaagtttccatgatgtgaagctcagtgaccagagtctcatttggaactctgacctgatagagacccttgagctggaaaatcttttgataaatgcatgcataaccatgtattcggcagaggctcggaaggaaagcagaggagctcatgctcgtgaggatttcacgacaagagatgacgagaagtggatgaagcactcactggggtactgggaaaacgagaaggttcgattggcatacaggccagtgcacatgaacacattagacgatgaagtagagtccttcccg

SEQ ID NO: 43791 - DNA, 302 bp, Zea mays
gtacaagtggaggaagcggatggagtgggtgatcggccgcctacctccctggctcaggtgcagagcggagagcatgctgaacaagatgcccaacgagctgtccagggaagaagggccgaccgggcccaaggagaagaacaactgggagggagacgagagatggtaagactggtacgtaggaacagtgctcaacgatgtgattttataacatgtgtggcttaaattaaggggcgtgctatatttaggtgtttgaaaaacagcttcttcgcggaccatacactagtacaatttggctctaaaaa

SEQ ID NO: 43792 - DNA, 290 bp, Zea mays
gggtgctgccgcccaagcccatcgtcgtcaaggccaagctcatctccaaggtcgccgagaagaagatcaaagccgccggcggcgccgtcgtgctcaccgcctagttttcagtccttattcgcctcttggttttgagatctatatctggactagcagtgctttcttgtctcacctatttgtgttaagaagacgtagtttttaaatccattgctccttcctgtttggacagtgctttcatatcagatatttcaggtatattagagctagaaaaagcaaaaaaagggcggccc

SEQ ID NO: 43793 - DNA, 231 bp, Zea mays
gaggaagtctgtccgtggttgtattgtgagccaagacctatctgttatcaacttggtaattgttaagaagggtgagaacgatctgcctggtttaactgacactgagaagccaaggatgaggggtcccaaaagggcctccaagatcaggaagctgttcaatcttgcaaaggatgacgacgtgcgcaagtacgtgaacacgtaccgcaggacattcactaccaagaatggcag

SEQ ID NO: 43794 - DNA, 307 bp, Zea mays
gtttgctgagctcattaccaagatcgacaggcgctctggcaaggagcttgagaaggagccaaagttcctgaagaacggtgatgctggtatggtgaagatgatacccaccaagcccatggtggtggagacattctcagcgtatcctccccttggtaggtttgctgtccgtgacatgaggcagacggttgctgttggagttatcaagagtgtggagaagaaggacccaaccggcgccaaggtgaccaaggctgctgccaagaagaaatgatgcgatcctgcgcctgctttagcaatacctagttttcat

SEQ ID NO: 43795 - DNA, 290 bp, Zea mays
catgaatctactgatgatccttacctttgttgcagctgctgttgctgcccccttcacatgatgatgacaagatcgttggtgggctacatctgtgaggagaattctgtcccctaccatgtgtccttgaattctggctaccacttctgcggtggctccctcatcagcgaacagtgggtggtgtcagcaggtcactgctacaagtcccgcatccaggtgagactgggagagcacaacatcgaagtcctggaggggaatgaacagttccatcattgcggccaagatcatccgcc

SEQ ID NO: 43796 - DNA, 303 bp, Zea mays
gctgctggtgcagatggtctttctgagttccagaagaagatttttgacgtcctgtacaagattgctgatgttccgttcttggcaccctacaaaaccaagatcattgatgttatcgagaagggagagaagcagcccaacatcactattggcattctggtctccgttgtcgtcgtgttcgttaccgttctcttcaagatcctgtttggaggcaagaagccggtggcacctgtgaaacctgcagctgaggcgaagaagcccaaggccacagtgaccgacggtgctggaagcagtggcgacaaggat

SEQ ID NO: 43797 - DNA, 301 bp, Zea mays
gagaagactgctttcgatgaggctgagaaaaagaaggaagaagaggaagccgccaagggtggcgatgatgacgatgatgacctagaggatgagcgcagacgatgacaaggcagacgatgacaaggccgactctgatgccgaggatgacaaggactctgaggagcacgacgagctctagatgatgagtatgatagaggtggccactgacattggtgccgttggcctggatttatcagctcttccattttgttctccttttctgttatcagaaactttaggacattgttaagaagctgaggga

SEQ ID NO: 43798 - DNA, 305 bp, Zea mays
gatgccaatttaccagaggcctttcatgaaggggaagctgtacatccatttcacggtggagttccctgactcgttggcaccagagcagtgcaaggctctcgagacagtacttccaccaaggccttcatccaagctgacagacatggagatagatgaatgcgaggagacgactatgcatgatgtgaacaacatcgaggaagagatgcgcaggaagcaagctcacgctgcccaggaggcgtacgaggaggacgacgagatgccgggcggaccaagagagtgcagtgcgcgcaacagtaagcagacta

SEQ ID NO: 43799 - DNA, 301 bp, Zea mays
tgaagagggtagtgaggaggatgaagatgatgacgagtgatggagctcctcgagacaatggaccgtgcttcatccaacaatggagcggctacacaaggccccgtggcgatcacaaaaaaggagcctatatccatgtactagaattattcagtttcactccacatcgtgatgttttatttttacttttgtcgtgctataacggatagcgctcctcgttggcgccactggcgggtggttctgcctctggtctggtgtgtttgtgtgtggtcacacttgccagccagcagaggcgcctgcttgt

SEQ ID NO: 43800 - DNA, 301 bp, Zea mays
gctcgtgataggctctgagccacccttcaagctgaagggcctttggctcttccgtggccaggatgttcccaagtttgtaatggacgaggtctatgacatggagctctacgagtggacacaaggtggacatctctgatgaggaccagaaggagcgtgtcaatgcgatgattgaggaccaggagccctttgagggcgaggccttgcttgacgcgaaatgcttcaagtgagtgtgcttgcctggagacagaactgtttagcccttgaatttgcctatggaagagtttgcacttttactagtgtc

SEQ ID NO: 43801 - DNA, 300 bp, Zea mays
  unsure (1)..(300): unsure at all n locations
ggaagtacgtgagcaacctggagaggcgcgagacccgccgctacatngagatgntctacgccntgaagtaccgtagcctggcaagccaggttccgctgtccttcgattagtacggggannnnnnnnnnnnnnnnnncccaggccgnannccgatcgcctgcatttcgatctgtttcaccgcaattngcattgttagtcgtgtattggagttatgtgtacttggtttccaagaanttnngttccttctcgtttttattccttgtttgancgtttttgggcagcgctggcctgggnctagta

SEQ ID NO: 43802 - DNA, 289 bp, Zea mays
cttaggtgcaaaggagctggccaaggattttgttgtatctgggacagcatcagaatctttgtatggtgcttgtgagtccatgtacaagccgaacatggaacctgatgaactcttcgaaactgtatcccaagctctgaattcatcaatagaccgtgactgccttagtgggtggggtggctatgttctgattgtgacaccgactgaagtgagggagcatgtgattaagagcaggatggactaaatcatggccactatcactataattcttagctggtttccaatgcttaga

SEQ ID NO: 43803 - DNA, 200 bp, Zea mays
tcaaagatgtcaggcttcttccagacaagtttctatttcggctacacgctgatgttctgccttggcctaggcatactttgtggagctattggctatctagggtcaaccctttttgtaaggagaatctacaggaatatcaaatgtgattaaatccctgctgcttaagctagcaacagacaaatcatatgtattgtcaggag

SEQ ID NO: 43804 - DNA, 191 bp, Zea mays
ggcagagcagccagcacccctggatctacgagaagtaaacatggaaagtttcacatcaaaccttgagagccagaggaagcatgtcaccatttgtgctttagcaatgttttcgaaaagattatgatctgtatcttggaaccttatttcaatggaccaaatttctttctttgccaaaaaaaaaagacaagaaa

SEQ ID NO: 43805 - DNA, 288 bp, Zea mays
atgtaaccgtgcaggtaactctggagcgtgacatgactaacgtttcatctgaggttggtccagtccatgcgccaaggtttcccaagcctaaggaagaaggctggtggctggtgattggggacagctccaaaaaccgttactggcaatcaaaagagtggcactccagaagagggcgagagtgaaacttgagttttctgctccggcagaggctgggagaaaggactacatgatttacttgatgtcagactcttacttgggctgcgatcaggagtatgaattcaccgttga

SEQ ID NO: 43806 - DNA, 284 bp, Zea mays
ggctgcttgtgttccgacggtggatgcggaggaagcatgcgccctcctcagctcttccacacaccactatctggatgtcaggatgtgggaggattttgacaaaggccatgtcgccggtgctcggaatgttccctactacctctccgtcactccgcatgggaaggagaagaatccccagtttgtggaacaggtttccgcgctctacgccaaggaccaaaacttgattgtgacctcgtcaacgcgggcttcaccaacgtgaggaacctacaaggcggatacctttc

SEQ ID NO: 43807 - DNA, 116 bp, Zea mays
cggctcgatgggaaacgtcaggtcatgatcaggccgtcatccaaggtgatcatcaagttcctgacggtcatgcagcgccatggttacattggcgagttcgattacgtggatgacca

SEQ ID NO: 43808 - DNA, 262 bp, Zea mays
gcagaacagcataatcttcctgatcaacaacggtgggtacacgattgaggtggaaatccatgacgggccatacaacgtcatcaagaactggaactacactggctttgtggacgccatccacaatggcgagggcaagtgctggacctccaaggtgaagagcgaggaggagctgacggctgctattgagacagcgctaggggagaagaaggactgcctgtgcttcatcgaggtgatcgcgcacaaggacgacaccagcaaagag

SEQ ID NO: 43809 - DNA, 153 bp, Zea mays
gagaaaggcgatgctctgtacgctatggagctgactctggctctggaaaagctgggtaatgagaagctgcacagcctgcatggtgtggcaacaaggtgcaatgatcctcagctgatagacttcatcgggagtgagttcccgaggagcaggtgg

SEQ ID NO: 43810 - DNA, 272 bp, Zea mays
gttaatggctgcagcagacaaatatgagttgccaaggttaagattgttgtgtgaatcttacttgtgcaagcatatttctgtaaattccgtggcaactactctagcattggctgatcggcaccatgctatggagctaaatccgtttgcctcgaatttgctgccgagaacctgtcagctgtgatccggactgagggtttcgactatctcaaagacaattgccctctctgcagtcagagatactgcggacagttgccgggtgtgaagggccatgt

SEQ ID NO: 43811 - DNA, 281 bp, Zea mays
  unsure (1)..(281): unsure at all n locations
agcttgaggagaaaatgctgttgaacttgcacaaaaagaaatggaccgatgggctaattttgaagaggtttgacactcactcgaaaaccaacgagcagactgtccaggaaatgctaaacctagccataaagtacaacaaggcagtgcaggaggaggacgaactgccacctgagaaacttgcgatagcaaatgtgggtcggcaagatgcaaaaaagcatttggaagagcatgtgtcgaatttgatgtcatcaaacatagttcangacctaggaaccatgctc

SEQ ID NO: 43812 - DNA, 246 bp, Zea mays
ggtagctcgagcgcgcgctccacctgcgccgacgcgatgcgggccaagtggaagaagaagagactgcggaggctcaagaggaagcgccggaaaatgaggcagagatctgagtaagcgcatcttgtgaccgaggatggcgagcttctcctgcaccatggctgtgacgcgttgggaagattgtcacgctttgtagacgtgctttgcggtaagacgtaggcgatgtaagccgtcctttttgattaattc

SEQ ID NO: 43813 - DNA, 280 bp, Zea mays
gacagcaggtcgagcatcttcgacgccaaggccgggatcgctctgaacgaccacttcgtcaagctcgtctcgtggtacgacaacgagtggggctacagcaaccgcgtcgtcgacctgatccgccacatgttcaagacccagtagaggggttttttccccctgcttctcatggatggttgctgcttgtgtatgccgagaataaatgtggatggcgcgtgcctctgggtcgccaggttcatgctgagtctggacatgttttgcacttttgcttcccttcctg

SEQ ID NO: 43814 - DNA, 274 bp, Zea mays
catgaatggaaagagggaatgagccaggaagaggcagagaaatttgtggtgaaggtagtttcccttgctatggcccgtgatggtgctagcggaggggttgtccgtacagttacaataaatgcggtggcgtgaagaggaacttctaccctggcgacaagctacccctgtggcacgacgagctggagccccagaactcgttgcttgatattcttgctgccgggaaccctgatcccatggtgcagtgaatttgccctccacttccgttgtgaacttt

SEQ ID NO: 43815 - DNA, 278 bp, Zea mays
cagaacttggacaggtcattcagctccagggtgatcagaggaagaacgtctcgaatttcctcgtccaggccggcattgtgaagaaggagcacatcaagattcatggtttctgagcaaccgccgggtcatagcaaaccaaccctgcatgcagggccagcttattatatataatatctgaggtggagcatatctatctggctgtgtactgcaagcaggcctagtacgccgcctgcgcgttcctcctattacacatataggcccctccctgcgtgtatgct

SEQ ID NO: 43816 - DNA, 271 bp, Zea mays
gatgggttcatgaacttcatgcacagggacgaagaggtgaactacttcccttcgaggtttgatcccgcccgtcacgcggagaaggtccccattcctccccgtgttctaacaggctgtcgtgagaagtgcatcattcagaaggagaacaacttcaagcaggctggcttgagatatcgttccttcgaccctgcaaggcaagaccggttcatccagcgatgggttgacgcactgacagaccctcgcgtgacccatgaacaccgtaccatttgga

SEQ ID NO: 43817 - DNA, 272 bp, Zea mays
tagagatcacttcccttgcaccaagcagcatgaagatcaaggtcgttgcagcgcctgagaggaagtacagtgtctggataggagggtcgatcctagcctcgctcagcactttccaacagatgtggatatcgaaggaggagtacgacgagtctggaccggcaattgttcaccggaggtgcttctagggtttcacaagttcctcgtcgttacctagtctcaaattatgtcccctccatttctcgagatatgtgtggcagatttgcatgatacgt

SEQ ID NO: 43818 - DNA, 271 bp, Zea mays
catgaacttggtcctcgaagacgctgaggacatcaacgtcaagaaaaacactaggaaatcacttggccggatactcctcaaaggtgacaatataactttgatgatgaacagtggcaagtgaagattcttatggcaggaacgatgtttggtgctcgcttcgattatctgtgacacaatgtactccatccatccgtccagacttaaatgatgtatcatgtcattgtggtttagtgagagtgtatgactacctgaggaaactcacgtgttacta

SEQ ID NO: 43819 - DNA, 219 bp, Zea mays
gtatcccggagcttttgtgctcgagttcatgttgggatcgtcgtcgcgtttgtgttcctgctcctgagcctgatgggcaccctgttggtggtcacctgggctaggtttcgggtgcccaggttctggggatactgccttatgggcatgtacatcttgttcaccgtagtcagtattgccatcgccagttattcaggatgatatgtcatccctttttttgtg

SEQ ID NO: 43820 - DNA, 285 bp, Zea mays
atttactggggatggttgctatttttctcattcagaggaataggcatgctttaattggccgggccattgatgatcatgacatgcaacgagtccttgaatttctgaagtctgatccggttgtagatgctctttatgattgcaaaagtgaggtgattgggccaggtttttttagattcaaggctgaaattgatttcaatggagttgttctggtacaaaattatttggaaaggactggacgtgggagttgggcaaaacagttccgggaagctgcaatgtccaaggatg

SEQ ID NO: 43821 - DNA, 281 bp, Zea mays
agctcgtgataggctctgagccacccttcaagtgaagggcctttggctcttccgtggccaggatgttcccaagtttgtaatggacgaggtctatgacatggagctctacgagacgaccaaggtggacatctctgatgaggcccagaaggagcgtgtcaatgcgatgattgaggaccaggagccctttgagggcgaggccttgcttgacgcgaaatgcttcaagtgagtgtgcttgcctggagacagaactgtttagcccttgaatttgcctatggaagagt

SEQ ID NO: 43822 - DNA, 279 bp, Zea mays
gaccactgtcaagaacgaggacaagcttgagttcagcaagatcttggaggctattaaggcgaacttcaatgacaagtttgatgaagtcaggaagaagtggggaggtggcatcatgggctccaagtcgcaggccaagaccaaggccagggaaaagttgctggccaaggaggccgcccagcggatgacgtagattatccactgttgagtttgcccctgtagtttgacgtggaagcaccgatgagcattgtgcactcgtattgtgtttttttgaatctactt

SEQ ID NO: 43823 - DNA, 275 bp, Zea mays
ccaggcgatgcaaaccagtcggtcacattgttgctgatgagggtttggaggcgtatctacctttggctgatatggttgacgtgtctgaagaggttaagcggctctccaagcgcctctccaagatgcagtcggagtatgatgctcttgttgcccgactcaattccccaagttttgttgaaaaggcccctgaagatattgttcgcggagttcgtgaaaaagcgtctgaggcagacgagaagatctctctaactaaaaatcgtctcacttttctgcaa

SEQ ID NO: 43824 - DNA, 279 bp, Zea mays
gtgagtacgaccagaaaatatccattgatttctacaaggaaggagatcccttgaaaccagctgtgacgggcgtcttagtgttcgtttccactccagatccaattggcaacaagtactatcttggccctgctcctctgcaggatatggcaaggcaaattgctacagccaatggccctactggctataatagggattacctgttctcaatggagaaggcattagccagcattagccacgaagatgattcgatcatagagcttgcaaacgaggtgaggaagg

SEQ ID NO: 43825 - DNA, 274 bp, Zea mays
ggcggctacggtggtggtggggcggctacggcggtggcaaccgtggcggcggctacggcaactccgacgggaactggaggaactgagcggtggggcccgcgcggccaagttatcctgttacgctaccgtgatgtttaccctagtccagagggtttatcttcgttcgtgtcgtgtttgttgttgcccatctgtgtttttgattgcaaggtcgctctgtgtcagttgttagtgctgtgttcatcctcggtttcagcagacccatgcatcaaacagc

SEQ ID NO: 43826 - DNA, 266 bp, Zea mays
gacgcatcgaggttagcacggaagaagcgaccatgaaggccaagtggaagaagaagcgcatgaggaggctcaagaggaagcgcagaaagatgaggcagagatccaagtaggcagatcgagaaggattgtggacctgatgacatgcgtgggtacatacatttcttcggatgcgttggtgtgcctgtggagagatgtcaacctgccatggtgtcacggtccgccatcagttgaacgtcttgcctgcacttcagtaggacacttttcat

SEQ ID NO: 43827 - DNA, 275 bp, Zea mays
tacgagagtaaatgaaatcttaaagatctcgctgtgctagtctcatgatcaaggagcaatgatagatgacattgattcccatatagagaacgccgttgtagcgacttcgcaggctaaaggccagctttcaaaggctgctaaaactcagaagtcgaactcttctctgatatgcttgttgctcgttattttcggagtggtcctgctcatagtgataatagtacttgcagcctaaaagcttggaaggcagctggggttccgaaatctgatcgagagct

SEQ ID NO: 43828 - DNA, 268 bp, Zea mays
gtgtgggtggcttcagaagatctacggtggccgccagaggaatggctcccgcccaccacacttctgcaagagcagtggtgctgttgcacgcaacatcctgcagcagctgcggattatgggcatcatcgatgtcgatcccaagggtggacgtttcatcaccaaccagggaaggcgtgatctggaccaagtggctggaagggtcgctgttgaagcgtgagcagtgtcatctttggtttcaatggtgtcatgtttgatggttgagaaggct

SEQ ID NO: 43829 - DNA, 288 bp, Zea mays
ctcagaattcggctcgaggctttacgttggaagtgacaactacatcaaggcaatgcgtctatttgtgggtgagcctgtctggacaccatacaatcgtccgcatgaccatctcccggctaggaaggagtacgtcgagaaaatcatcaaccgaggtggaaaccaagccgtcgaagctcgttgagcgtgtccactctacatgtcctcctgccgtctcagcctcttgtgttttacaccctacaactcctagtaccgccgaataagatttgctatctgcaatgtgctcatgcc

SEQ ID NO: 43830 - DNA, 250 bp, Zea mays
caagagtgtggcagaagctttgcgaccctagccaactggttgacatcctttggaataacaatgacagcaaatttgcttctgtcctggagtgctgcaggtacatttgccttctacatgatggtgagtgctttcactctcgtctttgtcatcctttgggtgccggagacaaagggaagaactctcgaggagatacaatggtccttccagtgagctccagtatttcatctatatatatgcaaatagcgtggca

SEQ ID NO: 43831 - DNA, 267 bp, Zea mays
aagaaggacccaatggagccaaggtgacgaaggctgctgccaagaagaaatgatctatctgtctggtgctgtgcttgcttgttggttacctcgtggaagcttaaaatatctcgtcttgttgacatccttgcagttgtcgcgtgaacaagtaatctatgatggcaatgtttgcctggtcatgaagtattattactttcgttgaaaccgtgatgctattaagacttaatttttttatggaacatcgaatgtaaggcatacatggttatg

SEQ ID NO: 43832 - DNA, 256 bp, Zea mays
ggacatggaaggagaggcgatgccaacgttcgtgctggtcaaggatgggaaggaggtaggccgtgtgattggggctaagaaggacgagcttgagaggaagatcaggatgttcgtcacgtcatcttcctcgtcctaacttagcagtgcatacactcccaccttctctggtttctcgactccagtggttcgcctgggacggggttgctgaaatggttcccttctctgaatactgaaaaatcagaaaaagaagtatatg

SEQ ID NO: 43833 - DNA, 202 bp, Zea mays
gaagttgcctcatctcatccgtgctgttcgcaatgctggattaattgtcacatggattactgatcctatgcatggaaacaccatcaaggccccttgtggcctgaagactcgtccattcgactcaattctggctgaagtgcgcgcattcttcgacgtgcatgatcaagaaggaagtcacccaggaggcatccaccttgaaatg

SEQ ID NO: 43834 - DNA, 185 bp, Zea mays
caacacccaggtcctcatcaattgccgcaacaacaagaagctgcttggccgtgttcgtgcttttgatcgccactgtaacatggtgctcgagaacgtgcgtgagatgtggacagagatccccaagactggcaagggcaaaaagaaggctctgcctgtgaacaaggatagattcatcagtaagatgt

SEQ ID NO: 43835 - DNA, 240 bp, Zea mays
gggtgacaaagttgagaaggtggtggtgtctgatcgcgttgtggactcaccgtgctgccttgtgactggcgagtatggctggaccgccaacatggagaggatcatgaaggcacaggccctgagggactcgagcatggcgggctacatgtcgagcaaaaagacaatggagatcaacccagagaaccctatcatggatgagctccgcaagcgtgccgaggctgacaagaatgacaagtcagt

SEQ ID NO: 43836 - DNA, 177 bp, Zea mays
ctgcttccccctggacggtcacgtgctctgtcggaagtgccacactgctagagcccagacctgagtgaggacaggtcctcttcagactgcagtccatgccccattgtggaccgaccacactgaggaccagctgcccccacctcaggtattgttttgatgtctagcccctgcccattt

SEQ ID NO: 43837 - DNA, 139 bp, Zea mays
ttaacatctgtggtttgtgtgtcatgaatcgtggttgtggcttcgttggtttaatggacctgttgtgatctctgtgttgtacccaaaactcttctgcagcagtatggcttgaatccttatgaagtacatgattgaactt

SEQ ID NO: 43838 - DNA, 175 bp, Zea mays
gtaggatcttctatatcctatggaccgcatcctccgccaaggtgaagagcaagatgctttatgcaagctcaaaccagaaattcaagagtgggctcaatggcattcaggtggaactgcaggctactgatgcaagtgaaatcagccttgatgagatcaaggatcgggctcgctaggc

SEQ ID NO: 43839 - DNA, 199 bp, Zea mays
ggttaagttccagctgaagaaggtgctttgcatgggtgttgctgttggcaactgcggcatggatgagaagcagatcttccagaatgtgcaaatgagtgtcaacttcctcgtgtcgctcttgaaaaagaattggcagaatgtgagatgcttgtacctgaagagcactatgggaaaggtgtaccggctgttctaaatttcc

SEQ ID NO: 43840 - DNA, 213 bp, Zea mays
gttactccttgggctacttcgtgagggtgaaggtgttgctgctagtgtgcttgaaagccttggtgctgatccaaacaacatccgtacccaggtcataagaatggttggggaaagcacagaagctgttggggctggagttggtggaggaagcagtggccagaagatgcccacacttgaagaatacggtacttttttgacgaaattagcggaaga

SEQ ID NO: 43841 - DNA, 264 bp, Zea mays
gaccaaccttcccctacaccagaaaaatccccagttctttggtccgcgtcagagaggcggcggcgatgtctgggcgcggcaagggcggcaagggtctgggcaagggcggcgcgaagcaacacggaaggtgctccgcgacaacatccagggcatcaccaagccggcgatccggaggctggctaggaggggtggcgtagagcgcatctcggggctcatctacgaggagaccagcggcgtgctcaagatctttctccgagacgtcat

SEQ ID NO: 43842 - DNA, 225 bp, Zea mays
gaggagaagacggacacctggcaccgcgtggagcggagagcgggaggttcctgcgcaggttccgactgcccgagaacgctaagacggagcagatcacggccgccatggagaacggcgtgcttacagtcactgtgccgaaggaggacgccaagaagcctgaagtgaagtccattcagatctacggctagacctcggtctgcggtcgtcgtaactgcgtggtttgag

SEQ ID NO: 43843 - DNA, 203 bp, Zea mays
ggcaaattgtcaacgtcccatcattcatggtgagggtggagtctgagaagcacattgacttttcactgtcaagcccattcggtggaggccccgcaggaagggtgaagagaaagaatcagaagaaggcaagcggtggcggcgatgctggcgatgaggatgaggagtgaggatggacaattagcggttaccaatataataatatt

SEQ ID NO: 43844 - DNA, 190 bp, Zea mays
ggaagtggaaggatgtcatcgactacaacgacaagatcacgtacactttccatgacgactctaagagagacaagcccagcagaggtgggcggtacaccgtgtaagctggacgtcaagaaggccgttgctttggattggaagtggagagcggaggtggggattttcttctgggatcgtcgccgactttcgt

SEQ ID NO: 43845 - DNA, 299 bp, Zea mays
gccacggacgtgaggtgcgggagaaagaggaggaggaacgcgaaggacgccacggccgcgggcgccgcgaggaggtggcggagacgctcatgaggatggtgaccgccaggatgtgaggggccgacgcgctcgccaaaacgagcaggaagcaacgagaggatggcgcgcgaccgacgtgcgtacgtagcatgagcctgagtggagacgttcgacgtgtatgtatatacctctctgcgtgttagtactatgtacgtaagcggcaggcagtgcaataagtgtggctctgtagtatgtacgtg

SEQ ID NO: 43846 - DNA, 274 bp, Zea mays
gtggcaacgtggcggcggctacggcaactccgacgggaactggaggaactgagcggtggggcccgcgcggccaagttatcctgttcgctaccgtgatgtttaccctagtccagagggtttatcttcgttcgtgtcgtgtttgttgttgcccatctgtgtttttgattgcgaggtcgctctgtgtcagttgttagtgctgtgttcatcctcggtttcagcagacccatgcatcaaacagcatggactgcggatcgatggttgctgttaccccgtc

SEQ ID NO: 43847 - DNA, 287 bp, Zea mays
cgttcctcatctcaccagaagcgaagcggaggagggaggaaggagatcgcgagcagccggagccggaggcgagaggatgaagacgttcgacccgtggccggtcttcttccgccgggagtggaagcgcaactggccctttctcacggggttacccatcaccggcttcatcatcaccaagatgacggccaacttcaccgaggaagacctcaagaactccaagttcgtccaggaacacaagaagcgctgaccaaccgggtggagtcgtccgaatcgcctgcggatgaaaa

SEQ ID NO: 43848 - DNA, 295 bp, Zea mays
ttacagcctccctgagaatgactgccgatacgcgatctatgatttcgactttgttactgcagaggatgtccagaagagcaggatcttctatatcctatggtccccatcctccgccaaggtgaagagcaagatgctttatgcaagctcaaaccagaaattcaagagtggcctcaatggcattcaggttgaactccaggctacagatgcgagtgaaatcagcctcgatgagatcaaggatcgggcacgctaggcgcaccgccatcgcgagtttcatggtcacgcatcatggactcgc

SEQ ID NO: 43849 - DNA, 146 bp, Zea mays
gtcttactgttttgctgcctttagatgttgggttgtttcaaacaggagtttatgaaggggatctattagtttcgcgatgtcgttagtttagtgcattagcaaagagaaagccgaatgctgctagctgttctgttgcttaacttttg

SEQ ID NO: 43850 - DNA, 300 bp, Zea mays
gcgtgacatctacaaggatgctgatgaagatatgcggagggccatgatgaagtcattcgtggaatcaaatggcactgttctctcaaccaattggaaagatgttggagcaaagaaggtagaagggagcccccctgatggtatggagctcaagaagtgggaatactaaagtttggactgcccatcttttgtaaatccaggtcttggaaactatgacctaattccgtccacccatagtgccatgagcttgcttggttaagtctctgcttttgtaagctttctgtatgacagtctagcgtgtgt

SEQ ID NO: 43851 - DNA, 285 bp, Zea mays
gcttatttcatttgtgaaggacaaggagtcgtgggacttgaacaatgaagagaagattgaggctgctggtaagaagaaagaggaagggaatgcattgttcaaatcgggcaaatatgctagagcttccaagcgatatgagaaggctgccaagtacattgagtacgacacttcgttcagtgaagatgataacacagcaatccaagcaactgaagatcagctgcaacctaaacaatgctgcctgcaaactgaagttgaaggattacaaggagctgcgagctttgcacc

SEQ ID NO: 43852 - DNA, 295 bp, Zea mays
cacttaaggaaaatcttgaaaagctaggttcacctttgtcatgggatcatatcactaatcagattggaatgttctgctacagtgggatgacacctgaacaagttgaccgtttaacaaatgaataccacatttacatgacccgcaatgggaggataagcatggctggtgttacgacaggaaatgttagttacctagcaaatgcaattcatgaggttaccaaaccaaattgagttagggtcctaccttctttggtcgatggaagctgatggaatgagactgtgaagcggcgtttccc

SEQ ID NO: 43853 - DNA, 280 bp, Zea mays
gagagagttcctgacacagaaatacctgagcaagatgaagatcaagatgatccagatgaacgacatgatcctgactctgatatggaagtggatgaccacaaggctgtggaagagtcatcgaggaggagcattctaggtataaaaatcaagagagaatttggtgaaaatgcgaccagagtacaggatggtggcagggttgcatctgaacatagaggactggaacccatggcagaagacatggttcctccaagcaagtcctcaggcagatgccagtgcatgg

SEQ ID NO: 43854 - DNA, 285 bp, Zea mays
cagggcctggtggtggctgggggcctgtcggccttcgtgctcggggtctactactacaccatgagagccgtgggaggcacggacgagctgcaggtggcgatcgacaagtttgaggagatgaagaagaaggacgctgccagaaactccagcacaggaggatcgtaaacgcggcgcccttctcgtctctgtactgaacctggatctgcaggctgacatgatacggtagtcaagtcgctcagtaggccaagaacatgcgtgcctctaactgtgcataaataatgtgtg

SEQ ID NO: 43855 - DNA, 231 bp, Zea mays
aatagtcaagagtattgtttttgagtcgcggaagcagagggaagaaaaatcgtagtcatgtttggactttaactttgttttatgttggaaagtacttgaaagacttttcctgtggtaattctaggcgtaggttgctgtgctggttggggtttactggtgaaccagagtttttctatctcctcgtatgaatttgctacctcaagttacctggatgttcactattttgttggt

SEQ ID NO: 43856 - DNA, 263 bp, Zea mays
ggtgagtttagccccatcccctaggtgttctccagcttgaggatcgcaggcagagaggaccagcccagcagccacaggcctgaccaaagcccaggctgggcggcgccgcaactccccattttccactgggaggtgtttcctcagcacagtcaacataggagcagcgactggacccagagccatgtggctgtgccctctggccctcaacctcatcttgatggcagcctctggtgctgtgtgcgaagtgaaggacgtttgtgttg

SEQ ID NO: 43857 - DNA, 227 bp, Zea mays
ggacgccgcctgtgctgcagccatgtctctagtgctccctgaaaagttccagcatattttgcgcgtactcaacaccaacatcgatgggcggcggaaaatagcctttgccatcactgccattaagggtgtgggccgacgatatgctcatgtgctgttgacgaaagcagacattgatctcaccaagagggccggagaactcactgaggatgaggtggaacgtgtgatca

SEQ ID NO: 43858 - DNA, 309 bp, Zea mays
ggatggttctgcagatgaggggcactatcctccctgggcacaagtgggaggtcatggtggatttgttcttctacagggacccagaggaagcaaaggagcaggaggaggaagctgctgttgcccctgagttcgccgcaatcactgattaccaaggagctgatcagtggggtggtgaccagtggacctctgatgtgactgcgccgcctgttgctcctactggtgctgattggggtgctgctccagctccggttcactacggtgatggctgggatcaagctggggccctgcaactgtggtggacggcactgt

SEQ ID NO: 43859 - DNA, 301 bp, Zea mays
gtgtgtatttcgggtatttacgatgaactgaaactgaaagagggccacgatcccggagataaagcatcacccgtggttcctgaagaacctcccgagggagatctcggagagggagaaggccaactacaaggtcgcggatgccgccgagccgacgcaggccgtggacgagatcatgcggatcgttgaggaggccaagacccccggtgacatgtccaaggtggtcgacccggcgctgctggccgagatggcagagctggagagcgacgaggaagaggcagacaccgatgacacctactgatcg

SEQ ID NO: 43860 - DNA, 296 bp, Zea mays
tcttgactgggtgaaaggactgttgaaggagaagaaggtggagatgctggtggacccagatctgcagaaagcctacgaggaggtcgaggtggagagccttattcaggtggcactcctctgcacgcagggctcccccctggaccgtccaaagatgtcggaggtggtgaggatgctcgaaggtgacgggctggcagagcgttgggacgaatggcagaaagtagaggtggtgaggcaggggctgagtcggcaccgtccgcaatgactggatctcgattccagtacaccttcgtgcgtgg

SEQ ID NO: 43861 - DNA, 300 bp, Zea mays
caacaaggaccagatcgccaaggatgtgaagcagttctatgaccaggccctacagcaggccgtggtggatgatgacgccaacaacgccaaggctgtggtgaagaccttccacgagacgcttgactactgtggctccagcacactgactgctttgaccacctcagtgctcaagaacaatttgtgtccctcgggcagcaacatcatcagcaacctcttcaaggaggactgccaccagaagatcgatgatctcttctccgggaagctgtacctcatcggcattgctgccatcgtggtcgctgt

SEQ ID NO: 43862 - DNA, 283 bp, Zea mays
gacaagttcaaggagatcgttgtggaccaggtcggggatcgcgctaccagctacgaggacttcacaaacagcctccccgagaatgactgccgatacgcgatctatgatttcgactttgtcactgcagaagatgtccagaagagcaggatcttctatatcctatggtccccatcctccgccaaggtgaagagcaagatgctttatgcaagctcaaaccaaaaattcaagagtgggctcaatggcattcaggtggaactgcaggctactgatgcaagtgaaatca

SEQ ID NO: 43863 - DNA, 321 bp, Zea mays
tatcccgcgtcaggcgtaagttcaagggatgcaccttgatgcccaacattggatatggctccgacaagaagaccaggcactaccttcccaacaagttcaaaaagtttgttgtacacaatgtctccgagctggagctgctgctgatgcacaacaggacttactgcgctgagatcgcccacaacgtgtccacccgcaagcgcaaggagattgtggagcgtgctgcgcaactggacatcgtggtcaccaacaagctcgccaggctccgcagccaagaggacgagtgaaatgttgagtagttttgattgtgctctgctggtgttg

SEQ ID NO: 43864 - DNA, 327 bp, Zea mays
gtgggttccaagaggagagcttttctatcaaggattctaacatcagtgtttccaatgaggctttcttccaccaattccttgcagtgcgagccatggatcctctggatgtcctgagccagaaccctgattcagtattcggaaagttctgtagaagtaagtaccttttgcttgtgcatcaaaaaatggaaggttctttcttcggcaacatggatcagaggaactacgtcatgagcggtggccatccaaggacacctttctaccaggcattcctaaagctagcaaagtccatatggttgctgcacaggttggcgtactccttcgacccaa

SEQ ID NO: 43865 - DNA, 206 bp, Zea mays
gtcagagttgccattctttgcctccaaggttcggctcggcaagaatggagtggaggaagtgcttggtctgggtgagctcaacgagttcgagaagaaggggctggaaaacctcaagggcgagctcaagtcttccatcgacaagggtatcaagtttgcccacgggaactaggcaccttgcacggcttctaacaattgatagcccttgc

SEQ ID NO: 43866 - DNA, 282 bp, Zea mays
cgacgacacagagaacctcgcccatgagcgagttccaagtgacctgaagaaaaatctcatgcaagcaaggctcgataagaagttgacccaggcacagcttgctcagatgatcaatgagaagccacaggtgatccaggagtatgagtcaggcaaggcaattcccaaccagcagatcattggcaagctcgagagggccctgggaacgaagctgcgtggcaagaaataaccaggagcatcatagcgaagacaaggcaaactgtctgcttattatttgctatgttt

SEQ ID NO: 43867 - DNA, 281 bp, Zea mays
gtctgagcgcctggccaaatacaaccagctgctcaggatcgaggaagagctcggtgatgccgcggtctacgccggagcaaagttcagggcaccagtggagccctactaagaaaggaagaggatggggatgttttcttgtggagctatactagctcgctgctgccttttgttacaatgtttgtacggtcgcaataaatgtatggtcgtgtttgctcgagagctactcaagtgattttgtcgtgggagccccaaagcagaaagaaatgttttttcctcccccc

SEQ ID NO: 43868 - DNA, 157 bp, Zea mays
gtaccgcaaagccatgctgaagcttggcatgaagcccatcactggtgtcagccgtgtcactgtgaagaaaagcaagaatatactgtttgtcatctcgaagccagatgtgttcaagagcccgaactcagacacatacgtcatattcgccgaggccaag

SEQ ID NO: 43869 - DNA, 199 bp, Zea mays
gcgcctcggaggcgttcagctgcttcaagatgaagctgaacatctccttcccagccactggctgccagaaactcattgaagtggacgatgaacgcaaacttcgtactttctatgagaagcgtatggccacagaagttgctgctgacgctctgggtgaagaatggaagggttatctggtccgaatcactggtgggaacga

SEQ ID NO: 43870 - DNA, 179 bp, Zea mays
atagcacctgcagcaagatggatgtgggcagcaaagatgtcctgatggagagcccgccggactactccgcagctccccggggccgatttggcattccctgctgcccagtgcacctgaaacgccttcgtatcgtggtggtggtggtggtcctcatcgtcgtggtgattgtgggagccctg

SEQ ID NO: 43871 - DNA, 280 bp, Zea mays
ggttaaggctgatcgtgatgagtcgtctccttatgctgctatgcttgctgctcaagatgttgcacagcgttgcaaggagctcggtatcaccgcgctgcacattaagcttcgtgcaactggaggcaacaagaccaagacccctggacctggtgctcagtctgctctcaggggtcttgctcgttctgggatgaaaattggacgcattgaggatgttaccccggttcccactgacagcactcgcagaaagggtggtaggaggggaaggaggctgtaagcgtgt

SEQ ID NO: 43872 - DNA, 153 bp, Zea mays
ggacattaccgagctcattgctgctgtcagggagaagtttgcttcagtcgcatgtggcggtgtcgagtgtggctgttgtagcagctgcccctgctgatggcggcgctactgcaactgaggcgaagaaagtatagaaggtgcaggataactaat

SEQ ID NO: 43873 - DNA, 237 bp, Zea mays
  unsure (1)..(237): unsure at all n locations
gctttcgaatgtgttcatgatggctggggtgttgctgagctggtgggtgtgccacataaggacgctgagttcaagacccacccgatgaacttcctgaacgaaaggaccctgaaggggaccttctttggcaactataagccacgcactgatctgccaaatgtggtggagataagcatgnaaaaggagctggaggtggagaagttcatcacgcacagcgtcccgttcgccgagatcaac

SEQ ID NO: 43874 - DNA, 279 bp, Zea mays
gtcaaaggacaccacattaaatcacaggttaatgctgcttcaggtgctatttctctaatacaacttcaagaagggatgaaaaagatggaggggagtgaggacagcgaggagcaacttatgaagagttttgaggagaaaaaagatgccatgctcagctcgctttggaaaatcaatgtggttgatatcgagtccacgctctcacgtgtctgccaagcagttctgagagatagcatggtctccaaagatgtcctgaagctgcgagcccaagcgttgaaaaag

SEQ ID NO: 43875 - DNA, 232 bp, Zea mays
tggtacacgagccttgcagataagcatgaatgctccagtcatggttgagcttgagggagaaacagaccctcttgagattgcgatgaaggagcttagagcgcgcaagatacccttcacgatcagacggtacctacctgatggaagttatgaagactggggagtagacgagctcattgtggaggactcctggaaacgccaggttggtggagactgaagatgctgatctacttgg

SEQ ID NO: 43876 - DNA, 304 bp, Zea mays
gtaaatttggtcatagagaggtatcaatctatgactgaagtaaccagcgtcatgagaaaatcgtcactggtgatcaaattcttattagtgactggtatactagccgtgctcacggtcatgagcagatcggacactcacatgattaatttatggaattaaatttaatttgtcattttcatcgcattagtattatttattattattttgattactatggtttggtatttacttacaattagtaactgctaataaaattttgaccatcttataaaagcatgctcagcttaacctttatttattggcc

SEQ ID NO: 43877 - DNA, 303 bp, Zea mays
gtagcagttgagaatgaaagagagcaagatgatccattgaagctatcagggaaaactagacaacttggcctcattgtgtgcagaggcacggcagtcatgctggtctcaccgactgatgggactgatgagatcgccaaccctttcctcgcggacggagcatagcttgcacccctcggaacaatatgtccctgtgggaaaagaaccggtttctcgtgtatctgttgtatcgtgtgcagctgtgcggcttattagtggtgtttaaatgcactagatctaatagttagtgactaaaattattggaga

SEQ ID NO: 43878 - DNA, 217 bp, Zea mays
gatcgaggagagaataacgcagagctctgtgctcccggcctctgtcttctgccgtcccggccgtttaatttatagtctctactgtgtgttcgtcccatgtgtttagcagcagcagcaggtgtattgtgcgggtatgtaatggtattgcaactatattgggtgtaaaaccataataaatgtggaaaaaatgcaaggaaaaaaaaaaaaaaaagggggg

SEQ ID NO: 43879 - DNA, 221 bp, Zea mays
  unsure (1)..(221): unsure at all n locations
ttgngatgttttcttgttgagctatactagctcgctgctgccttttgttacaatgtttgtacggtcgcaataaatgtatggtcgtgtttgctcgagagctactcaggtgattttgtcgtgggagcaccaaaagcagaaaagaactgtttttttaaaaaaaaaaaaaaaaaaaaaaaaaaaaaaaaaaaaaaatgaaaaaaaaaaaaaaaaaaaaagaaaaa

SEQ ID NO: 43880 - DNA, 283 bp, Zea mays
ttcattgttgagcaggctgccgtgagatatgtgcaggaggcctgtgtacatgatggatatgttctacccaaattgtatgcaaaggttcatcactgtgtctcatgtgcaatccatgcgcacattgtccgggtccgctctcgtgagaacaggaggaaccgtgagcccccgcagcgcttcagacgccgggatgatggcccaaggcctggtcagggcccgccgcgcccaggcggtgcagctcctgcagctgcagctgctgctgctcctcgtacctaagttctggaat

SEQ ID NO: 43881 - DNA, 270 bp, Zea mays
ttagatgtgtatcaaggattgctacagagacatccatctggcttgagctggcttttgctatggcaaacacaagtgcagggatcgctgggtgttgcaccgtgtctgcattatgtggttacattctggaccctgtattttctatgcttttatgcccctactgtttagtattaattatcaataaatttgtttgggtcggttgaaaaaaaaaaaaaaaagtaaaaaaaaaaaaaaagcaaaaaaaaaaagttaaaaaaaaaaaaaaaacaacca

SEQ ID NO: 43882 - DNA, 263 bp, Zea mays
gtagaatccgcgttacaacttttggagccggtcttttacacactgtgcacctgagatagagaaactgttcgagtcggtggcaaggtcatgtggcgcaaaagttgtggacgaaggaatcagcgtgcaggatggcagccactaaagccatctgctttgttcaagtgttgtttttgtgctatttcttgctcggcactggaaattttctgtgcttgtacagatcgtctgtatagtaaagctgttagtcacacgtgtcggtgcactgc

SEQ ID NO: 43883 - DNA, 283 bp, Zea mays
ggaggatctggtttctaccgacttccttggtgacagcaggtcgagcatcttcgacgccaaggccgggatcgctctgaacgaccacttcgtcaagctcgtctcgtggtacgacaacgagtggggctacagcaaccgcgtcgtcgacctgatccgccacatgttcaagacccagtagaggggttttttccccctgcttctcatggatggttgctgcttgtgtatgccgagaataaatgtggatggcgcgtgcctctgggtcgccaggttcatgctgagtctggac

SEQ ID NO: 43884 - DNA, 263 bp, Zea mays
ggcgcacggagaagaggaagaacccactcaagaacatggctgctgtgctcaaactcaacccctacctcggcactgcccggaagatggccacccttgctgaggctgctcgtgtgaaggccaggaaggcgaagctcgactccaagaggaccaagcttaccccggagactgccaaggttaaggctgctggcaaggcatggtacaagaccatggtctcggacagcgactacaccgagtttgagaacttctcaaagtggctcggcgtg

SEQ ID NO: 43885 - DNA, 298 bp, Zea mays
ggcgcttcgggagccgcggcttatggtgcagacatggccaagtccaagaaccacaccacacacaaccagtcccgaaaatggcacagaaatggtatcaagaaaccccgatcacaaagatacgaatctcttaagggggtggaccccaagttcctgaggaacatgcgctttgccaagaagcacaacaaaaagggccttaagaagatgcagtgccaacaatgccaaggccatgagtgcacgtgccgaggctatcaaggccctcgtaaagcccaggaggttaagccaagatcccaagggtgtc

SEQ ID NO: 43886 - DNA, 295 bp, Zea mays
gcgatttgagaatgatattgagaccggggaggaagtggttctcatgacgacgaaaggggaggctatcgcgattggtatagctgaaatgactactgctgtgatggcgacctgtgaccatggtgcagtttcaaagatcaagagggtagtgatggacagagatacatacccaaggaaatggggacttggcccggtggcactcaagaagaaaaaactggttgctgagggtctacttgacaagcatgggaagccaaatgagagacaccactgagtggccttcggatgtggtgcttcccac

SEQ ID NO: 43887 - DNA, 274 bp, Zea mays
gtaaatttggtcatagagaggtatcaatctatgactgaagtaaccagcgtcatgagaaaatcgtcactggtgatcaaattcttattagtgactggtatactagacgtgctcacggtcatgagcagatcggacgctcacatgattaatttatggaattaaatttaatttgtcattttcatcgcattaggattatttattattattctgattactatggtttggtatttacttacaattagtaactgctaataaaatcttgaccatcttataaaag

SEQ ID NO: 43888 - DNA, 295 bp, Zea mays
gtgccgcaaggacggggtctacatgtacttcgaagataatgctggagtgattgtgaatcccaagggtgagatgaaaggttccgctatcactggacctatcggcaaggagtgtgctgatctttggcctaggattgctagcgcagcaaacgccattgtttgagagcttgttggaatatgttcagtactctatatgatcatcttattatcagttgctagactgcaattgggcttatgtttgttcactcattttgtagtaaacagaattggtataccaggggatcatataacatgtatg

SEQ ID NO: 43889 - DNA, 283 bp, Zea mays
gtcccaggcgggcgggtcgttcactgttactcgtgacacgtctggggagcagcttggcaggggtactaagattacacttttcctcaaggaagatcagttagaataccttgaggagcgtcgcctcaaggatttggtcaagaagcactctgagttcatcagctaccccatctccctgtggaccgaaaagacaacggagaaggagatttctgatgatgaagatgaggaagagaagaaagacgctgaggagggaaaggttgaggctgttgacgaggagaaggaagag

SEQ ID NO: 43890 - DNA, 279 bp, Zea mays
gctgccgatgcgggaacatgtactgttcggtgcaccgctactccgacaaacatgactgtcagttcgactatcggactgcagcaagggacgcgattgccaaggccaatcctgtggtgagggcggagaagctcgacaagatctgaggcgggcattgggggagcgaaatggttgcaatctgcaagaattcaacatgctgtctttgctgcgttatcattgaaacttgccattcttgtctgctgctgcgtcccgtgaggttcaatactgtgatgcacacagcat

SEQ ID NO: 43891 - DNA, 107 bp, Zea mays
gtttgttgttatgaagcaggcggtacttttgtagttgatgaaggacgtttgtcgccactgtcatttacataatccggataataatttatattgtgtaatcttgagag

SEQ ID NO: 43892 - DNA, 266 bp, Zea mays
tagtgtcttgtgtcttagcactgtcaagaacgaggataagcttgagttcagcaagattttggaggctattaaggcaaacttcaacgacaagttcgatgaggtcaggtagaagtggggaggtggcatcatgggatccaagtcgcaggccaagaccaaggcccgggaaaagctgctcgccaaggaggctgcgtgacggatgacctagattgtctactgctgtgtctgccctgtagtttagaggggtagactgatgaactgtaatgtgg

SEQ ID NO: 43893 - DNA, 250 bp, Zea mays
ggaagcgcaaggtgatcgtcgaacgtgctgcgcaactggacatcgtggtcaccaacaagcttgccaggctccgcagccaggaggacgagtgaaatggccattatttccggttgtgatccgctggtgtgcaagatgttgctgagatccgagattcattctctgccatttttattcgcttatgttagacttttccaatggacaaaattctgttataagcggaagagtgatggcgaggaccatctagtttttg

SEQ ID NO: 43894 - DNA, 233 bp, Zea mays
tatgagggcctccaagatcagaaagctgttcaaccttaacaaggatgatgatgtacgcaagtacgtgaacacataccgcaggacattcactaccaagaacggcaagaaggtcagcaaggcacctaagatccaacggcttgtgacacccttgaccctccagaggaagcgtgctagaatcgctgacaagaagaagaggataactaagaagaagtctgaggctgctgagtaccaga

SEQ ID NO: 43895 - DNA, 299 bp, Zea mays
gtacgtcttcatccgcaaggtgaagatactcaagccccccaagttcgatcttgggaagctcatggaggttcacggcgactacaaagaggatgttggtgtgaagcttgagaggcctgtcgagggagatgaggctgggcaggaggttgctgctgccgagtagtttgtttgctagttctatatctaggcgagtctggacatgaggttgcttatgacgtgaacttatagagttgtcttggctatgtgttttcgtctggccctaagatttgtcttgaaacaagttaaaattacgatattgtaac

SEQ ID NO: 43896 - DNA, 243 bp, Zea mays
tgaggagggcttcagccttgctgtttctagaaaccttctgaggctcatgaatggtgacattcgtcacctcagggaagctggcatgtccaaccttcattctcactgctgaacttgctgctgctccttcagcagttggacgatgagggcaaactgcaacaagtgtcaaatgctctctcagagttcattcggaaagccacggtggtttgcggagaatgagaaatgttggagcggcgtgtaggatca

SEQ ID NO: 43897 - DNA, 188 bp, Zea mays
ggatgatttgctcagatccaaagcttgattctcaccgcttcaaggatataattgacgaggtgattggtgaaggtgagctgaagtcaactaaggtgtatgagaaatgggctaaaaagatctcagggatggagccaccaacaaatccgctagataggagagtgaagaagaggaagaacagtgaggagaat

SEQ ID NO: 43898 - DNA, 299 bp, Zea mays
gtcgagggcatggacgtcgtcaaggccatcgagaaggtggacacccgcaacggctccacctccaaggtggtcaaggtcgctgactgcggacagctctcctagatctctctgatctggtctgttcggccgccctccctccgtcatcgtcgactccccctgcgtccgttcctttggatctgaataagatggtggtgatctgagtggtggtcttagtttatcatgtatcgctcgcagtttaatttagcggtttaggtgtggatctgtgaaccccatggcgcctctgcttgattcgtgtttca

SEQ ID NO: 43899 - DNA, 237 bp, Zea mays
agaaggtcaacaccctgatcaggcctgatggaaagaagaaggcttacgtgaagcttatgcctgactatgatgctcctgatgtggccaacaaaatcggcatcatctaaagttaccgcgtcaggcatctgctgtgctctatttccatgtgaaaccagagtttttgtagctatggctcagtggctccatgaccatgtcttatgcacacttacgaatttgatatcatccaagtcacaggtt

SEQ ID NO: 43900 - DNA, 210 bp, Zea mays
tttcaaatcttcgacttcaactttatgggcctcggtttgtgcattaagcttggcttcactggttttcagcctatccactaaggaaaacagtatcctatctttttcaagagcttcgttccttagcgtgatgacctctgatcgaagatttccaagagctatctggcagctctcgtcgtcttcttccttttgagcccttaaagatttacttag

SEQ ID NO: 43901 - DNA, 190 bp, Zea mays
tggagaatcagtaaaatgattatctgctagactagatgtgtttctctgtactcgattgtattgagacacatatatatagttgcgaaaatgcggtggtgagaaattcgaaatgaatctgagccagaactcggaccgccaaatttcatcatttttactcacaaatttctaccatattgaacagcgagataat

SEQ ID NO: 43902 - DNA, 313 bp, Zea mays
gtcggaccagcagcgcctgatctttgctggcaagcagctggaggatggccgtaccctcgccgactacaacatccagaaggagagcaccctccacctggtgctccgcttgcgaggtggtatgcagatctttgtgaagactctgactggcaagaccataaccctggaggttgagagctccgacaccatcgacaacgtgaaggcgaagatccaggacaaagagggcatccccccagaccagcagcgtctgatcttcgccggcaagcagctggaggatagccgcaccctagcagactacaacatccagaaggagagc

SEQ ID NO: 43903 - DNA, 287 bp, Zea mays
ctggtggtcatcaagggcaagaagaaggtttggaacctcaccaagaaggaaagctacgacctggtggacggagattttctcttcacacctgccggggatgtgcacagggtcaagtactttgaggacacagagttcttcatccgttgggatggccactgggacatctttctcgacgaggatctcgacactgcacgcagtgccattgacgcggagcttgcagctgccagcaagtgagatcatgccatctatgtgcagtgatggcaagcttctgaaggtgctatgctcac

SEQ ID NO: 43904 - DNA, 273 bp, Zea mays
accctggttactcaccaggaatccctcgaatccaaggtgaacgagactaaggcaaccgtcaagttccagctcaagaaggtcctttgcatgggcgtcgccgtcggcaacttggcgatggaggagaagcagatccagcagaacatccagatgagcgtgaacttccttgtttcccttctgaagaagaactggcagaatgtgagatgcctctacgtcaagagcaccatggggaagccatacagggtgttctaagtatgctcttttgtgaagtctgct

SEQ ID NO: 43905 - DNA, 288 bp, Zea mays
cgactccaacgtcagtggaagaccttttgagtttagactaggtgttgggcaggttatcagtggctgggacgttggcgtcaatggtatgcgggttggggacaaaaggagactcaccattccaccttccatggggtatgggagcaaaagagtggggcagataccacagaactcaactctcatcttcgatgtggagctggtgaacgtaaaatgaagtgagaagatccacgagaaactgcggcagtttcacaaattttgctacgcatcattttccttgggcgatgctgtttc

SEQ ID NO: 43906 - DNA, 300 bp, Zea mays
cttctgcgaaggccttccacgagcagctgtctgtggcggagatcaccagcagcgcgttcgagccggcttccatgatggtcaagtgcgacccacggcacggcaagtacatggcttgctgcctgcatgtaccgcggcgacgtggtgcccaaggacgtgaacgccgcggtggccaccatcaagacgaagcgcaccatccagttcgtggactggtgcccgacggggttcaagtgcggcatcaactaccaggcgccgacagtggtcgcgggtgccgacctcgccaaggtgcagcgcgcggtgtgc

SEQ ID NO: 43907 - DNA, 128 bp, Zea mays
ccgacgtggacggtgatggccagatcaactacgacgagttcgtgaaggtgatgatggccaagtgagatatgcccgccgtttttaagctagttcctctcctgatggtagtaactagtctagttttggag

SEQ ID NO: 43908 - DNA, 284 bp, Zea mays
gctgacgatgatgatgatgctgccaccatggtactcgacggtgcggcggaaacggtggacgaggttgatgaagctgcccgagccaaggccgtagccaaggcgctctgcaagggctctagcaaggcggacgacgtcgctgatgcgctccgcgaactcaacatggacgcgtacgatgatgaacatgaagaggtcgatattttcggctctgggctgggggacttgtactatccgagcaacgcaatggacccatatctgaagaagaacaatgaggatgatgaagagga

SEQ ID NO: 43909 - DNA, 301 bp, Zea mays
  unsure (1)..(301): unsure at all n locations
ggcggcgctcctgcagctgaggcgaagaaagaagagaaggtggaggagaaggaagaaagtgatgacgacatgggcttcaggctcttcgactaagcctgtacaatactcttgaaagatgnacaggcttagtcgaagaggctgaagcctgtgcaatagtcaagagtattgtttttgagtcgcggaagcagagggaagaaaaatcgtagtcatgtttggactttaaaattgttttatgttggaaagtacttgataagacttttctagtgtnattctangcgtaggttgctgtgctggttggggt

SEQ ID NO: 43910 - DNA, 280 bp, Zea mays
  unsure (1)..(280): unsure at all n locations
gccagcgcaagaagcgcgacttcgtcaacggggccgtcggcgcgttcgttgccggagcctctgtctgcggctacagaggaaagagtattcagtcagccctcatcggaggctcctgtctggctttcacatctgctgtgctggacattggcggcaatacgaccagagttgacaacggcaaagagtactatgcctacacaactgagaagaagcctgcaaattgattccaagtctgcacttctagcaaacaatcttgcnagccatcaactcagtgaatttgaag

SEQ ID NO: 43911 - DNA, 230 bp, Zea mays
gtgactgagagctcgtcggcttccgtccacgcgtgaagcgagagcatggacacccaggtgaagcttgctcgttgtggtgaaggtgatgggcaggaccggctccaggggtcaggtgacccaggtcagagtgaagtttttggatgaccagaaccggctcatcatgaggaatgtcaaggggcccgttcgcgagggtgacatcctcaccctgctcgagtccgagagggaggcca

SEQ ID NO: 43912 - DNA, 268 bp, Zea mays
ggaggcggctacggcggtggcggtggccgctatggaggtggtcgtggaggctacggcggcggcggttggggatacggtggtggaaaccgcggcggcggctacggcaacaacgacgggaactggaggaactgagcggtggggtccgctgaggcctagttatcttggtcgcttctgctaccgtgttcaccctagtctagagggggtttatcttcgtctgtggtcgtctcgtgtccgtttgtttcgattcgtgttcattgttgttgttgcc

SEQ ID NO: 43913 - DNA, 289 bp, Zea mays
ggaaaggcgggttcaagacggcggcgttcaggttcgtggccggcggcgtccgcacccgcctcaccttctacagctcctactaccacaccaaggtcaccgacggcgtctcgctctgcggccccgtgctggaccaggtcaaggttgtgcctgtcaaggcgtagtgaaatgaatcgtgagagcgccgagtgacggtctgctctgctcgtcgtctgtagctgtgctcgtcgtgatttggcgtggtgggttgtgaaagtgtggtcgaattctggacccttcggaatctgatcgt

SEQ ID NO: 43914 - DNA, 281 bp, Zea mays
tgcttgtgttccgacggtggatgcggaggaagcatgcgccctcctcagctcttccacacaccactatatggatgtcaggatgtgggaggattttgacaagggactcgtcgccggtgctcggaatgttccctactacctctccgtcactccgcatgggaaggagaagaatccccagtttgtggaacaggtttccgcgctctacgccaaggaccaaaacactgattgtgactcgtcaacgcgggcttcaccaacgtgaggaacctacaaggcggataactttc

SEQ ID NO: 43915 - DNA, 262 bp, Zea mays
agacaaatgagattggcaatgtcccaacgctgctcatcgggtctgctgcaggagctatctcaagctcagcgacattccctcttgaggttgcacgtaagcacatgcaagttggagctgttggtggcaggaaggtttacaagaacatgctccatgccctcctaagcattcttgaggatgaaggggttggggggctctacaaaggggtggggccaagctgcatgaagttgatgcctgctgctggggattcctttatgtgctacga

SEQ ID NO: 43916 - DNA, 294 bp, Zea mays
gctgatgaacgcttattgtgaccgccagtctgtggacatgaatgccattgcgttcctgtttgatggccgcaggttcgcggcgagcagacccctgatgagctggagatggaggacggcgacgagatcgacgccatgcttcaccagaccggaggcagcgttcctagcaccacctaaaagcctcgttttgctctccgtcctgcgtagtagtaaacaaaagggaaaaagtctttttaaggacctgtgatgctctggctccttgtgccattgctgagggacatcttagccttgtttagt

SEQ ID NO: 43917 - DNA, 303 bp, Zea mays
gagcactgcagctaagaaggctcctgccaaggaggaagaggaggaagatgaagaggagtctgacaagtccaagtcggaggtcaatgacgaggatgatgaagagggtagtgaggaggatgaagatgatgacgagtgatggagctcctcgagacaatggaccgtgcttcatccaacaatggagcggctacacaaggccccgtggcgatcacaaaaaaggagcctatatccatgtactagaattattcagtttcactccactcgtgatgttttatttttacttttgtcgtgctataacggatagcg

SEQ ID NO: 43918 - DNA, 247 bp, Zea mays
aaagagaggaaacgatggccatgcgaagaactccagggcagcagctcctgctgccaaagagtacgacgacgacgatgacgaggaggacgaggaacacacggaaaccttttgtggaagctgcggcggcctctacaacgcgaacgagttctggatcggctgcgacatctgcgagcggtggttccacgggaagtgcgtgcggatcacccctgccaaagcggaccacataaagcactacaagtgcccggac

SEQ ID NO: 43919 - DNA, 300 bp, Zea mays
caagaagaagaggatcgctaagaagaagtctgaggctgctgagtaccagaagcttcttgcccagaggctgaaagaacagagggaccgccgcagtgagagcttggccaagaggaggtctaagctttctgccgccgccaaggcatctgctgccacctctgcctaagaatgatcagtgcttagtgatgttttcaaggcctattttgttacagcttataagtaccttatgctgccctggctgtgttgcatcagtcgaccctccctacttagacttatgagtaattgttgcaattttgtatggac

SEQ ID NO: 43920 - DNA, 98 bp, Zea mays
gcttgttaccgtcgtgtcgaaccttgtactacgaggctccatcgaacatcgatggcttgcttctttatcagaacatgtttgaataaacgctatttggt

SEQ ID NO: 43921 - DNA, 166 bp, Zea mays
ctggtggtcatcaagggcaagaagaaggtttggaacctcaccaagaaggaaagctacgacctggtggacggagattttctcttcacacctgccggggatgtgcacagggtcaagtactttgaggacacagagttcttcatccgttgggatggccactgggacatct

SEQ ID NO: 43922 - DNA, 296 bp, Zea mays
ggcaacctgagcatgtgatgatgtttttacttgctgaaatgggaacaagcgggtcacttgatgggcagcaaaggttggtgatcaaaggaagatttgcccccaaaaactttgaagcaatcctgaggagatacatcaatgagtacgtcatctgcaatggatgcaagagccctgataccattctgtccaaggaaaatcgtctgttcttccttcgctgcgaacagtgtggatcttcaaggtccgttgctccaatcaaagctggattcgttgctcaagtcggtcgtcggaaggcatgagca

SEQ ID NO: 43923 - DNA, 286 bp, Zea mays
  unsure (1)..(286): unsure at all n locations
ccagaagaagagagctgagaagccagaggtccgcgatgctgctagagaagctgctcttcgtgagatcaaggagcgcatcaagaagaccaaggatgagaagaaagcgaagaaggcggaggtgagcaagtcccagaagacgcagacaaagggtgcggtccagaagggttccaagggccccaagttgggcggcggtggtgggaagcgctgaaagaacttagtgtcgtttctcgacattgcagtcgttccttagccanagccactttcgtagaaccgtgttgaatttgca

SEQ ID NO: 43924 - DNA, 293 bp, Zea mays
cactgctgtcactgctcgcgatctatgggcgcactcgtcgttctcggctcaaggccagctatcagcttcggtgctacctcacgactgcaagatgtatgtactgacgccgaactagctcagaagacaagagcggattgttccatggcgcgtgggatgcaaccattcggtcaggattcagggaagaagagtatgcagtgcaggcaaggatttcaagagaaggaaattcgatatcatttggttatacaggatatgagtgcgaatggaggaataatttatactaatactatggaagt

SEQ ID NO: 43925 - DNA, 178 bp, Zea mays
cagccaatggccctactggctataatagggattacctgttctcaatggagaaggcattagccagcattagccacgaagatgattcgatcatagagcttgcaaacgaggtgaggaaggtgctcaacagaacaaaggagaccaagatcactggtgccaatgcttccatgaaatcacatgc

SEQ ID NO: 43926 - DNA, 316 bp, Zea mays
agcggcggcgcaagtccccttcatctccggcgcggcacttgacgtctgacttcaacaccaggcaaatggcaggtggcagggttgcacatgctaccctcaagggccccagcgtggtgaaggagatcttcattggactgaccctgggtctgatcgctggaggtatgtggaagatgcaccactggaacgagcagaggaaaactagatccttctacgacatgcttgacaagggccagatcagcgtcgtcgtcgaggagtagttcccacgtgtcacctcagaagtttttttttccagttgtttttgaaaactcactctgga

SEQ ID NO: 43927 - DNA, 291 bp, Zea mays
ggataagaagaaggaaaatgctgagcgtgatgagcgtgccaagaagtcggtgagcatcaacgagttcctgaaacctgctgaaggagaaaggtactacggcggccgtggccgtggaaggggccgtggggatcgtggtggttttagaggcggatacggagggggatacagtcgtggcccagctgctgctgctccatccattgaagatcaagctcagttcccaagcctcggtgggaagtgaagggcgcccagctgctgctgtcaccgagcgttgtgttgtctgctgttgtcata

SEQ ID NO: 43928 - DNA, 318 bp, Zea mays
agtgaacccaaagggagagatgaaaggctctgccatcactggacccatcggaaaggagtgtgctgatctgtggcctaggattgccagcgcggcaaatgcgattgtctagtggaatcagttgatcgaaatttacttcaaataacatttgtttgtgttgcgaattgggaagagagtttttagttagacgagcttttgatggccctaaagatgttttcccggatgatctttgtgctgctggaccgtttcctgttagcttcgatggcatcctccccatatcgataaactgttgcttagcctgacaatcggaagagttaaatg

SEQ ID NO: 43929 - DNA, 304 bp, Zea mays
aaaaggatatgtctccaactgctggaaagatattctctcaattgttggatggatctggcgaatataccctggtctacgaagacaacgaaggagacaggatgctggtaggggacgtgccgtggaatgtgtttgtgtcaactgctaaaaggctgagggttttgaggagctcggagcttgccaaaggtttggtaggcacaaggccacctcagattgcggtactccgagaagaggacaccagattgctgaaacctgaaacagcgacaaatctgatcattggatgtgagcaagcaactgacccggactt

SEQ ID NO: 43930 - DNA, 309 bp, Zea mays
gcgtccgcagcggcgggaacaacaagttcgacggcatggtgtacctgtaccccggccgcggcggtgacggcggcatcgacgtcgagctggcgctgcagccggagcccatgcagaggctggagaaggacgacgacttcttcctgcgccaggcggcagcctaagcccgagtcgtcgatcgtcgtgtcagtgtccactgtccacccatccagttcgttgatcgtgctttattttagtagtaagtattgtgtacgttcctgcttgctatattattattatactagtcgtttgctttgttccttgattaattgt

SEQ ID NO: 43931 - DNA, 300 bp, Zea mays
agcggcgctcctgcagctgaggcgaagaaagaagagaaggtggaggagaaggaagaaagtgatgacgacatgggcttcaggctcttcgactaagcctgtacaatactcttgactattgcacaggcttagtcgaagaggctgaagcctgtgcaatagtcaagagtattgtttttgagtcgcggaagcagagggaagaaaaatcgtagtcatgtttggactttaactttgttttatgttggaaagtacttgagagacttttcctgtggtaagtctaggcgtaggttgctgtgctggttgggg

SEQ ID NO: 43932 - DNA, 168 bp, Zea mays
caagttgatcattggatcacttgagaggagttgagtgcaactctcgtccgttgggacgccacaacgtggagtaggcaagttttgtacttggccgaaccacgggataaaaaaaaaaaaaacaaaaaaaaagggcgcccgccgacaaataacctcttcgacccggaaata

SEQ ID NO: 43933 - DNA, 279 bp, Zea mays
tgggggtgatgctgccgtcggaccaggggctggtgagcgacccgcgcacgagctggctcgtccagggcttcgccgacaaccactggtggttcttcgaccagttcaggacctccatgatcaagatgagcgagctcaggggaccccaggggaacgtcggcgagatccgccgtaactgcttccgcccaaacaccaacggcatcgccgcctctgcttgagttgactgaccaggcaccgatccattacttcactttcactgtgtgtaataattaataataataa

SEQ ID NO: 43934 - DNA, 295 bp, Zea mays
ccaagaagtaccatgctttccttgcatctgaggctatcattaagcaaattcctcgtcttcttggtcctggtcttaacaaggcaggaaaattccctaccttggtgacacaccaggaatcccttgagtccaaggttaatgagacaaaggctacagttaagttccagctgaagaaggtgctttgcatgggtgttgctgttggcaactgcggcatggatgagaagcagatcttccagaatgtgcgaatgagtgtcaattcctcgtgtcgctcttgaaaaagaattggcagaatgtgaga

SEQ ID NO: 43935 - DNA, 295 bp, Zea mays
cagaaaccctcctccaccaacccaatccagctacatccgtctgggtgaactccagggccaggagcagttcgccgccttcgttcgcatcacctacgcggttcgatccaactggcaggaaggaacgtgatggccaagacgagctcgttcaagctggagcacccccttgagaagaggcagtctgaggctaatcggatcagagagaagtaccctgacagaattccagtgattgttgagaaggctgagaggagtgacattcctgacatcgacaagaaaaagtacctcgtcgctgctgatc

SEQ ID NO: 43936 - DNA, 300 bp, Zea mays
gacgcagcagcaggagacgcgccaaggagagcccgcaaggaggcgactatgagggccaagtggaagaagaagcgcatgaggaggctgaagaggaagcgccgaaagatgaggcagagatccaagtaggctgatggggattgtggatggtggtgtcggcatagttgtgttacgtttcttcgatgcgtgagttcatggagagatgtcacatcctagttcgtcgtcaccgtttgccatgggtccaatggctcgtcttggaaacctgcacttcagtaggccatctatcgtggtttctagctatat

SEQ ID NO: 43937 - DNA, 305 bp, Zea mays
actccttcttcatggatgttaagtgccaggggtgcttcagcataaccactgttttcagccactcccagactgttgttgtgtgccctggctgccaaactgtcctctgccaacccacaggaggaaaggcaaggctcactgagggctgctctttccgcaggaagggagactagagcggatgtggtcttcaagttttgctctatgccagatactagcgtcatgaactgcctttagctaagattttccataagttgttctcgagcagctatgtgttgcatgttggctacttccaaacttatatctggttt

SEQ ID NO: 43938 - DNA, 297 bp, Zea mays
ataaggagggccttcttcagctcccaagtgacaaagccctgctgagtgaccctgtcttccgccctcttgtcgagaaatatgctgcggatgagaaggctttctttgatgactacaaagaggcccacctcaagctctccgaactggggtttgctgatgcttaaatagaccctatcctggagtgatacattctgctgcatgtggtcttttgcatctggagtcaatgtgaacaagcagattgtcgtattgtctttctcgtaataaatttgtcaatgttgagcccttaggcttgaattgtgg

SEQ ID NO: 43939 - DNA, 294 bp, Zea mays
gggaggtccgcggggtcggccttctcgtcggcgtcgagctggacgtgccggctggtcctctggtcgacgcgtgcttggacgccggcgtagtcgtgctgactgccggtaagggcaatgtggtgaggctggtgccgccgctcatcgtctcggagaaggagctggagcatgccgcggatgtcataagggactgtctaccggcgctcgatgtcgttgctgctgcctaatgtatatggtggtgcaataggtccggatatgaaacctgattccagattttggaatcgaataatttcatgt

SEQ ID NO: 43940 - DNA, 295 bp, Zea mays
gcgcaaggagggacgtacccttgacccacacattgaggagcaatttggcagtggacggttgctggcatgcatttcttcccgccctggacagtgtggccgagctgatgggtacatccttgagggtaaagagcttgagttctacatgcagaagctacagaggaagaagggcaagagcgctgtagcttagagcattctcatggattgtcttgcaccgaaatgtgtgtcctgatgagtacactttttttggttagtcgtctcaagttcagagcgttatgccatgttttcagtcctgatt

SEQ ID NO: 43941 - DNA, 285 bp, Zea mays
cgggaacaaccccgcccagatgaacgcgcgcgtcggctactacaagcagtactgccagcagctccgcgtcgacccagggcccaacctcacttgctaggcgacggcgtccacgttgtacccatggctcctgctagtgctagctcgtccacaataaatgctcggcgtcgcaccctcgcgaaaagtaaaccaagagtttactgactagtacgagctagctagcatgcagtaataataatcatcgtaataataataataaaacgactgggctgagccactttgttcgac

SEQ ID NO: 43942 - DNA, 302 bp, Zea mays
cgaagatgatgacgagtgatggagctcctcgagacaatggaccgtgcttcatccaacaatggagcggctacacaaggccccgtggcgatcacaaaaaaggagcctatatccatgtactagaattattcagtttcactccacatcgtgatgtcttatttttacttttgtcgtgctataacggatagcgctcctcgttggcgccactggcgggtggttctgcctctggtctggtgtgtgggctgtgtggtcacacttgccagccagcagaggcgcctgcttgtacctagattactgtttccatt

SEQ ID NO: 43943 - DNA, 292 bp, Zea mays
atccccccggaccagcagcgtctgatcttcgccggcaaacagctggaggatggccgcaccctagcagactacaacatccaaaaggagagcaccctccaccttgtgctccgtctccgtggtggtcagtaagtcatgggtcgtttaagctgccgatgtgcctgcgtcgtctggtgccctctctccatatggaggttgtcaaagtatctgctgttcgtgtcatgagtcgtgtcagtgttggtttaataatggaccggttgtgttgtgtgtgcgtactacccagaactatgacaaa

SEQ ID NO: 43944 - DNA, 292 bp, Zea mays
ggtatatgcaacagcacgaagatgtagagctatccgctcttggaatggccatagcaacagttgtgaccgtggcagaaattctgaagaacaatggatttgctgttgaaaagaaaattaggacctctactgttgaaataaacgacgaatcaagagggcgtccattccaaaaggccaagattgagataatcttgggaaagagcgacaaatttgatgagctgatggccgctgctgcagaagagaggggcgaagtggaagatggtgaagagcaggcttgaaaacagtaccgatgaca

SEQ ID NO: 43945 - DNA, 247 bp, Zea mays
gtggagaggatggttggcgaactcgagaagtttgcaaaggaggacaaggagaagcgagacgctattgacaccaagaaccaagccgagtcggtcatctaccagaccgagaagcagctgaaggaactaggggacacggtccaggtgacgtcaaggggaaagtcgagtcgaagctgcaagagctcaaggatgctgttgctggtggctccacgcagacaatgaaggacgccataagtgcgttgaaccagga

SEQ ID NO: 43946 - DNA, 229 bp, Zea mays
cagtcttgtgtctgaccactgtcaagaacgaggacaagcttgagttcagcaagatcttggaggctattaaggcgaacttcaatgacaagtttgatgaagtcaggaaggagtgtggaggtggcatcatgggctccaagtcgcaggccaagaccaaggccagggaaaagttgctggccaaagaggccgcccagcggatgacgtagattatccactgttgaatttgcccctg

SEQ ID NO: 43947 - DNA, 243 bp, Zea mays
ggattttcaatttggcgagggaccaaaaatgctctcgagtggtgctttgtcaagcaaagctccatctgcgcgccctaccccgttgtgcgaactgtttggcatcaaacttgtgtggttgctgtcttctatgttctgctagtttatgttcggagtccgtgggaatatactagctgattaataaaaagaaaaaactgatgtgatgccataatagtataaaagggagaaaaaaaaaaaaaagggggg

SEQ ID NO: 43948 - DNA, 286 bp, Zea mays
cagctcttgctgccggcgctgatgtgtccatgattggccagttcggcgtcggtttctactctgcctacctcgtcgccgatagagttgtcgtgaccaccaagcacaacgatgacgagcagtacgtgtgggagtcccaagcgggcgggtcgttcactgttacgcgtgacacgtcaggggagcagcttggcaggggcactaagatcacactgttccttaaggacgatcagctggagtaccttgaggagcgtcgcctcaaggatctggtcaagaagcactctgagttcat

SEQ ID NO: 43949 - DNA, 190 bp, Zea mays
gtgtttgttgttgcccatctgtgtttttgattgcaaggtcgctctgtgtcagttgttagtgctgtgttcatcctcggtttcagcagacccatgcatcaaacagcatggactgcggatcgatggatgctgttacccccgtcaggctttattctaagttaatcttaaggaaaagggagtgcttcttggtgct

SEQ ID NO: 43950 - DNA, 305 bp, Zea mays
gcaagggcgggaagaaggccacgtgacgacgaggacgccaccgcggcggcgaccacggtgcggctcatgaaggagtagaccacgtggacgatgaagaaggcgaaggtggtggcgcactacggcttcatccccctcgtcatcgtcatcggcatgaactccgagcccaagccctccgtgttccagctcctctcccccgtctgatcggatctccccgtcagggcccggatgaggtcggtccgtagtagtttgtagctggtacttcatttgcttacatatgtccgagatcgagttgaagaaggtggatc

SEQ ID NO: 43951 - DNA, 164 bp, Zea mays
gactgccacacctcgcacattgctgcaagtttgcggagtgcattaccaagattgataggcggtctggcaatgagcttgagaaggagcccaaattcctcaagaatggtgatgctggtatggtgaagatggttcccactaagcccatggtagtggagaccttttct

SEQ ID NO: 43952 - DNA, 302 bp, Zea mays
agcatgaatgctccagtcatggtgagcttgagggagaaactgaccctcttgagattgcgatgaaggagcttagagcgcgcaagatacccttcacgatcagacggtacctacctgatggaagttatgaagactggggagtagacgagctcattgtggaggactcctggaaacgccaggttggtggagactgaagatgctgatctacttggcatggaaaggatgtgtagttacaggtcttcgttgcctctgagtggatgctgaacagtgaaatgaccaagacgaaacgatgctatgctagatgt

SEQ ID NO: 43953 - DNA, 299 bp, Zea mays
agagaccggagtcgtgtagcgagcagcaatttatccgtgtgcagccccagactggaaagaagatgctaattaaagtgaagacgctgaccggaaaggagattgagattgacattgaacctacagacaaggtggagcgaatcaaggagcgtgtggaggagaaagagggaatccccccacaacagtcgaggctcatctacagtggcaagcagatgaatgatgagaagacagcagctgattacaagattttaggtggttcagtccttcacctggtgttggctctgagaggaggatgtggtctt

SEQ ID NO: 43954 - DNA, 295 bp, Zea mays
gtgggcaagtggtgaatgtgaaagaatgttgcatacacccataagaaccttcccttacaatgaggctgtttttgtgcttgatcaggattcgtgtctatccagtgatgtttgatagtttcatcaggcaggagcatagaatggtgaatcttttcgattgaggactgtgaatccatggatgttcagtcattgtttgtgtagacattgtggtgagcttggaggccaccccacctccccaataaagcagtgctgggagtaatagagcactgatgtactgagggtgcctaggttaaacaag

SEQ ID NO: 43955 - DNA, 294 bp, Zea mays
agcgaagaggctaaggatggatgttggcacgttcgatatcaagtatctcgatgatgaccatgagtgggtaaagttggcgtgcaatgcagacttggaagaatgcatggagatctcgcggctttctggcagccatgtcattaggctactggttagcgatattgcagcacactttggcagttcttgtggaagctctggttgatatgcgtgtcagccttttgctttgatcaatgtagactcgaaagttcagttccacttggtagttttgttgctagttagctttagctgtttcattgt

SEQ ID NO: 43956 - DNA, 178 bp, Zea mays
gtccggtgagtgaagccgcacgaacccatggcctccggcgagcttgcctgcacctacgccgctctcatcctcagcgacgatggcatcgccatcaccgccgagaagatcgccacgatcgtgaaggcggccaacatcaaggtcgagtcctactggccggccctcttcgccaagctcctgg

SEQ ID NO: 43957 - DNA, 284 bp, Zea mays
gcacagatgaactcctgaccagggtcatcaccacccgcgctgatgtggacctcaaactgattatggaggcgtaccagaagaggaacagcgtgccgctggagcgggccgtcgcgggggacacctccggcgactacgagagcatgctcctcgcgctcctggggcaggagtgatgagccgtactggtgcgctggtgcctttctgaccggcgccgtggtgtaggttcgtgatcgtaataaacctgattgcctagctgtacgtgaggctgttcttcggtcctgtactgt

SEQ ID NO: 43958 - DNA, 289 bp, Zea mays
catttgtgacctgaacaaggttggtggattcctgcagcggatggacctgtgccgcaagtacgcctttgggaagatgctcgtgataggctctgagccacccttcaagctgaagggcctttggctcttccgtggccaggatgttcccaagtttgtaatggacgaggtctatgacatggagctctacgagtggaccaaggtggacatctctgatgaggcccagaaggagcgtgtcaatgcgatgattgaggaccaggagccctttaagggcgaggccttgcttgacgcgaaa

SEQ ID NO: 43959 - DNA, 281 bp, Zea mays
gcacctccacttgtgctccgtctccgtggtggtcagtaagtcatgggtcgtttaagctgccgatgtgcctgcgtcgtctggtgccctctctccatatggaggttgtcaaagtatctgctgttcgtgtcatgagtcgtgtcagtgttggtttaataatggaccggttgtgttgtgtgtgcgtactacccagaactatgacaaatcatgaataagtttgatgtttgaaattaaagcctgtgctcattaaaaaaaaaaaaacgggaatagaaaaaaaaagaggg

SEQ ID NO: 43960 - DNA, 234 bp, Zea mays
agagcgcacggcgccaagtccgacgatgtctacctcaagctcctcgtcaagctctaccgcttccttgtgcgcaggacaaagagcaacttcaacgccgtgatcctcaagcgcctcttcacgagcaagaccaaccgcccgccgctctcgatgcgccgcctcgtcaggttcatggaggggaagggtgatcagatcgccgtgattgtgggcaccgtgaccgacgacaagaggatcagc

SEQ ID NO: 43961 - DNA, 286 bp, Zea mays
  unsure (1)..(286): unsure at all n locations
gganatgtcgcctcatggcgccgccgcagccgaagtcgggcctcttcgtgggcatcaacaagggccatgtcgtcaccaagcgcgagctgcctctgcgcccgtcccaccgcaaggggagagcaacgaagagggtgtccatggtcaggggcctgatcagagaggttgctggctttgctccttatgagaagcgtatcaccgagcttctgaaggttggcaaggacaagcgcgctctgaagcttgccaagagaaagcttggaactcacaagagggcaaagaagaagagagg

SEQ ID NO: 43962 - DNA, 265 bp, Zea mays
gactccaatttttgttggtgagtccatgaaggatgatgcgtctgtggtattcgcctattacaaggatggtgccactaatccgacattcctctatttctctcatggtcttaaggagatcaagtgctaggcgtgcggcgaaattagttacccatgttgggtactatctatgtactattattatatccaaaactatagttgtcctggctgaattgaactcaaaagggtttgtttgagaaaaaattgtcccaagattggattgcttgtt

SEQ ID NO: 43963 - DNA, 284 bp, Zea mays
gtctggataggagggtcgatcctagcctcgctcagcactttccaacagatgtggatatccaaggaggagtatgatgagtctggcccggcaatcgtccacaggaagtgcttctaggttccgcaagttcctcattgttatctagtctcaagttatgcccccgtcatttctcgagatatgtgtggcagatttgcctgcgacgtttattttcatcggacctgagtcttctcggggttagcagctacctttgaatgttgtggctccctgtgcgagcggctgtgtcgtat

SEQ ID NO: 43964 - DNA, 284 bp, Zea mays
gaagacgatgatctaccccttcatcgacgccaacaccagggacaagttcgtgttcgtggatgacaagagcctgcgggagacgctgcggcgggagatcgacgagagccagctcccggagttccttggcgggaagatgcctctcgtctccctcaaggactacgcccagcagcctcagcccgtttgcgagtgagtctgtcgtagcgatggtggccggccggtgacgtgagcgacccaaagccgaaagctgattcgatctagactaagctaatcagcctacaagaggg

SEQ ID NO: 43965 - DNA, 285 bp, Zea mays
gaggtatgagaagagacactccaacatccctgcgcacatttcaccatgctttcgtgtcaaggaaggagatcatgtgatcattggccagtgcaggccagtgtcgaagactgtaaggttcaatgtgctcaaagttattcctgcaggttcgaagagtggagcagtgaagaaagctttcactgccgcttaagatcatgacgagttcatcatccatggcccggaaaagctctgttataacgttttgatgctgcctattagcctttttccccgtaactatatatgtgtact

SEQ ID NO: 43966 - DNA, 119 bp, Zea mays
ccagcccctctgccgaggacttgacatccattctggagtcagttggctgtgaagttgacaatgaaaagatggaactccttctgtcccagctgagcggtaaggacattaccgagctcatt

SEQ ID NO: 43967 - DNA, 136 bp, Zea mays
gtggagctgtacatgaaaaaggagctggaggtggagaagttcatcacgcacagcgtcccgttcgccgagatcaacaaggcgttcgacctgatggccaagggggagggcatccgctgcatcatccgcatggagatct

SEQ ID NO: 43968 - DNA, 283 bp, Zea mays
attatgatcaaccaggcttctacatgtgacctgaaagaacttgtttcgaagttcattccagaagttattggtaaggagattgagaagtctacctccagcatcttcccacttcaaaacttcttcatccgcaaggtgaagatactcaaggcccccaagttcgatcttgggaagctcatggaggtatcatggcgactacaaagaggatgttggtgtgaagcttgagaggcctgtcgagggagatgaggctgtgcaggaggttgctgctgccagtagtttgtttgct

SEQ ID NO: 43969 - DNA, 271 bp, Zea mays
cagaaggctgaggtgtccaagtcccagaaggcgcagacgaagggtgctgttcagaagggttccaaaggccccaagttgggtggcggcggtggcaaacgctgaaaaggaactaagtgtcattccgagacctcatcaaagccacctttgtagtaccttggttaattttgtattttctttcagagttacttgtgactcttaattttgcatctttatatattgggagaaatgatcgccgttcgttcaaaaaaaaaaaaaaaaaaagagggggccc

SEQ ID NO: 43970 - DNA, 280 bp, Zea mays
ctcgtgacacgtcaggggagcagcttggcaggggcactaagatcacactgttccttaaggacgatcagctggagtaccttgaggagcgtcgcctcaaggatctggtcaagaagcactctgagttcatcagctaccccatctccctgtggactgaaaagacaacagagaaggaaatttctgacgacgaagacgaggaagagaagaaagatgctgaggaaggaaaggttgaggatgttgatgagaaggaagagaaagaaaagaagacaagaagatcaaggag

SEQ ID NO: 43971 - DNA, 144 bp, Zea mays
ctggagttcatgaagaagctcaagaagatgacctccaaaatgctatccaagaatttgggcaggtcaaaaacctgcatttgaatttggaccgtcgtaccggatttgtcaaggggtacgctttgattgaatatgagaagtttgaag

SEQ ID NO: 43972 - DNA, 267 bp, Zea mays
gcttcattttataagaatggacgcagagacaataaaaaggtgaccataagagttgaagtcgtgactgcttcacttggcttccttactaactttgaagatgtttacaagatgtgggcttttgttgccaagttccttgatccttcatttcttgaaagtgaacgccttaccattgctgctgaccactcagaagggcaaacttgagcatgacatgtagcatagcaacaaaaaatgagagggaggtgatttctcctgttgaagcattgttgt

SEQ ID NO: 43973 - DNA, 109 bp, Zea mays
tggagatggatcagacggaggttcttcacctgctggagtcgccagatgctctgaaagccaaggttgctgaagccatggaggtcctccgctctgcccagcatctccagca

SEQ ID NO: 43974 - DNA, 165 bp, Zea mays
cttcggggctgagaaagggccttcacacttgaggccgtcagacctcccggccagccactcgtcgatgattgggactgcttgaagcaaatggtacggatcttcgaatcccattgcggatcgctcactcagtacggtatgaggcatatgagggcgttcgcaaatata

SEQ ID NO: 43975 - DNA, 108 bp, Zea mays
gccgtcatcgtccgccagcgcaagcgtggcgtcgcaaggacggtgtctacatgtacttcgaagataatgctggagtgattgtgaatcccaagggtgagatgaaaggtt

SEQ ID NO: 43976 - DNA, 276 bp, Zea mays
gggagcaccacaagaaggacgacggggagcacaaggaaggcatcgtggagaagatcaaggacaagatcaccggcgagcacggcgacaagtccggcgaccacaaggaaaagaaggacaagaaaaagaagaagcacggcgagggccacgaccacgacggcggccacagtagcagcagcagcgacagcatctgagatctggtgtcgcagcacaggtgcaacacatgtatgcttgctggatggaggattcataccagctgatgctgatgtagtgtttcac

SEQ ID NO: 43977 - DNA, 273 bp, Zea mays
gttgccatactcgtgccgtgctggggcttgctccacctgtgccggcaaaatcgagtctggttcggttgaccagtcggatgggtccttccttgatgacgggcagcaggaggaaggttatgtgctgacatgcgtctcctacccaaagtccgactgcgtcatccacacccacaaggaaggcgacctgtactagggctagggattttcaatttggcgaggagacaaaaatgctctcgagtggtgctttgtcaagcaaagctcatctgcgcgccctac

SEQ ID NO: 43978 - DNA, 273 bp, Zea mays
caaagttcctctagtgattcagtctgtcttcattcgatttcgttgaccgtgctttgagtgtccaatgttcagagaaaaagacgccgagacacgggagttcttggaagctgccaaggcctgtgtggaaatctgcaagtccagtggagtgccgctactgatcaatgaccgcgtagatgttgctctggcatgcgacgcagatggcgtccacgttggccaatcagacatgccagcatgggaagtacgacggctcctaggaccggaaaaatcatcggc

SEQ ID NO: 43979 - DNA, 234 bp, Zea mays
agcacgatgaaggttgttgctgcctacctgcttgctgtcctcgctgggaatgccagcccctccgctgaggatttgactggcattctggagtcagttggctgtgaagttgacaatgaaaggatggaactgctgctgtcccaactgagcggtaaggacatcaccgagctcattgccgcgggcagagagaagtttgcttcagtcccatgtggcggcggcggtgtggctgttgcggca

SEQ ID NO: 43980 - DNA, 284 bp, Zea mays
gtgaaactgatagcaccagatggagaggagagaatagcatgttcagttggaacaggtccagttgatgcagcttacaaggctattgaccaaataatccagatcccaactgttctccgagaatatggtatgacctcagtcaccgaaggcatcgacgcaatcgcaacaacccgggtggttgtcaccggagatgtgaccaacaactccaaacatgccttgactggccgcgctttcaaccgctccttcagcgggagcggggcagcaatggacatcgtcgtctccagtgt

SEQ ID NO: 43981 - DNA, 272 bp, Zea mays
gtcgggcctgaaggtgaagagcacgagtttgatgctccagacgacgcctacatccttgacgcagccgagactgccggtgtggagttgccatactcgtgccgtgctggggcttgctccacctgtgccggcaaaatcgagtctggttcggttgaccagtcggatgggtccttccttgatgacgggcagcaggaggaaggttatgtgctgacatgcgtctcctacccaaagtccgactgcgtcatccacacccacaaggaaggcgacctgtacta

SEQ ID NO: 43982 - DNA, 280 bp, Zea mays
gtttatggagactgtcataagcctggccagacaacggagacactgcatgattgagtgcatccctgtcccttgtgaagtgtcaagcaatgccccaatgtacttcaaaaaggctattgatgatgctgaagaagaatggacccaacatgagatgaagaaggttatcccgacaagtgcaagccgcaacttgaggcaagtcatcccggagaactttgcctacttccatgtggagttcgggctggaccgtggctttgttcatgtaatagatgacgagagcaagttc

SEQ ID NO: 43983 - DNA, 278 bp, Zea mays
gactggtttttgagaatactcgaaggaagtccagtgccatgagaaatgtgtcagacaatcatgcaagaactaaaacacatcttgtagataataaaatgttgagcagtcctgttgaaaataaatttatcgttaatggaggatctgcaatgcagacaattgaccatggacaagagtttctttctgatgttgttcatcaaggtaccttaggagtagatgaactagcaaagttactagcttgagaggtgattgctcttttattagccacacagaccagtatc

SEQ ID NO: 43984 - DNA, 223 bp, Zea mays
gctgctcaatgggcagaaggtggtggtcgtccgctgcgaggagatctgcatgtcgggcggcctcgtccgtcagaagatgaagtacctccgcttcctccgcaagcggatgaacaccaagccgtcccacggccccatccacttccgcgcccccgccaagatcctgtggcgcaccatccgcgggatgattccgcacaagaccaggaggggggaggcggctctggcg

SEQ ID NO: 43985 - DNA, 279 bp, Zea mays
tccgaattgcaaccatgccatgtgcatcaactgttaccgagactggtacacaaggtacccagtcatgcccgttctgccgcgggagcctgaagagggtccggtccagagacctgtgggtgctcaccggcgacgacgacgtgatcgacacggtgacgctggagaaggagaacgtgaagcacttcctcagcttcatcgacagcctgcccctgatcgtccccgacaacatgctgctggtctactacgactacctagtctagcaaggctcctccccccaccccc

SEQ ID NO: 43986 - DNA, 273 bp, Zea mays
ctcatcagccgggacgaggaccagatgaaggcggcgacggggaccatggacggcatcatcgacacggtgtcggcgtggcacccgatcacgccgctgctggcgctgctgaagccgctggggcagatggtggtcgtgggcgcgccgagcaagccgctcgagctgccggcctacgccatcgtgccgggcgggaagggcgtggctgggaacaatgtcggcagcgtcagggactgccaggccatgctcgagttcgcggggaagcacggcatcggggcc

SEQ ID NO: 43987 - DNA, 271 bp, Zea mays
catccctatggtttgatttgtatggaagaggtggcaactctagctgctcttctgcctttgagcatgtgtttgttggtgagatcaaaggacggggacaaggggagagtgaggtatcaggcttccataactggattcagttttacctggaagaagccaagggaaatgtggattaccaaggttatatatttccaaggcgccgtggtgaatcgcctgattcagagatacagctgctgactgttcagtttgagtggcatggcgtgctgaaatcggt

SEQ ID NO: 43988 - DNA, 273 bp, Zea mays
ggcaagcagggcaggtggcggcgggggcgcactccggcgggcgggaagaagcgcgggcgcacggcgggggacaaggagcagaaccggctgaagcggctgctgcggaaccgcgtgtccgcgcagcaggcgcgggagcggaagaaggcgtacctgacggagctggaggcgaaggccaagggcctggagctccgcaatgcggagctggagcagcgggtgtacacgctccagaacgagaacaacacgctccgccagattctgaagaacacgacggcg

SEQ ID NO: 43989 - DNA, 276 bp, Zea mays
cagaaggtgaagaagaccgagggcgagctttttgagacagaaaaggaggcatccaagtcactgcctgacttcaagaaggatgaccagaaggctgtggattctgctctgatcaaggctatcgaggctgtcctggagctgaaaacctatcttggcgcccggttctctctcagggatggtgacaagccccatgagatggtattctaagtttctagttttggagttcgtaggaagctgttttgtctgtgttcttgtacttctgagttttgtaccagtagc

SEQ ID NO: 43990 - DNA, 162 bp, Zea mays
ggcgcacaagaacggcatcaagaagcccaagcgccaccgccagacctccaccaaggggatggacccgaagtttctgaggaacttgaggtactcaaggaagggcaacaagaagagtggcgaggctgagtccgaggagtaagatgatggtgattgattttgtgg

SEQ ID NO: 43991 - DNA, 265 bp, Zea mays
gcggcagggttgcgcatgccaccctcaagggcccgagtgtggtgaaggagatcttcattggactgaccctgggtctgatcgcgggaggcatgtggaagatgcaccactggaacgagcagaggaagactaggtccttctatgacatgcttgacaagggccagatcagcgttgtcgtcgaggagtaaagagttcttcccagttattttcaaagaactctctcgagagcatgacaaagtgattgcttgctgtggagtttgtcctggaa

SEQ ID NO: 43992 - DNA, 266 bp, Zea mays
ctccctacatgattgcactggcctgcatatacatagcgagtgttttgaaagataaggacaccacagcatggtttgaagagctccgtgttgacatgaacatagttaagaatatctctatggaaatattagacttctatgacacctacacgattgatcctcaaaggggcatccctgaggataagataagccccgtgatgaacaagttgccggcaaaggcttaactcagatttggcgagcttaggagttgtaaactagtagtaaactac

SEQ ID NO: 43993 - DNA, 266 bp, Zea mays
atcgccaggtccgggacgaaggagttcatggaagctcttgctgccggcgctgatgtgtccatgattggccagttcggcgtcggtttctactctgcctacctcgtcgccgatagagttgtcgtgaccaccaagcacaacgatgacgagcagtacgtgtgggagtcccaagcgggcgggtcgttcactgttactcgtgacacgtcaggggagcagcttggcaggggcactaagatcacactgttccttaaggacgatcagctggagta

SEQ ID NO: 43994 - DNA, 267 bp, Zea mays
ctcagagacggaaccagagacgggccagagcatccccctcctccaccatgaaactcgctgtcaccctcaccctggtcacactggctctctgctgcagctccgcttctgcagagatctgcccgagctttcagcgtgtcatcgaaaccctcctcatggacacaccctccagttatgaggctgccatggaacttttcagccctgatcaagacatgagggaggcaggggctcagctgaagaactggtggacacctcccccaaagccagaga

SEQ ID NO: 43995 - DNA, 273 bp, Zea mays
cggcgcagctttgttcttgcagggtgaggaactgaggaagcagatcggcgctgcggcctacatcgagtgcagttccaaaacccagcagaacgtcaagtctgtcttcgatacggccatcaaagtggtccttcagcccccacggaggagggaggcagtgcctgccaggaagaagaacaggcgtggctccggatgctctataatgaaccttgtgtgtggcagcacatgtgctgcttagggagtctactagaacactgaaccgggaaggaggtgaag

SEQ ID NO: 43996 - DNA, 266 bp, Zea mays
ctggagcgacagagtctgcagatgatgatttgcctagtgtcatgacttgcgccaactatcttaaactaccaccatactccaccaaggctatcatgctaaagaaactgctttatgcgatcaacgaaggccaagggtcatttgatctttcgtgaatctcaacactaacataggtattggtccacctagaaatctgcgtcattgttacccagagttagtttctacctcattcatgtatgacataggttaaactcagctctccggagtcc

SEQ ID NO: 43997 - DNA, 270 bp, Zea mays
aattttgcggttgattcaggaaaatcaagctgagtttctccgcttggtgaatgaatctcctgagggtggtcctggagggaacatactaggtcaactggcagctgctgtgccacaaacgcttacagttaccccagaggaacgggaggctatccagcggctcgagggaatggggttcaaccgtgagcttgtgctagaagttttctttgcatgcaacaaggacgaagagcttacagccaactaccttctggatcacggccatgagtttgacga

SEQ ID NO: 43998 - DNA, 268 bp, Zea mays
ccgttcttggcaccctacaagaccaagattattgatgttatcgagaagggagagaagcagcccaacatcactattggcattttggtctccgttgtcatcgtgttcgttaccgttctcttcaagatcctttttggtggcaagaagccggtggcacctgtgaaacctgcagctgaggcgaagaagcccaaggccgcggagacggacggtgctggaagcagtggtgacaaggatgagaaagaggatgaaaaggacgagacaggcccacgtc

SEQ ID NO: 43999 - DNA, 257 bp, Zea mays
ctacgacgtaccacggaccagatatatgtatataaaccagccgacttgccagcgtaaatttcgtgagatgcatgggatatcgttggaaggatactgtaaggtttgcacttgtactgtgctctagcctagaattaccagactagagcagcagataacataggccatgcatgttttgattttgccctcggaatgtgcaacatgtaaattctgagggtattgtttatttacttatgtatgctactactagcgtttaacta

SEQ ID NO: 44000 - DNA, 204 bp, Zea mays
agggaagagggattaattcagcagcaggttctttttataaattctttgttgttatgaagcaggcggtacttttgtagttgatgaaggggatttgtcgccactgtcatttacataattcggataataatttatattgtgtaatcttgagaatcaaagcactgtttgtgttaaaagaaaaaaaaaaaaaacaaaaaagggggggcc

SEQ ID NO: 44001 - DNA, 308 bp, Zea mays
ggaagtctgtccgtggttgtattgtgagccaagacctatctgttatcaacttggtaattgttaagaagggtgagaacgatctgcctggtttaactgacactgagaagccaaggatgaggggtcccaaaagggcctccaagatcaggaagctgttcaatcttgcaaaggatgacgacgtgcgcaagtacgtgaacacgtaccgcaggacattcactaccaagaatggcaagaaggtgagcaaggcacctaagatccagcggcttgtgacccccttgcacctccagaggaagcgtgctagaattgctgac

SEQ ID NO: 44002 - DNA, 292 bp, Zea mays
ccaaagcctccgacccccttcctctctccctccgccgccgctgcgcacgcaggcgaacaagcgacatgggcgtctacacctttgtgtgccgcaacaacggcggcgagtggaccgccaagcagcactccggcgagatcgaggcttccgccgctaccccatacgagctgcagcgccgcctcgtcgctgccgcctccgcggccgactctgcctacggcgtccagtcgtccttctccatggtcacccccagctccgccgtgttccaggtgatcgtcggtgctgtcggtggtggtgc

SEQ ID NO: 44003 - DNA, 293 bp, Zea mays
tggcctcagttgaggacaagatattcagaaaaatacgggataaagaggcggaagtggaaaccatcaacaaaaggaactctgaactagaggaccagattaagcatttgggagtggaagttggtgcttggcagcaaagggccaagtacaatgagagcctgatcaatgcactcaagtacaacttggaacaagtatgtgctcaccagagcaaggacttcaaggaaggctgcggtgatagcgaggtagatgacacggcgtcctgtccctatggtggtgctgtcaatttgcaactgatg

SEQ ID NO: 44004 - DNA, 293 bp, Zea mays
gagaagactgctttcgatgaggctgagaaaaagaaggaagaagaggaagccgccaagggtggcgatgatgacgatgatgacctagaggatgaggcagacgatgacaaggcagacgatgacaaggccgactctgatgccgaggatgacaaggactctgaggagcacgacgagctctagatgatgagtatgatagaggtggccactgacattggtgccgttggcctggatttatcagctcttccattttgttctccttttctgttatcagaaacttaggacattgttaagaagct

SEQ ID NO: 44005 - DNA, 281 bp, Zea mays
agcagatctgcgcgctgaaggatgttggccccaagtaacttccctgccttggaatactgtatctcaaaacctaaatcgaacaaagaagtgtatcaaggattgcaacagagacatccatctggcatgagctggcttttgctatggcaaacacaagtgcagggatcgctgggtgttgcaccgtgtctgcattatgtggttacattctggaccctgtattttctatgcttttatgcccctactgtttagtattcaattatcaataatttgtttgggacggttga

SEQ ID NO: 44006 - DNA, 231 bp, Zea mays
gtcctactggccggagctcttcgctaagctcctggagaagagcacgctagaggatctaatcctctccgtgggatctggtggtggcgctgctccagatgctgcctccgccccaactgggggtgatgcagctactgcagcacctgctgcagcggagaagaaggaagagcccaacgaggaatctgatgacgcacatgggcttcagcctgctcagatgagaccctcgctacccag

SEQ ID NO: 44007 - DNA, 290 bp, Zea mays
cccaagtgttcgaaggaagcctgatcagggccatcaggaggctggaggaggttctgcagcagctgattctggcatccaagtccattggggaaaccgagttagaagcaaaactcgaggaggcggtcaacaagatcaagagggacatagtgtttgcagcatctttatacttgtagtgtcttggatgtctggttttatgtcaggggctaggtcaaaagctcatagggatttaaattaatcttaatttgctgttcatgttgagtgttgttggcatgatgaagctgtctgatttg

SEQ ID NO: 44008 - DNA, 270 bp, Zea mays
gacgcatcgaggttagcacgcgaagaagcgaccatgagggccaagtggaagaagaagcgcatgaggaggctcaagaggaagcgcagaaagatgaggcagagatccaagtaggcagatcgagatggattgtggacctgatgacatgcgtgggtacatacatttcttcggatgcgttggtgtgcctgtgcagagatgtcaacctgccatggtgtcacggtccgccatcagttgaacgtcttgcctgcacttcagtaggccacttttcaggtt

SEQ ID NO: 44009 - DNA, 284 bp, Zea mays
ggacagggaaaggggtatggactttgatttaatgccccctccaggtagcagcaagaaagcaggtacatctatggatgtggatcaaacaattgatccaaatgaaccgacatactgtatatgccaccagatttcatatggtgacatgattgcttgtgacaatgagaattgtggaggaggtgaatggtttcattacacgtgtgtgggtcttacaccagaaacgagattcaaggggaaatggttttgcccaacgtgcaggaatcttcagtgagaggttctcccaaacc

SEQ ID NO: 44010 - DNA, 293 bp, Zea mays
cccagctctggagaggaacacccgctggcactggaaccagtcggtcctcaacgtaaccatgaacgtgcggaaaatgttccgcgacatggacgagaggctgcttcaagcctgccacgacaacttccaagaggaagaggagaagcgggccgtgactgaggagcggcggaggctcatgtgggagcagctggagcgaagtgccgctcgcgggtaccaccagccgacgacgatcgctgccgatgcgagcagcttccccgcgccctcttcatcggctcgtcttgtatccctcaccgtga

SEQ ID NO: 44011 - DNA, 288 bp, Zea mays
  unsure (1)..(288): unsure at all n locations
ggctgatgacatggaagcactgtacaagaaggtccatgctgccatccgtgctgatccttctgtggtcaagtcaaccaagcagccaccaaaggagcacaagaagtacaaccccaagagaatgacgtacgagcagaggaaggccagtactcttgaaaggctcaaccaactcaactcctcgggcggcgcagatgacgacgatgaggatgacgagtanagtttggacccatcgaagtagtgctatcttatgcggcgatcagtatttgtgacatggcatttatcgctacctgt

SEQ ID NO: 44012 - DNA, 107 bp, Zea mays
agactttatcatcatgttttgttgcttttggttcttgaacagcgtttgcagcttagctgtaatgctttaattcgactttctatatattgttgaaccgtgttgtcgac

SEQ ID NO: 44013 - DNA, 309 bp, Zea mays
acaaaccatcatgtttcgctttgaggtaccagaggaggatggcaagtgtcggcaagtgaaagaagaactcatggcgctggtggaagcgaaacatgctggggtggcatacatcatgggccattcttatatcaaagctaggaggagctcaagtttcctgaagaagtttgcaattgatgttggctactctttcctccggaagaactgcagaggtccatcagttacgctgcacattccacacattagtctgatagaagtgggcatgatctactatgtttagcctaatgcccatggccatagttgacatgtgga

SEQ ID NO: 44014 - DNA, 278 bp, Zea mays
atgatgttcaagaaccacctgaaccagaggatgaccgtgacattatgcttggcaataaaaagaagataaaaaagaatgttaagttcccagatgaggatgatatactacagaaagatgaagctctagaagatgaagacatacaaaaaagatgatggtatctcattcagtaatcatacaggtcctgcttgggcaggctcagaaagagactacacatacgaggagctgctgaatcgagtgtccaacatcatgagggaatagaatccagatatggttgctgg

SEQ ID NO: 44015 - DNA, 300 bp, Zea mays
ccatcatggataatgatgatgctaatgggaggctacctactgtgatcaagtttgaattccagctttacaagacgaaggacgacaagtacctcttagatatgcagagagttactggacctcagctgctcttccttgacttctgtgcggccttccttaccaagcttagggttctatagtggtctaccatgtgcaaattttcactgtggtgatgaataaccgaaagcatgtaaataggaaccttgttctcgtcttttggacaacgaacatgtttgagtgactggtcttgtgttgagcgcgtaa

SEQ ID NO: 44016 - DNA, 299 bp, Zea mays
gcgtcgtctgcggcttcatcagcgccacgctcaacagggtgtacaccaagacgctgtacgccggcgacctgatggtgctcccgcagggccagctccacttccagtacagccacggcaacaccacggcggtgacgctgtcctcgttcagcagcgacaaccccggcctgcagatcctcgacttcgcgctcttcgccaacgacctgcccacggaggtcgtgaacaaggtgaccaacctggacgaactgcagatcgtcaagctcaaggcgctgttcggagggaggggctagacgcatatgtac

SEQ ID NO: 44017 - DNA, 241 bp, Zea mays
tagaggaggtctgaggttatcaatagacttacagtccagacgccatgggtcatttcacagaggaggacaatgccacaatcacaagggggttgcggcaaggtgaatgtggaagatgctggaggagaaaccctgggaaggctcctggttgtctacccatggacccagaggttctttgacagctttggcaagctgtcctctgcctctgccatcatgggcaaccccaaagtcaaggcacatggca

SEQ ID NO: 44018 - DNA, 294 bp, Zea mays
ctcgagccggaacgtctgaggttatcaataagctcctagtccagacgccatgggtcatttcacagaggaggacaaggctactatcacaagcctgtggggcaaggtgaatgtggaagatgctggaggagaaaccctggcaaggctcctggttgtctacccatggacccagaggttctttgacagctttggcaacctgtcctctgcctctgccatcatgggcaaccccaaagtcaaggcacatggcaagaaggtgctgacttccttgggagatgccataaagcacctggatgatct

SEQ ID NO: 44019 - DNA, 195 bp, Zea mays
gtctgggtgctcaagggcgccgactccatgcccgacgacgtcaaggagtggttgcgtgagagcttggacgacaagcagtgcttgctggtgcgaggctgggctccccaggtcgccatccttgctcaccgcgccgtcggcggcttcctcacgcactgcgggtggggctcgactctggaggccattgcagccggcatg

SEQ ID NO: 44020 - DNA, 295 bp, Zea mays
tggcaaggcaaattgctacagccaatggccctactggctataatagggattacctgttctcaatggagaaggcattagccagcattagccacgaagatgattcgatcatagagcttgcaaacgaggtgaggaaggtgctcaacagaacaaaggagaccaagatcactggtgccaatgcttccatgaaatcacatgcccctcttgtgcacctgtccgcgcttccagaaggcaccgttgtggactcgagatagcgacctctactcggaatttactttcagctcatgcatgtttgtgg

SEQ ID NO: 44021 - DNA, 203 bp, Zea mays
tacaaacatagataagatggttactcaattagatgtaaagaaattctttgaagaactttgcggtgaggtctctcggttgagacttctaggagacaatgtacattccacaaggattgcttttgttgagtttgttcatgctgagggtgccatcatggctctgaattgcagcgggatgattttgggaactctgcctgtaagggtga

SEQ ID NO: 44022 - DNA, 301 bp, Zea mays
gcgcagggagaagaggaagaacccgctcaagaacatggctgctgtgctcaagctgaacccctacctcggcactgcccggaagatggccacccttgctgaggctgcccgagtcaaggcccggaaggagaagcttgattccaagaggaccaagcttacctcggaggagactgccaaggtcaaggctgccggcaaggcgtggtacaagaccatgatctcggacagtgactacaccgagtttgagaacttcaccaagtggctcggagtgacgcagtgaagcggcctttgagacctagttaagttt

SEQ ID NO: 44023 - DNA, 299 bp, Zea mays
taagaatgttgctgtgaaggatctgaagcgtgggtatgtggcctccaactccaaggatgaccctgccaaggaggctgctagcttcacgtcccaggtcatcatcatgaaccaccctgggcagattggcaacggctatgccccagtgctggactgccacacctcgcacattgctgtcaagtttgcggagctcattaccaagattgataggcggtctggcaaggagcttgagaaggagcccaaattcctcaagaatggtgatgctggtatggtgaagatggttcccactaagcccatggtag

SEQ ID NO: 44024 - DNA, 257 bp, Zea mays
agtgggaacgtgaaggcttggcccgcaggtaccgtaacccgaagccagcgtggtcggtcttcagggaagcgagctttgggcacggcgagctaaagatcgtgaactccacccatgcccactggacctggcacagaaacgacgacgaagagccggtgagaaccgatgacgtgtggataaactctcttgctggttcagggtgcatccaggagggcagccgtgaccgtgagtcgaggaagatcctgatgtctccttgatgc

SEQ ID NO: 44025 - DNA, 297 bp, Zea mays
  unsure (1)..(297): unsure at all n locations
ctcgagccgggagttggccgggaccgtcaaggagatcctggggacctgcgtcaggtcgggtgcaccgtcgatgggaaggaccccaaggacttgcagcaggagatcgatgatggtgaggtcgagatcccctcagcttaaaggctatacaactagaaatcatcggacactattaaagtggtgttttgctccaaatgcagttcctgcacctcaatcgcctattattgtctgctttagttccttcaagtcttgtgagagacctaatcagtaccttgtgccttatanaattacatcttccga

SEQ ID NO: 44026 - DNA, 297 bp, Zea mays
aaagtttcatgattttatgacttttgtttgtgttttatacaatttttaaacatgtggatggcaagttcacggccatgtttagtgagcatgttgctcgaagtttttgatccgatcctggaatcggtcgtaacttatgctaagtaacatgaatatcattttttcatgcacggttttccaagtttcaagtgacctatcagttcaaatctaaattttccgaagaaattcaaatatacgaactaaatctactaacgattgaaactctgttaaaattgtccacaaatgatacatgtaggtcta

SEQ ID NO: 44027 - DNA, 293 bp, Zea mays
gacacagtccaggctggtggagagccttctgatgttcgtgacaggatgcgaaacatgtctgagcatgagagtatctgcggatccaggacagcaccatgtgactcctgtggacggtcgatcatgcttaaggagatggagattcatcttattgctgtgcatcagaagagctaatcacctactgacgctgggctggtctgaacttgagcctctattgtcatttggtcaacagaagctgtgaactttaatgtgccattcacgggttgtaggattgaaaactacaccttgggactggg

SEQ ID NO: 44028 - DNA, 296 bp, Zea mays
gttcttggaagctgctgcaacttcttgaccttagtttacattgtctttgtggtgctgcacacagtacctgtcctgtacgagaagtacgaggatcagattgactcgtatggcgagaaggggtgggttgaaattaagaagcagtatgccgtgttcgatgagaaggttctgagcaaagtacccaggggtcctgcgaaagccaggaagcactagatgcaagtgattcgaggtccctgttagtagggaatgctagcaaaaccggttcgagtttctccggaggggggcagcacatgtgggtg

SEQ ID NO: 44029 - DNA, 297 bp, Zea mays
cttatggagatgatggagatacgggaagctgtcagtgatgccagtgattctcaaaccctggagaagatccaatctcagattaaggcaaagctcgaaacctggtccgattccttccaggaggcatttgacaggaaggattttgaccgtgcgatggaagccacacagagaatgaggtactatgaacgtgcagtggaagaaacagtgaagaagctctgagcctctgatcttctgttacagctgccaaaggtggtgaggcttgtgtcttttcgtacggttccttgcagatccccctgtgct

SEQ ID NO: 44030 - DNA, 231 bp, Zea mays
  unsure (1)..(231): unsure at all n locations
tgctcgtgataggctctgagccacccttcaagctgaagggcatttggctcttccgtggccaggatgttcccaagtttgtaatggacgaggtctatgacatggagctctacgagtggaccaaagtggacatctctgatgaggcccagaaggagcgtgtcaatgcgatgattgaggaccaggagcactttgagggcgaggccttgcttgacgcganatgcttcaagtgagtgt

SEQ ID NO: 44031 - DNA, 289 bp, Zea mays
attatggagatgatggagatacgggaagctgtcagtgatgccagtgattctcaaaccctggagaagatccaatctcagattaaggcaaagctcgaaacctggtccgattccttccaggaggcatttgacaggaaggattttgaccgtgcgatggaagccacacagagaatgaggtactatgaacgtgcagtggaagaaacagtgaagaagctctgagcctctgatcttctgttacagctgccaaaggtggtgaggcttgtgtcttttcgtacggttccttgcagatccc

SEQ ID NO: 44032 - DNA, 206 bp, Zea mays
tgctcgtgataggctctgagccacccttcaagctgaagggcctttggctcttccgtggccaggatgttcccaagtttgtaatggacgaggtctatgacatggagctctacgagtggaccaaagtggacatctctgatgaggcccagaaggagcgtgtcaatgcgatgattgaggaccaggagccctttgagggcgaggccttgctt

SEQ ID NO: 44033 - DNA, 295 bp, Zea mays
  unsure (1)..(295): unsure at all n locations
aaagaatgagtctatatggcatgtggaatggctccttgacttgcttatattgtgggcactatcaagtatgggtgagctaaaaagtgcacataatatgttggaatcattgaagtcaagggtacgtttaatggacaggaatcggcagcaagcgatgcagaaggcaatcaagctggcggaggctgcttatgaatatgggaaaggagatcacatgaaagtctatgacactctgggtccagactttgatgcgcttggttatanaatgattggtgcatcagatgaacaagtggatgtcttc

SEQ ID NO: 44034 - DNA, 291 bp, Zea mays
gacagactcagagagaggccgccatggtgcagtctcctgccgacaagaccagcgtcaaggccgcctggggtaaggtcggcgcgcacgctggcgagtatggtgcggaggccctgcgagaggatgttcctgtccttcagcaccaccaagacatagttcccgcagttcgacatgagccacggctccacccacgttaagggccacggcaagaaggtagcagacgcgatgaccaacgccgtggcgcacgtggacgacatgctcaacgcgctgtccgccctgagcgacctgcacgcg

SEQ ID NO: 44035 - DNA, 159 bp, Zea mays
ccgtttcagcatcacgcaagtggctggatggtattcgaaaatggtattacaatgctgaaggattcaataaactggggttaatgcgagatgacacaatatacgaccatgctgatgtacgagaagccataagaagacttcctgagaacctttataatgcca

SEQ ID NO: 44036 - DNA, 291 bp, Zea mays
caacgagcagactgtccaggaaatgctaaacctagccataaagtacaacaaggcagtgcaggaggaggacgaactgccacctgagaaacttgcgatagcaaatgtgggtcggcaagatgcaaaaaagcatttggaagagcatgtgtcgaatttgatgtcatcaaacatagttcagaccctaggaaccatgctcgacacggttgtcatttagtctactaataatattgttgtcccaaactgaaacatagccacactatggaagcatgacacatgcaatgagcttgaggccag

SEQ ID NO: 44037 - DNA, 235 bp, Zea mays
gcggccgagctgacgcaaacatgcagatctttgtgaagaccctcactggcaaaaccatcacccttgaggtcgagcccagtgacaccattgagaatgtcaaagccaaaattcaagacaaggagggtatcccacctgaccagcagcgtctgatatttgccggcaaacagctggaggatggccgcactctctcagactacaacatccagaaagagtccaccctgcacctggtgttgcg

SEQ ID NO: 44038 - DNA, 281 bp, Zea mays
ctgatcattttcctaaggaacagacttaagtatgccctgactggagatgaagtaaaaaagatttgcatgcagcgattcattaagattgatgggaaagtcaggaccgatataacctaccctgctgggtttatggatgtcatcagcattgacaagactggagagaacttccgtctgatctatgacaccaagggtcgctttgctgttcatcgaattacacctgaggaggccaagtacaagttgtgcaaagtgagaaagatctttgtgggcacaaaaggaatccc

SEQ ID NO: 44039 - DNA, 280 bp, Zea mays
aaagctgctctcgtccctagaaataaagcagctcctccgcggggcggcgaactgctactcatcgccaaaaccctagccccgatccggtcgaggagcactacttcttggcatggcgggcacccctagccaggcaagcctcctgctccagaagcagctcaaggatcttgcgaagaaccccgtggatgggttctccgcagggcttgtagacgatagcaacgtcttcgagtggcaggtcaccatcatcggcccgcccgacaccctatatgatggaggctacttc

SEQ ID NO: 44040 - DNA, 281 bp, Zea mays
ctgaggcgaagaaagaagagaaggtggaggagaaggaagaaagtgatgacgacatgagcttcaaactcttcgactaagtctgtacaatacccttggctattgcacagacttagtcgaagaggctgaagccaagggtattgtttttgagtcgaggaagcagagggaagaaaaatagtagtcatgtttggactttaactttgttttatgttggaaagtacttgaaagacttttcctatagtaattctaggcgtaggttgctgtgctggttggggtttactggt

SEQ ID NO: 44041 - DNA, 275 bp, Zea mays
cgggcctgagtttgtaggcgcacggcgcctagcctagtcaacatgccggtcgccagaagctgggtttgtcgcaaaacctatgtgaccccacggagacccttcgagaaatcgcgtctcgaccaggagctaaagttgattggagagtatgggctccggaacaaacgtgaggtgtggagggtcaaatttaccctggcgaagattcgtaaggctgcccgggagctgttgacgctggacgagaaggatcctcggcgtctgtttgaaggcaacgtctgctg

SEQ ID NO: 44042 - DNA, 275 bp, Zea mays
aaggacttcaagggcagcgtgcccggcttcaaggtcgacaccgtcgacaccaccggcgccggcgacgccttcgtcggctccctcctcgtcaacgtcgccaaggacgactccatcttccacaacgaggagaagctccgcgaggccctcaagttctccaacgcctgcgggccatctgcaccaccaagaagggcgccatcccggcgctgcccacggtcgccaccgcccaggacctcatcgccaaggccaactagatggccgcacgccccgccgttcca

SEQ ID NO: 44043 - DNA, 278 bp, Zea mays
  unsure (1)..(278): unsure at all n locations
gcattctcgaattccgattcccaatccagcaaaccctaccagccttttgcaaactcagagagggacccgatggcacccaaggcggagaagaagccggcggcgaagaagcccgcagaggaggagcccgcggccccggcggagaaggcccccgctgggaagaagccgaagggnagaagcggctcccggcgggaaaatccgccggcaaggaaggcggtgttgacaagaaggggcggaagaaggccaagaagagcgtggagacgtacaagatctacatcttc

SEQ ID NO: 44044 - DNA, 276 bp, Zea mays
gtcgaggtccgtgaaggccgggctccagttccccgctgtcctcgaatacctcgccgctgaggttctggagctcgccggtaatgctgccagggacaacaagaagactcgcattattccgcgccacgtgcttctggcgatccggaacgacgaggagcttgggaagctgttgggcggcgtgactatcgctcacggcggtgtgctccccaatatcaaccctgttctgctgcccaagaagacggcggagaaggcgtccagtgtggggagcaaggaggcaaa

SEQ ID NO: 44045 - DNA, 276 bp, Zea mays
ctcgagccgcgccggagctcgacaaggacgaccgacgacgcacgcggagatccggcgtaatgcaaattttgaaaactgaactgtaagatggcatcagcagagctttcccgtgaggaaaatgtgtacatggcgaactcgctgagcaggcggagaggtacgaggagatggttgagttcatggagaaggtagccaagactgttgactcggaggagctcactgtggaggagcgaaacctcttgtctgttgcatacaagaacgtcattggagcccgccgcg

SEQ ID NO: 44046 - DNA, 273 bp, Zea mays
caaggatatcagatacgggctggaaaactgtggtcacaggtccaagatacattcaagcagatggacactgccgcaacagagctcgaatgcttccaagagctgcagaaacaggaacatctcgctgcttcatatcgaatccaaaatttgtctgaagaagtgagtaaacagaaggcactagaaaggaccctccagagccgctacggcgagctggtttctggtttccagaggatccaagaacaggtcgaggagcacaagaggcaactcaaggtacaa

SEQ ID NO: 44047 - DNA, 271 bp, Zea mays
tgtatcttcagtggaagtcgaatcagtatcgaggcgattggtgcaacgatcacttcctccatgtcaagggtctccgcaaggctcgtgaggtgagatctcagctgctggacatactgaaaaccctgaagatccccctgacatcatgccatatggaatgggacgtggtgaggaaggctatctgctctgcgtacttccacaattccgcccggttgaagggtattggggagtacgtcaactgccggaatgggatgccgtgccacctgcaccccag

SEQ ID NO: 44048 - DNA, 269 bp, Zea mays
aacaatacttccctgttggcctggtcatatctggaatgctgaagatatttcaggatctatttgcactacgattcgacgaaattaaggatgttgatgtttggcatgatacagttcgtgtgttttctgtttgggatgcaagttcaagtgatcttttgggttacttttttcttgatatcttttccagggaaggaaagtatgcccacacttgtgttgtgacccttcagaatggatgcttatgttctaatggtacacgtaaggttccggctgct

SEQ ID NO: 44049 - DNA, 269 bp, Zea mays
cttcaaagcaacacttgagctgcttgttgcttacaaggaccaagttgcagaagctaagaagcaaaatgaagaggctgctgatgatatggatggttttgatgctgatgaagaagatgatgacgaagttgactctgataaggagatgggtcttgatgatgaagacggggatgaagtaagcagtcttcagctgcagaaattagccgcagaggctagaggcttccaaccagccgatgacgatgactcagatgatgatttcagcgacgatgagc

SEQ ID NO: 44050 - DNA, 254 bp, Zea mays
ctttcttctaccccaagacgaactcggtgaactctttccggttcgttcccctacgcccgtttctctctcgtcgcgcaacatcagagcacaagcgaggaacccagtccagtcccgggaatggagtgcgtattgggcgtggttggccgcgacttcgtgctggtggcggccgacacctccgccgtgcagagtattctcgtccacaagaccgacgcagacaaggtgatggtgctccgactcgcataagctgatgggcg

SEQ ID NO: 44051 - DNA, 256 bp, Zea mays
catcgccaaggcgaccctactaactttgtggctaagagagccttgctagaggcagtctggttgttgtagttttgatggctgattcttctttgggatggagggaaatgaatggctctacagctccagccaggtaaggactgttgctcaatgcctacgcctcccttctgcccttaggaggaatttggctataatgcagagacacaaaagctgctgtgcaagaatggggagacgctgctgggggctgtcaacttcgttg

SEQ ID NO: 44052 - DNA, 263 bp, Zea mays
gcgagagacagacgcgtatacccaggcggcggttgaggaggaggagaagaagaagaagaagatggcttcctccgcgtacgcctcatggtccaagcggtggatccgtcccgaggtgtacccgctgttcgtgccgatggccgtggccctgggtatctgctcgtaccagcttgtgcgcaacatcacgggcaaccccgaggtgcgggtgaccaaggagaagagggcggccggcgtcctggacaaccacgacgagggcgagaggtacg

SEQ ID NO: 44053 - DNA, 275 bp, Zea mays
taacattgcatctgcgagatgaggccaaggagtacttggaagaggataagctaaaggatttggtgaagaagtactctgagttcatcaacttccctatctatttcgtggtcgaccaaggaggttgatgttgaagtgccaactgatcaggatgagacaagtgaagaagaggattcaactccagaaactacagaggaagagacagaagaagacgaagacgaagagaaagagaaaaagcccaagaccaagacaataaaggagactacttctgagtggga

SEQ ID NO: 44054 - DNA, 295 bp, Zea mays
cacacagaagcggcggcggcggacaaacgcaggcgaaggcgagggtgtgagggaaggagcaccagccatggtgcacgtcaacttctaccgcaactatggtaagacgttcaagaaaccaaggcgtccttatgagacggagcgtcttgatgctgaactgaagctggttggtgagtatgggctgaggtgcaagcgtgagctttggagggtccagtatgcactgagcaggatccgtaatgctgcaaggcacttgctcacccttgacgagaagaacccccgtcgtatctttgagggtgag

SEQ ID NO: 44055 - DNA, 295 bp, Zea mays
attgggtgtaagtgcttagttgagtttgaagttgctgattgcaccacaaagacatacccagaccacatgtttgatgtcatctacagtcgtgacactatccttcatatacaagataaaccctccttgtttaaaagtttcttcaaatggctgaaacctgggggaaaggttctaatcagtgattactgcaagagtcctggaaaaccatcagaagagtttgcaacatacattaagcagaggggttatgatctccatgatgtggaggcttatggacagatgctcaagaatgctggtttca

SEQ ID NO: 44056 - DNA, 285 bp, Zea mays
gcgccgacgatgggcatctctcgggacaactggcacaagcgccgcaagaccgggggtaagagaaaaccctaccacaagaagcggaagtatgagctgggacggccggccgccaacactaagattggccctcgccgcatacatacagtccgagttcgaggaggcaataagaagtatcgtgctctgagattggatgtggggaattttccggggctcagagtgttgtatcgcaaaacaagatcttgatgttgtctacaatgcatccataacgagctgtccgcaccaaga

SEQ ID NO: 44057 - DNA, 272 bp, Zea mays
agctgctctcgtccctagaaataaagcagctcctccgcggggcggcgaactactacgcatcgccaggggcctagcaccgatccggtcgaagagcactacttcttggcatggcgggcacccctagccaggcaagcctcctgctccagaagcagctcaaggatcttgcgaagaaccccgtggatgggttctccgcagggcttgtagacgatagcaacgtcttcgagtgccaggtcaacatcatcggaccgaccgacaccctatatgatggaggc

SEQ ID NO: 44058 - DNA, 289 bp, Zea mays
catcattcccagcagcactggagctgctaaggctgttggcaaagtgcttcctgtcctcaatggaaaattgactggaatgtctttccgtgtcccaactgtcgatgtttctgttgttgatctgactgttaggcttgagaagtctgccacctatgatgagatcaaggctgcggtcaaggccgaggcagagggtagcctcaagggcattctgggttatgtcgaggaggaccttgtttccaccgatttccagggtgacagcaggtctagcatctttgatgcgaaggctggcatt

SEQ ID NO: 44059 - DNA, 286 bp, Zea mays
caagatgagtcggcaccctgaggtgaagtgggctcagaggatcgacaaggtttacatcactgtacagttacctgacgcaaaggatgctaaggtcaatttggatccagatggtgtcttcacattctctggcagtgctggtacaaacttgtatgaattgaaactagatctgaatgacaaagtaaacgttgaggctagcaaaataagtgtgggggtcaggtccatattctgtatcgtagaaaaagctgaagccaaatggtggaagaaactcgttcgagatgatcaaggg

SEQ ID NO: 44060 - DNA, 282 bp, Zea mays
gtttcaatctacaaaacccaagcatctgctcttgaagcccatgcggcccccaactgcaaggttctggtggttgccaacccagcgaacaccaatgctcttatcttgaaagaatttgctccatcaattcctgataggaacgttacttgcctgacccggctggaccacaaaagggcttctgggcagatttctgagagacttagtgtccaagtcagtgatgtggagaatgttatcatctgggggtaccactcggtcaattcagtaccctgatgtaaaccttgccac

SEQ ID NO: 44061 - DNA, 288 bp, Zea mays
gcggctggcggtaaacgtattggtgtgttttctgttgagggacagtcatgtttctccagtattacctcaacgagcagggcgatcgcgtctatactctaaagaaatttgaccccatgggacaacagacttgctctgcccatcctgctcggttctccccagatgacaaatactcaagacaccgaatcaccatcaagaaacgcttcaaggtgctcatgacccagcaaccgcgacctgtcctctgagggcttgttaatctcttgtgttactcgtcccccggccgattatcag

SEQ ID NO: 44062 - DNA, 281 bp, Zea mays
gaccaaagcccgtgcaatgctgtgtgacatatatcaccatgcgatctctgatgagttttcagtggctcgcgacttgcttttaatgagtcatttgcaagatggtattcagctcatggacatatcatcgcagattttattcaacagagtcatggcccagttagggctgtgtgctttcagggctggtttgataaatgaagcccatggttgcttgactgagctctattctactgggagggtgaaagaattgcttgcacaaggtgtgcaacaaagccgataccatg

SEQ ID NO: 44063 - DNA, 277 bp, Zea mays
ccgcctccaaacccgaactccaagtcgccccgcatcgatggcgcccaaggccgagaagaagcccgcggcgaagaagccggcggaggaggagcccgctgccgagaaggcgccggccgggaagaagcccaaggcggagaagcgtgtcccagcaggcaattccgcgggaaaggaggcggccaaggaaaaaagggccgggagaagggcacaaagagcgtggagacctacaagatctacatcttcaaggtgctgaagcaggtgcacccggacatcggcatct

SEQ ID NO: 44064 - DNA, 289 bp, Zea mays
ggctacagctcccgtctctccgccgcttgcttggaaaacgaagaaaccctcctccaccaacccaatccagctacatccgtctgggtgaactccagggccaggagcagttcgccgccttcgttcgcatcacctacgcggttcgatccaactggcaggaaggaacgtgatggccaagacgagctcgttcaagctggagcacccccttgagaagaggcagtctgaggctaatcggatcagagagaagtaccctgacagaattccagtgattgttgagaaggctgagaggagt

SEQ ID NO: 44065 - DNA, 292 bp, Zea mays
cccgagcgagttcttggttgacctcttcccccttcggaccacctccaaggctcttggtgtagcttgccactctcaccaatcaagttttcatgtctgatctcgacattcagatcccaactgccttcgatcccttcgctgaggccaatgctggggactctggtgcggcagcagggtcaaaggactacgttcacgtgcgcatccagcagcgtaatggtcgcaagagcctgactaccgtccagggattgaagaaggagttcagctacagcaagatcctcaaagatctcaagaaagg

SEQ ID NO: 44066 - DNA, 283 bp, Zea mays
tgcactgggaagctgcactgcaagattgataaggttgctggcgttctggagactaaccgacctgatgagaggaatgctttctaccaggcgaccatcaagcaaggggacttcttgctgaaccgcatccagaagctttcacgggtcattgacctgtaaggactgtttgtgttggagctattcctgcaatcggcgcctgcaaatgtttaccaccctacgtcttccacaagacatctctgcttgagtggggattggggaacaagccctaagaacatctgtgttttaa

SEQ ID NO: 44067 - DNA, 283 bp, Zea mays
cctccatccacgaactcccgttctccatttccagccatggcggtgtcgatcgagctcaccaaggagtacggctacgtcgtgctggtgctggtggcctatgtcttcctcaaactttggatgggcttccaggtcggcaaggcccgcagaaagtacaaggtgttctaccccaccatgtacgccatcgagttagagaacaaggacgccaagctcttcaactgcgtgcagagggggcaccagaactctctagagtggatgcccgttatcttcgtcatactgctgctgg

SEQ ID NO: 44068 - DNA, 285 bp, Zea mays
tctggagctactgccttgccctcagaggatctaagacatggcacccaagaaggccaagagaagggcagcagcagaagggagctccaatgttttctccatgtttgaccagactcagatccaggagttcaaggaggctttcactgtaattgatcagaacagggatggcattattgacaaggaggatcttcgggacacctttgcggccatgggccgtctcaatgtgaagaatgaggaactcgacgccatgatgaaggaagccagtgggcctatcaacttcactgtctt

SEQ ID NO: 44069 - DNA, 281 bp, Zea mays
agcagctcgattcgtccttgaagcacataagatctacaaggacacaacacatggttgatcaactgacagaacttcagaaaaaagaacaaatgttttgtgaagcaaataagtgtcttcgaagaagactggaggagagcaaccaggttatatggcagcatgcgtgggagcaaagcgcgcggcattctgaagtgcagccgcagcagctcaatggcaataacttcttccatcccctcgatggtgctggtgaacccacccttcagatagggtatccttcagaggca

SEQ ID NO: 44070 - DNA, 259 bp, Zea mays
atcgacaggcggtctggcaaggagcttgagaaggagccaaagttcctgaagaacggtgatgctggtatggtaaagatgataccgaccaagcccatggtggtggagacattctcagcgtatcctccccttggtaggtttgctgtccgtgacatgagacagacggttgctgttggagttatcaagagtgtggagaagaaggacccgaccggcgccaaggtgaccaaggcggctgccaagaagaaatgatgcgatcctgcgc

SEQ ID NO: 44071 - DNA, 264 bp, Zea mays
aaaccctagcgccggcgcctccacttcgttttcctcactctctcctccagctcagggtccggcggcgaagggaaggcaagatgtacaccgcgaggaagaagatccagaaggagaagggtcttgagccctccgagttcgaggactccgttgcccaggctttctttgatctggagaacgggaaccaggagctcaagagcgacctcaaggacctgtacatcaacaatgctatccagatggatgttaccgggagtaggaaggctgtta

SEQ ID NO: 44072 - DNA, 276 bp, Zea mays
gaagaacccaatcctctggaatgtggctgatgtggtcatcaagttccctgaggaagaagctccctcgactgtcttgtcccagaaccttttcactccaaaacaggacattcagcacctgttccgcgagcctgagaagaggccccccaccgtgttgtgcaatacattcactgccctgatcctctcgccgttgcttctgctcttcgctctgtggatccggattggtgccaatatccagcacttcacttttgctcctagcagcgatatatttcacctggg

SEQ ID NO: 44073 - DNA, 304 bp, Zea mays
gggaatcctgagactgagattctcatctcaaagacccagatgatatcactgaaatgtgcagcctgtgggtttgtctcagatgttgatatgagggacaagctcacaaccttcatcctgaaaaacccaccagaacagaagaagggcggaaaagacaagaaggccatgaggagagctgagaaggaacgcctgaaggaaggtgaggctgctgatgaggagcagaagaaactgaagaaggatgcaaagaagaagggttccaaggattccactgctaagggtttgaagaagaaggctactactgctactg

SEQ ID NO: 44074 - DNA, 297 bp, Zea mays
cggagacgacgcacgcagagccgcagagatccgtcacactgcaagttttgaaaactgaactgtaagatggcatcagcagagctttcccgtgaggaaaatgtgtacatggcgaactcgccgagcaggcagagaggtacgaggaaatggttgagttcatggagaaggtagcgaaaactgttgactcggaggagctcactgtggaggagcgcaacctcctgtctgttgcatacaagaacgtcattggagcccgccgtgcctcatggcgcatcatctcctccatcgagcagaaggaggagg

SEQ ID NO: 44075 - DNA, 295 bp, Zea mays
atttaattggtgccaggataagaatgtagtcacagtcttcagtgcgcctaattactgttaccgctgtggtaacatggctgctattcttgaaatcggggaaaacatggaccagaacttccttcaattcaaccccgcacctcggcaaattgagccagacacaactcgcaaaaccccagactactttctgtaattgtggtggtgaccttaactttctggtgtttgatgctcctctcttccgcagcatcagggtatgtagatcttgtccttagatatgggtcccatgtacccggcctta

SEQ ID NO: 44076 - DNA, 294 bp, Zea mays
gaaagtgatggccgctcagcaccaattgttaagcttggtgatgcttctatggcttcacctttcacagcaaagcatgcctctgttgcccctactcttgacatcatccgtcaggggagaagcaccctagtcactacacttcaaatgttcaagattcttgggctcaattgccttgcaacggcttatgttctcagtgtcatgtacctggatggtgtcaaactgggcgatgttcaggctacaattagtggtgtctttactgcagccttcttcctcttcatctcccatgcccggccactc

SEQ ID NO: 44077 - DNA, 293 bp, Zea mays
gctggtcgggacctcacagactccctcatgaaaattctcactgagaggggttactccttcacaacctcagccgagcgagaaattgtaagggacatcaaggagaagctagcatatatagcccttgactatgagcaagagttggaaactgccaagaacagctcttcagttgaaaagagctatgagctacctgatggacaagtaatcaccattggtgcagagagattcaggtgccctgaggtcctcttccagccgtcgatgattggtatggaggctgctggaatccatgagacaac

SEQ ID NO: 44078 - DNA, 286 bp, Zea mays
aatactttgatgatgcattactggcgatgcagaagttgggaaagaaaagggcaagcttagtagacattgcagagtcctttaaatcaagagggaatgaattcatgagatcaaaccaacaccttaaagcggtagagctgtacacctgtgccattgcattgaaccaacaaaatgccatttactattgcaacagggctgctgcatatacccttcttaatatgaacaacaaagctattgaggactgcctgaagtcaattgaaattgaccctcactacagcaaagcatatag

SEQ ID NO: 44079 - DNA, 295 bp, Zea mays
tgccattcaagctgtgctctcgctctatgcatctggccgcaccacaggcatcgtcctggattcaggggatggcgtcacccacaatgtccccatctacgagggctatgcactgccccatgccatcatgcgtcttgacctggctggacgggatctcacagactacctcatgaaaattctcacagaaagaggctattcctttgtgaccacagctgagagagaaattgtgcgagacatcaaggagaagctgtgctacgtagccctggattttgagaatgagatggccacggcggcttcg

SEQ ID NO: 44080 - DNA, 294 bp, Zea mays
cacactagagccgccgccgctgccgtttcgcgcaccgtaccctagccctcgtcagcggcggactcgagctcctccagccatgacgttcaagcggaggaatggcggacgcaacaagcacgggcgcggccacgtcaagtacatccgctgctccaactgcgccaagtgctgccccaaggataaggctatcaagcggttcttggtgaggaacattgttgagcaggctgccgtgagagatgtgcaggaggcctgtgtacatgatggatatgttctacccaaattgtatgcaaaggttca

SEQ ID NO: 44081 - DNA, 306 bp, Zea mays
cttggacaattgtcagtgtctctgatgatggcgagagactggtggaggtggaacactgcagatttggcgcatgagtgatttgatctaccgcccagaggatgaagttcttgcagagctggagaatttcaaggctcatttggccagctgtgcaccgaagaattgagtcatgtgggttacctgcggaatgcaatcctgtggaaactgagtaggtgatgtagtttcatggccataagtatgagccccagttgacattgaatctgtcctctgatgctcctagagctgtacccttgaggggcttgtgctttt

SEQ ID NO: 44082 - DNA, 289 bp, Zea mays
ctcctctggccgccgcggggagagaggccgagatggcagatgagattgccaaggctcaggtcgctcggcctggtggcgacacgatctttgggaagatcatccgcaaggaaatacaagccaaaatcatttttgaggatgaccggtgccttgctttccatgacatttcccctcaagcaccaacacattttctggtgatacccaagaaacatgatatcccagatttctgtggcagaagatgatgatgaaagtcttcttggacacttaatgattgttggcaagaaatgtgctg

SEQ ID NO: 44083 - DNA, 283 bp, Zea mays
gtggagtgaaaccctaggtttaccgtggaagaagaaagtccattcggcgcgctctaggtgtttggcaaaaagcttaaaccggaaatcgtcatcgcccttacacatatcgatttggtttatgacatgtctgatctatataccttggttgatggcttcgttacacgtaattcagctaggactttagggcaaagtgatcatcactgcaaaacctggcgtcaagctagaaatcccagacggagcagtgattgggaataagattccaagttcacacagcaggagttgc

SEQ ID NO: 44084 - DNA, 279 bp, Zea mays
tcatggaacagctgtgggtctcccatctgatgatgacatgggcaacagtgaagttggtcacaatgcacttggtgctggtcggattttcgcccaaggtgctaagcttgttgatcaagctcttgcctcaggaaagatttatgatggagatgggttcaactacatcaaagaatcttttgaaaatggtactcttcaccttattgggttgttgagtgatggtggtgtccactcccgccttgaccaactacagttacttctgaaaggtgtcagtgagagaggagc

SEQ ID NO: 44085 - DNA, 287 bp, Zea mays
gtgtgtgtcaaagagagaaccagcacacagcagagtagcacctgatcgatcgatctcctactactagctcgttcgctttcacaaccagggagcagcaatggcatctgctgctactactctcctcaagtcgtcattcctccccaagaaggctgaatggggatccaagcaccagctggttgccgctcatcccaggccggcgaccgtcgtcgtctccatggttgcccgcgctaggcctacgctgacgagcttgtccagaccgcgaaaaccatcgcgtcgccgggacaggg

SEQ ID NO: 44086 - DNA, 288 bp, Zea mays
cgaagacaagatgaaggagcttgaggggatctgcaaccccatcatcgcgaagatgtaccagggcgagggcgcgggcatgggcgctgctgctggcatggatgaggatgccccgtctggtgggagcggtgctggtcccaagatcgaggaggtggattaagttggttagtgttcgaggtttggtttggtgaggtgtgaagtgcctgaactctgatggttgtttgtgaggtgtggtcgcaatagctgcggcctgtggtgaacttctcagaaataaataagttttcgttccta

SEQ ID NO: 44087 - DNA, 260 bp, Zea mays
agagattggagggaggcccctgcccaaggcaagagaaaccgcggcgcgcggagagggaggaagggcagacgcagacgggcgaacaagatgagggagatcatcagcatccacatcggccaggccgggatccaggtcggcaacgcctgctgggagctctactgcctcgagcacggcatcgagcacgatggcaccatgcccagtgattcctcggttggcgtcgcacatgatgccttcaacacgttcttcagcgagactggttc

SEQ ID NO: 44088 - DNA, 287 bp, Zea mays
agctccttcaaaaggacctgtccagttgcacaaggcaaaagctgctctcgatgctgatgatgattatgaggccgagcccccgaaggagaaggcaaagcctacgggggctgatgtggcgaagttgaaagagatgaagaggcaggaggagattgagaagaacaagcttgccttggagaggaagaagaggcaggctgagaagcaggcagcaaaagctgtggcccgagcacagaaggaagctgagaagaagctgaagaaagaggagaagaaagccaagaagaaatctggtg

SEQ ID NO: 44089 - DNA, 284 bp, Zea mays
ggctgttctccaggttatcccttatgtgaaggttttttcacgtgttgctccagaacaaaaagaacttgtactaactacattcaaaagtgttgggagggtgacactgatgtgtggagatggaaccaatgatgttggtgcactgaagcaggcacatgtcgtcgttgctcttttgaatgctgaaccagttcagaaagtggattcaaaatctaaagctgaaaataaatctgggaaattgaaaaacaagaagcctgctaatgaagcatcatcacaagtgactccggtag

SEQ ID NO: 44090 - DNA, 281 bp, Zea mays
gatcctgtcgggcagcaggccggggacgcgcggtacgtgttcgaggcgaagacgatccagaggatggagctcctggtcctcagcacgctcaagtggaggatgcaagcggtcacccccttgtcgtacgtcgactacttcctccaccggctccgaggcggcgccgcgccgagcagacgcgccgtcctccgatccgcggagctcatcctgtgcatcgccagaggtgagcaacgaccaggaagttctcagttctcacttctcacccggcggggttttttttttta

SEQ ID NO: 44091 - DNA, 261 bp, Zea mays
  unsure (1)..(261): unsure at all n locations
gaaacaatcaaccagcaacactcttctcgtataacataatacagcgaaggtaactcacatggcaacttccatgggttgtctcgtcttgctctgccttgtttcttctctccttcccagtgccgtccttggccacccatggggtggcttgttcccacagttctatgaccattcgtgccccaatgcgaaggagattgtgcagtccattgtggcacaggctgtggccaatgagaaccangatggcggcatctttcgtcagactgc

SEQ ID NO: 44092 - DNA, 299 bp, Zea mays
ggctggcagcgcggaggccgcacgatgcctggagttactgtaaaagacgttaaccagcaggagttcgtcagagctctggcagccttcctcaaaaagtctgggaagctgaaagtccccgaatgggtggacacagtcaagttggccaaacataaagagcttgccccatatgatgagaactggttctacacacgagctgcttccacagcacggcacctgtacctccgtggtggtgcaggggtggttcatgacaagatctacggagacggcgagaaaggtgtcagccagcacttcacagaggt

SEQ ID NO: 44093 - DNA, 306 bp, Zea mays
acgatgaggaatacaatgacattgtggaggacatgagggaagaaggacgcaaatatggtaacttggtgaaagttgtaattccacgacctgaccccagcgatgctccagttgctggtgttggaaaggtgtttttggaatatgcagatgtcgagggctcgaccaaagcaaagacggggatgcatgggcggaaatttggcgggaaccaggtggtggccgtgttctatcccgaggacaagttcgctgctgagcagtatgactgacagttgtagaacctgttctagagttgaacacacatgtgtgtgtttt

SEQ ID NO: 44094 - DNA, 280 bp, Zea mays
ctttatctgaatatatgattgagagcggatggactcggagctacttcgatatcagcgaaattggtttttctatgtacctctgttatatggctatgtatctcatctttgtggagtttggaatttactggatgcacagagagttgcatgacataaaaccattatacaaatatctgcatgcaacccaccatatttacaacaaggagaataccttgtctccatttgctggacttgcatttcatccactggatggtgttctgcaagcaataccacatgtgttcgc

SEQ ID NO: 44095 - DNA, 311 bp, Zea mays
gccgctgttgctgctcgtgttgaatctagaaccgtagccagacatgggactggaggacgagcaaaagatgcttaccgaatccggagatcctgaggaggaggaagaggaagaggaggaattagtggatcccctaacaacagtgagagagcaatgcgagcagttggagaaatgtgtaaaggcccgggagcggctagagctctgtgatgagcgtgtatcctctcgatcacatacagatgaggattgcacggaggagctctttgacttcttgcatgcgagggaccattgcgtggcccacaaactctttaacaact

SEQ ID NO: 44096 - DNA, 310 bp, Zea mays
agcgcatgagcttggcttgctagtgcttatggatattgttcatagtcattcatcaaataataccttggatggtttgaatggtttcgatggcactgatacacattacttccatggtggtccacgaggccatcattggatgtgggattctcgcctattcaattatgggagttgggaagttttgagatttctattgtcaaatgcgagatggtggcttgaagaatataaatttgatgggtttcgatttgatggggtgacctccatgatgtatactcaccatggattacaagtgacattcactgggaactatggc

SEQ ID NO: 44097 - DNA, 310 bp, Zea mays
aattttcttgttataatgctcagacagaacaagggatcatcaagtgcagcaccagctaaggtaaccgcgaatcaggcaccctctactcagacagtgcctgctactccacctcaaacgtcagcagccccagatgcaccggcacctattgtacctgtcagtgcaccggctgcaactgctacagcctcagcagctcctgctgttgctgtctccactgaggcggatagttatggtcaggctacctcaaacctagttgctggcagcaacttggaaggaacaattaaatccattcttgaaatgggtggcgggacat

SEQ ID NO: 44098 - DNA, 312 bp, Zea mays
  unsure (1)..(312): unsure at all n locations
ctgcgcctctacatttcttctctctctggtcctccgcctccgcctgatccatccaagacagggatcgccatgtcggactcggaggagcaccacttcgaatcgaaggccgacgctggggcgtccaagacctacccgcagcaggctggcaccgtccgtaagaacggcttcatcgtcatcaagacacgtcgctgcaaggttgtggatgttctacctccaagactggtaagcatggccacgccaaatgctactttgtcgccatagacatattcaatgggaagaagcttgcagatcatgtgcttcatcancaactgt

SEQ ID NO: 44099 - DNA, 280 bp, Zea mays
ggcagtcttgcaactgctggttatggaactgcccttggggttatacgcgctcttcattcggggggagttttagagaaggccttttgcaccgaaactcgtccatttaaccagggatccagacttacagctttcgagttagttcatgaaaaaatacctgcaacactgatagcagattctgctgctgctgcgttgaatgaacaagggcatgttcaggctgtcattgttggtgctgatcgaatagcagcaaatgtgacacagcacaagatggcactacaactcg

SEQ ID NO: 44100 - DNA, 299 bp, Zea mays
cgcttcataactttcaagatggacgacaagttcaaggagatagttgtggaccaggtcggggatcgcgctaccagctacgatgacttcacaaacagcctccctgagaatgactgccgatacgcgatctatgatttcgactttgttactgcagaggatgtccagaagagcaggatcttctatatgctatggtctccatcctccgccaaggtgaagagcaagatgctttatgcaagctcataccagagattcaagagtggcctcaatggcattcaggttaactccaggcacagatgcgagtg

SEQ ID NO: 44101 - DNA, 300 bp, Zea mays
gagcacggagctgctgatccgcaagctgccgttccagcgcctggttcgtgagatcgcccaggacttcaagaccgaccttcgcttccagagctccgccgtcgctgcgctgcaggaggcgtccgaggcctacctcgtcgggctcttcgaggacaccaacctctgcgccattcacgccaagcgcgtcaccattatgcccaaggacatccagctcgaccgccgcatccgtggggagatggcctaggcgtcgtcgcggtggaggtcgacatatggtcgcatttctgtcatcacgtctggctagaa

SEQ ID NO: 44102 - DNA, 305 bp, Zea mays
cgcaagtaccagaagagcacggagctggtcatccgcaagttgcccttccagcgcctcgtccgtgagatcgcgcaggacttcaagaccgatctccgcttccagtcctccgccgtcgcggcgctgcaggaggccgccgaggcctaccttgtggggctctttgaggacactaacctctgcgccatccacggcaagcgcgtcaccatcatgcccaaggacatccagatcgcgcgccgcatcaggggcgagagggcctgagcgaggcgagctcctctcaccgcaggcggcgtcgttgttgcttcggacct

SEQ ID NO: 44103 - DNA, 302 bp, Zea mays
  unsure (1)..(302): unsure at all n locations
tgcttggttccatcgggccggagagggagaagctagctagctagcagcagcnnnnnnnnnnnnnnnnnnnnnnnnnnnnnngagggtagctgcagctggggctagctggaaaggtcgggagccatggggaggggccgggtggagctgaagcggatcgagaacaagatcaaccgccaggtcaccttcgccaagcgccgcaacggcctgctcaagaaggcgtacgagctctccgtgctctgcgacgccgaagtcgcgctcatcgtcttctccaaccgcggcaagtatacgagttctgtagcgga

SEQ ID NO: 44104 - DNA, 304 bp, Zea mays
cccagagagacaccagagaacccaccatggccccctttgagcccctggcttctggcatcctgttgttgctgtggctgatagcccccagcagggcctgcacctgtgtcccaccccacccacagacggccttctgcaattccgacctcgtcatcagggccaagttcgtggggacaccagaagtcaaccagaccaccttataccagcgttatgagatcaagatgaccaagatgtataaagggttccaagccttaggggatgccgctgacatccggttcgtctacacccccgccatggagagtgtctg

SEQ ID NO: 44105 - DNA, 306 bp, Zea mays
ggggctcatgatactgcaaagctggctggtctccttgaggtattcatcaagaagtatgtccaatgttatgggtgtgggaatcctgagactgagattctcatctcaaagacccagatgatatcactgaaatgtgcagcctgtgggtttgtctcagatgttgatatgagggacaagctcacaaccttcatcctgaaaaacccaccagaacagaagaagggcggaaaagacaagaaggccatgaggagagctgagaaggaacgcctgaaggaaggtgaggctgctgatgaggagcagaagaaactgaag

SEQ ID NO: 44106 - DNA, 306 bp, Zea mays
ctcgagccgcttcaagaccgatctccgcttccagtcctccgccgtcgcggcgctgcaggaggccgccgaggcctaccttgtggggctctttgaggacactaacctctgcgccatccacgccaagcgcgtcaccatcatgcccaaggacatccagctcgcgcgccgcatcaggggcgagagggcctgagcgaggcgagctcctctcaccgcaggcggcgtcgttgttgcttcggacctgcttgtaggacttgtgcttctcttggtttcctttctggtggcagaggcatcttggtaccattgtgcttg

SEQ ID NO: 44107 - DNA, 274 bp, Zea mays
attattttagccaccagaacacagaatgttcttggggagaagggtcgtcggatcagagagctgactgcagttgtccagaagcggtttggcttccctgaaggcagcgtagagctgtatgcagaaaaagtggccacaagaggtctgtgatgcattgcccacgcagagtctctacgctacaaactcttaggagggcttgaagttcgaagggcctgctatggtgtgcttcggttcattatggaaagtgggcgcagaggctgtgatgctgtggtctctg

SEQ ID NO: 44108 - DNA, 294 bp, Zea mays
gccatatgaaccccagtcccggccgccaactgctgctgagctgttgcgggcctactgcgcgtctcgtgggcatgtcagccatgctgggctgcctgatgagaccagggctgctcgacaaatactgaaggattacattgatggtaaaatcccacactttgagctccctcctggcgtgacaggccctgaggtggactttgaacaaatcgctggatcagaaagtccaactacttcagcagctaatgaatcagttactgatgatctcgatgaagatgatgatgatgcaagtgatctgct

SEQ ID NO: 44109 - DNA, 272 bp, Zea mays
gtgccagaactgcgcgtagtccgcgccgatcgactgagaagcccggtttgcgctctcagaatgactgaatgggaaacagccaaacccgcagtggatgataacccggacatcaagctctttgggaaatggagcactgatgatctgcagatcaacgatatttctctacaagattacatcgctgtgaaggagacatatgccaagtacctgcaccacagtgcaggacagtatgctgccaagcgtgttcgcaaagtacaatggtccatcgtggagcg

SEQ ID NO: 44110 - DNA, 256 bp, Zea mays
gaaaggggagagagagagagagaagagagagagaagagagagagagagagatgagtgggagacccgcgagaggctgccgtgtagggaccgtagactcagcgactgcgaaggagggataacgggatggccgggatcggaccgatcatgcaggactgggagccggtcgttgtgcggtagatggcacacagcgccgccgctcagaacgttgagaaggctgtcacgccgcgcgccgcgccggtgcggagatcgataccat

SEQ ID NO: 44111 - DNA, 296 bp, Zea mays
cgaaccggcgatccgtaggctggccaggaggggcggcgtcaagcgcatttctgggctcatctacgaggagacccgcggcgtgctcaagatcttcctcgagaacgtcatccgcgacgccgtcacctacaccgagcacgctcgccgcaagaccgtcaccgccatggatgtcgtctacgcgctcaagcgccagggccgcacgctctacggcttcggcggctaggccgcctccccttctgatgctttgatatgacggccgtggtcggttgtgtgtctagttggccggtctactgtagttt

SEQ ID NO: 44112 - DNA, 296 bp, Zea mays
tcgttcccatgttattgttatgggtgctacaaaccgaccaaacagcattgatcctgctcttcgaagatttggaaggtttgatcgggaaattgacattggagttcctgatgaagttggccgtctcgaggttctccgcattcacactaagaacatgaaactagctgaagatgttaatttggaactcatttcaaaagatacccatggatatgttggtgctgatcttgctgccctttgcactgaggctgctcttcagtgcattcgtgagaagatggacatcatagatcttgaggatgaga

SEQ ID NO: 44113 - DNA, 298 bp, Zea mays
ggacgagctgaccctggctaagactgacctggagatgcagattgagagcttgaatgaagaactggcttacctgaagaagaaccacgaagaggagatgaaggaattcagcaaccaggcagtatgccaagtcaatgtggagatggacgccacccctggcattgatctgacccgtgtgctggcttagataagggaacagtatgaagccctggcagagaagaatcggagggatgccgaggcatggttccaggccaagagtgcagagctgaacaaggaagtatcctccaatgctgccatgatt

SEQ ID NO: 44114 - DNA, 292 bp, Zea mays
gaactctccgcccaagacgcaggtgcattgccgcgttgatcggtcgggccttatttcaggagcaccttggataagtgttccctatccctttcagtggggtgctccgacgtttgacgccggagaagctttcgctatgatgatgacttcgttcattgctcttgtagagtcaactggcgccttcatcggtgcttcgagatatgcgagtgcaactatgattcctccatcgattatcagtcggggcgtgggatggcagggcattggtcagttgctcgattctttttcgggacagcga

SEQ ID NO: 44115 - DNA, 293 bp, Zea mays
gcgagaggggggaaccgaggagatgaggctggtcggcctgacgggcgggatcgcgtccgggaagagcactgtctccaacctattcaaggacgccggcgtccccgtcgtcgatgcagacatcgttgctcgggatgtagtgcagaaaggcactggaggtttggaagaagattgtaaaaagccttcgggaatgatattttgttggagggtggagaaattaacagagcttacttaggacaaattgtcttttctgacccatcaaaacgtcaacttctgaaccgtcttctggcgccaca

SEQ ID NO: 44116 - DNA, 292 bp, Zea mays
ccttcatcaacgacatcttcgagaagctcgccgcggaggccgccaagctcgcccggtacaacaagaagcccaccatcacctcccgcgagatccagacctccgtccgcctcgtcctccccggcgagctcgccaagcacgccgtctcggagggtaccaaggccgtcaccaagttcacctcgtcttagcccccttgtagtaggcgtcgttgttgtctgcatctcaagcaagcactgtgatgtgccgcttctcatggtagtagtggtggttggctggtgtgtgtaagtggtgcagt

SEQ ID NO: 44117 - DNA, 288 bp, Zea mays
aatcaagccaccaccctctcctcctcctcagcggcgagcaccaccagcaacagcgagacacgatgaggccgatcttgatgaagggccacgatcgcccgctcacgttcctccgctacaaccgcgacggggacctcctcttctcctgcgccaaggaccacacccccacggtctggtacgccgacaacggcgacttcctcggcacctaccgcggccacaacggcgctgtctggacctgcgacgtctcccgcgactcggcgcgtctcatcaccggatccgccgatcagaccg

SEQ ID NO: 44118 - DNA, 279 bp, Zea mays
tcttgctgttgatatttggagccttggctgcacaatcattgagatgtttacaggaaagccaccttggagtggtcttgaagggccggctgcaatgtttaaggtgttgcgcacggacccaccaattccagataacctgtcccctgaagggaaggattttctgagatgctgcttcaagagaaaccctactgagcgaccaacagcacacaagttgctcgaacacccatttatccaaactttgaaccactacagcccacatagcgttgtacattcattttcggg

SEQ ID NO: 44119 - DNA, 290 bp, Zea mays
gtcgccaccaggtgcagagtctttcgtcatctcttctccggcgaagaacccccagtcgcccaccagatcacttgttaaactttgttgaggggtgatggcggtttctttcgcaaacctcagctccgaggcagggcttaaaaagcttgatgagtaccttctcactcgctgctacatcactggctaccaagcttccaaggatgacttcgctgtctacacttcgttttcgtctgctccctcgtccaagtatatcaacgtagcaaggtggtttaatcacattgatgcgctcgtga

SEQ ID NO: 44120 - DNA, 291 bp, Zea mays
catcactcatccacagctcgcagccgtattcctgtctcgaatcctctctcgccgctccgatggcccgcacgaagcaaacagcaaggaagtcgaccggcggcaaggccccccggaagcagctggccactaaggctgcgcgcaagtcggccccggccaccggcggcgtgaagaagccccaccgcttccgccccggcaccgtcgcgctccgcgagatccgcaagtaccagaagagcactgagctgctcatccgcaagctccccttccagcgcctcgtccgcgagatcgcgcagg

SEQ ID NO: 44121 - DNA, 156 bp, Zea mays
cacactgttccttaaggacgatcagctggagtaccttgaggagcgtcgcctcaaggatctggtcaagaagcactctgagttcatcagctaccccatctccctgtggactgaaaagacaacagagaaggaaatttctgacgacgaagacgaggaaga

SEQ ID NO: 44122 - DNA, 287 bp, Zea mays
cttgtgagttccaccccaaaacgaagcaacacgccttgcccggtgtgcaccgacgaaaccagcgacacagcacagagacgaacggcgtggtatcctcctgtctcagctgcttcctagctgggggtgctctctaccgtttcgagtacgcagtcaacccggcgctcttcctcgccaaagcgcgaggagggacgtgcacgctcgctccctctgaccctgacgacacggtggctcgccgcgccagatacctgctgagcaacggtttcaggtgctacaacctgttcaagagc

SEQ ID NO: 44123 - DNA, 285 bp, Zea mays
accgcttccgcaaccacgtataaaaacaccgcacgcgccgccgccgccgtcctattcctcggagaggagaagccgccgtcgcagcaatcacagcagcccggagaacggccaggtccgacaagatgcagatcttcgtgaagacgctgacagggaagaccatcaccctcgaggtcgagagcagcgacaccatcgacaatgtcaaggccaagatccaggacaaggaagggatcccgccggaccagcagcggctgatctttgccgggaagcagctggaggatggccgca

SEQ ID NO: 44124 - DNA, 278 bp, Zea mays
gcaaagcatgctggagcctactggtttggaagtccaaactatggagtatttacctgggatgacaaacttccaggagctcaggttcttctcagcaggttgcgactcttcctaagtccagggtacccttacgaagaaatactgaggacattccacaaccaaaccgacaatgttatgtgctcatatctgcctctattcaatttattcaacttcactaaaggaggactaatacgactcaaccatggaaggcctcagccacttcagtatgctgtcaacgcagc

SEQ ID NO: 44125 - DNA, 283 bp, Zea mays
ctaatcgcatctgcttccagagccccccgccgccgctgcgccctcctctcggtcctgccgtccgtcgaggtaaaaggacagcatggtgagggtcagcgtgctcaatgatgctctcaagtccatgtacaatgctgaaaagatagggaaacgtcaggtcatgatcaggccgtcatccaaggtgatcatcaagttcctgacggtcatgcagcgccatggctacattggcgagttcgagtacgtggatgaccacagagctgggaagatcgtggtggagctgaatgga

SEQ ID NO: 44126 - DNA, 268 bp, Zea mays
  unsure (1)..(268): unsure at all n locations
gcactttccaagtactccaattccgaagctgtggtttatgtgggctgtggtgaacgaggaaacgagatggctgaggttctcatggactttccccagttgacgatgacattgcctgatggccgtgangagtctgtcatgaagagaacaacactggtggctaacacatcaaacatgcctgtcgctgctcgtgaagcttccatttacactggaattacaattgctgagtatttccgtgatatgggctacaacgtcagtatgatggttgact

SEQ ID NO: 44127 - DNA, 280 bp, Zea mays
cctagctcccgcaactgccgccgccactcccacgctcgcagccatgccgcccaagctcgacccgtcgcaggtggtggaggtgttcgtccgtgtgaccggcggcgaggtcggcgcacgtcttcgctggcccccaagatcggcccgctcggtctttcccccaagaagatcggagaggacatcgccaaggagacggccaaggactggaagggcctccgcgtcaccgtcaagctcaccgtccagaaccggcaggccaaggtctccgtcgtcccctccgccgcgg

SEQ ID NO: 44128 - DNA, 297 bp, Zea mays
ccggcaacttcggcgttgcccgcctcatgcgcgaccgccgcaccaccgaactcgtcgccgtcaagtacatcgagcgtggcgagaagatagatgagaatgtccagcgcgaaataattaaccatagatcattgaaacaccctaacattattaggtttaaagaggttattttaacaccgacccatcttgctattgtcatggaatatgcctctggcggtgagctttttgagagaatatgtaagaacgtgcgattcagtgaagatgaggctcgctacttcttccaacaactcatttcaggag

SEQ ID NO: 44129 - DNA, 292 bp, Zea mays
agggaccggggcggaagaagagagagaagacgtctctctcctctcggcgtccccgttccccaacctctcgtctgctgcctgcctgcctgcctgcctgcaaaaaggagtttgtcatggcgtctaagcgcatcctcaaggagctgaaggacctgcagaatgacccccccacatcatgcagtgcaggtcctgctggtgaggacatgtttcattggcaagcaacaattatgggaccacctgacagtccctatgctggtggagtttttttagtgaacattcatttcccgccagatta

SEQ ID NO: 44130 - DNA, 292 bp, Zea mays
caaggttaaatatgaacttgacaagaaaactggactgatcaaggtggaccgtgtgctgtattcatcagttgtttaccctcacaactatggattcattcctcgcacgctttgtgaagacagtgatcctttggatgtactggttataatgcaggagcctgttatcccaggctgtttcctacgtgcgaaggccatcggccttatgccgatgattgatcagggagaggcagatgacaagatcattgcagtgtgcgctgatgatcccgagtacaggcattacaatgatatcaaggag

SEQ ID NO: 44131 - DNA, 294 bp, Zea mays
atttaccagtgatgatgagagagatggaatggtcggggtaccaggggtctcaggaaatattttccaggagatagatgggaggcagttcgacagcccaatactggggagtagaaagcagaaaggtggatttggcaaaggcaaaggaaaagctaactttgcaactgaaagagagaggagggagcagtttaatgtgaagtatggggctttaaggtcactgttcccaaaccctactaagaatgacagggcctctatagttggagatgccattgaatacatcaatgagcttaatagaac

SEQ ID NO: 44132 - DNA, 293 bp, Zea mays
gagattgtgaaggaagtctcatcctacctcaagaaagttgggtacaaccctgataagattgcctttgtccccatctctggttttgagggcgacaacatgattgagaggtccaccaaccttgactggtacaaaggcccgaccctgcttgaggctcttgaccagatcaccgagcccaagagaccttcggacaagcccctgcgtctccccctgcaggatgtgtacaagattggtggtattggaactgtaccggttggtcgtgtggagactggtgtcatcaagcctggtatggttgt

SEQ ID NO: 44133 - DNA, 293 bp, Zea mays
atttccaggaagccaagaaattatccaagccatatgttgatcaaattgctacagctactaaaccacatgtcgagaaagttagaactgctctcaagccttatactgaaagagcacgacatgtatatggacagtttcttgagacagctactacatatcatcagcaggctcaggcaactatctcggattaccttcaccggcatgagtttacaaaacagtttgtaactaaagagttggtgtggtatctggcttctgctttattggttacacccttctttgttttgtacacactccta

SEQ ID NO: 44134 - DNA, 287 bp, Zea mays
cttgtttattgctgcatataccttttaggtgcttggaaaaatttggtctgtggcatttaaatatcacttccgtatgccaccttactacacacttgttctccggtcacttgcctctttggaaggactagccgtggcagcagatgggactttcaaaacatttcaagcagcatacccatatgttgttcggaagcttctgtccgaaaattcacttgaaacaagaagactcttgaatcaggcaatttttaacaaaaggaaagagttccaatggcagaagattgacgcgtttc

SEQ ID NO: 44135 - DNA, 299 bp, Zea mays
ggaatgttcaagaacctcttcagtagattgtggcttgcacgagtcaccaatcaccaacactgctagctctatctcaaagattactctaccacagtctgttccacatgttttaggtgtcggtcaattgttggaatcagcactacatgtggctggccaggttgcaggtgcatctgtttcaacctcacctcttccatatggtacaatgactagtcaatgtgaagcccttggattgggcaccaggaagaagctatcgagctggcttgtcaatggacacgaatcaaccccggacaatcctatgc

SEQ ID NO: 44136 - DNA, 229 bp, Zea mays
cggctcgagatggatcatcaccggtacctctgggcggacggcatcgatgtggatatccctactggcttcgcaggatggttcttctgcatcactctcaggaagcttgtctgggttatccttcagcctctcttctatgcgtttagacccctgttcatcaaccccaagccaattacccatctggaagtcatcaacaatgtgatccaggtcacttttgacgtcctcgtctatt

SEQ ID NO: 44137 - DNA, 286 bp, Zea mays
tgaaaaagtatcttctgtggagggtgagaagatggtgcttgtggcatgtggatggcgccatacaattacggtttctgactctggtaatctgtacacttatggttggagcaaatatggtcagctagggcatggtgattttgaagatcatttagttccacataaagtagaagctcttgaaagatagcactatatcccagatttcaggcggctggaggcatacgatggcacttacatcagagggaaagctttacggatggggatggaacaagttcggacaagtcggagt

SEQ ID NO: 44138 - DNA, 289 bp, Zea mays
gcaatctcgtccccaaacaagcaaccaccgcctccccgatctcgtcgagaggaagcccaatcccgaaaccgccgccctattccaatggcgcccaaggccgagaagaagcccgccgccaagaagcctgcggaggaggagccggcggcggagaaggccacggcggggaagaagcccaaggccgagaagcggctccccgcgggcaagtccgcaggcaaggagggtggcgagaagaaggggaagaagaaggcaaagaagtcggtggagacgtacaagatctacatcttcaagg

SEQ ID NO: 44139 - DNA, 288 bp, Zea mays
aggagaatagcggcgaggacgaagtggcccgcccaggaaatggcgtcgatgcagagctggcgcaaggcctacggcgccatcaaggacaccacaaccgttagcctcgccaacctcaactcggacttcaaggatctggatgtggcgatcgtgaaggcgactaatcacgtggagtgcccacccaaggagcgacacctgcgaaaggttgttgcggcgacatccatcaccaggcctagggcggatgtcgcctactgcatccacgcgcttgcccgccgtcttgccaagacccgc

SEQ ID NO: 44140 - DNA, 291 bp, Zea mays
ctggttgccttaaccctactgaagcatgatgatctgcaaggtcctggtgatcactgtcttctgtgtgctgactgtggctttccccagtttggacatagattcaatcaatgaagaactacaggattcaatctttgatatactaaactcaacctctgacttccaactggcatcatatgaaccatcaacatctcctccagaggatagcacataccaggaatcaaacactgacttcatgcaaaccacatattccagaagcatacagatttctgagctctctaatggagctgagac

SEQ ID NO: 44141 - DNA, 295 bp, Zea mays
cctacaccgagcagccaagcgaggaagcgaagacccatttccccgagcgcaagagtaccatggcggcggcggcagtttatggcggcctcaaggggaagcttggcgtcgaggatgcccccgagctgcagctgaatcgcatccgcatcaccctctcatccaagaacgtcaagaacctggagaaagtttgtgcggatttggtaaagggagccaaggataagcatctgagggttaaggggcctgtcaggatccctactaaggttctccacatcaccacccgcaaatcgccttgcggtga

SEQ ID NO: 44142 - DNA, 288 bp, Zea mays
gccgctcctctcacaacccagtcgctcaaaaccctagagctctcgcctgctcgcctccgccgccggagcgagctccccatcttcatccgtcaaccatggcgacccagatcagcaagaagaagaagttcgtcagcgacggtgttttctacgccgagctcaatgagatgctgacgctggagctggcggaggatggctactctggcgtggaggtgcgcgtcacgccgatgcgcacggagatcatcatccgcgccacggcacgcagaacgtgctcggcgagaaaggccgcag

SEQ ID NO: 44143 - DNA, 272 bp, Zea mays
gaaaaaaccaacacactctcgcttgcggcaagaattttccggcccgaaaccgaaagcacccgcaccaatctctgcgtctcttcgtcttcggctgcgcggcggcggcagcagcggaggaggttgaggagatgctgtccggcgacatccccccgagccagaccatctacctcaacaacctcaacgagacggtcaagaaagaagaattgaagagatcgctttatgccttgtgctcacagtatggaaggatactggatgtggtggccctgaaaaca

SEQ ID NO: 44144 - DNA, 282 bp, Zea mays
gttgaaaacttgctcgactttgactttatggacccaccgccccaggagaatatcctcaactcaatgtaccaactctgggtgttaggtgcattgaacaatgttggtggccttacagaaattggctggaagatggtggagttcccgttggatccaactctggtaaaaatgcttcttatgggggagcagctagagtgccttgatgaggtgctgaccattgtatccatgctatcagtgccgtcagtcttcttccggccaaaagaccgagcagaggagagtgacgca

SEQ ID NO: 44145 - DNA, 280 bp, Zea mays
gtgatttcccccggcggcgttgggcgctggtttaggagaagaaaaggcggcgcgcggcggaaaaccctagcttagctcctctccggcgtcaagtgctctccggtttgagggcgcgatgagggtgaaggtgatttcgcgttccaccgacgactacacgcgcgacgccaccaggacctgcagaaagtattccgcaactatgatccagcgcttcgtagtcaagagaaagctgttgagtatactcgggcactcaatgctgccaagttagagaagatatttgcta

SEQ ID NO: 44146 - DNA, 279 bp, Zea mays
aagatgtcgaagcgaggacgtggtgggtcctccggagcgaaattccggatttccctgggtcttccggtaggagctgtgatcaactgtgctgacaacacaggagccaaaaacctgtatatcatctctgtgaagggaatcaagggacggctgaacagacttcctgctgctggtgtgggcgacatggtgatggccacagttaagaaaggcaaaccagaactaaggaaaaaggtacatcctgcagtggtgattcgacaacgaaagtcatatcgaagaaaagac

SEQ ID NO: 44147 - DNA, 276 bp, Zea mays
tatcaacagctgttgtagagccatacaacagctgttgacacctgtggggaaggataaatggtgaaaccaagcttagacttcttgccataatcaactgacaggcgctccaacagcagtgaaccaagtccagagccagtaccaacttgaacaggctgatctcacagatcatatcatcacttaccacctccctgaggtttgatggggctatcaatgtggatgttatttagttccagaccaaccttgttcctaacccacgtattcatttcatgctttcct

SEQ ID NO: 44148 - DNA, 277 bp, Zea mays
atctcaaaacctgacaagacatttcaaagaaagtattagattcattcacgagtgccggctccgcggtgaaagctgacttgtacactgcctggccggggtctccaggagcgtgacactggtgatcgcatacatcatgaccgtcactgactttggctgggaggatgccctgcacaccgtgcgtgctgggagatcctgtgccaaccccaacgtgggcttccagagacagctccaggagtttgataagcatgatgtccatcagtatcggcagtggctgaag

SEQ ID NO: 44149 - DNA, 277 bp, Zea mays
ccagggcattacgaagccggcgatccggaggctggcgagaaggggcggcgtgaagcgcatctcggggctcatctacgaggagacccgcggcgtgctcaagatcttcctcgagaacgtcattcgcgacgctgtcacctacacggagcacgcccgccgtaagaccgtcaccgccatggacgtcgtctacgcgctcaagcggcagggccgcaccctctacggatttggcggctgaggggtcaggggtgtcccccagcttctgctggtcgtggcagaagtc

SEQ ID NO: 44150 - DNA, 278 bp, Zea mays
gttctacggggtgctggcctccctcggcctgtggcagaaggaggcgaagatcctcttcctcggcctcgacaacgccggcaagaccacgctgctccacatgctcaaggacgagcggttagtgcagcaccagccgacgcagcacccgacgtcggaggagctcagcatcggcaagatcaagttcaaggccttcgacctcggcggccaccagatcgcgcgccggtctggaaggattactacgcaaaggttgatgctgtagtatacctggtagatgcgtatga

SEQ ID NO: 44151 - DNA, 281 bp, Zea mays
gagagaacccaccatggtgctgtctcctgccgacaagaccaacgtcaaggccgcctggggtaaggtcggcgcgcacgctggcgagtatggtgcggaggccctggagaggatgttcctgtccttccccaccaccaagacctacttcccgcacttcgacctgagccacggctctgcccaggttaagggccacggcaagaaggtggccgacgcgctgaccaacgccgtggcgcacgtggacgacatgcccaacgcgctgtccgccctgagcgacctgcacgcgc

SEQ ID NO: 44152 - DNA, 280 bp, Zea mays
ctccaatcacctgccggagcagctcgaggacaggctgacgatatagaaaacgaagcaaacgagcttatccgcatcaagaactatctctatggcaagctcgcggggcacacaggccattctgtcgagaagatccatgaggacctgtctagggtgaagcgcttcgacgccgaagggctctcgagtacgggatcatcgaccgtattgtcaggccgtctaggatcaagaaagagggctccactgctcaaaggagggacatgcggaatctgggacttggctaata

SEQ ID NO: 44153 - DNA, 271 bp, Zea mays
agcaaagcaatcggaattctctgcgatttctctagatctcgactaccccccactagttttggttcctcctttcgttcgagagagcgattctggtggcaatggcgaagagcgagggtccggcgatcgggatcgacctcggcaccacctactcgtgcgtcggcgtgtggcagcacgaccgggtggagatcatcgccaacgaccaggggaaccgcaccacgccgtcctatgtcggcttcaccgacaccgagcggctcatcggcgacgctgccaa

SEQ ID NO: 44154 - DNA, 293 bp, Zea mays
aaaacagaagcataatacacgagtgttttcagggagaacttgaagttgttaaggaggttcataggaagcatataatggaaaaaagagaggatggcggtgagctgaatggtgaggcaggttcagtggtgggaactgcagatggaattgttactgaaacatccaaggtcccattcctgatgctcggtcttgacctgccacctccacctcttttcaaagacgccatggagaaaaatatcattccacaggtaccattgtttaacatactgaagaagttcgatggtgagacagttaca

SEQ ID NO: 44155 - DNA, 289 bp, Zea mays
ctaatcgcatctgcttccagagccccccgccgccgctgcgccctcctctcggtcctgccgtccgtcgaggtaaaaggacagcatggtgagggtcagcgtgctcaatgatgctctcaagtccatgtacaatgctgaaaagatagggaaacgtcaggtcatgatcaggccgtcatccaaggtgatcatcaagttcctgacggtcatgcagcgccatggctacattggcgagttcgagtacgtggatgaccacagagctgggaagatcgtggtggagctgaatggaagactg

SEQ ID NO: 44156 - DNA, 286 bp, Zea mays
aaagcatcctgctgcaggcacagcagcaggtgcaaatgcagaaactcgtataccaagtcggagctgccctgccgacaaaagttgtctgcctgacacaggtagtgacagcagatgaactgagagatgatgaggaatacaatgacattgtggaggacatgagggaagaaggacgcaaatatgtcccacataatgccattgcagagtgttttatagtccgaccctatgcaatattggcaatcgggctttaacccacagaagacactattcttacggccttgattaatca

SEQ ID NO: 44157 - DNA, 274 bp, Zea mays
gtgaccatgcagaacctcaatgaccgcttggccacctacctggataaggtgcgtgccctggaagaggccaacagtgacctggaggtgaagatccgtgactggtaccagaggcagcgccccactgagatcaaagactacagcccctacttcaagaccatcgaggacctgaagaccaagatcctggcagccactgtggacaatgccaatgtcctcctgcagattgacaatgcccgcctggcggctgatgacttccgtaccaagtttgagacagagc

SEQ ID NO: 44158 - DNA, 290 bp, Zea mays
gccatctctatctcgattgatgaagagtgctattggtgagggcatgacacgtagagaccattcggatgtgtctaatcagctttatgccaactacgcaattggaaaggatgttcaggccatgaaggcagtcgttggagaggaggcactctcgtctgaggatctgctttacttagagttccttgacaagtttgagaggaagtttgtgacacaaggagcatacgacacacggaacatcttccagtcactagatcttgcatggacattgcttcggatcttccctcgcgaacttc

SEQ ID NO: 44159 - DNA, 284 bp, Zea mays
tctctcaaaccctagccgcctcctgcaagtttcagagctcagggatctgcgccatggcgagtgagacggagaccttcgcatttcaggctgagatcaaccagctgctctcactcatcatgaacaccttctactccaacaaggagatcttcctccgcgagcttatctccaactcttccgatgcgctggacaagatcatgttcgagagtctcactgccaagagcaagctcgatgcgcagctgagctgttcatccaccttgtcccagacaatgccacgaacacgctct

SEQ ID NO: 44160 - DNA, 284 bp, Zea mays
gatgagcctggttattatgaagatggggcctttggtataagattggagaatgtacttatttgcaaagacgccaatgctaagtttaattttggagataaaggttatttggcatttgaacatataacatgggctccataccagaccaagctgatagacaccgggcttctgacccctgttgagatcgactgggtgaacacgtaccactcagactgccggaagatcttggagcctcatctgaacgagcaggagaagcaatggctgatgaaagctactgagcccgtagc

SEQ ID NO: 44161 - DNA, 283 bp, Zea mays
cgaacgttaacgccagcactgggaagtgcgggatcgcgatgatggcgtcctacccgacgaagaagggcgcgaaccctcccaggccgtctccaaccccgccaacaccgccggctgcccctgacaatgtctgcgacgagaacttctcgtgctccgcgggcagcacctgctgctgcgcgtttggcttcaggaacgtctgcttggtctggggctgctgccctgtcgagggcgccacctgctgcaaggatcacgccagctgctgcccgccgggctaccctgtctgcaa

SEQ ID NO: 44162 - DNA, 286 bp, Zea mays
ctcgcattttccttgcaaccgattgcctatccccctcccaaccaaagaccgatggcgcccaaggccgagaagaagcccgcggcgaagaagccggcggaggaggagcccgcggccgagaagacgaccgccgggaagaagcccaaggcggagaagcgggtccccgcgggcaagtccgccggcaaggagggcggcgagggcaagcgtggcaagaagaagggcaagaagagcgtggagacgtacaagatctacatcttcaaggtgctgaagcaggtgcacccggacatcg

SEQ ID NO: 44163 - DNA, 285 bp, Zea mays
gagaagcttatggaacacatcaaacttttctccacatgtctcaatattcctaagcttattcgagcttgtgatgaacagcagcactggaaagaacttacctacctgtacatacagtatgatgaatttgacaatgctgccaccactattatgaaccactctccagatgcatgggatcatatgcagttcaaggatgtttgcgttaaagttgcgaatgtggagcattcttaaggcgggtcacttctatttgcaggagcatcctgatctcatcaatgatatgctgaatgt

SEQ ID NO: 44164 - DNA, 290 bp, Zea mays
gtccacatcgacgtgggcggccacatgtacaccagcagcctggccaccctcaccaaataccccgaatcaagaatcggaagactcttcgatggcacagagcccattgtcctggacagtctcaaacagcactatttcattgacagagacgggcagatgttcagatatatcttgaattttctacgaacatcaaaactcctcattcccgatgatttcaaggactacactttgttgtatgaagaggcaaaatatgtccaactccagcccatgttgttggagatggagcgatggaa

SEQ ID NO: 44165 - DNA, 162 bp, Zea mays
gagagagcccaccatggtgctgtctcctgccgacaagaccaacgtcaaggccgcctggggtaaggtcggcgcgcacgctggcgagtatggtcgcgaggccctggagaggatgttcctgtccttccccaccaccaagacctacttcccgcacttcgacctgag

SEQ ID NO: 44166 - DNA, 262 bp, Zea mays
ccctgttctgctgcccaagaagacggcggagaaggcgtccagtggcgggagcaaggaggcaaagtcgcccaagaaggccgccaagtcccctaagaaggcatagactgactgtccggagtgatctgatgtttagcagtaccttgttaccagtatgcggtgatgcgtaggctgcagatgggacgaatgtgcttgtatgtgtatgtgtcctgctgcaagttgtccttggcaattaggatggaagaagaaatgccttgtttctctg

SEQ ID NO: 44167 - DNA, 295 bp, Zea mays
cacgacgcaacaccatccagccaccagttcgaagcggaggcgaccggcaacctgcggcggagatgtcaggcaggggcaagggcggcaaggggctcgggaagggcggcgcgaagcgtcaccggaaggtgctgcgcgacaacatccaggggatcacgaagccggcgatccggaggctggcgaggaggggtggcgtgaagcgcatctccgggctgatctacgaggagacccgcggcgtgctcaagatctttctcgagaatgtcatccgcgacgctgtgacctacacggagcacgcccg

SEQ ID NO: 44168 - DNA, 280 bp, Zea mays
ggccatgtcgactctggcaagtcgaccaccacaggacaccttatctacaagcttggaggcattgacaagcgtgtgatcgagaggtttgagaaggaggctgctgaaatgaataagcggtccttcaagtacgcgtgggtgctcgacaagctcaaggctgagcgtgagagaggtatcaccattgatattgctctgtggaagtttgagaccaccaagtactactgcacggtcattgatgcccctggacaccgtgacttcatcaagaacatgatcactggtacct

SEQ ID NO: 44169 - DNA, 276 bp, Zea mays
cgcagagaacgccggcaggtagcgctactgctagaggagaggaagcggaaagggcggcggcagcgctcgtggtcagtcaaagatccaacctccggactcgcgatggggcggcggatcctcaacgatgctctgcgcacgatggtcaacgcagaccggcgggggaacgcgtcggcgcttctccgacccatctccggcgtcatggtctccttcctcaacatcatgaagtaccgagggtatatcaaaaactttgaggtcattgatgagaatagagttggg

SEQ ID NO: 44170 - DNA, 276 bp, Zea mays
gattattaaggttcctattgatgtatttaaaggaatcacagatgaggatgcagctaaagttgttgatggtctagctctaaaggcagcggataggcagtcttctatagaacagattaagaagctgtatgaacttttctgcaagtgtgattgcacattgctggagataaatcctctggcggagacagctgacaacaagcttgttgctgctgatgcaaaattgaactttgatgataatgctgcatttagacagaaagaaatatttgcactgcgtgatac

SEQ ID NO: 44171 - DNA, 274 bp, Zea mays
  unsure (1)..(274): unsure at all n locations
gctattgatgctactacaacagcaggtgttgaccttggtcagggtatgcgtgaagttgatatcaagaaatacattaaagttgaaaaggttcctggtggtcagttggaggattctagagtccttaaaggagttatgatcaataaggatgtcgtggctcctgggaaaatgaggagaaagatagtaaacccccgtatcatcctgttggactgccctgttgagtataagaaaggagaaaatcagaccaacgctgagttgatgntttttgaagattggc

SEQ ID NO: 44172 - DNA, 299 bp, Zea mays
ggaaagggggtctgggttgcgtacaggcgaaacgcacgcgccgccgctgccgcgcgagcctctccgtccccatcgccgcgcagatggatccgtcgtcggagcccctgtacgcgcaggtcgagccgtacgactccgggttcctcaaggtctccgatgtccacaccatctactacgagcagtccgggaacccgcaggccatgcggccgtgtttctccacggcggtcccggagccggcacgtcgcccggcaacaggaggttctttgacccgcagttctacaggatcgttctgtttgaccaga

SEQ ID NO: 44173 - DNA, 298 bp, Zea mays
ctgctgcacccaagcttcggggagctccctcagtgggctgtcgtcggtgacaccttccccgtcggctgcgcatacgacgagtgcaacgtccacttcaagtacttcaaggagaaccccgactaccacaacccgaagctcaacaccaagttgggggtctactcggagggctgcggcctcgacaaggtgctcatgtcatggggccacgacgactacatgtacctggtggccaaggagaacaagtgcacccttccttccgcggggctgttcatcagcagataccactcgttctacccactgc

SEQ ID NO: 44174 - DNA, 294 bp, Zea mays
aggaaactggagcgcccatcctgacagacgatgtcagcctgcaggtgttcatggatcatttgaagaagctggctgtgtccagtgcctcttaagctagtagcacagcctagaagtggaagaaaatgctgtcagattgtgctcacattgttgatagtgtcctagcatcattcacctttctgggagattctaataaataacccaaggctttttttatatgtatgtcttcaggttatagtatgtcttcaggttataatttatttgtagtcctctctacctgttttcctatacatgaaa

SEQ ID NO: 44175 - DNA, 289 bp, Zea mays
tcacacgcgcagaggggagccaccatgggtgctgtctcctggcgataagaggatgcgtcaaggccgcctggggtaatgtcggcgcgcacgctgtgcgagtatagtgcgtaggccctggagaggatgttcctgtcgctctccaccagcaatagctacttcgcgcacttcgacctgaggcagggctctgcccaggttaagggccacggcaagaaggtggccgactcgctgaccaacgccgtggcgcacgtggacgacatgcccaacgcgctgtccgccctgagcgacctgc

SEQ ID NO: 44176 - DNA, 297 bp, Zea mays
ggaggatgggagaatgatgaaactgttgaagaggcagcagctcgagaagctatagaagaagctggagttcgaggtgatatagtgcattttctggggctctatgacttcaaaagcaagacgcatcaagatgcgtgctgccctgagggtatgtgcagagctgcagtgtttgcgctgcatgtaaaggaagagctggcctcatggcctgagcagagcacccgacagaggacctggctcacggtccctgaagctgcatcaagttgccgataccagtggatgcaagaggccttgctgactggc

SEQ ID NO: 44177 - DNA, 295 bp, Zea mays
gataatccgccggcgttgagatgttggtttatcaggatctcctatctggcgacgagctcctgtcggattcattcacctacaaggagctcgagaacggcgtcctgtgggaggtcgagggaaagtgggtcacccaaggtcctgttgatgtggacattggtgccaatccatccgccgagggtggtgaggacgaaagcgttgatgacacagctgtgaaggtggttgatattgttgacacatttcgtctacaggagcaacctccttttgacaagaaatcatttgtgtcttacatcaaaaa

SEQ ID NO: 44178 - DNA, 294 bp, Zea mays
ggttcctggtgaaccgaacatatcttacatatgctctcgttattatcgtgctccagagctcatatttggagcgacagagtatacaacttcaatagacatatggtcagctggttgtgttctagctgagttgcttcttggtcagccactgtttccgggagagagtgctgttgatcagttggtagagattatcaaggttcttggtactccaacccgtgaggagatacgatgcatgaatcccaactatactgagttcaggtttcctcagataaaggctcatccgtggcacaagatttt

SEQ ID NO: 44179 - DNA, 294 bp, Zea mays
cagagcgtcaccatggcggtcgggaagaacaagcgcctgacgagaggtggcaagaagggagccaagaagaaagtggttgatccattttctaagaaagactggtatgatgtgaaagctccagcaatgttcaatattaggaacatcgggaatttactagttacaaggactcaaggaaccaaaattgcatcagatggcctcaagggtcgtgtgttcgaagtgagtcttgcagatctacagaacgatgaagttgcatttagaaagtgtcagctaattactgaggatgttcagggcaaa

SEQ ID NO: 44180 - DNA, 292 bp, Zea mays
aaaatacaatcaataatagagaggggaggtagcaacaccggctgcttaatctcttccttttcttcttcctatctccagcgcatcccaagaggcggaaagggaggagcgtggagcggcgaattattgtttgtttccccaagatgtcttctccaagcaagcgccgggagatggacctcatgaagctgatgatgagcgactacaaggtggagatggtgaacgatgggatgcaggagttctttgttgaatttcgtgggcctaacgaaagcatttatcaaggaggtgtatggaaggt

SEQ ID NO: 44181 - DNA, 292 bp, Zea mays
cgactctcactcacaaaattcacagctccaatcctggtgcaagcgcacagtagcggagcaagatgcggggaggagaccggccatctgcgtcgctccagctcctctcgctggggctcgtgctcctctacttcttcacctcaggcagcaccgttggtctcgtggagggacagaagacgtggtgcatcgccaagccgtcggcgtcgaacgagatcctggcgcagaacctggactacgcgtgctcccaggtgagctgcgccgtgatccagaagggcgggccgtgctactacccgga

SEQ ID NO: 44182 - DNA, 288 bp, Zea mays
cgaagatggcggaggggcaggttctagtattggatggccggggccatcttctgggccgcctggcggcattgtggccaagcaggtactgctgggccgaaaggtggtggttgtacgctgtgagggcatcaacatttctggaaatttctacagaaacaagttaaagtatctggcctttctccgaaagcggatgaacaccaacccgtctcgaggcccctaccacttccgagccccaagccgcattttttggcgcactgtgcgaggcatgctgccgcacaagaccaaaagagg

SEQ ID NO: 44183 - DNA, 289 bp, Zea mays
ggacagacttcactctcactatcagcagcctgcagcctgaagattttgcaacttactattgtcaacagacttacagtttcccgatcactgtcggcggagggaccaaggtggagatcaaacgaactgtggctgcaccatctgtctacatcttcccgccatctgatgagcagttgaaatctggaactgcctctgttgtgtgcctgctgaataacttctatcccagagaggccaaagtacagtggaaggtggataacgccctcctatcgggtaactcccaggagagtgtcac

SEQ ID NO: 44184 - DNA, 290 bp, Zea mays
ctcgattccgctgctctctccctcttcctctcccccgcggcggaccataaaccctaggcctcgccgtcgtcggaggcgccgccgcgatgtcgcactttggaaggacgggtccgccggacatccgcgacaccttctcgctgctcgtcctcaacatcagcttccgaaccacggccgacgaccttttcccgctcttcgagcgctgcggcaaggtcgtcgacgtcttcatcccgagggaccgcaggaccggggactcgaggggttttgcgttcgtgcggtacaagtacgccgac

SEQ ID NO: 44185 - DNA, 289 bp, Zea mays
attaagggaggtcaaaaatacaagtcccctaaaaatgcctatgttgaaggtgatgcctcaagcgcaactatttcttggctggtgctgcaattactggagggactgtgactgtggaaggttgtggcaccaccagtttgcagggtgatgtgaagtttgctgaggtactggagatgatgggagcgaaggttacatggaccgagactagcgtaactgttactggcccaccgcgggagccatttgggaggaaacacctcaaggcgattgatgtcaacatgaacaagatgcctga

SEQ ID NO: 44186 - DNA, 298 bp, Zea mays
ccgcctccctttccccttccctccctccctctccccgcgggccgccagatgcaatttcgccctcgattcgaccccgattcgtccgcccgcgaccgggattccctccgccaagcgcggatctgaacgctgcgctccgtgtcgccgctcgaatccgccatgaagggggccaaatccaagggcgccgccaaggccgatgccaagctggcggtgaagagcaaggtggcggagaagcccgccaagggcaggaaagggaaggccggcaaggaccccaacaagcctaagagggctcccagcgctt

SEQ ID NO: 44187 - DNA, 284 bp, Zea mays
acagtatgtctgctgctcggctctccgcggtggcacagtccaccgtgtatgccttctccgcgcgcccgctggcgggcaggagagcccgtggagcctgggctccctgcggggcagggtgctgctcattgagaatgtcgcgtccctctgaggcaccacgacccgggactacaccgaaatgaatgatctgcagaagcgtctggggcctcgtggcctggtggtgctcggtttcccgtgcaatcagttcggacatcaggagaatggcaagaatgaagagattctgaatt

SEQ ID NO: 44188 - DNA, 283 bp, Zea mays
gccatcaggtgagccaagatcggtgcatacaaatacatccaggagctgtggaagaagaagcagtccgacgtgatgctcttccgactaagggtccgctgctggcagtaccgccagctctctgcgctgcacagggctccccgccccacccggcctgataaggcgcgaaggctgggatacaaggctaagcaaggttatgtcatttacaggatccgtgtccgccgcggtggtcgcaagcgcccagttcctaagggtgcaacctacggcaagcctgtccaccacggtg

SEQ ID NO: 44189 - DNA, 298 bp, Zea mays
cttccgtccgagtctgagctcatctccgcgcgctgccgccgccgccgccgccgctcgacgcccaccgcgcagccatggcggaacagaccgagaaggcttttctcaagcagcctaaggtgttcctcagctcaaagaaatctggcaagggtaagaagccaggcaagggtggcaatcgattttggaagagcattggccttggtttcaagactcccagggaagcaattgaagggacctacattgacaagaaatgtccattcactggaaccgtttctatcagaggcagaattattgctggaac

SEQ ID NO: 44190 - DNA, 289 bp, Zea mays
gtcgcgacagagagagaggcggagttgcggagaagatgcagagcagcagcatgaagagggagatcagcgaggcccacgacaccattcgcttcggcatcaacgccggcgtcaaagccgacctcgccccgccgcacccgctccagtctaccatccaatcggagaccaagttctgggcggacaagaagaagttcgggacatatgccatatacggatccgccctcaacatccgcaaggatctcgatgcccaaatcctctccaggttccaaaggccccctggtgctttgccgtc

SEQ ID NO: 44191 - DNA, 192 bp, Zea mays
gagagccccacatgaattcaagattgcttgcctggaggacattaaggcactctttccttctgattacaatccattttatgctgggtttggtaacagagatactgatgagctcagttacaagaagatgggaatacctaaaggcaagatttttatcatcaacccaaagggtgaagtggctgtcaacagttctgt

SEQ ID NO: 44192 - DNA, 239 bp, Zea mays
gttttggtctcgccgcgcacgcctcctgaagcttctagacgttcgaggaggaggaggaggaggggaggctcccgccgccgccgtagccatggcgtccaccaaggtgcagcgtatcatgacccagcccatcaacctcatcttccgtttcctccagagcaaagcgcgcatccagatctggctcttcgagcagaaggacctccggattgagggtcgcatcatcggattcgatgagtacatga

SEQ ID NO: 44193 - DNA, 284 bp, Zea mays
gacctggaagcccaagtatgatcttgtacaggacgtcaaaaatcttcttctggaagtcagaaagaccatctgcaccagcagcagcctcctcagcacttctccttttccttctcaacatcatacttgggcttccaggagaagatttttgacgtcctgtacaagattgctgatattccgttcttggcaccctacaagaccaagattcttgatgttatcgagaagggagagaaacagcccaacatcactattagacttttggtctccgttgtcatcgtgttcgttac

SEQ ID NO: 44194 - DNA, 259 bp, Zea mays
ctcgagccgctcaaccaaattcaaagtcacagcggcgaaactctcggcgatgtctggcagcggcaagggcgggaagggtctgggcaagggcggcgccaagcgccaccgcaaggtgctgcgtgacaacatccagggcatcaccaagccggcgatccgcaggttggcgaggaggggcggcgtcaagcgcatctccgggctcatctacgaggagacccgcggcgtgctcaagatcttcctcgagaacttcatccgcgacgcc

SEQ ID NO: 44195 - DNA, 173 bp, Zea mays
atggcttcctgcaggatggcactcctccttggcttgctgctgctagtagtagcttcgcccgcgatcgctgatgacgactccggtatctactaccagctggctcttatgtggccaggagcatactgcgagcagaccagcgctgggtgctgcaagccgaccaccggcgtctcgcg

SEQ ID NO: 44196 - DNA, 225 bp, Zea mays
agcttgtgcagatagagcacgcgctcacggctgtcggatccgggcagacctccctagggatcaaagctgccaacggtgtagtgattgccaccgagaagaaactgccttctattttagtggatgaaacatctgtgcaaaagattcaggcactaacaccaaatattggagttgtctatagtgggatgggtccagattttcgtgttctggtgagaaaaagtcgaaagc

SEQ ID NO: 44197 - DNA, 182 bp, Zea mays
ggagcaggccagccaagcactgtcaggaatcctgtgaagcagctccagctatgtgtgaagaagaggacagcactgccttggtgtgtgacaatggctctgggctctgtaaggccggctttgctggggacgatgctcccagggctgttttcccatcctttctgggacgtcccagacatcagggg

SEQ ID NO: 44198 - DNA, 227 bp, Zea mays
gataaactatgtcgaaggtgacatgttcagtttcattccacctgctcaaactgtcgtgctaaagcttgtgctgcaccacctgaccgatgaggagtgcgtcaagctcctggctcaatgccggaaggcattcctccacggaaggacggcgggaaagttataatcggtgatattatgattgaccactctgggcttatgctgaaaactcacctcctgatggacatcggcat

SEQ ID NO: 44199 - DNA, 265 bp, Zea mays
ctcgagccgctcgagccgccacagctggcgacacccatcttggtggtgaggactttgacaacaggatagttaaccactttgtccaggagttcaagagaaagaacaagaaggatatcactggcaacccgagggctctccggaggctgaggacctcttgtgagagggccaagagaactctgtcttccactgcccagaccaccattgagatggactcgctgtacgagggttttgacttctactccactatcaccggcgccagttttga

SEQ ID NO: 44200 - DNA, 272 bp, Zea mays
acgtcttcctcctccagcgacggcagtgccggggaacaagagcacatcgcttctgacgtcactcagctcataggatggacgccgctggtcgaattgaagcgaatcgccagcgaggctgggatcgatgcgcggatcgtcggcaagatggaggcttaccagccactttgctccatcaaggaccgctctgctttgagaatgatagaggatgctgaggagaggggattgatttcgcctggagtcacaacactggtggagccgacgagtggtaacat

SEQ ID NO: 44201 - DNA, 251 bp, Zea mays
gagcagacggtgaaggagctgcagcaccgtctggacgaggctgagcagctggcgctgaagggcggcaagaagcatatccagaaactggaggccagggtccgtgaacttgaaggagaagttgaaaacgaacagaagcgcaatgttgaagctatcaagggtctgcgcaaacatgagagaagagtgaaagaactcacttaccaaactgaggaagaccgcaagaacgttctcaggctccaggaccttgtggacaa

SEQ ID NO: 44202 - DNA, 231 bp, Zea mays
gaaaacccagccgccgccgcatcggcctcccaggtaagcagtagcgtccaccccagccgccgccatgaagcgcaacccccgcgtcacgagctcccgccggaagtgccgcaagggcacttcacggccccgtcctccgtccgccgcgtgctcatgtccgcggcgctatcgacggagctccgccacaagtacaatgtgcgttccatcccgatccgcaaggacgactagttgcag

SEQ ID NO: 44203 - DNA, 255 bp, Zea mays
ctcgagccgcttgtgcccctccctcagccgcgtcgcgtcgcatcctacgatccaaagctgtctctgctcgcagccatggcgaagaactacccgaccgtgagcgccgagtacagcgaggctgtggagaaggccaggcgcaagctccgagccctcatcgccgagaagagctgcgccccgctcatgctccgcctcgcgtggcactccgcggggacgttcgacgtgtcgtctaggaccggcggtcattcggcacgatga

SEQ ID NO: 44204 - DNA, 231 bp, Zea mays
cttggattggctagggaagagacactaacggagatgatgactgctgagacaggcacataccgttggatggctccagagttgtacagcacagtaacactgaggcatggagaaaagaagcattacaaccacaaagtagatgtctacagctttgcaattgtgttgtgggaactcctccacaataaactgcccttcgagggaatgtctaaccttcaagctgcctacgctgccgct

SEQ ID NO: 44205 - DNA, 150 bp, Zea mays
ccctccagcgcctccaccctcctcgccgcctcactccctctgaggtcgcagatccgtccggttagacgaagccgcccgcacccatggcctccggtgagctcgcctgcacctacgccgccctcatcctcagcgacgacggcatcgccatca

SEQ ID NO: 44206 - DNA, 228 bp, Zea mays
agcgccagccagactggatcgatcacagtcacctccctcatgtactcctttgtcgtcatcaccagctcgtgatagatgacccaggagtacatgagggaggtgactgtgatcgatccaaaatggcttgttgagctggcgccaaggttttacaagggtgctgaccccaccaagatgagcaaaaggaaaaggacggagaagatcgagcctctatatgatagataccacgag

SEQ ID NO: 44207 - DNA, 223 bp, Zea mays
catgttcaagaggattaatgccaaggagcatgttgttggctggtacacactggcccaaaactaagggagaacgacttggatgtccatgcattattcaacagttatgttcctaatccagtcttggtgattattgatgtccaacccaaggagctgggtataccgaccaaagcgtactacgctgtggaggaggttaaagagaatgcaactcagaaaagtcagaagg

SEQ ID NO: 44208 - DNA, 283 bp, Zea mays
gtcattgattcttgaaaaggcattcaacgttctgcgaagaaatggtgttaatgtccagatgatctcacaaggggcgtccaaggtgaacatatccttggtagtcaatgacagtgaggcaaaacagtgcgtacaagccctccattcagcgttctttgagaatggattcttgtcggaggtagagggagctgacgttccccagaacggagcctctctgaactcaaatggcgctgtctatggaaactagtcgactctgcaactgctttcttcacaatttgtgtaccat

SEQ ID NO: 44209 - DNA, 285 bp, Zea mays
ccgctccgccccagcgcatcgcccgccgccacagcgtaccgcgacctcatctatcaccttcagctttcaatcatggcggacgtcgatgacgaaccggaggttgccgccggagctcccaagaagaggacgttccgcaagtacagctaccgcggcgtcgacctagatgcgcttctcgacatgtccactgacgacctcgtccagctcttctccgcgcgcgccatgagaacgttccagaggggtctgaagaggacgcccatggcgctcatcaagaaactgcgcaaggcg

SEQ ID NO: 44210 - DNA, 162 bp, Zea mays
attgtacctacaaggagggcctggatttgagagtccccgtcccacggaagcaggtgggtggttaaagaaagcttgtgaagaccaccgcgttgtcctgctagatcagcggggaacaggattatccacaccgttgactccatcatctctttcgcaaattaaatc

SEQ ID NO: 44211 - DNA, 285 bp, Zea mays
ggaccgtcacaagcgtgtccgaggagaccgagacctacaccatcatgacgagaatgccgccggaggttgccctggaggtgacgcctccggcggtgacggtgctgcccggagcatcgagagagctagctgtgaccctgacggcgaggtccgtgaccggcacctacagtttcggagagatcgccatgaaaggcgaccgaggccacctcgtcagaatcccagtggtagctatgggattcaagtaggttaggtagaagacgactgcgaccggcgctagagagtaggagg

SEQ ID NO: 44212 - DNA, 287 bp, Zea mays
gcctcccgagccctatctatccttttctcggcacctcgcgggtctcccgtccgccccgtcccgcattcgtatcctctcctcactctcgccgccgccgcttcccctgcgccccgagccaagatgaatgttgaaaagctcaagaagatggcaggtgctgtgcgcactggggggaagggtagcatgcgcaggaagaagaaggcagtccacaagactacgaccacagatgataaaaggcttcagagcaccctgaaaagaataggagtgaacaccattcctggtattgaaga

SEQ ID NO: 44213 - DNA, 283 bp, Zea mays
ccctggtcataagctggtctatcactgagatcatcagatactctttctttggaacgaaggaggcatttggctttgcgccttcctggttattatggcttaggtacagcacctttatgttgttgtatcctactggcatctctagtgaagttggtctgatctacattgccttgccttacatgaaggcatcggagaaatactgtattaggatgcccaacaaatggaacttctcatacgattacttctattcatctgtccttgccctcctgatctatgttccaggaag

SEQ ID NO: 44214 - DNA, 286 bp, Zea mays
ggcgaccctccctccttcgctccttccgcgccgactcccggccgtcgccgccatggtgaagtactcgcaggagccgggcaaccctaccaagtcggctaaggccatgggcagggatctgagggtccacttcaagaacacaagggagacagcctttgcgcttcgcaagttgtctttgaccaaggctaagcgataccttgaggatgttattgctcacaagcaggcaattcccttccggagatactgtgggggtgttggtcgcaccgcgcaagctaagtcgcgccactcg

SEQ ID NO: 44215 - DNA, 282 bp, Zea mays
gtctatgatgttaattctatgaaatcgtttgataatcttcacaactggcgtgaagagtttctaattcaggcgagcccatcagatcctgacaatttcccttttgttctgttgggtaacaaagttgatgtagatggtgggaacagccgtgtggtgtcggagaaaaaggcaaaggcatggtgcgcctctaaagggaacatcccgtactttgagacgtctgctaaggatggaacgaacgtggaagatgccttccagtgtattgtaaagaatgctctgaagaatgaa

SEQ ID NO: 44216 - DNA, 279 bp, Zea mays
tgtgttgttcggagcgggcagcagcacacagccccatcccaatcctagtcgatcttcttcccctcctcaaggaagaaaagaagctgaaccatggggaagagaaagtcagctgctaagccacctcctaagaagcggatggacaagcttgacactgtcttttcctgcccattctgcaaccacgggagtagtgttgagtgccgaattgacatgaagaatctgattggcgaacatcttgtagaatctgtcaggaaaacttcagcacaactgttaatgcactca

SEQ ID NO: 44217 - DNA, 279 bp, Zea mays
gcattattccgcgccacgtgcttctggcgatccggaacgacgaggagcttgggaagctgttgggcggcgtgaccatcgctcacggcggtgtgctccccaatatcaaccctgttctgctgcccaagaagacggcggagaaggcgtccagtggcgggagcaaggaggcaaagtcgcccaagaaggccgctaagtcccccaagaaggcatagactgactgtccggtgtgatctgatgtttagcagtaccttgttaccagtatgcggtgatgcgtaggctgta

SEQ ID NO: 44218 - DNA, 283 bp, Zea mays
gcgaggcgcttcaagctttgcaagaaagcgaacaggcaagagaaactaaggattctcagcgaggagtggtgcttcctataagcgagtactacgaacttagcaagagggcacatgaagccgaagaacaggcgagcgagaaggtagcagaagcactggcacaggtagtgtcggcaaaggaatcagaagcaatgagcctggagagcctaaaggaagcgtccgatgaaatggacgagaagaaggaagctcttgagatcgccttggagagagccgggagggcgaacga

SEQ ID NO: 44219 - DNA, 280 bp, Zea mays
atcctccacccaatcgaaggacctagcgagcggcacgtcggcggcgatcggagaagatggtgcgcaaggcgaaggttgagttcgacgagcagccgccggataacttcgacccgaagaacccgtatgccgacccggtggcgatgctcgagtaccgggaacacctggtgcgagagaagtggatccagatcgagaccgccaagatcatccgggagcgcctccgctggtgctaccgcatcgagggcatcaaccaccaccagaagtgccgccacctcgtcgacca

SEQ ID NO: 44220 - DNA, 274 bp, Zea mays
gtgattgtgaacccaaagggagagatgaaaggttctgccatcactgggcccatcggaaaggagtgtgctgatctctggcccaggattgctagcgcggcaaatgcgatcgtctaaaggaagcagtttgtcgaagtttcatttaaaatggggacttgagaagggagttcttagttagacgagcttttgattgccctgaatgtgtttccccggctaatgcttgtgctgctggaccgtttcctgatagctttgctttgatgacatcctccccgttatc

SEQ ID NO: 44221 - DNA, 276 bp, Zea mays
cgccaccgccgagcacaagagccccgagcacctcgtccgcaacccgtttggtcaggttccagctctgcaggatggtgacttgtacctcttcgaatcacgcgcaatctgcaagtacgctgctcgcaaaaacaagccagagctgttgagggaaggaaacctcgaggaggcagcaatggtggatgtttggatcgaggtggaggctaaccagtacaccgctgcactgaatcccatcctcttccaggtcctcatcagtccgatgcttgggggataaccgac

SEQ ID NO: 44222 - DNA, 277 bp, Zea mays
cactcactgctgccattaccaaggttctggcagaggcagggaaggccaaagcagttgcttttgacgagatcgacaaggccccggaagagagagccagaggaatcaccattgcaacagctcatgtcgagtatgagacggctaaaaggcattatgctcatgttgattgtccaggtcacgcagattatgtcaagaacatgatcactggagctgctcaaatggatggtggtattcttgtcgtgtcagctcctgatggcccaatgccacaaacaaaggagca

SEQ ID NO: 44223 - DNA, 281 bp, Zea mays
cctagctgaagatctcgagtgcaacgcaacgttggcgcttggcggccagtagtagcagctaatttagcgtcgctccttcctactagacgagagatcgagaaaccatggccaagctccaagtcactcctggcgccgcgttcaccgagtgcaatgaactcaacttccagggcctgtacatgtaccacacgcccctgggtcccaaggccaaccaagctgcgatcctagagagcaaggccaagatcggcatcggtgccaccgtggttaacaactgggcagtgtat

SEQ ID NO: 44224 - DNA, 331 bp, Zea mays
  unsure (1)..(331): unsure at all n locations
cacccaagaaacacacagaagcgaggagcactacttgttggttggattctcttcagtctagcagctagtccagttaagtttcagacacacatggggagcattggcagaggcacggccaactgcgccaccgtgccgcagccgccgccgtcgacagggaagctcatcacgatcctgagcatcgatggcggcggcatccgcggccttatcccggcgaccatcattgcgtacctcgaggccaagctccaggnagctgacgtcacggacgctcggatcgccgactacttcgacgtgattgccgggacgagcaccgggccctgctcgcgtcgatgct

SEQ ID NO: 44225 - DNA, 324 bp, Zea mays
aactagttctagggctcttctcctgcagtgttcaatgctgcacggctcatgtctaccaagctatttattggtggtcttgactggggtgttgatgacgtgaaactaagagaagcatttagcagctttggagaggttactgaagcgagggtgatcacagacagggagactgggaggtcaagaggctttggctttgtgaactactccgacagtgatgctgccaaggaagctatttctgcaatggatggcaaggaaattgatgggcggcaggtacgtgtcaacatggctaatgagagacctgctgggaaccgtggtggtggtggctat

SEQ ID NO: 44226 - DNA, 327 bp, Zea mays
aattgctcatacccagattaggaagatgaagggtttgaaacagaagaaggctcacctgatggagattcaggtcaatggtggtaccattgctgacaaggtggactacggctacaaattttttgagaaagaggtccctgttgatgctgtcttccagaaggatgagatgattgacatcattggtgtgaccaaaggtaaaggttatgagggcgtggtcactcgttggggtgtcacccgccttccccgcaaaacccacaggggtctccgcaaggttgcttgtatcggtgcatggcatcctgctagggtctcctatacagttgcccgtgctgg

SEQ ID NO: 44227 - DNA, 327 bp, Zea mays
aatgagattagtatcaaggccatgggacgggccataaataagacagttatggttgttgaattgatcaagagaagggttggaggtcttcatcagaacactgctactgaatctgttgatatcacagacacatgggaacctttggaagaaggccttctcccactagagacaactcgccatgtgtcgatgatcactgtgacactgtcaaagaaccctctggatacatcatctccaggataccagccacctatcccagctgaagaggtgaaacctgcttttgactatgatcatgaagaatcgtatcccactggtcgtggaagaggacgtggt

SEQ ID NO: 44228 - DNA, 327 bp, Zea mays
acaggggagagagagagagagaagagagagagaagagagagagagagagaggagtgggagacccgcgagaggctgccgtgtagggaccgtagactcagcgactgcgaaggagggataaggggatggccgggatcggaccgatcaggcaggactgggagccggtcgttgtgcggaagaaggcacccaccgccgccgccaagaaggatgagaaggccgtcaacgccgcgcgccgcgccggtgcggagatcgataccatgaagaagtacaacgctggtacgaacaaggcggcatccagcggtacatccctcaacaccaagcgcctcgacg

SEQ ID NO: 44229 - DNA, 322 bp, Zea mays
gggggaacaaacatatcgtacatctgctcccgatactatagggctccagagctcatatttggtgccactgagtataccacagcgattgacatttggtctgctggatgtgttcttgctgagcttatgctagggcagcctttgtttccgggtgaaagtggtgtggaccaacttgtcgaaatcatcaaggtcctcggtacgccaacaagggaagaaattaaatgcatgaacccaaattacacagagtttaagttcccacaaatcaaagcacacccatggcacaaggtattccacaaaaggatgccgccagaagctgttgatctgg

SEQ ID NO: 44230 - DNA, 325 bp, Zea mays
actccggcggcgcggacaagcccggcagtggcggcggcgcggtgaagacgccgtcggacttcctcaagtccatcaggggccgccccgtagtcgtaaagctcaactccggcgtcgactacagaggtatattggcttgtctggatggttatatgaacatcgcaatggagcagaccgaggagtacgtgaatggccagttgaagaacaagtatggcgatgccttcataaggggcaacaacgttctgtacatcagcacgacgaagcggacccttgccgatggcgcgtaccggattggattccctctgtcctcctcccgtgtgtgtgccgt

SEQ ID NO: 44231 - DNA, 326 bp, Zea mays
tgtcaactccactcctcttggccgccgcatcacctcctcttcgccgctgccgccaccgctccaccgggcagccagccagccatggatgaggagtacgacgtgatcgtgcttggcacggggctcaaggagtgcatcctcagttgtctcctttccgtcgacggcctcaaggttttgcatatggacagaaacgactactatggaggctattccacctcgctcaaccttaatcagctctggaagaggtttagaggggaatacaagcccccagcacatctaggtgcacgtggagactacaatgtggacatggtgccaaagtttatgatggc

SEQ ID NO: 44232 - DNA, 327 bp, Zea mays
acacttcccgcgtctcgtgcttcgcgctgtcgcaggacgggaggctcattgcaactgctagcaccaagggaacacttgttagaatctacaatgcagctgaaggcaatctcttgcaggaagtaaggagaggtgctgatagagcagaaatatatagcttggctttctcgaataatttgcagtatttggctgtgtccagtgataaaggaacaatacatgtcttcaatctaaagataaatgtgggatcgactgcaaatgataaacctatacctgctccagatcctgaagtttcgcatataagcccccctctttcgttcattaagggtgtgt

SEQ ID NO: 44233 - DNA, 327 bp, Zea mays
gcccgcggcaaccgccgccattctaccccaggtcggacggacccttgccggagacgagcacacgccacagcaggaattatcgggcgtagagcagcgcgaagcgagagatccaatggcggcggcggaggggcagtgggtgctcatggcaacggggcggacgccgaccaacattgcggtgatcaagtactgggggaagctggacgaggcgctcatcctccccatcaacgacagcatcagcgtaacgctcgaccccgaccatctctccgccaccaccactgtcgccgtcagcccctcattcccttccgaccgcatgtggctcaatggcaa

SEQ ID NO: 44234 - DNA, 308 bp, Zea mays
aaggataagaagaaggaaaatgctgagcgtgatgagcgtgccaagaagtcggtgagcatcaacgagttcctgaaacctgctgaaggagaaaggtactatggcggccgtggccgtggaaggggccgtggggagcgtggtggttttagaggcggatacggagggggatacagtcgtggcccagctgctgctgctccatccattgaagatcaagctcagttcccaagccttggtgggaagtgaagggcgcccagctgctgctgtcaccgagcgttgtgttgtctgctgttgtcatatttaaattttgtccg

SEQ ID NO: 44235 - DNA, 309 bp, Zea mays
accacaacatttgaagtgagatcaagagggtacatggctccagaatattactacagaggtgaagtctcaaccaaatcagatatatacagtctgggcatccttataatcgagatagtaacagggttaaaagtcgattctaacactgtagacttatcgtctaagaaccttatcgacaatgtacaaaggatttggacaaaaatgccacagatagcttctaagtacccgacgttggaagcaagcaacctccaacaagttaaaagatgcattgatgctgggttaaattgtgtgagcgaaaaaccaagagaaagg

SEQ ID NO: 44236 - DNA, 311 bp, Zea mays
ggggacgcggaggaagatggggctcgcgttcgggaagctcttcagccggctcttcgccaagaaggagatgcggatcctcatggtcggcctcgacgccgccggtaaaaccaccatcctctacaagctcaagctcggcgagatcgtcaccaccatccccaccatcggtttcaatgttgaaactgttgagtacaagaacattagcttcactgtctgggatgtcgggggtcaggacaagatcagacctctttggaggcattacttccagaacacccagggtcttatctttgttgtggacagcaatgaccgtgacg

SEQ ID NO: 44237 - DNA, 303 bp, Zea mays
gaaggttgcttgcaagttcttgcagcctggagcatatgatctggttggttacatagtgtatgagatcgaccagcacccttaccagaatgtattctacaatggcactatcgaggttgttgaggctggaggcttactcagtgttgagtctgtgttcctcatcacccttggatttgcacttcttggtctgtttggattgtgggcatatggccaggttcagcagctctcgaagaaaacaaagaaggcacccaaggtggagctcggaactggaacaactgatgccaacatcgatgagtggctggaggg

SEQ ID NO: 44238 - DNA, 304 bp, Zea mays
agaaactgaggaggacaagaaggcagctgatgagcgtgctgccgctgccaaggcctcttctaaaaagaaagaaagtggtaaatcctccgtccttatggatgtaaaaccatgggacgatgagactgatatgaagaagctggaggaggctgtccgcagtgtccagatggagggtctgacttggggagcatcaaagcttgtgcctgttggatacggcatcaagaagatgactatcatgttgacaattgtcgacgatcttgtgtccatcgacactctaattgaggacaccttacgcaagagcccatca

SEQ ID NO: 44239 - DNA, 301 bp, Zea mays
acttgctgaagcacatagaggtgttctttatgttgatgaaataaatctattggatgatggcataagcaatctacttctgaatgtcttgacggagggagttaacattgtggaaagagagggcattagctttcgccatccctgcaaaccacttctaattgctacttacaatccagaggaagggtctgtacgtgaacacttgcttgatcgtattgcaattaatttaagtgctgatcttccaatgagttttgatgaccgcgttgaagcagtggatattgcaacacggtttcaggagtctagcaaa

SEQ ID NO: 44240 - DNA, 301 bp, Zea mays
acacagctttatctgttggatccaactgaagaaaagccgacctggagaattttgaatgttccagggcaccctccccgattcgcctggggccacagcacctgtgttgttggaggaacaaaagcgatagtgcttggtggacaaactggggaagagtggatgcttacagaaatacatgagctctctttggcaaacaactcagtctgagttcatggtggacaaaccggggaagagtggatgcttacagaaatacatgagctctctttggcaagcaactcagtctgagttcatggtggccaaaccg

SEQ ID NO: 44241 - DNA, 296 bp, Zea mays
  unsure (1)..(296): unsure at all n locations
aaacacttgcgccgccactgcctcacaggtaaggccgccatggtctccggttcgggcgtgtgcgcgaagcatncagtggtggacgcgcgccaccacatgctgggccgtctctcctcgatcatagccaaggagctgctcaatgggcagaaggtggtcgtcgtccgctgcgaggagatctgcatgtcgggcggcctcgtccgtcagaagatgaagtacctccgcttcctccgcaagcggatgaacaccaagccgtcccacgggcccatccacttccgcgcccccgccaagatcctgtg

SEQ ID NO: 44242 - DNA, 299 bp, Zea mays
ggcggattcgggacagtctataagggaaccatccgaagcgggcgagaggtcgcggtgaaggtcctctccgccgagtccaggcagggcatcagggagttcctgacggagatcgacgtcatcagcaacgtcaagcaccccaacctcgtcgaactcatcggctgctgcgtcgagggaagcaaccggattctggtgtatgagtacctcaagaacagcagccttgaccgtgcgctgctggcttctaacagtgagcctgccgacatcacctggagcgtcaggtctgctatatgcctcggagtcgc

SEQ ID NO: 44243 - DNA, 301 bp, Zea mays
ataagagcggcggcgcgggcggacaaggagcaggcggaggaggagctgtgccaagccacaatgggtatctcgcgtgactcgatgcacaagcgccgggccaccggtggaaagcagaaggcctggaggaagaagcgaaagtatgagcttggtcgccagccagccaacaccaagttgtcaagcaataagacagtgaggagggtccgtgttcgtggaggtaatgtgaaatggagggctcttcgccttgatactggtaactactcatggggaagtgaagctgttacccgcaagacccgtatcctcg

SEQ ID NO: 44244 - DNA, 295 bp, Zea mays
gctagcatccgcagttcccccgcgcccgagacgcaaccccgcgccaggagtaagtttgttcttttatcgatattatcgatatggcgagggaggagaatgtctacatggccaagctggctgagcaggccgaaaggtatgaagagatggttgagtatatggagaaggtggctaagactgtagatgtggaagagctcactgttgaggagcgtaacctcttgtcggtcgcatacaagaatgtgattggggctcgccgtgcttcatggcgcattgtctcttctattgaacagaaggagga

SEQ ID NO: 44245 - DNA, 296 bp, Zea mays
atgcaagcattttgagattggtggagacaagaagggcaagggaacatctctcttctaagtttctcatcgcccatctcgatgttggatcgaacctgtgggtctactactgttctaaaaactcgtcaaatttcaatgttactagtagttctgaaagcaggtcatgctgtgtatcagattccaatgcctgacatttgcgctgagtgtgggttgacttttggctaaatgaagttttgcaccctgaatcttcattgaatgtgttgtgtgtttgtttgattttgttctgcgattgccttagt

SEQ ID NO: 44246 - DNA, 182 bp, Zea mays
gtgctgaggctttcgttggtctcttcgccggcgacgagcacccagcagttctgtagaaatggctgatggtgaggacatccagcctctagtctgcgacaatggcactggaatggtcaaggctggttttgctggcgatgatgcaccaagggcggttttccctagcattgttggccgtcctcgcc

SEQ ID NO: 44247 - DNA, 293 bp, Zea mays
ccgacgttttgcatctccaagcagcatcgtctcctccccagatccatcaattcgttcggaccgcccttctcgtgtccccgttccaaagcgcggcaggctgagcggttccgtcagatttagagtcgtcatgaatcccgagtatgattaccttttcaaacttctgcttatcggtgattctggtgttggaaaatcatgcttgcttctcagatttgcagatgattcatatctggacagctacatcagcacaattggagttgactttaaaattaggacagtagagcaagacgggaaga

SEQ ID NO: 44248 - DNA, 294 bp, Zea mays
tcggctcgaggcagaaacgacatcacactaggctgtttgctaataaccacaatgatcagcgtacagttgatagaagcggaaacatactgcctggcaccgtggttgattcgaagatttgccatcctactgaatttgatttctacctgtgtagccatgctggcattcagggaacaagccgccctgctcattaccatgtcctgtgggacgagaacaagttcacagctgatgagctgcagactctgacaaacaacctatgctacacgtacgctaggtgcacccgctccgtgtcaattg

SEQ ID NO: 44249 - DNA, 295 bp, Zea mays
atgaattgtgtgaagtgcattaggatcctatccccccaagaagtgcagcagatgagcttagatggtgatttggggaacaatgtcctctccaaccaggcttgcagcagctcagatggtgggaatgcctggaagcctcgccgcgaccagaaccctggtaacccttccatcgggttctacgaccaatttgagtgacctgatcacggaaattcgagatgagaattatagctgcaaaaagcaaccagtgtccagccatctacagaattatcgccacggaaagggtaagcagatgcaggat

SEQ ID NO: 44250 - DNA, 147 bp, Zea mays
agggctttcgcgccgccgccgccgccgccgccgcagccgcaacaatgccgtcgcacaagaccttccggatcaagaagaagctggcgaagaagatgcgccagaaccgccccatcccctactggatccgcatgcgcactgacaatacca

SEQ ID NO: 44251 - DNA, 288 bp, Zea mays
atgggctgcagattctgtgctactggaacaatgggcttcaaaagcaatctgtcttctggagaaattgtagagcagctggtccatgcatctcgctattctcagatccgaaatgttgttttcatgggaatgggggagccgatgaacaactataatgctttggttgaagcaatcggagtgtttactggatctccttttcagctttcacctaagagaattactgtatctactgtcggaatcattcatggaatcaacaaattcaatggtgaccttccaaaggtgaatttagca

SEQ ID NO: 44252 - DNA, 289 bp, Zea mays
gagcaatgcatacttcaagcgtttccaggtgaagttcaagagaaggcgcgctggcaagacagactacagggccaggataaggctgattaaccaagacaaaaacaagtacaatacacccaaatacagatttgttgtgcgatttaccaacaaggacatcacagcacaaatcatatctgctagtatagcaggtgatatggttcttgcttctgcttactcgcatgagttgccacgatatggtctcgaagttggtctgaccaactatgcagctgcctactgcactggccttctg

SEQ ID NO: 44253 - DNA, 292 bp, Zea mays
ctgatttctatagtgtacttggtgtctcaagaaatgctagtaaatctgaaatcaagagcgcctatcggaagcttgctaggagctatcatccagatgtaaacaaagatcctggtgctgaacaaaagttcaaggatatcagtaatgcttatgaggttctgtctgatgatgagaagcgatcgatctatgataaatatggagaagcaggtctgaagggtgctggcatgggcacaggagattactcaaacccgtttgatctctttgagtcattgtttgaagggtttggtggaatggg

SEQ ID NO: 44254 - DNA, 288 bp, Zea mays
atttaatcttgcttacagattcaagcagtttagaatgatgagcggactaagcacaatgaagctgcttccatatgtgacaaagtagtttttagtaaggtgaaagagggtcttggtggaaatgttagagttattttatctggagctgctccacttgctacccatgttgaagaatacttgcgtgtggtcacatgtgcacatgtcgtacaaggatatggcctcacggaaacttgtgctggatctttcgtctcgctaccagatcaaatgtccatgataggaactgttggcccc

SEQ ID NO: 44255 - DNA, 279 bp, Zea mays
ccttaacacaacacagaggaagcaggcggcggcgatcgggcgatggcatggcgggcgagcctgtctcggagcctaaaggagatccgcgtcctcttctgtcagtcctccccggccagcgccgccgcccgaagaactatggtgacatcaaggctcgcaacccctccctcgccttccttgtccgcgagtgctccggtgtccagccctagctctgggcgcgctacgatatgggtctcgagatatgcgtgaacttggatggcctgacggaagcacagattgata

SEQ ID NO: 44256 - DNA, 282 bp, Zea mays
tatctcctcgcattttccttgcaaccgattgcctatccccctcccaaccaaagaccgatggcgcccaaggccgagaagaagcccgcggcgaagaagccggcggaggaggagcccgcggccgagaagacgaccgccgggaagaagcccaaggcggagaagcgggtccccgcgggcaagtccgccggcaaggagggcggcgagggcaatcgtagcaagaagaagggcaagaagagcgtggagacgtacaagatctacatcttcaaggtgctgaagcaggtgcac

SEQ ID NO: 44257 - DNA, 191 bp, Zea mays
ctccttcaccaaggcgtcttcactgtctgagcaagtcactatcagcctgtcgtccgagcttccagtggtggtcgagtacaagatcgctgagatgggttacattagactttacctggcccccaagatcgacgatgacgaggagatgaagccctgatggcctgtgacgacataatgctcgtgttgcctgctct

SEQ ID NO: 44258 - DNA, 230 bp, Zea mays
gcaatgaccgtgaccgtgttgttgaagccagagatgagctccacaggatgctgaacgaggatgagctacgtgatgctgtgctgcttgtttttgccaacaagcaagatcttcccaatgccatgaatgctgctgagattactgacaagcttggattacactccctgcgccacgacactggtacatccagagcacttgtgccacaactggcgagggtctgtatgaaggcctgg

SEQ ID NO: 44259 - DNA, 290 bp, Zea mays
aattcaactccgcatctgaatcggcactcggcagcgcgccagctccatagcgaggagatggcgctcacaagaatcggtcttgctggccttgcggtcatggggcagaaccttgccctcaacattgcagagatagggttccccatctctgtgtacaacaggacaacctccaaggtggacgagaccgtgcagcgtgccaaggcagaaggaaaccttcccgtctacggcttccatgaccccgcgtcctttgtgaagtccattcagaagccacgggtggtgatcatgctcgtcaa

SEQ ID NO: 44260 - DNA, 288 bp, Zea mays
ggtgctagggattgtgaggtaaagcgtgatggcagcgccgccggcgagggctcgagccgactacgactacctaatcaaactgctcctcatcggagacagcggcgttggaaaaagttgcctcctgttacggttttcagatggatcattcaccactagcttcattaccactattggcattgacttcaagataagaactgttgagttggatggcaaaaggattaagttgcagatctgggatactgcaggccaagaacgtttccgcacaattaccactgcctactacagggg

SEQ ID NO: 44261 - DNA, 308 bp, Zea mays
ctcaaggcatggaagaaagaggcactgccacctgttgaggttcctgctgcagcaaaatggaagttcagaagtaagccttctgaccaggttatacttgactacgactatacatttacgacaccatattgtgggagtgatgctgtggttgtgaactctggcactccacaaacaagtttagatggatgcggcactttgtgttgggaggatactaatgatcggattgacattgttgccctttcagcaaaagaacccattcttttctacgacgaggttatcttgtatgaagatgagttagctgacaatggtat

SEQ ID NO: 44262 - DNA, 284 bp, Zea mays
aactgttcaaacttctgtaaataatgtcatcaatgatgtactcggttcctgtgaggtattcgaggaaaagcaagtaggcaatgaaagattcaacatatttagtggctgcccttctggccagacagcgactattgttctccgtggtggtgcagaccagttcattgaggaagctgaacgaagtctccatgatgccatcatgattgtgaggagagcacttaagaactcgacagttgtgccgggtggtggtgctattgatatggaaataagcaagtatctcaggcagc

SEQ ID NO: 44263 - DNA, 285 bp, Zea mays
acgccgcggtggccaccatcaagacgaagcgcaccatccagttcgtggactggtgcccgacggggttcaagtgcggcatcaactaccaggcgccgacagtggtgccgggtgccgacctcgccaaggtgcagcgcgcggtgtgcatgatctccaactccaccagcgtcgtcgaggtgttctcccgcatcaacagcaagttcgacctcatgtacgccaagcgcgcgttcgtgcactaatacgtcggcgagggcatggaggagggggagttctccgaggcacgcgagg

SEQ ID NO: 44264 - DNA, 172 bp, Zea mays
gcaaagagatgagtagcggtggggcaccctgtttatttcgacgtaccctttattgctatagcattgtaataagcgatgggcatgcttgtagttgaataagtacaatgtccatgtattcaaacatcagcgtcatgtttatttgtttgttaaaaaaactatgttgcctttttgg

SEQ ID NO: 44265 - DNA, 283 bp, Zea mays
aagcggcggcgcgggcggacaaggagcaggcggaggaggagctgtgccaagccacaatgggtatctcgcgtgactcgatgcacaagcgccgggccaccggtggaaagcagaaggcctggaggaagaagcgaaagtatgagcttggtcgccagccagccaacaccaagttgtcaagcaataagacagtgaggagggtccgtgttcgtggaggtaatgtgaaatggagggctcttcgccttgatactggtaactactcatggggaagtgaagctgttacccgcaa

SEQ ID NO: 44266 - DNA, 283 bp, Zea mays
catcgttctcaagatcaatggggaggacaccagcgtcattagcccaacccttggattcaacatcaagaccatcaagtaccacaaatactctttgaacatatgggatgttggaggacagaagacaatcaggtcttactggagaaactactttgagcagactgatggattagtttgggttgttgatagttcagacataaggaggcttgatgattgccgtgctgaactccacaatctcttgaaagaagagagactagttggagcttcattgttggtttttgcaaat

SEQ ID NO: 44267 - DNA, 284 bp, Zea mays
acctaacgtaccctcttccgcgccgccatgtctgggaggaagaagacgcgggagcccaaggaggagaacgtgacgcttggccccgctgtccgcgagggagaacacgtctttggcgttgcgcacatcttcgcctccttcaacgacactttcatccatgtgacggatctgtctggaagggagacgctcgtccgcatcactggtggcatgaaggttaaagctgatcgtgatgagtcctcgccttatgctgctatgcttgcctcacaggatgtcgcgcaaagatgcaa

SEQ ID NO: 44268 - DNA, 286 bp, Zea mays
ccgtcccaagaggagaaactccggccggcgacgcgggggaaaatggggaagacgccggtgcggatgaaggcggtggtgtacgcgctgtcgcccttccagcagaaggtgatgccggggctgtggaaggacatcaccaccaagatccaccacaaggtcaccgagaactggatctccgccacgctcctcctcacccccgtcgtcggcacctaccaatacgccatgtggtacaaagagcaggagaagctttcccacagatactaaatgggatgtcctccaagttgctgcg

SEQ ID NO: 44269 - DNA, 287 bp, Zea mays
ctcgagccggattgatatttctgaggatggatttgtgagcctacttacttcagatggcaaccactaaggatgatcttagactcccaactgatgagactcttgtggcccagattaaggaagggttcgaaagcgggaaggatcttgttgtgactgtccagtctgcgatgggggaggagcagatctgcgcgctgaaggatgttggccccaagtaacttccttggctttggagacggaaccctactctatctcaacttaaatcggaaaagaagtgtatcaccaaaggattg

SEQ ID NO: 44270 - DNA, 281 bp, Zea mays
caaatccccaaagcctccgacccccttcctctctccctccgccgccgctgcgcacgcagggtaacaagcgacatgggcgtctacacctttgtgtgccgcaacaacggcggcgagtggaccgccaagcagcactccggcgagatcgaggcttccgccgctaccccatacgagctgcagcgccgcctcgtcgctgccgcctccgcggccgactctgcctacggcgtccagtcgtccttctccatggtcacccccagctccgccgtgttccaggtgatcgtcgg

SEQ ID NO: 44271 - DNA, 276 bp, Zea mays
agcgcaacccttccctgacagcggcggcgacatggtgctcgaggcgacgatgatctgcatagacaactcggagtggatgcggaacggcgactacgccccgtcgcggttccaggcgcaggccgatgccgtcaacctcatatgcggtgccaagacccagtcgaacccggagaacacagtaggcgtgatgacgatggccgggaagggcgtccgcgtgcttgtcactcccaccagcgacctcgggaagattctcgcctgtatgcacgggttggaagttgg

SEQ ID NO: 44272 - DNA, 273 bp, Zea mays
gagacgccgccgccgcaagccgtccgccttgcccctcgaaggcttggtcctccttgtatcccgacctcctccgccacagagccgtttccccgctagagttatcgttcctctgcagcgatggcgatcaagcggaccaaggcggagaagaagatcgcgtacgacaagaagctgtgcagcctgctccatgagtacaccaaggtgctcatcgccctcgccgacaacgtcgctccaagcagctccaagacatccgctggtgcctcaggggcgactcag

SEQ ID NO: 44273 - DNA, 282 bp, Zea mays
cgctacagctcccgtctctccgccgcttgcttggaaaacgaagaaaccctcctccaccaacccaatccagctacatccgtctgggtgaactccagggccaggagcagttcgccgccttcgttcgcatcacctacgcggttcgatccaactggcaggaaggaacgtgatggccaagacgagctcgttcaagctggagcacccccttgagaagaggcagtctgaggctaatcggatcagagagaagtaccctgacagaattccagtgattgttgagaaggctga

SEQ ID NO: 44274 - DNA, 276 bp, Zea mays
acaagattgaacaagaagagagacacagatgaaatggtggatatattgattgctgttgtattcagtgctttgcgtgataaatattctattgaaggacatgaagagtggatcacagagctagactcatccactgaagaaaagttttcacgccatctaatcattcgtatacccaagattgcatttaaagacaactcccatgttggtgcgtttgtctgtgaggtctgttcacaaattgcagctcagcggacaacaaatcatggacttgataaactttat

SEQ ID NO: 44275 - DNA, 94 bp, Zea mays
ctccaaattcccaattgtcaacctctcctcagagttcgagtgaccatgtcggggcgcggaaagggctggaatgggctgggaaagggcggcgcga

SEQ ID NO: 44276 - DNA, 282 bp, Zea mays
caacaacccactgatagcagagatcaggaagaagatccccagcgagttccttcgaagcattctgccgaacggtagccatgaccacccgctaaagatgccccttccaaatgtcatcaaatcagatgtgttgaaaaaggctccggagtttaagtttggctggaggactgacgaagagttcgcgagagagacacttgcaggcgtcttcgagcgcaccgtgttccctgcaaagtacgcgctggggatgtcggcagacgtgtacaagacctggaatttcaacgagca

SEQ ID NO: 44277 - DNA, 180 bp, Zea mays
ggagaaccccatgcgggaacttcgcatccgcaaactctgtctcaacatctgtgttggggagagtggagacagactgacgcgagcagccaaggtgttggagcagctcacagggcagacccctgtgttttccaaaggtgagtagtcacaaggacatacagggtttgcctgcttgggtcgctt

SEQ ID NO: 44278 - DNA, 279 bp, Zea mays
gtcggattgataacttcattgatggtctatctgctctgctggacgagctcaatgaagagacttttgagcaccatagaagtggtttaatagctgataaactggaaaaggaaccttcacttagctaccaaactagtgattattggtctcagatcgctgataaaaggtacatgtttgatatgtcaaaactggaagctgaagagcttaagacagttcagaaggctgatgttatagcttggtacaacacatacataagatcatcgtccccaaagcgaagacgtc

SEQ ID NO: 44279 - DNA, 278 bp, Zea mays
cgctgatcaagcatgagggtacccagtctgctggcagagctggtaagaagcctcggcggaacatcaacgtgcacagcgcatacctccacgtgctcggggactccgtccagagcgtcggggtcatggtgggcggggcgatcatctggtacaagccggagtggaaggtcatcgacctcatctgcacgctcgtcttctcggtggtggtgctgttcaccacgatccggatgctgcgcacatcctcgaagtgttgatggagagcacgccccgcgagatcgacg

SEQ ID NO: 44280 - DNA, 274 bp, Zea mays
ccctgaggtgctcgacctttctgaggaggacctgattgagaagtttgccactggtgtctccatggttgcctccctgtcactggcgatctcgtacccgacccttgctgctgtgccccacatgttcatcaatgggtacaagaatgtgcttgctgttgctgtcgagacagactactcatacccacatgctgacaagatcaaggagtacctcaaggacccaagcaagtttgctgttgccgccccggttgctgctggggactctggcgctgcagctgct

SEQ ID NO: 44281 - DNA, 142 bp, Zea mays
ctttaccattcctccccaaaacacatcctgcgatcctcgaagcctccgccgagcatcgatcatgtcggcctactgcggcaagtacgcggatgagctcatcaagaatgctgcctacatcggcacccctggcaagggtatcctt

SEQ ID NO: 44282 - DNA, 270 bp, Zea mays
caacgtatgaccttctacacgcggaccatctctttctgagctttgagaacagatggtccgcgtgcagaaggtcataaagagatgcaaactggctgcagttttcgccgaggtcgaccgtgtactgaggccacagggcaagcacatcgtgagggacaccgcggacacgataaatgagctggagagcatggccaagtccgtgcagtgggaggtgcggatgacctacaccaagggcagcgagggcctgctctgcgtcgagaagtcgatgtggcg

SEQ ID NO: 44283 - DNA, 276 bp, Zea mays
gtcttgtgttgttcggagcgggcagcagcacacagccccatcccaatcctagtcgatcttcttcccctcctcaaggaagaaaagaagctgaaccatggggaagagaaagtcagctgctaagccacctcctaagaagcggatggacaagcttgacactgtcttttcctgcccattctgcaaccacgggagtagtgttgagtgccgaattgacatgaagaatctgattggcgaacatcttgtagaatctgtcaggaaaacttcagcacaactgttaat

SEQ ID NO: 44284 - DNA, 273 bp, Zea mays
gtgattctctgggaggtaatcactcataagcattgttaacttatggttccggtaaggtatatgttgtccatcagaagataacaatccttatgagtgattctctgggagggaatgcgaagaccttgatgtttgtgaatgtttcaccagcagagtctaacttggaggagacttacaactcgctcctgtatgcttcacgcgttcgatgcattgttaatgatacgagcaagcatgttgctccaaaagaaatcatgagattgaagaagttgatcgcct

SEQ ID NO: 44285 - DNA, 271 bp, Zea mays
cctgacgaccgtcgaataattttgtcggcgtggaatccttcagatctcaagaagatggctcttcctccttgccacatgtttgcacaattctatgtggaaaatggggagctatcttgccagatgtatcaacgctctgcagacatggggcttggtgttccattcaacatcgcatcatattctctcctgacatacatgattgctcaagtttgtgatctttctcctggagattttgtccatgttataggggatgcgcatgtctatagaaaccatg

SEQ ID NO: 44286 - DNA, 272 bp, Zea mays
ccttggcgacgcagaggatgtcagggaagtctcgggaacatacggcgcatttgaaggtgccattacgctgacctcgctcaggctcgtcaccagcagcagaacctggggcccctggggggtcgagaacgggacgcgtttctccatcacggcgcccaacggcagcagcatcgcgggattctatgcgcgggcgggaaccaggctcgtcgacgctatcggtgtttacatacgtccagtggtgccaggcaggcctcggtgaacaagcgagcggagct

SEQ ID NO: 44287 - DNA, 163 bp, Zea mays
ctcagcgccgcgcttgcgtttccttctcttcgcttccaagatgtcgcagcgagggcgtggaggttcggctggtaacaagttccggatgtcactgggtctaccagtggcagctactgtgaactgtgccgataacactggagccaagaacctgtacatcatttct

SEQ ID NO: 44288 - DNA, 220 bp, Zea mays
gctttgggcatttcgcaattgctaatgatgatgtgtacaagttagctgagaatatcaaatccaagggtggtaagatcacccgccaacctggtcctgtcaagggaggatccactgttattgccttcgcacaggatcctgatggctacatgtttgagcttatccagagggctgacacacctgagcctctttgccaggtcatgcttcgtgttggtgaccttga

SEQ ID NO: 44289 - DNA, 319 bp, Zea mays
gaagatgactatcatgttgacaattgtcgacgatcttgtgtccatcgacactctaattgaggaccaccttacgcaagaacccatcaatgagtacgtccagagttgcgacattgtggctttcaacaagatctagagttcagtttctgagtttgggcaacggcagcggctcagctcgtcaagtttgtgctgggatgccagtttatcccttctagtctattacagaaacgttgttcggagctgagtctattataaacatcttggtctgagtttattgttgagtggtgccagtttttttcaatatacatttatcttaaaaaca

SEQ ID NO: 44290 - DNA, 306 bp, Zea mays
ggctcaccacaccaaccaacaagcaaaaattccccaatcctctcgtctccgcggcgaagatgtcggggcgcggcaagggcggcaagggcctgggcaagggcggcgcgaagcgtcaccggaaggtgctgcgcgacaacatccaggggatcacgaagccggcgatccggaggctggcgcggcggggcggcgtgaagcgcatctcggggctcatctacgaggagacccgcggcgtgctcaagatcttcctggagaacgtcatccgcgacgccgtcacctacaccgagcacgcgcgccgtaagaccgtca

SEQ ID NO: 44291 - DNA, 298 bp, Zea mays
attatactgttcccgttctttcacagggggcactggactcgaataagtgagccggtcggtggccgcttgtcctacaaacctccaatctatgacataaacgcaccagatctgtacatccctttcatggcatttggaagcttcatcatcctttcagggtttacattgggtttcatgggaaagtttactccagcagctataaatctgcagtttacaagggcgctcatcggctggggcttccagctcatggtcctgaaaggtctgctctactcgatgggtggtggcgaggtgccactgctcg

SEQ ID NO: 44292 - DNA, 298 bp, Zea mays
tacggaggtgccggaactcagttcggcatgccgccttttcaacaaccccctatcatcacacatccggtgtctggacaatcattggaccgctccactgcagcggcggatggatcacagggttctgcaacttctgtccaagaccaattgatgccattgggtgtgataggagggcaaatgatgtcgtgggcacctcgccatccaggcatttggccaccgatgcaaacacagatgtcaccgccgatgccgtggggatttcctcctcgtgggcagtcacaatcaccaggattgccctcacact

SEQ ID NO: 44293 - DNA, 187 bp, Zea mays
tgagagagatgagtatcggtggggcagactgtttatttcgacgtacgctttattgctctagcattgtaataagcgatggggatgcttgtagttgagtaagtacaatgtccatgtattgaaacatcagcgtcgtgtttatttgtgtgttaaaaaaactatgttgccttttgggaatagaaaaaaagaa

SEQ ID NO: 44294 - DNA, 293 bp, Zea mays
cccagaagatccaagtgaccctacacattcatgtgctatgagttctgataattttgttcagataactggtggtgctgaagctgttaaaaaagcactgtttggagtatcaaccatcatttacgagcacccatgaaaagagaacattcctcttgaaacttcaattcctgatcctactccaagcattataatcccttcagaacttcctgtctatcctgctagtaacttttactcggccccagatgctgctataccttctgtacatccaagcatgtctgtcttaggggcaacacgtc

SEQ ID NO: 44295 - DNA, 290 bp, Zea mays
acgcattcctcccatctcccaagacctcctcagacccgagaagcgcactgcggccaaggacgccaccggcactggagctggagggaaggcgaagaagggagcggccggtcgcaaggccggcgggccgaggaagaagtcggtgacgaggtccgtgaaggccgggctccagttccccgtcggccgcatcgggcgctacctcaagaagggccgctacgcgcaggcgatcggcagcggtgcccccgtctacctcgcggccgtcctggagtacctcgccgctgaggtcctggagc

SEQ ID NO: 44296 - DNA, 290 bp, Zea mays
acaagtctcagtgattggcaaggctggtggtgacatgtggaagtccttgtctgatgccgagaaggctccctacgtatctaaggccgagaagctgaaggttgagtacacaaagaagatggacgcctataacaacaagcagtctggaggacccacagagtctggtgattctgacaagtccaagtccgaggtcaacgacggggacgaggagggtgatgagtgatggatgacgggtgaaactctgggctgcccaagtgcttgcagtcagcagggaaatctcatcgtcgttgggc

SEQ ID NO: 44297 - DNA, 289 bp, Zea mays
acaagcctcagatctcagtcacctgcgccgccgcttcgttcgtgtggaggggagaagagaggaaatggcggcgaccgagggcgtgctcctggggatgggcaaccccctcctcgacatctccgccgtcgtcgatgacgccttcctgacaaagtatgacatcaagctgaacaatgctattctcgctgaggagaagcacttgcctatgtatgacgagttggctagcaagagcaatgttgaatatattgccggaggagccacccagaactctatcagggttgcccaatggatg

SEQ ID NO: 44298 - DNA, 290 bp, Zea mays
acatcctcggggtgcccaagtcggcgtcccaggacgacctcaagaaggcctaccgcaaggctgctatcaagaaccaccccgacaagggcggtgaccccgagaagttcaaggagctcgcacaagcctatgaggttttgagtgatccagagaaacgcgagatttatgatcagtatggtgaagatgcccttaaggaaggaatgggcggtggaggatcccatgttgatccatttgacatcttctcatcattttttggaccctcttttggaggaggtggtgggagcagcagggga

SEQ ID NO: 44299 - DNA, 289 bp, Zea mays
actaggtgagcagcttgatcttctccagagggaactacaagcaagggagctctcgcaaatgcaacttaaagatgaagttataagaatcgagaccgacatcatggatgcagttgccaaagctgggtctaggtctgacaaagataatgagcttttaaagatcttatctgatgtttcaccaaggaatgtccagaacctcaacaaccttttgaatgctaaggatacagaaattgcgaggttgagagaggaaatcagaatattgtctgctcactggacgaacaaaaccaaggaa

SEQ ID NO: 44300 - DNA, 283 bp, Zea mays
cttgtacattcaacattggatcagtgcgacagtgctgattttaccctagaagttttcttcaatatgaaaaatcacacagtgtatgtgaagaaaaggccttacctgaaagtgtttcttgagaaggttgctcagatgtttgagcttgtcattttcacagctagtcagagaatctatgctgagcaacttatagataaacttgatcctgatggaaaatatatctcacggcgtatttatcgtgaatcttgtatattctctgacggttgctatacaaaggatctgacaa

SEQ ID NO: 44301 - DNA, 282 bp, Zea mays
cgtaaggaagaggaggagggcaggatgtcgcaccgtaagttcgagcacccgaggcacggctccctcggcttccttcccaggaagcgctcctcccgccaccgcggcaaggtgaagtcatttcccagggatgaccccaagaagccttgccatctcactgccttccttggctacaaggctggcattcctcacattgtccgtgaggttgagaagccaggatccaaactccataagaaggaaacttgtgaggctgttaccatcattgaaacccctcctcttgtcatt

SEQ ID NO: 44302 - DNA, 304 bp, Zea mays
agttttcgcgccgccgccgccgccgccgccgcagccgcaacaatgccgtcgcacatgaccttccggatcaagaagaagctggcgaagaagatgcgccagaaccgccccatcccctactggatccgcatgcgcactgacaataccatcaggtacaacgccaagcgcaggcactggcgccgcaccaagctcggcttctgagcgtcgggattggccggctgctgcgtcggaaggctagggtctaagagctatcttccttctgttttatcaatgtgtcagtttttctgtaagctagcaagtgttgcta

SEQ ID NO: 44303 - DNA, 297 bp, Zea mays
gccgcagccgctgcttttcgttcgtcttcatcctacgcgagggcgaaacccagaaaccctctccctcctgtactccggccgacacatccaggggcgatgacgctgggtagctccggcgccggatcgagcgtcgtcgttcctcgaaacttcaggctattagaggagctcgagcgtggagagaagggcattggtgatgggacagtgagctatggaatggatgatgctgatgacatctacatgcggtcatggactggtaccatcattggccctcacaatactgtacatgagggtcgcatc

SEQ ID NO: 44304 - DNA, 298 bp, Zea mays
agcgaaagactagcatcagcaggcggcgtcgagtagcggctccccacctcgaagttgccagcatggctagaggattggagatgcatttgaatgagctcaatgcgcccaagcattggatgctggacaagctttgcggagcttttgctcccaagccatcttctggacctcacaagtctagggagtgcctgccactgatcctcatcatcaggaacaggctcaagtatgctcgtacataccgtgaggtcatttccatcctgatgcaacgccatgtacttgttgatggcaaggtcaggacaga

SEQ ID NO: 44305 - DNA, 295 bp, Zea mays
atattcagctgatggaatatggtcacgaaaagccagaagtgactgcagtatcaattgaaccaaatttttcttcgtatctttttagcgagtacttgtgtagtacgccagacaagaaattatctgaaggcgtctaccttggaaggaataagcggaaatattcaaataatgatgaaccttcagattctttgaaggcaatggatggtatcaatgttgtgaatggtcttgaatgcaagatatcctgcaagacctcgaaagtttcatatgtccttgatactgaagatttcttgttccggct

SEQ ID NO: 44306 - DNA, 292 bp, Zea mays
aaatggttttgttgtgtgacagccagccctacgcaatcctgaggaaggcaattgcatgcgctggaaatactgcccctttaattttctatacatactatccataagacactgtagaggtacccatggctctctgggctccaggatgggtgtctcataaaactctggcgtgcatgtatgtatggtgtgagagttgtcggcatacatttgcaaagtggacttctgcttgtaattctagtcctgtctctctttttttttttcctgttggtctgctagtacgggtccgaatttgtgt

SEQ ID NO: 44307 - DNA, 289 bp, Zea mays
ctaccaggtggtgttgggcgagtacgaccgtgctgtgaaggagggccccgagcaggtgatccccatcaactctggggaactctttgtgcatccactctggaaccgctcgtgtgtggcctgtggcaatgacatcgccctcatcaagctctcacgcagcgcccagctgggagacgccgtccagctcgcgtcactccctcccgctggtgacatccttctcaacgagacatcctgctacatcaccggctggggccgtctctataccaacgggccactcccagacaagctgcag

SEQ ID NO: 44308 - DNA, 292 bp, Zea mays
accacccaccacccagcgcaaggccaggcggcccaggccaccactccttaccttttccccctcttttgttccttcattcacgaatcccgtcttcttcctttcttggccttctccacctcatcgccgagacgagatctctcccacacgaggaagggagagatgggcgggcgggtggatcacgagtactcctacctgttcaagatggtcctcatcggagacagcggcgtcggcaagtccaatatcctctctcgcttcacgcgcaaccacttctccctcgactccaagtccacca

SEQ ID NO: 44309 - DNA, 286 bp, Zea mays
atgggacaaggacctggccaagaagatttggtgttttggacctgagaccactggcccgaacatggttgtagatatgtgcaagggagtgcagtatctcaatgaaatcaaggattctgttgtggctggtttccagtgggcatcaaaggagggtgcactggctgaggagaacatgcgtggaatttgctttgaggtctgtgatgtcgttcttcatgctgatgctatccacaggggtggtggtcaggtcattcccactgccaggagggtcatctatgcctctcagctcacg

SEQ ID NO: 44310 - DNA, 293 bp, Zea mays
aatctccccagcaatccctagcagaagccttccatcctcactcgctcgatggcccgcacgaagcagacggcgaggaagtccaccggcggcaaggcgccgaggaagcagctggcgactaaggcggcccgcaagtctgcccctgcgaccggcggagttaagaagccccaccgcttccgccccggcaccgtcgcgctccgggagatccgcaagtaccagaagagcacggagctgctgatccgcaagctgccgttccagcgcctggtgcgggagatcgcgcaggacttcaagaccga

SEQ ID NO: 44311 - DNA, 283 bp, Zea mays
  unsure (1)..(283): unsure at all n locations
agaagcttccccttccgtctccatatcttcttcttagtccgccgtctccactccgcgttccctggctccctgcgttgcgtcttgggggagagagagaagtgggagacccgcgagaggctgccgtgtagggactagggaccgtagagtaagcgacacgnaggagggagagggggatggccgggatcgggccgatcaggcaggactgggagccggtggttgtgcggaagaaggcacccaccgccgctgccaagaaggatgagaaggccgtcaacgccgcgcgccg

SEQ ID NO: 44312 - DNA, 286 bp, Zea mays
agaaaaggggcaggaagaaatcgagcctcactcgatctatcaccacgccgcagcacacacgaggcaggcggcgccatggccatgaagcaggacatgtccgcgctcgagaccaacttcgccaacctgaccgcctccgccggcgacgacacgtacttctccgccgaagcccccgacgtgccgtccatggtgctccccatctgcgacgacttcgacggcttccaggcggccaccaaggatatggtgaagaataagaaggggacgaccacgcttgccttcatcttcgaca

SEQ ID NO: 44313 - DNA, 283 bp, Zea mays
acttcttctctctctacacctccgcctccgcctgatccatccaagacagggatcgccatgtcggactcggaggagcaccacttcgaatcgaaggccgacgctgcggcgtccaagacctacccgcagcaggctggcaccgtccgtaagaacggcttcatcgtcatcaagaaccgtccctgcaaggttgtggaggtttctacctccaagactggtaagcatggccacgccaaatgccactttgtcgccatagacatattcaatgggaaaaagcttgaagatattg

SEQ ID NO: 44314 - DNA, 278 bp, Zea mays
cgctgctcccacctctagcccgacaggtgaagccgccgccgctgcagtgtccatagccaccgcaggagactgagatggggggttttgtcaagacccacaagagcaatgcatacttcaagcgtttccaggtgaagttcaagagaaggcgcgctggcaagacagactacagggccaggataaggctgattaaccaagacaaaaacaagtacaatacacccaaatacagatttgttgtgcgatttaccaacaaggacatcacagcacaaatcatatctgct

SEQ ID NO: 44315 - DNA, 277 bp, Zea mays
atgccactcaagttcgctcctttgccaaggatgcagctccagctgaccgtcctcctgttggtggggatgatctcctgaagggcatattctttgaggtaaagaagaagtctgagacagctctcggcgtccttaaaaaggaaaagatcactattgatccagatgacccagcggcagtttctcaatatgctcaagtcatgaagactgtaagggaaaaggcggatcttctttctgattctcaaaggattaaatataccattgagaccttcaccaagggcat

SEQ ID NO: 44316 - DNA, 281 bp, Zea mays
ctgcttttggggaagacggtgagggtgatgacctggacctgtggacagtacgatgttctgggcaacactgggagcgagaggccagtgtccgtttccagcatgttggcacctctgtgttcctgtcagttactggtgaacagtaaataaacccaatccgtgggcagcatgaggtgcatggcatgcctagtgccaatgcacacaacacgtcgaaggccatggaaggaatcttcatcaagcccggagcagatccctccacaggtcacgatgaactctgagccgga

SEQ ID NO: 44317 - DNA, 292 bp, Zea mays
ctattaatgaatcgtgtggacttgtctcttcttgttataacaaagggtttgacaaaaacgggagaagattatgcggtaaaagctgctcatgtggagcttgctgagaggatgcgaaagagagatccagctactgcacctactgttggtgaccgtgttccttatgtaataattaaagcagcaaaaggggcaaaggcatatgagaaatcagaagatccgatttatgttttggacaataatatacccattgatcctcaatactaccttgagaaccaaattagcaagccacttttga

SEQ ID NO: 44318 - DNA, 289 bp, Zea mays
gcgcaagctgcctcctcctcgtcgtccggtcgtgagaagggatggcgggccgtggcaaggctatcggcgctggcgcgcgaagaaggcaacgtcgaggagctccaaggccggactccagttccccgtcggcaggattgccaggttcctcaaggcgggcaagtacgcggagcgcgtcggcgccggcgcccccgtgtacctcgccgccgtcctcgagtacctcgcggctgaggttctcgaacttgccgggaacgccgcgagggacaacaagaagacccgcattgtgccgcgc

SEQ ID NO: 44319 - DNA, 291 bp, Zea mays
gaagaatgcaaagaaagaggaagacattccagtgcttgatgaaattcagcgcaatgagatttttacaagagacagtatccccacatggctagcctactctggatatcttgcactatcagctgttgctgtgtttgccattcccttgatgttccatgagatgaaatggtactatgttattatagcatacttattggccccggcattgggtttctgcaatgcctatggtgctggccttactgatatcaacatggcctacaattatggaaaggtcgcgctctttattcttgcggc

SEQ ID NO: 44320 - DNA, 294 bp, Zea mays
cttcacagcgtatcatcgttttccatcgctcctactcctatcatccagaaaatctgagcggtattgatggcgcccaaggcggagaagaagccggcggcgaagaaggtggcggaggaggagccctcggagaaggcggctccggcggagaaggcccccgcggggaagaagcccaaggcggagaagcggctacctgcgggcaagtccgccggcaaggagggcggcgacaagaagggtaggaagaaggcgaagaagagcgtggagacctacaagatctacatcttcaaggtcctgaag

SEQ ID NO: 44321 - DNA, 293 bp, Zea mays
ggtgaagccgccgccgctgcagtgtccatagccaccgcaggagactgagatggggggttttgtcaagacccacaagagcaatgcatacttcaagcgtttccaggtgaagttcaagagaaggcgcgctggcaagacagactacagggccaggataaggctgattaaccaagacaaaaacaagtacaatacacccaaatacagatttgttgtgcgatttaccaacaaggacatcacagcacaaatcatatctgctagtatagcaggtgatatggttcttgcttctgcttactcgc

SEQ ID NO: 44322 - DNA, 293 bp, Zea mays
cacaatacattgactatttgatgacttgggttcaagatcagcttgatgatgatactctttttccttctaagattggtgtcccatttcccaaaaactttatgtctgtggcaaagactattctaaagcgtctgttcagggtttatgcccatatttatcaccagcactttgattctgtgatgctgctgcaagaggaggcccacctcaacacctcctttaagcacttaattttctttgttcaggagtttaatctgattgataggcgtgagctggcacctcttcaagaattaatagag

SEQ ID NO: 44323 - DNA, 296 bp, Zea mays
agccaccacagcgtcgtcgtcttcgtctccagtccaagcaagcgaagagcacccctcgagatctctccctccccgcgccgccatggacgcagttgactcggtagtcgacccgctccgggagttcgccaaggacagcatccgcctcgtcaagcgctgccacaagccggaccgcaaggagttcaccaaggtcgccgcgcgtactgcgatcggcttcgtcgtcatgggattcgtcggcttctttgtcaagctcatcttcatccctatcaacaacatcatcgtcggctccggctgatccg

SEQ ID NO: 44324 - DNA, 294 bp, Zea mays
gttagtgggctcagactgcatgttcgcattgaaggttatggacatcgagtacctcataagcagaaagaaaatgctcagagcacaaactgagagggagatactgcaaatgctcgaccacccattccttccaaccctgtattctcatttcacgacggacaacctttcttgtctggtaatggagttttgccctggtggtgacctacatgttcttaggcagaagcaacctaccaaaaccttttcggaagcagctgcaagattttatgtcgctgaagtcctcttagccttggagtatct

SEQ ID NO: 44325 - DNA, 283 bp, Zea mays
caccaccaggcttgttcttggtaatgcgctctattttaaaggagcttggactgagaagtttgatgcatctaaaacaaaagatagcgagttccaccttcttgatgggagctcagtccaagcacctttcatgtccagtacagacaaacaatatatcgtggcttacaacaacttgaaggtgcttaagcttccataccagcaaggtgcggacaagaggcagttctccatgtacattcttcttccagatgcaagagatggcatctggagcttggctgaaaagctgagc

SEQ ID NO: 44326 - DNA, 279 bp, Zea mays
tccagcaagtaaaccccgtttccacaacgtcaccgcaccgccgtcatgccgaccgtaagcgtgaaatggcagaaggagctctttccaggcatagagattgacactagccagcctccgattgttttcaagactcagttgtacacactaactggtgtgccacctgaacgccaaaaaattatggtgaagggaggaatattgaaggacgatgcagattggtctactttgggagtgaaagatggccaaaagttgatgatgataggcacggctgatgagattgtg

SEQ ID NO: 44327 - DNA, 282 bp, Zea mays
gtaatgatttctttgctctttttctggatccgacgatgacttactcttgtggtattttcaaggcggaagatgagagtttagaagcagcgcactacgtaaacttgacaatctaattaataaggctaaggtggatccggggcatcatgtccttgacattggctgtggttggggctcattggcaatacgtttggtgaagagaactggctgcaagtgcacaggaattacattatcggaggagcaactgaaatatggaaagagaaaggtgaaagaatttggattaga

SEQ ID NO: 44328 - DNA, 281 bp, Zea mays
ttggggacgagggccagattctcttcaccgaacccctcttcacgccaaagactcttcgggagcaattggtgcagcttatgtttgaaaagttcaatgtttcaggcttttatgcctctgaacaggctgtattgtcactctatgctgttggacgcatttcaggatgtaccgttgacattggtcacgggaaaatagatattgctccagtttgtgaaggagctgttcaacacatagcttctaagagattagagattgggggagttgacttgacaaacctgtttgca

SEQ ID NO: 44329 - DNA, 283 bp, Zea mays
  unsure (1)..(283): unsure at all n locations
gttcaagggaacaaaaaactgatattagcttttctatggcaattgatgcggtacaacattctacaactgctgaagaatcttagatttcactcaaatggaaaagagatcacagataatgacatattggcatgggccaataagaaagtaaaagattctggaaagcaccactcttatatgcaaagtttcaaggataaaagcctttcaagtggcacctttttccttgacttactaagtgctgtggagcctcgagttgtgaattggagccttgtgaccanaggggaaa

SEQ ID NO: 44330 - DNA, 285 bp, Zea mays
ctggtggacgtgagcggcaccgggaccctatcccagagctaccactacgaggtgtgtttgaccggagactcagatggtctctgagttcaagttcctgaagccgattattcctaaccttttgccccagggcgctggtgaagaaatagggcaaactgctgccttccggaatagctttggattaaattagagatctcgtgatgacgcgttgatttctgccatttatcccaaactttttcagatctagaattcgagagtgtcatggacaaaaatttcaccttgagattg

SEQ ID NO: 44331 - DNA, 285 bp, Zea mays
gcgggcggctgggctagcagattgattggtttgagtggttgggtcggctctaggaaacgccccgccgcggcgatggggtgcttccattccacggcgaacggcaacaccctggctacgaggaccccgtgcacctcgcctcccagaccgccttcagcgttagtgaggttgaggctctattcgagctgttcaagagcataagtggttcggtgattgatgatggcctgatcaacaaggaagaattccagctagcactatttaagaatcagaggaaagaaaatcttttcg

SEQ ID NO: 44332 - DNA, 290 bp, Zea mays
accagaagagcacggagctgctgatccgcaagctgccgttccagcgcctggtgcgggagatcgcgcaggacttcaagaccgacctacgcttccagagctctgctgtctccgcgctgcaggaggcggctgaggcctaccttgtcgggctcttcgaggacaccaacctctgcgccatccacgccaagcgcgtcaccatcatgcccaaggacatccagcttgcccgccgcatccgcggggagagggcctaagcgtcatattttctgtcatcagtgcccgatcagaagatgtag

SEQ ID NO: 44333 - DNA, 290 bp, Zea mays
gcggcggcgcgggcggacaaggagcaggcggaggaggagctgtgccaagccacaatgggtatctcgcgtgactcgatgcacaagcgccgggccaccggtggaaagcagaaggcctggaggaagaagcgaaagtatgagcttggtcgccagccagccaacaccaagttgtcaagcaataagacagtgaggagggtccgtgttcgtggaggtaatgtgaaatggagggctcttcgccttgatactggtaactactcatggggaagtgaagctgttaccggcaagacccgtat

SEQ ID NO: 44334 - DNA, 274 bp, Zea mays
gaaatttgtacgtgtatgataaaaacaaggatgggaacacagactgtacgtttccagctgtcaaggatcagtctcagtttatggttgcacatgcaaagtcgagtaagagcaacccagtcgctaggtggcatatatgtcaaggttcgatcaatgcaatttccttttcaccagatggcgcatacttggcgactgttgggagagatggttatttgagagtattcgatttttcaaaggaacaactaatatttggtggaagaagttattatggtgcact

SEQ ID NO: 44335 - DNA, 280 bp, Zea mays
attgacacctacggtggctggggagcccatggtggtggcgctttctccggcaaggacccaaccaaggttgaccgcagcggagcctatgtcgcaaggcaggctgccaagagcatcgtcgccagcggccttgctcgccgcgccatcgtccaggtgtcttacgccatcggcgtgcccgagcctctctccgtgttcgtcgacacgtacggcaccggcgcgatccccgacaaggagatcctcaagattgtcaaggagaacttcgatttcaggcctggcatgatca

SEQ ID NO: 44336 - DNA, 296 bp, Zea mays
cggggctctacgccgtcctcaacagcttctacaacgtcgagggcggacaccgcgccatcgtcttcaaccgcctcgaggggatcaaggacaaggtgtaccccgaaggaactcacctgatgatcccgtggatcgaaaggccgatcatctacgacgtccgcgcccgacccaacctcgtcgagagcacctccggaagccgcgacctccagatggtgagaattggtcttcgtgtccttactcgacccatgccagatcagctacctagaatctacaggaacttgggggagaacttcaatgag

SEQ ID NO: 44337 - DNA, 301 bp, Zea mays
tcggggctctacgccgtcctcaacagcttctacaacgtcgagggcggacaccgcgccatcgtcttcaaccgcctcgaggggatcaaggacaaggtgtaccccgaaggaactcacctgatgatcccgtggatcgaaaggccgatcatctacgacgtccgcgcccgacccaacctcgtcgagagcacctccggaagccgcgacctccagatggtgagaattggtcttcgtgtccttactcgacccatgccagatcagctacctaaaatctacaggaacttgggggagaacttcaatgagagag

SEQ ID NO: 44338 - DNA, 308 bp, Zea mays
tgcatgctccacagggcctgcttgatctttcaggtgggcagacacatataggaatcaagagaatgggagagcttgatctaaaagcattttcaaaggcatgccaaaaggagcgtacagaaaatgcagaagttactgctgcctttctttgttcaaagtgggaggctgaaataaaaaatcctgactggcacccttttagggtcgtcacaattgatggaaaggagatggcaataatcgaggatgatgcaaagcttcgagcactcaaagaagaacatggagaagaaatctatgcaatggtgacaaaggcgctg

SEQ ID NO: 44339 - DNA, 273 bp, Zea mays
ccgtcggttcacttctccaggtaaggaaagggttcgtactcatggcgccgccgcagccaaagtcgggcctcttcgttggcatcaacaagggtcatgtcgtcaccaagcgcgactgcctccccgcccgtgccaccgcaaggggaaatcaacgaagagggtgtctatggtcaggggcctgatcagagaggttgctgggtttgctccttatgagaagcgtatcactgagcttctgaaggttggcaaggacaagcgtgccctgaagcttgctaagag

SEQ ID NO: 44340 - DNA, 147 bp, Zea mays
gcaatgttcatactgctgccctgcacctgctgtgtaaccaggcctgtgtttgttctggctgatagtgatgtaccctaagacttgtaacgtcatgttcgttcttgtgaactatagcgagtgaataaatttggttaatgttggatgttc

SEQ ID NO: 44341 - DNA, 311 bp, Zea mays
agcagaaatagatggaaccttcacaactatttactggtggtacaggaccgcgagccacgccgcagagctcacagcggggttctacaacactacgaacagagacggatactctccagttttcagaatgctcaagaagcactctgtgatccttaagctcgtctgctacggacccgagtacacagttcatgagatggacgacgacgaagcgtttgcggatccggaaggtctaacctggcaggtcatcaacgcggcgtgggatcagggactaccgctctgtatcgagagcgctcttccgtgccgtaatggtgagg

SEQ ID NO: 44342 - DNA, 300 bp, Zea mays
gttcttctcccacttcaccatcaggaagttcgccgacgacgagaggtagctggtggacgcggtgaacgggacggagtacgtacccacgtacgaggacaaggatggcgactggatgctcgtcggcgacgtcccctggaagatgttcgtggaaacctgccagcgccttcgtctgatgaaaggttcagaggccgtgaacttggcaccaagagccgcccgatgaggcacactccgttgggcgttggcacgcacgcacgcactggcgtcttgaaggaaagggggaatctgctggtcttgatgagg

SEQ ID NO: 44343 - DNA, 222 bp, Zea mays
gaagctgcttccgttgcttaccgctaccgccgctggaagcttgatgaggagacaagcttggttgctcggtgcgaggttcatgccgtgagcgttgatctacgcggcgagcgccagttccttacactcaacgccctcaacgagttcgatcccaaggtcactggtgttgactggaggaagaagcttgagacccagcggggtgctgtgcttgcacatgagctcaag

SEQ ID NO: 44344 - DNA, 273 bp, Zea mays
gaagaaaaggatgtttacttttcctttggaagtgtccaggaccatggggccagcaaagctagccaaggaatgcactcatcaaaattttgcctaaatattgctggggacaccccttcttccaatcgtctgtttgatgcgatagttacccactgtgtccctgttatcatcagtgacgacattgagctaccttatgaggatgtgttggattattcaaaattctccatctttgtccgttcgtctgatgctgtaaagagaggtcacctgatgagactg

SEQ ID NO: 44345 - DNA, 285 bp, Zea mays
cttttgctcggaacgcacacaccgcccgtccccgatctccgatcccctcgtcgatccaaagatgcagatcttcgtcaagaccctcactggaaagactatcaccctcgaggtggagtcttctgacaccattgacaacgtcaaggccaagatccaggacaaggagggcatccccccggaccagcagcggctcatctttgctggcaagcagctcgaggacgggcgcacacttgccgactacaacatccagaaggagagcaccctccacctggttctccgcctcagggg

SEQ ID NO: 44346 - DNA, 231 bp, Zea mays
caatatgctgttaaatcaaatgcgatctgaggatggggatccagaaaagctcctccggcattcattttatcaatttcaggctgaccgttctcttcctgatcttgagaagcaaatcaaggaactggaatcagagagaaattccatggtaattgaggaagcggagagcttgaaggattattacgatctcttacagcagcacaggagtttaaagagggatgtcaatgatattgt

SEQ ID NO: 44347 - DNA, 259 bp, Zea mays
agaaaacagagctgaggagctgcgtaatcttttgacccagctcagaccattttttgcagttattcctaaggcaaagactgcaaaaattgtccgtggaataattgatgctgtcgccaagatacctggaacatcagatcttcagatttcactctgcaaggaaatggtagaatggaactgggcagagaagcgtactttcctccggaagcgtgtggaggcaaggttggcagctctcctgttagagaatcaggagtatactgaa

SEQ ID NO: 44348 - DNA, 279 bp, Zea mays
  unsure (1)..(279): unsure at all n locations
ggacaagaaggaagccgaggcggtgacggtggccaccgagccgaaagggaggaagaggggcaagaaggaagccgaggcggtggcaccagcggcagaggaggaggatggggttgatgtggcggctggagcgaactcngtcatcgtcgaggcctgcactcagtgcagacagtttaagatccgaactcagaaggtgaaggaggacctggaaagttatgtttcgggggtgtctgtgataatcaaccctcagaagccacgccgtggttgccttgagatacgtga

SEQ ID NO: 44349 - DNA, 299 bp, Zea mays
gcagtctaacagcaccccctcctcgctcgcactccgttcgtctgaactctcctcccgtcctttcctttctgaggctcgcgaaccccgacaatggccgcaaccgcggtgtcggtcgacgagaagctcgacaagcttcgcgccgaggtcgccaaactcagccagatcagcgagaacgagaaggccgggttcatcagcctcgtgtcacgctacctcagtggggaggcggacagatcgagtggagcaagatccagaccccgaccgatgaggtagtggtgccgtacgataccctcacgtcgcct

SEQ ID NO: 44350 - DNA, 290 bp, Zea mays
ggcaaggcaaagaaagttgttccggcacagaccctttggtttgacattttgaaggcacagatagagactggtacaccatatatgctttataaggatacttgcaataggaaaagtaaccagcagaatctgggcacaattaaatcgtcaaacctgtgcactgaaataattgagtttacaagccctactgagaccgctgtctgcaacctagcatctattgctttacctcgttttgttcgggaaaaggatgttccgttggagtcccatccatctaagcttgtgggtagcagtga

SEQ ID NO: 44351 - DNA, 236 bp, Zea mays
tgtagctgcaggtattgctggaggcactggtgtcatgcctggaggtaatgtggggcaggaccatgctatcttcgagcaaggtgcttctgcaggaaatgttggaaatgagaaaattgtggagaagaagagagctaaccctgttgcactgctgctgtcttctgccatgatgttgaggcacttgcaattaccatcttttgctgaccggctggagacggcagttaagcgtgtcattgcag

SEQ ID NO: 44352 - DNA, 232 bp, Zea mays
gggcggctgtagtggtgccttctggagaggagcagagatacacctgccatgtgcagcatgagggtctgcgcaagcccctcaccctgagatgggagctgtcttcccagcccaccatcgccatcgtgggaatcattgctggaccggatcacttggagctgtgatcactggagctgtggtcgctgcagtgatgtggaggatgaagagctcagataggaaaggatggagttacact

SEQ ID NO: 44353 - DNA, 240 bp, Zea mays
aaaacacctgctgtagccatcctctctaccgcgagtcagagttgattgaggaaaattgtgcaggggtgagaaatgcagcccagcgcaaactatttgatgagctgggaatagtggctgacgaattacctgtcgaccagttcattccgcttgggaggatgctttacaaggctccttcagatggaaaatggggcgaacacgagttggattacctcttgttcatggttcgtgacgtgaagctcg

SEQ ID NO: 44354 - DNA, 239 bp, Zea mays
gtcaacatggggaagacacgtggtatgggagccgggcgcaactcaagacccaccgcaggaaccagcggtgggctgacaaggcatacaagaagagccatttgggcaatgagtggaagaaacccttcgctgggtcatcccatgccaagggcattgtcctggagaagattggtattgaggccaagcagcccaactccgctatccgtaagtgtgctcgtgttcagcttgttaagaatggcaag

SEQ ID NO: 44355 - DNA, 250 bp, Zea mays
gaacgtgccatatgtgtttgttccatcgaagcaagctcttggccgtgcttgtggtgtgacaagaccggttattgcttgctcagtgaccagtaatgagggtagccagctgaaactacagatacagggtctcaaggactccattgagaagcttctcatctgatctgccgaagacctttcagtgtgatgggcctcatcgacacttttttcagaggcttggactggtgatggtgtcttgtttactttgcgcttt

SEQ ID NO: 44356 - DNA, 241 bp, Zea mays
cagatttaacaactgtatctgcaaagaaggccaaagattttcttcccttcttgcagcggaacagaaggcattcggccatcgttgaatatgtttttagtggccatcggttcaaactaacaattcccaaggagacttgtagtatcgccttctcattatctggtgtccgttgtcctggtaaaggcgagccatactcagacgaagctattgctttgatgaggagaaggatacttcaacgagatgt

SEQ ID NO: 44357 - DNA, 240 bp, Zea mays
ctggcccatctatggaccatactcatgtgagcacagttgtcaaaggcagttttggttaccttgaccccgaatacttccgcaggcagcagctcacagagaaatccgatgtctactcgtttggtgttgtgctgtttgaggtcctctgcgcacggcctgccttgaaccctactcttgcaaaagaagaagtcagcttggcggagtgggcgttgcactgccagaagaagggcattcttgaccaga

SEQ ID NO: 44358 - DNA, 241 bp, Zea mays
atcgagcgaatgagcgtcaatgacattgtaactctaggtgcaaaaccattgttcttactagattactatgcaacgagcaagcttgatgttgatcttgcagagaaggttatcaaggggattagggatggctgcgaacaatcagattgtgctctcctaggaggggaggtaagatgtttttggaattgaattactaggactcgacaattcaaccatgcagtattacccttgtaagtttagtagt

SEQ ID NO: 44359 - DNA, 221 bp, Zea mays
ggctcgaggttgctcgtgcatatttccaagaattgatcagtgctattgacttctgccatactagacaagtttatcatagagatctaaagcccgaaaatcttcttcttgacggaagtcgcaacttaaagatttcagactttggtttgagtgcacttccaaactgcaagagaaaagatgggttactccacacaatttgtgggactcctgcatatgttgctcca

SEQ ID NO: 44360 - DNA, 235 bp, Zea mays
aacgcacacacacgcaaccagatctcccccaaatccagccgtcggcacctccgcttcaagatgcagatctttgtgaaaaccctgactggcaagactatcaccctcgaggtggagtcgtctgacaccattgacaacgttaaggccaagatccaggacaaggagggcatccccccagaccagcagcggctcatcttcgctggcaaacagcttgaggacgggcgcacgcttgctgact

SEQ ID NO: 44361 - DNA, 232 bp, Zea mays
ctctcgcatccgcagcctctcgagctctactccatcccctcgatctcgaagcgcacagcagcagtcaggcggccatggacgcgagcgcagccggagccggcgggaaggcgaagaagggcgcggccgggcgcaaggccggcgggccgaggaagaagtcggtgacgaggtccgtcaaggccgggctgcagtttcccgtcggccgcatcgggcggtacctgaagaagggccggta

SEQ ID NO: 44362 - DNA, 237 bp, Zea mays
gtcagcaatgcagaataccgctacaaagatgtaatcctgccagctttaggattgaatcagagctccgaatgggactttggggtgttctcaggtgtcgttggcgttgagaagccagacccaagaatttacaagatagcgctggagatggcaggaaacgtcgctccggaagaagcgctccacataggtgacagcatgcggaaggactacaccccagctaggagcatcgggatgcatgcg

SEQ ID NO: 44363 - DNA, 225 bp, Zea mays
ctcgtctccgacacgctctacctcaccgtctcctacatcgaccgcttcctctctgccaaagttctcaacaggcagaagctgcagctcctcggcgtctccgccatgctcatcgcatccaagtatgaggagatcagcccgcccaacgtggaggatttctgctacatcaccgataacacctacaccaagcaggaggtagttaagatggagagtgatatactgaatgtc

SEQ ID NO: 44364 - DNA, 227 bp, Zea mays
ctcccactgcctggtgatgttgatgtcatttgtggaggcccaccatgccaaggtatcagtgggtttaatcggtacagaaaccgtgatgagccactcaaagatgagaaaaacaaacaaatggtgactttcatggatattgtggcgtacttgaagcccaagtatgttctcatggaaaatgtggtggacatactcaaatttgcggatggttacctaggaaaatatgcttt

SEQ ID NO: 44365 - DNA, 225 bp, Zea mays
caaggacatcagcaaggacaaccgtgctcttggaaagctgaggagggaagctgagcgtgccaagagagccctgagcaaccagcaccaggtccgagttgagatcgagtccctctttgacgggaccgacttctcggagccgctgacccgtgccaggtttgaggagctgaacaatgatctgttccgcaagactatgggccctgtcaagaaggccatggaggacgctgg

SEQ ID NO: 44366 - DNA, 227 bp, Zea mays
atcaaagaaggacagatgtccttctcatgttttacaagtcattgaagaagagcttaccaagcttcagcttttagaagccagctctagtgacgttcagtgtaactcgtaattatttggactggctgacagtattgccatggggaaattatagtgatgaaaactttgatgtccaccgtgctcagaaaattctcgatgaagaccattatggtttgagtgacgtgaaagag

SEQ ID NO: 44367 - DNA, 224 bp, Zea mays
cgaaggttcttcagagtacaatatatgaagttgaccttgatcgaattcttcagagcatccatatttatttacaagaacttgtgatggaagaaatacggagaagggctggtgctgatgacaagccattgagaatggtcaaaactgtcttgcatgaacttgtgaagcttcggggaacggcaataaagggtcacctttcaatggttcctatagatgctgaacctcag

SEQ ID NO: 44368 - DNA, 274 bp, Zea mays
ccagaatgtttctcacgaggacggagtacgaccgcggggttaacaccttctcgccggaggggcggctgttccaggtcgagtacgccatcgaggccatcaagttgggatccactgcgatcgggttgaaaacaaaggatggtgttgtccttgctgttgagaaacgtgtgacctcgccactgctggaaccaagcagtgtggaaaaaatcatggaaattgatgagcacataggctgtgccatgagtgggcttattgctgatgctagaacactagtcga

SEQ ID NO: 44369 - DNA, 285 bp, Zea mays
gcaacttcccatcaatctgcattcattctggaatgactcaggaagaaaggctaacaagatataagaacttcaaggaaggccacaagagaattcttgtggctacagatttagttggcaggggcattgacattgagcgtgtcaacattgtgataaactatgacatgccagactcagctgatacttatttgcacagggttggaagggctggacgttttggcacgaagggacttgcaattacctttgtttcctctgcttcggattctgatgttcttaaccaggtgcaag

SEQ ID NO: 44370 - DNA, 279 bp, Zea mays
gtggtccttctgcaaaaagtatttccgcagatgtatctcagattgcatctccacaggatgctgaagttaaagtcgcaattctgactgtaagtgacactgtttcatcaggtgctggccctgataggagtggcccaagagctgtatctgtagtgaattcttcatcagagaaactgggtggtgcaactgtggttgccactgcagttgttcctgatgaagtggacaagatcaagggcattctggtacaatggagtgatattgaccatgttaacctcattctga

SEQ ID NO: 44371 - DNA, 288 bp, Zea mays
gcgagcgaagaacgcgggcagcgagcgagatgcagcaccgaggcttcctcgtcctcaccctcctcgctctgctggcgctcacctccgacggtcgccaacaagaaagataaggtgaagaagggcggcccggggaccgagtgcgctgactgggcctgggggcatgcacccccagcagcaaggattgcggcgtcggtttccgcaagggcacctgcggggcccagacccagcgcatccggtgcagggtgccctgcaactggaagaaggagtttggaaccgcctgcaagtaca

SEQ ID NO: 44372 - DNA, 286 bp, Zea mays
cgttgagatgcaccatgaggctctccaggaggcccttcccggtgacaatgttggcttcaacgtgaagaatgttgctgtgaaggatctgaagcgtgggtatgtggcctccaactccaaggatgaccctgccaaggaggctgctagctttacctcccaggtcatcatcatgaaccaccctggccagattggcaatggctatgccccagttctggactgccacacctcacacattgctgtacaatttgctgagctcgttaccaagattgataggcgatccggcaaggag

SEQ ID NO: 44373 - DNA, 289 bp, Zea mays
gagagagagagagagagcaggaagcaggggctagacgcggatcggcgagcatgaggggcggcggcggcggcgggatgatggacgatgaagagagggtgggccatgcggagatcccgaccagtttcggtcccgagctgcgcgcctgcctccgatgccgcctcgtcaagacctacgaccagttcagggagaacggctgcgaaaactgcccgtttctagagatggacagagagcacgacaacgtcgtcaactgcaccacccccaacttcactggaattatctctctgatgga

SEQ ID NO: 44374 - DNA, 252 bp, Zea mays
tgtgaggcagtatttatcccggcaggatgtccccacctagcttctgttcaaatgtccaaggctcgactccatattcttccttaagctaggtgaggcagtatttatcccggcaggatgtccccaccaggttagaaatttgaagtcttgcataaaggttgcactagattttgtttctccggaaaatgtccgagagtgcatcaggttaacagagggtttccgtctgctgccgaagtggcataaggtgattgaaga

SEQ ID NO: 44375 - DNA, 203 bp, Zea mays
acggaaccttatatcgttgctcataattttctcttgtcacatgctgctgctgtgtcaagataccgtaacaagtatcaggctgctcagaaaggaaaggttggaatagttctggacttcaattggtatgaagctctcacaaactcaaccgaagaccaagcagcggctcaaagagcaagggatttccatgttggttggtttgctga

SEQ ID NO: 44376 - DNA, 233 bp, Zea mays
tgaacgggtcaactttttcttaaggttatccacacaagtgtatgggcggggcagaagcgtcttgggcagctggccaagtggaaaaccgctgaggaggttgctgcattggttcgatctcttcctgtagaagagcagccaaagcaaattattgtgacaaggaagggcatgttggatcccttggaggtccatctacttgacttccctaacattgttattaagggcagggagctgca

SEQ ID NO: 44377 - DNA, 240 bp, Zea mays
tagccaaaccaagcaagcagggaatccccacaaggcagcagatggaagcgaaaggtggcggtggcccgcgcgctgccaggtcgacggctgcaacgttgacctcaccgacgtcaagcccgcctactactgccgccacaaggtgtgcaaaatgcactccaaggagccccgcgtcctcgtcaacggcctcgagcagcgcttctgccagcagtgcagcaggttccaccagctggctgaattcga

SEQ ID NO: 44378 - DNA, 221 bp, Zea mays
atttttggggatagggactttagaggacgagatgttaaggttgcactcgaactatcatttatggaagcagttcaagggtgcagcaaaacggtcaccttccaaacgtctgtaacatgtgaaatctgtggtggagccggtgtgcctcctggaaccacacctgaaacatgtctatcttgcaggggttcaggatttatattcatgcaaaccgggcccttcaggat

SEQ ID NO: 44379 - DNA, 290 bp, Zea mays
caaggaatgaggagaatcgtgcagcctttgagaatgttaccaaaatttctcctgcatttgtgctattctttgactgttctgaagaagatatggagaaacgactcctggggcgcaatcagggaagggttgatgataacattgaaactatcaaaaaaaggttcaaaacctttgttgactcaactctgcctgtcattgagcattacaactcaaaggacaaggttaaaaagattgatgctgcaaaaccaatccccgaggtgtttgaagacgtcaaagccatttttgccccatat

SEQ ID NO: 44380 - DNA, 286 bp, Zea mays
atcacaagcctgatcaaactgatgagcggcacgtattgaagatgctggaggttttgtgatgtgggcaggaacatggcgcgttggtggtgtacttgctgtttcgcgtgcttttggtgacaaactcttaaagcaatatgtggttgtggatccggagatccgagaggaagttgttgatgacacactcgagtttcttatccttgcaagtgatgggctgtgggatgtggtctctaacgaggaagctgttgcgatgactagatccattaaggacccagaagaggctgcaaag

SEQ ID NO: 44381 - DNA, 284 bp, Zea mays
aaggacctcgaggagggaatcaaccgcctagttctttgctctggaaaggtgtactatgaactggatgaagaaagaaggaagtcggagcgcactgatgttgctatatgtagagttgagcagctctgcccgttcccctatgacctcatccagcgcgagttgaagagatatccaaatgccgagatcgtgtggtgccaagaggagccgatgaacatgggagcatacagctacatcaacccgcggttgctgacggcgatgaaggttctgggccggggtggcatcgagga

SEQ ID NO: 44382 - DNA, 248 bp, Zea mays
tattcaaggaaatgaaggcaaccggtgtgaacccaaacctggtcatgtgcaatacaaggttgtatgtcatgggccacgcattgcaaccttgggtggtgaagagcatccacagggagatgattgacaagcaggtgcagcacaacaaggtgacctactgttgtctcctgcatgcatacaccagggcacactacgatgaggatgccatggctgtgtaccggctgatgaaggatgaagcaatggacgtgatg

SEQ ID NO: 44383 - DNA, 256 bp, Zea mays
ggctttgccatgctgcttatggatctttccggaagaaggtttttgctgctaggcacaattccaatcttgatagcatctctagttatcctggttgtgtccaatctaattgatttgggtacactagcccatgctttgctctccacagtcagtgttatcgtctacttctgctgcttcgttatgggatttggtcccatccccaacattttatgtgcagagatctttccaaccagggttcgtggcctctgtattgccattt

SEQ ID NO: 44384 - DNA, 274 bp, Zea mays
aaggcggtgcggtttatcgacgcggcccacttctctgtccccgcggggcagtacgcggtggagctggtggccgggcgggagagcgccatcgcgcaggtcatccgcaccgtgcccaaccgcgcctacaacctgtcgttcgccgtcgggacgcccggaacggctgccacggctctatgctggtggaggcgttcgcgggcaacgtcacgcagaaggtgccgttcgattccgccgggaaaggcgggttcaagacggcggcgttcaggttcgtggccgg

SEQ ID NO: 44385 - DNA, 225 bp, Zea mays
gatatgtacaaggaatgaatgaggttttggcacctctctattatgttttcaagaatgaccctgaccaaagtcaagctgctttagcagagccagatgccttcttctgttttgtcgagctgcttagcgggttccgagacaacttttgcaagcaacttgacaacagcgtggttggcatacgctccacaattactacactgtcacagcttctgagaagacacgaggagg

SEQ ID NO: 44386 - DNA, 281 bp, Zea mays
gtctcattggcaggaggtttagtgatgcctctgtccagagtgatattaagctgtggcccttcaaggtcattccagggcccggtgagaagccaatgatagttgttcagcacaagggggaggagaaacagtttgcagccgaagagatctcctctatggttctcatcaagatgcgtgagatcgctgaagcttaccttggcagcacgatcaagaatgctgttgtcacggtccctgcctatttcaacgactcgcagaggcaggccacaaaggatgctggggtgatt

SEQ ID NO: 44387 - DNA, 228 bp, Zea mays
gatgcaatcataattattgtccatctcctctccaaccaattgcctcagctggtcagcactctgaaagcagcgctgcatacttttcttggcctacatctactctaatgcacgggtcagctgaaggccgtgctaattactttgggaacctacagaagggtgtactaccaggacatcttggtcgcttgcactagggccagcaagctaccaccttacttgatttaatgatta

SEQ ID NO: 44388 - DNA, 287 bp, Zea mays
tcctctcgcgagtcgcggtctcgcgcccccctccgccgaccgccgcctcctcacaaccgcggaagctgcttccctctccattggacgcggccagcttccatctctcggtcacctccctctacatcccacggccgctaccaccttccctctacctcacacggccgccggcctctccaaggtctgcacacgcaggaaaaaccttgccacgagtcgccgacactccatcccggaagagctaacgaggtgactccccaccgcgcccatgggtgacagccagtactccttct

SEQ ID NO: 44389 - DNA, 259 bp, Zea mays
ggaagacgttactttgaagtggatgttggctaaggaaccggatgggatgtaggagtctgtatggccgatgctgcgatgggtcctgggatgaagcaagagcctcagtctggattctggactttcggatgtgcagaaagataagctatgtagcgcttacttctcccccaacttcccttcatctgcatgagcagtccctgcctgtgggaatttttctggactatgaagccggagttgtatccttttataacgggaatactgg

SEQ ID NO: 44390 - DNA, 262 bp, Zea mays
ggctcgaccagctttccccttctctccggtccgggaatcggaagctcagggcagaagtttagccatggggcagacgcatcttttgttgctcgcttgtttctgggtcctgtcaacatgctccttgctacttgatgcttcctccgatggactgttaagaatcaacctgaacaagaagagactggacaaggaagctttgactgctgcgaaattggcgaagaaggagagcaaccttcgaaggtctgtgggtgctgaccagtatctc

SEQ ID NO: 44391 - DNA, 277 bp, Zea mays
attcttgccacatatgcaagaggcagaaccctgggcatgttgaatatttctcgaactatgaggacattgagttgcattttagagaagatcatttcctatgtgaagatgaagcatgtttggaaaagaagtttgttgtcttcctgagtaaagcgcactgaagaagcataatgctatggagcatggtgggcggatgtctcgttctctgaggaatgttgcacttgagacacctaccaacttaatatatcgcagaaatgagcaagaacaacggcgtggcagg

SEQ ID NO: 44392 - DNA, 278 bp, Zea mays
ctttataagggctggagtatgcagtgggtctcagatgcagacagtcatagatcctacgagtatgaagtggtggaggtcctttcaaacttcacagtggaagctggtgtgactgttatccccttggtcaaggttaaaggttttgtgagtctgtttgcaccagcaaaggacaaaccatcatttgttataccatcaagtgaactacttcgcttttcccacagcatcccatttttcagaacagtgggaaacgagaaggttggtgtcccttgtgggtttcttga

SEQ ID NO: 44393 - DNA, 276 bp, Zea mays
gactagttctagagcacagcctctctacattcagtgggcacatatcacgtctgcgcaagattgtagaaatggtatcaaaagattctctagttctaattgatgagattggcagcggcactgatccagctgaaggtgtagctctttcaaccagcattttgaagtatcttgcaagtagagtgaatttagccattgtgacaactcattatgctgatctaagtcggctccagtcagttgataaccgattcgagaatgctgcaatggaattttgtgtagaaa

SEQ ID NO: 44394 - DNA, 273 bp, Zea mays
cttaaccatgtgacttacctcattgagcagaacaaggctcagcatgttgtcatcgctcacgacgtggatccgatcgaacttgttgtgtggcttccagccctgtgcaggaagatggaggtcccttactgcattgttaaaggaaaggctcgccttggatcgattgttcacaagaagaatgcatcagtcttgtgtcttaccactgtcaagaacgaggataagcttgagttcagcaagattttggaggctattaaggcaaacttcaacgacaagttc

SEQ ID NO: 44395 - DNA, 274 bp, Zea mays
gacaaggtgttttttgcctcagtccgctctgggggcagcagccaagtttacttcatgactctgaaccgtaactgcatcatgagacggtgacgtggccctgggctggggctgtcccacactggacccagctctccccctgcagccaggcttcccgggccgcccctctttcccctccctgggcttttgcttttactggtttgatttcactggagcctgctgggaacgtgacctctgaggcctcatgccttcgtgatcacgtgaccatcctcttccc

SEQ ID NO: 44396 - DNA, 278 bp, Zea mays
ctcgccgtctgccttctgcgcctccatttcggcctctgtcccttgcaagttcaatctcacctccaaccatgggtaaagagaagtcccacatcaacattgtggttattggccacgttgactctggcaagtcgaccaccacaggacacctgatctacaagcttggaggcattgacaagcgtgtgatcgagaggtttgagaaggaggctgctgaaatgaacaagcggtccttcaagtacgcatgggtgctcgacaagctcaaggctgagcgtgagagaggt

SEQ ID NO: 44397 - DNA, 275 bp, Zea mays
caccacaagaaggacgaggagcagcccgccggcgagtacgggtactccgagaccgaggtggtcaccgccaccggcgagggcgagtacgagaggtacaagaaggaggagaaggagcacaagcacaagcagcacctcggcgaggccggcgccatcgccgccggcgccttcgcactctacgagaagcacgaggcgaagaaggaccccgagcacgcgcacaggcacaagatcacggaggaggtcgctgccgcggcggccgtcggcgccggcggctacgt

SEQ ID NO: 44398 - DNA, 271 bp, Zea mays
atcaccgaagcgggagcggccaaaatgaagtttaatccctttgtgacttccgaccgaagcaagaatcgcaaaaggcatttcaatgcaccttcccacattcgaaggaagattatgtcttcccctctttccaaagagctgagacagaagtacaacgtgcgatccatgcccatccgaaaggatgatgaagttcaggttgtacgtggacactataaaggtcagcaaattggcaaagtagtccaggtttacaggaagaaatatgttatctacattg

SEQ ID NO: 44399 - DNA, 264 bp, Zea mays
agcgcgtccacctcccaaacccctactcccccaggaagcaatggcttcccccacccagggccaggtcatcacctgcaaagcggcggtggcgtacgagccgaacaagccactcgtgatcgaggacgtgcaggtggcgccgccgcagccggcgaggtccgcgtcaagatcctcttcaccgcgctctgccacaccgaccactacacctggagcggcaaggatcctgagggtctttttccttgcattcttggccacgaagctgctgga

SEQ ID NO: 44400 - DNA, 271 bp, Zea mays
cgcttcttgaagatggtaagaaattggaaatgacatattcagtgaagtgggtagcgactgatgtgtcatttgcacgccgttttgaagtgtacctggactatcctttctttgaacaccagattcactggttctccattttcaactctttcatgatggttatttgcctaactggtttggtttcaatgatattgatgcggactttgagaaacgattatgccaaatatgctcgtgaagatgatgatctagagtccctggagagagatgttaatga

SEQ ID NO: 44401 - DNA, 268 bp, Zea mays
cagaagagcggcggcgcgggcggacaaggagcaggcggaggaggagttgtgccaagccacaatgggtatctcgcgtgactcgatgcacaagcgccgagccaccggtggaaagcagaaggcctggaggaagaagcgaaagtatgagcttggtcgccagccagccaacaccaagttgtcaagcaataagacggtgaggagggtccgtgttcggggaggtaatgtgaaatggagggctcttcgccttgatactggtaactactcatgggga

SEQ ID NO: 44402 - DNA, 272 bp, Zea mays
  unsure (1)..(272): unsure at all n locations
caagttccttctgccaagcacaacacagaccatcgtctgcccgcccaactgcacccgccgccgtcgcctcccaaaacccaaccaaaccctagattcgccgccctcagctccggtcagaccctccccccttcgaagatgccgaacctcgagtaccggatgtatgaacagcggttancggaagtggatgatgcggtgatgatccatgtgatgcacatcgctgacatgggcgcgtacgnctccctgctcgagtacaacaacatcgagggcatgat

SEQ ID NO: 44403 - DNA, 270 bp, Zea mays
gcgccttccgcgaactgaggtctcccgagaggccgagaccaccccgatgtccgccatggagaccgacatcaacgcgccgccgcccgcctcagccggcgagggatcctccgtggtcggtccgtcctcctcatcctcccgcaagcccaacaagcgcttcgagatcaagaagtggaacgccgtcgcgctctgggcatgggatatcgtcgtcgacaactgcgccatctgccgcaaccacatcatggatctatgcatcgagtgccaggcgaacca

SEQ ID NO: 44404 - DNA, 262 bp, Zea mays
caggactacaacagggaaccgtgtctttagtgccctcaagggagcattggatggaggcctggatattcctcacagcgagaagaggtttgctggattcaagaaggacgacaagcagttggatgctgatacccaccgcaggtacatctatggtggccatgttgctgactacatgaagaaccttgctgaagaggagccagaaaagtaccagagccacttcagtgcgtacattaagaaaggagttgaggctgatgaaatagaagcg

SEQ ID NO: 44405 - DNA, 176 bp, Zea mays
ggagcaggcggaggaggagctgtgtcaagccacaatgggtatctcacgcgactcgatgcacaagcgccgtgccaccggtggatagcagaaggcctgcgaggaagaagcgaaagtatgagcttggtcgccagccggccaacaccaagttgtcaagcaataagacagtgaggagggtc

SEQ ID NO: 44406 - DNA, 264 bp, Zea mays
accgtgtctgtaccagggctacttgattgacacaatgtcgtttgttgacgccctgccttctctgcgatcgaggcagtggcaggctgtggttctggtaatgcttgacgcgctctctgtgcaccagcttcccgcccttgctccagtcttttcgaattcgaagcttgtgcaaaagatgttgaacgctgctcaggttagcagagaggagtatgactccatggtggacctgtttctaccgtttggaagatccgtccaggcgatcacgcc

SEQ ID NO: 44407 - DNA, 269 bp, Zea mays
gcggtcgtaagggctgaggatttttggtccgcacgctcctgatcctgactcaccgctgttcgctactcgcagtagtacaagtcggtcaggaagcccgcgcgcaacagccatggcttttaaggataccggaaaaacacccgtggagccggaggttgcaattcaccgaattcgaatcaccctaacaagccgcaacgtaaaatccttggttataggtgtgtgctgacttgataagatgcgcaaaagtaaagaatctctaagtgaaaagacca

SEQ ID NO: 44408 - DNA, 253 bp, Zea mays
gttccacttgtgctaaatggcagtgactctgtgattcagtattatgtgccatatctttctgctatccaactatttgcagatccatcaagacctgcttcaagaaacaggcgtcctggggatgaaagtgatggggactctatggatactagcagtgagagcagcattgagaatgacgttgagcggctaagagtctcatcatcactggaaggtaaacatcgactggaaaatggtggcatacgaagtgatgatggtg

SEQ ID NO: 44409 - DNA, 262 bp, Zea mays
gaatgatctgcctggtctgactgacactgagaagccaaggatgaggggtcccaagagggcctccaagatcagaaagctgttcaaccttaacaaggatgatgatgtacgcaagtacgtgaacacataccgcaggacattcactaccaagaacggcaagaaggtcagcaaggcacctaagatccaacggcttgtgacacccttgaccctccagaggaagcgtgctagaatcgctgacaagaagaagaggataactaagaagaag

SEQ ID NO: 44410 - DNA, 246 bp, Zea mays
ctgcgttgtaactgcgttatctctatgttgctgagcgtaaaatagttactgctccagggtgctttgttatttgatgcaccaacgggtggcagtgccgggcatgtttggatcgtagcctcacttgccacactttgcctaacttttctgcctaatgttagtttttcaattcgaacgactaaccttaggcaaagtatggcatagttagccacgaaccaaacaggcctgagtcattcagttttaattatg

SEQ ID NO: 44411 - DNA, 308 bp, Zea mays
  unsure (1)..(308): unsure at all n locations
gaaatcatgcgtcttcaacatatcatcattctgcagaacaagatcgatcttatccaggaaagcgcacgnntgaatcagcatgaagcaatccaaaaattcatccagggaacaatagctgaaggtgcacctgtggtgcctatatccgcccagctgaaatacaacattgatgttatctgtgaataccttgtgaagaaaatccccatccctgaaaggaactttacctcacctcccaacatgattgttattcgctcctttgatgttaacaagcctggttcagaggttgatgacatgaggggtggtgtagctgg

SEQ ID NO: 44412 - DNA, 301 bp, Zea mays
  unsure (1)..(301): unsure at all n locations
aagctaggggagcactgccttccaagtttgactgcgattatgcctatgtcttggggcatgtgtgctaccacatcatagctgccggtttgaacggttacatggccacagtgacaaatgttaagagtccagtgaacaagtggcgatgtggtgcggctcctatttcgtctatgatgactgtgcagcgatggtcgcgtggcccttcagccacccaaatcggaaagcctgctgttcacatggctagcgttgacttgaaagganaagcatacgatgtattgaggcagaattcttccaggtttttgtt

SEQ ID NO: 44413 - DNA, 301 bp, Zea mays
catttcttctctctctgctcctccgcctccgcctccgcctgatccatccaagacagggatcgccatgtcggactcggaggagcaccacttcgaatcgaaggccgacgctggggcgtccaagacctacccgcagcaggctggcaccgtccgtaagaacggcttcatcgtcatcaagaaccgtccctgcaaggttgtggaggtttctacctccaagactggtaagcatggccacgccaaatgccactttgtcgccatagacatattcaatgggaaaaagcttgaagatattgttccttcatca

SEQ ID NO: 44414 - DNA, 299 bp, Zea mays
ggtcagcggtcgccgataatatgtccggcaagagcacgctcagtgaggtccgcaccagctccggcaccttcctcaggaagggccaggatcctattgttgagggtatagaggacaaaattgctgcatggacattccttccaaaagagaatggtgaagatatccaagtcctaagatataagcatggggagaagtatgaaccacactatgattacttcactgacaatgttaacactgtccgtggtggtcatcgctacgctactgttcttttgtacttaactgatgtaccagaaggaggggaa

SEQ ID NO: 44415 - DNA, 297 bp, Zea mays
cttcaggacaaaatcaataattggagggccacagctcttattttgacatccatccttttcgctgctgttgtgttctggttcattggcatatttatccccagcgtcgatcgtttcaatgaagagagcgagcatggccttactgtcgccgagagatcaaatctcaggccgctccttgatgaaaaggacgagccacggacatctgactaaaacctacgcaagtcataaccttttatttcttggcttagtccgtagtttttcccttatgccatcaacatgtgaaatgtaaatttgcatgcc

SEQ ID NO: 44416 - DNA, 299 bp, Zea mays
tgggaaagattgacgaggctgctgatttgatgcaagaagttgctgtcgaaacatttggctccatggcaaagacggagaaaattgctttcattcttgagcaggtccggctatgcctagatcgtcaagattatgttcgagcacaaattttatcaaggaaaatcagtactagagtatttgacgcagatccatcaaaggaaaaaaagaaaccaaaggagggtgacaacattgttcaggatgctcctgcagatattccttccctcctagaattgaagcgtatctactatgaactgatgattcga

SEQ ID NO: 44417 - DNA, 297 bp, Zea mays
aagaagacgctcgtcttctacacgggccgcgcgccgccgtaggcaagacgccgtgggtcatgcacgagtaccgcctcgagggcagcctgccgcccaacctccaccgcggggccaaggacgaatgggctgtgtgtaaggtgatcaacaaagacttggcgggcaaggctgggcagcaacaaatggcgccgccgcacgccgtgtccgtgggcatggagcgcacagctcgctggccttcctcgacgacctggtgctcgacaacgccgacgacctgcccccgctcatcgactcgacaacgta

SEQ ID NO: 44418 - DNA, 296 bp, Zea mays
tgggcggcaacatcaccctgttccgagggctcctgtactgggtggcgcactgctggggtccaccgtggcgtgcttcctgctccgcttctcgacgggcgggcaggccacgggcaccttcgggctgacgggcgtgtcggtgtgggaggcgctggtgctggagatcgtgatgaccttcgggctggtgtacacggtgtacgcgacggcggtggacccgaagaagggcagcctgggcaccatcgcccccattgccatcggcttcatcgtgggggccaacatcctggtgggcggcgcttcga

SEQ ID NO: 44419 - DNA, 249 bp, Zea mays
gtggagtagtggtaggaaaagctcgtcgccgagtcgccgtacgggggctcggctcgggtgagcgagcggcggccggcgggtactgaggcctgagggcgaggcgatgggccgcctccgtgacgggcgagccttcctcgaccgcgcgcttgtcctctcgtcgctgctccttctcgcctccggcgaaatcttcttcgaggaacggttcgatgatgggtgggatagccgctgggtgacatctgattggaagaa

SEQ ID NO: 44420 - DNA, 292 bp, Zea mays
atcgtgcaaacgtgtatgttggtttccaggtccagctagatcttacggggatattcatgcatgggaaaatcccgacgttgaagatttctctgatccagatcttccgtgcacatctgtggcaaaagatccatgaaagtgttgttatggatctttgccaagttttggaccaggagttggatgcacttgagattgagactgtgcagaaggagacaatacatcccaggaagagttacaagatgaacagctcctgtgctgatatccttctctttgctgcacacagatggacgatgtc

SEQ ID NO: 44421 - DNA, 297 bp, Zea mays
gttccagatgaactccttgttgaaagggtggttggaaggcggcttgatcctgtaacagggaaaatatatcatttgaagtattctccgccagagaatgaagaaatcgcttcaaggcttacacaaagatttgacgatacagaagaaaaggttaagttgaggctggagacttattaccaaaatatcgagtccttgctatcaacatatgagaacattattgtcaaagtgcaaggagatgccacagtggatgctgtctttgctaagatcgacgagctgctgggttctatcctggagaagaaa

SEQ ID NO: 44422 - DNA, 286 bp, Zea mays
ccaaggcgtccgaaatccctgagctcgctgtcatcaaggacctgcatcttaggacggttgatgagctcggtttagataggtcgattgtttcaggtttattggatgaattggagcaacttcttaaaggagttgctatgatgaaagagctgacccttaggacaagagattaccttgtttcctttggtgaatgtatgtcgacaagaatatttgctgcatatttgaacaaacttgggaaaaaagcacgccagtatgatgcatttgatattggctttataaccaccgatga

SEQ ID NO: 44423 - DNA, 286 bp, Zea mays
ggacggtcgagccggagaggaaaagctagctagcagctaccagctctcggccggcggtggtagtctgcctgcagctggggttagttagctgcaagggttgggagccatggggaggggtcgggtggagctcaagcggatcgagaacaagatcaaccgccaggtcaccttcgccaagcgccgcaacggcctgctcaagaaggcgtacgagctctccgtgctctgcgacgccgaagtcgcgctcatcatcttctccaaccgcggcaagctctacgagttctgcagcgga

SEQ ID NO: 44424 - DNA, 286 bp, Zea mays
caaggacaaggcgatcaagaggtttcaggtgaggaacatcgtggaacaggcggccatcagggacgtccaggaagcatgcgtctatgatggctacgtcctcccgaagctgtacgccaaggtgcaccactgcgtctcgtgcgcgatccacgctcacatcgtccgcgtccgatcccgtgagaagcgcagggaccgcaagccgccggagcgcttcaggcgcagggaggataggcctgctggtggacaaggaggcccccgccctggtcctggtgctgctgctacagctcca

SEQ ID NO: 44425 - DNA, 285 bp, Zea mays
atattctctcatccaggaccaagtagttttggcatccaagttggaaactgcaccagtaaccaatgttgatgttgatgtcaatgcatcagagcttctaaaagaaaagggaaatagcgctttcaaaagaagacagtggatcaaggcaattgagttttactcagaggccatcagtttgagtgacacaaatgcaacatattactgcaacagagcagcagcttatctggaactgggccgttttaagcaggccgaagcagattgtgaccgggccttactgttggatagaaa

SEQ ID NO: 44426 - DNA, 289 bp, Zea mays
aacctctcctatgttgatctttcaagcaattttttgcacggctcactgcctatgggcattggtgatttgagcgcgttgacattgctgaaccttcgtcagaacaactttactggcgaaatcccaagaacaatcaccaaacttaagaatctgttatacattgacttatcaagcaacaatttcaatggtagcatacctgatggcctccctgatgatctggtcgaatttaatgtttcctacaactacctgtctggctctgttccaagtaatttactgaaattcccagattcat

SEQ ID NO: 44427 - DNA, 282 bp, Zea mays
caagaccgatggcgcccaaggccgagaagaagcccgcggcgaagaagccggcggaggaggagcccgcggcggagaagacgaccgccgggaagaagcccaaggcggagaagcggatccccgctggcaagtccgccggcaaggagggcggcgagggcaagcgtggcaagaagaagggcaagaagagcgtggagacgtacaagatctacatcttcaaggtgctgaagcaggtgcacccggacatcggcatctcctccaaggccatgtccatcatgaactccttca

SEQ ID NO: 44428 - DNA, 276 bp, Zea mays
ctccgccgccgccgccgccgcatcaagcccccgccccgccgtcgcctgaggtagacaccaatccgccgccatggggcgtatgcacagccgcgggaagggtatctcatcgtcggcgcttccctacaagaggacgcctcctacctggctcaagaccgctgcctccgacgtggaggagatgatcacaaaggcagcgaagaagggacagatgccgtcgcagatcggcgtcctgctccgtgaccagcacggtatcccccttgtcaagagcgtcacgggcag

SEQ ID NO: 44429 - DNA, 271 bp, Zea mays
cggcgcgcacgctggccgagtatggtgcggaggccctggagaggatgttcctgtccttccccaccaccaagacctacttcccgcacttcgacctgagccacggctctgcccaggttacgggccacggcaagaaggtggccgacgcgctgaccaacgccgtggcgcacgtggacgacatgcccaacgcgctgtccgccctgagcgacctgcacgcgcacaagcttcgggtggacccggtcaacttcaagctcctaagccactgcctgctggt

SEQ ID NO: 44430 - DNA, 277 bp, Zea mays
caggagtgtccacaaaggtgatatgctctagcaggggatgtggcatctgacccaacgtagctatgatttcactggtgtgacctcatggtttgctgccaagtgtgaccttatccttcttctgtttgaccctcacaagcttgatataagtgatgagttcaaacgtgtcatttcatctttacgtgggcatgatgacaaaatacgcgtagtgttgaacaaggccgaccaagttgacacacaacagcttatgagagtgtatggtgcattgatgtggtctctt

SEQ ID NO: 44431 - DNA, 279 bp, Zea mays
ccgacctcaccctctgctgacctcgctcccctcccgtagccgccggagccctcatcggtttatcctcccgctgccacctgcaacagccccgggcggagatccatcctaactctacgtgcaggtgaccccaagtcctcaagtgggtggcgcaaccatgcccaaggttaagaatccccacgttttcatggacatatcaatcggtggaggtagcgccgagaggatcacattcgagctatttgcaaatgtagttccaaagaccgcggagaacttcagagcact

SEQ ID NO: 44432 - DNA, 281 bp, Zea mays
agaattcaagcaattgtacatgaacttcatgaattgggtttgctcaaggatcactctttggaggggcggtatttccagaattacagttatggaggtgtgattcaggatgaccatattccatttttaagaagaggtgttccagttctgcatctgataccgtctcctttccctgaagtctggcacaccatggatgacaatgaagaaaatttggatgaatcaaccattgacaatctacacgaaatcctacaagtctttgtgttggaatatcttcattgtaatac

SEQ ID NO: 44433 - DNA, 266 bp, Zea mays
atcaaatagttgcaaggctgttgctattcttgcagggcacacagctgaggtctcggtgcttgcatatgaatatggtcgaaacctgggtctagccttccagttaattgatgatgttcttgatttcaccggcacctctgcatcccttgggaagggttcattgtctgatattcgccacggaattattactgccccgatgctatatgcgatggaggaattccacaactgcagaagttgttaccggggtttgataatctgcaaatgtgaat

SEQ ID NO: 44434 - DNA, 273 bp, Zea mays
ccccgcgtccgctagccctagccgccgtccgccgacttcatcgtcgccgtcgtctagacctcttcacgcactggaaagcttaaagtccgacatcaatggcgaacatcatcctgatctcatcatgtgccggaagcagcctggcatcgcgattggccgcctttgcgagaaatgtgatggcaagtgtgttgtctgcgactcgtacgtgcgcccatgtacgcttgtccgggtctgcgacgagtgcaattatggttccttcgtacggaagtgtgtgat

SEQ ID NO: 44435 - DNA, 272 bp, Zea mays
gaagttctcattcaatacaagaactagtgcatttaattctagacacaattcaaaagatcaaagcctctccaagtcccaaattcattccaaccacctagtgacttgagagagtgtgtgttcgtgttcatttgcgctcttgttgcttggatggctttcttgcttcctcattttgttcccaagtgaattgtaattaaagcaagattaaggagacccgatctttgtgaccacctcaacggggattaggttctttggaaccgaacctcggaggtgag

SEQ ID NO: 44436 - DNA, 273 bp, Zea mays
agctcttgatttgacacatcattgggaaatgttggatcaagagatcgaagccacgatcatgcctcttgtgtatcgctacaagatttgggtgctttgcaacgattgcaacaaggtctcagaggtgaactttcacgtgattggccacaagtgcagccactgcagatcgtacaacacccgaacgacatcgcgccctgcagatttatcgggaagcagctcaccttcaacagactcatccgacaacaacatatagagaagaaaccattgacagagcca

SEQ ID NO: 44437 - DNA, 273 bp, Zea mays
ctcgagccgatttgagagtcgacttaagcttgagacacggcttcaagttcttgagggtagacaacttgggaaatctgctggttccacaaaggggaagcccaagatagaagtgtatgaaaaggaccggaagaagggtactggggctttaacaactcctgctaagacatataaccctgcagctgatctggtactcacggaagaaacaccaaagaagtcagaattggcttcaaagaagaggaaacataatgaggtggaaactgaaccattagcaga

SEQ ID NO: 44438 - DNA, 261 bp, Zea mays
tggaagctgtggaacagcgctggaccatggtgtcacggccgtcggctacgggacagagaacggcaaggactactggatcgtgaagaactcatggggcagcagctggggcgagtccgggtacgtgaggatggagcgcaacatcaaggcgtccagcggcaagtgcggtatcgcggttgagccgtcatacccgttgaaggagggcgccaacccgccgaaccctggccccagcccgccgtccccgaccccggcgcccgccgtgtg

SEQ ID NO: 44439 - DNA, 237 bp, Zea mays
gaggctgtgggtggtggcggggccgtccatcttcacgcgcttctcctccttcggcgtcaccgtcatcagccaggccttcatcggccacatcggcgccacggagctggccgcctacgcgctcgtctccaccgtgctcatgaggttcagcaacggcatcctgctgggcatggcgagcgcgctggagacgttgtgcgggcagtcgtacggcgcgaggcattacaacatgctgggcatcta

SEQ ID NO: 44440 - DNA, 278 bp, Zea mays
cctcgacgcctctctctctttccccgagctctcgaaaccctaggtgcgtgccgaccggcggcggcggcgaggtgatggcgatggacccggacgcggtggcgaaagccttcgtggagcactactaccggacgttcgacaccaaccgcgcggcgctggtggggctgtatcaggagacctccatgctcaccttcgagggccagaagttccagggcccatccgccattgccggcaagctcggatctcttcccttccaggcctgcgagcaccagatcgtcacc

SEQ ID NO: 44441 - DNA, 269 bp, Zea mays
gtcgtggccgcagagatacacggtcgccgccggcatcgcgtcggtgctgtcgtacctccaccaggagtgcgagcagcgcgtcatccaccgggacatcaagaccagcaacatcctgctggacgtcaacctgagcccgcgcctgggcgacttcgggctggccaggctcatggaccacaacaagagccccgtgtccacgctcaccgcggggaccatgggctacctcgcgccggagtaccttcagtccggcaaagccaccgagcagaccgacg

SEQ ID NO: 44442 - DNA, 265 bp, Zea mays
ctgaatgggatgatacaaatgtgggtcgtgttggtccaccacttccttgctgctatgtgaagcttgtctcatgggaagaaggtggttacaagatttctgattctccgatgccgagaggagaggtcgtggttggcggacacagtataacaaaaggttatttcaacaatgaagcaaagacgaacgaagtatacaaggttgatgagaggggcatacgctggttctacactggtgatattggtcagttccatcctgatgggtgccttga

SEQ ID NO: 44443 - DNA, 266 bp, Zea mays
  unsure (1)..(266): unsure at all n locations
agatctgcaggatttcaataaagtaaacgagatctatggcaaatatttcccggtgccagcacctgcacgatcaacctaccaagtggcggcgctgccactgaatgcccggattgagattgagtgcatcgctgctctctaatcagatcatccaaccactcattaaatcatcaataagcacccaggaatttgtggtagaggtacctgtaccagttcagtgtctgaaaactgcgggtaacaaacctttgtgtcncggataagtgatgtgt

SEQ ID NO: 44444 - DNA, 266 bp, Zea mays
agacaagacaactgttctggagctgacgtacaactatggagtcacagaatacagcaagggcaatgcataagctcaggttgccattggcaccaatgatgtgtacaagagcgccgaggcggttgatctggcgaccaaagaactaggtggcaagattttgcggcagccagggcctctacctgggatcaacactaagatcgcctcttttgttgatccagatggctggaaagtggttctggttgacaacaccgacttcctcaaggaactcc

SEQ ID NO: 44445 - DNA, 267 bp, Zea mays
gatgacttgccgctggtcgggaacaaggcgccagacttcgaagccgaggctgtgttcgaccaggagttcatcaacgtgaagctctctgattacattgggaagaagtacgtcattctgttcttctaccccttggatttcaccttcgtctgcccgaccgagattactgcgtttagtgacagatacgaggaatttgagaagttgaacactgaggttcttggtgtttccattgacagtgtgttctcccaccttgcatgggtgcagacagac

SEQ ID NO: 44446 - DNA, 302 bp, Zea mays
caagccaccagcgctcgtcacctccaatcaacaaattcccaatccgccgcttcccatcccgcgttcgccgctccatttgatcgaattcccgatggcgcccaaggccgagaagaagcccgcggagaagaagccgacggaggagaaggccgagaagaagcccagggcggagaagcgcgtgccgggcaaggagggcggcgagaagaaggggaagaagaaggccaagaagagcgtcgagacgtacaagatctacatcttcaaggtgctcaagcaggtgcacccggacattggtatctcgtccaagg

SEQ ID NO: 44447 - DNA, 270 bp, Zea mays
agactagttctagggacttacgggattcaactgccggtgtgggaacttgtactgcgcactccaccgctactccgacaagcacgactgcaagttcgactaccggactgctgccagggacgccattgccaaggctaatccggtggtgaaggcagacaagctcgacaagatctagggggggttccctacggttgggtatcaggaagattgtaaaccgcggtaactcgtcatgcggaactgctgctttgcccccggcgcttttctctaccatgt

SEQ ID NO: 44448 - DNA, 296 bp, Zea mays
ctgaaggactccaagacccttctctttggtgagaaggaggttgctgtgtttggctgcaggaaccctgaggagatcccatggggttcggttggcgctgaatatgttgttgagtctactggtgttttcactgaccaggagaaggctgcagctcacttgaagggtggtgccaagaaggttgtcatttctgctcctagcaaggatgcccccatgttcgttgttggtgtcaacgagaaggagtacaagtctgacatcaacattgtctctaatgctagctgcacaaccaactgccttgctcc

SEQ ID NO: 44449 - DNA, 282 bp, Zea mays
ctagtcgagcgagcccttatagttaattaagcgagtcgatcgatccaagagaagaagaagcagcagacaggaatggcgtcgctctcgatgacgacgagcgcagggctccgcgcgcagtggacgcctaggcagaacaagctgttcgagcaggcgctggcggtgtacgacaaggacacgcccgaccgctggcacaacatcgcctgcgccgtcggcgcgggaagtccgcggacgacgtcaggcgctactacgagctgctggaggaggacgtcggccacatcgagt

SEQ ID NO: 44450 - DNA, 280 bp, Zea mays
agcaatacaaaccatgagcatgatcagccgcctcatctccgcttgagggatcctacagtacccgaacgagtaaatgttgcactgtatgcagcgccagaatcacgctattgcccagcccgggtttacgaatatatctctgatgagaaaggtgacccaaagcttcatataaatgcacagaattgtcttcattgcaaggcttgcgacatcaaagatccaaagcagaacatcgagtggacagttccagaaggtgaaggtggccctggttacacagtattgtaga

SEQ ID NO: 44451 - DNA, 298 bp, Zea mays
cacgttttaagctgcgagcgagatctgctttcacagcgtggctgaccagcagatccgtcgttgccggaacccacgctcgccggctgcgaatgcatctgtagcctgctcttcgtccacacggacaattggacgagctagactctgcgtcgccggcgatggggtgctccttctcagggctgaacgcactgtacgacaccgtcggcggtcggggtggtgacgtctgggttaacgactaccacttccgcgtgctccgcaggctcggcgatgccggccctgcgggctcgtcggtcttcctcgt

SEQ ID NO: 44452 - DNA, 262 bp, Zea mays
  unsure (1)..(262): unsure at all n locations
ccaaacacttgcgccgccgctgcctcacaggtaaggccgccatggtctccggttcgggcgtgtgcgcgaacatncgtgggtcgacgcgcgccaccacatgctgggccgtctctcctcgatcatagccaaggagctgctcaatgggcagaaggtaggtctagtccgctgcgaggagatctgcatgtcgggcggcctcgtccgtcagaagatgaggtacctcggcttcttccgcaggcggatgaacacaagcggtccgaggggc

SEQ ID NO: 44453 - DNA, 274 bp, Zea mays
ctcatttccactttccactccgcctccgctgccgatcgccgtccccgaccgcagtgcaggactgaggatgagtgaagaggataaggctgctgcttctgctgagcagcctaagagggcccctaagctcaatgaaaggatcctctcctctctgtccaggaggtccgtagctgctcatccatggcatgatctcgagatcggtcctggtgctcctgctgtattcaatgttgtggttgagatcacaaggggaagccaagtcaatacgagcttgacaaga

SEQ ID NO: 44454 - DNA, 296 bp, Zea mays
attcgacgatctagttccctgccctttccagcaacctgatcggagctgcatcgtctactctgaaaagatcacaggagattgaaatcggaccatcaaagaagcatcccaaagttgatgagcaggtaccattacctgatagtcatctctcttgtattcttgaatttgatggtgcctctaaaggaaatccagggaaagccggtgctggagcaataataaggcaggtagatggttccgtgattgctcaactacgtgagggtctgggcattgcaaccaacaatgctgctgaatatcgtgca

SEQ ID NO: 44455 - DNA, 240 bp, Zea mays
agggacttcttgaagaacatgtgcaatagagaatcctgccggtttttacaccctgggacacatacagcggctgcgagcgccaatgttgaagtatgccgtgattttaaacgaggagaatgcaatcgacctgcctgtcgctttttgcatccatatacaagttgaagttttctgttagctaaacttgagtgctctgcccaccgcggccgctactgctgtgctgctgctgctgctgctgccgcc

SEQ ID NO: 44456 - DNA, 289 bp, Zea mays
aaagcgagaagaccagaaggtgagaagagagagagagagtgtgtgtgatcggtacaaggatcaccgctgtgcctgcgcgtgctgcttcaccgaatcgagtcagatcctgtccgaatccgagctaagggatggcaaccggtagtgaagcctcgaaggcagctgaggctgtggttgactggcataaacacgacagcaagaggatgctccatgcggtttaccgtgttggggatctggaccgcacaatcaagtactacacggaatgctttgggataaaactgctgaggaaaag

SEQ ID NO: 44457 - DNA, 291 bp, Zea mays
agtaagcagcagcaggaaccctagcaccgccgcatccgcagccatgggtatcgacctcgttgccggtgggaggaacaagaagaccaagcgcacagcgccgaagtccgacgatgtttatctcaagctccttgtcaagctctaccgtttcttggtcaggaggaccaagagcaacttcaatgctgtcattctcaagaggctcttcatgagcaaaaccaatcgcccaccaatctccatgcgccgccttgtcaagttcatggaaggaaaggagaagaacattgctgtgattgttgg

SEQ ID NO: 44458 - DNA, 245 bp, Zea mays
atcgtgaacccgccgccgacgcagcagcaggagacgcgccaaggagagcccgcaaggaggcgactatgagggccaagtggaagaagaagcgcatgaggaggctgaagaggaagcgccgaaagatgaggcagagatccaagtaggctgatggggattgtggatggtggtgtcggcatagttgtgttacgtttcttcgatgcgtgagttcatggagagatgtcacatcctagttcgtcgtcaccgtt

SEQ ID NO: 44459 - DNA, 287 bp, Zea mays
cacaaagtctaaacctgaaaacggaggctgtcatgacgatctttagtaaagcagtacggaagttattcttgagctacattcagagagcaaaagaagctggaaaccgcattgaaactgcaaaagaactgaagaagttaatttccttcaacatagttgttgttaccgagcttttagctgacattaaaggagaactatctccagttgctgaaactgaagcatcaagtgcagcttcagattctgaaggagaggatggtgaacatgaatgggaatcattggatacactgagg

SEQ ID NO: 44460 - DNA, 243 bp, Zea mays
gccgacttcatcaaggtcagcgacgacgaggtggccttcctcacgcgcggggacgccaacgacgagaagaacgtgctgtccctgtggtttgacgggctcaagctgctcgtcgtcaccgacggggacaagggatgcaggtacttcaccaaggacttcaagggcagcgtgcccggcttcaaggtcgacaccgtcgacaccacgggcgccggcgacgccttcgtcggctccctcctcgtcaaggtc

SEQ ID NO: 44461 - DNA, 218 bp, Zea mays
ttccactccgacattcacgtgcagctgtcgggagcaggcaatggcgccggatctaagcgaactcgccgccgccgctccagcccgtggcgcctacctcgccggcgtcggtgtcgcggtcctcctcgctgcctccttcctcccagtagccgagtcgtcctgcgtgcgagataactcattggtgagagacataagccaaatgccgaaaagcagctatggga

SEQ ID NO: 44462 - DNA, 263 bp, Zea mays
ggcttctcctcccccctgtatcaagtcctcctcgggttagggttccttagggttttgtggaggggcgatggcggcggctgatgtggagtaccgttgcttcgtcggcggacttgcctgggccaccagcaacgagtcgctggagaatgccttcgcctcctacggcgagatcctcgactccaaggtcatcaccgaccgggagacggggaggtcccgcggcttcggcttcgttaccttctcctccgagaactcaatgctcgacgtta

SEQ ID NO: 44463 - DNA, 296 bp, Zea mays
gtatttagaagcgcccctcctcctctcccccatccgtacccaatctaatcgacacccggccgagatgggccgcaagttcttcgttggtggcaactggaaatgcaatggaaccgcagatcaggttgagaagattgtcaaaaccctgaatgaaggaaatgttccctcttcagatgttgttgaggtcgttgtcagtcctccttatgtgttcctcccggtggtcaagagccagctgcgccaagagttccaagttgctgctcagaactgctgggtgaagaagggaggtgcattcactggtg

SEQ ID NO: 44464 - DNA, 293 bp, Zea mays
  unsure (1)..(293): unsure at all n locations
ctcctcctttttctccactccgcttttgcttggttccatcgggccggagaggagaagctagctaactagcagcagcnnnnnnnnnnnnnnnnnnnnnngagggtagctgcagctggggctagctggaaaggtcgggagccatggggaggggccgggtggagctgaagcggatcgagaacaagatcaaccgccaggtncaccttcgccaagcgccgcaacggcctgctcaagaaggcgtacgagctctccgtgctctgcgacgccgaagtcgcgctcatcgtcttctccaaccg

SEQ ID NO: 44465 - DNA, 291 bp, Zea mays
gaaagctgaaggtttcagttgtagcagttccaaaaacaatcgacaatgatatacttttgatggataaaacatttggttttgatacagctgttgaagaagcccaacgagccattaattccgcatatatagaggcacgtagtgcttaccatggtattggcttggtcaaattaatgggaagaagcagcgggtttattgcaatgcacgcttccctttcaagtgggcaggtcgatgtctgcttaatacctgaggtaatataaatgtagcttttactatgtttaaaactgccatatg

SEQ ID NO: 44466 - DNA, 290 bp, Zea mays
aaagaggagtggaagtttgatacactttgtgatctttatgatacactcaccatcacccaagctgttattttctgcaatactaagagaaaggtggattggctcactgaaaaaatgcgtacaaataacttcaccgtatcagctatgcacggtgacatgccccaacaagaaagggatgccattatgggtgagttcaggtctggcgcaactcgtgtgctaataactacagatgtttgggctcgaggactggacgttcagcaggtttcacttgtcataaattatgatctcccaaa

SEQ ID NO: 44467 - DNA, 288 bp, Zea mays
aaggacttcaagggcagcgtgcccggcttcaaggtcgacaccgtcgacaccaccggcgccggcgacgccttcgtcggctccctcctcgtcaacgtcgccaaggacgactccatcttccacaacgaggagaagctccgcgaggccctcaagttctccaacgcctgcgggccatctgcaccaccaagaagggcgccatcccggcgctgcccacggtcgccaccgcccaggacctcatcgccaaggccaactagatggccgcacgccccgccgttccaccacgtcactgtc

SEQ ID NO: 44468 - DNA, 291 bp, Zea mays
gaagactgttgaaacccgagctccatcttttgatgaaaaagaaagagaaggatgcatgtcaaagtgcaaaagggaggaggcaaagatcactgcttgggaaaatctacagaaagcaaaagcagaggctgccattcgaaagctggagatgaaacttgaaaagaaaagatcatcgtcaatggacagaattctaggcaaactccgctctgctcagaagaaagcacatgacatgcgaagtgtagtttcttatagtgaagatcattgtggtgcgaggacaaccaagaagacatcttt

SEQ ID NO: 44469 - DNA, 292 bp, Zea mays
caacaagatggtcagagccgggtgcaaggtgaaaatctggattgccgactggttcgcgcagtcaacaacaagatgggaggcgacctcaagaaaatccagacagtcgggcgctacatgatcgagatttggaaggcggccgggatgaacctcgacggggtggagttcctgtggtcctccgaggagatcaaccggcgcgcccacgagtactggccaatcgtgatggacattgcccggaaaaacaacgtcaaacggataatgagatgctgccaaattatgggcagaagtgaccagg

SEQ ID NO: 44470 - DNA, 295 bp, Zea mays
agacttcttcctctctggatcttacacgaaacaggactacattgacagcatggaaggagcaactctctccggcaggcgaacgtcggcctacatctgcggtgccggggaggagctgctggccctccgaaagaagctactcatcgacgacggcgagaaggcgctggggaacgttcaagtcctgcaggctagctgaacaacccctcctgcactgcagagaagcttggatctttccaaccacacatacatgctggaatggacaaaccaaccaaccattggcttttctcgcttcagggtg

SEQ ID NO: 44471 - DNA, 284 bp, Zea mays
ctcttcgcttccaagatgacgaagcgagggcgtggaggttcggatggtaacaagttccggatgtcactgggtctaccagtggcagctactgtgaactgtgccgataacactggagccaagaacctgtacatcatttctgtgaagggaatcaagggtcgccttaacaggcttccttctgcctgtgttggtgacatgattatggcgaccgtgaagaagggaaagcctgaccttagaaagaaggtgatgccagctgttattgtgaggcagcgcaaccatggcgccga

SEQ ID NO: 44472 - DNA, 293 bp, Zea mays
aaatcttccgttctcaaaccaacctaggcaattggccgcagcctctcaccctcgcgagtcccgacctcccgcagccgccgcacagatggcacccaaggcggagaagaagccggcggccaagaagcccgcggaggaggagcccgcgacagagaaggtggagaaggctccggcggggaagaagcccaaggccgagaagcgcctcccggcgggcaagtccaaggagggcggcgagggcaagaaggggaaaaagaaggcgaagaagtccgtggagacctacaagatctacatcttca

SEQ ID NO: 44473 - DNA, 284 bp, Zea mays
gtcgctcacatctttgcatccttcaatgacaccttcattcatatcactgatttgtctgggagggaaactctggttcggatcaccggtggcatgaaggtgaaggctgaccgtgacgagtcgtcaccttacgctgctatgcttgctgctcaagacgtcgcacagcgctgcaaggagcttggcattactgcactgcacattaagcttcgcgccaccggaggcaacaagaccaagacccctggacctggtgcccagtctgccctcagggcgcttgctcgttccgggat

SEQ ID NO: 44474 - DNA, 284 bp, Zea mays
gtcgacaccttgcttcactgctcctctaattccagcgagaatggatcacgttcaaagccatgccctcctcgcccaggggaaaagggtgaaatgcatgtggtgcctgtaccattgcctttagtatctggtctaagcagtgttagaatcaacattcctcctgatctacgaccacctgaagcaagacagaatatactttctgcagtgcaagaactaggaaagcgctacccccaaggacatgggtattcaagaacctgaactagttgacttggtacataaacttgaag

SEQ ID NO: 44475 - DNA, 284 bp, Zea mays
gattgttccaggtattagcagtcgaccggttcctcggagcacgatgaagtttgttgctgcctacctgcttgctgtcctcgctgggaacgccagcccctccgctgacgatttgactgccattctggagtcagttggctgtgaagttgacaatgaaaagatggaactcctgctgtcccaactgagcggtagggacatcaccgagctcattgccgcgggcagggagaagtttgcttcagtcccatgtggtggcggcggtgtcgctgttgcggcagctgcacctgctg

SEQ ID NO: 44476 - DNA, 288 bp, Zea mays
cgccaacggcacttctgtggctgacaagcgcttcaagacattgccgacgagtgagatgctaccgaggaatgaagtccttggtggatacatctttgtctgcaacaacgataccatgcaggaggatctcaagaggcagctttttggtttgccagcaagatatcgtgattcagtccgagcaatcactcctggcttgcctcttttcctctataactacacaacccaccagcttcatggggtatttgaggctgccagtttcggtgggtccaatatcgatcctactgcatggga

SEQ ID NO: 44477 - DNA, 285 bp, Zea mays
gtggcaattgatggtggccttattacacctgtccttcaggatgctgacaagctggatatttatttgctctcgcaaaattggaaggacctagtcaagaaagcacgtgcaaaacagctccaaccaaatgattacaactctgggacttttacactgtccaacttgggtatgtttggtgtagatcggtttgatgcaatccttccacctggccagggagctattatggctgttggagcctcgaaacctacagttgtggctgataaagatggtttctttagcgtcaagagc

SEQ ID NO: 44478 - DNA, 282 bp, Zea mays
gcaagaactgccggagacctgggcactttgctaaggagtgcccatctgcgcctacgtgcaataactgtaaccttccaggccacttcgcagcagaatgcacctcaaaaactgtttgctggaaatgcaaagagcctgggcacattgcgagtgagtgcaagaacgaggccctgtgccacacctgcaacaaaacaggtcacttggcgcgtgattgccctacttcaggggctaacgtcaagctatgcaacaaatgttttaaatcaggccacgtcgccgttgactgca

SEQ ID NO: 44479 - DNA, 281 bp, Zea mays
cgcctagaagaggaaggaagaacagagataagcgacaacgcgtccctcctcgccttcctcccgcctcgagctcttcccggagcaaccggagccacagacgtcaggacagcctagcgcgttccacgccggtatgcagaaccagatcatgtgccatgcttgccggacccttctgctctacccgcgtggcgcgtccagcgtctgctgcgcggtttgccaggccatcaccaccgtgccgccaccaggattggagatggctcagcttatatgtggtggctgtcgaa

SEQ ID NO: 44480 - DNA, 281 bp, Zea mays
ctcgttcctgtcgcgcagcacgacctccacttcacatctcccccagcggcggcgcggtcagttgaacaatggcggactccaaggccacctcggcggtcaccctccgcacccgcaagttcatgaccaaccgcctcctggcccgcaagcaattcgtgcttgaggtgatccaccccggccgcgccaacgtctccaaggcggagttgaaggagaggcttgccaaggcgtacgaggtgaaggacccaaacaccatctttgtcttcaagttccgcacccacttcgga

SEQ ID NO: 44481 - DNA, 294 bp, Zea mays
cgagttctcctcaaccaaattcaaagtcacagcggcgaaactctcggcgatgtctggccgcggcaagggcgggaagggtctgggcaagggcggcgccaagcgccaccgcaaggtgctgcgtgacaacatccagggcatcaccaagccggcgatccgcaggttggcgaggaggggcggcgtcaagcgcatctccgggctcatctacgaggagacccgcggcgtgctcaagatcttcctcgagaacgtcatccgcgacgccgtcacctacaccgagcacgcccgccgcaagactgt

SEQ ID NO: 44482 - DNA, 275 bp, Zea mays
atcagttctgttcctcttgctgtcaatcccatcactcgttgtgtaccggacatatggaagcatatccatgcaccacaacattgctctcatgtttctctctggttactttgtgaatggtccatactctctgatcaccacagctgttgcaactgatcttggcacccaagacgctatcaagggaaattcacgggcgctggcgacggtttctgcgataattgacggcactggttctgttggtgcagctctgggtcccttgcttacgggttacatctcaa

SEQ ID NO: 44483 - DNA, 275 bp, Zea mays
gattctgctctgatcaaggctatcgaggctgtcccggagctgaaaacctatcttggcgcccggttctctctcagggatggtgacaagccccatgagatggtcttctaagcttctagttttggagttcgtaggaagctgttttgtctgtgttcttgtacttctgagttttgtaccagtagcgaacgtttcattgtgattgaagtcttcctgccaaatatcataagatctaagaaagttctatccgtgttggtggttcagcagtgcactatctgcat

SEQ ID NO: 44484 - DNA, 277 bp, Zea mays
ctggaagcattgatcgctgctgttaacagcagtgatagcagtcacattgttcatgtccctcctggtgaaaatgctctctctgatgtcctcctaagcactcctatatatcctggtgaagaaggtggaagtggttttgctgcttccgcagcagctgccgtagctactggagcatctggatttgaatttggtgtggacccaaatgtagatccagagttggcactcgccctgcggttgtctatggaagaagaacgagcaaggcaagaggctattgcaaaaa

SEQ ID NO: 44485 - DNA, 276 bp, Zea mays
gagcttgcaagatttgttgagcatgtggataaggacaatgatggtattattacttttgaggagtggagagattttactttgctttatcctcatgaagcaaccatggaaaacatatatcatcactgggaaagagtctgccttgtagatatcggtgagcaggctgctataccagaagggataaacaaacatgtaagtgcgagcaaatatctgattgcaggaggcatcgctggtagcgcatctcgcactgcaactgcacctcttgatcgcctcaaagta

SEQ ID NO: 44486 - DNA, 280 bp, Zea mays
gtccgccgtcgtgcgctcgctacccctctccctcgaggcctttgccggcgaagagcgcccagtcgcccaccaggatgaagtttgttgctgcctatctgcttgctgtcctcgctgggaactccagcccctctgccgaggacttgacatccattctggagtcagttggctgtgaagttgacaatgaaaagatggaactccttctgtcccagctgagcggtaaggacattaccgagctcattgccgccggcagggagaagtttgcttcagtcccatgtggcgg

SEQ ID NO: 44487 - DNA, 262 bp, Zea mays
ggaaaccctagccgccatatctcacgatccactcgagcaccaagccgagggaaggtgaggagcgatggcgcgcggcgtggtgtcggcgaagggcggcgcggtcgcgggcaagaagaaggggtcggtttccttcacgatcgactgcaccaagccagtggaggacaagatcatggaggtcgcctcgctcgagaagttcctgcaggagcgcatcaaggtcgccggcggcaaggctggcaacctcggcgactccgtcaccatctct

SEQ ID NO: 44488 - DNA, 268 bp, Zea mays
atctcactctcctccgaagccatcgtccacgtcccagcctccccggactctaggggcagaagctgcagcgtcgagatggtgaaggggcgcacggggcagcgcgtgaggctctacgtccggggcaccgtccttggatacaagcggtccaagtcgaaccagtacgagactacgtcgctggtgcagatcgagggggtgaacaccaaggaggacgtcgcgtggtactgcgggaagcggatggactacatctacaaggcacagacaagagcag

SEQ ID NO: 44489 - DNA, 257 bp, Zea mays
atctccccagcaatccctagcagaagccttccatcctcactcgctcgatggcccgcacgaagcagacggcgaggaagtccaccggcggcaaggcgccgaggaagcagctggcgactaaggcggcccgcaagtctgcccctgcgaccggcggagttaagaagccccaccgcttccgccccggcaccgtcgcgctccgggagatccgcaagtaccagaagagcacggagctgctgatccgcaagctgccgttccagcgc

SEQ ID NO: 44490 - DNA, 258 bp, Zea mays
gttgggagatacaagagcccagatgagcaccctttcttttccaaggatctgcctgagccccggttgccacctatgcaatacccaagggttttgcatcccattgctgattctatcaatatcaacaaagagatttggaaaatgtattttgatgaacttcttccaagattggtgaaagaaggaagtgatggtaatgctggatccagtgctctttgtgacacaacctgcttgcaggcactctccagaaggatccactatggg

SEQ ID NO: 44491 - DNA, 236 bp, Zea mays
ggcgaagacggtgtccatggtcaggggcctgatcagagaggttgctggctgtgctccttatgacaagcgtatcaccgagcttctgaaggttggcaaggacaagcgcgctctgaagcttgccaagagaaagcttggaactcaccagagggcagagaagaagagagaggagatgatgggcgtcctcaggaagatgagatcggctggtacgcagactgacaagaagaaataaagcattt

SEQ ID NO: 44492 - DNA, 148 bp, Zea mays
aatggatgttcttgctgtgaagcaagcgtgcaaatttgcaaaagatcatgctgttgcaaatggaccaattgtccttgagatggatacctacaggtaccatggccactctatgtcagatccaggaagcacttaccgcaccagggatgag

SEQ ID NO: 44493 - DNA, 251 bp, Zea mays
ctagtcccctgctccattctcagccgccgccaatcccttcccgtgctccgcaaccgctgagtgagaagaagagatggccggcaagggcgatggcccggctatcggcatcgatctcggcacgacgtactcttgcgtcggcgtgtggcagcacgaccgcgtcgagatcattgccaacgaccagggtaaccgcaccacgccctcgtacgtcgccttcaccgactccgagcgcctcatcggagatgcggccaaga

SEQ ID NO: 44494 - DNA, 245 bp, Zea mays
atcgagccgaagcctcatggcgcatcatctcctccatcgagcagaaggaggagggccgagaggatgaggaccgagtaacactcatcaaggattatcgtggcaagattgagactgagctgaccaagatctgtgatggcatcctcaagctgcttgagacccatcttgtgccgtcttccactgcccccgagtccaaggtcttctatctcaagatgaagggtgattactacagataccttgctgagttc

SEQ ID NO: 44495 - DNA, 244 bp, Zea mays
ccctcgtctcgtgccactttctcagtcccctctagccgccgcctaccgctcgcgctctcctcgcgttcgggaaggtcgtttcgccatggcctcggagacggagacgttcgccttccaggcggagatcaaccagctgctctcgctcatcatcaacaccttctactccaacaaggagatcttcctcagggagctcatctccaactcctccgatgccttggacaagatcaggtttaagagtttgacg

SEQ ID NO: 44496 - DNA, 105 bp, Zea mays
cgcagagacaggcgtcttcgtactcgcctatctccgcgacccaaagcgttcccccttctcccattcttctctcatttctcagcaccgccgccgctaccccctttc

SEQ ID NO: 44497 - DNA, 105 bp, Zea mays
atggtgccaattgttgagcctgagatccttgttgatggccctcatgacattgatcgctgtgcttacgtcactgagaccgtccttgctgcctgctacaaggcgctc

SEQ ID NO: 44498 - DNA, 194 bp, Zea mays
gccggagctcgacaaggacgaccgacgacgcacgcggagatccggcgtactgcaaattttgaaaactgaactgtaagatggcatcagcagagctttcccgtgaggaaaatgtgtacatggcgaactcgctgagcaggcggagaggtacgaggagatggttgagttcatggagaaggtagccaagactgttgact

SEQ ID NO: 44499 - DNA, 289 bp, Zea mays
gatcgccacgaccaagggcagagggccccggaggcggcgtagcaatggcggcaggctaccgggccgaggacgattacgattacctcttcaaggtggtcctgatcggcgactccggcgtcggcaagtccaacttgctctcacgcttcacgcgcaacgagttcagcctcgagtccaagtccacaatcggcgtcgagttcgccacccgctctctccaggtcgacggcaaggtcgtcaaggcccagatttgggacaccgcggctcagacgatacgtgcatcatagtgcgatta

SEQ ID NO: 44500 - DNA, 289 bp, Zea mays
ggacagtgaggagggtccgtgttcgtggaggtaatgtgaaatggagggctcttcgccttgatactggtaactactcatggggaagtgaagctgttacccgcaagacccgtatcctcgacgtggtctacaatgcatcaaacaatgagcttgtgaggacacaaacccttgtgaagagtgccattgtgcaagttgatgactgccccattcaagcagtggtacctcactcactatggagttgacattggtaggaagaagaaaacccctgctgcaagaaggataatgctgaggg

SEQ ID NO: 44501 - DNA, 285 bp, Zea mays
agtacggatcaagtatcaaggtcttcatcatggatccagctacttggagcacctcaatttcttgtctgctataagggctcaaggtgcatccggaccatctgtgaacttaagtgacggcctactatctgttgccgtcggtgtggctgggcaattatcaatcgagcagggccggtttgtaaccatggaagaggtcttaggtttgtagcctggtgataattcaggcatcctaatgtactgtaaaaccttttgtgtattattaggtatatgttcttaataatgctgcgg

SEQ ID NO: 44502 - DNA, 281 bp, Zea mays
ggccagtgcgcattacaaagacaggcatgtacaacttgttcttcatatcctgtgatccaaaactgagaggccttactatgagtggcaagactatctggaagaatcctggtgggtatctaccgggacgaatggcgcctttgatgaaattttatgttctcatgtcgctggcgtatctgttggtaatgattgtttggtttagccagtacgtaaggttctggagggatatattgccaatacagaattggatcactctaatcattgacactggtctgtttgagatg

SEQ ID NO: 44503 - DNA, 292 bp, Zea mays
ttctgttcgaagagtggttcagcattgcctacaaccttgaccgtgaattcggcccgaggttgaaggaccatatgcagtattgtgttaatcatccagaggaaattaacaagctctccaaggtgaaagcccacctataggatgtcaaagggatcatgatggacaacattgagaagatattggatcgcggggagaagattgagcttttggtgggtaagacagagaccctacagtcacaggcggacatgtgccacaggcatggcagagagttgaggcgaaagatgtggcttcagaa

SEQ ID NO: 44504 - DNA, 287 bp, Zea mays
gtgtggtgttacttcagaaggtgaaacggcgaaatgcaaaaaggttgtctgtgatccttcttacttgcctagcaaggtaaggaagattggaaaagttgcacgtgcaatcgctattatgagccacccaattccaaacacaaatgagtcccactcgattcagattattttgccgcagaagcaacttgggcgcgtgtcagacatgtatgttttctgttgctcatatacacataatgttgcgccaaaagggaagttcattgcatttgtgtctgcggaagctgagaccgata

SEQ ID NO: 44505 - DNA, 291 bp, Zea mays
gtgcgaaccaagcagaccccagcagaagaagcgaagtcgtcgccggagcaggaggaagagcgaggagcaacatgtcgtggcaggcgtacgtcgatgaccacctgctgtgcgacatcgaaggccagcacctcagcgccgacgccatcgtcggccacgacggcagcgtctgggcacagtccgagaacttccccgagttaaagcctgaggaggttgctgggatgataaaggaactcgatgaacctggaactcttgcaccaatggtatttttgttggaggtacgagtacatggtg

SEQ ID NO: 44506 - DNA, 282 bp, Zea mays
ggcagctcaggccctacatggagtccatggtgccacttcccggtgtctatgatccggacttcatcgccgctaaccagggctctcgtgccaacaatgtcatcaagggcaccaagaaagaacaggtggagcagatcatcaaagatatcagggagtttaaggagaagaacaaagtggacaaggtagttgtgctgtggactgcaaacactgaaaggtacagcaatgtatgtgctggtctcaacgacacaatggagaatctgctggcatctgtggacaagaacgagg

SEQ ID NO: 44507 - DNA, 280 bp, Zea mays
ggcagatggtgttgctaatatcaatgtcaccgacagccagatcccactgactgggccaaactcaatcattggcagagctgttgttgttcacgctgatcctgatgatcttggaaagggtgggcacgagctcagcaagagcactggaaacgccggtggccgtgttgcttgtgggatcattggactccagggctgaaaacgatcgccggacttgggggtgcctgagaggtccgtctcctgccgtccccagcagacgagcctgaacattcggagacatcgtgaa

SEQ ID NO: 44508 - DNA, 271 bp, Zea mays
gagctatttgatgatgtcattcttatagccgaagtcaaatcgtataccaaggtccacgtgaatatgcagttgacttttttggtgctatgggattcaggtgtccagaaagaaaaaacgtggctgattttttgcaagaagttttgtccaagaaagatcaacagcagtattggtgccactatgattatccataccaatttgtttactgtatcaaaatttgctgaagccttcaaaacatttatattggtaagagattgcatcaggattcaatgtt

SEQ ID NO: 44509 - DNA, 275 bp, Zea mays
ctccggtccctcgcgaaccctagagccgcaccagcacactcccgcagcagtagccgccgccgccgccgccgcagcccagccgtaggaaacaggaggaagatgccggcggggcacgggcttcggtcgcggacccgagacctgttcgcgcggccgttccgcaagaagggttacatcccgatcaccacgtacctgcgcacctacaagatcggcgactacgtcgacgtcaaggtgaacggcgccgtgcacaagggcatgccgcacagttctaccacggc

SEQ ID NO: 44510 - DNA, 278 bp, Zea mays
ggacgaggaagggtacccggccttcgcgctcgtcaacagggtcaccggcgaggccatcaagcactcccagggcgagggccacccggtcaagctggtgccctacaaccccggctaccaggacgagtcggtgctgtggacggagagccgcgacgtcggccacggcttccgctgcgtccgcatggtcaacaacatctacctcaacttcgacgccttccacggcgacaaggaccacggcggcgtgcgcgacggcaccaacatcgtgctctgagagtggtgcg

SEQ ID NO: 44511 - DNA, 264 bp, Zea mays
ggcctgagcaaaaaagagactcttctttgaaatatcagacacgatgtgttcgatgttttcccaacggaacaggatatgctcttagttctgttgaagggcgagtttctatggaattctttgatctatctgagtctgctcaatctaaggagtatgctttcaagtgtacatcggaaatctgaggctggcagggacacgtttatcctgtcaatgcattgctttccatccctatatggaactttgccacggagggtgtgatggattgtg

SEQ ID NO: 44512 - DNA, 270 bp, Zea mays
gtagcttggttttattcctgaaggggttaacttggatcctatcttgcctgtactggccaaggtttttgatcaggcactagaaggaggcggtgccaagaatattaacttccaagaattggcagcagatctagcacagataacttttgattatccattacaggatacctccgtattttgatttgattattagagccatcggagtattagaaggcatagctttggtgggagatcctgaatttgcgcttgtggatgaagcatacccatacatcg

SEQ ID NO: 44513 - DNA, 267 bp, Zea mays
gactagttctaggcaaacatgtggaatgaagccctaaacaaacgacttggcactgaggatttcgaccttcaggggatcattatggagattgaaagacgtggaatgtcttttgatcagttgctcaccatacccgagcaagacgaatgggtgtacagtgatggtaaatcaactacttgtgtcgccttcattactgcaatgtacaaggaggctggaatattcaccccttctcggagtcgatccaggtcaccgagtgtcatattcgtgacg

SEQ ID NO: 44514 - DNA, 78 bp, Zea mays
gtgcagcaagactacccagttgggtattagctttgctggtggttacattgccggtgtcttctgtgctattgtttctca

SEQ ID NO: 44515 - DNA, 255 bp, Zea mays
atctggtttctgcttattactatggtacttgagctccagtggcataatattgtacctcttaactagacctccttagaccaacaaggacatcacagcacaaatacatctctgctagtatagcaggtgatatggttactgcttctgcttactcgcatgagttgccacgatatggtcttgaagttggtctgaccaactatgcagctgcctactgcactggccttctgttggctcgagtgtgctcaagaccgtggttta

SEQ ID NO: 44516 - DNA, 278 bp, Zea mays
ctacatcatctctggccctgtggtggccatggtctgggagggcaagagcgtcgtcacaactggccgcaagatcattggcgccaccaaccccctggcttctgagcccggcaccatccgtggcgactttgctgtcgacattggcaggaatgtcattcatggaagtgacagcattgagagtgctaataaggagattgccctgtggtttcccgagggccttgctgattggcagagcagccagcacccctggatctacgagaagtaaacagtgaaagtttcac

SEQ ID NO: 44517 - DNA, 242 bp, Zea mays
gtgatccacctgctggtgttcagattcgtgagggtctgcactacaacccctacttccctggtggtgccatagccatgcccaagatgctcaatgatggagctgttgagtatgaggatggtactcctgcaactgaagcccagatgggtaaggatgttgtatcattcctttcatgggcagctgagcctgagatggaagagagaaagctgatgggagtgaaatggatctttctactatcactagcg

SEQ ID NO: 44518 - DNA, 288 bp, Zea mays
ctctctcttgctcgcactcgcggagatcgaagagaagcgcaggaggccccagcactagcgccgccccgccgccgcatcagacatggcgctggccgctcgcctcgtctcgcgctcccgtcagctatattcggttcaagccactttggggaatggaggtgtcactcaagttcgctcctttgccaaggatgcagctccagctgaccgtcctcctgtcagtggggatgatctcctgaagggcatattctttgaggtaaagaagaagtttgagacagctcttggtgttcttaa

SEQ ID NO: 44519 - DNA, 284 bp, Zea mays
caggactcccagaggcggccgtggcggcggtggcaggggtggccgcggcggtggcatgaagggcgggagctaggccgtcgtggtggcgcacaagcacgccggtgtcttcatctccaagtccaaggaggatgcgctctgcaccaagaacatggtcccgggagagtccgtgtacggagagaagcgtgtctccgttcagaatgaggatggaacaaaagtcgaatacagggtgtggaaccccttccgttccaagctggctgctgctgtgcttggtggtgttgacaaca

SEQ ID NO: 44520 - DNA, 291 bp, Zea mays
ccgacaggctaaagggctccacgctcgtcatcaacggaatggtcacggatgggtcagacgaatgggcgatctacggcggaaccggggtgttcgccatggccaccggtgtcatgaagagaagaaaccttgccggcggtagcaacgacgggaactctgacgagcttgccctggaagttttctgcccggtgtttggcgcatcacagcaaccaattagcaagcagcaggagtccatctcctccgtcaccaagatcggactatggggcggacagggagggtcggcacaggacatca

SEQ ID NO: 44521 - DNA, 280 bp, Zea mays
cgcttcataactttcaagatggacgacaagttcaaggagatagttgtggaccaggtcggggatcgcgctaggagctacgatgacttcacaaacagcctccctgagaatgactgccgatacgcgatctatgatttcgactttgttactgcagaggatgtccagaagagcaggatcttctatatcctatggtgccccatcctccgccaaggtgaagagcaagatgctttatgcaattacaaaccagaaatacaagagtggcctgcaatggcattcagttgaa

SEQ ID NO: 44522 - DNA, 234 bp, Zea mays
ttacctccgccatcatgggtcgcatgcacgctcccgggaagggcctgtcccagtcggcgctgccctaccgccgtagcgtgcccacgtggctgaagttgacgtctgacgacgtgaaggaacaaatttacaccttggccaagaaaggcctgactccttcccagataggtgtgattctgagggactcacatggtgtggcacaggtccgttttgtgaccggaaatacaatcttgagaa

SEQ ID NO: 44523 - DNA, 283 bp, Zea mays
ctcgtcagacgtcagccagcagttcgaaaccaaggatcgatccaggagcttccggaaggctaggcgcgcgtgcagcgtcgaggtgctggtgccggtgccgcccatggatcgggctcgcggatccgcgttcctgctcggcgtcctgctcgcaggatccttgttcgcgttttcagttgctaaagaggagaccaagaagctcgggaccgtgatcggtatcgatctcggtaccacctactcctgtgtcggtgtgtacaagaacggtcatgtcgagatcatcgccatg

SEQ ID NO: 44524 - DNA, 272 bp, Zea mays
ggataattcaagtatttcagacttgatgggtcttctgcaatctcagaccgccgtgacatggtccgagctttccagaacaggaatgatgtatttgttttcttgttaagcacaagagctggggggcttggtattaatttgactgctgctgatactgttattttttatgaaattgactggaatccaacacaagaccagcaggcaatggatagaacgcacagacttggtcaaacaaaggaggtaactgtgtacaggcttatatgcaaagatactat

SEQ ID NO: 44525 - DNA, 282 bp, Zea mays
cggagttccttgcagagggcactgctattgaggacctgttcaagcctgacagagtgctcatcggtggccgggagacccccgagggcaggaaagccgtccaggctctcaaggatgtgtatgctcactgggttcccgaggacaggatcctcaccaccaacctgtggtccgctgagctctccaagctcgccgccaatgcgttcttggcacagaggatctcctctgtcaatgccatctccgctctctgcgaggcaaccggagccaatgtctctgaggtggcttacg

SEQ ID NO: 44526 - DNA, 288 bp, Zea mays
gcaccgccgtcacgccatctcgccgggggcggaaccccgaccgcgagtatggggaacatcttcgtgaagaagcccaagatcactgacgtcgatagggccatcctcaccctcaagacgcagcgccgcaagctcgcccagtttcaacagcagcttgagaaggtaatcgaagcagaaaaggaagctgcacggcagttggttcaacagaagaagagagacagagctttgattgctctgaagaagaagaaagctcaggaagagctgttgaaacaagttgacacatggcaaatg

SEQ ID NO: 44527 - DNA, 274 bp, Zea mays
gcaagacttccgtccgagtctgagctcatctccgcgcgctgccgccgccgccgccgccgctcgacgcccaccgcgcaccatggcggaacagaccgagaaggcttttctcaagcagcctaaggtgttcctcagctcaaagaaatctggcaagggtaagaagccaggcaagggtggcaatcgattttggaagagcattggccttggtttcaagactcccagggaagcaattgaagggacctacattgacaagaatgtccattcactggaaccgttt

SEQ ID NO: 44528 - DNA, 270 bp, Zea mays
gtcgagtcttggactcgttgaacccgttcatgcatgctcgcggtgtggccttcatggtcgataactgctccacaactgctcgtttgggatctaggaagtgggcaccacgcttcgattacatcttgacccaacaggcgtttgtgactgttgacaagaaagcaccgatcaaccaagacctcatcagcaacttcatgtctgaccctgtccacggtgccatcgaagtctgcgctcagctgaggcccactgttgacatctcagtgaccgctgatg

SEQ ID NO: 44529 - DNA, 275 bp, Zea mays
ggcagagaagctcaaggctgagtacaccaagaagatcgacgcttacaacaacaagcagtctggagaccccacggcgtctggtgattccgacaagtccaagtccgaggtgaacgacgaggacgaggagggtgacgagtgatgtatgacggatgaaactctgtccaagtgtttgcagtcagggataaaatctcgtcgttgtcggcctaaccgggttttctcgaaggactttctagatgcagtagattagtgccgtcttctgagtagtttccttgcag

SEQ ID NO: 44530 - DNA, 277 bp, Zea mays
ctctagcagcagatcctcgtgcgagaaagcgctagcccttcgtactgtcccgatggcccgcacgaagcagacggcgaggaagtccactggcggcaaggcgccaaggaagcagctggccacgaaggcggcgcgcaagtctgccccggcgaccggcggagtgaagaagccccaccgtttccgccccggcaccgtcgcgctccgggagatccgcaagtatcagaagagcacggagctgctgatccgcaagctgccgttccagcgcctggttcgtgagatc

SEQ ID NO: 44531 - DNA, 277 bp, Zea mays
gacaaaaccagaccaccaaacaagtgccagcgccctctcgcagtcgccgcaatggagagcaccttcatcatgatcaagcctgacggcgtccagaggggcctcattggtgagatcatcagctgttttgagaagaagggcttctacctcaaggccttgaagcttgtcaacgtggagaggtcgtttgccgagaagcactacgccgatctcgcctccaagcccttcttccagggcctacgtggactacatcatctctggcctgtggtggccatggtctggg

SEQ ID NO: 44532 - DNA, 219 bp, Zea mays
ggacgagctgaccctggctaagactgacctggagatgcaggttgcgctgacatgaatgaagaactggcttacctgaagaagaaccacgaagaggagatgaaggaattcagcaaccaggcagtaggccaagtcaatgtggagatggacgccacccctggcattgatctgacccgtgtgctggctgagatgagggaacagtatgaagccctggcagagaag

SEQ ID NO: 44533 - DNA, 282 bp, Zea mays
gagaatccccaagcaaacaaacagggtagagggagaggagaggagaggagaggagaggttgggtctgggacaccatggctccgatgaagctgtacggggcggtgatgtcgtggaacgtgacgaggtgcgcaacggcgctggaggaggctggctccgactacgagatcgtgcccatcaacttcgccaccgccgagcacaagagccccgagcacctcgtccgcaacccgtttggtcaggttccagctctgcaggatggtgacttgtacctcttcgaatcacgag

SEQ ID NO: 44534 - DNA, 143 bp, Zea mays
gtcaaagatgaatccatgtttcttacttggaaaccccgaacaaacaccactagcacgaggcgctcgcgttggcgtcgctcaccgacgacgagaagaaacttggcgactgccatttcgacctctggaagcagtcctacatggcc

SEQ ID NO: 44535 - DNA, 274 bp, Zea mays
gttcacagcgtatcatcgttttccatcgctcctactcctatcatccagaaaatctgagcggtattgatggcgcccaaggcggagaagaagccggcggcgaagaaggtggcggaggaggagccctcggagaaggcggctccggcggagaaggcccccgcggggaagaagcccaaggcggagaagcggctacctgcgggcaagtccgccggcaaggagggcggcgacaagaagggtaggaagaaggcgaagaagagcgtggagacctacaagatct

SEQ ID NO: 44536 - DNA, 300 bp, Zea mays
gtcacagagcctctcgagatcctgctccacctccccttgttagctgaggataagaacgtgccatatgtgtttgttccatcgaagcaagctcttggccgtgcttgtggtgtgacaagaccggttattgcttgctcagtgaccagtaatgagggtagccagctgaaactacagatacagggtctcaaggactccattgagaagcttctcatctgatctgccgaagacctttcagtgtgatgggcctcatcgacacttttttcagaggcttggactggtgatggtgtcttgtttactttgcgc

SEQ ID NO: 44537 - DNA, 282 bp, Zea mays
ctcgtgtggccggagtctcccgttcggaacgccaagccccccctccggcgaaatggcccccaagcgaggtggcagggcgccggtgccggccaagaagaagacggataaagtgacgaaccctctattcgagaagaggccgaagcagttcggcatcggcggaacgttgccgcccaagaaggacctgcaccggttcgtcaagtggcccaaggtcgtgcgtatccagcggcagcgccgatcctcaagcagcgctcaaggtaccacggcgctcaaccgttcaccgca

SEQ ID NO: 44538 - DNA, 187 bp, Zea mays
gtaggatgaaggagggccagaacgacatcttctacatcactggtgagagcaagaaggctgtggagaactccccgttcccttgagaagctgaagaagaggggctatgaggtgctgttcatggtggatgccattgacgagtattctattggacagctgaaggagtttgagggcaagaagctcgtctctg

SEQ ID NO: 44539 - DNA, 285 bp, Zea mays
gggaggaccagtacagcctcgcctcccgcgacggcaaggtctgcctcgtgcgcacggaccgtgatgacgacgcgcagactggatcaaggacatgaagtacagcaccagggtgaaggatgaggaaggctaccctgccatcgtcctcgtcaacaaagccactggagaggctctcaagcattcccttggccagtcacaccctgttcttctgacccgccataatccagactccctggacgagtctgtcctgtggacagagagcagggacttggggatgggttccgctgc

SEQ ID NO: 44540 - DNA, 286 bp, Zea mays
tgttaacctggagagggtgggctttgggacaaagaacttcgacatggctatcgtgttcaaggatttcaagaaagacgttctccgcattgactccatcccttcagcatcgcttgacgcgataaaggaatggctggacacaactgacctcaagtactatgagagcaggctgaatctgaactggcgccctatcctgaaaactataatcgatgatcctcagaagttcattgacgatggcggctgggagttcctgaacatggaggcgagtgactcagagactgaggacaca

SEQ ID NO: 44541 - DNA, 297 bp, Zea mays
cgtccccaaacaagcaaccaccgcctccccgatctcgtcgagaggaagcccaatcccgaaaccgccgccctattccaatggcgcccaaggccgagaagaagcccgccgccaagaagcctgcggaggaggagccggcggcggagaaggccacggcggggaagaagcccaaggccgagaagcggctccccgcgggcaagtccgcaggcaaggagggtggcgagaagaaggggaagaagaaggcaaagaagtcggtggagacgtacaagatctacatcttcaaggtgctgaagcaggtgc

SEQ ID NO: 44542 - DNA, 294 bp, Zea mays
ggtttagcagaagtaaggcggtcaaggaggctcactgtttcatttatctgtacagttgcaaactatgagtatggtttttactggcacttctatcaggatgggaaaatagaggcagaagtaaagcttactggaattctcagtttaggggccttgatgcctggggaatcgaggaaatatggcacaactattgcccctggtctgtatgcaccagttcatcagcatttctttgttgcccgtatggacatggctgttgattgcaaacctaatgaagctcataaccaggtggttgaggtt

SEQ ID NO: 44543 - DNA, 218 bp, Zea mays
gccgcttccgcaaccacgtataaaaacaccgcacgcgccgccgccgccgtcctattcctcggagaggagaagccgccgtcgcagcaatcacagcagcccggagaacggccaggtccgacaagatgcagatcttcgtgaagacgctgacagggaagaccatcaccctcgaggtcgagagcagcgacaccatcgacaatgtcaaggccaagatccaggac

SEQ ID NO: 44544 - DNA, 177 bp, Zea mays
tcggcacgcaggctagcagcacagcagcagccagagccatcccctctcctcgctacgcttcgcttcctcggcgccgattcctcctcctcctcctccaccctcgtccgtccccttccggcgcacgagctcgcccgagatggcgaacgcgagatcgggtgtcgctgtgaacgatgagtg

SEQ ID NO: 44545 - DNA, 284 bp, Zea mays
gtcttatttcgttgatacataacatcatttcccacactccaccccatgaatttgagatagacttatatctgagctttggaaagtgctggaatgtcaaattccaaaccaaatagactacgttattaagtaattaccaattcctccaaaatgaatagatccaaacgtcccgttagttcatttgatgtctatgcatacagcagcaaggtctacttgggtttatagttgtgtaggtaacttaattggttatagtgaatcaggtattggtctcaaggtgttttccgttt

SEQ ID NO: 44546 - DNA, 286 bp, Zea mays
catcactgcactggtggtgtccgtggtgctccacagagtgaagcgatagccaggagatgcgacgatgcgcaagtgggcgctctcctccgcgctcctcctcctctttctcctcaccacactccccgacccatctaagaagctacaagtgtatgccgaggagagcagcgatgacttggctaacccacccaaggtagaggagaagcttggtgctgtccctcatggcctgtccaccgactctgaggttgcccagagggaagccgagtctatctctaggaagactctcagg

SEQ ID NO: 44547 - DNA, 277 bp, Zea mays
gtgaactccatctatctcttccccacgaacgcttgcggcggcggcggaattaggaggcgatggggcactccaacgtctggaactcgcaccccaagaactacgggcccggatcccgcgtctgccgtgtctgtgcgaaccctcatggactgatcaggaagtacgggctgatgtgctgcaggcagtgcttccgcagcaatgccaaggacattggcttcatccagtaccgctgaaatcaggtgggaatggaccatgttgtagaggcgagctgtagtttatt

SEQ ID NO: 44548 - DNA, 287 bp, Zea mays
tgttgggcgcagagaatccccaagcaaacaaacagggtagaggtagagggagaggagaggagaggagaggagaggagaggttgggtctgggacaccatggctccgatgaagctgtacggggcggtgatgtcgtggaacgtgacgaggtgcgcaacggcgctggaggaggctggctccgactacgagatcgtgcccatcaacttcgccaccgccgagcacaagagccccgagcacctcgtccgcaacccgtttggtcaggttccagctctgcaggatggtgacttgta

SEQ ID NO: 44549 - DNA, 277 bp, Zea mays
gatcagaagagcggcggcgcgggcggacaaggagcaggcggaggaggagttgtgccaagccacaatgggtatctcgcgtgactcgatgcacaagcgccgagccaccggtggaaagcagaaggcctggaggaagaagcgaaagtatgagcttggtcgccagccagccaacaccaagttgtcaagcaataagacggtgaggagggtccgtgttcggggaggtaatgtgaaatggagggctcttcgccttgatactggtaactactcatggggaagtgaa

SEQ ID NO: 44550 - DNA, 265 bp, Zea mays
tgtgttgcgcccggaccccggaccgcgccggctcgcaaactccccacaaccctcgtcgccgcctggtgctccacccccgccaccgccatgggtaaattccgcaagcttggccgcaattactcccaacgcctctgcatgctcaggacgatggtgtcgcagctggtgaagcacgagcgcatcgagaccaccgttgccaaggcgaaggaggttcggcggaaggcggatcagatggtgcagctagggaaggagggtactcagcatgcag

SEQ ID NO: 44551 - DNA, 274 bp, Zea mays
gtcttcttggatgtagtggagagtgttaacattctagttaacagcaatggccagattgtgagatcagatgtggttggggcactgaagatgcgaacatatttgagtggaatgccggagtgcaaacttggcttgaatgatagggttcttttggaggctcaaggcagagcaactaaaggcaaagcgatagacctcgatgatatcaaatttcatcagtgtgtacgtttggctagatttgagaatgatagaactatatcgttcatacctcctgatggat

SEQ ID NO: 44552 - DNA, 242 bp, Zea mays
ggagtcggagggaaccgaaaactcagggtctcgaatttcctaggagcggaggcgatggctgggaagggaggaaaaggattgctcgccgcgaagacgacggcggccaagtcggcggagaaggacaaggggaagaaggcccccatctcacggtcctcccgcgcgggcctccagtttcctgttggacgaatccaccgtcagctgaagcaaaggactcaggcaaatggccgcgttggtgccactgc

SEQ ID NO: 44553 - DNA, 258 bp, Zea mays
tttgtcagcagagctggagtgaaggtcgtcgacgtcctctcccccaaggttttcattggtttgattgttggagccatgcttccgtactggttctctgccatgaccatgaagagtgttggaagcgctgccctgaagatggtggaggaggtccgcaggcagttcaacaccattcctgggttgatggagggaacagccaagcccgactacgcaacctgtgtgaagatctccactgatgcttccatcatggagatgattcct

SEQ ID NO: 44554 - DNA, 274 bp, Zea mays
ggggagcccatggtggtggcgctttctccggacaccgtaggtgtcaatgatgatcttgcggccagtgaggccatcattgacacctacggtggctggggagcccgtggtggtggcgctttctccggcaaggacccaaccaaggttgaccgcagcggagcctatgtcgcaaggcgggctgccaagagcatcgtcgccagcggccttgctcgccgcgccatcgtccaggtgtcttacgccatcggcgtgcccgagcctctctccgtgttcgtcgaca

SEQ ID NO: 44555 - DNA, 274 bp, Zea mays
cagctggacatcgacaacccgcagagcatccgcgcgctgcgtgactttctgcttcaggagtacggaggactgaacgtgctggtcaacaatgcgggcatcgccttcaaagttgttgaccccacccccttccacattcaagcagagctgacaatgaaaaccaacttttttggtacccaagatgtctgcacagagctactccctataataaagtcccaaggtcgagtggtgaatgtatcatgcagcgtgagtctcagggccctgaaaagctgcagcc

SEQ ID NO: 44556 - DNA, 278 bp, Zea mays
gatttcttctctctctgctcctccgcctccgcctgatccatccaagacagggatcgccatgtcggactcggaggagcaccacttcgaatcgaaggccgacgctggggcgtccaagacctacccgcagcaggctggcaccgtccgtaagaacggcttcatcgtcatcaagaaccgtccctgcaaggttgtggaggtttctacctccaagactggtaagcatggccacgccaaatgccactttgtcgccatagacatattcaatgggaaaaagctgaaga

SEQ ID NO: 44557 - DNA, 274 bp, Zea mays
ctcctccaccgcacctccaagaatccacctccacgactgagttgacggctcggcggcgccatggcagttcaccggctccaaccttccccctccggcctacagtgctccaccgcccggtcgccagtgctcctccatgggccacggctgacgggtgcacgcaccggcaggagaggtggatttggtggacctagattcgatgtgcagagagcgacttggaggtggctgacatcttcaagcactacaacatgcagttacaactactgttggccataca

SEQ ID NO: 44558 - DNA, 266 bp, Zea mays
gtggtggggcgtggtggagcgggagggccccggccgctacgactgggaggcctacgccgagctcgtgcgcatggtggagcgagccggcctccgactccaggccgtcatgtccttccaccagtgcggtggcaacgtcggcgacacctgcaacatcccgttgccgccatgggtgctggaggagatgagcagcaacccggacatcgtgtacacggacaggtccggccgccggaaccccgagtacatctccctcggctgcgacacgctgc

SEQ ID NO: 44559 - DNA, 270 bp, Zea mays
attgcgcaatttaagcacatacttggagtgaaaccagcaccacagaatgcactaagcaatgttcctgtcaaaacttattcaagatcactggaacttccaaaagagtttgacgctagatctgcatggtcccgttgcagcacaattgggaacatacttgatcaaggtcactgtggctcttgttgggcttttggtgctgtggagtgcctccaggaccgtttttgcattcacctcaacatgagcattttactttcagtcaatgacctactggca

SEQ ID NO: 44560 - DNA, 275 bp, Zea mays
gcccaaggccgagaagcgcctcccggcggccaagtcgtccggcaaagaaggcggcgacaagaagggtaagaagaaggcgaagaagtcggtggagacctacaagatctacatcttcaaggtgctgaagcaggtccaccccgacatcggcatctcttccaaggccatgtccatcatgaactccttcatcaacgacatcttcgagaagctcgccggcgaggctgccaagcttgcgcgctacaacaagaagcccaccatcacctctcgggagattcaaa

SEQ ID NO: 44561 - DNA, 261 bp, Zea mays
gcgagggcgacaggacgacaagtgcctccccgtccagtacctcgaggcgatccggggcctgcaggccgcggggttcgctcccgcccgcaccatccacatctcgcttgtccccgacgaggagatcggtggcgcggatgggttcgacaagttcgcccgatcggaggagttccgcgccctcaacatcgggtttatgctcgacgaggggcaggcgtcgccgacggacgtgttcagagttttctacgcggacaggctggtgtggag

SEQ ID NO: 44562 - DNA, 265 bp, Zea mays
gccttatcgacaaaatgcttgagaagattggaacacctgaggcacttgccttgagagggaaggctgccgtcgcacaggccaaactagcaaatcggctctaccagaagaaattctctggcccgaggtgggaggcgttggccaagaaaggtgccaagaaacagaggttgttgtgggcatccaccggtgtcaagaacccagcttatcccgacactctttacatcgacagtctcattggacctgacacggtcaacacgatgcccgacca

SEQ ID NO: 44563 - DNA, 266 bp, Zea mays
atgcgtacctgattcttgtatgcaccatcttcatcgacaaagatggaaaagagaagactgggtttagtggtagaatggggaaccgaattgctgctccaaggctgctgaagctcaacccactggactctcatctagctggagcaaacaacaggttcagggagggcagattctcttgggtgacggagaacgggaagcaggagcggcatctagtggcgacggtggggaagtacagcgtggtgtggaacttcctgcaggtgaagaacagc

SEQ ID NO: 44564 - DNA, 260 bp, Zea mays
gttctacggggtgctggcctccctcggactgtggcagtaggaggcgaagatcctcttcctcggcctcgacaacgccggcaagaccacgctgctccacatgctcaaggacgagcggttggtgcagcaccagccgacgcagcacccgacgtcggaggagctcagcatcggcaagatcaagttcaaggccttcgacctcggcggccaccagatcgcgcgccggtctggtaggattactacgcaaaggttgatgctgtagtata

SEQ ID NO: 44565 - DNA, 267 bp, Zea mays
agtagaattcacagtttaacaagtagaattcacagtttaattttgtctcaatacataaaatagtgttatattatatctgataataaagataatgttgattttgcggaaataacgaatgcccagcgtgtcgcacccattgtgcaagcagacgttctttgagggatgatcccaattatgatgcactgattgcagccctatatccagatattgataagtatgaggaagaggaatttgctttcagtgagtaggagaggattcagaataaaa

SEQ ID NO: 44566 - DNA, 299 bp, Zea mays
tcccatcccactaccacccatctcgtcgtccgccgattcgatccggttcttccaacccaggggcagtgatggcgacgaagaggagcgtgggcaccctcggcgaggcggatctgaaggggaagaaggtgttcgtgcgcgccgacctcaacgtcccgctcgacgatgcccagaagatcaccgacgacacccgcatccgcgcctccgtccccaccatcaagttcctcctcgagaagggcgccaaggtcatcctcgccagccacctgggtcgtccaaaaggtgtcaccccaaagtacagcttg

SEQ ID NO: 44567 - DNA, 298 bp, Zea mays
gttcattgtgctagaagttcctgatgatgttctaatcgacagatgtgttggaagacggctggatcctgtgactggcaagatttaccatttaaaaaactaccccccggagaatgaggagatttctgcccgacttattacacgttctgatgacacatttgagaaggttaaatcacgtcttgatacgtacaagcaaaattctgaagctattcttcctacatactctgatttgcttaataagattgatggaaactgcccagccgaagttgtttttcaggcgatagatttcctgttacagaag

SEQ ID NO: 44568 - DNA, 275 bp, Zea mays
ggcatccgcagagagtttgttccgtccaggcaaccaaaaagcgttgccccgccgcgcagaggaagaagagagcagaggaggatggctcgtacgaagcagaccgcccgcaagtccacgggaggcaaggccccccgcaagctagctcgccaccaaggcggcgaggaagtcggcgccgacgaccggcggcgtgaagaagccccacaggtacaggcccggaaccgtggcgctgcgcgagatccgcaagtaccagaagagcacggagctgctgatccgcc

SEQ ID NO: 44569 - DNA, 293 bp, Zea mays
gtctatccgatctgccacctcgccgtctcgcacgttcctttccccaactccccagcgcctctccgcgccgctttccagatccaggttgttcagcatgggtctggtgaaggaaggcgtcgacatggaggagggaaccctagagatcggcatggagtacaggactgtatctggtgtggccgggcctctggttatcttggataaagtaaagggcccaaagtaccaagaaattgtaaacatccgacttggagatggcaccactcgccgtggtcaagtccttgaagttgatggagaaa

SEQ ID NO: 44570 - DNA, 293 bp, Zea mays
ccgtcatcgatctcgtttcaaatccatccatcctcgtttcctccgtcccgcagcatctcaaccccatggccaagatcaagatcgggatcaatgggttcggcaggatcggaaggctggtggccagggtggccctgcagagtgacgatgtcgagctcgtcgccgtgaacgaccccttcatcagcaccgactacatgacctacatgttcaagtacgacactgtgcacggacagtggaagcaccatgaagtcaaggtgaaggactccaaaacccttctctttggtgagaaggaggtt

SEQ ID NO: 44571 - DNA, 295 bp, Zea mays
gcagaaacctctggaaaaagatgctggagaaaagaccatagcctggttggacaagctgaggaatgcgaatgggtcattgccaacttccaagatccgtctcaacatgcagcgtgttatgcaaaataatgctgctgtattccgtacacaagaaacacttgaagaaggttgtgagctgattagcaaaacatgggaaagtttccatgatgtgaagctcagtgaccagagtctcatttggaactctgacctgatagagacccttgagctggaaaacttttgataaatgcatgcataacca

SEQ ID NO: 44572 - DNA, 291 bp, Zea mays
cattttctctcctctctccgtcgccgcctcgggccaaaccctacgcagggagttgattgatcgattgcagccatgagtaagttgcattccgagcttctcaaggattgcatctcccagatagttcaggatgccaagaagaataggaagttcactgagactgttgagcttcagattagtctgaagaattatgatccacaaaaggacaagcgtttcagtggctctgttaagttgcctcacatccctcgtccaaagatgaaggtgtgcatgcttggtgatgcccagcacgttgag

SEQ ID NO: 44573 - DNA, 288 bp, Zea mays
gtccttcagctccttgaggatgcgcttagacgcccccacatcatgcagtgcaggtcctgctggtgaggacatgtttcattggcaagcaacaattatgggaccacctgacagtccctatgctggtggtgttttcttagtgaacattcatttcccgccagattaccccttcaaacctccaaaggtttctttcaagacaaaggtcttccatcctaatatcaacagcaatggaagtatatgccttgacattctcaaagagcagtggagccctgactttgacaattctaaggt

SEQ ID NO: 44574 - DNA, 280 bp, Zea mays
tgaactctttcttcgggtgggaattaagcctcctaagggtgttctactctacggtcctccaggaactgggaagaccctattggcaagggctatcgcaagtaacatcgatgccaactttttgaagattgtttcaagtgctattatcgacaaatacattggagaaagtgctcgtttgattagagaaatgtttggctatgcacgtgaccaccaaccatgcatcatcttcatggatgaaattgatgctattggtggtcgaagattagtgagggaactatgctga

SEQ ID NO: 44575 - DNA, 288 bp, Zea mays
actctaccatatgtgctgtcatcatctgatgacatgttaataaaactgtgggactgggataaagggtggatgtgcactcaaatttttgagggacattcacactatgtgatgcaggttactttcaacccaaaggatattaacacttttgcaagtgcatctcttgatcgcactacaaagatatggagtttaggttctccagatccaaacttcacacttgatggacatcaaaagggtgtcaattgtgttgactacttcactggtggtgacaggccctatttgattactggt

SEQ ID NO: 44576 - DNA, 283 bp, Zea mays
  unsure (1)..(283): unsure at all n locations
gtgaggagtgcaccgtcgcttggggaatttgcaaccatgcattccacttccactgtatcagccgttggctaaagacncgtcaagtgtgccctcttgacaacagtgagtgggagttccagaagtatggtcactagagagaatggcttcggcgtggagttgcttcatcgtttctcgtcgtttagcagtagtggttactgaatagattctggtgaacatgctatggatctgtaacgtttctgaagctctgccttacttgaagctgtaggcgaatactctggttatg

SEQ ID NO: 44577 - DNA, 289 bp, Zea mays
ggaatgaattctcatattacatgctgatctgttcaaatttcatcctgaaccacactcaagaagctaatgagtggtccatatatccttggatacatagcaactgcaattctctttctgacaacgatcaacttcgtcctgtttcatttcctgacattcatccctcaagtgcaggtatcacagagggattttcaatgtgcgctggggactttgtagaggtctacagcgaggaaagccaagaatctgcatgggatgctgttgtaacttgctttttcctggatacggcacacaa

SEQ ID NO: 44578 - DNA, 276 bp, Zea mays
cagaaagaaaatgatgagagctgctgcaagaatacagagtcatttccgaacatggcagattaggaggaacttcatgaacatgcgaagacaagctatcaaaatacaagctgcatacagaggtcaccaagtgagaaggcagtaccgcaaggtattatggtccgttggagtagtggaaaaagctatcttgcggtggaggaagaagagaaaaggcctgcgtggcattgcaactggtatgccagttagcatggccacagacgcagaagcagcaagcactgc

SEQ ID NO: 44579 - DNA, 281 bp, Zea mays
agctagggacctaaagaacaaggatcttgtgggaaagtcggacccttttgcattgatatacatacgtccattgcatgataaaacaaagaaaagcaaaacaattaacaatgatttgaatcccatctggaatgagcactatgaatttgtggttgaggacatatctacgcagcacttgactgtaaaaatttatgatgatgaaggactccaatcatcagagatcattgggtgtgctcgagtagacttagctgatatacagccaggaaaagtgaaggatttatggt

SEQ ID NO: 44580 - DNA, 280 bp, Zea mays
gccttctgcgcctccatttcggcctctgtcccttgcaagttcaatctcacctccaaccatgggtaaagagaagtcccacatcaacattgtggttattggccacgttgactctggcaagtcgaccaccacaggacacctgatctacaagcttggaggcattgacaagcgtgtgatcgagaggtttgagaaggaggctgctgaaatgaacaagcggtccttcaagtacgcatgggtgctcgacaagctcaaggctgagcgtgagagaggtatcaccattgat

SEQ ID NO: 44581 - DNA, 282 bp, Zea mays
cactagactctttttccccttcattggacatactaacaccccttaaaccaatggctgttggcaagtcatattcctcaactgttgcactagagggcaagatatttgttcttggtggtggtgacggtgcttgctggtttgatacagttgactgttatgaccgaagccgtgatgattggtccacatgcccatcgttgacttgtgacaaggggagccttgctggggttaatgtcaacgggagaatctatgcatttggtggtggagatggaaccaagtgtttctctg

SEQ ID NO: 44582 - DNA, 284 bp, Zea mays
gtgatctcaacccaagtcgtgcctccgctccggtcacccgtcgctccacgcaaccatgtcgaggaggaagaccagggagctcaaggaggagaacgtcacccttggacccactgtccgtgaaggagagtatgtctttggtgttgctcacatctttgcatccttcaatgacaccttcattcatatcactgatttgtctgggagggaaactctggttcggatcaccggtggcatgaaggtgaaggctgaccgtgacgagtcgtcaccttacgctgctatgcttgctg

SEQ ID NO: 44583 - DNA, 295 bp, Zea mays
ggctttcgtgtcataccacttgatgtgaaaacagatggtgtatcctctggtaggacgctagatttggcatctagtcttgatgtgggctctgctgcaccccaagcctcaggggatgcatctccagatgactgcaatttgagatctgtgctgacaatcgcctttcaattcccgtatgagatgcaccttcaggacagcgttgcagcaatggcccgtcaatatgtccgtagtgtcatttctgctgtgcaaagagtgtcgatggctatatctccctcccaatctggtctaaatgctgggc

SEQ ID NO: 44584 - DNA, 287 bp, Zea mays
aattcggctcgagagttgcaatcacaaaaaacccttgtctccatcctggtgatgtcagagtacttgaagctgtatatgaccctggattggatgctaggggtcttattgattgtgttgtatttcctcagagaggggaaaggcctcatccgaatgaatgctccgggggcgatttggatggcgacctcttctttattacttgggatgacaaactgattccggagaaggttgatgcacctatggactacactgcaacgaggccacgcataatggaccatgctgttacactt

SEQ ID NO: 44585 - DNA, 290 bp, Zea mays
atctgagcctggtatggacttaggggacttttccaataaaactcctgcttcagctcgtcacaaaaggggatgcaattgcaagaagtcgtcgtgtctaaaaaaatactgtgaatgttttcagggcggcgtgggatgctccgtaagttgcagatgcgagggctgtaagaatgcttttggaaaacgggagggggcttctgtgttaggcataggggaacctaaacagggattggaagaaaagtatgtttgtgtgaaagaagaaaaaagtgaaatcgataaacagcttgttgtct

SEQ ID NO: 44586 - DNA, 284 bp, Zea mays
attaagggaggtcaaaaatacaagtcccctaaaaatgcctatgttgaaggtgatgcctcaagcgcaagtatttcttggctggtgctgcaattactggagggactgtgactgtggaaggttgtggcaccaccagtttgcagggtgatgtgaagtttgctgaggtactggagatgatgggagcgaaggttacatggaccgagactagcgtaactgttactggcccaccgcgggagctcatttgggaggagacactcaaggcgattgatgtcaacatgaacaagatg

SEQ ID NO: 44587 - DNA, 279 bp, Zea mays
gttatgattgataacattgataaggttcttgaaagaggtgatcgtttggaactgctggttgacaagactgcaaatatgcaaggaaatacagttcgattcaagagacaagctcggcggttcagaaacactgtttggtggagaaatgtcaaactcacggccgcattgatacttctcctcctggtaataatatatgtcgttctagtcttcgtgtgccatggtttcaccctaccaacttgcataaggtaaggcatgatgtgcacatagtgctttttgctgtgc

SEQ ID NO: 44588 - DNA, 286 bp, Zea mays
gaaaggcattgttcaatggcttgccaaacccttttactgccgcgaggtaccacagcttggtcattgagcaagaaaccttcccacatgatgctttggaggctactgcatggactgaagatggacttatcatggctgctcgccacaagaagtacaaacacatccagggtgtccaattccacccggagagcatcatcacccctgaaggcaagaaaatcatcctcaactttgtcagattcattgaggaactggagaagcagcgttcgtaggggaggtagacgcgacaggt

SEQ ID NO: 44589 - DNA, 231 bp, Zea mays
gcagaagaacgtgaacgaggcggtggaggggctcagggccaagggtatcaccgcggttggtgccgtctgccacgtctccgacgcacagcagcgcaagagcctcatcgagacggccgtcaagagctttgggcacatagatattcttgtctccaatgctgccgcaaatccttctgtagatagcatacttgaaatgaaagagtctgttctcgataagttgtgggatattaacgt

SEQ ID NO: 44590 - DNA, 297 bp, Zea mays
tacacatttgattcaggacatgctttcaatttgccgtgagactttcaagggttctgtccgctatgcatgggctagtgtcccaacatacccgagtggggtgattgggtttctgttatgcgccaacgctggcccaccggtcaactttctgactcctgtaaatccaattgaagaagtggaaggagctactaaagcgggaagggagatcaggttttataattcagagatgcatatggcagcgtttgttcttccgacatttgccaagagggagctagaagcatactgtgcttccacggaaac

SEQ ID NO: 44591 - DNA, 296 bp, Zea mays
atcaagaaaccctaaaaacatcatcggtctcctattggtgaagagtcttttgactgttcgtgctgaaacggagacgccggttagtgctgtttcaattagaaggattccaagggttccttcagacatgcctttgtatgatatactcaatgagtttcagaaaggaagtagtcatatggctgctgttgtgaaggctaaacctaaaactgaaccaccgcctgacagaactgaaccaaatagggaagcagttgggccagcacagttgactgttaccttgttatctaatgctgaagaaagtg

SEQ ID NO: 44592 - DNA, 295 bp, Zea mays
gattctcgtgttggagcatttaggcgtcagttggagaagatcattcttgacaaacatgaggacaccatgagcaagatgggtgccatattagcatctggtatcctcgatgctggtggtaggaatgttacaatcaagctcctctcaagaaacaagcatgacaaactcacggctgtgattggtcttgccgttttcagtcagttctggtactggtatcctctcttgtatttcatcagcctggccttctcgccaacagccttcattgggctcaactctgatttgaaagtgccaaagtttg

SEQ ID NO: 44593 - DNA, 293 bp, Zea mays
ccatagccaacatggctgacaggctaggtcttgtggctactattaaggaccgagcaaatgaaatcttcaagaaaattgaagatctcaagtctattaggggaagaaatcaagatgccatattagccgcatgtctatatattgcttgtagacaagaagatcgccctagaactgtgaaagaaatatgttcggttgctaatggggccacgaagaaagaaattggcagagccaaagaatttatagtgaaacaactggaagttgagatggggcaatctatggagatgggaacattcatg

SEQ ID NO: 44594 - DNA, 292 bp, Zea mays
gacccaaattatgtttgagactttcaatgttcctgccatgtatgttgcaatccaagcggtgctctcactctatgctagtgggcgtactactggtattgtactcgactctggtgatggtgtgagccacactgtgcccatttacgaaggatatgcccttcctcatgccattcttcgtttggatcttgctggtaaggacctcacagactccctcatgaaaattctcactgagaggggttactccttcacaacctcagccgagcgagaaattgtaagggacatcaaggagaagcta

SEQ ID NO: 44595 - DNA, 293 bp, Zea mays
cacccgtgccaggtttgaggagctcaacatggacctgttcaggaagtgcatggagcctgttgagaagtgcctgagggatgccaagatggacaagagcaccgtccatgacgttgtacttgttggtggctccactaggatccccagggtgcagcaactgctccaggacttcttcaacggcaaggagctgtgcaagaacatcaaccccgatgaggctgtcgcctatggtgctgctgtccaggctgccatcctgagcggtgagggcaatgagaaggtgcaggacctgcttctgctgg

SEQ ID NO: 44596 - DNA, 293 bp, Zea mays
ggctttcaaaaatgccggacgaagtaagggctgagataggcccgtatttcaacgcccgcgcagcataacagatgagcagagcgagaaactggctaagccagggagcactgctggtggcgatgctatgaagcagttcatgagaaaggggctcactcctaggtggtggggtgaccttgatgtcaaccagcacgtgaataacgtcaagtacatcggttggattcttgagagtgctccgatcgcgatcctggagaagcacgagctcgcaagcatgacgctggattacaggaaggagt

SEQ ID NO: 44597 - DNA, 292 bp, Zea mays
gatggcatgacttcattgtcctctcttgtatgcgttctccatttggcagagacaaagatgcagttgcgcactcatccgaagctgcttttcgtcctttctgcagtcatcatccagtggttctgacataatcgcaaaccgtggagttggggctttattaggggactcaatcacggatcaaggtcttaggctcccaatggcacctggtttcgtctacctgagaacatgtcgaactttccatgacacatacttcgttagtgaagtgatcctcaagcaagtgattgaatgggctcac

SEQ ID NO: 44598 - DNA, 295 bp, Zea mays
gcggtctgctcgttcgatctgtgcagcagatctgaggtcccgggcgaccgtgaagcagcttcaatcgtcggcatggcgctcgtattgcatagtggggctggaaacaagaatgccttcaaagcacttattgctgcagaatacagtgggatcaaggttgagttgaccaaggattttgagatgggtgtctccaacaagacccctgagtttcttaagatgaacccccttgggaaggttcctgttctggagactcctgatggccctgtttttgagagtaatgctatcgcacgctatgttg

SEQ ID NO: 44599 - DNA, 282 bp, Zea mays
agccgccgccgctgctcatctcacatccctcgagaagacgcctgctcctcgccgatcgatacgatggccgtcttctccgacctccacaccgccgacggcctcaagtccctcgaggctcacctcgccggcaaaacctatgtgtctggtgactccattactaaggatgacattaaggtcttcgccgcggtgccgtcgaagcctggcgctgagtttcctaatgccgcccgctggtacgagaccgtctctgcggctgtagcctcaagattccctggtaaggctgtt

SEQ ID NO: 44600 - DNA, 293 bp, Zea mays
acttcctcgagttctcctcaaccaaattcaaagtcacagcggcgaaactctcggcgatgtctggcagcggcaagggcgggaagggtctgggcaagggcggcgccaagcgccaccgcaaggtgctgcgtgacaacatccagggcatcaccaagccggcgatccgcaggttggcgaggaggggcggcgtcaagcgcatctccgggctcatctacgaggagacccgcggcgtgctcaagatcttcctcgagaacgtcatccgcgacgccgtcacctacaccgagcacgcccgccgc

SEQ ID NO: 44601 - DNA, 288 bp, Zea mays
attggaaactggagccatccaaattggttctaaggtgttagttctaccttctgggcaagaggcgactgtgaaagccattgagcgggactctaattcatgcaccgtagcgagagctggtgataatgtggcaatttgtttacagggtattgatggaaaacaactaatacctggcggggttctttgtcaccctggtttccctgtgcctgtagctaaccacttggagctgaaggttctagtcctggacatcactactcctattcttgttggctctcaggtggagtttcacat

SEQ ID NO: 44602 - DNA, 291 bp, Zea mays
gcgcgctggcggcggccaaggccgcgaggcagcaggaggcaagccgtctcggggcctccggcggcggcgacgtccctctcgtcgactacctcaacacccagtactatggggtcgtcggcatcggcacaccgccgcagaacttcaccgtcatcttcgacaccggcagctccaacctgtgggtcccctcctccagatgctacttctcgatagcctgctacctccaccacagatacaagtcggccaagtctagcacgtacaaggcggacggcgagacctgcaagatcacctacg

SEQ ID NO: 44603 - DNA, 290 bp, Zea mays
caaaccctaaccggccggcccaattctcacgtgctcgccgcctaggagcattcacgttggcggcgggcggcggctcggttcctctcctccaccgcacctccaagaatccacctccacgactgagctgacggctcggtagcgccatggcagttcaccgcctccaaccttccccatccggcctacagtgctccaccgcccggtcgccagtgctcctccatgggccacggctgacgggtgcacgcaccggtatgcatcccttgctgctctaattcccgacgctctagctcgtg

SEQ ID NO: 44604 - DNA, 288 bp, Zea mays
gcctctctgccttcctgcctgcttccctccctccgtgagatccccgctcgggttgccatggcggaccagctcaccgacgaacagatcgccgagttcaaggaggccttcagcctcttcgacaaggacggcgacggctgcatcaccaccaaggaacttggcactgtgatgcgctcattggggcagaaccctactgaggctgagcttcaggacatgatcaatgaggttgatgctgatggcaatggaaccatcgactttcctgagtttctcaacctgatggcgcgcaagatg

SEQ ID NO: 44605 - DNA, 292 bp, Zea mays
tcttccctccctccctctccccgcgggccgccagaggcaatttcgacctcgattcgaccccgattcgtccgcccgcgaccgggattccctccgccaagcgcggatctgaacgctgcgctccgtgtcgccgctcgaatccgccatgaagggggccaaatccaagggcgccgccaaggccgatgccaagctggcggtgaagagcaagggggcggagaagcccgccaagggcaggaaagggaaggccggcaaggaccccaacaagcctaagagggctcccagcgctttcttcgtg

SEQ ID NO: 44606 - DNA, 280 bp, Zea mays
agagggtgcactcaaaggtattcttggctacacagacgaggatgttgtttccaatgattttgttggtgattcaaggtcaagcatctttgatgctaaggctggtattggactgagctcttccttcatgaagctcgtgtcttggtatgacaacgagtggggctacagcaaccgggttctggatctgatcgctcacatggctcttgtgagcgccaagcactgatgttcgtactcgttcctccagtaccagtagtagcctagataagaggctgcacgtttgacg

SEQ ID NO: 44607 - DNA, 278 bp, Zea mays
gctcttcaccgaccggttctggacagcaccggatagcagtaaccatatcatgtctcaaagccggagcaagagcaagagctccaacttgtatcagaggattgcagcacaaagaggaagcatggggaagacaaggatataatgggagaggtaaccaagacccatgaagctatacaatcattggataagtccatctcaacgctgcagatggagcttgcagcaaagcggagcacacttgagctgctccgatctagtggttcaccagtaacctttgaaactag

SEQ ID NO: 44608 - DNA, 285 bp, Zea mays
agctgagtccacaggacaatcctcaagtcaaagagattaggtgtatagccatccctccgcagcatggaacacaccagatggtgactctgccatcaaatcttcctgaacatgagttccttaatgatcttgaacccttgggatggatgcatacacagccaaatgaagctccacagctatcaccacaggacctgacatcacatgccaagattctggagaacaacaaacaatgggatggtgagaagtgcatcattctgacatgcagcttcaccccaggatcttgctcgt

SEQ ID NO: 44609 - DNA, 283 bp, Zea mays
ctcccaccctcctgctcctcctcccacggtcccgccatttcgtcccccgctcaccaactcaaaccccctccgctctcaaaccctaaccctagccctagcccgctcccggcggagcgacgatgccgaagcgtgcggcggggcggcggacgaagaggagttccgcgccgaggtggaggagcgcctcatcaacgaggagtacaagatctggaagaagaacacacccttcctctacgacctcgtcatcacccacgcgctcgaatggccctcccttaccgtgcagtgg

SEQ ID NO: 44610 - DNA, 283 bp, Zea mays
ccctaatcccacctccagtctctgggcaccaaatttccggcggcgatggcggcggctgtggcgaggtcagggttccggcgcatgttctccgtctctgccttcgcgccgccgaaggccccgccgcgcgccccaaggccgacccatcccccaacctcttcgtctccggcttaagcaagcgtaccacaagtgaaggacttagagaagcctttgcggagtttggtgaagttttgcatgctcgagttgtgaccgatcgtgtcagtgacttttctaagggatttggctt

SEQ ID NO: 44611 - DNA, 283 bp, Zea mays
gcagagaccattctgggtactatcgtaatggcaaagaatccatgccttcatccaggggatgtccgaatccttgaagctgttgatgtgcctgaactgcatcaccttgttgattgcttggtcttccccaagaaaggtgagaggccgcacgcgaatgaagcatctgggagtgatcttgatggggatctatacttcgtaacatgggatgaaaaccttataccacctggtaaaaagagttggaaccctatggactactccccagctgaagcaaaacaactgccacgcg

SEQ ID NO: 44612 - DNA, 285 bp, Zea mays
cagctcccatatccgctcccctacctctccagcatcctcccgtctccgtcgtctcgtctccgctcctcacctcgccagccatgggcaagatcaagatcggaatcaacggtttcggaaggatcggcaggctcgtggccagggtcgccctgcagagcgaggatgtcgagctcgtcgccgtcaacgaccccttcatcaccacggattacatgacgtacatgttcaagtacgacaccgtgcacggccaatggaagcacagcgacatcgccctcaaggactccaagacgc

SEQ ID NO: 44613 - DNA, 285 bp, Zea mays
agcggcggcgagggcggacaaggagcaggcggaagaggagctgtgccaagccacaatgggtatctcgcgtgactcgatgcacaagcgccgggccaccggtggatagcagaaggcctggaggcagaagcgaaagtatgagcttggtcgccagctagccaacaccaagttgtcaagcaataagacagtgaggagggtccgtgttcgtggacgtaatgtgagatggagggctcttcgccttgatactggtaactactcatggggaagtgaagctgttacccgcaagac

SEQ ID NO: 44614 - DNA, 223 bp, Zea mays
ctagggttttgctgctctccgaccccgagctccgaaggccgcagcatcaggcgcggcccccctcgcgtgtgaccgagatggcgctgccgaatcaggggaccgttgattaccccagcttcaagctcgtcatcgtcggcgatggtggaactggtaaaactacatttgtgaagaggcatctcactggagagtttgagaagaaatatgaaccaaccattggtgtgga

SEQ ID NO: 44615 - DNA, 294 bp, Zea mays
ccaggaggtgactaaggtggtgcctgctgtcacccccgaggttaaggattctctggttaagaacataaggaggaggatgacaccacagcctctcaagatccgtgctgatatagagatgaaatgcttccagtttgatggagtgctccatattaagcaagctatgaagaaagctgaagctgcgggcaatgataactgtcctgtgaagattaagctagttgctcctccactgtatgttttgaccacacagacccttgacaaggaccaaggcatttcagttctcactactgcagtcaa

SEQ ID NO: 44616 - DNA, 293 bp, Zea mays
ctaaagaggatccttcacaccatactcgaataaaaaagtggcttcaaaagcttaaggcagaagatgtcctcttgcgtgggttaacatggagcaggcttttggaccctgataagaaagggcagtggtggttgtctggggatgttccatctacagtagctaagattgaagatgttgcagctgttataagcaaggatgttgcagagacaaaaaaacttcttcagcttgcagctgctcaacggatgaacactgacatacgaagagcaatcttttgtattataatgagtgctgaagac

SEQ ID NO: 44617 - DNA, 292 bp, Zea mays
cggctcgagcctgctcacccacccgtcccctcctgctcgcccatggctcccatcgctgtcggcgacgccctccccgacggccagctcgggtggttcgacgagaacgaccagctgcagcaggtctccgtccacgcgctcgccgccggcaagaaggtcatcctcttcggcgtccccggcgccttcaccccgacctgcagcaaccagcatgtgccaggcttcatcacacaggctgagcagctcaaagccaagggtgtagacgagatcctgcttatcagcgttaacgaccccttcg

SEQ ID NO: 44618 - DNA, 290 bp, Zea mays
acggaagacagctttgaccatatctatgctttcaaggctgcaatagagaaggagtctcctggtagtgtagtggagatacaaacagagaaggttggggaaaagatcagattctgcaaaatgtttgttgcattcaaggcttgtattgatggttttttgcaagggtgcaggccctatttaggcattgactcaactgtgctcacaggtaggtggaaaggccaacttgcttctgcagttgcaatagatggccacaattggatgtttcctgtggcacttgggctgtttgaatctga

SEQ ID NO: 44619 - DNA, 288 bp, Zea mays
caagaaggctttcatagtgcaacctttgcaactgcactagtctttgcatgcgtggttatgcatgatgcttttggagttcggttacatgccggaaagcaggcagaggtgctgaatcaaattgtctatgagctaccagaagaacacccattatcagagacaaagccattgcgtgaaatccttggacatactgttcctcaggttgtggccggttgcatccttggagttctcatggctgccgttatgcacctgtctctcgggagttcttagtcaactgttgttcatggatgt

SEQ ID NO: 44620 - DNA, 223 bp, Zea mays
atgaagataagcaaactggcagcatctacgagcactgggatattcttccccctaagaaaatcaaggacccagaggctaagaagcctgaggactgggatgacaaggagtacattcctgaccctgaggacaagaagccagagggctatgatgatattcccaaggaaattcctgaccctgatgctaagaagcctgaggactgggacgatgaggaagatggtgaatg

SEQ ID NO: 44621 - DNA, 283 bp, Zea mays
gagtttgtttacttaactgccgttctgtcaaagatacaagaaggggggtggttgccgctggctttctcatcactgtttctctgcataatgtacacgtggaactacggaagtgtactgaagtaccagagcgagatgcgcggcaagatatccctggacttcattcttgatctgggagccacacttggcaccgtaagagttccaggcattggactcgtgtacaacgagctggtccagggaatcccatcgatctttggccagctattagtcacacttccagcgatgc

SEQ ID NO: 44622 - DNA, 237 bp, Zea mays
aagcgagcgagggacccggggcggaagaagagagagaagacgtctctctcctctcggcgtccccgttccccaacctctcgtctgctgcctgcctgcctgcctgcctgcaaaaaggagtttgtcatggcgtctaagagcatcctcaaggagctgaaggacctgcagaaagacccccccacatcatgcagtgcaggtcctgctggtgaggacatgtttcattggcaagaacaattatgg

SEQ ID NO: 44623 - DNA, 93 bp, Zea mays
agctcgtgttccgcttcttgcagccgtcgccgcgaagcgctccagagaacttccgtcaacatggggaagacacgtggtatgggagccgggcgc

SEQ ID NO: 44624 - DNA, 282 bp, Zea mays
ctgggttggttgattatgtggagacgctcgtaaggaaacctgaaactgaattcaatgttgttgtgcttcaatccaatggcgtcgatcagccaaaagagtcggttcatgtactaaatgtcgggaggctgcggatgaggcttactaaagggaagtcggtagtcgccaaggaattctattcctcatcgatgcagttatgtggtgtgagaggcggaggcgaacagcctcgcaggcgatgttttggcgacccagaaacgacctcagcttggtgctagccttcgagag

SEQ ID NO: 44625 - DNA, 283 bp, Zea mays
  unsure (1)..(283): unsure at all n locations
gctggagtctattgttctgagccttgttcgtgtatcggctgtatgaacaaccagagtcatacggaaactgttctatctacgcggcaacagattgaatctcgcaatccattagcatttgctcctaaagtaattcatacatctgagcctggtctggacctaagggacttctccaataaaactcctgcttcagctcgtcacaaaaggggatgcaattgcaagtagtcgtcatgtctanaaaaatactgtgaatgttttcagggtggtgtgggatgctccataagtt

SEQ ID NO: 44626 - DNA, 281 bp, Zea mays
tgtagatatacctcttgataaagaggccttggactggaacaccaggatgaaaattgcagcaggtgctgccaaaggactggagtacctacacgacaaagctaatccaccagttatttatagggatttcaagtcgtcgaacattctgttggatgaaagtttccacccgaagctgtctgactttggacttgccaagttgggtccagttggcgacaaatcacacgtctcaacacgtgtaatgggtacatatggttattgtgccccagaatatgctatgacagggc

SEQ ID NO: 44627 - DNA, 279 bp, Zea mays
acttccggtggctgtgacaacacggtgaaggtgtggaagctcaacaacggcagttggcggatggactgtttccccgccctacagatgcacaaggactgggtgagagacgtcgcgtgggcgccaaacctgggccttccaaagtccaccatcgccagcgcctctcaggatggaacagttgttatctggacagcagcaaaagaaggcgagcagtgggaaggccggttgctgtatgatttcaggacccctgtgtggaggctgtcgtggtcactgactgggaat

SEQ ID NO: 44628 - DNA, 276 bp, Zea mays
acctgaattcaggcaggagtaccaggcgcacaccctggcaacaagagcgctgcggccgtgagcaaggcagcaggggaaaagtggcgctctatgtcagagcaagagaagcaaccctatgtggaccaagctgggcagaagaagcaggactatgagaagactaaggcaaatactgagaaggagagcacaagctcaaagaaggctaagactgatgacgacgatggctcgaagtccgaggtcgatgatgaggatggcggtagtgacgaggataacgacgac

SEQ ID NO: 44629 - DNA, 274 bp, Zea mays
aagacctccaattccctcgtagcagcagcaccagtagagtctccttcctctccggcggcgatgtctgggcgcggcaagggcggcaaggggctgggcaagggcggcgccaagcggcaccgcaaggtgctccgcgacaacatccaagggatcacgaagccggcgatccggaggcttgcgaggaggggcggcgtgaagcgcatctccgggctcatctacgaggagacccgcggcgtgctcaagatcttcctcgagaacgtcatccgcgacgccgtca

SEQ ID NO: 44630 - DNA, 294 bp, Zea mays
caatccttcaagcgcaactgcctcctcctcgtcgtccggtcgtgagaagggatggcgggccgtggcaaggctatcggcgctggcgcgcgaagaaggcaacgtcgaggagctccaaggccggactccagttccccgtcggcaggattgccaggttcctcaaggcgggcaagtacgcggaggcgtcggcgccggcgcccccgtgtacctcgccgccgtcctcgagtacctcgcggctgaggttctcgaacttgccgggaacgccgcgagggacaacaagaagacccgcattgtgcc

SEQ ID NO: 44631 - DNA, 297 bp, Zea mays
cccacagccaccgccgccgccgccgctacctgacccctagtgtccggatttaacttcaaacatggcggacgtcgatgtcgagccggaagtcgccgccggtgctcccaagaagaggacgttccgcaagtacagctaccgcggcgtcgacctcgatgcgctgcttgacatgtccaccgacgacctcgttcagctcttcccagcgcgcgccaggagaaggttccagaggggtttgaagaggaagcccatggcgctcatcaagaagctgcgcaaggcgaaaaaggatgctcctgtcggcga

SEQ ID NO: 44632 - DNA, 294 bp, Zea mays
attccattgtgcaacgccctgtggttgtgaatggtgacatccttgcgaggccaatgatgtaccttgcgctgacttacgaccacaggttgatcgatggcagagaggctgtcttcttcctgcggcgcatcaaggatgttgtcgaggaccccaggaggttgctgcttgacatataaattcatgcaccagcgctgcgctgccctgccggactgttttgtgcaattgtgcttatctggaaataatgccatggaaatttttgactgatgaaaaagaattacttcctcagaaagacgaaat

SEQ ID NO: 44633 - DNA, 294 bp, Zea mays
atcgaagtgaggagcgcactgaagccagccgccgatgagtcgcctcctctcgcggcagaccttgccgccgtccgtcgatctgcaccctttgcgtgcgtgtccaggtggctgcacacgccgtcattcgcgacggtttctccgcaagaggtttcaggttccagcccagcggaagtgcagaattttgggcagctggacagcatctgctaactggaactggatagtcgatcccctgaacggtgataaattcatcaaagttgctgaggttcagggaacagaaataaagccattcgtgga

SEQ ID NO: 44634 - DNA, 290 bp, Zea mays
agactgctcatgaggtgggagttcttgatggtcaaggattctcagttaatataccttggagccgtggtggtgttggagatgatgactacatctttgcttttcagactgtggtgcttccaatagcttcagagtttgccgcagacatcactataatatctgcaggattcgatgcagctagaggtgaccctctgggttgttgtgacgtcactccaactggatactcttggatgacatccctgctagctggttcctcaaatggaagattgttggtgatacttgagggaggatac

SEQ ID NO: 44635 - DNA, 295 bp, Zea mays
ctccgctcggccaccagcattgaccgcctcccctccccaccgctcctggccctccataccccacccccccgcaggagcggcgcggcggcggcggcggcaaagccaaaggcaagatgttcgggcgcgcgccgaagaagagcgacaacaccaagtactacgagatcctcggggtgcccaagtcggcgtcccaggacgacctcaagaaggcctaccgcaaggcagctatcaagaaccaccccgacaagggcggtgaccccgagaagttcaaggagctcgcacaagcctatgaggtttt

SEQ ID NO: 44636 - DNA, 297 bp, Zea mays
cgtcttgaaaggggagagagagagagagaagagagagagaagagagagagagagagaggagtgggagacccgcgagaggctgccgtgtagggaccgtagactcagcgactgcgaaggagggataaggggatggccgggatcggaccgatcaggcaggactgggagccggtcgttgtgcggaagaaggcacccaccgccgccgccaagaaggatgagaaggccgtcaacgccgcgcgccgcgccggtgcggagatcgataccatgaagaagtacaacgctggtacgaacaaggcggca

SEQ ID NO: 44637 - DNA, 239 bp, Zea mays
ccagacctctttcttccaggtgcttaacatccccaccaagattaacaagggtaccgtggaaattatcacccctgtggagctgatcaagaagggtgaaaaggtgggctcgtccgagtctgccctgctcgccaagctgggtatccgccccttctcgtacggcctccaggtcaccagtgtctacgaggatgggtccgtgttcagccctgaggtgctcgacctttctgaggaggacctgattg

SEQ ID NO: 44638 - DNA, 292 bp, Zea mays
agaggagcccgcgacagagaaggtggagaaggctccggcggggaagaagcccaaggccgagaagcgcctcccggcgggcaagtccaaggagggcggcgagggcaagaaggggaaaaagaaggcgaagaagtccgtggagacctacaagatctacatcttcaaggtgctgaagcaggtgcaccccgacatcggcatctcgtccaaggccatgtccatcatgaactccttcatcaacgacatcttcgagaagctcgcggccgagtccgccaagctggcgcgctacaacaagaag

SEQ ID NO: 44639 - DNA, 291 bp, Zea mays
cacgagcgattgcggcggcggaagtaagaggcgatggggcactccaacgtgtggaactcgcaccccaagaactacgggcccggatcccgcgtctgccgggtctgtgcgaaccctcatggactgatcaggaagtacgggctgatgtgctgcaggcagtgcttccgcagcaacgccaaggacattggcttcatcaagtaccgctgaagtcagctgggcgggctatctgaatgccatctcttggacagtgtagtagaggcgatgccacaattttaattactgtcatttagatgt

SEQ ID NO: 44640 - DNA, 291 bp, Zea mays
atgggtttgcgtgaagtaaagtctttgcggcgcatgaatcatcctaacattgtgaagctcaaagaggttatccgagaaaatgatatattatacttcataatggaatacatggagtgtaatctctaccaacttatgaaggataaggtcaagcctttctcggagtctgaagtacgcaactggtgctttcagatatttcaggctcttgcttacatgcatcagaggggctactttcatcgtgacctcaaacctgagaatctgttagttagcaaagatgtcataaagctagcagac

SEQ ID NO: 44641 - DNA, 290 bp, Zea mays
gaaacgtgagaattatgatcagtatggtgaagatgcccttaaggaaggaatgggtggtggtgggtcccatgctgatccatttgacattttctcatcattctttggaccctcttttggaggaggtggtggaagcagcaggggaagaaggcaaaggaggggagaagatgtagtccactcacttaaagtttctctggaagatctttacaatggaatctcaaagaagctctctctttcgcgcaatgtcatctgctccaagtgcaagggcaagggctcgaagtctggtgcttcaa

SEQ ID NO: 44642 - DNA, 291 bp, Zea mays
acattattcaaccccctccgaagtatgttctacctggacaaaagatctaagaaggctcctgtttctagctttattatcaaggactcgctaaagttgaaaaccagcgatgctgaaacggttgtcaacatacatgctgctagcgaaaagtttgctgagttgattcctctcctcgagtcaaacgctgacgtgtatgctctcaaagagaagctggaagatgagtaccttgagataccaggagacagcgtgaagcgtgtttttgcagggcttatactccgagaaataaaggagttt

SEQ ID NO: 44643 - DNA, 288 bp, Zea mays
cttccagtcactcgatcttgcatggacattgcttcggatcttacctcgcgaacttctccaccgtattccagcaaagaccttggaccagtactatagcagagatgcttcccactgaatcactgatcgttgatcagtgttccaatattttggcaagtgcagctttgaataaattgaagggattggcctcgtggccattttcctgtatttatctgtagtcaggtccaattcttttctgttggtgagcgcaagttattcatagatgactcggtcatgggaatatttgtaata

SEQ ID NO: 44644 - DNA, 300 bp, Zea mays
ttgaagtcttcagctatggcgcgcctccgcatggtggtttcggggtgggtttggagagggtggtgatgctgttctgcgccctaaacaacatcaggaagacctcgatgttctctcgcgatccgcagagacttgtgccgtaatttactgagtccaatgccctgagtttgcagcagagcgtactggttgttttgatgttctttgagcatcgaacatcgctaacttgcaatctcagctactgaagccacggttaccgtggttcagagttcctgttaaattcacaaagctacttgtatctattag

SEQ ID NO: 44645 - DNA, 288 bp, Zea mays
attgcacaccaggtgcaaacatgtggtctttgggaaggtggtccgtggaatagctttgcttaaaaagcttgaagcagttggtagtgaaactggaaatccttcttatcaagtgaaaattgtagactgtggtgaagtttccaacacaaattctcaggatctgctaaagggagataaagtaaactcaaagacagataaaggtataaatagatgagtactatgttccatctctttgctgccaaagaatagataaaagttgatgtcatgtttgtgcagaaacaaggttgtaat

SEQ ID NO: 44646 - DNA, 285 bp, Zea mays
attcaattgaagctcgaagctacatcaattctgtggcttgtggtttcttagattatgactcaagtgacaatccactccaagagacggttaaacctatggtagatggtggaactgagggcttcaagggacacgctagagtcattatacctggaacaacaccttgctttgaatgcaacatatggctttttcctccacaggttaagttccctttatgtactctcgccgagacaccaagaactgcagctcactgcattgagtatgctcacttgatcaaatgggatgagg

SEQ ID NO: 44647 - DNA, 285 bp, Zea mays
agatcacccgcgaacctggtcctgtcaagggaggatccactgttattgccttcgcacaggatcctgatggctacatgtttgagcttatccagagggctgacacacctgagcctctttgccaggtcatgcttcgtgttggtgaccttgagcgttctatcaagttttatgagaaggccctagggatgaagctcctaaggaagaaggatgtacctgattacaagtataccattgccatgttgggctatgctgatgaggacaagacaactgttctggagctgacgtaca

SEQ ID NO: 44648 - DNA, 291 bp, Zea mays
ggtgaagccgccgccgctgcagtgtccatagccaccgcaggagactgagatggggggttttgtcaagacccacaagagcaatgcatacttcaagcgtttccaggtgaagttcaagagaaggcgcgctggcaagacagactacagggccaggataaggctgattaaccaagacaaaaacaagtacaatacacccaaatacagatttgttgtgcgatttaccaacaaggacatcacagcacaaatcatatctgctagtatagcaggtgatatggttcttgcttctgcttactc

SEQ ID NO: 44649 - DNA, 290 bp, Zea mays
agccccaaggccccaactacccccagtctcggaagagaactatccagaagcgcaagactccaaagccgtcgccttcctatccatcccttcctcgccgcgggggtcgcctgagatcacataaacaatggtgaaggctgttgctgtgcttggtagcagcgatggtgtcaagggcaccatcttcttcacccaagagcgagatggccctaccactgtcaccggaagtgtctctggcctcaagcctggcctccatgggttccatgtgcatgcacttggtgacaccaccaatggct

SEQ ID NO: 44650 - DNA, 287 bp, Zea mays
acgcaacttcacagcgtatcatcgttttccatcgctcctactcctatcatccagaaaatctgagcggtattgatggcgcccaaggcggagaagaagccggcggcgaagaaggtggcggaggaggagccctcggagaaggcggctccggcggagaaggcccccgcggggaagaagcccaaggcggagaagcggctacctgcgggcaagtccgccggcaaggagggcagcgacaagaagggtaggaagaaggcgaagaagagcgtggagacctacaagatctacatctt

SEQ ID NO: 44651 - DNA, 282 bp, Zea mays
attgaatacatcaaatcacttgatgctgaagaagacatcaagcttctcaagttccatgggtggaagctgcccccacgatgcgctcgtgttctgacgcatcagcaccatgcttttgaagaaaggtgcagctcgtggcttcacaccatatgacatagggcgcattctatgcagggaaactgtgaatagggagtctgagattgaggacatcattcaggcagcagaggatgctgttctcccagggtccagtgaaaacatgttcttagaaactgtatctgaaatcat

SEQ ID NO: 44652 - DNA, 281 bp, Zea mays
cgatctgtttgctcccccagacatgtcgggccgcggcaagggaggcaagggcctgggtaagggcggcgcgaaacgccaccgcaaggtgctccgcgacaacatccagggcatcacgaagccggccatccggaggctggctcgcaggggcggcgtgaagcgcatctccgggctcatctacgaggagacccgcggcgtgctcaagatctttctcgagaacgtcatccgcgacgccgtcacctacacggagcacgcccggcgcaagaccgtcacagccatggacg

SEQ ID NO: 44653 - DNA, 282 bp, Zea mays
acatccgcagttcccccgcgcccgagacgcaaccccgcgccaggagtaagtttgttcttttatcgatattatcgatatggcgagggaggagaatgtctacatggccaagctggctgagcaggccgaaaggtatgaagagatggttgagtatatggagaaggtggctaagactgtagatgtggaagagctcactgttgaggagcgtaacctcttgtcggtcgcatacaagaatgtgattggggctcgccgtgcttcatggcgcattgtctcttctattgaaca

SEQ ID NO: 44654 - DNA, 284 bp, Zea mays
ggacatcgagcggatccaaggaagtgccggcgacgtgctggaggacgaccccgtcgggcggctcaaggtgtacgtgtacgagctgccccccaagtacaacaagaacgtggtggcgaaggactcgcggtgcctgagccacatgttcgccacggagatcttcatgcaccgcttcctgctggcgagcgcggtccggaccctgaacccggacgaggcggactggttctacaccccggtctacaccacgtgcgacctcacgccgtggggccatcccctcaccgtcaagt

SEQ ID NO: 44655 - DNA, 287 bp, Zea mays
ctaaataagagagttacattccctatggagttagatctgacaccatacatgagttgcactgatggaagtgacctgtatgatctctatgctgtagtcgttcatctggatatgctgaacgcatcattctttggacattatatatgctatatcaaaggttatcaaggaaggtggtataaaattgatgactgcaaggttatggttgttgatgaggaggaagtacatgctcaaggcgcttatatgcttttatatagcaggagaacagctcgtcctaggtcacttcttacagt

SEQ ID NO: 44656 - DNA, 303 bp, Zea mays
ctctcccccgccccgttcgtctccggcgagctagggtttgcccccccgcctcgccaccccacggctcccgccatcccttggatctccagccatgtacggcggagacgaggtttcggcaatcgtcatagatgtgggctcttacagctgcaaggcgggctacgcaggcgacgacacccccaaggccgtcttcccatcggttgttggttcaattgaacaaactgaagacacagatgaccccaagccagagaaggaagctgactctgcatcagattctaagaacggtgccaagcccatggatgtgga

SEQ ID NO: 44657 - DNA, 299 bp, Zea mays
tgcggcgtggagtgagcacattgaggactgtctactcctcgttcgcgtgctgttcgtcccgagcgatccggcaaccatgaacatcttcaagaataaggtcgactccatagaggctctcaggaccagcaaacgggaaatggctgtcgccacgcggggagttgagagagagatttgttccctgcaaatggaggagataaggctggttgcagagataaagaagactgccaagactggaaatgatgctgcaaccaaaatattagctcggcaacttgtcaggctgaggcaacaaatcctcaatt

SEQ ID NO: 44658 - DNA, 296 bp, Zea mays
gagtctcgtccacccgtcgtcctcctagctcctctactcgccagtcgccatgggcaagattaagatcggaatcaacggcttcggaaggatcggcaggctcgtggccagggtcgccctccagagcgaggatgtcgagctcgtcgccgtcaacgaccccttcatcaccacggactacatgacctacatgttcaagtacgacaccgtccacggccactggaagcacagcgacatcacactcaaggactccaagacccttctcttcggtgacaagccggtcaccgtctttggcatcagga

SEQ ID NO: 44659 - DNA, 297 bp, Zea mays
atacaagttgatgctgctccattcaagcagtggtacctcactcactatggagtggacatcggtaggaagaagaaggtgcctgttgctaagaaggatgcgactgagggacaagagggtgaggctatagctgaggaaacaaagaagagtaaccatgtgcagaggaagattgagaagcgacagcaggaccgtgcactcgacactcatattgaagagcaatttggcagtgggagattgttggcctgcatttctgcccgtcctgggcagtgtggccgagctgatggctacatccttgagggg

SEQ ID NO: 44660 - DNA, 297 bp, Zea mays
agatgagagtgggaaacgcatggggatcgttgagcttccctctcacaagttcttcatcggtgcacagttccatcctgaattcaagtcgagaccagggaagccatctccgcttttcttagggctgatagccgcggcgtctgggcagctagaaccattgctccaacgcagcaacccgacaacgaaagcatgttcgatcagtaaagtcccgaaactgaaactgtaccccactgggcctgtgaataatccactgaacagcttggtaaacgggtacttcccaaatggcactgggatccacac

SEQ ID NO: 44661 - DNA, 298 bp, Zea mays
ctgctccctcggtccctccctcggtccctcccggtctcgcagttcctccccgtcgtcttccaccgcaaatcgccgaagcaagcaggcgagctcgggaccagatccactgcgggcagctggagcggaagggccatggggacgccgccgcctttccaggagtccggccactgcgacgtctgccgctgcaccttcaacaccttccgccgccgtcatcactgccgcagctgcggacggacgctctgtcacgagcattcttcgtactacatggctctcccgcagtatgggatatatacagacg

SEQ ID NO: 44662 - DNA, 298 bp, Zea mays
ccgacctcaccaacgacgagtaccgcgccacctacctcggcgccaggaccaggccgcagagggagaggaagctcggcgccaggtaccacgccgccgacaacgaggacctgccggagtccgtcgactggagggccaagggcgccgtcgccgaggtcaaggaccagggcagctgcgggagctgttgggcttactcaacaatagcagctgtggaaggcatcaaccagattgttacaggcgacttgatctccttgtctgaacaagagcttgtcgactgtgacacttcgtacaatcaggggtg

SEQ ID NO: 44663 - DNA, 298 bp, Zea mays
gttgcacatccatgtgagttggcagaggtgtttgatgtgatgtgggcatttgtgttttatgtaatagatagtatcatcctcgctcgttgtgccgccttcgtccacacaagcgacggagctaaggttacgagaaccggcccagtggcaccatgttggtctaccaggatctgctatctgacgacgacctccagtaggactccctcccctacaggcaactcaggaacggcgtcacagacgtcgaggacaagtgcactatcaaatacgcgatctttgccgagtgcatataatcttgccgaga

SEQ ID NO: 44664 - DNA, 293 bp, Zea mays
ccttcgtggacgtgctggggctggaagaggagtctctgggctcggtgccagcgcctgcctgcgcgctgctgcagctgtttcccctcacggcccagcatgagaacttcaggaaaaagcagattgaagagctgaagggacaagaagttagtcctaaagtgtacttcatgaagcagaccattgggaattcctgtggcacaatcggacttattcacgcatggccaataatcaagacaaactgggatttgaggatggatcagttctgaaacagtttctttctgaaacagagaaaatgt

SEQ ID NO: 44665 - DNA, 291 bp, Zea mays
atttactgtctactacaagcctaggacaagtccagctgagtttgttgttccctgtgatcgctatatggaatcactgaaaacgaaattaccctatagggatgagatttaaaatgaggtttgaaggtgaagaggctccagaacaaaggttcactgggaccattgttggaaatgtggatcctgatcaagctggatgggctgaatctaaatggcgttacctcaaggtgaggtgggatgaagcttcctccattccacgtcctgaaagggtttctccctggcaaatagaacctgcag

SEQ ID NO: 44666 - DNA, 290 bp, Zea mays
agctggagtgctggactgcagctgccagcggcatttgcgtgcagcactgcctgcgcctgctgtgccgcccagtccaatggagaacgccgcgtcggtcatctcctcgctcctcggcggcggcggcggctccggggcacaggcggcaacggtgaagtccgtcctcgtgtaccccatcaagtcctgcaggggaatctccgtgccccaagcccccatcaccgccacggggttcaggtgggatcgccagtggatgctcgtcaactccaaagggagagcatgcacccagagggtgg

SEQ ID NO: 44667 - DNA, 292 bp, Zea mays
cttgcaggtcagcattgtcggttacaagaagggacagctcaagatgctttcacatgcatatgaccgtactcttggtgggaggcacttcgatgaggccctcttcaagcacttcgcggcgaagttcaaagaagaatataagactgatgtttaccagaatgcccgtgcatgccttaggttgcgtatggcgtgtgagaagcttaagaagatgctgagcgccaacccagaggccccactgaacattgagtgcttgatggatgagaaagatgtgagagggtttattaagagagaggag

SEQ ID NO: 44668 - DNA, 297 bp, Zea mays
gtctgctcgcatttcctcccaatccatcccgcctccaaacccgaactccaagtcgccccgcatcgatggcgcccaaggccgagaagaagcccgcggcgaagaagccggcggaggaggagcccgctgccgagaaggcgccggccgggaagaagcccaaggcggagaagcgtgtcccagcaggcaagtccgccggcaaggagggcggcgagggaaagaggggccggaagaagggcaagaagagcgtggagacctacaagatctacatcttcaaggtgctgaagcaggtgcacccggaca

SEQ ID NO: 44669 - DNA, 286 bp, Zea mays
atggaggcttgccccagatggggaccaaaagctgcttccctggagacgggcggggaggccaaacttcctgctgaaagcctgtggcctcttttggggtgggggcgggggtccaggcagaaagaaaccgtctgctgctcaagacccacaggacgccgggaagactaaatgatcactgcccccagtgaatatggtgaagaagctggtgatggcccagaagcggggagagacacgagccctttgcctgggtgtaaccatggtggtgtgtgccgtcatcacctactacatc

SEQ ID NO: 44670 - DNA, 284 bp, Zea mays
caagataagagtttcttcctcacaggctaaaaacaggctatttatcgggaacataccctataactggacagagaatgaatttaaaaaagcagcagaggaagttggccctggagttttaaaagttaatctcgtgaaggcaccacattcagatacgaacaagggttatggatttattgaatactacaaccaggcttgcgcagagtatgctaagaagatgatgtctaccccagaattcaaactagataaaaatgcccctaatgtcagttgggcagatactaagaatg

SEQ ID NO: 44671 - DNA, 286 bp, Zea mays
aaccgccgtcatgtcgaagcgaggtaggggaggttcggctgggaacaagttccgcatgtcactgggtctaccggtggcggcaacggtgaactgcgcggacaacacgggcgcgaagaacctctacatcatctccgtcaagggaatcaagggccgcctcaaccgcctcccgtccgcctgcgtcggcgacatggtcatggccaccgtcaagaagggaaagcccgacctcaggaagaaagtgatgcctgccgtcatcgtccgccagcgcaagccgtggcgtcgcaaggac

SEQ ID NO: 44672 - DNA, 286 bp, Zea mays
atgcttgtatgctctagggtttttgccacgccgccgccgctctgccccttccaccccaccgatataccaagatgacggcgcaggctgcggaggagctcgccgcccagatcgagcagcagaagctcgaggagcagaagaccgaggcagaagaggttgtggtggaggaggatgacgaggatgatgaggatgacgatgatgatgacaaggatgatgatgaactggatggacaagaaggggatgggagtggcaagtcgaagcaaagcaggagtgagaagaagagccgcaa

SEQ ID NO: 44673 - DNA, 214 bp, Zea mays
acacgatccaactcctgagcactttcacctcgtcccctacaagccaatcgaagccgagatacggccatggactccaccggcaccggagcaagggcgtaaggggaagaagggagcggtcgagcagaaggtcggcgggccaaggaagaagtcggtgtcgaagtccgtaaatgccgggctccagttccccatcggccgcatcgggcgctacttaaag

SEQ ID NO: 44674 - DNA, 124 bp, Zea mays
cgtctgctcgcatttcctcccaatccatcccgcctccaaacccgaactccaagtcgccccgcatcgatggcgcccaaggccgagaagaagcccgcggcgaagaagccggcggaggaggagcccg

SEQ ID NO: 44675 - DNA, 250 bp, Zea mays
ctgcctcagctgcattacacagtgattttttttcaaccgagcattatgcttgtaacccttcaagtctgccaacatatccaccaagcaaggagatggatgccaagttaagagacgaggaggctagaagactacgagcggctgcaaaggccaagggagaacagaaaaggactcgaccacgtgatcgatctcggagggctggaccagcaccagaagctaatgcagagattcaagcaaacttagacaggcgacg

SEQ ID NO: 44676 - DNA, 291 bp, Zea mays
agcaaccttggctggtcacctgtgtatgttgagtccaaccttggtgtgatgtcgattggtttcatgctgcctaatccagacgatgctgtcatatggaggggtccccgcaagaatggactgatcaagcagttcttaaaggatgtcgattggggggagattgactatcttgttgtggacgctcctccaggaacatctgatgagcacatctcgatcgtgcaataccttcaagccacaggaatcgatggcgcgataatcgtcacgactccgcagcaggtctctctgattgacgtg

SEQ ID NO: 44677 - DNA, 178 bp, Zea mays
ggggaagcccgccgccgccccggcccccagcaaccagcagatcgggacctctgttctgcgcaatccatccatggcggaggaatcaggccgtcccttgccaaagtttggtgaatgggatgtcaacgatccggcttccgcagacggatttactgtcatattcaacaaagccagagatgag

SEQ ID NO: 44678 - DNA, 248 bp, Zea mays
tagtcccctgctccattctcagccgccgccaatcccttcccgtgctccgcaaccgctgagtgagaagaagagatggccggcaagggcgatggcccggctatcggcatcgatctcggcacgacgtactcttgcgtcggcgtgtggcagcacgaccgcgtcgagatcattgccaacgaccagggtaaccgcaccacgccctcgtacgtcgccttcaccgactccgagcgcctcatcggagatgcggccaa

SEQ ID NO: 44679 - DNA, 244 bp, Zea mays
  unsure (1)..(244): unsure at all n locations
atctcctcgcatttcttcccatccgatccccccttcgcaaccaaaaccccaacgggggccgcatcgggggggcccaagcgcgagaacaaccccgccgcgaagacgccggcgcaggaggagcccgccgccgagaaggcgcccgccgggaagaagccgaagcgnagaaccgggtccccgccggcaagtccgctgccaaggaaggcggcgagggcaagaggggcaacaagaacggcaagaagagcgt

SEQ ID NO: 44680 - DNA, 129 bp, Zea mays
tcccaaggctggggtgattggtttcacgaaaacagttgccagggagtatgcaagcacaaatatcaatgtgaatgctattgcaccagggtttattgcatctgatatgactgccgaacttggagaagagct

SEQ ID NO: 44681 - DNA, 293 bp, Zea mays
aatggaagaaatgttgtggttcaaaatctacatcaaatttgtgtattcaagattgctaatgaaactggaaagccatggctgtggtgggattatgtgcatgatttcgcacttaggtgcccaatgaaggataagaaatacaatcatgactgtgccagcgatgttatcaagtcacttggattggacatcgagaaaataaacaagtgtgttggcgaccctgaagccaatgaggaaaacgtaattttaaaggcagaacaagatgcccaaattggtcatggtagaaggggagatgtcac

SEQ ID NO: 44682 - DNA, 291 bp, Zea mays
gtgctcgtctcaccgaggtccgcaagaacggaacctgcccctggctcaggcctgatgggaagacccaggtgacagtcgagtaccgcaatgagggtggtgccatggtccccatccgtgtccacaccgtcctcatctccacccagcacgacgagacagtgaccaatgatgagatcgctgctgacctgaaggagcatgtcatcaagcctgtcatccctgagcagtaccttgacgagaagaccatcttccaccttaacccatctggccgctttgtcattggtggacctcacggcg

SEQ ID NO: 44683 - DNA, 170 bp, Zea mays
agcttgggttggctgagtttcccgaagatagccgattcactaatgttgaatcagctcttgttgcattaggttgcaaggagtgtcttctcccagcagattgtgaaaaatccattgacctaaatccccttcaagacgtcattagtaactgtaatgtgctgttgactgagaaa

SEQ ID NO: 44684 - DNA, 128 bp, Zea mays
agggaggcgccgacgccgagtttttgctccatcccgcatccaccgccagaatgtttctcacgaggacggagtacgaccgcggggtgaacaccttctcgccggaggggcggctgttccaggtcgagtac

SEQ ID NO: 44685 - DNA, 129 bp, Zea mays
ctcctaaacttgcctcctggagctacggttacagttcttaagaacttgagaatatgtgatgattgtacatgctgcaataatgttcatgtcaaaggctgtcgcaagagagattgttgttagagatgttag

SEQ ID NO: 44686 - DNA, 211 bp, Zea mays
agcttgatcagtaccaaattctcaagtacccccttaccacagaatcagcgatgaagaagattgaagataacaacactctggtcttcattgttgacctcaaggcagacaagaagaagatcaaggctgccgtcaagaagatgtatgacatccaggcaaagaaggtcaacaccttgatcaggcctgatgggaagaagaaggcttacgtgaagct

SEQ ID NO: 44687 - DNA, 252 bp, Zea mays
gctgaaattgctcacaacgtgtccaccaagaagcgcaaggagatcgtggagcgtgctgcacagctcgacattgtggtcaccaacaagcttgctaggctccgcagccaggaggacgagtagtctggtttcttgtcttaacgacgaactggatgttgccattcctttctgtagggaactactttgcttgtgtcttgttagtactgaaaggaatggcaacattggttatggttctgacaagtcgaccaggcacta

SEQ ID NO: 44688 - DNA, 267 bp, Zea mays
gtggcagccatcaggtgagccaagatgggtgcatacaaatacatccaggagctgtggaggaagaagcagtccgacgtgatgcgcttccttctaagggtccgctgctggcagtaccgccagctctctgcgctgcacagggctccccgctccagccggcctgataaggcgcgaaggctgggatacaaggctaagcaaggttatgtcatttacaggatccgtgtccgccgcggtggtcgcaagcgcccagttcctaagggtgcacctacg

SEQ ID NO: 44689 - DNA, 283 bp, Zea mays
gggtgctacaaccacaattgccgcggattcgtgcagacgacgaacaagattgcaattggggcggctatcaccccggagtcggtgtacaatggcaggcagttcgacatcactctcatgctatggaaggacccaaagcacgggcactggtggctggagctgggcccgggcctcgtagtcgggtactggccgtcgcacctcttcagccacctggctcgccacgccaacatggtgcagttcggcggcgaggtcgtcaacacccggccgtcggggtcgcataccgcga

SEQ ID NO: 44690 - DNA, 278 bp, Zea mays
cgatctgtttgctcccccagacatgtcgggccgcggcaagggaggcaagggcctgggtaagggcggcgcgaaacgccaccgcaaggtgctccgcgacaacatccagggcatcacgaagccggccatccggaggctggctcgcaggggcggcgtgaagcgcatctccgggctcatctacgaggagacccgcggcgtgctcaagatctttctcgagaacgtcatccgcgacgccgtcacctacacggagcacgcccggcgcaagaccgtaacagccatgg

SEQ ID NO: 44691 - DNA, 200 bp, Zea mays
cgcgaacgcggagagcacgccatgaaggcctcgggcacgctacgagagtacaaggtagtgggtcgctgcctgcccacccccaaatgccacacgccgctcctctaccgcatgcgaatctttgcgcctaatcatgtcgtcgccaagtcccgcttctggtactttgtatctcagttaaagaagatgaagaagtcttcaggggg

SEQ ID NO: 44692 - DNA, 227 bp, Zea mays
cttctggagccggaactgcagcttgagaagcagaaaaacgagatgaaaaggaaggaagcttggcgtgtttatggtgccttgctgtgtgctgcaggcaaatgcttgtatgatcggttgaaactatttcctggtttgctttctccgtcgatgcggcctcttttacagagcaacaaaagggtcttaaccaacaacccagataagcgaaaatctagcacagatctctctgc

SEQ ID NO: 44693 - DNA, 297 bp, Zea mays
gtacaatgttggaaatagtaaaccagcttgatgggtttgatgcaagagggaacatcaaagttctcatggccactaataggcctgatacattggatcctgcacttctgcgtcctggtcgtctggacagaaaggtagaattcgggctacctgacctggagggccgtacccaaatctttaagatccatacacgcaccatgaactgcgagcgagatattcgtttcgagcttctggcacggctctgcgccaactctactggagcggatataaggagcgtctgcacagaagccgggatgtatg

SEQ ID NO: 44694 - DNA, 252 bp, Zea mays
ggtgattctggtgttgggaaatcatgcttgcttctcagatttgcagacgattcttatttggacagctatatcagcacaattggggttgatttcaaaattcgcacagtggagcaagatgggaagaccataaaacttcaaatttgggatactgctgggcaagagcgcttcaggacaatcactagcagctactaccgcggagctcatggaatcattattgtatatgacgtgacagaccaagaaagcttcaataat

SEQ ID NO: 44695 - DNA, 250 bp, Zea mays
ggaacgtctgaggttatcaataagctcctagtccagacgccatgggtcatttcacagaggaggacaaggctactatcacaagcctgtggggcaaggtgaatgtggaagatgctggaggagaaaccctgggaaggctcctggttgtctacccatggacccagaggttctttgacagctttggcaacctgtcctctgcctctgccatcatgggcaaccccatagtcaaggcacatggcaagaaggtgctgac

SEQ ID NO: 44696 - DNA, 309 bp, Zea mays
accgcagtgtaggtctagatcatccaatccaacacaccggtcgagcaatggcggcagggctgcaggtgttcggacagccggcgtccaccgacgtcgcgaggctgctgacctgcctcttcgagaagaacctcgagttcgagctcatccgcaccgacaccttcaagaagtcccacaagctccccgagttcatcaagctaagggatcctactgggcaggtgactttcaagcacggtgacaaaacaatcgttgattccagggccatttgccggtacctgtgcacgcagttcccggacgacgggtacaagaagc

SEQ ID NO: 44697 - DNA, 285 bp, Zea mays
ctgtactctctcacctccttcgccgttgtctaccagatcatccactggcgtcggagaagaagcagtcgaacccgatgcgggagatgaaggtccagaagctcgtgctcaacatctccgtcggcgagagcggtgatcgcctcacccgcgccgccaaggtactggagcagctaagcggccagtcaccggtattctccaaggcaaggtacactgtgaggtcgtttgggatccggcgcaatgagaagatcgcatgctatgtgatcgtgcggggtgagaaggcatgcagct

SEQ ID NO: 44698 - DNA, 314 bp, Zea mays
gtctgggatgtcgggggtcaggacaagatcagacctctctggaggcattacttccagaacacacagggtcttatctttgttgtggatagcaatgaccgtgaccgtgttgttgaagccagagatgagctgcacaggatgctgaacgaggatgagctacgtgatgctgtgctgcttgttttcgccaacaagcaagatcttcctaatgccatgaatgctgctgagatcactgacaagcttggattacactccctgcggcagcgacactggtacatccagagcacttgtgccacaactggcgagggtctgtacgaggg

SEQ ID NO: 44699 - DNA, 172 bp, Zea mays
attcgctccgtcgccgccaagatgatgtgcggggcgccctccgcgacgcagccggccaccgccgagacccagcacatcgccgaccaggcgaggtcccagcttgaagagaaagatcacaagaagttccctgtgtttaaggccgtgtcattcaagagccaggtggtcgcgggga

SEQ ID NO: 44700 - DNA, 124 bp, Zea mays
cggctcgagatggatcatcaccggtacctcggtgcggacggcatctatgtgtatatccctactgatttcgagggctggtgcttcttcaccactctcaggaagcttgtctgggttatccttcagc

SEQ ID NO: 44701 - DNA, 237 bp, Zea mays
gcaagacgaccaaggcggccataccgaggagaagacgatgagcgcccctacaagtacaacacaagcagccaacaaccagctgtccacaagaacgtcgattgagagggtcttctgggcaagctttgaagaccttcccaacgccctcaagtcatgcttcctctacttggctgctttccccaagggcaccttcctgtctaccggcagtatagtgcgggtgtggatggccgagggatcatt

SEQ ID NO: 44702 - DNA, 305 bp, Zea mays
  unsure (1)..(305): unsure at all n locations
cagaactgtgcgtcaaacatggtgaacaacagagagagggagaagatttttgtagccagccaggagaaattccacgccggcgcagacaagcagtactggaaatcgatttcagatctcatcccacatgaaatagccaccatcgagaagcgggggaagaaagacaaggacaagaagccatccatcacagttgtccagggccccaagcctggcaagcccaccgacctgtcccggatgcgccatatcttggtgaagctgaagcatgctccgctgccacatatngtgcagcctccaccaccagcacctgt

SEQ ID NO: 44703 - DNA, 293 bp, Zea mays
gcagtcactcccgggccgccgccgccgccgcctccgcgaaaaaccctagcaggcttcgccgctatcactccaacgggcgcgaccatggtggccacaaagaagacgaagaaatccacggacaacatcaataacaagctgcagcttgttatgaagagtggcaagtacactctcggctacaagaccgtcctcaggactctcaggaactctaagtcgaagctagtgatcatcgctaacaactgcccgccccttcgtaagtctgaaattgagtactatgctatgctggccgaggtcac

SEQ ID NO: 44704 - DNA, 292 bp, Zea mays
gcggcgcggacagagagccatcggcggcgcactgaccgccggcgaagggtacagagatgaagacggttagcctcggcgcctctaggccttccactgtcaacttccgcatgccgacgagggacaacctcgtgcctatacgcgtcgacgtcgaggtggacggccagcgctacagggacgccttcacctggaacccgcgagatcccgactcggagataatcagcttcgctaagcggacggccaaggacctcaagctgccggccaatttcgtcccccagatgctccagtccatcca

SEQ ID NO: 44705 - DNA, 277 bp, Zea mays
gacacagatggcaaagtacttcacagcatacaggatagaccacatcttgggtttctttaggatatgggagcttccagatcatgctgcaacaggtttagttgggaaatttagaccttccatccctcttagtcaggaggagcttctaagtgaaggtctatgggattttaatcggatgagccaaccatacattcgtcaggaaatactggaggagaagtgtggatccttttggacagtcattgcagccattttctaaatgagtaccagaacagtggtatga

SEQ ID NO: 44706 - DNA, 292 bp, Zea mays
ggccctttccgagtggtcaaaatgaaactcctctggtgaaatggagaatccaggggatggatgagtcatctttacctctgtcagtcaattgctggccgtcagtatctggaaatgaaacctatgtgaacattgaatatgaagcttctgagatgtttgatctgcacaacgttgtcatatctatacctctgccagcacttcgggaggctccgagtgttagacagatcgatggagagtggaagttcgactcaagaaactctgtgttggatggtctattctccgtatcgatcagtcg

SEQ ID NO: 44707 - DNA, 298 bp, Zea mays
cgaactgatttcgatgtcagcgggcctaaaccttggaaacttatttgactcagagcaggagttcaaaagagaaacaaggtttacatcaaaatgtccccccaaagaaattgtccgcaagatcgaggaagctgcaaaacctctaggatttgatgttcagaagaaaaattacaagttgaggctcgaaaaggtaaaggcagggaggaagggaaacctcaacgttgctactgagatactgcaagttgcaccctctctccacatggtagaagtccgaaaagcaaagggtgacactctggaattt

SEQ ID NO: 44708 - DNA, 291 bp, Zea mays
ctcaccattggatttaacgttgaaactaatgttcttgtactcgacgttttcaacgttaaatccaatggtggggatggtggtgacgatctcgccgagcttgagcttgtagaggatagtggtcttaccagctgcatcgagaccgaccatgagaatcctcatctccttcttggatttaacgttgaaactgtcgagtacaagaacattagtttcactgtttgggatgtcggtggtcaggacaagatccggcccctgtggaggcactacttccagaaccaccaggggctcattttt

SEQ ID NO: 44709 - DNA, 295 bp, Zea mays
aagcgcccctcctcctctcccccatccgtacccaatctaatcgacacccggccgagatgggccgcaagttcttcgttggtggcaactggaaatgcaatggaaccgcagatcaggttgagaagattgtcaaaaccctgaatgaaggaaatgttccctcttcagatgttgttgaggttgttgtcagtcctccttatgtgttcctcccggtggtcaagagccagctgcgccaagagttccaagttgctgctcagaactgctgggtgaagaagggaggtgcattcactggtgaaattag

SEQ ID NO: 44710 - DNA, 292 bp, Zea mays
caattgccgagtattttcgtgatatgggctacaacgttagtatgatggctgactccacctcacgatgggctgaggctttgcgtgagatctcagggcgtttggctgaaatgcctgctgatagtggttacccagcttacttggctgcgcgtttggcatccttttatgaacgtgctggtaacgtgaaatgcctgggaagtccacacaggactggcagtgtcacaattgttggagccgtctctcctccaggtggtgatttttcagacactgttacctctgcaaccctcagtattgt

SEQ ID NO: 44711 - DNA, 318 bp, Zea mays
attttatcctcatgtcaataacatggatggattttttgtagctaagctgaaaaagttaagcaatacaattccggtgacgtctgagccgtctaaagcatctgaagaagcagctaaggctgatggtgaagatgagaaagctatttctaatgaacaagagactggtgttcctgataaagatgagaaaactgttgagataaaaaatcataaaaatgtgactaataaaagaacaagtgtcaccaaagagactggaagccataaacgtgaatccaataagccaggaaagcatctcaagataaataagaataatgctacaaaaga

SEQ ID NO: 44712 - DNA, 231 bp, Zea mays
gcaaatcaaacaacaatgcttaaaggagaaactgaagaaattgggaagcttattgaaaagacgatgatgcaaaaatatggagttgaaaatgtaaacgatcacttcatggccttcaatactatttgtgatgccactcaggaaagacaagatgctatgtatcagctggtgaaagagaaagttgaccttattcttgttgttggaggatggaattcaagtaacacctctcatctg

SEQ ID NO: 44713 - DNA, 309 bp, Zea mays
agattctacccgttatttggccttggggctaatattgctcttatcttttctgggcgtactgtgaagtatttctcaaatttgcgcaagacattgggtcctggaattgatggctgggaagtatctttgaaaggaatgatgagcatagtggtactccttggacttgtcataacttccatctattggggagtgaacaagtttgttttgaatgatccttcacttccaaaggctgatcgtaagaagaaaaaggaaaagcctaaacttggcatgaaagagagtctgaaggttctgctctcctcgaggtatgtgagg

SEQ ID NO: 44714 - DNA, 293 bp, Zea mays
ggctcgagtcttgaagttggtctgaccaacaatgcagctgcctactacactggccttctgttggctagccgtgtgctcaagacccgtggtttagataaggaatatgagggcaatgttgaggccactggtgaggacttctctgttgagccagctgatgagaggaggcctttccgtgctctcttggatgttggccttattaggactacaactgggaaccgtgtctttggtgccctcaagggagctttggatggtggactggatattcctcacagcgagaagaggtttgttggttt

SEQ ID NO: 44715 - DNA, 299 bp, Zea mays
attcccagtaccctcacgccggcatccgtcgaagctgctcgacctcgactcaagccttccttgctccttgccgccgtcgagtcgtcgcaggaacgatgacccggcggaacggctgtacgatctacgtgggcaacctccccggcgacatccgcgagagggaagtggatgatctcttctacaagtatggacgtatagtggaaattgacttgaaaattccaccaaggcctcctggttttgcttttgttgagtttgaggacgcacgtgatgctgaagatgcaatatatggccgtgatggatac

SEQ ID NO: 44716 - DNA, 254 bp, Zea mays
atcgagccgcaggttgctggagtaccacaccacacattaagtcgtggttgatgcaacatagcatgaatgaatctgatgcctacagatattttgtactgagagctcaaaagatagcaatatcgcatggttatgacatcattaactgggaagagacatttaacaactttggagacaagctggatcgtaaaactgtggtgcataactggcttggaagtggagttgcagagaaagtggttgctgctggtttgagatgc

SEQ ID NO: 44717 - DNA, 248 bp, Zea mays
ctccgcttccagtcctccgccgtcgccgcgctgcaggaggccgccgaggcctaccttgtggggctctttgaggacactaacctctgtgccatccacgccaagcgcgtcaccatcatgcccaaggacatccagctcgcgcgccgtatcaggggcgagagggcctgagcgaggctggctcctctcaccgcaggcggcgtcgttgttgcttcgggcctgcttgtaggacttgtgcttctcttggtttcctt

SEQ ID NO: 44718 - DNA, 313 bp, Zea mays
ttccccttccctccctccctctccccgcgggccgccagaggcaatttcgcactcgattcgaccccgattcgtccgcccgcgaccgggattccctccgccaagcgcggatctgaacgctgcgctccgtgtcgccgctcgaatccgccatgaagggggccaaatccaagggcgccgccaaggccgatgccaagctggcggtgaagagcaagggggcggagaagcccgccaagggcaggaaagggaaggccggcaaggaccccaacaagcctaagagggctcccagcgctttcttcgtgttcatggaggaatttcg

SEQ ID NO: 44719 - DNA, 310 bp, Zea mays
aggtcttctacggcatcctgagaatagagaatgcgcagactgcaagtcaaagggtcctcgatgggcaagtgtgaatctaggtatctttatatgcatgacatgttctggcattcatagaagcctgggggtgcacatatctaaggtaagatctgccaccctggatacatggctgccagagcaagttgcatttattcaatcaatgggaaacgaaaaagcaaatagctattgggaagcagagctgcctcctaactacgatagggttggaatagagaatttcatccgtgcataatatgaggacaagagatgggta

SEQ ID NO: 44720 - DNA, 172 bp, Zea mays
gcacctccaagtgtccaacctcaggctgctccagctgctacggttgctgctactgatgatgctgatgtgtacagtcaggcagcttcaaaccttgtatctggcaacaatctagaacagactatccaacaaattcttgacatgggtggtggtacatgggaacgtgatactgttg

SEQ ID NO: 44721 - DNA, 306 bp, Zea mays
gatcgttgtgctgggtggagcgttctttgcggctggaaatgccactccttccgctgaagcaaatatccacagtgatccggaggcagccgacatggttttcacttctggggcggacatctacgtcgttggcctcaacatcacaacgcaagtcagcttcacagataaggatctcctggagctaagaaactcgcaagggaagtacgcacagttcctatgtgatgtatgcaagttctacttggactggcacaccgagtcttatggtgctcctgtgattttcctccacgatccggtcagctttgccgcgct

SEQ ID NO: 44722 - DNA, 301 bp, Zea mays
ggcgcagagaatccccaagcaaacaaacagggtagaggtagagggagaggagaggagaggagaggagaggagaggttgggtctgggacaccatggctccgatgaagctgtacggggcggtgatgtcgtggaacgtgacgaggtgcgcaacggcgctggaggaggctggctccgactacgagatcgtgcccatcaacttcgccaccgccgagcacaagagccccgagcacctcgtccgcaacccgtttggtcaggttccagctctgcaggatggtgacttgtacctcttcgaatcacgcgca

SEQ ID NO: 44723 - DNA, 173 bp, Zea mays
cgccggcctacaaccgttttcgtgctcacacacccaaaccttagtcgcgatcaggccccaaggactcgagatgaagtcgagggcacggtccaccgccggcgactccaggctctcggtgaggaagaccaaggctgagaaggacccaaacaagcccaagaggcctccgagcgcgt

SEQ ID NO: 44724 - DNA, 245 bp, Zea mays
cttcagccaggaacagtagaagtgaagctccttctggttcacagaaagagaatggtgccagtacaagcaatatagaaaagccaccacctgtggagaaaacattactttgtactcttgaagagttgtataatggaacaaaaaggaaaatgaagatcactaggaatgttgcaaagccagatggaagaatagaagttgaaacagaggtcttggcagttgaagtgttacctggctggaaaaagggaacc

SEQ ID NO: 44725 - DNA, 268 bp, Zea mays
ctgttttaaagacatatatttatcatatgatctacccattctaccccagacagttacccaagataaatgaaagcataagtctataccaagaattttacatgaaagttaccagtagctttatctgtaatagccaaacactggaaataactcaatgtccatccttatacataaatggataagtaaattgtggtacatccatacaatggaatactactcaacaatgagaagaaatgaagtactgatacatatagcaacatggatgaatctc

SEQ ID NO: 44726 - DNA, 296 bp, Zea mays
cacctcgccgcgatctccgtagcctccgtcgcgtcgagcatcgatcatgtcggcctactgcggaaagtacaaggatgagctcatcaagaatgctgcctacattggcacccctggcaagggtatccttgctgctgatgagtccactggcaccattggcaagcgcctttccagcatcaatgtcgagaacgttgaggagaaccgccgtgccctccgtgagctcctattctgctgccctggtgctctccagtacatcagcggtgtgatcctcttcgaggagaccctgtaccagaagacca

SEQ ID NO: 44727 - DNA, 292 bp, Zea mays
gggagctttacagcaacaacataagtgggacaataccccctgaactggggaacctgactaacctggtcagtttggatctgtatatgaacaacttctctggcaatatccctgacagcctggggaatctagtgaagctgcgtttcctacgtcttaacaacaatagcttggttggtccgattcccgtatccttgaccaatatctccactctccaagtactggatctctcgaacaacaacctctcaggacaagtcccatcgactggctccttttcactcttcacccctataagttt

SEQ ID NO: 44728 - DNA, 239 bp, Zea mays
aaaagcaggtgccaatcattgggctgctgatgaacgacagaggttttatttctcgggttctttgcccaaaatatggtggattccttacttttgggtcactcaagaaaggaaaagagtctgcacctgcacagccaactgctgcagacttgataaatctgtacaatattaggcagatagggccagacactaaggtctttggtataattggtaaaccagttggccatagcaaaagcccaatt

SEQ ID NO: 44729 - DNA, 237 bp, Zea mays
ctcgtgcccaccagcttgtaatggagggatacaattggtgtcatgatcggaatgtggttaccattttcagtgcacccaattactgttatcgttgtgggaaccaggctgctatcatggaattagatgacactttaaaatattccttccttcaatttgacccagcgcctcgtcgtggtgagcctcatgttacacggcgcaccccagactacttcctaaaatttctccctgggaaacctg

SEQ ID NO: 44730 - DNA, 297 bp, Zea mays
gatgacagctggtacaagacggtcattttagctggtggttcgtcgtgcttgcctggtttaccagagaggctggagaaagagcttcaccaacttcttccaccttatatgtcagaaggaataagagtactccccccttcatttggcactgattctgcctggtttggtgcaaagatgatcagcaacgtgagtactttcactgaggcatggtgtgcaaagaagaaacaattccgtcagaagacaggccggagtggtacattgtttgccaattcctggtaatgaaaatctcagacacaagtc

SEQ ID NO: 44731 - DNA, 298 bp, Zea mays
cacaggcaagcactgtcaggaatcatgtgaagcagctcgagctatgtgtgaagaataggacagcactgccttggtgtgtgacaatggctctgggctctgtaatggcggctttgcttcggacgatgctcccagggctgttttcccatccattgtgggacgtcccagacatcagggggtgatcgtaggaatgggacaaaaagacagctacgtgggtgacgaagcacagagcaaaagaggaatcctgaccctgaagtacgcgatagatcatggcatcatcaccagctgggacgacatggaa

SEQ ID NO: 44732 - DNA, 244 bp, Zea mays
cctcagatgaatgaggagctctctggttggaagcttgttgttggagatgtcttcagagaaccaacctcaccgaagctgctctgtgtcatgattggcgatggggttcagattttgggtatggcaattgttaccattttctttgccgcatttggcttcatgtctcctgcatcgagaggaatgttgttgacagggatgatagtcttttatatgttacttggaattgtgtctgggtatgctgctgtca

SEQ ID NO: 44733 - DNA, 175 bp, Zea mays
ggctcgggtcgttgtggtgcgctgtcttcccgcttgcgtcagggacctgctcgactcagtggccgccatggcatcagatgaaggcaaactttttgttggagggctgagttttgacaccaatgagcagtcgctggagcaggtcttctcaaagtacggacagatctctgaagtggtg

SEQ ID NO: 44734 - DNA, 245 bp, Zea mays
aatccggatacctttcaggacgatgggaatgaagtcagtattgcggcatctgaattggtgagcgacatcactgttcgtatagggactacaaagttttaccttcacaagtttccgctcctctccaagtgtgctcgctttcagaagttgattccaaccactggtgatgaaaatattgagatccacatccatgatattcctggtggcgcaaaggcttttggggtctgtgccaagttttgctacggcat

SEQ ID NO: 44735 - DNA, 292 bp, Zea mays
gaagttcctcaagcccggcaaggccgtgatcctcctgcagggccggttcgccggcaggaaggcggtgatcgtgcgcgtgttcgaggagggcacccgcgaccgcccctacggccactgcctcgtcgccggcctcgccaagtaccccaagaaggtggtccgcaggactcggccaagaagacggcgaagaagtcgcgcgtcaagtgcttcatcaagctcgtcaacttcacccacctcatgcccacccgctacaccctcgacgtcgacttcaaggacgtggccaccggcgggcccg

SEQ ID NO: 44736 - DNA, 288 bp, Zea mays
cctcaggattatctcaaaaacccaaccttttgaggcgactgctacaagaacccagatggcagccctatcttaaataattatctgagctggaactggaataatcaactcagagagaagtacagaacaaaatctgacataattctcaaggaaaggatgagttggaatggaaagggcgcctcacctgggcatgaggccgtcaggctggataccgtgctcgaggcagtagagctcccagcaagaattccctacctggatgcctgcctgcccgatatggatgctgatgatctc

SEQ ID NO: 44737 - DNA, 292 bp, Zea mays
gcgagcgagggacccggggcggaagaagagagagaagacgtctctctcctctcggcgtccccgttccccaacctctcgtctgctgcctgcctgcctgcctgcctgcaaaaaggagtttgtcatggcgtctaagcgcatcctcaaggagctgaaggacctgcagaaagacccccccacatcatgcagtgcaggtcctgctggtgaggacatgtttcattggcaagcaacaattatgggaccacctgacagtccctatgctggtggtgttttcttagtgaacattcatttcccg

SEQ ID NO: 44738 - DNA, 293 bp, Zea mays
gccagaagggcagccactattgttctccgtggtggtgcagaccagttcattgaggaagctgaacgaagtctccatgatgccatcatgattgtgaggagagcacttaagaactcgacagttgtgccgggtggtggtgctattgatatggaaataagcaagtatctcaggcagcatgcacgaacaattgctgggaagtctcagttctttgtaaattcatttgctaaagcccttgaggttattccacgccaactttgcgataatgctggatttgatgccactgacgttctcaataa

SEQ ID NO: 44739 - DNA, 279 bp, Zea mays
agaagctgtacatccatttcacggtggagttccctgactcgttggcaccagagcagtgcaaggctctcgagacagtacttccaccaaggccttcatccaagctgacagacatggagatagatgaatgcgaggagacgactatgcatgatgtgaacaacatcgaggaagagatgcgcaggaagcaagctcacgctgcccaggaggcgtacgaggaggacgacgagatgccgggcggagcctagagagtgcagtgcgcgcaacagtaagcagactatcatc

SEQ ID NO: 44740 - DNA, 288 bp, Zea mays
ctcgagccgactccagcatctcccgtctccgtcgtctcgtctctgctcctcacctcgccgccagccatgggcaagatcaagatcggaatcaacggtttcggaaggatcggcaggctcgtggccagggtcgccctgcagagcgaggatgtcgagctcgtcgccgtcaacgaccccttcatcaccacggattacatgacctacatgttcaagtacgacaccgtgcacggccaatggaagcacagcgacatcaccctcaaggactccaagacgcttctcttcggcgagaag

SEQ ID NO: 44741 - DNA, 283 bp, Zea mays
caccaacaatctgactgggaatatcatggaggcatttaaagagtgcaagaaccttacggaacttaacctgcaaggaaaccatcttcatggtgagataccacattacttgtctgagctaccactagtaacagtggaattggcccaaaacaacttcacaggaaagctgccagagaaattgtgggaatcatcaactattctggagatcacactcagctacaatcagcttactggccctatacctgaaagcatcggtagactcaccagtttgcagaggctacagatc

SEQ ID NO: 44742 - DNA, 286 bp, Zea mays
acgtcttgaaaggggagagagagagagagaagagagagagaagagagagagagagagaggagtgggagacccgcgagaggctgccgtgtagggaccgtagactcagcgactgcgaaggagggataaggggatggccgggatcggaccgatcaggcaggactgggagccggtcgttgtgcggaagaaggcacccaccgccgccgccaagaaggatgagaaggccgtcaacgccgcgcgccgcgccggtgcggagatcgataccatgaagaagtacaacgctggtacg

SEQ ID NO: 44743 - DNA, 289 bp, Zea mays
agcagatcgtcctgatggcacaggcacaccaccctcttctcctactccttttgctcttcctctcctccactgccatttcttcctccaagagaacccagccgaagttctccgccgtcttctacttcggcgactcggttctcgacaccggcaacaacaaccatctccccacggtagctgtggcgaaccatgctccttacggaagggacttcccagggaagaaaccgacggggaggttttccgacggccggcttatcccagacctcctcaacgagaggctgcagctcaaaga

SEQ ID NO: 44744 - DNA, 274 bp, Zea mays
ctcagatctccttgacaggctgaggacccctgtggacaatgcccttagagatgcaaagttgcaattcaaagatattgatgaggttattcttgttggtggctcaactagaataccagctgttcaggagcttgtcaagaaaatgacaggaaaggaccccaatgtgacagtcaaccctgatgaggttgttgcacttggagcagctgtgcaggctggagttctgtctggtgatgttagcgacattgtacttcttgatgtgacccccttgtccctaggt

SEQ ID NO: 44745 - DNA, 283 bp, Zea mays
agcaggaggcggacaaggtaagcagcaatcgcaggaaccctagcgccgccgcacccgcaggaatgggtatcgacctcgtcgccggtgggaggaataagaagaccaagcgcactgcgcccaagtctgacgatgtctacctcaagctcctcgtcaagctctaccgtttcttggtcaggaggaccaagagcaatttcaacgctgtcattctcaagaggcttttcatgagtaaaaccaaccgaccaccaatctccatgcgccgccttgtcaagtttatggaaggaaa

SEQ ID NO: 44746 - DNA, 280 bp, Zea mays
gtcttatgtcatttactctttaggacaacctcttgaaaaactaaatcatttctttgaaggtgttgaagctcgcgtggcacagggcataagggaggaggaagtaagttaccaacttgcatttaacaaacaagaacttcgtaaagtcattaaggagtaccctggaaaggaagtaaaaaaaggtctagataacctctacaagaaagttgataaacatttatgtgaagaagagaacttacttcaggtggtgtggcactccatgcaagatgaatttatacgccag

SEQ ID NO: 44747 - DNA, 278 bp, Zea mays
gacaagtttctactccgtaatatcttggatacatattctctcatccaggaccaagtagttttggcatccaagttggaaactgcaccagtaaccaatgttgatgttgatgtcaatgcatcagagcttctaaaagaaaagggaaatagcgctttcaaaagaagacagtggatcaaggcaattgagttttactcagaggccatcagtttgagtgacacaaatgcaacatattactgcaacagagcagcagcttatctggaactgggccgttttaagcaggc

SEQ ID NO: 44748 - DNA, 277 bp, Zea mays
aaccgccccaatgtctacataaagatccctgctaccgccgaatgtgttccttccatccgggaagttatcgctaatggcattagcgtcaacgtcacgcttattttctctattgcgagatacgaggctgtgattgatgcttaccttgatgggctagaggcttctggcttgagcgacttatctcgagttaccagtgtcgcatccttctttgtcagccgagtcgacacccttatcgacaaaatgcttgagaagattggaacacctgaggcacttgccttga

SEQ ID NO: 44749 - DNA, 274 bp, Zea mays
tgagtattagatcaacttcattttccccagctactgaggctatgtctgaaacaaaggttgcacctatcacccaggttgatctctctttcctcagtgaagggaaatctacatgggtgaatctgacatcacaagacacggagcggcctgatcttgcaaatgcacccgtagtagtcaccggaggcagaggtttaaaaagtgctgaaaattttaaattgttggagcagcttgctgagaaacttggcgcacagtgggtgcgactcgggctgctgttgat

SEQ ID NO: 44750 - DNA, 278 bp, Zea mays
ggccacaggaagtgttcacacttaagattgccacctactatccctagttgtgatttaggtttctcttgatgagatctcttgagtccagtattataaaacagagagtgggctagcggagttcagtgtcagtgtgagtgagtgtcagtgtaattccacatcctccgaatgtggacagtccaatcaccagctccttttttcctccccggctttcttacaggcttgactgttgtaatgacgggtgctcagattccatggtagggcacaatgaagaggcatct

SEQ ID NO: 44751 - DNA, 291 bp, Zea mays
aagccgtccgccttgcccttcacgaaggcttggtcctcctccttgtatctccactccccccttcacagatccgttcctccagctagggttagcgttcctctgcagcactggcgatcaagcggactaacgcggagaagaagatcgcgtacgatctgatgctgtgcagcctgctcgatgagtacaccaaggtgctcatcgccctggccgacaacgtcggttccaagcagctccaggacatccgccggggcctcaggggcgactcggtggtgctcatggggaagaacacgctca

SEQ ID NO: 44752 - DNA, 284 bp, Zea mays
ccgccgctcctctccgcttccaagatgtcgaagcgaggacgtggaggttctgctggtaacaagttccggatgtcactgggtctaccagtggcagccactgtgaactgtgctgataacactggagccaagaacctttacatcatttctgtgaagggaatcaaggggcgccttaacaggcttccttctgcctgtgttggtgacatggttatggcaactgtgaagaagggaaagcctgaccttaggaagaaggtgatgccagctgtcattgtgaggcagcgcaacca

SEQ ID NO: 44753 - DNA, 284 bp, Zea mays
ctcgagccgctcatatcctgagccagagatcaaacaaaccagagggagcgaagcatggcagcaggcttgcaggtgtttggtcagccggcgtctactgatgtctccagggttctgacatgcctgtttgagaagaaactggagttcgatcttgtccgcatcgatacgttcaagacgcatcacaagcttcccgagttcatcaggcttcgggatcctaatgggcaagtgaccttgaagcacggcgacaaaactctcgttgattcgagggacatctgccggtacgtctg

SEQ ID NO: 44754 - DNA, 279 bp, Zea mays
atccgccgccatcgcttcaagcagcgaaccctagccgccctcagcgacggattgcagatctcccagccatgacgttcaagcggaggaacggcggacgcaacaagcacgggcgcggccacgtcaagtacatacgctgctccaactgcgccaagtgctgtccaaaggataaggctatcaagcggttcttggtgaggaacattgttgagcaggctgctgtgagggacgtgcaggaggcttgtgtgcatgatggatatgttcttcccaattgtacgcaaggtt

SEQ ID NO: 44755 - DNA, 288 bp, Zea mays
  unsure (1)..(288): unsure at all n locations
tcncatcccactaccacgcatctcgtcgtccgccgattcgatccggttctaccaacccaggggcagtgatggcgacgaggaggagcgtgggcaccctcggcgaggcggatctgaaggggaagaaggtgttcgtgcgcggcgacctcagcgtcccgctcgacgctgcccagaagaccaccgacgacacccgcatccgcgcctccgtccccaccatcaagttcctcctcgagaagggcgccaaggtcatcctcgccagtcacctgggtcgtcccncaggtgtcaccccaa

SEQ ID NO: 44756 - DNA, 240 bp, Zea mays
cagtctccctagcaatctctagcagcagatcctcgtgcgaagaaagcgctagccccttcgtactgtcccgatggcccgcacgaagcagacggcgaggaagtccactggcggcacaggcgccaaggaagcagctggccacgaaggcggcgcgcaagtctgccccggcgaccggcggagtgaagaagccccaccgtttccgccccggcaccgtcgcgctccgggagatccgcaagtatcaga

SEQ ID NO: 44757 - DNA, 240 bp, Zea mays
gacaactctctctaccgtccgataccccaagcaccagcgcggcggcggcgaccatggctgtcggaaagaacaagaggatctccaagggaaagaagggtggcaagaaaaagaccgtcgaccctttctctaagaaggattggtatgacatcaaggcaccgtcggtgttcagtgtgcgcaacatcgggaagactctcgtatccaggacacagggtaccaggattgcttctgagggtctgaagc

SEQ ID NO: 44758 - DNA, 277 bp, Zea mays
  unsure (1)..(277): unsure at all n locations
tgcagatcagcaacttcgccagcatctggttcatctccgtcttcatctcgatcttcgccacgggcatcctggaggggaggtgnagcggggtgggcatcgacgagtggtggaggaacgagcagttctgggtgatcgggggcatctccgcgcacctcttcgccttgttccagggcctgctcaaggtgttggccggcatcgacaccaacttcaccgtcacctccaaggcctcggacgaggacggcgagttcgcggagctgtacatgttcaagtggacgac

SEQ ID NO: 44759 - DNA, 283 bp, Zea mays
gtcaacaacacagatttcaaagtgttgtacccgacactaacagattatgacattcgatattacatctatgagttactcaaggcattagattactgccattcacaaggtattatgcaccgagatgtgaagccccacaatgttatgatagatcatgagcttcggaaactccggctgatagactggggccttgctgaattctatcatcctggcaaggaatataatgtccgtgttgcctccaggtacttcaagggtcctgagcttcttgttgacttgcaagattatg

SEQ ID NO: 44760 - DNA, 278 bp, Zea mays
agcccccaattaagcagaagaagggtggtttcttgtcatcactatgtggcggtaggaagaaggcaagcaaatcaaagaagggctcggactagaagaagtcgcagaagcatgtggacagttctgtgccagtattcaaccttgaagatatagaggagggagttgaaggcgctggatttgacgacgagaaatcacttcttatgtctcaaatgagcctggagaagagatttggccagtccgcagcgtttgttgcctccactctgatggagtatggtggtgtt

SEQ ID NO: 44761 - DNA, 281 bp, Zea mays
ccgcattcgatccaactcctgagcactttctcctcgtccccgacaagccaatcgaagccgagatacggccatggactccaccggcaccggagcagggggtaaggggaagaagggagcggccgggcgcaaggtcggcgggccaaggaagaagtcggtgtcgaggtccgtgaaggccgggctccagttccccgtcggccgcatcgggcgctacttgaagaagggccgctacgcgcaggtgtacggcaccggcgcccccgtctacctcgccgctgtcctcgaat

SEQ ID NO: 44762 - DNA, 282 bp, Zea mays
caaatcccacaatcttcttgtagcacaccactgtcttcgtccaactcggcggcgatgtctgggcgcggcaagggcggcaaggggctgggcaagggcggcgcgaaacgccaccgtaaggttctccgcgacaacatccagggtatcacgaagccggcaatccggaggctggcgaggaggggcggcgtgaagcgtatctccgggcttatctacgaggaaacccgcggcgtgctcaagatcttcctcgagaatgtcatccgcgacgcggtcacctacaccgagcac

SEQ ID NO: 44763 - DNA, 280 bp, Zea mays
ggaccaggtaagcagcagcaggaaccctagcaccgccgcatccgcagccatgggtatcgacctcgttgccggtgggaggaacaagaagaccaagcgcacagcgccgaagtccgacgatgtttatctcaagctccttgtcaagctctaccgtttcttggtcaggaggaccaagagcaacttcaatgctgtcattctcaagaggctcttcatgagcaaaaccaatcgcccaccaatctccatgcgccgccttgtcaagttcatggaaggaaaggagaagaac

SEQ ID NO: 44764 - DNA, 273 bp, Zea mays
gtccgctgcagccatgagtaagttgcagtctgagtctgtcaaggatgccatctcccagattgttggggatgccaaggagaagaataggaagttcactgagactgtggaacttcagattggtctgaagaattatgatccacagaaggacaagcgtttcagtggctctgttaagttgccccatatccctcgtcccaagatgaaggtgtgcatgcttggtgatgcccagcatgttgaggaggccgagaagatgggacttgactacatggatgttga

SEQ ID NO: 44765 - DNA, 261 bp, Zea mays
cagagcagcagtctagggggtgtttgggaataaagtttttctgcagttatggaagaatacaaatactgcagtaatctcaaatactgtagtattcttaaatactgcagtattatatacataatggtgtttggcaagctgggtaaaatctatgttttcaaaactgaagtattgcaaatactatagttgtattaaggcattctaaacttagctactggacctcagttttcaaaactgcggtattataaactacggtattgtcat

SEQ ID NO: 44766 - DNA, 81 bp, Zea mays
gtccaagctcctccagttagaatcgacagccaagcaaaatatggtgctctggcccgaggtgatggcgccatttacttgcgc

SEQ ID NO: 44767 - DNA, 271 bp, Zea mays
gtcagccacaccgtgccaatctacgaaggttatgcccttcctcatgccatcctgcgtcttgaccttgctgggcgtgacctgactgacagcctgatgaagatcctcaccgagagaggttactccttcaccaccacggccgaacgggaaatcgtacgggacatcaaggaaaagcttgcatacgtggctcttgactatgatcaggagctggagaacgccaagagcagctcatctgtggagaagagctacgagctgcctgatggcccagtgatca

SEQ ID NO: 44768 - DNA, 277 bp, Zea mays
gcaccgtggtgtgggcattgtcaatcactggagcctacttacaacaaactagccaagcatctaagtggagttgactcccttgtgatagccaaaatggatggtactaccaatgagcatccacgtgcaaagtctgacggatacccaacaattctcttctatccagctgggaagaaaagctttgagcctgtcacgtttgagggggagcggacagtggtagatatgtacaggttcatcaagaaacatgctagcatccctttcaagttgaagcgccaggagt

SEQ ID NO: 44769 - DNA, 192 bp, Zea mays
gtcaatgcttcaagaactaggcaaacaaaacccacaaatcctgcgtttgattcaggaaaatcaagctgagtttgtccgcttggtgaacgaaactcccgagggtggtcctggaggaaacatattaggtcaactggcagctgctatgccgcaatcggtgacagttaccccagaggaacgagaggccatccagcg

SEQ ID NO: 44770 - DNA, 297 bp, Zea mays
accagtacctcgccgccgtcatcaaggcgcgcaacttgagctcgtcggcaacgcaagtgcgacgcgccggcgcacgacgacctgctgtctcggttcatgcgcaagggctcctattcggacgagtcgctgcagcacgtggcgctcaacttcatcctcgccggccgcgacacctcctccgtggcgctctcctggttcttctggctcgtgtccacgcacccggacgtggagcgccagatcgtactcgagctgtgcgccgcgctcgccgcgtcccgcgactcccacgacccggcattgtgg

SEQ ID NO: 44771 - DNA, 296 bp, Zea mays
ggacagttctgtgccagtattcaatcttgaagatatagaggagggagttgaaggcgctggatttgatgatgagaaatcacttcttgtgtctcaaatgagcttggagaagagatttggccaatctgcagcttttgttgcgtccactctgatggaatatggtggtgttcctcagtctgcgactccagaatctcttctgaaagaagctatccatgtcataagttgtggctacgaggacaagactgaatggggaactgagattgggtggatctatggttctgtgacggaagatattctca

SEQ ID NO: 44772 - DNA, 289 bp, Zea mays
ggcggagaaggaggcggcggctatgtggggcggcggcgacaagctcattctgcgcggccttcagttccatggcttccacggtgtccttcaggaggagaagacgttgggacagatgttcgtggttgacatcgacgtctggatggacctcgccgctgccggcgagtccgactgcatcgctgacactgtcagctacaccgatatctacagcattgcaaaggatgttgtcgagggcacgccacgcaacctcttggagtcggtagctcactcgatcgcagaggccacactgctc

SEQ ID NO: 44773 - DNA, 298 bp, Zea mays
ttagatgtaaaggagttgatctccatgcttgccgatagtcaaggagactgttcaataatcagtagctacaagctggatacagccgactctgtttgcccttcgagggttcgtgctatgttggcttctagggcttgccgaatgtctactatgataggcgatccactaacaaaagctgagatgaagaagatacttaaaaacatggctggattgaggtccccttggaactgcccacacgggaggccaacaatgcggcacctagctgacctgcgtactatgaaggcgaaagatatcgcgttta

SEQ ID NO: 44774 - DNA, 294 bp, Zea mays
gaggtccaagtcgaaccagtacgagaccacgtctctcgtgcagatcgagggggtgaacaccaaggaggatgtcgcgtggtacgctggcaagcgcatggcgtacatctacaaggccaagaccaagagcaatgagacccgctacaggtgcatctggggcaaggtcatccgtccgcacgtaaactcgggcgtcgtccgtgccaagttcaagtccaacctcccgcctgagtccatggggcgcaaggtcagagtgttcatgtacccgagcagcatctaaggttttgttggagtaaagat

SEQ ID NO: 44775 - DNA, 285 bp, Zea mays
gtccgcgtccagtgtgtccgctactccgctccccctcagtcctcagttcctcacctagcggtagcgtgcgcgcgggagacgtagatggcggcttcggaggcggcagcggcggcggcaacaccggtgacgccgacagaggggacggtgatcgcgatccacagcctggaggagtggagcatccagatcgaggaggccaacagcgccaagaagctggtggtgattgacttcaactgcacaatgtgtcctccgtgccgcgccatggctaccatttttgctgatatggcc

SEQ ID NO: 44776 - DNA, 290 bp, Zea mays
gagtctccttcctttctcccgtcgcctccgcctccgccttcagtttagcctccaagcaggggcgccgcgcggggtattctgtccgtcgttgagggtagagagtcacttgcaccgggggagcggagatgaagccggttgtggggatcgtggtgtcgaacaagatgcagaagtcggtggtggttgcagtggaccgtctcttccacaacaaggtatacaaccgctacgtcaagcgcacctccaagttcatggcacacgacgatgacgactcctgcaacattggcgaccgggtt

SEQ ID NO: 44777 - DNA, 289 bp, Zea mays
gactccaaagccgtcgccttcctatccatcccttcctcgccgcgggggtcgcctgagatcacataaacaatggtgaaggctgttgctgtgcttggtagcagcgatggtgtcaagggcaccatcttcttcacccaagagggagatggccctaccactgtcaccggaagtgtctctggcctcaagcctggcctccatgggttccatgtgcatgcacttggtgacaccaccaatggctgcatgtcaactggaccacactacaatcctgcgagcacggaacatggagcaccag

SEQ ID NO: 44778 - DNA, 276 bp, Zea mays
gaagttcttgaagccttctgttgcagggttccttttgcagaaggagcttgactaccttgtcggagctgtttcaagccctacacgcccatttgctgccatcgtgggtggttcaaaggtgtcatccaagatcggggttattgaatccttgttggagaagtgtgatatccttctcttgggtggtggtatgatcttcacattttacaaggcacaaggtctttctgtcggtgcttcgttggttgaggaagacaaactcgatcttgcaacatctctactgca

SEQ ID NO: 44779 - DNA, 282 bp, Zea mays
ggactgacaagacctaccctgctgggttcatggatgtcatttccatccctaagacaatggagaactacaggctgctttatgacaccaagggccgcttccgtcttcacccaatcagggatgaggatgccaagttcaagctctgcaaggtgaggtccgttcagtttggccagaagggcatcccctacctgaacacctacgacggccgtaccatccgctaccccgacccgctcatcaaggccggcgacaccatcaagatcgatctggagaccaacaagatcatgg

SEQ ID NO: 44780 - DNA, 278 bp, Zea mays; identical to SEQ ID NO: 8712

SEQ ID NO: 44781 - DNA, 281 bp, Zea mays
ggcgggaaagcagctactgctgcagcgaacagcttgaacagggagtttggatcaaagcttaaagagcacatgcagtactgtgtggaccaccctgaggaggttagcaagcttgccaaggtgaaggcccaagtctccgaagtcaaaggagttatgatggaaaacattgagaaggttcttgaccgtggcgagaagattgaactgcttgtcgacaaaactgaaaatctgcgttctcaggcacaagatttcaggcagcagggcaccaaggtgcggcggaagatgtg

SEQ ID NO: 44782 - DNA, 291 bp, Zea mays
aagcaaggggttccatcattgaataagccgactatacgtggtgatcatctgttcactgttaaagttgcaatacccaagcgcttaagtgggcgtgaaagggaattactggaggaacttgcatctttgagtaatggtggctttgctcgaacagatgccaagccaaaacctgcccagccaaaacgtgtacatctagagaaagaagttggtgctagccaagaagatacagacaaatctaaagcagcgggtgattggttgaagaaacttacagttttgctgggtcattgctatggt

SEQ ID NO: 44783 - DNA, 291 bp, Zea mays
acatatctcctcgcattttccttgcaaccgattgcctatccccctcccaaccaaagaccgatggcgcccaaggccgagaagaagcccgcggcgaagaagccggcggaggaggagcccgcggccgagaagacgaccgccgggaagaagcccaaggcggagaagcgggtccccgcgggcaagtccgccggcaaggagggcggcgagggcaagcgtggcaagaagaagggcaagaagagcgtggagacgtacaagatctacatcttcaaggtgctgaagcaggtgcacccggac

SEQ ID NO: 44784 - DNA, 287 bp, Zea mays
  unsure (1)..(287): unsure at all n locations
gccaggcataacgactgatgaaattgataaagcagtgtatctaatgataattgataatggagtataatctacacctcttggttattgtggatatgcaaagatagtctgcacttcagtgaatgaatgcatctgtcatgggattccggattctcgtccccttgaggatggagatatcatncatattgatgttactgtctacctcaatggctaccatggtgatacatctgctacatttctttgcggtgatgttgatgacgaagctaagaaattagttaaggtgacaagag

SEQ ID NO: 44785 - DNA, 289 bp, Zea mays
cacagaagcggcggcggcggacaaacgcaggcgaaggcgagggtgtgagggaaggagcaccagccatggtgcacgtcaacttctaccgcaactatggtaagacgttcaagaaaccaaggcgtccttatgagaaggagcgtcttgatgctgaactgaagctggttggtgagtatgggctgaggtgcaagcgtgagctttggagggtccagtatgcactgagcaggatccgtaatgctgcaaggcacttgctcacccttgacgagaagaacccccgtcgtatctttgaggg

SEQ ID NO: 44786 - DNA, 293 bp, Zea mays
ggagcaggaagatgccggccgggcacgggctgccgtcgcggacccgcgacctgttcgcgcggcccttccgcaagaaggggtacatcccgctcaccacgtacctgcgcacctacaagatcggcgactacgtcgacgtcaaggttaacggcgccgtgcacaagggcatgccgcacaagttctaccacggccgcaccgggagcgtctggaccgtcaccaagcgcgccattggcgtcgagatcaacaagcaggttaacggtcgcatcatcaggaagcggatccatgtccgcgtggag

SEQ ID NO: 44787 - DNA, 292 bp, Zea mays
atcaccgctgttaggttctaccaggagaccttcggcgtccctccggccacgcgagctcgccgaaatggtcgcccacaggttccatcagtaccaggtggtgggtcgcgcgctgccgaccccaaccgatgagcaccccaagatctaccgcatgaagctctgggccaccaacgaggttcgcgccaagtccaagttctggtacttcctgagaaagctcaagaaggtgaagaagagcaatggccagatgcttgccatcaacgagatctttgagcgcaacccgaccaccatcaagaac

SEQ ID NO: 44788 - DNA, 287 bp, Zea mays
aaaagttgggcattgcaagcaaagtggttatggctagaaaaaaccaatccaaatagacattggcagggtcgaaaattacctgtgcatcgacatgttaatgatttgattgcaaattctatgatatctatcattgggaatggggacaacactctcttctggattgataattggtcaaatgggaatgaagtcagggaccttaccctagatgtggtagccaaggtgggcaaatgatcccaatctactagaactgtgacacatgctcttgataattattagtgggtcaatga

SEQ ID NO: 44789 - DNA, 281 bp, Zea mays
gcagcccccaactacccccagcctcggaaggacccttccagaagcgcaagactctaaggccgtcgccttcccattcttcctcgccgcgggggtcgcctgagatcacataaacaatggtgaaggctgttgctgtgcttggtagcagcgatggtgtcaagggcaccatctttttcacccaagagggagatggccctaccgctgtcaccggaagtgtctctggcctcaagcctggcctccatgggttccatgtacatgcacttggtgacaccaccaatggatgc

SEQ ID NO: 44790 - DNA, 284 bp, Zea mays
cctcacttaaaccctcctccgctcgacgacaccacacgaaaatatacgtcagaataaaccgcagcaaatcttctccggcatcggcagcgcccaaatccggcaatccgctgctccgaatggactcaggttacaatccccggacggtggaggaggtgttccgggacttcaagggccgtcgtgccgggataatccgcgcgctcaccactgatgcggaggatttcttcaagcaatgcgacccggaaaaagaaaacttgtgcctgtatgggtttcctaatgagagctgg

SEQ ID NO: 44791 - DNA, 284 bp, Zea mays
  unsure (1)..(284): unsure at all n locations
atctcctcgcatttcttcccatccgatccccccttcgcaaccaaaaccccaactaaaaccgcatcgatagcaaccaaaaacgngaanagncccgcggcgaagatgccggcggaggaggtgcccgcggccgagaaggcgcccgctcgggaagaagccgaacggnnagaggcgggtccccgctgacaagtccgctgccaaggaaggcggcgagggcaagaggggcaagaagattggcaagaagagcgtggagacctacaagatctacatctgcaaggtgctgaagc

SEQ ID NO: 44792 - DNA, 263 bp, Zea mays
aaaggcagcagcatcattcatgggtgagatatggcaagttcctccaatgttttctgccattaaggttggcggtgaaaagatgtatgacaaagcaaggaagggtgaaacagtagagctttcaccaagacgtatatcgatataccaatttgatattgagcgcagtttggaagacagacagaatttgatatttcgagttacttgctcaaaaggaacatacattcggtccctatgtgcggacttgggtaaagcactggaagctgtgc

SEQ ID NO: 44793 - DNA, 284 bp, Zea mays
tgttgggagagtactctcgtgcaactaggaaaaggcacaaggttccgtcccactgcatgcgtcaagagactgtctggttttcttgttctgatttgtcatttgctggtgctcaaagccggcttggtttcctcgaaggatcagcatctactcttgattgtggactttgtcgcatctgatatcaacttcataaatctttatccaagatggcgctgcaaaacattggtgcttcaaacagggatgatgccttctacaggtacaagatgcccagaatgattaccaagata

SEQ ID NO: 44794 - DNA, 285 bp, Zea mays
gccttcagctgatatatggagccttggctgcaccgtgttggaaatgctaacccggcaaataccatttcctaatattgagtggacaaatgctttcttcatgattggaagaggggaacagcctactattccctgctacctgtcgaaggaggcacaagatttcattggccagtgtgtaagagttgatcctgagagccggccttctgcatcacaacttttggagcacccattcgttaacagaccactgcgggcttcatttgaatcttcatctcccccagccatctgatt

SEQ ID NO: 44795 - DNA, 285 bp, Zea mays
gaaataaagagggagaggcgaaaacaatctaacagggagtctgcaaggagatctagattacgcaagcagcaagagtgcgaggacttagcccggaaggtagctgacctaacgaccgagaacagcgctctcagagcagaacttgacaacctcaagaaggcttgtcaagacatggaagcagaaaattcacgtctgttgggtggggtggctgacgcccaggtaccaagtgtcacgaccacactgggaatgagcatcgagccgccgaagttgcagctgcagctgcagcag

SEQ ID NO: 44796 - DNA, 280 bp, Zea mays
atctcctcgcattttccttgcaaccgattgcctatccccctcccaaccaaagaccgatggcgcccaaggccgagaagaagcccgcggcgaagaagccggcggaggaggagcccgcggccgagaagacgaccgccgggaagaagcccaaggcggagaagcgggtccccgcgggcaagtccgccggcaaggagggcggcgagggcaagcgtggcaagaagaagggcaagaagagcgtggagacgtacaagatctacatcttcaaggtgctgaagcaggtgca

SEQ ID NO: 44797 - DNA, 282 bp, Zea mays
ccaaattcaaagtcacagcggcgaaactctcggcgatgtctggccgcggcaagggcgggaagggtctgggcaagggcggcgccaagcgccaccgcaaggtgctgcgtgacaacatccagggcatcaccaagccggcgatccgcaggttggcgaggaggggcggcgtcaagcgcatctccgggctcatctacgaggagacccgcggcgtgctcaagatcttcctcgagaacgtcatccgcgacgccgtcacctacaccgagcacgcccgccgcaagactgtga

SEQ ID NO: 44798 - DNA, 277 bp, Zea mays
gttatcgatggaaagggtgctcaatatgagtgtgcaggctaatgtgaacctgataccgaagcatacaaatgacacagaatccctggagcagttttgcaaggacactgtgatcaccatctggcattatcatggtgggtgccatgtagggaaggtggttgaccagcattaccgggtgcttggagtttcaggtctccgggtggttgacggctcaatattttctaaatcgccagggaccaaccctcaagctacagttatgatgatgggcagatatatggga

SEQ ID NO: 44799 - DNA, 277 bp, Zea mays
  unsure (1)..(277): unsure at all n locations
cttcgtcgtgcggcaactgcgcgaccgccgacgcccgacggcaggagccccaggtcttcgtcgaccccttcgcaaggtctcggttccatccttcgccggaggcnacgcccgtcaacaggacttgatctactactcactagcggtgtagaggcgaagagaagaacttgaccatgagcagcataggcacaggttacgatttgtctgtcacgactttctccccagatggtcgtgtcttccaggtcgagtatgccaccaaggccgtcgacaacagcgggac

SEQ ID NO: 44800 - DNA, 276 bp, Zea mays
atttctctctggaatgatcttgctactacgactggccaagagcttttggacatggttgacagttcgcctgttgttgcgataaagagcctaaaagtatctgacttccaaggcgtgtctctttcaactattggcagaagtactctcgagattaatcctgacctgcctgaggctaagaatctgaagtcctggtatgactctgaaggcaaagatacttcactggcaccaatcagtgcagaagcgggtgccacacgcgctggtggtttcaagtccatgtat

SEQ ID NO: 44801 - DNA, 280 bp, Zea mays
cccatttgtgttaatctgaaaaatgtcaatcccaagagttgcacaaggcgcttctcaagaggcagcgtggagagcaatcatgtcttgagagaaatagcttcacctgaactcaacatactcgaggacaaggtccatgatgatagtgaagatagtccaagcttgagcttttcggaaatacagaggaagtggaaggaagagttggaccaggaacttaaaagagagcgagaaatgaggtcgggtggctatggtaaagcaccatcaccgtcctcaacgagccgga

SEQ ID NO: 44802 - DNA, 288 bp, Zea mays
caagaacctcaagcttggcatccacgaggactccacgaacaggaccaagattgctgagctcctgaggtaccactcgaccaagagcggggatgagctgaccagcctcaaggattatgtgaccaggatgaaggagggccagaacgacatcttctacatcactggtgagagcaagaaggctgtggagaactccccgttccttgagaagctgaagaagaggggctatgaggtgctgttcatggtggatgccattgacgagtattctattggacagctgaaggagtttgaggg

SEQ ID NO: 44803 - DNA, 293 bp, Zea mays
gcaaggaagactgccactagcccaagttcaggatggcgatgaaggttcaaatttatcagctgaggaaaagcatctgaatgagacattcataaaggacagtatccctccctggttggcaggatctggttacattggccttgcagcaatatcgattgcaaccgtcccaatgatctttccgcagatcaagtggtaccttgtcctctcggcatacgttgttgctcccctcctcgctttctgcaactcatatggcactggactaacggactggaatcttgcgtctacatatggaaaga

SEQ ID NO: 44804 - DNA, 298 bp, Zea mays
gtttccttcctcctccagtgctgtcatcgccgccgccgccccggtttccttcgtaagcccgtcgtcctccgtccgcgactctgcgcgagaagcgagagtatggacacccaagtgaagcttgctgttgtggtgaaggtgatgggaaggaccggctccaggggtcaggttacccaggtcagagtgaagttcttggatgaccagaaccgtctcatcatgaggaacgtcaagggaccggttcgcgagggagacatcctcacactgctcgagtctgagagggaggctaggaggctgcgttgag

SEQ ID NO: 44805 - DNA, 286 bp, Zea mays
cgcaatggcggccttcaacaagcttggtggccttctaaggcacagtgctctggtgagcggtatcactggtggctcttctcctgcagtgttcaatgctgcacggctcatgtctaccaagctatttattggtggtcttgactggggtgttgatgacgtgaaactaagagaagcatttagcagctttggagaggttactgaagcgagggtgatcacagacagggagactgggaggtcaagaggctttggctttgtgaactactccgacagtgatgctgccaaggaagct

SEQ ID NO: 44806 - DNA, 282 bp, Zea mays
gtcaaggatgtgatagatggtgatctctgcgagcagtatccctccctcccagccgatatgcaaaggaagattgctgatgagctggacagaactccgggtgaaatcctgaagaagctagaagacatcaggaacaaaatcatctgaaacagcggcttagtgtgaagaaattaggcagggcaatgccggtgctctttgctttaagactatccagttcgagctgttgccgcacttcaagatgtgacagcagcgcatccaacaagtttggagcacgctgatctgtac

SEQ ID NO: 44807 - DNA, 278 bp, Zea mays
aacactgtcatcccgaccaagaagtcgcaggtgttcaccacctaccaggaccagcagaccactgtctccatccaggtctttgagggtgagcgcacatgaccaaggactgccgtcttctgggcaagttcgacctcaatggcattccgtcagctccgaggggcacaccccagatcgaggtgaccttcgaggtggacgccaacggtatcctgaacgtgaaggcggaggacaagggcacgggcaagtcggagaagatcacgatcacgaacgagaaggggcgg

SEQ ID NO: 44808 - DNA, 288 bp, Zea mays
ggcaagctcactggcatgtccttccgggttcccaccgtggatgtgtcagttgttgacctcactgtcagaatcgagaagggggcctcttacgaggaaatcaagaaagctattaaggctgcttctgagggcccactcaagggtattatgggctacgtggaggaggatctggtttccaccgacttcaccggtgacagcaggtcgagcatcttcgacgccaaggccgggattgccctgaacgaccacttcatcaagctcgtctcttggtacgacaacgagtggggctacagc

SEQ ID NO: 44809 - DNA, 280 bp, Zea mays
attcatcattgcacaataaaaaagttggagtttgacacaaagtattactatgctgttgggattggacaaactgtgaggaagttttggtttttgacccctccaaaaagcggcccagatgttccatatacactcggtctcataggtgatcttggtcagagctttgattccaatgttacgctcacccattatgagtccaatgcaaaagcacagggagttctttttgttggggacttgtcatatgcagataactacccatatcatgataatgtgagatgggata

SEQ ID NO: 44810 - DNA, 273 bp, Zea mays
gttgaggagagtggaaatttatgaattcagccgattgaatatggtttacactcttctaagcaagcgaaagcttctttggtttgtacaaaacaagaaggtcgaagattggacagacccacgttttcccactgtccaaggcatagtacgtcggggcttgaaggttgatgcattgatacagtttatactccaacagggtgcttcaaaaaatctgaatctcatggaatgggataaactctggacaatcaacaagaagataattgatccagtgtgcgc

SEQ ID NO: 44811 - DNA, 276 bp, Zea mays
gtcgcttcctcccgttagactaggttaggctaggctagggtgtcgaccagctcgcggtaatggtggccttcaggttccatcagtaccaggtggtggggcgcgcgctgccgacgcccggcgacgagcaccccaagatctaccgcatgatgctctgggccaccaacgaagtccgcgccaagagcaagttctggtacttcctgaggaagttgaagaaggttatgaagagcaacggtcaggtcctggccatcaacgagatcttcgagcgtaacccgacga

SEQ ID NO: 44812 - DNA, 278 bp, Zea mays
cctctcacctgctgactgctgtgccgctccgctccggtggcatctgcatctgcatctccatccctcgatctgtcttctctcagggtggaagaagcgtgacaatggaggctccacccgtggcgctgttcgacaccctcaaggcagccaaaccgttcttcttgttggctggtcccaacgtgattgaatcggaggagcacgtcctgaagatggccaaacacatcaaagcaattacgaccaagcttggaattccactcgtgttcaagtccagctttgataaa

SEQ ID NO: 44813 - DNA, 280 bp, Zea mays
cagacgactgggccgccgccgcttggtgctgaggctttcgttggtctcttcggcggcgacgagcacacaccagcagttctgtagaaatggctgatggtgaggacatccagcctcttgtctgcgacaatggcaccggaatggtcaaggctggttttgctggggacgatgcaccatgggcggttttccctagcattgttggccgtcctcgccacactggtgtcatggtagggatgggacagaacgatgcatatgttggcgatgaggcacagtccaagagagg

SEQ ID NO: 44814 - DNA, 288 bp, Zea mays
catcaatgggtacaagaatgtgcttgctgttgctgtcgagacagactactcatacccacatgctgacaagatcaaggagtacctcaaggacccaagcaagtttgctgttgccgccccggttgctgctggggactctggcgctgcagctgctcccaaggaagaagagaaggctgcggacctgaagaggagtcggacgaggaaatgggcttcagctcttcgacgactagagctgctgttttcgtcaaactgctgcaagttttggctttttttatcatctacaagtactgt

SEQ ID NO: 44815 - DNA, 295 bp, Zea mays
cgagagagctccacaggccaggtccccatcgccgcggcgcttgccccacctctcccccgcccggtagtagcctcgccgccgttgccgagatggggttcgtgtccttcgtcgggagggtgctcttcgtcgccgctttcctcctctccgcctaccaggagtttaatgaattcggtgctgatggtggaccagcagctaaggcccttcggcccaaattcaacgtgtttgtcaaaaatgtatctgctcatctgggagtagctgtgccacacattgagttgaagcatgtgattgctgctac

SEQ ID NO: 44816 - DNA, 328 bp, Zea mays
atcgatgcatggtacgggctcggagcggcggcgcgggcggacaaggagcaggcggaagaggagttgtgccaaggcacaatgggtatctcgcgtgactcgatgcacaagcgccgagccaccggtggaaagcagaaggcctggaggaagaagcgaaagtatgagcttggtcgccagccagccaacaccaagttgtcaagcaataagacagttaggagggtccgtgttacgtggaggtaatgtgaaatggagggctcttcgccttgatactggtaactactcatggggaagtgaagtgttacccgcaagaccgtatcctcgagtggtctac

SEQ ID NO: 44817 - DNA, 295 bp, Zea mays
cggagacgacgcacgcagagccgcagagatccgtcacactgcaagttttgaaaactgaactgtaagatggcatcagcagagctttcccgtgaggtaaatgtgtacatggcgaactcgccgagcaggcagagatgtacgaggaaatggttgagttcatggagaaggtagcgaaaactgttgactcggaggagctcactgtggaggagcgcaacctcctgtctgttgcatacaagaacgtcattggagcccgccgtgcctcatggcgcatcatctcctccatcgagcagaaggagga

SEQ ID NO: 44818 - DNA, 277 bp, Zea mays
gcaagatgacggcgcaggctgcggaggagctcgccgcccagatcgagcagcagaagctcgaggagcagaagaccgaggcagaagaggttgtggtggaggaggatgacgaggatgatgaggatgacgatgatgatgacaaggatgatgatgaactggatggacaagaaggggatgggagtggcaagtcgaagcaaagcaggagtgagaagaagagccgcaagccatgctgaagcttggcatgaagcccatcacggtgtcagccggtcactgtgagaaa

SEQ ID NO: 44819 - DNA, 270 bp, Zea mays
  unsure (1)..(270): unsure at all n locations
taagncggcgcctccatttcgttttcctcactctctcctccagctcagggtccggcggcgaagggaaggcaagatgtacaccgcgaggaagaagatccagaaggagaagggtcttgagccctccgagttcgaggactccgttgcccaggctttctttgatctggagaacgggaaccaggagctcaagagcgacctcaaggacctgtacatcaacaatgctatccagatggatgttaccgggagtaggaaggctgttgtcattcacgtccc

SEQ ID NO: 44820 - DNA, 286 bp, Zea mays
ctgctcttccatcgcgccagtgttttgagaagctggtcggcgctcctagatcccttcgcctctctcgcgttcgaggctaggtagccgccaccatgagccgctcggggcagcctccggatctcaagaagtacatggacaagaagcttcagattaagctaaatgcaaaccgtgttgttattggcacacttcggggattcgaccagttcatgaatctggtgatcgacaacacgtggaggtcaatggaaatgacaagacagatattggactggtggttatcaggggaaac

SEQ ID NO: 44821 - DNA, 242 bp, Zea mays
gtacctttcgcctccggcgccgccgccgccgcctgatagctccagcgccctgcgccgtcggctgcccggctgccgtcctcgcgctacgagctgggcatctccgtcgccgatccagcatgggtaagacacgtggtatgggagctgggcgcaagctcaaggcccacaggaggaaccagaggtgggctgacaaagcccacaagaagagccatcttggcaacgagtggaaggacaccttgctggat

SEQ ID NO: 44822 - DNA, 290 bp, Zea mays
gtctatgtcgcaaggcaggctgccaagagacatctcgccagcgaccttgctcgccgcgccatcggtcaggtgtcttacgccatcggctcgaccgggcatctctccgtgttcgtcgacacgtacggcaccggcgcgatccccgacaaggagatcctcaagattgtcaaggagaacttcgatttcaggcctggcatgatcatcatcaaccttgacctcaagaaaggcggcaacgggcgctacctcaagacggcggcctacggccactttggaagggacgaacctgacttcac

SEQ ID NO: 44823 - DNA, 286 bp, Zea mays
ggacctggccatgatcaccgggcagtggcccgtcaagacccgtgagggaaacaccatcggtatcgcagtcaccctccgcggcaggataatgtacaacttcctggataggctcatcaaccttgggctccctaggaccatggacttcctgggtgtcaaccccaacagcttcgacgggcacggcaactacagccttggcctccgtgaccagggcgtgttcccggagatcccgtacgaggtgggcgggaagaagaacggcatggacgtgtccatcgtcaccagcgccaag

SEQ ID NO: 44824 - DNA, 280 bp, Zea mays
gtgattgcatgtcctggataaagcccaaagttgggacagtgtgctttggtgttgttgctagtcaagcagcaattatccttgcaggtggcgagaagggaatgcgctatgcaatgccaaatgctagagtaatgattcatcaacctcaaggtggatctgagggtaatgtggaggaggtgaggcgacaggttggagaaaccatctatgctcgtgcataaagttgataaaatgtttgctgctttcaccgggcaaccactgacatggtgcagcatggacagagagg

SEQ ID NO: 44825 - DNA, 291 bp, Zea mays
gatccatgtccctcatttcagctcaagttccctgttaagccagctgatatcaagaaaagaatagagagcttgatcgaccgggagtacctggagcgcgacaggagtaacccccagatctacaactatctggcttgacaacgttttggtggatcgttcccatttcattactatcagaaaaaggcactgtaaattaatttattttccggtttcttgttctttcatgcttttcttctctgggaggaagttgtagttgtagctgctgcaacgtgtttatatagaacaatttttcgg

SEQ ID NO: 44826 - DNA, 287 bp, Zea mays
gcaaccttcgggtccatcttctcggccatctcctggctccgggacctgccagcaccgtgtatgtggttagctccttcttgccaacgaaccatgagctcccagattcgtcagaattattccaccgacgtggaggcagccgtcaacagcctggtcaatttgtacctgcaggcctcctacacctacctctctctgggcttctatatcgaccgcgctgctgtggctctggaaggcgtgagccacttcttccgcgaattggccgaggagaagcgcgagggctacgagcgtct

SEQ ID NO: 44827 - DNA, 278 bp, Zea mays
gtcgcagcctctcaccctcgcgagtcccgacctcccgcagccgccgcacagatggcacccaaggcggagaagaagccggcggccaagaagcccgcggaggaggagcccgcgacagagaaggtggagaaggctccggcggggaagcgacccaaggccgagaagcgcctcccggcgggcaagtccaaggagggcggcgagggcaagaaggggaaaaagaaggcgaagaagtccgtggagacctacaagatctacatcttcaaggtgctgaagcaggtgca

SEQ ID NO: 44828 - DNA, 284 bp, Zea mays
gtcaagttctgccagaagcacgggatctgcgtgaccgcgcacaccccgctgggtggctccaccgccaacgccgagtggttcgggacggtctcgtgcctggacgaccctgtcatcaagagcttggctgagaagtacggcaagacgccggcgcagtcgtcctccgctggggtctgcagcgggacacggtggtgatccccaagacctccaaggcggagaggctgcaggagaactttgacgtcttcggttttgacatctccggcgaggacatggagaggatgaaggcc

SEQ ID NO: 44829 - DNA, 282 bp, Zea mays
tagcttcatccaagctgacagacatggagatagatgaaggccttggtggaagtactgtctcgagagccttgcactgctctggtgccaacgagtccttcatccaagctgacagacatggagatagatgaatgcgaggagacgactatgcatgatgtgaacaacatcgaggaagagatgcgcaggaagcaagctcacgctgcccaggaggcgtacgaggaggacgacgagatgccgggcggagcccagagagtgcagtgcgcgcaacagtaagcagactatcat

SEQ ID NO: 44830 - DNA, 277 bp, Zea mays
gttttagatggcctaattcatttctgggatccatctgatggtttgttgatgtataccattgagggacgcagggatattgctgggggtcgcctcatgacagataggagatctgcagctaatacaagtataggaaagtagctcacaacattgtgctattctgctgatggaagttctattttagctggaggaaacaccaaatatatttgcatgtatgatgttggagaacaggtgctgttgcgtaggttccagatcactcgcaatctctcattggatggag

SEQ ID NO: 44831 - DNA, 120 bp, Zea mays
gtcttgttgtgactgtccagtctgcgatgggggaggagcagatctgcgcgctgaaggatgttggccccaagtaacttccttggctttggagacggaaccctactctatctcaacttaaat

SEQ ID NO: 44832 - DNA, 179 bp, Zea mays
gtgcataccccaaaatccccaaaccctaggcgaactcggcacggcggcgatggcagcggcgggcctgcggatggggaacgcgagcctcccacccgaggtgaaccgggtgctgtacgtgcggaatctgccgttcaacatctcgagcgaggagatgtacgacatcttcggcaagtacggcg

SEQ ID NO: 44833 - DNA, 282 bp, Zea mays
gtaaggggagagagagagagagaagagagagagaagagagagagagagagaggagtgggagacccgcgagaggctgccgtgtagggaccgtagactcagcgactgcgaaggagggataaggggatggccgggatcggaccgatcaggcaggactgggagccggtcgttgtgcggaagaaggcacccaccgccgccgccaagaaggatgagaaggccgtcaacgccgcgcgccgcccggtgcggagatcgataccatgaagaagtacaacgctggtacgaaca

SEQ ID NO: 44834 - DNA, 235 bp, Zea mays
gataaacactggaacaaccttgttgagagtgccaaggagcgaaattgcttattcaaggtccccaagccattgaccgcattctttgcagaggataacctgaagactatgaaggtggaaaggcgtcctccgccagagatgaatgctcgagtactggaagagatcaaccaagaagttgtaaggtcaggagctcatgaatgtcgatgatgccgccgatcatgcagacgcaggggacgac

SEQ ID NO: 44835 - DNA, 178 bp, Zea mays
ggactgtggaacttcagattggtctgaagaattatgatccacagaaggacaagcgtttcagtggctctgttaagttgccccatatccctcgtcccaagatgaaggtgtgcatgcttggtgatgcccagcatgttgaggaggccgagaagatgggacttgactacatggatgttgaggc

SEQ ID NO: 44836 - DNA, 171 bp, Zea mays
gtagttcctacagttgtaaccagagcagagcctcacaaccaggttataattcatccgactcaagcaagggtcctcactatccgggagaacgcaaggttacagggcttccccgattactaccgattgtttggcccgatcaaggagaagtacattcaagtcgggaacgcatga

SEQ ID NO: 44837 - DNA, 266 bp, Zea mays
gtcgagccgatgatggtctacttattgatgcaaactctggaaagacagttcattccataaaaggacatcgggactactcatttgcatcggcttggtcccctgatgggcgaacatttgctaccggcaaccaagacaagacatgccgaatctgggacgtgaggtacctttcaaaatccgtccatgtgttgaggggtaaccttggagccatccggtccatccgcttcacctcggatggccagttcatgtccatggctgaacctgctgac

SEQ ID NO: 44838 - DNA, 286 bp, Zea mays
agagagaagacgtctctctcctctcggcgtccccgttcccaatcttcatctgttgcctgcctgcctgcctgccgtgcaaacgaggatttgtcatagcgtctaagcgcatcctcaaggagctgaaggacctgcagaaagacccccccacatcatgcagtgcaggtcctgctggtgaggacatgtttcattggcaagcaacaattatgggaccacctgacagtccctatgctggtggtgttttcttagtgaacattcatttcccgacagattaccccttcaaacctcc

SEQ ID NO: 44839 - DNA, 287 bp, Zea mays
gccgagtgcccgattacaatcagccatcgccaccacctccctccgcggctccgccgtccgccgcgaacacgccgctgtctcgaccccttgtgctcctccttcagcaagatggcggagattgagataaaaacagcacctgctgacttccgcttccctacaacaaaccaaacaaggcattgttttactcgctatgtcgagtaccacaggtgtttgaatgccaaaggggatgatgctggtgtttgcgaaaaatttgccaagtactacaggtccctttgccctggagaatg

SEQ ID NO: 44840 - DNA, 277 bp, Zea mays
aatgatgcaaatagtcagctgcccgtatgtaaagacagtcgctaccaccaagaccggtgtattaccaggaatggcccctcctatagtacccatgatacatccccaggttgctattgcagcttcacctgctaccttagctggagccaccgcagtttctgagtggactgaatataaaacagcagatgggacgacgtactattataataatagaacacttgaatcaacgtgggaaaagccccaagaactgaagacaaaaaaaaaaaagggggggcccccg

SEQ ID NO: 44841 - DNA, 279 bp, Zea mays
atgcaccttcaggacagcgttgcagcaatggcccgtcaatatgttcgtagtgtcatttctgctgtgcaaagagtgtcgatggctatatctccctcccaatctggtctaaatgctgggcataggatgctttctggcttccctgaagctgccacacttgctagatgggtttgccagagttatcactaccatctaggtatggaattacttaatcaatcagatggagctggtgaagcattgttgaaaatgctctggcatcatccagatgctgttctgtgctgc

SEQ ID NO: 44842 - DNA, 279 bp, Zea mays
atttaataatttcgaaggaacaagggcattcagtgatgtcgttgctgaagcaaaagaggcgggatacactgaacctgacccaagagatgatctatctggaactgatgttgcccgagaggtcattatccttgcaagggaatcaggtttgaggcttgaactttctgatattcctgtgaagagccttgtgccagaaacacttgcagcatgctcgtcagcagatgaattcatgcagaagctaccatcctttgacgaggactgggccaggcaacgcatgatgct

SEQ ID NO: 44843 - DNA, 282 bp, Zea mays
tgggaaaactggaggtagttattcttataacaagcatccttattgttgcctttttcacaacattgacaaagctacatccgaagatgaagccgtatgagtatggattccgtgtgttcttgttgacattctgttacgttatggtctctgggtacaacactgggaaattcactgatacagctacaagcagatttatattgattgctattggtgctgctgtcagtcttggaatcaatgtaggcatctacccaatactgggcgggagaggatttgcataacttgata

SEQ ID NO: 44844 - DNA, 282 bp, Zea mays
acgagccataaaccagagctagtggggttggcgtggttctgtaatgtaaagagcaaaaccacggcaatcctacgagccatagaccagagctagtactgaagaatgctcatacacgccttggtcatcgtgttggaaggatgatccagtagctcttccctcaagatcccaatttccgagggcgccgtgttgtgaccttccacaaccagcgagactacatatttttccgccatcacaggtacatcttcgagacaaaagaaaagaaggttgcttcgaaggaaaaga

SEQ ID NO: 44845 - DNA, 275 bp, Zea mays
cgcctccgacatcctactttcgtcctcacgagtgaccgataatccgccggcgctaagatgttggtttatcaagatctcctatctggcgacgagctcctgtcggattcattcacctacaaggagctcgagaacggcgtcctgtgggaggtcgagggaaagtgggtcacccaaggtcctgttgatgtagacattggtgccaatccatccgccgagggtggtgaggacgaaagcgttgatgacacagccgtgaaggtggttgatattgttgacacatt

SEQ ID NO: 44846 - DNA, 269 bp, Zea mays
ctcctcctcgcctcctctccctagcctccacgacgcaagggagacgtgacggaaagcgacgcggcgcgagcgagtgagggccaaggggaagaggggaagcaccgcaccaggacccttgagcgccgccgccgcctctgatctccgcgaggttgtcaggattcaatatgtcgaccagcacattcgcgtattcctgcacgctgttgggcaatgttagaacaacgcaggcctcccagacagcggtgaagagcccttcgtctctaagcttcttc

SEQ ID NO: 44847 - DNA, 276 bp, Zea mays
tggtgttaggaggtgcattgaacaaattaacgaggctaacagaggtgaaataagtcaggacgaattgcaagaaagacagaacaaagctggtgaagacccagagatccagaacattcttaccgaccctatcatgagacaggtgctaaatgatttccaggagaacccaagggcggcccaggagcacctgaagaaccctggagttatgcaaaagattcagaagcttgtaaatgctgggatagtccaaatgagatgatcaggcacacgatgcgattgtac

SEQ ID NO: 44848 - DNA, 277 bp, Zea mays
gaccttcacgtctgatttccctcatgtcgagaggtatttctggaccatggttaaccagcctaacttcaagaaggtcattggtgaggtcaagcaggcagagtctgcacctcctattccgaaaaaggctgctccttctaaggagccaaaggcaaaggatgtcaagaaggaggctccaaaggaggcccccaagccaaaggtggttgaggcaccagcagaagaggaagcaccaaagccaaagccaaagaatcctcttgacttgctgccaccaagcaagatg

SEQ ID NO: 44849 - DNA, 268 bp, Zea mays
tcttatacggttatggagcttatggataggatttggacaaaagctggtgttctgagaggttaagcctcctctctcgaggttgcgttcttgcatttgcagatgttaggggtggaggggatttatcatggcatatggcaggaaccaaagctaataaaatgcattcaattcaagattttgctgcatgcggcaggcatctcataaagcaaggctttgttcaccaaaatcgcctttgtgctataggctgtagtgctggtggtctgttggtggg

SEQ ID NO: 44850 - DNA, 267 bp, Zea mays
gagaaatctcgttttggaaatgcatttcatctgtgtcgtgagattttacgacttacgaagttggttattgatgctaacatccagttccgtctgggaaatgtggatgccttccagttggctgatggtctgcaatatatattttctcatgttggacagttaactggtatgtataggtacaagtaccgattgacgaggcggtcgatggggagggcgacggtgacgaggacgacgatggggaaggcggtgacgaggaggatgatgatgagg

SEQ ID NO: 44851 - DNA, 271 bp, Zea mays
cgcaaggtgttcaaggagaagaaccctaagaacaagtctgtcgctgcggtggggaaagctgctggcgacaggtggaaatccctgagcgagtcggacaaggctccctatgtagccaaggctaacaagctcaagctcgagtacaacaaggccatcgctgcctacaacaagggcgagagcactgcagctaagaaggctcctgccaaggaggaagaggaggaagatgaagaggagtctgacaagtccaagtcggaggtcaatgacgaggatgatg

SEQ ID NO: 44852 - DNA, 271 bp, Zea mays
gccgcttcagctccgccgcagcagatagagttctggggtctcgaggtcaagcctggttccactgttaagtgtgagcctggatatggctttgtgctgcacctttcccaggctgctcttggggaatcgaagaagagtgtgaatgccttgatgtatgtcaaaattgatgatcagaaacttgccattggaaccctctctgttgacaagaacccacacatacaatttgatctggttttcgataaagagtttgagctgtcgcacacatcaaaaacta

SEQ ID NO: 44853 - DNA, 298 bp, Zea mays
cagcgtgaggtgacccatctggcccgccgcgatgctggcaacacggcggctgctcggctggtcgcttcccgcgctgggatctgtacgtttcagcggcgacacgacagcacccaagaaaacctcatttggctcgctgaaggatgaagaccggattttcaccaacctgtacggccgccatgactggaggctgaaaggttccctgagtcgaggtgactggtacaagacaaaggagatcctgctgaaggggcccgactggatcctgggcgagatcaagacatcgggtttgaggggccgtgga

SEQ ID NO: 44854 - DNA, 294 bp, Zea mays
acaggatttcgttcagcacttctcccagatcgatagggtgctgactgaggatgagatggggcacccagagataggagatgctattgcccggcacaaggaggtcctggagtacaatgccattggaggcaagtataaccggggtttgacggtggtagtagcattccgggagctggtggagccaaggaaacaggatgctgatagtctccagcgggcctggactgtgggctggtgtgtggaactgctgcaagcgttcttcctggtggcagatgacatcatggattcatcccttacccg

SEQ ID NO: 44855 - DNA, 293 bp, Zea mays
ctcagtcactgggagaagaacctctcataccctcggtgctccagtccccagctcactcagccacatacaccatgtgtgaagaggagaccaccgcgctcgtgtgtgacaatggctctggcctgtgcaaggcaggcttcgcaggagatgatgccccccgggctctcttcccctccattgtgggccgccctcgccaccagggtgtgatggtggaaatgggccagaaagacagctatgtgggggatgaggctcagagcaagcgagggatcctaactctcaaataccccattgaacac

SEQ ID NO: 44856 - DNA, 293 bp, Zea mays
cggagagcctcgtgactgagatgaacgcggcatatgcaaccatcgatgaactccgacgcctggtatctgacaaagaagctttgatcagatctaccaattctcagttgcatgatgcaaagattatgcttgcagacaagcaagcatctgtagagaaactggaatgggaggtaaagatgtcaaataaaaaggtcgaagatcttcaaggagatgtgtcaaatatgggattcgagataagctcgttgatggcatttttcgataaaatttcagagaatctttcaggtgactcttatgat

SEQ ID NO: 44857 - DNA, 292 bp, Zea mays
gcagcctaaaaaccctagcccccgaatcagatcccaccgcccgccggaacgcggaaccctgcccccggccgccatggagatgagcgatgcggagcggctgttcttcttcgagatggcctgcaacaactccgaggtcgcgtacgagcagaaccccaacgacgccgacaacttgacgcgatggggcggacgctgctggagctatcacagatgcgtaacggccccgacagcctcaagctcctccaagatgcggaagccaagctggaggaggcactgcaaattgatcccaacaagt

SEQ ID NO: 44858 - DNA, 208 bp, Zea mays
cacggttgcttgaactttattgaggaaaatgatgaagttctggttactggtgttggtcgcaaaggtcatgctgttggtgatattcctggagtccgctttaaggttgtcaaagtagccaatgtttctcttttggccctatacaaaggcaagaaggaaagaccaagatcataaatattaatggtgaaaacactgtagtaataaattttct

SEQ ID NO: 44859 - DNA, 289 bp, Zea mays
caacagtttcattagatattggagacaaacaaataatgatattattgtcgcaaaaaatcgactgatagtcaaacaacaacgattagtcggaaggagtcggagggctgctaccgctcacaatctctaacttatccaattatctcacgtcggtgctcatgtaccgctgcctcgtcaaagaagatgatcgtgatacagccatcttcaccttcgagtccgtcgaatagggctccgagggcactaatgttgtgattcagattaacctagcttttaattagctttcggccaagat

SEQ ID NO: 44860 - DNA, 288 bp, Zea mays
agcagaagtggaaggaagcaggcggccaccatggtgaagggacgcacgggacagcgcgtcaggctctacgtccggggcaccatcctcggatacaagaggtccaagtcgaaccagtacgagaccacgtcgctcattcagatcgagggggtgaacaccaaggaggacgtcgcgtggtacgctggcaagcgcatggcgtacatctacaaggctaagaccaagagcagcgagacccgctacaggtgcatctggggcaaggtcacccgcccgcacggcaactcgggcgtcgtc

SEQ ID NO: 44861 - DNA, 286 bp, Zea mays
ctcgccgcctccagtccagagccaccgtgagatctgcccgattccgccgcccggacccggggactccctcccctcctcgatccgttcgggcggactgccggcctagcttcaagtgcggggatggtgttctacttcaaggcgcggcccgaggccggcgactacaccatcttcatgggtcttgacaagtacgagaacgaggacctcatcaaatacggcttccccgaggacatctggttccatgtagataagatgtcctctgcacatgtgtatgtgagattgaataaag

SEQ ID NO: 44862 - DNA, 285 bp, Zea mays
cccgtgctccgcaaccgctgagtgagaagaagagatggccgacaagggcgatggcccggctatcggcatcgatctcggcacgacgtactcttgcgtcggcgtgtggcagcacgaccgcgtcgagatcattgccaacgaccagggtaaccgcaccacgccctcgtacgtcgccttcaccgactccgagcgcctcatcggagatgcggccaagaaccaggtcgccatgaaccccatcaacaccgtctttgatgccaagcgtctcatcggcaggaggttcagtgatgc

SEQ ID NO: 44863 - DNA, 284 bp, Zea mays
acgccacgcctacatccccaaagatgccatccccacaaatgaagctatgaagaagcaaatagttgtagcatcgaaggctatgcctttttactgcgctcttccaactttatctgaatatatgattgagagcggatggactcggtgctacttcaatatcagcgaaattggtttttctatgtacctctgttatatggctatgtatctcatctttgtggagtttggaatttactggatgcacagggagttgcatgacataaaaccattatacaaatatctgcatgcaa

SEQ ID NO: 44864 - DNA, 284 bp, Zea mays
ccccaacctaagtgttctcgaggtgaggaatgtgattggggatagaggactagaagttgttgctgctacatgcaagaagctacgaaggctcagaattgagcgtggcgacgatgatcctggccaagaagagcagggaggagtctctcagataggtttgacagccgtagccgttggctgccgcgaactagagtacatagctgcctatgtatctgatatcacaaatggggcgctggaatccattggcactttctgcaagaatctctatgatttccggcttgttctac

SEQ ID NO: 44865 - DNA, 285 bp, Zea mays
acctccagttggagttcctggggagctacctttctgagctgagcttgctggattatggcttgattcgctccttgccgtcacttgttgcagcctcagccgtctttgttgcaaggctgaccctggatccacacacccatccctggagcaagaagatgcaaacgctaacaggctataagccatctgagttgaaggactgtgttgctgccatacataatttgcagctcaaccggacatgtcaatccatggtggcgatccgggagaaatacaggcaacaccgattcaagg

SEQ ID NO: 44866 - DNA, 287 bp, Zea mays
aagtattttgcaaagctcttacgaaaggccatgaaaggtctaggcactgatgacaagacacttataagggttgtggtgacgaggactgaaattgatatgcaatatatcaaggcagagtacttcaagaagtataagaagccattagctgaggctatccactccgaaacatcaggaaactatcggacattccttctttcacttgttggtcctggacattaggttatgtttcgaccatgggacatgatattccatccatccaccctaaatgcagcgacctacctggaaaa

SEQ ID NO: 44867 - DNA, 95 bp, Zea mays
gttcatgctgagtctggacatgttttgcacttttgtttcccttcctgctaccatctgtgacagatccgctcgctaatatgggacctgagattagc

SEQ ID NO: 44868 - DNA, 280 bp, Zea mays
cgtgggatgagccgccgtacaagatcaacgcctccgggcagactgcccgtctcggcttcaacaccatcgcaaccagcgctacacactacaacggcatcctggagtacaatgcgcacagtctgtatggcttctcgcaggccattgccacgcatacggcgctgcaagggctgcaggggaagaggccgttcatcctgacccgctccacgttcgtcgggtcgggggcgtatgccgcgcactggaccggagacaacaagggcacgtgggaaaatctccgttactc

SEQ ID NO: 44869 - DNA, 276 bp, Zea mays
atcaagcctgagatgatcggccactaccttgctgagttttccatctcctacaagccggtcaagcacggcaggcccggtatcggtgccacccactcctctcgttttattcctctgaaatgagctgttacccggctttgtagtctcccaagagttcggtggcgatgttcattcagcttttctacttgttttgaacaagttaaatgcccaagacattttgttctgttccattccagctcaagaattcaaagctaagcattgcacacttatgctgttttg

SEQ ID NO: 44870 - DNA, 275 bp, Zea mays
gcaagatggaccggacgtcgatcctgggcgacacgatcgactacatgaaggagctgctggagaggatcaagctgctgcaggaagagatcgggcagcagcaggaggaggcgccaggcatgctcagcgtcttccgggagctcaaccccaacgagatggtggccaggaacacccccaagttcgacgtggagcggaaggagggcggcgacacccgggtggagatctactgcgccgccaagccggggctgctgctgtccacggtgagcacgctggacacg

SEQ ID NO: 44871 - DNA, 241 bp, Zea mays
agatcacagtctcagagacgagtttgccaaatatggacaagttattgaagctaagattatccttgatcgtcagtctgggaggtccagaggctttggctttataacttacacgtcttctgaggaggcttcggctgccatcactgccatggatggaaagactctggatggacggaacatacgggttaatcatgctaacgagaggacaggtggcttccgcagcagcggtggttatggtggtggc

SEQ ID NO: 44872 - DNA, 277 bp, Zea mays
agggaatcttgtttgtcgctattgatcagaaacgcccattgtctgatcaaggtccatttgacatcgttcttcataagttgactggaagggggtggcagcaattgctggaggaatatagggaggcgcacccagaagttactgttcttgatccacctggcgcaatagcaaacttgcttgatcgccagtctatgcttcaagaagtatctgaattggacctcacagactgtcatggtaaagtacgtgtgcctaagcagctatttgttaatactgatccctc

SEQ ID NO: 44873 - DNA, 279 bp, Zea mays
actccatggtttaagttcctctgggagacatacaggactgttctagagatactaaggaacaattcaaagcttgaagcgttatatgctatgactgctcatagggcttttcaattctgtaaacagtataagagaacaactgaattccgtaggttgtgtgagatcataagaaatcatcttgctaatctcaacaaatatcgcgatcaaagagatcgtcctgatctgactgcacctgaaagtttacaactgtatcttgatacacgtgttgagcagcttaaagtt

SEQ ID NO: 44874 - DNA, 167 bp, Zea mays
atccccgacaagccaatcgaagccgagatacggccatggactccaccggcaccggagcagggggtaaggggaagaagggagcggccgggcgcaaggtcggcgggccaaggaagaagtcggtgtcgaggtccgtgaaggccgggctccagttccccgtcggccgcatc

SEQ ID NO: 44875 - DNA, 189 bp, Zea mays
atcccccgctcaccaactcaaaccccctccgctctcaaaccctaaccctagccctagcccgctcccggcggaccgacgatgccgaagcaggcggcggggcggcggacgaagaggagttccgcgccgaggtggaggagcgcctcatcaacgaggagtacaagatctggaagaagaacacacccttcctct

SEQ ID NO: 44876 - DNA, 186 bp, Zea mays
aaagaatcaaatacaatggcaatgctaaccttcgagctggtactaacaaaattgcactgctgagtgttgcctgtggattgccgaatgttggagtgcattatgagacgtggaacactggtgttggtggtcctgttgtgcttcatgggctggatgaaggttcacgagaccttacttggcagacttggt

SEQ ID NO: 44877 - DNA, 194 bp, Zea mays
ctctgctcctccgcctccacctccgcctgatccatccaagacagggatcgccatgtcggactcggaggagcaccacttcgaatcgaaggccgacgctggggcgtccaagacctacccgcagcaggctggcaccgtccgtaagaacggcttcatcgtcatcaagaaccgtccctgcaaggttgtggaggtttcta

SEQ ID NO: 44878 - DNA, 289 bp, Zea mays
  unsure (1)..(289): unsure at all n locations
aaccattcgaaagcttctagaattctttttagaactttgagatctagtttgtctgctctaacaaacacccccgcatcgtctgcataaagagaacaacgaaacttagccccattgggtaatacctggcccagtagcccctcatgagctgccctttcaatcattcgttgtaggggatccattgcaaggatgaagagaaaaggcgatagtgggtcaccctgacgcacccctctcatgtgcttgatttctttggtttgctngccattaatgatgattttggatgaagatgatc

SEQ ID NO: 44879 - DNA, 101 bp, Zea mays
gagagaacccaccatggtgctgtctcctgccgacaagaccaacgtcaaggccgcctggggtaaggtcggcgcgcacgctggcgagtatggtgcggaggccc

SEQ ID NO: 44880 - DNA, 290 bp, Zea mays
acttgcaacaattgctaaggagcatgggggtatcataagatttatccaggtttcttgcctaggggcgtcaccgtcttctgaatctagaatgttgaggacaaaagctgcaggagagcaatcagtcttcaaagaattccctgaggctacaatcatgaggcctgctaccatgattggcacagaagatcgaatcctgaacagatgggcacaatttgcaaagaattggggtttcctcccgcttgttggtggtggatctactaagattcagcctgtgtatgtaatcgatgttgctg

SEQ ID NO: 44881 - DNA, 282 bp, Zea mays
atgaccgccgtctgtgtcgtcatccactctggttgaactaacaaccaggctagatttcttcaaagaacggcggtcacaattgatggaacagctccacagcctcgatttagggcatggatccacgtcccatggtatcccatacaaaccttcatctccctggaacagcccaaagtaaagtaggggatgatcagttgctgcagtacgacgtctctgtatattcttggtatagaatctcctttatgtttcactccatctttgtagagcctggtagtgagaatgtat

SEQ ID NO: 44882 - DNA, 284 bp, Zea mays
atctccgggaacttttacgctaggtcaatctataagagcgttgtgaatctacatggatcagccaaaaatttaccagcttcatgtacctcaaagccaaagcaatcacctgagctgtgtatgttcccacagtatgttgtcccgacaatgcgcacaccattgttcatacttaatgcagcctacgattcgtggcaggtcaagaacgtcctagcacctagtccagctgatccgaagaagacttgggcccaatgcaagcttgatatccagagctgctccggcagccaact

SEQ ID NO: 44883 - DNA, 163 bp, Zea mays
ccatcacacacaagacacaaccccactcacccggcagggaggccctcttcgtcggcggaggccatggtttccctcaagccgcagaagaggctcgccgcgggagtcctaaaatgtggcaaggggaaggtgtggcttgaccccaacgaggtctacgagatctcga

SEQ ID NO: 44884 - DNA, 284 bp, Zea mays
  unsure (1)..(284): unsure at all n locations
ctccaactatttcgccgcaaaggcctctagaagcaatcaggcgaaccgcggctgcggcgcgatgggagagcaggtcgtgacggagcgtatccagcggaagctggnaggaggccaacactaccgtccaacagcacctcgccggcatccaggaccacgtcaacttcaccatgcagcaagcatacttcaagtgcgcatatgattgcttcgatcggcgccgtactcaggaagcgatcaacaattgtgtggagaattgtggtatgcctgtccttgctgtcaacaatgtt

SEQ ID NO: 44885 - DNA, 286 bp, Zea mays
cgcacaccagcacctgccctcctcgccgtcgccgcctccctccgcgcgaccgatctaccctccgccgccaccatgtcgctgatcgccggggaggacttccagcatatcctgcgtttgctgaacaccaacgtggatgggaagcagaagatcatgttcgccatgacctcaatcaagggtgtcgggcgccgcttctccaacatcgtctgcaagaaggccgacatcgacatgaacaagagggccggcgagctgacgcctgatgagctggagcgcctgatgacggtcgtgg

SEQ ID NO: 44886 - DNA, 173 bp, Zea mays
tgccgcaggacctgcaggctgcccgcgccctcgtcatcatcagcatcatcgtggctgctctgggcgtgctgctgtccgtggtggggggcaagtgtaccaactgcctggaggatgaaagcgccaaggccaagaccatgatcgtggcgggcgtggtgttcctgttggccggcctt

SEQ ID NO: 44887 - DNA, 315 bp, Zea mays
gtggacacgccggagcaatcatttttgctctcaagaacaagctggacattaccctcggagtagcgttggggtcggcgacccagatctccatgtttgtggtgccgctgagtgtcattgtagcttggatcgcgggtattcaaatggatcttgacttcaagctcatagagaccggctctctcttcgtctcagtaatagtgacagcattcaccctccaggatggttcgtcacactacctcaaggggatccttctgctgctgtgctacattgtgatcggtgcatgcttctttgttacgaggcaacctgcaagtaacaaca

SEQ ID NO: 44888 - DNA, 314 bp, Zea mays
cgggtttgccgccagaacacaggtgttgtgaaaactacccctaaaagccaaaatgggaaaggaaaagactcatatcaacattgtcgtcattggacacgtagattcgggcaagtccaccactactggccatctgatctataaatgcggtggcatcgacaaaagaaccattgaaaaatttgagaaggaggctgctgagatgggaaagggctccttcaagtatgcctgggtcttggataaactgaaagctgagcgtgaacgtggtatcaccattgatatctccttgtggaaatttgagaccagcaagtactatgtga

SEQ ID NO: 44889 - DNA, 314 bp, Zea mays
ctacacagaagcggcggcggcggacaaacgcaggcgaaggcgagggtgtgagggaaggtgcaccagccatggtgcacgtcaacttctaccgcaactatggtaagacgttcaagaaaccaaggcgtccttatgagaaggagcgtcttgatgctgaactgaagctggttggtgagtatgggctgaggtgcaagcgtgagctttggagggtccagtatgcactgagcaggatccgtaatgctgcaaggcacttgctcacccttgacgagaagaacccccgtcgtatctttgagggtgaggcattcttcgccgcatga

SEQ ID NO: 44890 - DNA, 319 bp, Zea mays
gacttgtgacctggaacatctgctggggaacaagaggtgtgattgattttatcggtcgctattctgatgtagaccttagaactgcaaaagatggagagtatgttaaggttactggggttgttacttgtggaaatttgccccttgagtcctcattccaacgggtgccacgatgtgtgtacacttcaacttgcttgtacgagtacaggggttgggactcgaaagccgcaaacgccacacaccgacggtttacttggggtctcaggtcaatggaacggcacgcggtggacttctacatctccgatttccagtccgggctgcg

SEQ ID NO: 44891 - DNA, 314 bp, Zea mays
ggtgccttcaggagtccccaggaggctttcttctccacttccctgggagtcaagttcactgggacactggaccacagcaagggatttgttttctgtccctccagcatatatatttggagcgattctgcctgcttttatggttgcaggactttacttctttgatcacagcgtagtgtcacagttggcacagcaaaaagagtataatttgaagaagccttctgcctaccactatgacattttggtccttggattcgtggtcctgctctgcggtttgcttggtatccctccatctaatggagtgcttcctcagtctc

SEQ ID NO: 44892 - DNA, 313 bp, Zea mays
gtaccatttcgatccaatggcgccgacgtcgaagctgtcgacgggcatcaagcgcgcttcgcggtcgcacgcgtaccatcgccgtgggctgtgggccatcaaggccaagaacggcggcgccttccccaaggccgacaaggccgccgccgccgtggaacccaagttctaccctgccgacgacgtcaagccccgcgttcccagcacccgcaagcctaagcctaccaagctcaggtcgagcatcacgcctgggacggtgctgatcctcctcgcagggcgcttcatggggaagagagtggtgtttctcaagcagctc

SEQ ID NO: 44893 - DNA, 306 bp, Zea mays
ggcgacgaaagctgcgacggacgccccctcgtcgaatgcactggcgaccgttccgtcgaggagcagccggagcacgcaggagttgagggaaaagctttgaaaatgtcatccaccgtgccgaagtcatcaaatatcttctggcatgattgtccagttggcaagactgatcgccagaagctactcaagcagaaaggctgtgttgtctggattacaggccttagtggttcaggtaaaagtaccttggcatgtacattaggccgtgagctccacacaagagggaagcttgcatatgtccttgacggtgat

SEQ ID NO: 44894 - DNA, 310 bp, Zea mays
gtgtcaactcagagttaaatggattaagggcggtgcaggatgtgctttgttaaacagatgcttgaaggcagcacgctccttaagagtcatcaccactccctaatctcaagtacccagggacacaaaaactgcggaaggccgcagggacctctgcctatgaaagccaggtattgtccaaggtttctccccatgtgatagtctgaaatatggcctcgtgggaagggaaagacctgaccgtcccccagcccgacacccgtaaagggtctgtgctgatgaggattagtaaaagaggaaggaatgcctcttgcag

SEQ ID NO: 44895 - DNA, 310 bp, Zea mays
gcctctctcaatctgataccgcagatccgtcgtccggtgagtggaagccgcacgaacccatggcctccggcgagcttgcctgcacctacgccgctctcatcctcagcgacgatggcatcgccatcaccgccgagaagatcgccacgatcgtgaaggcggccaacatcaaggtcgagtcgctatggccggccctcttcgccaagctcctggagaagcgcaacgtcgaggacctcatcctctccgttggatctggtggcggactgctccagttgctgctcgcacacctgctggtggtgctgcggctgctgct

SEQ ID NO: 44896 - DNA, 308 bp, Zea mays
gggcgcgtggtctacgccgagtgacagagacgctcaggctgtgttctcaggatgaccgagtgggagacagcagtgccagcggtagcagagaccccagacatcaagctctttgggaagtggagcaccgatgatgtgcagatcaatgacatttccctgcaggattacattgcagtgaaggagaagtatgccaagtacctgcctcacagtgcagggcggtatgccgtcaaacgcttgcgcaaagctcagtgtcccattgtggagcgcctcactaactccatgatgatgcgtcgcagcaacaacggcaagaa

SEQ ID NO: 44897 - DNA, 305 bp, Zea mays
gtccaggctctggatttgggtctggaggatcagggggttcaggttctggtgcaccatcagagaaacgtggcagggggcggccacctggctctggaaagatgcaacagctggcttcgcttggaaagtggtttcttggctctgttggaacaggttttactccgcatgtgattattattcaaccaggagaggacgttgctgcgagaataatggccttctcacagcaaggcccaagggcagtgtgcatcatttcagcaactggagctatttctacagcaacccttcaccaggattcagactctggtggt

SEQ ID NO: 44898 - DNA, 305 bp, Zea mays
ggtggctccggcaccagctgtcgtgaagaagcaggaggctaacaaagtggtgaatcccctgtttgagaaaaggcctaagaattttggcattggacaggacatccatcccaaaagagacctcacccgctttgtgaaatggtcccgctatatcaagttgcagcggcagagagccatcctctataagcggctgaaagtgcctcctgcgattaaccagttcacccaggccctggaccgccaaacagctactcagctgcttaagctggcccacaagtacagaccagagacaaagcaagagaagaagcaga

SEQ ID NO: 44899 - DNA, 301 bp, Zea mays
gtctcagccaaggactggagaggtggcagggctgccagctttaacatcattcctagcagcaccggtgctgccaaggctgttggtaaagttcttcctgatctgaatggcaagctcactggtatgtccttccgtgttcctactgtggatgtctcggttgttgacctcaccgtcagaatcgagaagggggcctcctatgaggatatcaagaaagctattaaggctgcttccgagggtccactcaagggtatcatgggttatgcggaggaggatctggtttctaccgacttccttggtgacagca

SEQ ID NO: 44900 - DNA, 296 bp, Zea mays
gtccaggccaacgccctcagcaagatccagaaagacatcgccaagaaccaccaggtccgcaagcagtacaccatccaggtcggggagaacgagctcgtcctcaaggagctggagctgctcagcgatggggccaacgtgtacaagctcatcggaccggtgctggtcaagcaggacctcgcggaggccaaggccaacgtcaagaagcgcatcgagtacatctccgcagagctgaagcggatggatcgggcgctcaaagacttggaggaaaagcaaaacagcaagaaggaatcgatatt

SEQ ID NO: 44901 - DNA, 302 bp, Zea mays
cgcttccagccgccgccgcgtccgcctcgccaagcgcagcagccgccgcagcacatcgctctcttgatctcagccatggcggaggtggagcagcaacaggacacgccgaagctcttcaaccgctggaccttcgatgatgtccaggtgaacgacatctcgctgaacgactacctcgctgtgaacgcgacgaagcacgcgatgtacctgccgcacaccgacgggcgctactccaagaagcggttccgcaaggcgcagtgcccgatcgttgagcgccttacaaactccctcatgatgcacgggcg

SEQ ID NO: 44902 - DNA, 300 bp, Zea mays
gccgaaaggatagaaggccaagggaaagaacgtggctccggccccagctgtcgtgaagaagcaggaggctaagaaagtggtgaatcccctgtttgagaaaaggcctaagaattgtggcattggacaggacatccagcccaaaagagacctcacccgctttgtgaaatggccccgctatatcaggttgcagcggcagagagccatcctctataagcggctgaaagtgcctcctgcgattaaccagttcatccaggccctggaacgccaaacagctactcagctgcttaagctggaccacaa

SEQ ID NO: 44903 - DNA, 296 bp, Zea mays
gattgcagtacatatcaggggaaagaatgaacccacttacactcctagtgtagacatgggagcttttgttattgtggtcaatgcagataaggttgctgtttctggtaaaaagcggtcacaaaagctttataggaggcactccggaaggcctggagggatgaaagaagaaacttttgaccaacttcagaaaagaattccagagagaatcattgaacatgcggttcgtggcatgctccccaagggaaggctgggaagaagattatttacccacctcaaggtatacaaagggacagaac

SEQ ID NO: 44904 - DNA, 293 bp, Zea mays
atcgcggagaagaagccggcggaggagaaggccgagaagaagccaagggcggagaagcgcgtgccgagcaaggagggcggcgagaagaagggaaagaagaaggcgaagaagagcgtcgagacgtacaagatctacatcttcaaggtgctcaagcaggtgcacccggacattggcatctcgtccaaggccatgtccatcatgaactccttcatcaacgacatcttcgagaagctcgccgccgaggcagccaagctcgcccgctacaacaagaagcccaccatcacctcccggga

SEQ ID NO: 44905 - DNA, 289 bp, Zea mays
gtcccaaccagcaccatgcccatgatattggggtactgtgacatccgcgggctggcccacgccatccgcctgctcctggagtacacagactcaagctatgaggaaaagaagtacacgatgggggacgctcctgattatgacagaagccagtggctgtatgaaaaattcaagctggtgcctggactttcccaatctgccctacttgattgatgaggctcacaagatgaatcagagcatacgacatcttgtggctacattgctcgcaagcacaacctgtgaggggagacag

SEQ ID NO: 44906 - DNA, 291 bp, Zea mays
atcttggacaatgctcgcaagtctactatagatgctaccactgatgcaggcaagaaagttaaggagctgactgatgcagttgcacctcatgtccagcagctatttgatacatatccaaatcttgaaaaggtagttgttccacttggtggaacaatatgtggtacaatgatggcatggttggtcatgcctatcattctaaggaggcttcacaagtacgcatcacaaagtcctatatcagcacttctggggaactccaccaagaatgatgttttgtaccaaactagtctctgg

SEQ ID NO: 44907 - DNA, 297 bp, Zea mays
  unsure (1)..(297): unsure at all n locations
ttcctcgcaacgtccgcagtttatcctctcgactttacagtacctgctctcagctcctccctatctcaatggcatccgcgaatgccatctccaccgcctcccccttccggtccctctctcagggcagggcgacgaggtcacagcggttcgtggtgcgtgcgaacgccaaagacattgcctttgaccagaaatccagggcagcgctgcaggccggcgtcgagaagctcgcaaacgccgtcggtgtcaccctcgggccacgagngaggaatgtggtgctcgatgagtacggcaacccca

SEQ ID NO: 44908 - DNA, 270 bp, Zea mays
ttagcgggagaacgataatgcaaagtgctatgttcttggctgttcaacacgactgcagacccatggacaagagcgcaggcagtggccacaagagcgaggagaagcgagaaaagatgaaacggacccttttaaaagattggaagacccgtttgagctacttcttacaaaattcctctactcctgggaagcccaaaaccggcaaaaaaagcaaacagcaagctttcatcaagccttctcctgaggaagcacagctgtggtcagaagcattga

SEQ ID NO: 44909 - DNA, 286 bp, Zea mays
gcacaccaaggagagtacgtggaggagcagccatggcttcatcggtggccgccgcggcgagcacattcctgggcacccgcctggcggacccggcgccacagaacgggcgcatcgtggcccggttcgggttcgggttgggcggcaaggcgaagctgctccgaagaaggtggcgaagacatcgacctcctctgaccggccgctgtggttccccggcgccgtggcgccgactacctggacggctcgctggtcggcgactacgggttcgaccgttcggtctcgggaagcc

SEQ ID NO: 44910 - DNA, 286 bp, Zea mays
tctttgggttccggggggagatgaagatggttttgcccggtgacaatgtaactgcgaattttgagttgatatcacctgttcctcttgaacctgggcaaagatttgcgattagggaaggaggaagaacggtcggtgctggagtcgtctccaaagttcttagctgatcagtttccactttcttctccgtagcaattcagtgaacaaacgagtgttgatatgttcgaccgggttagaaacgagcgcaaagcaccgggttttcttttgcatttttcttggaatgactgag

SEQ ID NO: 44911 - DNA, 286 bp, Zea mays
ctagaagatatatctcaggatggtagcaggctttgggctattgacaaacccaatattgcacaaccccctcgcggatgggaaaggcagattaggataagaggtgaagggggtaccaaatttgctgatgtatactatacctctcctactggaaggaaacttaggtctctggttgaagtcgataggttcctccaagagaatccggagtatggtgctcagggtgtaactttagctcagttttcgttccagatacctagacctctacggcaggactatgtgaaaaagaaac

SEQ ID NO: 44912 - DNA, 271 bp, Zea mays
gtgagagagaagagagagagaagagagagagagagagaggagtgggagacccgcgagaggctgccgtgtagggaccgtagactcagcgactgcgaaggagggataaggggatggccgggatcggaccgatcaggcaggactgggagccggtcgttgtgcggaagaaggcacccaccgccgccgccaagaaggatgagaaggccgtcaacgccgcgcgccgcgccggtgcggagatcgataccatgaagaagtacaacgctggtacgaacaa

SEQ ID NO: 44913 - DNA, 265 bp, Zea mays
ggacgaggtgagggcggggaggatgagctgctgctgccgcgtcgcgaggatggcgacgccgcggagggcgagagtggagtggtgatgcgggtggccgtcgacgcgaagccgcagcggtgggtgtaggcgctcggatgcttttctacccgacgctggtgtacaacgtcgtgaggaatcggttcgagaagcacttccactggtgggatcagatcgatgagcatgtcctgctcggtgctgttccattccctagcgatgttctccggct

SEQ ID NO: 44914 - DNA, 271 bp, Zea mays
attctgctgaatttgctggtgaaagtttcgcaatgctctctggcacaagtatggctgcgccccatgtcgctggcctcgccgctctaatcaagcagaagtttccttcttttagcccagcagctatagcttctgcactgtccacaaccacaactcttagtgacaggcaagggaaaccaatcatggcacagcgaacatacagcaacccagacttgacgcagtctccagcgacatcttttgatatggggaatggctttgtcaacgctaccgctgc

SEQ ID NO: 44915 - DNA, 273 bp, Zea mays
gctctgttgaatttgaagttgctgattgcaccacaaaggattacccagaaaatagttttgacgtcatctacagccgtgacaccatccttcacatacaagacaagcctgctctgttcagaagcttcttcaaatggctaaagcccggtggcaaagtcctaatcagcgactactgtaagaatcctggaaaaccatcagaagaatttgctgcgtacattaagcagagaggctatgaccttcacgacgtgaaggcttatggacagatgctgaaggatg

SEQ ID NO: 44916 - DNA, 273 bp, Zea mays
gtttcactggccaaggctctttcaaacgcctacgtacccatcggggcaactcttgttagcccagagatatcagatgtgatccattcccagagcaataagcttggttcatttgctcatggattcacgtactccggccatccggttgcctgtgctgtggccattgaagctctgaaactttatcgcgaaagggacattcccggccatgtcaagcaaatcgccccaaagttccaggacgggattagggcgctggcagacagtccgattataggggag

SEQ ID NO: 44917 - DNA, 275 bp, Zea mays
gccgctccattgttggatgaagcacggtccattgtctcgaggagcggctacacaaggccccgtggcgatcacaaaaaaggagcctatatccatgtactagacttattcagtttcacatcacgatgtggagtgaaactgaataattctagtacatggattactgtttccattgtcgtcatcatcggctaacattgtcataatgtcagtttgggtaatgttagattaagtaattattgtgttcaaaaaaaaaaaaaaaaaaaaaaaaaaaggggggg

SEQ ID NO: 44918 - DNA, 128 bp, Zea mays
ccgcctcggtgcctcctcgcttcgaagtgttcgtgcgaaggcgaccctccctccttcgctccttccgcgccgcctcccggccgtcgccgccatggtgaagtactcgcaggagccgggcaaccctacca

SEQ ID NO: 44919 - DNA, 291 bp, Zea mays
agccactcgccacgttccaccagccggcgccccttttccttctcactccgctggcgccggcgccgccttatccatggcgtcggagaagaagcaatccaacccgatgagggagatcaaggtgcagaagctggagctcaacatctccgtcggagagagtggggatcgcctcacccgcgccgccaaggtcctggagcaactgagtggccagtcaccagtgttctctaaggctaggtacactgtccgttcctttggtatcaggcgtaatgagaagattgcctgctatgttactgt

SEQ ID NO: 44920 - DNA, 286 bp, Zea mays
ccaacatcaaatccctcccatctcttcccctccgccgccgtctctgctctccaagatcgcgatggcgtcagaaaagaagcagtcgaacccgatgcgggagatcaaggtgcagaagctcgtgctcaatatctccgttggagagagtggagatcgactcacccgcgccgccaaggtgttggagcagttgagtgggcagtctccggttttctccaaggcaaggtatactgtgaggtctttcggtattcgtcgtaatgagaagatgcatgctacgttacggtcaagggtg

SEQ ID NO: 44921 - DNA, 290 bp, Zea mays
gttctccgtcaccagctttccttttccttttcaattctccacagcgattcgtctcctctgctcttatctccgctgtgcctgtgcctgacttttcctcctcttcgtccctcccacccgcaaccgcacagagaaaggggaggaggctctctacccagcgcacccgagcacccctcagccccggatcgggacccctgctctgcgcaatccacccatggcggaggaatcaggccgccccttgccaaagtttggcgattgggatgttaatgatccagcttctgcagacggattca

SEQ ID NO: 44922 - DNA, 288 bp, Zea mays
acaagggcaggttctttgccttcggtcgtgtcttctcagggaaggttgctactggtatgaaggttcggatcatgggtcccaactatgtccccgggcagaagaaggatctgtatgtcaagagtgtccagcgtactgttatctggatgggaaagaagcaagagtcggttgaggatgttccgtgtggtaacactgttgctatggttggtctggatcagttcatcacgaagaatgctacactcactaatgagaaggagactgacgcttgcccaatcagagcaatgaagttct

SEQ ID NO: 44923 - DNA, 289 bp, Zea mays
ggcgacctcaaccagttcctcagtgcccaccagctggaggacaaggcagccgagggggcccctggggacgggcaggctgcgcaggggccaaccatcagctacccaatgctgctgcatgtggcagcccagatcgcctccggcatgcgctatctggccacactcaactttgtacatcgggacctggccacgcggaactgcctagttggggaaaatttcaccatcaaaatcgcagactttggcatgagccggaacctctatgctggggactattaccgtgtgcagggccggg

SEQ ID NO: 44924 - DNA, 289 bp, Zea mays
gccggcgcccggtctacaaccccccgccgggccccaagccatggccgatcatcggcaaccttaacctcatgggcgagctgccccaccgctccatgaacgagctctccaagcggtacggtccgctcatgcagctctggttcgggtcgttgcctgttgtcgtcggcgcgtccgccgagatggcaaagctcttcctcaagaccaacgacgcggcgttctccgaccggccgaggttcgcagtcggcaagtacaccgcgtacgactgctccggccttctgtgggctccttttga

SEQ ID NO: 44925 - DNA, 277 bp, Zea mays
aatctggtgagcatatcattgctggagctggtgagcttcatcttgagatttgcctgaaggatctgcaggaggacttcatgggtggtgctgaaattattgtttccccacccgtcgtctccttccgtgaaacgttcttgagaagtcctgccgtactgtcatgagcaagtctcccaacaagcacaaccgtctgtacatggaagcgagccccttggaggagggtctcgctgaggccatcgatgacggccgtattggcccacgtgatgatccgaagtgcgct

SEQ ID NO: 44926 - DNA, 286 bp, Zea mays
ccatcgagtcgagacgagaccgtcctccgcccgagtctcgctcgctagctagggtttccaccaatggcggcgcccaccacctcccgccgcggccccggcggcgcgcgcaacatggacgacgagaacctaaccttcgagacctccccgggggtcgaggtcgtcagcagcttcgaccagatgggcatcaaggacgacctcctccgcggcatctacggctacggtttcgagaagccctccgccatccagcagcgcgccgtgctccccatcatcaacggccgcgacgtca

SEQ ID NO: 44927 - DNA, 280 bp, Zea mays
gccatcgctgcctacaacaagggcgagagcactgcagctaagaaggctcctgccaaggaggaagaggaggaagatgaagaggagtctgacaagtccaagtcggaggtcaatgacgaggatgatgaagagggtagtgaggaggatgaagatgatgacgagtgatggagctcctcgagacaatggaccgtgcttcatccaacaatggagcggctacacaaggccccgtggcgatcacaaaaaaggagcctatatccatgtactagaattattcagtttcact

SEQ ID NO: 44928 - DNA, 280 bp, Zea mays
gacgcaaccccgcgggtcgcgggatcaaggagccagagagcgggacgcagcgagcgttccgccggagatcgagaccgtagctagggtttgaggcgccgggctgcggtggacgagatgtcgacgccggcgaggaagcggctgatgcgggacttcaggcgcctgcagcaggacccgcccgccgggatcagcggcgcgccgcacgacaacaacatcatgctctggaacgccgtcatattcgggccggatgatacgccgtgggacggtggcacgttcaagctta

SEQ ID NO: 44929 - DNA, 279 bp, Zea mays
cccccaactacccccagcctcggaaggaaccttccagaagcgcaagactctaaaggccgtcgccttcccattcttcctcgccgcgggggtcgcctgagatcacataaacaatggtgaaggctgttgctgtgcttggtagcagcgatggtgtcaagggcaccatctttttcacccaagagggagatggccctaccgctgtcaccggaagtgtctctggcctcaagcctggcctccatgggttccatgtacatgcacttggtgacaccaccaatggatgca

SEQ ID NO: 44930 - DNA, 251 bp, Zea mays
ggagaggttcaagaccggcaagaacaggtggttctttaccaagctccgcttctagatggtcggcgtcccgaatggtgaccgtcggtttcttgtatgggacacactccaagccatgtctcttttcgtattgccatgaagacttcttcgtgtttagtcctggggctctcaggtatattgtgcgtgtgtacttcgaatgtttggtcttggagtcctactgaattgatgaatgttcaatttatgtcttcaggatt

SEQ ID NO: 44931 - DNA, 279 bp, Zea mays
atttttcatatcctcactcgccgccgccgccgctcgtccctcgccccatcgcgatggcccggatcaaggtgcacgagctgcgggggaagagcaaggcggatctgcaagcgcagcttaaggagtttaagtcggagctctccctgctacgcgtagccaaggtcaccggcggggctcccaacaagctctccaagatcaaggttgtgcgcacctccatcgcgcgcgtgctgaccgtcatctcgcagaagcagaagtcggcgctgcgtgaggcgtacaagaaga

SEQ ID NO: 44932 - DNA, 296 bp, Zea mays
ccgagtctccagccaaccacatccagtccaccccatccccctcgaccccgacaaccccgagtcccgacccgatggcgcccaaggccgagaagaagccagcggagaagaagccggcggccgaggagaaggcggagaagacgaccgcaggcaagaagcccaagtccgagaagcgcctgcccgcctcgaagtcctccggcaaggagggcggcgagaagaaggggaagaagaaggccaagaagagcgtggagacctacaaaatctacatcttcaaggtcctaaagcaggtgcaccccgac

SEQ ID NO: 44933 - DNA, 292 bp, Zea mays
ctacgagcactcgccgccactcaccagcaaattcccaagccgcaccttcccccatctctttcgcgccccatttgatcgattcctgatggcgcccaaggccgagaagaagcccgcggagaagaagccggcggaggagaaggccgagaagaagccaagggcggagaagcgcgtgccgagcaaggagggcggcgagaagaagggaaagaagaaggcgaagaagagcgtcgagacgtacaagatctacatcttcaaggtgctcaagcaggtgcacccggacattggcatctcgtcc

SEQ ID NO: 44934 - DNA, 316 bp, Zea mays
atcgatcaccgcaagagctcggaatcggtcgaccatgatgagaagctccagaacgctacaacacttggagcaacccacactgtaaatgcagcaaaagctgatgcagttgaaaggataaaggaaattactgatggtaggggtgtagatgtggctatagaggcacttggtaaggcgttaacattttcccagtgcgccaagagtgtgcgtgatggaggcaaagctgttatgatcgggcttgctgcaacgaacgtaatgggagaggttgatataacccgtcttgtccgacgacaggtgaaaatcattggctcatatggcg

SEQ ID NO: 44935 - DNA, 304 bp, Zea mays
aaatgccgtcatatggggatccatcttgagtgcctgcagagtccacaaaaacattgacctagcccgacatgccgcggagcatcttctcaagttagcccctgaggaggatgccgtctatgtccagttgtacaacatatacatagactctagacagtgggcagatgcaaaaagagtaaggatgttgatggaagaacggggagttaagaagacggcaggttacagctcgatcactgtggctgggcaggttcacaagttcgtcgccaatgaccaatcgcatccttggacgttagagatcatggcgatg

SEQ ID NO: 44936 - DNA, 181 bp, Zea mays
cacaggtacagcgcatcgttaagggtgaggtgagtgtggcgctcaaggaccagcaggccgccgtcacctccagcatcatgcaggccatgcgctcagctgctggcacacctgtcccctctgcccaccttgactgccaggcccagcaagcccatatcctgcagctgctgcagcagggccacct

SEQ ID NO: 44937 - DNA, 304 bp, Zea mays
cccgttcccaaggagttgtcctcgccggcggatccggggcgccgctgcaagaggaggaaggaggaggagaggataccagaatggcgtcgcgctcggcgtccaaggatatcatcacgctgcgaggctctgccgccatcgtcagcgagttcttcgggtacgcggcgaatagcatcctctacaaccgcgctgtgtacccggaggagagcttcagcaaggtgaagaagtacgggctcaccatgctgctcacccaggacgagggcgtgaagaacttcatcgccagcctcacctcccagctctcagaatg

SEQ ID NO: 44938 - DNA, 297 bp, Zea mays
atggaatttgagtgtgaacagaagtctaccaaagaggacgtcaaggaacttatattccaggatatactgtcataccatcctcagcttctgaacgattacaagaacggctctgaaaagacgagttttctatatcccagcgccgatgacaggttccgtaggcaatttgctagcttagaagataatggagagaggaatgccgcgcttgacaggaaacatgtttctctcgcatggacaacaaccgttcactccactccaattcctgcacacgaaggtccagcagcaacctcccatgttgct

SEQ ID NO: 44939 - DNA, 305 bp, Zea mays
cgactcttagcttgtcggggacggtaaccgggacccggtgtctgctcctgtcgccttcgcctcctaatcactagccactatgcgtgagtgcatctccatccacgttggccaggctggtgtccagattggcaatgcctgctgggagctctactgcctggaacacggcatccagcccgatggccagatgtcaagtgacaagaccattgggggaggagatgactccttcaacaccttcttcagtgagacgggcgctggcaagcacgtgccccgggctgtgtttgtagacctggaacccacagtcattg

SEQ ID NO: 44940 - DNA, 300 bp, Zea mays
ttgggcgcagagaatccccaagcaaacaaacagggtagagggagaggagaggagaggagaggagaggttgggtctgggacaccatggctccgatgaagctgtacggggcggtgatgtcgtggaacgtgacgaggtgcgcaacggcgctggaggaggctggctccgactacgagatcgtgcccatcaacttcgccaccgccgagcacaagagccccgagcacctcgtccgcaacccgtttggtcaggttccagctctgcaggatggtgacttgtacctcttcgaatcacgagcaatctgca

SEQ ID NO: 44941 - DNA, 301 bp, Zea mays
gcaaaatctgcacgagagacagacgacgagatggccgatgcggaggacgccgccgccgcgcgccgacgggccgccataaccgactaccgcaagaagctgctcaactgcagggagctcgagtcgcgcgtcggcaccgtgagagaaagccttaaaaatgcaaagagggattttaccaagactgaagacgacttgaaatctctgcagagcgtggggcaaataattggagaggttctccgacctcttgataatgaacgctttattgtgaaggccagcagtggtccccgatatgtggtcggttgcc

SEQ ID NO: 44942 - DNA, 298 bp, Zea mays
caaggtcgttaagctccaagaagagcttgacattgatgtgcttgtgcatggcgagcctgagagaaacgatatggttgagtacttcggtgagcagctctccggttttgcgttcactgccaatggctgggtgcagtcttatgggtcaaggtgcgtcaagcctccgatcatctacggtgacgtgagccgccccaaccccatgaccgttttctggtcgaagacggcgcagagcatgacgtctcgcccaatgaaggggatgctgactggcccagtcacaatcctcaactggtccttcgtccgg

SEQ ID NO: 44943 - DNA, 301 bp, Zea mays
cctaaattagtctttgttcttcctgttgtgctcctcgccttggcgctgcaggcgatcctccggccaccgccgccaaagctctgtggctccccaggtggccctcctctgacatctcccaggatcaagctcagggacggaaggtaccttgcgtacaaagaggatggagtacagagagacaaggccaggtacaagatcatcacagtgcacgcatttgatagcaccaaggacttcccctcgcctgtttctaaggagctcgtggaaggactgggaatttacctccttgcttatgacagagctggat

SEQ ID NO: 44944 - DNA, 307 bp, Zea mays
catgaagtgtgacgtggacatccgcaaagacctgtacgcctacacagtgctgtctggcggcaccaccatgtaccctggcattgccgacaggatgcagaaggagatcactgccctggcacccagcacaatgaagatcaagttcattgctcctcctgagcgcaagtactccgtgtggatcggcggctccatcctggcctcgctgtccaccttccagcagatgtggatcagcaagcaggagtatgacgagtccggcccctccatcgtcgaccgcaaatgcttctaggcggactatgacttagttgcgtta

SEQ ID NO: 44945 - DNA, 295 bp, Zea mays
gcttgatgacgggcgcacgcttgccgactacaacatccagaacgagagcaccctccacttggtgctgcgcctcagaggaggcatgcagatcttcgtgaagaccctgaccggcaagactatcaccctcgaggtagagtcttcagacaccatcgacaacgtcaaggccaagatccaggacaaggagggcattcccccagaccagcagcggctcatctttgctgggaagcagcttgaggacgggcgcacgcttgccgactacaacatccagaaggagagcaccctccacttggtgctg

SEQ ID NO: 44946 - DNA, 291 bp, Zea mays
ggctgagtccacaggacaatcctcaagtcaaagagattaggtgtatagccatccctccgcagcatggaacacaccagatggtgactctgccatcaaatcttcctgaacatgagttccttaatgatcttgaacccttgggatggatgcatacacagccaaatgaagctccacagctatcaccacaggacctgacatcacatgccaagattctggagaacaacaaacaatgggatggtgagaagtgcatcattctgacatgcagcttcaccccaggatcttgctcgttgactg

SEQ ID NO: 44947 - DNA, 289 bp, Zea mays
gagcgtcagagcccgatcccgatccagcgaggcggcgaccctccctcctccccttgcttcgctcgtccagccctgaccacccgcatccccgtcagtcatggcagcggcagcaggcggaggcgcggtgcgtgcgctgtcccagaaggagcaggacatacagatgatgctcgccgccgacgtccaccttggcaccaagaactgcgatttccagatggagcgctatgcctttaagcgccgcaccgacggcatctacatcatcaaccttggcaagacatgggagaaactgcag

SEQ ID NO: 44948 - DNA, 291 bp, Zea mays
gcatcgcagtttctaatcgtttggagagcacacaagaatgtcgttcgtgcagctctctggtgctggagtcgctgcagtggccttcacgaacaagagcctagtctctcggcacgcagcgctacgggtctgctcgtcgaggcgctcgatccgtagcctggtcgttaaggctgcaactgtcgtcaccccaaagtacacttcactgaagcctctgggagatagggtgcttgtgaagcttggtgccgcagaggagaagacagttggtggcattttgcttccatctactgcccagac

SEQ ID NO: 44949 - DNA, 304 bp, Zea mays
ctccaacaaagagcttggatgacatgcatctgattgcttggtagacagacagatttgaacttgtggctttcttatcaaactgatgatcacagtctcagggacgagtttgccaaatatgggcaagtacttgaagctaggattatcattgaccgtgaatctgggaggtctagaggttttggctttgtaacttacacgtcttctgaggaggcttcagctgccattactgccttggatggaaagactctcgatggacggagcatacgtgttaatcatgctaacgagaagacaggtggctttcgtggcg

SEQ ID NO: 44950 - DNA, 295 bp, Zea mays
gtctacccagggccacccagcggccctggggcctacccatcttctggacagccaagtgccctcggagcctaccctgccactggcccctatggcgcacctactgggtcactgattgtgccttataacctgcctttgcctgggggagtggtgcctcgcatgctgataacaattctgggcacggtgaagctcaatgcaaacagaattgctttagatttccaaagagggaatgatgttgccttccactttaacccacgcttcaatgagaacaacaggagagtcattgtttgcaatacaa

SEQ ID NO: 44951 - DNA, 293 bp, Zea mays
ggaaaagaaggaaaacggacagattacactccatattcatgccaaaatatcatatctgcaacacctggtgttggagatcaccatggatgcccgtttcgacattttggcgaagaaaatttgcgggcagcactcaacaaaatgggcgttggtgggcatgcattggaagagataatagataaagtgaagaacaggcattaccagctagcttgcacattaacatttgagaccacacacggtgtctcctgtgattctggaatcaaccatccaaaccaatatttcagtgaaagccagaa

SEQ ID NO: 44952 - DNA, 285 bp, Zea mays
actgattggagtgtcagagccatctctgccacaaacttgtatcttcgtgtaaatcacatttatgtcaattctgatgatataaaggagactggctacacttacattatgccaaagaacatattgaagaaattcatatgcatagcagatctgcggacacaaattgctggatttttgtatgggctgaagacacaggacaatcctcaagtcaaagagattaggtgtatagccatccctccacagcatggaacacaccagatggtgactcttccagcaaatcttcctgag

SEQ ID NO: 44953 - DNA, 292 bp, Zea mays
ccaagaagcaagaaaactagaaaaggctcctcccgaccgcaacgcccctcatctccctcgaccccgacatccccgacccgatggcgcccaaggcggagaagaagccagcggagaagaagccggcggccgaggagaaggcggagaagacgaccgcaggaagaagcccaaggccgagaagcggctgcccgcgtccaagtcctccggcaaggagggcggcgagaagaaggggaagaagaaggccaagaagagcgtggagacctacaagatctacatcttcaaggtgctgaagcag

SEQ ID NO: 44954 - DNA, 289 bp, Zea mays
cattgctcatacccagattaggaagatgaagggtttgaaacagaagaaggctcacctgatggagattcaggtcaatggtggtaccattgctgacaaggtggactacggctacaaattttttgagaaagaggtccctgttgatgctgtcttccagaaggatgagatgattgacatcattggtgtgaccaaaggtaaaggttatgagggcgtggtcactcgttggggtgtcacccgccttccccgcaaaacccacaggggtctccgcaaggttgcttgtatcggtgcatgg

SEQ ID NO: 44955 - DNA, 290 bp, Zea mays
tcttgcttgatggcagtttcgaggcccgtgtatcagactttggacttgcaaagcttttagaggatgaagaatcacatattactacaatagttgcaggaacatttggctatcttgcaccagagtatatgcaatttggcagagccaccgagaagactgatgtctacagttttggggttttggtactcgaaatactcagtggaaagcggcctactgatgcatccttcattgagaagggactaaacattgttggatggttaaattttcttgctagtgagaaccgggagagggaa

SEQ ID NO: 44956 - DNA, 294 bp, Zea mays
atcgaagcgaggacgtggtgggttctctggtgcgaaattccggatttccttgggtcttccggtaggagctgtaatcaattgtgctgacaacacaggagccaaaaacctgtatatcatctccgtgaaggggatcaagggacggctgaacagacttcccgctgctggtgtgggtgacatggtgatggccacagtcaagaaaggcaaaccagagctcagaaaaaaggtacatccagcagtggtcattcgacaacgaaagtcataccgtagaaaagatggcgtgtttctttattttga

SEQ ID NO: 44957 - DNA, 287 bp, Zea mays
aagatggctacttttgtcctgccctggccaaagctgtcaaaaccatgaaaaaggcagagaaggtgctccttacagtaaagccacaatgtgagattccatttcaagatggatttggtgagaagggtagaccagcagctggagaggaaggtgctgtgccgccaaatgcttcgctgctcattgaccttgagttgatttcatggaagactgtcacagaaattggggatgataagaaaatccttaagaaggttctcaaggagggagaaggttatgagcgtcccaacgagggt

SEQ ID NO: 44958 - DNA, 282 bp, Zea mays
gggagagattggagggaggcccctgcccaaggcaagagaaaccgcggcgccggagagggaggaagggcagacgcagacgggcgaacaagatgagggagatcatcagcatccacatcggccaggccgggatccaggtcggcaacgcctgctgggagctctactgcctcgagcacggcatcgagcacgatggcaccatgcccagtgattcctcggttggcgtcgcacatgatgccttcaacacgttcttcagcgagactggttccggcaagcatgtgcccaggg

SEQ ID NO: 44959 - DNA, 269 bp, Zea mays
ctcgaccgctactcagaagccttccatcctcactcgctcgatggcccgcacgaagcagacggcgaggaagtccaccggcggcaaggcgccgaggaagcagctggcgactaaggcggcccgcaagtctgcccctgcgaccggcggagtgaagaagccccaccgcttccgacccggcaccgtcgcgctccgggagatccgcaagtaccagaagagcacggagctgctgatccgcaagctgccgttacagcgcctggtgccggagatcgcgc

SEQ ID NO: 44960 - DNA, 278 bp, Zea mays
gatgccagggctggggaaggagcacgtgaagatgcgggtggagaaggacgccctggtgatcaagggggaggccggcaaggacctcgagggcgacgacgacaagggcccggcgcggtacagctaccgcatcggcctctcctcccaggctttcaagatggaccagatcaaggctgacatgaagaacggcgtgctcagggtcaccgtcccgaagatcaaggacgaggagcgcaaggacgtcttcgagatcaagatcgagtagggtgtgtgcatcggatggg

SEQ ID NO: 44961 - DNA, 279 bp, Zea mays
gtacccttgttaattatcacccctgtggagctgatcaagaagggtgaaaaggtgggctcgtccgagtctgccctgctcgccaagctgggtatccgccccttctcgtacggcctccaggtcaccagtgtctacgaggatgggtccgtgttcagccctaaggtgttcgaccttcttaagaagaactgatttagaagtttgccacttggtgttccatggtggccccttgtacttgggattcgaaccgaccctgctgttgtccccactgttcatcatgggtac

SEQ ID NO: 44962 - DNA, 295 bp, Zea mays
aagatgaagggtgactactacagataccttgctgagttcaagactggagctgagagaaaggacgctgctgagaacaccatggtggcatacaaggctgcccaggacattgctttggctgagcttgctccaactcaccctattaggcttggactggcactcaacttctcagtgttctactatgagattctcaactcacccgatcgcgcctgcagtcttgcaaagggtttttgaggccatctcggactggaaccggacacccggagcgaggagtcctacaaggacagcactttgatca

SEQ ID NO: 44963 - DNA, 298 bp, Zea mays
cgcacatcccgtcgcatcccatcccactaccacgcatctcgtcgtccgccgattcgatccggttcttccaacccaggggctgtgatggcgacgaagaggagcgtgggcaccctcggcgaggcggatctgaaggggaagaaggtgttcgtgcgcgccgacctcaacgtccctctcgacgacgcccagaagatcatcgacgacacccgcatccgcgcctccgtccccaccatcaagttcctcctcgagaagggcgccaaggtcatcctcgccagcgacctaggtcgtccaaaaggtgtca

SEQ ID NO: 44964 - DNA, 295 bp, Zea mays
ctttcttgtaacccaagacgaactcggtgaactctttctcctcgcgcacaccggagcacaatcaaggattccagtccagtcctgccaatggagtgcgttttgggcttggttggccgcgacttcgcggtggtggcggccgacacctccgccgtgcagagtatcctcgtccacaagactgacgaggacaaagtaatggtcctcgactcgcacaagctgttgggcgcttcaggggagcctggtgaccgggtgcagtttacggagttcatacagaagaacctccacctgtaccagttcc

SEQ ID NO: 44965 - DNA, 295 bp, Zea mays
gagaaagacccgttcgaggcggcggcgatgtcggggcgcggcaagggcggcaagggtctgggcaagggtggagccaagcgccaccggaaggtgctccgcgacaacatccagggcatcaccaagccggcgatccggaggctggctcggaggggcggcgtgaagcgcatctcggggctcatctacgaggagacccgcggcgtgctcaagatcttcctcgagaacgtcatccgcgacgccgtcacctacaccgagcacgcgcgccgcaagaccgtcaccgccatggacgtcgtctacg

SEQ ID NO: 44966 - DNA, 289 bp, Zea mays
ctcgagccgaatctcgagccgctcgagccgctatttggacatgcttcaaatgataactttattcagcctcatcacacagaccatattcatcaggcttatgcgggggataaaaatctaatcaaatttgagggtgatcacaattcgccaagaccccagttttattacgactctgtttcaatattcttctacaacgttcttcacccacctcagtttccttcaacctgcacacataaacttgataagtattataaccttggtgcttttaagggtgctgctggtactaatgaga

SEQ ID NO: 44967 - DNA, 286 bp, Zea mays
ggcggattcgggacagtctataagggaaccatccgaagcgggcgagaggtcgcggtgaaggtcctctccgccgagtccaggcagggcatcagggagttcctgacggagatcgacgtcatcagcaacgtcaagcaccccaacctcgtcgaactcatcggctgctgcgtcgagggaagcaacgggattcggggtaatgagtacctcaagaaagcagccttgaccgtgcgctgctggcttctaacagtgagcctgccgacttcacctggagcgtcaggtctactatatg

SEQ ID NO: 44968 - DNA, 294 bp, Zea mays
gcagcaccgtcgtcgaactcttcccttttcggcggcattggagatggcggcgaatctagaggacgtgccgtctctggatctgatgcacgaactgctccgtcggatgaagtgcagctccaagcccgacaagcacctcatcctcatcggcccacctggctctggaaagggtactcagtctccccttattaaggatgaatattgcctgtgccatttagccactggtgatatgttgagggctgctgtggcagccaagacaactctaggtatcaaagctaaagaagctatggataaggg

SEQ ID NO: 44969 - DNA, 292 bp, Zea mays
gtggttttgctgcttccgcacagctgccgtagctactggagcatctggatttgaatttggtgtggacccaaatgtagatccagagttggcactcgccctgcggttgtctatggaagaagaacgagcaaggcaagaggctattgcaaaaaaggctgcagaagatacatctaataccgaaaatatcaatgcctcaagctcaaacagcgattctgttatggctgaagcagaacttgcctcaaatgctgctgctggtgacaagcaagaacagccaaaggatgatgacgatctacta

SEQ ID NO: 44970 - DNA, 289 bp, Zea mays
agagacttatgcttggtgagaacctgtatcctcttgttgaacagctggaacgtgagcaggctgccaaggtcactggcatgcttttggagatggatcagacggaggttcttcacctgctggagtcgccagatgctctgaaagccaaggttgctgaagccatggaggtcctccgctctgcccagcatctccagcagagcaatgtttctactgagcagcagctggctaatctatcattgaatgatgggtcgtctccagctgaacgttaatgtttctgatgtttcgaaatgct

SEQ ID NO: 44971 - DNA, 292 bp, Zea mays
gcaatctcgtccccaaacaagcaaccaccgcctccccgatctcgtcgagaggaagcccaatcccgaaaccgccgccctattccaatggcgcccaaggccgagaagaagcccgccgccaagaagcctgcggaggaggagccggcggcgtagaaggccacggcggggaagaagcccaaggccgagaagcggctccccgcgggcaagtccgcaggcaaggagggtggcgagaagaaggggaagaagaaggcaaagaagtcggtggagacgtacaagatctacatcttcaaggtgc

SEQ ID NO: 44972 - DNA, 289 bp, Zea mays
gtcggagggaaccgaaaactcagggtctcgaatttcctaggagcggaggcgatggctgggaagggaggaaaaggattgctcgccgcgaagacgacggcggccaagtcggcggagaaggacaaggggaagaaggcccccatctcacggtcctcccgcgcgggcctccagtttcctgttggacgaatccaccgtcagctgaagcaaaggactcaggcaaatggccgcgttggtgccactgcagccgtctactctgccgccatcctggagtacttgactgccgaggttctgg

SEQ ID NO: 44973 - DNA, 281 bp, Zea mays
cctttcaattaccaccaaccaaacaggtggcggcacggcggcggggtagcatttgtgctacgagggcttttgcaatggcggcttcggggttcggcggcggcgaggcgttccggctctcggccgcaccaggggccggcttactgaagctgcacaagggcgacatcaccctctggtccgtcgactgcgccaccgacgccatcgttaatgctgctaatgagcgaatgttaggtggcggaggtgttgatggagctatacatcaagctgctggaccagagctagtg

SEQ ID NO: 44974 - DNA, 285 bp, Zea mays
gcgctgcacagggctgccgcccgaggacacctgcttgccgtccagttgctggtcacccagggggccgaggtggatacgcgggacaccctgggcctcacacccctgcatcacgcctctcgggaaggccacgtggaggttgccggctgcctgctggacaggggtgcccaggtggatgctaccggctggctccgctagacccccctacacctggctgcagagcgagggcctgcggcgtaccgtggggcttctgctgagccgaggggccagccccaccctgcggacgca

SEQ ID NO: 44975 - DNA, 283 bp, Zea mays
cttccagtcactcgatcttgcatggacattgcttcggatctaccctcgcgaacttctccaccgtattccagcaaagaccttggaccagtactatagcagagatgcttcccactgaatcactgatcgttgatcagtgttccaatattttggcaagtgcagctttgaataaattgaacagattggcctcgtggccattttcctgtatttatctgtagtcaggtccaattcttttctgttggtgagcgcaagttattcatagatgactcggtcatgggaatatttg

SEQ ID NO: 44976 - DNA, 269 bp, Zea mays
ccttttcattggtaatctcggtgatactgtagtcgaagaggaattgcgaagtctcttcagtgtgcaacctggattcaagcaaatgaaagtgttacgtcaagataggaacactgtttgctttattgaatttgaggatgtgaatgctgctacatctgtgcaccaaactctgcagggtgctgttattcctagttctggtcgtggtggaatgcgaattcaattttcaaagaatccctttgggcgaaggaaggattcagctgctggcctgccaa

SEQ ID NO: 44977 - DNA, 287 bp, Zea mays
cgagctcttctggcgggcctccctcgtgcctagggccgaggagttcccgttccagcgggtgcccaaggtcgccttcctcttcatggcgcgcggccccatccccttcgcgccgctctgggacaagttcttccgcggacaccaggggctctactccgtctacgtccacaccgtgccggactacaagctcaatgtgtccaagagctccgctttctacggcagacagatccccagcgaggaggtgtcctggggatcaattaccttggtggatgctgagaagcgcctgctgg

SEQ ID NO: 44978 - DNA, 284 bp, Zea mays
cgagtactcatatgttaatgcaccattgcagaaggagctgttggctgatgaggtggggaacacagctgcattcctggtttcttcattggcttctgccatcaccggctcgactgtttatgttgacaatgggctcaatacaatggggcttgcaattgacagccctaccataacgtcatagatgtggttgtggtagatagacgacctttcctgctgcattgcggtatcatccttgaataaagatcatagttagttataaatatgagaggtaagggcaggaaaggggg

SEQ ID NO: 44979 - DNA, 278 bp, Zea mays
ggtgtgagtgttgaagagctcctcaacatgatggatccggccttgcttgacgacgtcatacgccggctgctggaggtgaagaatctcaagcctgggaagaacgcgcagttgtcggagtcggagatcaagcagctctgcgctgccgccaaggagatcttcctgcaccagcccaacctgctggagctcgaggcgcccatcaaaatctgcggtgatgtccatggccagtactctgatctcctgaggctattcgatatggtggctatccgctcaggcaacta

SEQ ID NO: 44980 - DNA, 284 bp, Zea mays
ccataattcagctgctgctgcgaaggatcctgacagtgctttctttaaaagattggatggctttcaaccttgtgaagtaaatgaactgaaagcaggaagccattattttgctgtatatggtgacaatttactttaaaagtgcaagctatactattgaggttgtatctggtgaacccttcactgctcaaaaagagaagctacgaagtgtggaggcaaagataattgcaaaacgatctgagctgtctaaatttgagtctgagtatcgcgaggttttggcaaagttc

SEQ ID NO: 44981 - DNA, 275 bp, Zea mays
gtgatgggcaggaccggctccaggggtcaggtgacccaggtcagagttaagttcttggatgaccagaaccggctcatcatgaggaatgtcaaggggcccgtccgcgagggtgacatcctcaccctgctcgagtccgagagggaggccaggaggctgcgctgaagccctagcgttcttggtgggctcttgtttggtctttggtgtcttcgaatttgtgctatgtttgaacttctgtgaccctgtcttgagagtagtaagcctggtgataagattgc

SEQ ID NO: 44982 - DNA, 284 bp, Zea mays
gcgaggtgctggcggtgctgctggacaggttctttgacatggagtatgctgagtgcgtgaaggcttttgaggcttatgcaagtgctgcaaagcagatcgatgagctctgtgcattctatgcatggtgtaaagataccggagttgcaaggtcatctgagtacccagaggtgtagcgtgtcaccgataagttgctggagacgctggaagaatttatgagggaccgggcaaagaggcccaagagcccatcaccggagcctgaacctgagcctgtcaaggaagaacct

SEQ ID NO: 44983 - DNA, 284 bp, Zea mays
attcctcccacacgtccccatcaccattgctgcgacgagagtgcgcgggagagggtaggtggcgaggcggcggagatggggcgggggccggtgcagctgcgccggatcgagaacaagatcaaccgccaggtgaccttctccaagcgccggaacgggctgctgaagaaggcccacgagatctccgtgctctgcgacgcagaggtcgcgctcatcgtcttctccactaaggggaagctctacgagtactctagccattccagcatggaaggcattcttgagcgtta

SEQ ID NO: 44984 - DNA, 283 bp, Zea mays
ctggattgctcaaagccatgtgagaaagtttgcccagctgatgcactatcactaaagcatcccatggttgatggagagcgcacactatctgatcccttacgtggtaaatatgagggtggtgtaattactgagcggtgctatggatgtggtcggtgcttgccagtttgcccgtatgacagaataagagctgtgtcctatgttcgagaccctactatgactgctgaattattgaaaagcgatgatgttgatgcaatagagatacataccactggaaaaggaactg

SEQ ID NO: 44985 - DNA, 283 bp, Zea mays
ccaagttcggcatcgtctacgtggacttcaacacgctcgaacgccacccgatagcgtcggcctactggttcagggacatgcttcagaagcattgagatctccagagccgagcctgagcacggaaggtaccattttgttcagcttcgcctagtgtttgggatggcccaatggttcaaatccggctcagtgcctggctaccaaaatgggaacaaaggacagctaccccgatcaattgtgatgttgtgtgtttgtgggtatgttctctctggagtttgagctgtgg

SEQ ID NO: 44986 - DNA, 161 bp, Zea mays
agtacaacaacttcaagcctcaccggccattaaagagacgagttaaagacttctttaaacattttgatcggcatgcactggatctgttagagaagatgttgactttagatccatcacagaggatatcagaggaagatgcacttgatgcggaatatttctgg

SEQ ID NO: 44987 - DNA, 107 bp, Zea mays
agcgagggatgatgtctctgatttgctgcctatggtactcgtgtgttcataaaaaaatattatgcgaagagcggagacaatcaataaaaaaccttgagatctttttg

SEQ ID NO: 44988 - DNA, 286 bp, Zea mays
aggttttgctgctctccgaccccgagctccgaaggccgcagcatcaggcgcggcccccctcgcgtgtgaccgagatggcgctgccgaatcaggggaccgttgattaccccagcttcaagctcgtcatcgccggcgatggtggacctggtaaaactacatttgtgaagaggcatctcactggagagtttgagaagaaatatgaaccaaccattggtgtggaagttcatccgttggatttcaccactaactgtggtaagatcaggttctactgctgggataccgcagg

SEQ ID NO: 44989 - DNA, 279 bp, Zea mays
acagggacattgggtgggagattggggacgagggccagattctcttcaccgaacccctcttcacgccaaagactcttcgggagcaattggtgcagcttatgtttgaaaagttcaatgtttcaggcttttatgcctctgaacaggctgtattgtcactctatgctagtggacgcatttcaggatgtacagttgacattggtcacgggaaaatagatattgctccagtttgtgaaggagctgttcaacacatagcttctaagagattagagattgggggag

SEQ ID NO: 44990 - DNA, 277 bp, Zea mays
aattcggctcgaggagattgggaagatggccaagtacagtagctgcgagtggctagcagttgtggcatttcttcttttcgtggcatcgtggatacttctccggcttgttatattccctttctggatcctaagaagcacaagctatgaagtactgctgaccctggacaaggagaaacatcagttttatggccccatatactattatgttttcaactgtcttctgttctcactcctagttcttcacatatattggtgggtactgatatggcggatgcta

SEQ ID NO: 44991 - DNA, 122 bp, Zea mays
cgaattgtatctcatgtagatctgtctgaggttgaaacttaaatggagcagtagtatctgtgctattggtacccctgttactgaattgatgtgatgctgagtttaattttgttttcatatct

SEQ ID NO: 44992 - DNA, 268 bp, Zea mays
caccaactgaaattcgtggaacacttggtaccgttaatcaactttttatttgcattggaattcttgcagctttgttagctggattgcctctggcaggaaatcctgcctggtggaggacaatgtttggaattgctgtagttccatccattctgctggctgtaggaatggccttttcgcctgaaagccctcgttggctattccagcaaggaaaggttactcaagcagaattagctgtaaaaagactgtatggaaaagaaatggttaccga

SEQ ID NO: 44993 - DNA, 315 bp, Zea mays
ctattatcttcctcagaacggttcaataaagctttacaaggaaatcgtatgccctcttgatggttttgagttgcttttgttctcgatggtgggacctgatgcaaaatctttcccactgtgccctttttgctataattgtcctccatttgaaggcatcgacaaactctttggtgctctcaagctcgatgacaccggcaaggttgggaaaggggccggcataacatgcttcctttgtcctcacccgacatgcaagcaatctatgatcactcagggagtttgtgcttgtcctgagtgtagtggtaccctgattcttga

SEQ ID NO: 44994 - DNA, 248 bp, Zea mays
atcgccgtcatcatcagcactgggatcaaccccaaggccaagccctactacctttttgatggctacgctcacctttcgtccgggcttgcctgtggccttgctgggcttgcagctggcatggccatcggcattgttggtgatgctggagtcagggcgaatgcacaacagccgaagctttttgtgggcatgatcctcatcctcattttcgcagaagcgcttgctctgtacggtctcattgttggaattat

SEQ ID NO: 44995 - DNA, 292 bp, Zea mays
accaagaagacggcggagaaggcgtccagtgtggggagcaaggaggcaaagtcgcccaagaaggccgccaagtcccccaagaaggcatagactgactgtctggagtgatctgatgtttagcaggaccttgataccagtatgcggtgatgcgtaggctgtagatgggtcgaatgtgcttgtgtgtgtatgtgccctgctgcaagttgccctttgctatttaaaatggaagaagaaatgccttgtttctctgaaaaaaaaaaagctagccaagggattaaaagaaaaagaaaaa

SEQ ID NO: 44996 - DNA, 298 bp, Zea mays
atctagattgtattggtgatcctgaattcattggcaagatcggaactgacattgaagactacaaatgttcctggctagttgtgcaagctcttgagcgtgctgctgagaaccaaaagagcattctgtttgaaaattacggaaagtctgatccagcgtgtgttgcaaaggtgaaggacttgtacaaagagcttaaactggaggaggttttccatgagtacgagagggagagttacaacaagctgattgccgacatcgaggcccagccgagcaaggcagtccaaactgttttgaagtcctt

SEQ ID NO: 44997 - DNA, 173 bp, Zea mays
attcttttgaattaaaaagaaatctctcttctaggctggtgcttttcgactataatttggagattgttccaatgtccgtgcaatcatctgaacatgttactacttattgtaccttgtcgtgcaaagttttgctaagatctcaaaaaaaaaaaaaaaaagggcggccgccgact

SEQ ID NO: 44998 - DNA, 308 bp, Zea mays
atacaacaagttctacgagtccttctcgaagaacctgaagcttggaatccatgaggactccacgaacaggaacaagattgcggactgctgaggtaccactccaccaagagcggagatgagctgacaagcctcaaggactatgtgacgaggatgaaggagggccagaatgacatctactacatcactggcgagagcaagaaggccgtggagaactcccccttcctcgagaagctgaagaagaagggctatgaagtcctgtacatggtggacgccatcgatgagtatgctattggccagctcaaggagtt

SEQ ID NO: 44999 - DNA, 296 bp, Zea mays
acccgtcgacgcgtcgttcttgccggcagcgcctcacctccgccatctcctcctccagggggatcggatacgccacaggctgcgcgatggtgctgtgggtcttcggctacggctccctcatctggaaccccggcttcgacttcgacgacaaaatcctcggcttcatcaagggctacaagcgcacctttaatctcgcttgcattgaccacagaggcacaccggagcatccggcgaggacctgcacgcttgaaaccgacgacgaggccatatgctggggaattgcatattgtgtcaag

SEQ ID NO: 45000 - DNA, 301 bp, Zea mays
acaagaagatgctggaagaggtctcgatcctcccctagaagcgcctccgcaacaaggttgccggcttcaccacccacctgatgcgccgcatccagcggggcaccgtccgtggcatctcgctcaagctgcaggaggaggagcgggagcgccgcatggacttcgtcccggagaagtcagcgctcgaggtcgaagagatccgcgtcgacaaggagaccatggagatgctcgcggcacttggcatggccgatctcccgggcgtagagcgccaggctgaggtctccagcgtccccgcctacggccg

SEQ ID NO: 45001 - DNA, 309 bp, Zea mays
gctctctctctctattcgttccccgcctcaccccgagccagccgtctcgctagggtttcgccgccgccgccgccgccgccgccgctatgcctcgccgcagctcaggaaggtctgccccacgcccagctacccgtgctgctccagtgaggaacccgccacagccagcacgccaggctcctcctccagctcctgttcgagatggtggtggctccatgtttggaggaattgggtccaccattgctcaaggtatggcgtttggcacgggtagtgccatggcacacagggctgttgatgctgtattaggtcccc

SEQ ID NO: 45002 - DNA, 309 bp, Zea mays
accagggtgaaaaggatgacaagataatagcagtctgtgctgatgatcctgaatatcgtcactacaacgacatcagtgagctgtctcctcatcgcctgcaagagatcaagcggttctttgaagattataagaagaatgagaataaagaggttgctgtcgatgcattcttgcctgcgaccacagctcgagaggccattcagtactccatggatctgtatgcgcagtatattttgcaaagcttgaggcagtagattggaagcaactatttatctgggcgtcttggaatgagtgtgattttaataagtcaaa

SEQ ID NO: 45003 - DNA, 288 bp, Zea mays
agaagctgagctccaggacatgatcaacgaggtcgatgctgatggcaacggcaccatcgatttcccagagtttctcaaccttatggctcgcaagatgaaggacaccgactctgaggaagagctcaaggaggccttccgtgtgtttgacaaggaccagaacggcttcatctcggccgccgagctccgccatgtcatgacaaatcttggtgagaagctaactgatgaggaggtggacgagatgatccgtgaggctgatgtcgatggtgatggccagatcaactacgagga

SEQ ID NO: 45004 - DNA, 286 bp, Zea mays
atcttttatgagcacaccatgtctctgaccgaagctctatgtgggttccaatttgttcttacacatctggacaacaggcagcttctgatcaaatcaaaccccggcgaagttgttaaacctgaccaattcaaggcgataaacgacgaggggatgcctatttaccagaggcccttcatgaaggggaagctctacattcatttcacagtggagttccccgactcgctggcgccagagcagtgcaaggctctcgagtcggtacttccgccaaagccttcgtccaagctga

SEQ ID NO: 45005 - DNA, 289 bp, Zea mays
agtcaatacagtgatcttctaaggctttttgaatatggaggttttcctcctgaagccaattatctattcttaggtgattatgttgatcgaggcaaacaaagtttggagactatatgccttcttcttgcttacaaaatcaagtaccctgagaacttttttcttctgaggggcaatcatgaatgtgcctcaataaacagaatatatggattttatgatgaatgcaagcgtcgatttaatgtgcggctatggaaggtcttcacagaatgttttaacactctacctgtggctg

SEQ ID NO: 45006 - DNA, 296 bp, Zea mays
gattccctctgctctttcgctaacgaaggtagccatggcggggagaggtaaggcgatcggctcaggcgccgccaagaaggccacgtccaggagctccaaggctggcctccagttccccgtgggaaggatcgccaggttcctcaaggccggcaagtatgccgagagagtcggcgccggcgcccctgtctacctcgctgccgtgctcgagtatcttgctgctgaggttcttgagctggccggcaatgcggcacgtgacaacaagaagacccgcatcgtaccgcgccacatccagctcg

SEQ ID NO: 45007 - DNA, 289 bp, Zea mays
atcaaatcagaccctggtgaagttgttaaacctgaccaattcaaggcgattaacgatgaggggatgccaatttaccagaggcctttcatgaaggggaagctgtacatccatttcacggtggagttccccgactcgctggcaccagagcagtgcaaggctctcgagacagtacttccaccaaggccttcatccaagctgacagacatggagatagatgaatgcgaggagacgactatgcatgatgtgaacaacatcgaggaagagatgcgcaggaagcaagctcacgctg

SEQ ID NO: 45008 - DNA, 286 bp, Zea mays
gtgcaaaggagattaaagttggtgaggtcattgctataactgtggaagaagagggtgacattgagaagtttaaggattataagccgtcatcttcagctgaacctgtagctcctgctgaatcaaaggctcaaccagaaccttcacaaccaaaggtggaggaaaaaaagcttacccaggctcctgaggttaaggccccaaagattgaagaagcttctcaatctggagatcgcatatttgccagccctcttgctcgtaaactggctgaagataacaatgtcccactatc

SEQ ID NO: 45009 - DNA, 292 bp, Zea mays
  unsure (1)..(292): unsure at all n locations
cccacccacccactcgcttcagccgcctccgccgcgcgtacaagcaggtggagacaggatgccggctggccacggcctgcgctcgcggacgcgcgacctcttcgcgcgccccttccgcaagaagggctacatcccgctcaccacctacctccggacctacaagatcggcgatttctccgangntaaggtgatctgtgccgtccacaaggggatgctgcacaagttctaccacggccgcaccggtcgcgtctggaacgtcaccaagcgcgccatcggcgtcgaggtcaacaag

SEQ ID NO: 45010 - DNA, 289 bp, Zea mays
gagcagccaagcgaggaagcgaagacccatttccccgagcgcaagagtaccatggcggcggcggcagtttatggcggcctcaaggggaagcttggcgtcgaggatgcccccgagctgcagctgaatcgcatccgcatcaccctctcatccaagaacgtcaagaacctggagaaagtttgtgcggatttggtaaagggagccaaggataagcatctgagggttaaggggcctgtcaggatccctactaaggttctccacatcaccacccgcaaatccccttgcggtgaag

SEQ ID NO: 45011 - DNA, 287 bp, Zea mays
accagcacctgccctcctcgccgtcgccgcctccctccgcgcgaccgatctaccctccgccgccaccatgtcgctgatcgccggggaggacttccagcatatcctgcgtttgctgaacaccaacgtggatgggaagcagaagatcatgttcgccatgacctcaatcaagggtgtcgggcgccgcttctccaacatcgtctgcaagaaggccgacatcgacatgaacaagagggccggcgagctgacgcctgatgagctggagcgcctgatgacggtcgtggccaacc

SEQ ID NO: 45012 - DNA, 292 bp, Zea mays
aagctgcagctggtgatgaagagcggcaagtacaccctgggctacaagaccgtcctcaagacgctgcgcaactccaagggaaagctgatcatcatcgcaaacaactgccctccacttaggaagtctgagattgagtactacgccatgctggccaaagttagcgtgcaccatttccacggaaacaatgttgatcttggcactgcctgcgtgaagtactacagggtgtgctgcctcagtatcatcgacccaggtgactcggacatcatcagtaccacccctggcacccagtgag

SEQ ID NO: 45013 - DNA, 294 bp, Zea mays
gttccgtgtccgcgtccagtgtgtccgctactccgctccccctcagtcctcagttcctcacctagcggtagcgtgcgcgcgggagacgtagatggcggcttcggaggcggcagcggcggcggcaacaccggtgacgccgacagaggggacggtgatcgcgatccacagcctggaggagtggagcatccagatcgaggaggccaacagcgccaagaagctggtggtgattgacttcactgcaacatggtgtcctccgtgccgcgccatggctccaatttttgctgatatggccag

SEQ ID NO: 45014 - DNA, 289 bp, Zea mays
gggaatgggaagaggctcttagagtcgcttacatgcttagcacgcatgatctggttgaagctgtcagagacgcagcttcagaatgcgccgcatcactgatagccgagtacctcgaaggactgttgaagatcggtaaatatgcagcacgctatttggccgtacggcagaggagattgtcgctcgctgccaaactccggtcggaagatcggtttatggatgttgaagatgacagcgtttcagaaacgagcactagcttcagtgaaatgagcgcatataccacaagggagtc

SEQ ID NO: 45015 - DNA, 284 bp, Zea mays
taccaacaaggacatcacagcacaaatcatatctgctagtatagcaggtgatatggttcttgcttctgcttactcgcatgagttgccacgatatggtctcgaagttggtctgaccaactatgcagctgcctactgcactggccttctgttggctcgccgtgtgctcaagacccgtggtttagataaggaatatgagggcaatgttgaggccactggtgaggacttctctgttgagccagctgatgagaggaggcctttccgtgctctcttggatgttggcctta

SEQ ID NO: 45016 - DNA, 294 bp, Zea mays
tctctatcgactggcgacgactccgccaccgccgccgctctacgcgagacgcccaggtcttcgccaacgacgagcatccgggttagagaggaagaaattgcaaccgaaacaatggcggcagattccggcgctcgcagacaaccaagcttcaccaaggtcgaccagctgcgccctggaacccacggccacaacctcatcctcaaggttgttgactccaagatggtcgtccagagaggccgcgagggagggccccagggaagacagatgaggattgcggagtgcttggttggtgat

SEQ ID NO: 45017 - DNA, 172 bp, Zea mays
agagcagcggcgcgggcggacaaggagcaggcggaggaggagctgtgccaagccacaatgggtatctcacgcgactcgatgcacaagcgccgtgccaccggtggaaagcagaaggcctggaggacgaagcgaaagtatgagcttggtcgccagccggccaacaccaagttgt

SEQ ID NO: 45018 - DNA, 291 bp, Zea mays
gatgatgatgaccttgatctttttggtgatgaaactgaggaggacaagaaggcagctgatgagcgtgctgccgctgccaaggcctcttctaaaaagaaagaaagtggtaaatcctccgtccttatggatgtaaaaccatgggacgatgagactgatatgaagaagctggaggaggctgtccgcagtgtccagatggagggtctgacttggggagcatcaaagcttgtgcctgttggatacggcatcaagaagatgactatcatgttgacaattgtcgacgatcttgtgtcc

SEQ ID NO: 45019 - DNA, 289 bp, Zea mays
ccgactatttcgggtaaaccaaaaagcgagtccaaggacaaagagaagaagcataaaaagcacaaagacagagagagggacaaagacaaggaacataagaagcacaaacatcggcataaggatcggagtaaggacaaagataaagacaaagacaaggataagaaaaaagataagagtggtcatcatgattctgattcaaagaaacatcatgaaaagaagaggacgcacgagggaactggagattcagcagatgtgcataagcacaagaagagtaagcacaagagttcca

SEQ ID NO: 45020 - DNA, 125 bp, Zea mays
ggagaagcttacagatgtggcagagtgtttagctgggaggatcatgaacaagagaacatcgtcgtcgaagctattcttttatgatctttatggtggtggcatgaaggttcaagtgatggctgatg

SEQ ID NO: 45021 - DNA, 260 bp, Zea mays
atttcagatttcagagcgcgcaagaacccttttgaccaccggcgccgccgccgcgaagccaagccaaactgagtaagcagctatggagggatccgccgccgctccgctccgcacgcgcatctgcatcatcgggagcggtcccgctgcgcacacggcagccatctacgcggcccgcacggagctcaagccagtgctcttcgagggctggatggccaacgacatcgccgcgggcgggcagctcaccaccaccaccgacgtcg

SEQ ID NO: 45022 - DNA, 262 bp, Zea mays
gccgaaagtaagcctcagttccgccggcgtgcgaggggttcgatctgggttagcctctcacgatgccgccagcccccaagtccggcgacgccctcttcgccagcgtggatcgcgtcaatgcggagtgattcacgctcacgtacggcgccatagtgcggcagtgctcacggatctggaggaggtcgaggaggtcaacaagcagctcgatcaaatgggttacaacattggaacacgattggtcgatgagttcttagcaaagtca

SEQ ID NO: 45023 - DNA, 234 bp, Zea mays
cggggaacagcctactattccctgctacctgtcgaaggaggcacaagatttcattggccagtgtgtaagagatgatcctgagagccggccttctgcatcacaacttttggagcacccattcgttaacagaccactgcgggcttcatttgaatcttcatctcccccagccatctgattgtactattgatatagtggggagaatctcgttgagaggccaatgcgcaggtcacgtgt

SEQ ID NO: 45024 - DNA, 271 bp, Zea mays
ctgcacctgatgcaggacgagctgtcgcagctcccgcatgcgaagaaggacagcaaggtcgagtcgaagcagagcaaggggaacgcgctgaacgagctccttgagctcaggagctgctccagctgccttttcttcgagtgcagaaaacagaaggatctttacctttggatggagaagtctccaggaggaccatcagtagaatttctagttaatgctgatcacaccatggaggagttgaagcttaccggtaaccatctgaaagggacacgcc

SEQ ID NO: 45025 - DNA, 195 bp, Zea mays
cagagttacaatcctgacagacaagtttgggcaaccaaaaggattagcatacgaggaatttgttgaagttgaagctgatcaggaagctatcaagttgaacgagtcagagtagcacggtcgccaactcaaggaggcaccgaagaggactaacgttcctgggatgaagcaaccccgcggacgaggtttcaatccgta

SEQ ID NO: 45026 - DNA, 258 bp, Zea mays
atttggtaatttcgaaggaacaagggcattcagtgatgtcgttgctgaagcaaaagacttgggatacactgaacctgacccaagagatgatctatctggaactgatgttgcccgaaaggtcattatccttgcaagggaatcaggtttgaggcttgaactttctgatattcctgtgaagagccttgtgctagaaacacttgcagcatgctcgtcagcagatgaattcatgcagaagctaccatcctttgacgaggactg

SEQ ID NO: 45027 - DNA, 238 bp, Zea mays
gaaaagccagaatcaatgaatgcatttgctcttgtttcgaggtcacagggcttcaaccttggaaatttgtttgagaaggagatgatgggaatggtaaagagggaaacatctttcacgtctcaatgtacagcacaggagatcatgtcaaaaatagaggaagcatgtgggccacttggtttcaacgtgcggaaacaaaattacaagatgagattgaaaggtgacaaatccggaagaaaag

SEQ ID NO: 45028 - DNA, 260 bp, Zea mays
gccagggcatgaaaactggaatgtactatctacgcacacgagctgctgctgatgcgatcaagttcacagtggataccacgcttctgaaggagaatgggaacggggtattgcccctatttttctttcgttcagttctgcaatgttttttttcctcaggttactagggacacggctcaccatgaacaccacttgcacacgcaggttagcgatggaaagcacgcggaggaagacgtagacgctaaaatggcacagatggtctg

SEQ ID NO: 45029 - DNA, 217 bp, Zea mays
ctggtctcgccttccgaggaaactcaccagcccaccacagacccgagcggaagaagccatgtccgggcgcggtaagggaggcaaggggctcggcaagggcggcgcgaacgatcaccggaaggtgctgcgcgacaacatccagggcatcaccaagccggcgatccggcggctggcgaggaggggcggcgtcaagcgcaatctcggggctcatctacga

SEQ ID NO: 45030 - DNA, 250 bp, Zea mays
tctcactgtacaagctgccggaaggcaagggcaggatgacacaactcctttcggaggcgagagattctcaggcagccaagatggaggaaaccgccgacccgcaatgtctggaccttcaggtcggagatgcacgttttgagttcgaggcgaagacgatccagagaatggagctccttgttctaaccaccctcaactggaggatgcaggccgtgacacctttctcctatgtggattgcttcctaaacaggct

SEQ ID NO: 45031 - DNA, 255 bp, Zea mays
gtatggagaatggaacacaacaagcttgtacagaaaagctttgctcgtttgtactacaatgatttcttgagaaactgcagcacggttgatgaagagtcgagggaaaagttggcaccgtatgcaggcttgtcatctgaagaaagctaccagagtcgctaccttgaaaaggcatctcagcaagttgcaaagaacctgtacgagtccaaggttcagccaacaacattgatcccaaagcaagttgggaatatgtataca

SEQ ID NO: 45032 - DNA, 275 bp, Zea mays
aaagccacccaagtcagggcatcttgatcctctgcattctgctgcaactcgcatacagaataagttcagaggatggaaggggagaaaggagtttcttcttattaggcagcgaattgtgaagatccaggctcatgtgcgaggtcaacaagtgaggaagcattatcggaaaatagtttggtctgttggcatcgtggagaaagttatattgcgttggaggcgtagaggggctggcttacgtgggtttcggtctacagaaggttcagtggagagcagca

SEQ ID NO: 45033 - DNA, 275 bp, Zea mays
cgcttctcttccccctcttatcaagtcctcctcgggttagggttccttagggttttgtggaggggcgatggcggcggctgatgtggagtaccgttgcttcgtcggcggacttgcctgggccaccagcaacgagtcgctggagaatgccttacgcctgcctacggcgagatcctcgactccagcgtcatcaccgactgggagacggggaggtcacgcggcttcggcttcattacgctgctctccgagaactccatgcgcgacgctatcgagaccat

SEQ ID NO: 45034 - DNA, 277 bp, Zea mays
ccggactggttcctcaacaggaagaaggattacaaggacggcaggttctcgcaggtcgtctccaacgcccttgatataaagctcagggacgaccttgagaggctcaagaagatcaggaaccaccgtggtctgcgtcactactggggcctccgcgtccgtggccagcacaccaagactactggtaggcgtggaaagaccgttggtgtctccaagaagcgatgagctctatatcaccctgagaaatcttggccgcactaccgtgttggtttgtgtccaa

SEQ ID NO: 45035 - DNA, 273 bp, Zea mays
ggcggcggaacggaagcggaagcggaaggaagtaggcggccaccatggtgaagggacgcacggggcagcgcgtcaggctctacgtccggggcaccatcctcggatacaagaggtccaagtcgaaccagtacgagaccacgtcgcttgtgcagatcgagggggtgaacaccaaggaggacgtcgcgtggtacgctggcaagcgcatggcgtacatctacaaggccaagaccaagagcagtgagacccgctacaggtgcatctggggtaaggtca

SEQ ID NO: 45036 - DNA, 234 bp, Zea mays
ttccaacaaggacatcatagcacagatcatgttcgctagtatagcaggtgacatggttcttgcttctgcttactcgcatgagttgccacgatatggtctcgaagttggtctgaccaactatgcagttgcctactgcactggccttctgttggctctccgtgtgctcaagacccgtggtttagataaggaatatgagggcactgttgaggtcactggtgaggacttctctgttga

SEQ ID NO: 45037 - DNA, 247 bp, Zea mays
gtgttgagttggatggtgtccttcgcacaaagcctcttgaaattggaattgtaaatggcatggatgtttatgaatgggatccttcaacagataagtacaccatcgtgaaatatgttgcaacaacggtaactgaagcaaaggctctcaataaagagaggttgcaagctgaagttggattgcctgtggactcgagcatccctgttatagtttttgtcgggcgtcttgaagatcagaaagggtctgacat

SEQ ID NO: 45038 - DNA, 277 bp, Zea mays
cgtcgatccacgcaaccatgtcgaggaggaagaccagggagcccaaggaggagaacgttacccttggacccactgtccgtgaaggagagtttgtctttggtgttgctcacatctttgcatccttcaatgacaccttcattcatgtcactgatttgtctgggagggaaactttggttcggatttctggtggcatgaaggttaaggctgatcgtgatgagtcgtctccttatgctgctatgcttgctgcccaagatgttgcacagcgttgcaaggagct

SEQ ID NO: 45039 - DNA, 263 bp, Zea mays
caaggatgccatctcccagattgttggggatgccaaggagaagaataggaagttcactgagactgtggaacttcagattggtctgaagaattatgatccacagaaggacaagcgtttcagtggctctgttaagttgccccatatccctcgtcccaagatgaaggtgtgcatgcttggtgatgcccagcatgttgaggaggccgagaagatgggacttgactacatggatgttgaggctctcaagaaaatgaacaagaacaaga

SEQ ID NO: 45040 - DNA, 256 bp, Zea mays
ttttcttgggcgttcttcggcttcgttgtcacaaggttcgagttcgtcaccgtctagtacgactgtgcgagggaggaagaggcgaggagaagatgcagatcttcgtgaagaccctgacggggaagaccatcaccctcgaggtggagagcagcgacaccgtcgacaacgtcaaagccaaaatccaggacaaggaagggattcccccagatcaacagcgactgatattcgctggcaagcagctggaggatggacgcac

SEQ ID NO: 45041 - DNA, 277 bp, Zea mays
ggggaaaaccgggctatgagcacctgagtgatccgctgcatatcttgatagaggccgagttccctgccagtatcatcgatgcaaggctgagacaagcacaggagattatagaagaattgcttaaaccagtggacgagtcccaagatctctacaaaaggcagcagctcagggagctggcaatgcttaactcaaccctgagagaggacagccctcatccggggagtgtctctccattcagcaacggtggcatgaagcgtgcgaaaacaggacagtagag

SEQ ID NO: 45042 - DNA, 276 bp, Zea mays
agcaagtatatcaagaattgtcatgttaactgaggcgctatttgaggtgttggatgaaattcaccgtcaacctgcatcactttcactttccatggtgtctgttcaggctcctgaatctgtagttgattcgttgccatgtgccatatctgcctaaccgaatatgaggacggagaccagataagaacccttccgtgcaagcacgagttccacctgcaatgcgttgacaagtggctgaaagaaatacacagggtgtgccctctgtgccgtggagacgtc

SEQ ID NO: 45043 - DNA, 299 bp, Zea mays
agcaagaaaactagaaaaggctcctcccgaccgcaacgcccctcatctccctcgaccccgacatccccgacccgatggcgcccaaggcggagaagaagccagcggagaagaagccggcggccgaggagaaggcggagaagacgaccgcaggatagaagcccaaggccgagaagcggctgcccgcgtccaagtcctccggcaaggacggcggcgagaagaaggggaagaagaaggccaagaagagcgtggtagactacaagatctacatcttcaaggtgctgaagcaggtgcaccccgac

SEQ ID NO: 45044 - DNA, 292 bp, Zea mays
tcgatccctctgccctagcaccagccatggcgaacgcagcttcttctcagtttcctactcgccgcctccgcgccgctaatcgtcgccacggccaagaaatccggggacgtgtcggagctccagatcggcgtcaagtacaagccggaatcatgcagcattcaagctcacaaaggtgacaaggttaaagttcactaccgtggaaaacttactgatggaacggtttttgattcaagctatgaaagaggtgacccgattgaatttgaattgggcactggacaagtgatcaaaggat

SEQ ID NO: 45045 - DNA, 289 bp, Zea mays
cgaggaggcaaatagctgtggcaacataccttatcgataaactagcccttagggctggcaatgaaaaggacgacgatgaagctgatactgttggttgctgtacgctgaaggttgataatgttacatgtatgcctccaaatcagattcagtttgactttctgggtaaagattcaataagatactttaacaccgtagaggttgaagagcttgtgtacaaggcaattgagggtttccgtgctggaaagaagccaggacaagatctatttgacaagattgatacatctaggct

SEQ ID NO: 45046 - DNA, 306 bp, Zea mays
  unsure (1)..(306): unsure at all n locations
ttcactgaaccgccgtatggcccagttccaccatctgaatctgctcaagcttggcaacaaccgaacacgtacgatgctgctgttcaagctcagatggcagctgctggatatcaaggtgactggtcaagctatgtgtatgcggaacagcagttgggttatccagaacagtatgtgcagcaaagcacccaggaatacgatgtgttagcggaccctagtatatcccaggatccgaggttcatgactcaggcggacaaggatcggggtttaggttctgttttcaaacgtgacgatcanaggcttaatcag

SEQ ID NO: 45047 - DNA, 245 bp, Zea mays
gtctggatggttccaagattatcaagacggtatctaaaacacttccccacaatctcagctgagtagacaacatcctccaagatgaagttgtggggaagcgtgtcagatacgctttggatggttccaagattatcaagattttattggacccaaaggagaggaacaacactgaatacaagctggagacactcagctgggtctaccgcaggctgtgtgggaaagatatggtctttgagtaccctatg

SEQ ID NO: 45048 - DNA, 241 bp, Zea mays
gaagaaatgctggaggggagggcgcgggtggaggacacggacatgccggcgcggatgcaggacgcggcgacctccgcggcctcgcgcgcgctcgacctcttcgacgtcgccgactgccgcgccatcgccggccacatcaagacggagttcgacaagcggtacggcgtcgggtggcagtgcgtggtgggcgccaacttcgggtgcttcttcacccacagcagcggcaccttcatctacttct

SEQ ID NO: 45049 - DNA, 310 bp, Zea mays
  unsure (1)..(310): unsure at all n locations
atgaactgtttgtgtcacccatgttcctctgctccttggcactttctgatgcatgctcaaatgcttaagaaagactcatagaagcgactcctattcctatgccaggtcattgagataccaaggggcagcaaggttaaatatgnacttgacaagaaaactggactgctcaaggtggaccgtgtgctgtattcatcagttgtttaccctcacaactatggattcattcctcgcacgctttgtgaagacagtgatcctttggatgtactggttataatgcaggagcctgttatcccaggctgtttcctacgtg

SEQ ID NO: 45050 - DNA, 287 bp, Zea mays
cgtgatctcaacccaaggcgtgcctccgctccggtcacccgtcgctccacgcaaccatgtcgaggaggaagaccagggagcccaaggaggagaacgtcacccttggacccactgtccgtgaaggagagtatgtctttggtgtcgctcacatctttgcatccttcaatgacaccttcattcatatcactgatttgtctgggagggaaactctggttcggatcaccggtggcatgaaggtgaaggctgaccgtgacgagtcgtcaccttacgctgctatgcttgctgct

SEQ ID NO: 45051 - DNA, 291 bp, Zea mays
ctcaagaatccaaataggccaattgccagcttcatattctctggaccgactggagttggcaaatcagagcttgcaaaggccctggcggcctactactttggctcggaggaggctatgatcaggcttgacatgagtgagttcatggagcggcatactgtctccaaactcattggatcacctccaggttatgttgggtacactgagggaggccaactaactgaagcagtccgtcgccgcccgtacacagttgttctctttgatgagattgagaaggcacatccagatgttttc

SEQ ID NO: 45052 - DNA, 296 bp, Zea mays
  unsure (1)..(296): unsure at all n locations
gccgatcgccgtccccgaccgcagtgcaggactgaggatgagtgaagaggataaggctgctgcttctgctgagcagcctaagagggcccctaagctcaatgaaaggatcctctcctctctgtccaggaggtccgtagctgctcatccatggcatgatctcgagatcggtcctggtgctcctgctgtattcaatgttgttgttgagatcacaaagggaagcaaagtcanatacgagcttgacaagaagactggactgattaaggttgatcgagtcctttactcatcagttgtatacc

SEQ ID NO: 45053 - DNA, 273 bp, Zea mays
gggttggcttctcctccccctccggttcgggttcgggttcgtgaggttctccggggttcggtttcgtgggtgggcggatcgagatggcggcgtcggatgttgagtaccgctgcttcgtcggcggcctcgcctgggccacggacgaccactccctccacaacgccttcagcacctacggcgaggtcctcgagtccaagatcatcctcgatcgggagacgcagaggtcccgcggcttcggcttcgtcaccttctccacggaggaggcgatgcgga

SEQ ID NO: 45054 - DNA, 281 bp, Zea mays
ggagttgtgcgctaaacaattgatgcatttccttccttggaaaattgattaccatcccttgaaaccattttataaaaaggatttttatgatgcttagtcttgctttagaaaaacaaaatgttttgttttaaaaacaaaaggtgatgcttcatagtggatgggaatttttacaaagaaaagactgatgatggtggatccatcacggccgtgatgggttcaacatctgaaaagatgtacctctgccagttaccaaactttgggttttaaataataaagctgag

SEQ ID NO: 45055 - DNA, 269 bp, Zea mays
gggggaggagaggacaggaggccaagcagcagcggcagagacgcaggcgccgcaatgcagggctccaggaccaaatctggctccgctgaggcgaagggcaacggcaagacgaaatcaaagaagaagggtggtgggaagaagaagaaaggcaagaaaggagatgcagcagaagcagatcccatggaggaggcgacaaacggtgctacaagccaagaataattctgatttttggaattactgccaccagctgttttcatgtttcttcgctg

SEQ ID NO: 45056 - DNA, 284 bp, Zea mays
cgttccccaccccgaccgactgctccccctcccccgcaccagcctcaagccctcaaggcctcaaggcatcgccggtcgccgcaacttcgctgaggaagcccgcacccctgcccggatccgatggccaacagcaacctcccgcggcggatcatcaaggagactcagcggctgctcagcgagccagcaccggggatcagcgcgtcgccctcggaggagaacatgcgctacttcaacgttatgatccttgggccggcgcagtcgccctatgaaggtggagtttttaa

SEQ ID NO: 45057 - DNA, 281 bp, Zea mays
ggcggcggaacggaacggaagcgccaggaagtaggcggccaccatggtgaagggacgcacggggcagcgcgtcaggctctagcgtcggggcaccatcctcggatacaagaggtccaagtcgaaccagtacgagaccacgtcgcttgtgcagatcgagggggtgaacaccaaggaggacgtcgcgtggtacgcatggcaagcgcatggcgtacatctacaaggccaagaccaagagcagtgagacccgctacaggtgcatctggggtaaggtcacccgcccg

SEQ ID NO: 45058 - DNA, 281 bp, Zea mays
ctcgagccgccaaatccacacgggaactccatccgtgacagtgctaatatgtatgcaatcttgctcgccaacgagcttatgagcatagagttgcggtggcaagatcagcgtgacactttggaactgatcctgggggtgtgggtggagatgttgttgtatgctgctgaccattgcagccaagagtcccatgccaggcagctcagtaatggctgcgaattcatcaccatcgtgtcgttgctggcacaccacttcaagtactactctggggccttcagggacgc

SEQ ID NO: 45059 - DNA, 280 bp, Zea mays
ggactcacatctctatggtcgtaatagagaaacattggagtggactgcacggcataagattgcagttggtgctgctcgtgggctgcggtacctccacgaggaatgtagggttggctgcataatccatcgtgacatgagaccaaacaacatccttgtcacacatgatttcgagccactggttggagatttcggcctggcacgatggcaacctgatggagacatgggtgttgaaacaagagttattggcacagttggttatctggcacctgaatatgcgcag

SEQ ID NO: 45060 - DNA, 275 bp, Zea mays
gccattggcattgcgagaggggttcagtttctgcataatctgactgctcctgggttcgtacagaacaatctcaacatagaacatattctgctggacaagaccctcacgtctaagatcagcaacttcagtcttccaatgatatcaactagcaagaacggcaagattctctcagagaccccatttgctgtccatgaagacaatgatatcggcagtgctcagaacgcggcacaaggtgacaaggaagacatctaccagattggcctaattctcctgga

SEQ ID NO: 45061 - DNA, 277 bp, Zea mays
cacttccgcgccgccacccccttcaggtaaggaagaggaggagggcaggatgtcgcaccgtaagttcgagcacccgaggcacggctccctcggcttccttcccaggaagcgctcctcccgccaccgcggcaaggtgaagtcattccccagggatgaccccaagaagccttgccatctcactgccttccttggctacaaggctggcatgactcacattgtccgtgaggttgagaagccaggatccaaactccataagaaggaaacttgtgaggctgtt

SEQ ID NO: 45062 - DNA, 275 bp, Zea mays
gtgacaacatgattgagaggtccaccaaccttgactggtacaagggcccaaccctacttgaggctctggacttgatcaatgagccaaagaggccttcagacaagcccctgcgtctcccccttcaggatgtgtacaagattggtggtattggaactgtccctgttggacgtgttgagactggtgtcattaagcctggtatggttgttacttttgggcctactggtcttactactgaggttaagtccgttgagatgcaccatgaggctctccaggag

SEQ ID NO: 45063 - DNA, 277 bp, Zea mays
cttcgacctacagggttccgaacatgaaattcaatgtcgctaaagtcctgcaatcacttgtaccaatccttgatcaatctgttgtggagaagacagtgaaaccatgcttagttgagctcagtgaggacccagatgtagatgtaagatactacgcacaccaagcccttcgggcgtgtgaccaaatggtgatatctagttgactagcctgtccaggaattagcaaatgagatacatattggtctattctttttgaacattttaaagtgttatgtagtct

SEQ ID NO: 45064 - DNA, 275 bp, Zea mays
aatcggatctccaggccggcagaagttgagcggactgactggtcactgtagttcgatcgaatccgagtagggctgatacagttcgattcggcgggaggcatggcgtccgaaaagcacttcaagtacgtcatcctcggcggcggcgtcgcggcggggtacgcggcgcgggagttcgccaagcagggagttaagcctggggagcttgcaatcatctccaaggaggctgtggctccttacgagcgtcctgccctaagcaaaggttacctctttcctac

SEQ ID NO: 45065 - DNA, 273 bp, Zea mays
  unsure (1)..(273): unsure at all n locations
gcctgtcgctggcgtcgccggtcgccgccgctcgattgnctccggctgaatatcccttgccccataaggcctgaccttgaaagcctcgccacttgatcccggcagcggcggaggggagggcgatgccgaagcggacgacacacacctactcgagcgaggacgcactgccggagagccccgagtccgaccttttcgtatactactgcaagcactgcgcctcacatgtcctcatcaccgataccctattgcagaaaatgcccaagcggaagactg

SEQ ID NO: 45066 - DNA, 268 bp, Zea mays
cgccctctcgctccagccgcttcacagcgccgccgctcgcctctccgaccgccgcgagaatgccgttcaagaggttcgtggagatcgggcgcgtggccctggtgaactacggcaaagactatggccgcctcgtcgtcatcgtcgatgtggtcgaccagaacagggcacttgtggacgcccctgatatggtcaggtgccagattaacttcaaacggctctcacttactgacatcaagattgacatcaaacgcgttcccaagaagtcaac

SEQ ID NO: 45067 - DNA, 270 bp, Zea mays
ctcgagccgactgatggctacatccttgagggtaaagagctcgagttctacatgacgaagctccagaggaagaagggcaagggtgttgcatcttagagcattcttttagctagaactgcaaaatatcttctacttgggggattttgttgttagtctttatgcatatcatttgcggacctgatgaacacttcataagtgaatcaactctcgattctaagaattgataattttcacatgcggtggttgtaattgtgatatttaggtttgcta

SEQ ID NO: 45068 - DNA, 269 bp, Zea mays
ccaccatcactctctctctctggtgtgtattgcaggcagcaccgttggtctcgtggagggacagaagacgtggtgcatcgccaagccgtcggcgtcgaacgagatcctggcgcagaacctggactacgcgtgctcccaggtgagctgcgccgtgatccagaagggcgggccgtgctactacacggacagccccgtgtcccgcgccgccgtcgccatgaacctctactacgcctacagcggcaggcacccctggaactgctacttcaaca

SEQ ID NO: 45069 - DNA, 268 bp, Zea mays
cggaggacgtcttctccttctggctgaaccggagcccggacgcggacgcagcgtccggcggcgagctcgtcttcggcggcgtcgaccctgcgcacttcagcgggaaccacacctacgtccccgtctcccgcaaggatactggcagttcgacatgggggaccttctcatcgacggccactccaccggtttctgcgccaaggggtgcgctgccatcgtcgactccgggacttccttgctcgctggcccaacggccataattgcccaggtg

SEQ ID NO: 45070 - DNA, 270 bp, Zea mays
gcgaaaaaggataggaatcctcttgtgtcctggccgtcgccgtcgctgcgtcgttccagatttggggatagaaatccggcaccgagattcgagtcgaaaaggacatcatttgctagatggcgcgtaccaagcagaccgctcgcaagtccactggaggaaaggctcctaggaagcaactcgctacaaaggcagcccggaagtctgcacccacaactggaggagtgatgaagcctacccgttaccgcccagggactgttgctcttcgtgaga

SEQ ID NO: 45071 - DNA, 274 bp, Zea mays
caaaaagaagacaagggttgtgacagacacgctaaatccaatatggaaccagacatttgatttcatggtagaagatgcactgcatgatttgctcatggtggaagtatgggaccatgatacatttggaaaggattacatagggaggtgcatcttgacactgacgagagttatactcgaaggtgaattccaagatacctttgtactgcaaggtgccaaatcgggaaaactaaacttgcatttcaagtggacgccacagccaatctatcgtgatcgt

SEQ ID NO: 45072 - DNA, 277 bp, Zea mays
aggagctcttcataaaaagagctccagcacaggttgtcgaggccatgcgccaaacagtgactaatatgatgggcactttaccaccacaatttttcgctgtaactgtctcaacggtcgctgaaaatctggctcagcttatgtacagtgtcctaatgactggatacatgtttaggaatgcacagtaccgtctggaactgcaacagagtttggagcagattgctcttcctgaaccaaaagaagaaaaggattacgctcctggaactcagaaaaaggtaac

SEQ ID NO: 45073 - DNA, 279 bp, Zea mays
cacacactcgagaactccatttcgatctcatttgaaatcaacccatcctcgtttcctccgtctagcagcctctcaccctcatggccaagatcaagatcgggatcaatgggtttggcaggatcggaaggctggtggccagggtggccctgcagagcgacgacgtcgagctcgtcgccgtgaacgaccccttcatcagcaccgattacatgacctacatgttcaagtatgacactgtgcacggacagtggaagcaccatgaggtcaaggtgaaggactcca

SEQ ID NO: 45074 - DNA, 289 bp, Zea mays
cgccgcaagtccggcggcgtgcggttcaccatcaacggcttccggtacttcaacctggtgctgatcacgaacgtggccggcgcgggggacgtggtgcgcgcgagctggaaggcgtcgggcaccggggagtggctgcccatgtcgcggaactggggccagaactggcagtccagcgccatcctcgtcggccaggcgctctccttccgcgtcaccggcagcgaccgccgcacctccacctcctggaacgccgccccgcgggactggcgcttcggccagaccttcgagggca

SEQ ID NO: 45075 - DNA, 293 bp, Zea mays
agctctacgacgtctcctgggacgtcatcctcgtcgacggcccgcgcgggtacacggcttcgtcgccgggcaggatgtcggcgatattcacggcgggggtgctggcgcggacgcgggccggggagggcgtgaagacggacgtcctggtgcacgactacgagcgggaggtggagcgggcgtgctccagggagttcctgtgcgaggagaaccgcgtcgtcgagaccagcacgcggtcgctcgcccactttgtcgtgcgcggcggtagttctgcccgccgggacgccttctgctcc

SEQ ID NO: 45076 - DNA, 292 bp, Zea mays
ggaaattttcttgggcgttcttcggcttcattgtcacaaggttcgagttcgtcaccgtctagtacgactgtgcgagggaggaagaggcgaggagaagatgcagatcttcgtgaagaccctgacggggaagaccatcaccctcgaggtggagagcagcgacaccgtcgacaacgtcaaggccaaaatccaggacaaggaagggattcccccagatcaacagcgactgatattcgctggcaagcagctggaggatggacgcacgctggctgactacaacatccaaaaggagtca

SEQ ID NO: 45077 - DNA, 275 bp, Zea mays
gtgatgggcaggaccggctccaggggtcaggtgacccaggtcagagttaagttcttggatgaccagaaccggctcatcatgaggactgtcaaggggcccgtccgcgagggtgacatcctcaccctgctcgagtccgagagggaggccaggaggctgcgctgaagccctagcgttcttggtgggctcttgtttggtctttggtgtcttcgaatttgtgctatgtttgaacttctgtgaccctgtcttgagagtagtaagcctggtgataagattgc

SEQ ID NO: 45078 - DNA, 294 bp, Zea mays
gagagaggcgaggaaggagggagagagcacgggggcttgatcgaagatggatgccggagcaaaggtggtgaagaaggccgcggcggggcgtcgcggcgggggcggccccaagaagaagccggtctctcgctccgtgaaggccggcctccagttccccgtaggccgtatcggccgctacctcaagcagggtcgctactcccagcgtgtcggcaccggcgcccccgtctacctcgctgccgtcctcgagtacctcgccgccgagctcctcgagttggcggggaacgcagcgcggga

SEQ ID NO: 45079 - DNA, 288 bp, Zea mays
aattctgccgtctccaccgccgccgcagccagcgtcaccggagggatctgccgtctcccttgctccacgcgatgaacaccgacatcaccgcctcgactaagccggagtacccggtggtggatcggaacccggccttcaccaaggtggtcggcaacttctctgcgctcgactacatgcgcctctccaccatctccgccgtctccgtcaccgttggctacctctccgggatcaagccggggatccggggcccgtcgatggtcacgggcggcctcatcggggtcatgggag

SEQ ID NO: 45080 - DNA, 287 bp, Zea mays
gagatttggacaatgtattttgatgaacttcttccaagattggtgaaagaaggaagtgatggtaatgctggatccaatgctctttgtgacacaacctgcttgcaggcactctccaaaaggatccactatgggaagtttgtggcagaggccaagtttcaagagtcccctgaagcttacacgccagccataatagcccaagaccgtgatcaactcatgcgccttctcacatatgaaacggtggagcgtgctgtcgaacacagggtggaagccaaagccaagatcttcgg

SEQ ID NO: 45081 - DNA, 285 bp, Zea mays
gtgaatatctcagattcttcttcagattcagatgatgaggaacatggaccaagtaaagaggactgcattcgtcagtttaaggtgatgctaaaggaacgaggagttgcaccattttcgaagtgggagaaggaacttccaaaaatagtttttgacccacgctttaaggctattcctagtcactcaacaaggcgggctatatttgaccactatgttcgcacacgtgctgaagaggagcggaaagagaaaagagctgccctgaaggctgcagtagaggcgtataaagaa

SEQ ID NO: 45082 - DNA, 280 bp, Zea mays
ctcaaatcagaccctggagaagttgtcacacctgaccaattcaaggcgattaacgatgatgggatgccaatttaccagaggcctgtcatgaaggggaagctgtacatccatttcacggacgacacaaccgactcgctggcaccagagcagtgcaaggctctcgagacagtacttccaccaaggccttcatccaagctgacagacatggagatagatagatgcgaggagacgactatgcatgatgcgaacaacatcgaggaagagatgcgcacgaagcaag

SEQ ID NO: 45083 - DNA, 280 bp, Zea mays
gaatgacttctttataactggagaatcttatgctgggcactacattccagcatttgcaagcagagttcaccaaggaaacaaagcaaacgagggcattcatataaacttgaagggatttgctatcggcaacggtctcactgatccagaaatccaatacaaagcctacacagactatgcgctggaaatgaatcttatcacaaaatccgactacgaaaggatcaataggttcattccaccatgtgaatttgcgattaagatgtgtggtgctgacgggaaagca

SEQ ID NO: 45084 - DNA, 277 bp, Zea mays
gacgtggtctacaagtagctgttgctggtattcccaagactattgataatgatatagcggttatagacaagtcatttggttttgatactgctgtagaagaagcccagcgtgccattaatgcagctcatgtggaagcttcaagtgctgaaaatggaataggtttagtgaagcttatgggtcgctatagtggatttattgccatgtatgctactcttgcaagcagagatgtggactgctgtttgattcctgagtcacccttttatttggaaggggaggg

SEQ ID NO: 45085 - DNA, 276 bp, Zea mays
aattcggctcgagcaagatccaagaactcgctcgcgcgcacggacagggccggaacccagggatcgagactgaacagcagtccgagacgccatgaacgtggaggaggaggtcgggaggctcaaggaggagatccataggctcggccagcagcagcccgatggctcttacaaggtcaagtttggcgttctcttcaacgacgatcggtgtgcaaatatctttgaagcactagttggcaccttgagggccgccaagaagaggaagatcttgacctacga

SEQ ID NO: 45086 - DNA, 267 bp, Zea mays
aaaactggagctgcccaagaagctataaatggtattagacgggctagcaaggccatgactgagcaagaagcccggcaaattcttggtatcagtgaaaattcgacgtgggaagagattgtccagaagtacgacacaatgtttgagaggaataacaaaaacggcagcttctatctccagtcaaaggttcatagagcgaaagaatgcctggaacctttatatcaaaagcctgatgtactgaactgagattttgcagacgccctagcttct

SEQ ID NO: 45087 - DNA, 289 bp, Zea mays
gtgatgtatatagctttggcgtactcataatggagatcatcactggtagatctcctgtagactacacaagagcagctggagaggtcaacttggttgagtggctcaagaccatggttgccgagaggaaagcggaggaagttctggacccaaagatggctgaaaagccttctcccaaaacgctgaaacgggcgctcctggtcgcgcttcgctgtgtcgaccctgatgcgaacaagaggcctaaaatggggcatgtgattcacatgctcgagatggacgatctcctcttccg

SEQ ID NO: 45088 - DNA, 296 bp, Zea mays
ctacaccaacctcaacaggcttgtgtcccaggtcatctcatccctgactgcttccctgaggttcgatggtgctctgaacgttgatgtgaacgagttccagaccaacctggtgccctaccctaggatccacttcatgctttcgtcctacgctccagtcatttctgctgagaaggcctaccacgagcagctgtccgtggccgaaatcaccaacagcgccttcgagccatcctccatgatggccaagtgcgacccccgccatggcaagtacatggcatgctgcctcatgtaccgtggtg

SEQ ID NO: 45089 - DNA, 301 bp, Zea mays
tccgcttccaagatgtcgaagcgagggcgtggaggttcggctggtaacaagttccggatgtcactgggtctaccagtggcagctactgtgaactgtgccgataacactggagccaagaacctgtacatcatttctgtgaagggaatcaagggtcgccttaacaggcttccttctgcctgtgttgttgacatggttatggcaaccgtgaagaagggaaagcctgaccttagaaagaaggtgatgccagctgttattgtgaggcagcgcaaccatggcgccgaaaggatggtgtctacatgta

SEQ ID NO: 45090 - DNA, 299 bp, Zea mays
gctctttgtcgcagccgagggcatgtacacgggccagttcgtctactgcggtcgccgcgccaccctctccatcggcaacgtgctgcccctccgcgggatccctgagggtgccgtcgtctgcaacgtcgagcaccacgtcggtgaccgcggtgtcttcgccagggcctctggggactacgccattgtgatcagccacaaccctgacaacggcacatcgaggattaagctgccctctggcgccaagaagattgtccccagcagctgccgtgctatgattgggcaggttgctggtggaggca

SEQ ID NO: 45091 - DNA, 272 bp, Zea mays
ggctcgacaactcctgagcactttctcaccgtccccgacaagacaatcgaagccgagatacggacatggactccaccggcaccggagcagggggtaaggggaagaagggagcggccgggcgcaaggtcggcgggccaaggaagaagtcggtgtcgaggtccgtgaaggccgggctccagttccccgtcggccgcatcgggcgctacttgaagaagggccgctacgcgcagctgtcggcaccggcgcccccgtctacctcgccgcagtcctcg

SEQ ID NO: 45092 - DNA, 278 bp, Zea mays
atggaattacttaatcaatcagatggagctggtgaagcattgttgaaaatgctctggcatcatccagatgctgttctgtgctgctcctttaaggagaaacctatgtttacgtttgcaaacaaggcagggctggacatgttagaaacatctcttgttgccctgcaagacctgacgctagacaagatcttcgacgagtcaggaaggaaagcactattctcagacatctcgaaactaatggaacagggctacgcgtacctgccgtcagcgtgtgcatgtca

SEQ ID NO: 45093 - DNA, 273 bp, Zea mays
ggctcgagtcggctcgaggtcgtcgttgagatgtttgagaaaatgtttacgaatacagaaattgtgttgttctaagacttttctgtagcgaccttgagaaatttcccttaagggcttgttcggttatttttactccatatggattggaggggattgatacggattggagaggattttgacttactgaggattgaaccccgctcaatccccctcaatccatatggattggggtagaaccaaacaagccctaagtgtcaacttcgtccatcgaga

SEQ ID NO: 45094 - DNA, 156 bp, Zea mays
cgtaagatacaaattccaactacctctagctcgcttgtgtggtatctgtatcagtattcatgtgtttgtttgcttatgtgtttgtttgcttgtatttgctggtgcttgtatcgcgggatgcaatgagttgttgtttggttgttgtcaaccaggctc

SEQ ID NO: 45095 - DNA, 288 bp, Zea mays
cacagaagcggcggcggcggacaaacgcaggcgaaggcgagggtgtgagggaaggagcaccagccatggtgcacgtcaacttctaccgcaactatggtaagacgttcaagaaaccaaggcgtccttatgagaaggagcgtcttgatgctgaactgaagctggtcggtgagtatgggctgaggtgcaagcgtgagctttggagggtccagtatgcactgagcaggatccgtaatgctgcaaggcacttgctcacccttgacgagaagaaccccgtcgtatctttgaggg

SEQ ID NO: 45096 - DNA, 296 bp, Zea mays
gtggtttccaaagccaagtgtgtgtactagcaaccagctagctcgggcggcagcaggcagccatcatgtcggaggagaagcaccaccacttcttcaaccaccacaagaaggacgaggagcagcccgccggcgagtacgggtactccgagaccgaggtggtcaccgccaccggcgagggcgagtacgagaggtacaagaaggaggagaaggagcacaagcacaagcagcacctcggcgaggccggcgccatcgccgccggcgccttcgcactctacgagaagcacgaggcgaagaag

SEQ ID NO: 45097 - DNA, 285 bp, Zea mays
aagatgcggccaagctggcgcggtacaacaagaagcctaccattacgtcccgcgagatccagacctccgtccgcctcgtcctccccggcgagctcgccaagcacgccgtctccgagggcaccaaagccgtcaccaagttcactagctcctaggcgagcgatgcgacgtgcactcgtctcctcttcttgcagtagtgcaatagtagtacggttaggtgtgttgccgtggtggtagttgccgctgtgtttgctttctgggctgggctcggttgatgtgttttatgta

SEQ ID NO: 45098 - DNA, 277 bp, Zea mays
gtccttattacatggctccagaggtgctaaagagaaactatggcccagaggttgatgtttggagtgcaggagtgattctgtacattcttctttgtggtgtccccccattctgggcagaaacggaacagggtgttgctcaggcaatcattcgatctgtcattgatttcaaaagagatccatggccaagggtgtctgataatgccaaagaccttgtcagaggaatgctgaatccggacccaaaacgacgattgacagctcaccaagtgcttggtcaccc

SEQ ID NO: 45099 - DNA, 275 bp, Zea mays
cgcagtcccatcctctcgctcgccaggagaagcagccgccgttgctgctgccgcgtccacagaatggggggtttcgtgaagacccataagaccaatgcgtatttcaaacgtttccaagtgaaattcaagagaaggcgggctggcaagacagactacagggccaggataaggctgattaaccaagacaaaaacaagtacaacacacccaaatacagatttgttgtgcgatttaccaacaaggacatcactgcacaaatcatatctgctagtatagc

SEQ ID NO: 45100 - DNA, 278 bp, Zea mays
ccaggctcctcgacagtcgatagcctcccaagtcccaactcgacctgagccgattcggaaggacggtttgcctacctctggttccggcggccatggcggtggcggcccctggccagctcaacctcgacgaggccccgtcatggggctcccgcagcgtagactgcttcgagaagctcgagcagatcggcgagtgcactacgggcaagtgtacatggcgaaggagacgggcaccaacgagatcgtcgcgctcaagaagatccgcatggacaacgagcgcg

SEQ ID NO: 45101 - DNA, 278 bp, Zea mays
gctcgggaagccgttcctccgctccgcctcctacctcaaggaggccctcctcgcgctcgccgaggcatcacggcggctgccacctcaaatcaccgctcgacgttgccctcaagctcgcggcgtacaagactttctctgaccactcgcccgtgctccagttcaccaacttcaccgcaacgcaggcacttcttgacgaaattggtggcagcacgtcgtcctgtatccatgtcatcgattttgatcttggcgttggaggcagtgggcttctttcttgcagg

SEQ ID NO: 45102 - DNA, 279 bp, Zea mays
ggaggacgcaaggagggtagtggaagccttttggtccgcaacatcccattaagtgtcagagcggaggatcttcgagttccttttgaaaggtttggccctgttcgggatgtttacattccaaaggactattactctggggagcctcgaggatttgcctttgtagagtttgttgatccttacgatgcctctgaagcccagtatcacatgaatcgccaagttttctttggtcgggaaatagctgttgttcttgctgctgagtcacgaaaaaggccagaagaa

SEQ ID NO: 45103 - DNA, 280 bp, Zea mays
ctaatctcgccttccgaggaaactcaccagcccaccacagacccgagcggaagaagccatgtccgggcgcggtaagggtggcaaggggctcggcaagggcggcgcgaagctcaccggaaggtgctgcgcgacaacatccagggcatcaccaagccggcgatccggcggctggcgaggaggggcggcgtcaagcgcatctcggggctcatctacgaggagacccgcggcgtgctcaagatcttcctcgagaacgtcatccgcgacgccgtcacctacactg

SEQ ID NO: 45104 - DNA, 277 bp, Zea mays
tgaactaaaggaagaagttcaagaagcaccaagagtgaaaatgttgcattgcccaagcaaggcaatggacattgagaacgagatccaagttctgtgtgatcaactggctaaaaaatcttcagattctcttcgccttttgaaagagttggagctgcatcgaagttacggggaaaatgacatgcccttgtatgaactaaagggtctagaaactttaggctcaacgttgcacatagttgttcacgactgtgcctctgtagatctctggaacagttcaatc

SEQ ID NO: 45105 - DNA, 274 bp, Zea mays
ctgttgttcaaactattcttactgcagaggctacctgatggtgtacgtttaagaggggagattcatgtcttgcttctcggtgatccctccacagcaaaatcacagttcctaaaatttgtagagaagactgcacctattgcagtatatacatctggcaaaggatcgtctgcagctggtcttacagcatctgtaactcgtgatagtagctcgcgtgagttttatttggaaggaggagccatggttttggctgatggtggagtagtctgtatcgatg

SEQ ID NO: 45106 - DNA, 250 bp, Zea mays
ctgcggggccgctgcgcatccgagctgctcggggaatgcacacaaggattgcaagtgtgtatctatggctggtttgggccatgtgcttcaccagtgggctgtacaatggattgacagcgcggatcactctgaagaagactctttctgttgccactgtgatgaatcttgcaatggagctttccttgcaggctcaccagtttggtactgtatgtggtgtcagcgactggtgcatgttgattgtcacagcagc

SEQ ID NO: 45107 - DNA, 277 bp, Zea mays
gcgcacgcgacatcgacaaagttgatctagatctagaggttgtcagtgatgaagtcggtggggaaggcggagttggcatggatgcttccaacatcggaggccatgaggaccacatagcgcgggcgctcggcgtcggcggtgaagaaggcctcaaagttagcctggcgggtgaggtcaagcttggcgtgggtgtgggccacgacgcaggtgaagacaagcatgaggaggcgacacacgatggtttaaccgacaagatcgttgcgcccgacgacgaaga

SEQ ID NO: 45108 - DNA, 277 bp, Zea mays
atggaagttgatagggttctaaggcctggtggctactgggtgctgtctggccctccaattaactggaaggtgaactacaagggctggcaacgcacaaagaaggatcttgaggtagagcagaacagaatagaggaaattgctgaccttctatgctgggaaaaagtctcagagaagggcgagatggcgatatggaggaaaagggtgaataccgagtcttgcccttctaggcaagaagaatcagctgtgcagatgtgtgaatcaacaaacccagatgatg

SEQ ID NO: 45109 - DNA, 267 bp, Zea mays
gcgactgccgccttccctcgatctattctccatcttgtcctccctttgctaaaaataacgaggcagaggcatcttcgatttgacgtgcgcttcctcttcctcgctcgctctcggtcgcagtgatggctgatgtcgacgagtaccgttgcttcattgggaacctgtcctggtcaacgactgatgaaagcctcaaggatgcgttcagcaaattcggcaacctcactgaggcaaaggtggttcttgacaaattttcaggacgttctcgtg

SEQ ID NO: 45110 - DNA, 274 bp, Zea mays
gaggttctgggtgacaaagttgagaaggtggtggtgtctgatcgcgttgtggactcaccgtgctgccttgtgactggcgagtatggctggaccgccaacatggagaggatcatgaaggcacaagccctgagggactcgagcatggcgggctacatgtcgagcaaaaagacaatggagatcaacccagagaaccctatcatggatgagctccgcaagcgtgccgaggctgacaagaatgacaagtcagtcaaggatctcgtgatgctgctgttcg

SEQ ID NO: 45111 - DNA, 271 bp, Zea mays
gaagccatgagcagcaaagtctctcgcgacaccctgtacgaggcggtgcgggaacttctgcacgggaaccagcgcaactccgcaagttcctggagacggtggagttgcagatcagcttgaagaactatgatccccagaaggacaagcgcttctcgggcaccgtcaggcttaagtccactccccgccctaagttctctgtgtgtgtcctgggggaccagcagcactgtgacgaggctaaggccgtggatatcccccacatggacatcgaggc

SEQ ID NO: 45112 - DNA, 288 bp, Zea mays
ggcgacctccagaaaaggatgagcgtcctgtcatcaaggatgcaatcccaaaccttttctttgccaaccagataattaacaaagcctgcgcaacccaagctatcgtttcggttctcttgaactctcctggcattacccttagtgatgagcttaaaaagctcaaggaatttgcaaaggatttgccacctgagctcaaaggactggctatagtcaactgcgcaagattcgtatgttaaacaattcgtttgcgaggtcagaggcctctgaggagcagaaaccacctagcgg

SEQ ID NO: 45113 - DNA, 268 bp, Zea mays
gcgtggcaaggcaacgagagcaacgaagagtattcaaaccgaaaacaatggatccggtgcggaagagcgtgtgcgtgaccggcgctggcggcttcgtcgcgtcggagctggtgaagctcctcctctcccggggccaatacgcggtccgcggcaccgtgcgcgaccctggtgctagcaagaatgcccatctcaaggtgctggaaggagctgaggaaaggttgcagcttctcaaggctgatctgatggactacgacagcattgcatcagc

SEQ ID NO: 45114 - DNA, 266 bp, Zea mays
cgtcttgtgttgttcggagcgggcagcagcacacagccccatcccaatcctagtcgatcttcttcccctcctcaaggaagaaaagaagctgaaccatggggaagagaaagtcagctgctaagccacctcctaagaagcggatggacaagcttgacactgtcttttcctgcccattctgcaaccacgggagtagtgttgagtgccgaattgacatgaagaatctgattggcgaacatcttgtagaatctgtcaggaaaacttcagca

SEQ ID NO: 45115 - DNA, 269 bp, Zea mays
ccggactggttcctcaacaggaagaaggattacaatgacggcaggttctcgcaggtcgtctccaacgcccttgatatgaagctcagggacgaccttgagaggctcaagaagatcaggaaccaccgtggtctgcgtcactactggggcctccgcgtccgtggccagcacaccaagactactggtaggcgtggaaagaccgttggtgtctccaagaagcgatgagctctatatcaccctgagaaatcttggccgcactaccgtgttggttt

SEQ ID NO: 45116 - DNA, 263 bp, Zea mays
ggtgactcggagaaactagtgaaagtgttattcgaacttgcaaggcatcatgcaccatctactattttccttgatgagattgatgctatcattagtcaacgtggtgaagctcgtagtgaacatgaagctagccggcgattgaaaactgagctattaatacagatggatgggttgactaagacagatgagcttgtttttgttctagcagcaacaaatttaccatgggaattggatgcagcaatgctgcgtcggctggagaagcg

SEQ ID NO: 45117 - DNA, 297 bp, Zea mays
gcagactggtagtagccggcgcgccgtcaccgtatcctcagatcagcggcgagcagaaaccacaccactctactgacgcccgacgagcagtgtaacattttccttcagccatgggtaaggagaagactcacatcaacattgtggtcattggccatgtcgactctggcaagtcgaccaccactggccacctgatctacaagcttggaggtattgacaagcgagtgattgagaggttcgagaaagaggctgccgagatgaacaagcggtcattcaagtatgcgtgggtgcttgacaagc

SEQ ID NO: 45118 - DNA, 297 bp, Zea mays
gtggcattgaggagatcctaccacttggaccattaaatgagttcgagagatctggtctggagaaggcaaagaaagagctggcggagagtatccagaagggcgtctctttcatcaagtgaggccggcgacggccagcccaacatagaaatagatgtggcgtgtttctgcttcttgagaactcatcttgttatctctctgtaagactgagtgcatgacacgaataatccacgtacacggctgtactaaaaagatgatgaatctgtggtggctaaaaaaagggaaatagaaaagtctggt

SEQ ID NO: 45119 - DNA, 186 bp, Zea mays
gatatccgaaagtttttggacggtatctatgtgagcgacaagggcgtcatcgaagaggagcagtgagcgacagagtagccgaaatgccaggagatgaatatgaatgtcgtttgagttgcaattttgtgagattggatgtgaacctttttctcattccttaaatagttgactgccagtgttcgtggt

SEQ ID NO: 45120 - DNA, 313 bp, Zea mays
cggagttggagggagttgggtcaagctgtttacagatagcaaaagcctttggagcttcccaagtcattgcagtggatgtccttgatgagaagcttcagaacgctacaacacttggagcaacccacactgtaaatgcagcaaaagatgatgcagttgaaaggataaaggaaattactgatggtaggggtgtagatgtggctatagaggcacttggtaaggcgttaacattttcccagtgcgccaagagcgtgcgtgatggaggcaaagctgttatgatcgggcttgctgcaacgaacgtaatgggagaggttga

SEQ ID NO: 45121 - DNA, 300 bp, Zea mays
cttgctgcttgtttaggctgaagaacctgttgaggtttaccatgataacgaattcaaaaacaggagatggcacttccaatcctacaacttcacagtgtccatcgtctgggctcctttcctcatcaaatctggtatttttgagaatgaggatggcgtgtctacctctgaaatacagctccaccttgatatactcgatgctaactggacaagtcagtatgagagctttgactatattattatttctggcggacaatggtttctgaggacagcggtctactgggagaacggtgcagtggttgg

SEQ ID NO: 45122 - DNA, 304 bp, Zea mays
  unsure (1)..(304): unsure at all n locations
gcaggatttgcctcagtagcccagggtatggaaggctgcgttcctagcaacaaagagacctnggcgtatggcatgccatcagccaccaacaatccagatgcctctggtcagtccttcagcgaagcgttgaagagctcgaggaagcctccgttgcagtacgatgcctccgaatctgcagactgtgccccaggtggtaagggcgcgaagaagaaaacgaagaaaggaaagcagattgacccttctcttcttggtttcaaggtccacagtaaccggatcatgatgggcgagattgttcgagatgatt

SEQ ID NO: 45123 - DNA, 292 bp, Zea mays
agaagacaacccgtcagcccctctcgtttttcatccgccttcgcctccaaccgcgtgcgctccacgcctcctccaggaaagcgagagcttctgcataagaacaacaaatcaaaagcgtgatcagctcggtgccaacaaaacctcaacaaccaagtttcatgtctgatctcgacgtccagcttccatctgcctttgatccgtttgctgaggcaaatgctgaggactctggtgctggtcctggaacgaaggattatgtgcatgtgcgcatccagcagcgcaacggcagaaagag

SEQ ID NO: 45124 - DNA, 294 bp, Zea mays
agcggcgccggcctacaaccgttttcgtgctcacacacccaaaccttagtcgcgatcaggccccaaggactcgagatgaagtcgagggcacggtccaccgccggcgactccaggctctcggtgaggaagaccaaggctgagaaggacccaaacaagcccaagaggcctccgagcgcgttcttcgtcttcatggaggagttcaggaaggactacaaggagaagcaccccaatgtgaagcaagtctccctgattggcaaggctggtggtgacaagtggaagtccctgtctgatgcc

SEQ ID NO: 45125 - DNA, 292 bp, Zea mays
tgcacagaaaattttcctcttactccaaacaatccatatggcaaaacaaagctcgttgttgaagatatttgccgggatatctaccgttcagatcctgaatggaagatcattttacttaggtacttcaatccagttggtgctcatcctagtggatatcttggcgaggacccacgaggaattcccaacaatcttatgccctatgttcagcaagttgcggttggtaggaggccagctctaacagttttaggaaatgactatgcaacaagagatgggactggggtccgagattaca

SEQ ID NO: 45126 - DNA, 292 bp, Zea mays
caaatatctcgagggactgcaggccaatgtccagaggcttaagacgtacaaggccaagctggttatcttcccaaggcgtgctcgcaaggccaatgccggcgactctactccggaggagcttgccacggccacccaggtccagggcgactacatgcctattactcgtggtgagaagcgctcagtcgaggttgtgaaggttactgatgagatgaagtcgtttgcggcctacggcaagctccgtcttgagcggatgaacaagaaacaccttggtgcccgccagaagaaggcggct

SEQ ID NO: 45127 - DNA, 291 bp, Zea mays
aaaggccgcgacgagccgaccagctctactgcccccttccggccttcggcgaccgtgacgagcaacgacgaccacggtgacgatggccgcttcctccctctgccacgggcacttgctcctgtttctcctcgtgtccgtcaagatcgatggcgtgagtgcgaagggctatggtcttccagccaagacatcaaacacaaaagtgatacttaatggcggacagagggttacatttgccaggccggatggctactttgcattccacaacatgccagctggaactcatcttattga

SEQ ID NO: 45128 - DNA, 291 bp, Zea mays
  unsure (1)..(291): unsure at all n locations
tccaagttctagcagcgcaggcntcggatttcggcaatgtccgccgcgcggtaagggcggcaagggtctgggcaagggcggcgcaagcgccaccgcaaggtcctgcgcgactacatccagggcatcaccaagccggcgatccggaggctggctaggaggggcggcgtcaagcgcatctccgggctcatctacgaggagacccgcggtgtgctcaagatctttctggagaacgtcatccgtgacgccgtcacctacaccgagcacgcccgccgcaagaccgtcaccgccatg

SEQ ID NO: 45129 - DNA, 292 bp, Zea mays
tgctgcaataccagttattccaggtagaaaatcaagagtagaaacatttgcgggtgccaatcggacctacactatagaagctatgatgggtgacaagaaggccttacaagctggaactagtcacaaccttggccaaaacttttcacgagcttttggaacacagtttatggatgaaaatggtcaaatcgaacacgtctggcagacctcttgggctattagtactcggtttgttggtgggattatcatgacccatggcgatgatgccggtctaatgcttcctccaaggattgca

SEQ ID NO: 45130 - DNA, 282 bp, Zea mays
gttggagtatatagttcgtggtgagcagaggaatctatttgagcttatgcatgctattgcaacaacacaagggttgaaaggcttttggaaagggaactttgtcaacatcctccgcactgctccattcaaggcagtcaacttctacgcatatgacagttacagaaagcaactgctcaaatggtctggtaacgaagaatctgcaaactttgagagatttattgctggtgcttttgctggtgttacagcaacgattatgtgcatacctatggatacaatcaggac

SEQ ID NO: 45131 - DNA, 283 bp, Zea mays
caaaacgcttccccgacgcctgactccaaaccctttcgcctccgccgccgccgccgccgcctgatagctccagcgccctcgccgtcggctgcccggctgccgtcctcccgctacgagctaggcatctccttcgccgatccagcatgggtaagacacgtggtatgggagctgggcgcaagctcaagacccacaggaggaaccagaggtgggctgacaaagcctacaagaagagccatcttggcaacgagtggaagaaaccctttgctggatcatctcacgcaaa

SEQ ID NO: 45132 - DNA, 281 bp, Zea mays
aggaaactaaaataatgtttagttttcgtatttggcaatttagggactaaaataaaataaaatgaagggactaaaaattaatcccaaaaaccaaacacattcgtaaggatatctgaatatgaaatgctaaaccagatgatgcatgtcatatctcactaacaccacacttaagctgtgctaatgctggtcgtcatcatgcagtaagctgctgaacaacgccactggatccggcaacacgaacacatcttcgacgcctacaagtgacgctgagggatctgcga

SEQ ID NO: 45133 - DNA, 281 bp, Zea mays
acaagatcgacaggcggtctggcaaggagcttgagaaggagccaaagttcctgaagaacggtgatgctggtatggtgaagatgataccgaccaagcccatggtggtggagacattctcagcgtatcctccccttggtaggtttgctgtccgtgacatgagacagacggttgctgttggagttatcaagagtgtggagaagaaggacccgaccggcgccaaggtgaccaaggcggctgccaagaagaaatgatgcgatcctgcgcctgctttagcaatacct

SEQ ID NO: 45134 - DNA, 281 bp, Zea mays
cggctttgacaattcctaatggtgccactgtgatttccacaatcaaccgatcaatgcgagcatatgccactgcaatagttgctgctgaatatatcctcagatggcttcctagaggcacacatgagtggtccaaactggttaccccggaggagcttgtcctaatgctgcaaaaggcttccgtctccgtcgaagagatggcagggttcgtttacaatccgttgagcggagaatggtccctgtcagatgatatcagtgtgaactacattgcttttggcgttaag

SEQ ID NO: 45135 - DNA, 285 bp, Zea mays
gtcccctgctccattctcagccgccgccaatcccttcccgtgctccgcaaccgctgagtgagaagaagagatggccggcaagggcgatggcccggctatcggcatcgatctcggcacgccctcgtacgtcgccttcaccgactccgagcgcctcatcggagatgcggccaagaaccaggtcgccatgaaccccatcaacaccgtctttgatgccaagcgtctcatcggcaggaggttcagtgatgcgtctgtccagagtgatatcaagttgtggcccttcaaggt

SEQ ID NO: 45136 - DNA, 285 bp, Zea mays
ctcgagccgggaaagggttcgtactcatggcgccgccgcagccaaagtcgggccttttcgttggcatcaacaagggtcatgtcgtcaccaagcgcgagctgcctccccgcccgtgccaccgcaaggggaaatcaacgaagagggtgtctatggtcaggggcctgatcagagaggttgctgggtttgctccttatgagaagcgtatcactgagcttctgaaggttggcaaggacaagcgtgccctgaagcttgctaagagaaagcttggaactcacaagagggcaa

SEQ ID NO: 45137 - DNA, 265 bp, Zea mays
ctacaagcccacacgtgctgctgaacgtgtggatccttcttaactctctatgggaaagcagggcttcctggtcttcaatgccgttggtggaggcactggctctggccttggttctctcctccttgagcgcctgtctgtggagtacggcaagaaatccaagctgggcttcactgtgtacccatctccccaggtgtcaacctctgttgtggagccttacaacagcgtgctcttcactcactcactcctggagcacactgatgtctcc

SEQ ID NO: 45138 - DNA, 298 bp, Zea mays
cacagccgtcgccgcccgccagcccgccagcgagagaagtccgcttcatccgttcgccgcctcaaggacgagatggacacatcaagccctgcagcacttgtcaatgcacagatgctgaacatgtttgttgggcgaagagtgcgcacggttgttcaagtccaacacaatgaaggtggagtgcttgtcgggcagtccaccgatgggcaccagttgtgtgtcaaaagtgccatggacgtccccgtatcacattttatggaggtttatggaattgctgaaaacagccagaccatccgtgctg

SEQ ID NO: 45139 - DNA, 287 bp, Zea mays
tcctaagttaccaagagttgtccgaatggcaaacctctgtgttgttggtgggcattcagtaaatggtgtagctgaaattcacagtgaaattgtgaaacaggatgtgttcaacagcttctatgagatgtggccaactaaatttcagaataaaacaaatggagtgactcccaggcgttggatccggttttgtaatcctgcattaagtgcactaatttcaaagtggattggttctgatgactgggtgcttaatacagacaaactggcagaactgaagaatttgctgatat

SEQ ID NO: 45140 - DNA, 285 bp, Zea mays
ctctctttccgagctctctcgctgtctctcacccagccgccaccatgtcaggactctacaaccagggcttctcccctgcaagaaccctctccccccagattaggagcaaccccgacgctgatagccagtacttggccgagcttctcgccgaacaccagaagttggggccattcatgcaggtgctgccgatatgcagccggctgctcaaccaagaaatcatgcgggtgtcaagcatggttcatgaccatggatttagtgatcttgacagacgccggtttagaagtc

SEQ ID NO: 45141 - DNA, 286 bp, Zea mays
gcaccacaagcgagcgagggacccggggcggaagaagagagagaagacgtctctctcctctcggcgtccccgttccccaacctctcgtctgctgcctgcctgcctgcctgcctgcaaaaaggagtttgtcatggcgtctaagcgcatcctcaaggagctgaaggacctgcagaaggacccccccacatcatgcagtgcaggtcctgctggtgaggacatgtttcaatggcaagcaacaattattggaccaactgacaatccctaagctggttgtggttttttaatg

SEQ ID NO: 45142 - DNA, 286 bp, Zea mays
aaagctctcgatctcaccgacaccgaggaagaagagatcaatggcgtccgagcagggagtcgtgatcgcgtgccacagcaaggctgagtttgacgcccacatgaccaaggcccaggaagccggcaagctggtggtcatcgacttcactgccgcctggtgcggtccatgccgcgccatcgccccactgttcgtcgaacacgccaagaagttcactcaggtcgtcttcctgaaggtggacgtggacgaagtgaaggaagtcaccgcggcctacgaggtcgaggcgatg

SEQ ID NO: 45143 - DNA, 284 bp, Zea mays
ctcgagcgcgcgtcgcatcctacgatccaaagctctctctgctcgcagccatagcgaagaactacccgaccgtgagcgccgagtacagcgaggctgtggagaaggccaggcgcaagctccgagccctcatcgccgagaagagctgcgccccgctcatgctccgcctcgcgtggcactccgcggggacgttcgacgtgtcgtcgaggaccggcggtacattcggcacgatgaagcatcagtcggaattggctcacggcgctaacgcggggctggacatcgcggtg

SEQ ID NO: 45144 - DNA, 296 bp, Zea mays
ggccatcgggcgcgcgggcgcgcgcacgacgactacgggttctcggcggagatacagacgctggggcgcatcaggcaccgccacatcgtgcggctgctcggcttcgcggccaaccgggagaccaacctgctggtgtacgagtacatgccgaacggcagcctcggcgaggtgctccacggcaagaagggcggccacctgcagtgggcgacgcggttcaagatcgccgtggaggcggccaagggcctctgctacctgcacaacgactgttcgccgccgatcctgcaccgcgacgtcaa

SEQ ID NO: 45145 - DNA, 291 bp, Zea mays
ggttgtgctgctgccctcaagcaggctggtgcccgtgtcattgtgaccgagatcgaccccatctgtgccctccaggctctgatggagggtcttcaggtccttcccttggaggacgttgtctctgaagctgacatcttcgtgaccaccactggcaacaaggatatcatcatggttgaccacatgaggaagatgaagaacaatgccattgtctgcaacattggccactttgacaatgaaattgatatgctcggccttgagacctactctggcgtcaagcgcatcaccatcaag

SEQ ID NO: 45146 - DNA, 287 bp, Zea mays
acatcctgaaagttggcgaggcagagaaaaatcttggtgcaggcgatgtcaatgtttacgcacagatgattgatgatgctgagggcctggacaagattgagaacctacagagccatgacaacactgagatatatgagaaggctgtcaagatgctcgaatcttactggctagaggaggaagatgatgccatgccctctggcgacaatccccagaatggcttcaactttgggaaccagccctctgttccatcaggtggattcaacttcggctgaagatgcccatttgga

SEQ ID NO: 45147 - DNA, 285 bp, Zea mays
attcttccttcctccctctagatctcgccttcacaacaacgacgaacagcgggtacgtacttggagatccaagaagctaagaaatgtcagcccagtttgcatccgagcatgcttgctatgtcaactgcaactattgcaacactatcctggtggtgaatgtgccaagcagttgttcctacaacgtggtgactgttaaatgtgggcattgtacaatggtgctgtccatggatctcagtcccttccatcagcaggcacgcactgtcccagacaaccaggttgtccaga

SEQ ID NO: 45148 - DNA, 285 bp, Zea mays
gatgtcgcaccgtaagttcgagcacccgaggcacggctccctcggcttccttcccaggaagcgctcctcccgtcaccgcggcaaggtcattccctagggatgaccccaagaagccttggcatctcactgccttccttggctacaaggctggcatgactcacattgtccgtgaggttgagaagccaggatccaaactccataagaaggaaacttgtgaggctgttaccatcattgaaacccctcctcttgtcattgttgggctcgtggcatatgtgaagactcctc

SEQ ID NO: 45149 - DNA, 281 bp, Zea mays
gcaaggctccgatttgcacatgcagaaactgttgttccttttagcgctttcttggtctttttcttgaaggtccagaaattgagaagatacagagagaggaagcattggacctaccccctttgccgccacagggaagaaactggaagggcagtgttgttgcgccttttgctggtaacaatatgctggttttatatcaatgtccaagcaaaatttcggatggcagcacaatctctggaggctgaaacaactcttacttagttcaagttctacacaacgaagtc

SEQ ID NO: 45150 - DNA, 285 bp, Zea mays
atcgtgaacccgccgccgacgcagcagcaggagacgcgccaaggagagcccgcaaggaggcgactatgagggccaagtggaagaagaagcgcatgaggacgctgaagaggaagcgccgaaagatgaggcagagatccaagtaggctgatggggattgtggatggtggtgtcggcatagttgtgttacgtttcttcgatgcgtgagttcatggagagatgtcacatcctagttcgtcgtcaccgtttgccatgggtccaatggctcgtcttggaaacctgcacttc

SEQ ID NO: 45151 - DNA, 275 bp, Zea mays
gacagggcaggtgatctcgaccttttcaactgggaaggtcccatatgttgtgaagctcaatcctgatgaggataagcagcatattctccttgccggaatgagcgataagaagattgtgcaatgggatatgaagtcagggcagattacacaagagtatgatcagcatttaggggctgtgaacaccataacttttgtggataacaacaggagatttgtgacctcaagtgatgacaagtctcttcgtgtgtgggagtttggcatccctgtggtgatta

SEQ ID NO: 45152 - DNA, 277 bp, Zea mays
ggtccttgacaacgggcggctgctgacgctgtcgctggaccccacgtccggctccgggttccagtcccggcacgagtacctgttcggcaagatcgacatgcagctgcggctggtgccgggcaactccgccggcaccgtcaccgcctactacctgtcgtcgcagggcggcgcgcacgacgagatcgacttcgagttcctgggcaacgtgtccggcgagccctacacgctgcacaccaacgtgttcacgcgggggcaggggcagcgggagcagcagttc

SEQ ID NO: 45153 - DNA, 275 bp, Zea mays
atctgctcaacaagtatatgtacctcactgggagggtggatatgaggcagattgagaagacaattcagtatcttattggctctggaatggatcctaggactgagaataatccttatcttggtttcatctacacctccttccaagagcgggcgaccttcatctcacacgggaacactgctcgtcacgccaaggactttggcgacttaaagcttgcacaaatctgcggcatcattgcctcggatgagaagcgacatgaaactgcgtacaccaagatc

SEQ ID NO: 45154 - DNA, 90 bp, Zea mays
ccttcctccccaggacgtgatgaatgctctcctggaggctctctttggtggtgtgggtaagggattcaccaaagaggttgtgaagaacaa

SEQ ID NO: 45155 - DNA, 172 bp, Zea mays
actggatctggtaaaacttatacaatgatgggtaaaccaggaaatgatcaaaaagggataatacctcgttctttggagcaaattttcaagaccagtcggtttctagaatctcaaggatggaattattccatgcaagcatcaatgttggaaatatacaatgagaccattcgtg

SEQ ID NO: 45156 - DNA, 298 bp, Zea mays
aggaaggagtcggagggaaccgaaaactcagggtctcgaatttcctaggagcggaggcgatggctgggaagagaggaaaaggattgctcgccgcgaagacgacggcggccaagtcggcggagaaggacaaggggaagaaggcccccatctcacggtcctcccgcgcgggcctccagtttcctgttggacgaatccaccgtcagctgaagcaaaggactcaggcaaatggccgcgttggtgccactgcagccgtctactctgccgccatcctggagtacttgactgccgaggttctgga

SEQ ID NO: 45157 - DNA, 283 bp, Zea mays
cggcaaggcgaccctccctccttcgctccttccgcgccgcctcccggccgtcgccgccatggtgaagtactcgcaggagccgggcaaccctaccaagtcggctaaggccatgggcagggatctgagggtccacttcaagaacacaagggagacagcctttgcgcttcgcaagttgtctttgaccaaggctaagcgataccttgaggatgttattgctcacaagcaggcaattcccttcggaaaacactgtggggttgtgcgtcgtccgcgcaactaagtcgcg

SEQ ID NO: 45158 - DNA, 295 bp, Zea mays
aggaactgcctgtactggaaaatcaacaatcgctacacaacttgctcagaggctcaatttgcctaatgttttgcagacggacatggtgtatgagctgctgcggacatcaacagatgcgccacttacttcagttcctgtgtgggctcgcgattttaattcacctgaagagcttatcactgaattctgcagagaatgcagagttgtacgcaagggtttggctggcgatttgaagaaggccatgaaagatgggaaaccaattattatagagggaatacatttggatccaagcatttat

SEQ ID NO: 45159 - DNA, 290 bp, Zea mays
ggaaagggccgcgacgagccgacgagcaacgacgaccatggcgacgatggccgcttcttcctgccacgggcaacttctcctgtttctcctcgtggccgtcgcgtcggcctgcctcggctccgcggcaggcatcaagccggatctggagagggctacacgatcgctggccgcgtcaagatcgatggcatgagcgtgaagggctttggtcttgcaacaaagacatcaaacacaaaagtgatacttaatggcggtcagagggttacatttgccaggccagacggctactttgc

SEQ ID NO: 45160 - DNA, 290 bp, Zea mays
ctcgagcgcagcatccacccgttagactaggtcaggctatggtgtcgaccaactcgcggaaatggtggccttcaggttccatcagtaccaggtggtagggcgcgcgctgccgacgctcggcgaacgagcacgccaagatctaccgcatgaagctctgagccaccaacgaagtccgcgccaagagcaagttctggtacttcctgaggacgttgaagaaggttaagaagagcaacggtcaggtcctggccatcaacgagatcttcgagcgtaacccgacgacgatcaagaac

SEQ ID NO: 45161 - DNA, 276 bp, Zea mays
gcctcccaccacaaaccctcctccagtgctcttctcttctagccgccgccgcaaccgcttgctagcgctctgcgctctcatcctcgcgtccgtggaaggtcgtctcgccatggcctccgagacggagacgttcgccttccaggcggagatcaaccagctgctatcgctcatcatcaacaccttctactccaacaaggagatcttccttagggagctcatttcaaactcctccgatgccttggataagatcaggttcgagagtttgacggacagagc

SEQ ID NO: 45162 - DNA, 254 bp, Zea mays
tgaacgatctagattacgaaaagatcaatccaatcaagtatgttccagcattggttgatggggattttgttgtttctgactccctggcaatcatattgtatcttgaagataaatatcctcaacaccctcttttgcctcaagatctcaaaaagaaagctataaatctgcagattgcaaatatagtttgttcaagcattcaacctcttcaatgttatgctgtaattggtctgcttgatggcaccttaagctctaac

SEQ ID NO: 45163 - DNA, 282 bp, Zea mays
ctcctctctccgtcgccgcctcgggccaaaccctacgcagggagttgattgatcgattgcagccatgagtaagttgcattccgagcttctcaaggattgcatctcccagatagttcaggatgccaagaagaataggaagttcactgagactgttgagcttcagattagtctgaagaattatgatccacaaaaggacaagcgtttcagtggctctgttaagttgcctcacatccctcgtccaaagatgaaggtgtgcatgcttggtgatgcccagcacgttga

SEQ ID NO: 45164 - DNA, 284 bp, Zea mays
tccgtcgcggcggagatcgagtcgagcgcccgccacggcgatggcggctagagtcctgccgccgccgccgctccctctcgtactcctcttactgctgctcccgctctcagcccgggacaccgtcgccgcgggcgaggatttcccacgcgacgggcgggcgatcgacctcgacgagagcaacttcgaggcggcgctgggcgtcatcgacttcctcttcgtcgatttctacgcgccatggtgcggccactgcaagcgccttgcgcccgagttagatgaagctgcac

SEQ ID NO: 45165 - DNA, 287 bp, Zea mays
cgccacgttccaccagccggcgccccttcttctcactccgctggcgccggcgccgcgttatccatggcgtcggagaagaagcaatccaacccgatgagggagatcaaggtgcagaagctggtgctcaacatctccgtcggagagagtggggatcgcctcacccgcgccgccaaggtcctggagcaactgagtggccagtcaccagtgttctctaaggctaggtacactgtccgttcctttggtatcaggcgtaatgagaagattgcctgctatgttactgtaagggg

SEQ ID NO: 45166 - DNA, 284 bp, Zea mays
gccgccgttgctgctgccgcgtccacagaatggggggtttcctgaagactcataagaccaatgcgtatttcaaacgtttccaagtgaaattcaagagacggcgggctggcaagacagactacagggccaggataaggctgattaaccaagacaaaaacaagtacaacacacccaaatacagatttgttgtgcgatttaccaacaaggacatcactgcacaaatcatatctgctagtatagcgggtgatatggttcttgcttctgcctactcgcatgagttgcca

SEQ ID NO: 45167 - DNA, 284 bp, Zea mays
ctcgcggccccctccgccgaccgccgcctcctcacaaccgcggaagctgcttccctctccattggacgcggccagcttccatctctcggtcacctccctctacatcccacggccgctaccaccttccctctacctcacacggccgccggcctctccaaggtctgcacacgcattcagcgacgcatttgcctatatcagcactgtggtcataactctagtagagaaaggagaagatgcaggcatctagggcaaggcttttcaaggagtacaaggaggtacaacga

SEQ ID NO: 45168 - DNA, 278 bp, Zea mays
  unsure (1)..(278): unsure at all n locations
aacacatctcctcgcatttcttcccatccgatccccccttcgcgaccaaaaccccaactcgccccgcatcgatggggcccaagggcgagagcagacccgcggcgaagaggccggcggaggaggagcccgcggccgagaacgcgcccgccgggaagaagccgaagctnagaagcggggccccgctggcaagtccgctgccaaggaaggcggcgagggcaagaggggcaagaagaagggcacgaagagcgtggagacctacaagatctacatcttcaagg

SEQ ID NO: 45169 - DNA, 272 bp, Zea mays
cgacaacgtggctctcaaaggatttgccaagttcttcaaggaatccagcgacgaggagagggagcacgctgaaaagctcatggagtaccagaacaaacgtggaggcagggtgaggctccaatcgattgtgacgcctttaaccgagtttgaccaccctgagaaaggagatgctctgtacgctatggagctggctctggccctggaaaagctggtcaatgagaagctgcacaacctgcatggtgtggcacaaggtgcaatgatcctcagttgac

SEQ ID NO: 45170 - DNA, 249 bp, Zea mays
ttcttctccatccatgcagatgcagaagatggatctcctcgtaaaggaggaggttccttggccccacctttcccatctccatgtaccttgcggactgcgcttctacgatatgctgatctactcaatccaccgaagaaggctgctttgcttgctttatcttctcacgcatctgatccagctgaagctgagcgacttagattcttggcttctccttctggaaaggatgagtattctcaatggataactgct

SEQ ID NO: 45171 - DNA, 277 bp, Zea mays
gcagggggcaccaaaagggaggtcaagatcacaatctccagctcggtctcagtctaggtcacctgtccctgatcctagatctcaggcgaggtcaagatctagaagccaagagagggaggaggatgctgttaaccgtgggaatactctgtatgtgactgggctctcttcgagggttactgaaagggatgttaaggattatttttctaagcatggaagggtggttggttgccatgttgttcttgaaccccatacacgtgtttcccgtggatttgccttt

SEQ ID NO: 45172 - DNA, 280 bp, Zea mays
gtccgcctcaacggtccaaccctccggttcgacgtaggcgccggcgggaaatgaaggtctccgtgaagacgctcaagggatccagcttccatatcgaagtggatcctaccgacaaggttgccgacgtgaaaaaggttatagagagtatacaagagcaggcttcctatcctgctgaccaacaagtgcttatacaccaggggaaggtgctcaaggacgacacaacattggaggaaaaccaagtagttgaaaataattttcttgttataatgctcagacagaa

SEQ ID NO: 45173 - DNA, 301 bp, Zea mays
atccgctgcagccatgagtaagttgcagtctgagtctgtcaaggatgccatctcccagattgttggggatgccaaggagaagaataggaagttcactgagactgtggaacttcagattggtctgaagaattatgatccacagaaggacaagcgtttcagtggctctgttaagttgccccatatccctcgtcccaagatgaaggtgtgcatgcttggtgatgcccagcatgttgaggaggtcgagaagatgggacttgactacatggatgttgaggctactcaagaaatgcacaagaacaag

SEQ ID NO: 45174 - DNA, 212 bp, Zea mays
agcttgagctgaggccaacatcaattgagaaagaggtcttccctcaaattgcagctgatcaacagctctatgcaatggtccttccaggtttttggatggatgttggtcagcctagggactacattactggcttgcgtctttatctagactcgattaggaagaaatcagctgccaagctagctactggagcacatgttgttggcaatgtgctg

SEQ ID NO: 45175 - DNA, 164 bp, Zea mays
gtccatagactcctccaagatgcttgtagtcctgctcacagcagccttgctggctctgagctcagctcagggcacggatgaagaggtcaacaatgctgagaccagtgatgtaccagcagattctgaacaacaacccgtggactcgggttcagatccaccttctg

SEQ ID NO: 45176 - DNA, 180 bp, Zea mays
aagctcgaagatattgttccttcgtcacacaactgtgatattccgcatgtgaaccgtactgagtatcagctgattgatatatcagaggatggatttgtgagccttcttacttcagatggcaacactaaggatgatcttagactcacaactgatgagactcttgtggcccagatcaaggaa

SEQ ID NO: 45177 - DNA, 286 bp, Zea mays
gttgtcactgatccagatatgactctggtggatgggtctaagttggtatatcatcgttttccttggcaggagccatttgcgccgtatttgctggaagtgctctacgaggatgatgacatggttgcccttaataagccttctggcttgcaagttctgcctaaaggactgtttcagcagcgaactgttttagcacagcttcaattgaaagactggaagatggcctcatcttgccggttcaagagaaaagatgtgcagtcacatccagtacctgttcatcgtttaggga

SEQ ID NO: 45178 - DNA, 289 bp, Zea mays
ctcgattccgctgctctctccctcttcctctcccccgcggcggaccataaaccctaggcctcgccgtcgtcggaggcgccgccgcgatgtcgcactttggaaggacgggtccgccggacatccgcgacaccttctcgctgctcgtcctcaacatcagcttccgaaccacggccgacgaccttttcccgctcttcgagcgctgcggcaaggtcgtcgacgtcttcatcccgagggaccgcaggaccggggactcgaggggttttgcgttcgtgcggtacaagtacgccga

SEQ ID NO: 45179 - DNA, 291 bp, Zea mays
aatatttatggtacacatgtacttcttgaggcctgcaggattagtggccagatcaagaggttcatccatgtcagcactgatgaggtctatggggagactgacgaggatgcagttgttggcaaccatgaagcatcacagctgcttcctacaaacccatatgcagccaccaaagcgggagcggagatgcttgtaatggcatatgggagatcctatggactgccagttatcactactcggggaaacaatgtctatggcccaaatcagttccctgagaagcttatcccaaagttc

SEQ ID NO: 45180 - DNA, 289 bp, Zea mays
ggcggctgcggcggacacggaggcgaaggaggaggagcagcagcagcaggcggcgccgaggagcggcatcccactcagtgcttgcaaccatggctaggggattgaagaagcacttgaagaggctcaatgcgcccaagccatcttctggacctcacaagtccagggagtgccttcctctgatcctcatcatcaggaacaggctcaagtatgctctgaactaccgtgaggtcatttctatcctgatgcaacgccatgtacttgttgatggcaaggtcaggactgacaagac

SEQ ID NO: 45181 - DNA, 290 bp, Zea mays
agcagttttagcgggtacaagatctaaacaggacacgggaggcgctacgccaggaccgacgggaaggttttccagtttcttaatgcgaaatgcgagtcggctttcctttccaagaggaatcctcggcagataaactggactgtcctctacagaaggaagcacaaaaagggacagtcggaagaaattcaaaagaaaagaacccgccgagcagtcaaattccagagggccattactggtgcatctcttgctgatataaatggcaagaggaatcagaaacctgaagttagaaa

SEQ ID NO: 45182 - DNA, 112 bp, Zea mays
cacgatcgaggcagggcgccaattgcggtggccaccacttccaatccactccccgcgttcgcctcgccgagctgttcttgctctgtcctctctccaactccacgatttgttc

SEQ ID NO: 45183 - DNA, 286 bp, Zea mays
ccattctcagccgccgccaatcccttcccgtgctccgcaaccgctgagtgagaagaagagatggccggcaagggcgatggcccggctatcggcatcgatctcggcacgacgtactcttgcgtcggcgtgtggcagcacgaccgcgtcgagatcattgccaacgaccagggtaaccgcaccacgccctcgtacgtcgccttcaccgactccgagcgcctcatcggagatgcggccaagaaccaggtcgccatgaaccccatcaacaccgtctttgatgccaagcgtc

SEQ ID NO: 45184 - DNA, 177 bp, Zea mays
cctctcaaaccctagccgcctcctgcaagtttcagagctcaggaatctgcgccatggcgagtgagacggagaccttcgcatttcaggctgagatcaaccagctgctctcactcatcatcaacaccttctactccaacaaggagatcttcctccgcgagcttatctccaactcttccg

SEQ ID NO: 45185 - DNA, 283 bp, Zea mays
ctcaagtccaaccacccctccatccgatgcgtcgtcctcgacatgggcgccgtcgcggcgatcgacacgagcggtctagacgcgctgtccgagctcaagaaagtcctggacaaaagaaacatcgagctggtgcttgccaacccggtggggtcggtggcggagaggatgttcaactcggcggtgggcgagagcttcgggtcgggccgcctcttcttcagcgtacggcaggccgtcgcggcgggggcgtgcaaagcggcgcagccatgacgacgacgacaggctg

SEQ ID NO: 45186 - DNA, 270 bp, Zea mays
ggttgctgcaaagaagcatcttatcgacaatgtgaagaaaaccgtcaaaggacgagcacaacttggggtggaggcgtttgcggaagctcttcttgttatacccaagactttggctgagaactctggtttagatactcaagatgtgattgtttctctccagaatgagcatgaccgtggattagttgtggggttgaaccatcactctggggatccgattgatccccagatggaaggcatcttcgacaactactctgtgaagcgccagatcat

SEQ ID NO: 45187 - DNA, 274 bp, Zea mays
ggcatcggcggcgactacccgctgagcgccaccatcatgtccgagtacgccaacaagaagacccgcggcgccttcatcgccgccgtgttcgccatgcaggggttcggcatcctcttcggcactatcgtggcaatcgtcgtctcggcggcgttccggaacgcgttcccggccccgccctacttcgtcgacgcccaggcgtcgctcgtcccggaggccgactatgtctggcgcgtcatcctcatgttcggcaccgtcccggccgcgctcacctact

SEQ ID NO: 45188 - DNA, 278 bp, Zea mays
tcccctcttccctttctagccttccacccttcatccacccgccgctcctcgagcacccccgtcccgcgccgcctccggctccggcgagatgtcacgcttcggtcgatccggcccgccgccgccgatccgcgacacgtactcactcctcgtcctcaacatcaccttccgcacaactgctgatgccctcttccctctcttcgacaagtacggcgagattgtcgacatctacatcccaagggaccgccggactggtgactcgcgcggattcgcgttcgtga

SEQ ID NO: 45189 - DNA, 278 bp, Zea mays
acacactcgagaactccatttcgatctcatttgaaatcaacccatcctcgtttcctccgtctagcagcctctcaccctcatggccaagatcaagatcgggatcaatgggtttggcaggatcggaaggctggtggccagggtggccctgcagagcgacgacgtcgagctcgtcgccgtgaacgaccccttcatcagcaccgattacatgacctacatgttcaagtatgacactgtgcacggacagtggaagcaccatgaggtcaaggtgaaggactcca

SEQ ID NO: 45190 - DNA, 280 bp, Zea mays
cacaattcgcaccacattattgtcttgtgttgcccgcaacccaaagcggatcaaaacctagatctcgtccccgttcctccgatcctcatggattcctcctcctcctcgtccagcctgagccagcagcccgagttcgattacctcttcaagctgctgcttatcggcgactccggcgtcggcaagagcagcctcctcctccgtttcaccgccgactcctttgaggacctttcccccaccataggtgttgacttcaaggtgaagatggttaccattggtggca

SEQ ID NO: 45191 - DNA, 281 bp, Zea mays
gaaggatctcaagcgtggttttgtggcctcaaactccaaggatgaccctgccaaggaggctgccagcttcacgtcccaggtcatcatcatgaaccaccctggccagatcggtaacggctatgccccagtgctggactgccatacctcccatattgctgtcaagtttgctgagctgattaccaagatcgacaggcgttctggcaaggagcttgagaaagagcccaagttcttgaataacggcgatgctggtatggtgaagatgattcccaccaagcccatgg

SEQ ID NO: 45192 - DNA, 338 bp, Zea mays
atccagccgccaccaggtgcagagtctttcgtcatgtcttctccggcgaagaacccccagtcgcccaccagatcacttgttaaactttgttgaggggtgatggcggtttctttcgcaaacctcagctccgaggcagggcttaaaaagcttgatgagtaccttctcgctcgcagctacatcactggctaccaagcttccaaggatgacttggctgtctacacttcgttttcgtctgctccctcgtccaagtatatcaacgtagcaaggtggtttaatcacattgatgcgctcgtgaggctgagcggagttactgcagagggccacgtgtgagggttgaa

SEQ ID NO: 45193 - DNA, 335 bp, Zea mays
atatatgcaaatcaaagagaagattgtgcctctgaagattgacctccgagtgaacaacactgtaattagggaccagttcttatgggatatcggcaaccttgatagtgaccctgaagaatttgcgaggacgctgtgtgatgatttgaacattacagaccctgaagttgggcctgcaatagctgtttccatccgtgagcagctttatgagattgctagtcagagcgtctctgttatgagagagaagcaaatgtcaaagaagggaaggcgagcaccagaattttcttcaaatagtaaagccgtgaacaatgcagtggatttgttcaagtattttggca

SEQ ID NO: 45194 - DNA, 329 bp, Zea mays
attctagggttttgctgctctccgaccccgagctccgaatgccgcagcatcaggcgcggcccccctcgcgtgtgaccgagatggcgctgccgaatcaggggaccgttgattaccccagcttcaagctcgtcatcgtcggcgatggtggaactggtaaaactacatttgtgaagaggcatctcactggagagtttgagaagaaatatgaaccaaccattggtgtggaagttcatccgttggatttcaccactaactgtggtaagatcaggttctactgctgggataccgcaggcaagagaagtttggtggcctcagggatggatactata

SEQ ID NO: 45195 - DNA, 330 bp, Zea mays
gtggcattgaggagatcctaccacttggaccattaagtgagttcgagagatctggtctggacaacggcagagaaagagctggcggacagtatccacaagggcgtctctttcatcgagtgaggccggcgacggcaggcccaacatagagatagatgtggcgtgtttctgcttcttgagaactcatcttgttatctctctgtaagactgagtgcgtgacgcgagtggtccacgtacacggctgtactaaaaagatggtgagtctgtggtggctaaaaaaaggtagatagaaaagtctggtagtagaagttgtttctgaacaaatgggtttct

SEQ ID NO: 45196 - DNA, 326 bp, Zea mays
atcgacgagtcggctcggtaggcaagaccataaccttggaagccgagagctctgacaccattgacaatgtgaaggccaagatccaggacaaggagggcattcccccagaccagcagcgtctgatctttgcgggcaagcagctggaggatggccgcactctcgcggactacaacatccagaaggagagcacccttcaccttgttctccgcctcagaggtggtatgcagatctttgtaaagaccctgactggaaaaaccataaccctggaggttgagagctcggacaccatcgacaatgtgaaggcgaagatccaggacaaggagggc

SEQ ID NO: 45197 - DNA, 328 bp, Zea mays
agtttttcctcttaaagcagagctactgaaacctcaagcagaaatggagagatttataacggatttggtaaagaaaagtgtgcaagatgtaactggttcagaatttgaactattcatggggattctgcgaacttagagcatatttggggattctgctcctagagagtcctttcaagaactaattgaaattattcaagcacaggctgatctcaactcacaattcaatgtttcggacattgaccacattgaaaggtggatttcatgcatgtatatggctcttcctatcttcatgagaggagcatcagcaagcaagttcctcaattacttc

SEQ ID NO: 45198 - DNA, 326 bp, Zea mays
acccagtcagaagaacggcggcgcgggcggacaaggagcaggcggaggaggagttgtgccaagccacaatgggtgtctcgcgtgactcgatgcacaagctccgagccaccggtggaaagcagaaggcctggaggaacaagcgaaagtatgagcttggtcgccagccagccaacaccaagttgtcaagcaataagacggtgaggagggtccgtgttcggggaggtaatgtgaaatggagggctcttcgccttgatactggtaactactcatggggaagtgaagctgttacccgcaagacccgtatcctcgacgtggtctacaatgca

SEQ ID NO: 45199 - DNA, 339 bp, Zea mays
cagtgtcggtgataagaatgtcctcatctttgaccttggaggtggtaccttcgatgtctccctccttacaattgaggaaggtatctttgaagtcaaggccacagctggcgacacccatcttggtggtgaggactttgacaacaggatggttaaccactttgtccaggagttcaagagaaagaacaagaaggatatcactggcaacccgagggctctccggaggctgaggacctcttgtgagagggccaagagaactctgtcttccactgcccagaccaccattgagattgactcgctgtacgagggcattgacttctactccaccatcacccgtgccag

SEQ ID NO: 45200 - DNA, 323 bp, Zea mays
gtttttctgtctcacattactagtgatcctgccatgggccaggaaaagcctgttttcttcagtttgtatgccaccataagccacatcaagcctgaccagaacatgtggtaccgtgcttgcaagacctgcaacaagaaggtgactgaaacttttggatctggatactggtgtgagggatgccaaaagaatgactcggaatgctcactgagatacatcatggtcatcaaggtttccgatcctactggcgaacatgggtctctgtgttcaacgagcatgcagagaagatcattggctgcagcgccgacgagcttgatcggatcagg

SEQ ID NO: 45201 - DNA, 322 bp, Zea mays
agcccccgagaagaggtttactggtacaatagttggctgtgaagatcttgacccactatggcgtggttccagttggagatacttgaaggtgcgctgggatgagccttctactatcccgcggccagatgagttctctccctggaagatagagcctgcttcatcacctcctgttgatcctctgcctgtttctagaggaaaaagacctagacaaaatgcacctccaccttcccctgagtcatctgttctcacaaaagaaggtgcaaccaagattgatactgattctgctcaaacaccacgtcgaaattcggtcttgcagagtcaa

SEQ ID NO: 45202 - DNA, 324 bp, Zea mays
gcatgtctgttgtagaagaaagctttgagtaccttgatgccccagttgagaggatcgctggagctgatgtacctatgccctatgctgccaaccttgagagaatggctgttccacaggtcgatgacattgtgcgggcagcaaagcgggcctgctacagggcagtaccaatggccgcagctgcctgattggtgtacagacctttctgtttttcttcctcagttttcgctctctggcagcaagaaacatgtagtattcataaagtgccggcaaattggccggaccccagactccaagcgagctagtttttgtagatctgctatggtg

SEQ ID NO: 45203 - DNA, 319 bp, Zea mays
aagatcgacaggcggtctggcaacgagcttgagaaggagccaaagctactgaagaacggtgatgctggtatggtgaagatgataccgaccaagcccatggtggtggagacgttctcagcgtatcctccccttggtaggtttgctgtccgtgacatgaggcagacggttgctgttggagttatcaagagtgtggacaagaaggacccgaacggcgccaaggtgaccaaggcggctgccaagaacaaatgatgcgatcctgcgcctgctttgacagtacctagttttcatcatcacaagttttgtttgtgatcgttgctgt

SEQ ID NO: 45204 - DNA, 321 bp, Zea mays
ctggcaagaaggaaattcagctgcagcttgagaagatgaagaaatatgcttctgttatccgtgtcattgctcatacccagattaggaagatgaagggtttgaagcagaagaaggctcacctgatggagattcaggtcaatggtggtaccattgctgacaaggtggactacggctataaattttttgagaaagaggtccctgttgatgctgtcttccagaaggatgagatgattgacatcattggtgtgaccaaaggtaaaggttatgagggtgtggtcactcgttggggtgtcaccgccttccccgcaaaacccacagggg

SEQ ID NO: 45205 - DNA, 321 bp, Zea mays
acgcacaccagtttcaagcagtcactacgccgtggcaacgtcgtgggaaggattcgagtcaggggcgaactacggtgacggcgctgtcaatacatgccgtagctgcgcgacgcgggctggcttgtccgatcggtttgcctcggccatgtcgactgagaaagttctttgcaagttcttcatgcatggagcttgcttgaaaggagagtactgtgaattctcccacgactggagtgatcaagcaaatagtgtttgcacattctaccaaaaaggtgcatgctcgtatggtagccgttgcagatatgaccatgtcagagtttctcg

SEQ ID NO: 45206 - DNA, 319 bp, Zea mays
aagccatcttgcagactgtgcatcacaatgcctactccgaagatccttatgcccaggaatttggtataaagattgatgagcgtcttgcatccgttgaagctcgtgttctgcctcctccaaggctgaaataccatgatagtggcagagagagggatgtattgccaagagttgggcagtggaatatgatgaataagaaaatggtcaatggtggtagagttagcagctgggcatgcattaacttctcacgaaatgtgcaagatggtgctgctaggagtttctgtcatgatctcgctttgatgtgccaagtatcaggaatgga

SEQ ID NO: 45207 - DNA, 321 bp, Zea mays
actgcctcgtgtggccgtcgtctcccgttcggaacgccaagccccccctccggcgaaatggcccccaagcgaggtggcagggcgccggtgccggccaagaagaagacggataaagtgacgaaccctctattcgagaagaggccgaagcagttcggcatcggcggcgcgttgccgcccaagaaggacctgcaccggttcgtcaagtggcccaaggtcgtgcgtatccagcggcacgccgcgtcctcaagcagcgcctcaaggtaccaccggcgctcaaccagttcacccgcaccctcgacaagaacctcgctacgaacctgt

SEQ ID NO: 45208 - DNA, 318 bp, Zea mays
gcagctgttgctgctcgtgttgagtctagagccgtagccagacatgggactggaggacgagcaaaagatgcttaccgaatccggagatcctgaggacgaggaagaggaagaggaggaattagtggatcccctaacaacagtgagagagcagtgcgagcagttggagaaatgtgtaaaggcccgggagcggctagagctctgtgatgagcgtgtatgctctcgatcgcatacagaagaggattgcacggaggagctctttgacttgttgcatgcgagggaccattgcgtggcccacaagctctttagcaacttgaaatg

SEQ ID NO: 45209 - DNA, 315 bp, Zea mays
  unsure (1)..(315): unsure at all n locations
cgacgatggcgagcggcacatgaagagggagatcagcgagacccacgacaccctccgcttcggcctcaatgccggcgtcaaggcncacctcgcgccgccgcacccgctccagtccagcatccaatcggaggccaagttctgggcggacaagaagaagtttgggacagaggccatctacggatccgccttgaacatccgcaaggatctcgatgcccaaatcctctcaaggttccaaaggccccctggtgctttgccatcatctctgcttggatatgaggcactgacaggttccctagatgattttgcgttttgaag

SEQ ID NO: 45210 - DNA, 321 bp, Zea mays
tccaccagcaaatccccaattcctccgagttcgagcgaccatgtcggggcgtggcaagggcgggaagggtctgggcaaaggcggcgccaagcgtcaccgcaaggttctccgcgacaacatccagggcatcacgaagccggcgatccggaggctggcgaggaggggcggcgtgaagcgcatctcggggctcatctacgaggagacccgcggcgtgctcaagatcttcctcgagaacgtcatccgcgacgccgtaacctacacggagcacgcccgccgcaagaccgtcaccgccatggacgtcgtctacgccctcaagcgcca

SEQ ID NO: 45211 - DNA, 296 bp, Zea mays
tgcccgtgctggtgccattgccccatgtgaagtcactgtgccagcccagaacactggtctcgggcccgagaagacctcctttttccaggctttaggtatcaacactaaaatctccaggggcaccattgaaatcctgagtgatgtgcagctgatcaagactggagacaaagtgggagccagcgaaccacgctgctgaacatgctcaacatctcccccttctcctttgggctggtcatccagcaggtgttcgacaatggcagcatctacaaccctgaagtgcttgatatcacagagga

SEQ ID NO: 45212 - DNA, 297 bp, Zea mays
taccacactgtgcccatttacgaaggatatgcccttcctcatgccattcttcgtttggatcttgctggtcgggacctcacagactccctcatgaaaattctcactgagaggggttactccttcacaacctcagccgagcgagaaattgtaagggacatcaaggagaagctagcatatatagcccttgactatgagcaagagttggaaactgccaagaacagctcttcagttgaaaagagctatgagctacctgatggacaagtaatcaccattggtgcagagagattcaggtgccct

SEQ ID NO: 45213 - DNA, 294 bp, Zea mays
cttctggtcaccttctgttctctccatgtagcattatgtatgaaactctttgagcacaaacctttcgatgcaaggaccgtcatgggattcggagtgctcaatggcatatcgattggacttcttaacttgagtttgggtttcaattctgttggtttctatcagatgacaaagctggctattattccctgtactgttatactggaaacccttttcttcaggaagaaatttagtcggaacatcaagctttcccttagtgtgctccttcttggtgttggtgttgcactataactgatc

SEQ ID NO: 45214 - DNA, 165 bp, Zea mays
cactggttcagtgaccctgaagctgtacaagggttccgtgaacatcgcgtcccggaagagcccctacagcctgtacagggaagatatctcctcgtttgagaacggggagatctacaaccaagctgacgccgaggggttcatcaggatgtacggcctaccgacacg

SEQ ID NO: 45215 - DNA, 299 bp, Zea mays
agatctggctttggttgtggctaagcctgatccaaaaccagagcctaaacccgaaccaaaaccagagccccaaccaaaaccagaacctaagcccgaaccaaaaccacagccagaacctaagcccgagcccaaaccaaagcctgaccctccacttcctcagttgatagctgctggtgggatgtggctattaacaattattgtagtgtttaaataaaatgccatgttgcagcgtgcttttgtaggtgctgctacttgttgtatctatcctatcttttctttgtcattttttgtatgttatg

SEQ ID NO: 45216 - DNA, 294 bp, Zea mays
caagctcaaggctgagcgtgagacaggtatcaccattgatatcgctctgtggaagtttgagaccaccaagtactactgcacggtcattgatgcccctggacaccgtgacttcatcaagaacatgatcactggtacctcccaggctgactgtgctgtccttatcattgactccaccactggtggttttgaggctggtatctccaaggatggccagacccgtgaacatgctctccttgcgttcacccttggagtgaagcagatgatttgctgctgcaacaagatggatgcaacact

SEQ ID NO: 45217 - DNA, 164 bp, Zea mays
ctcgattccgctgctctctccctcttcctctcccccgcggcggaccataaaccctaggcctcgccgtcgtcggaggcgccgccgcgatgtcgcactttggaaggacgggtccgccggacatccgcgacaccttctcgctgctcgtcctcaacatcagcttccga

SEQ ID NO: 45218 - DNA, 190 bp, Zea mays
tcagagagtatgaggacttcaaggtcagaatcaatgccttggttgctaaagcccaaaaggttcctgaggaaggatggacgatgcaggatggaactccatggcccggaaataatgtccgtgatcatcctggaatgattcaggttttccttggtcaaagtggtggccatgatgtggaaggaaatgagctgcc

SEQ ID NO: 45219 - DNA, 180 bp, Zea mays
catcaaacaaaattaaggttttgatggcaacgaacagaatagacattttggatcaagcccttctgaggcctggccgcatagacaggaagattgaatttccaaatcctaacgaggattcacgtttcgatatcttgaagatccattcaagaaaaatgaacttgatgcgtggcattgatctga

SEQ ID NO: 45220 - DNA, 289 bp, Zea mays
tagctccatagcacttgttccagctagctaggagagagagctttgtttaggcggcggcaagatgaacaggaagccaggagactgggactgcagggcgtgccagcacctcaacttcagccgtcgggatgcatgccagcgctgcagtgaaccacgtggagttggtgatcgtagcggcggtggtggcgacttgggtgggcgtggtggttcctccttcggcggtggctttggtgctggctctgatgtccgccctggtgactggtactgctcctgcggcgcacacaacttcgcc

SEQ ID NO: 45221 - DNA, 285 bp, Zea mays
ctccactgcatctgccatcttggggaactctttggcctctggaaccggcctgcccagccgctcgatcgacgttcggcgaggaggctgattcggtctgttggatcggaggcgcggcgatgggggcgctgtcgcggccggaggaggtgctggcgctggtaaagctgcgggtggcggcggggcagatcaagcgccagatcccgcccgaggagcactgggccttcgcctactccatgctccagaaggtgtccgtagcttcgctctcgtcatccagcagctcggacccga

SEQ ID NO: 45222 - DNA, 291 bp, Zea mays
attctcctcaaggaggggctccagtgggactggttcatcaatctcagtgcgtcagattatccgctcatgacacaagatgacatacttcatgtcttctcttctttgccaagaaatcttaattttatagagcactttcggttatctggatggaaagttaatataagggcaaaaccaattgttctggacccagggctctatctgtccaagaaatttgatcttactatgactactgagcggagagaattgccaacatctttcaaattatatactggttctgcttggataatgctt

SEQ ID NO: 45223 - DNA, 294 bp, Zea mays
tagcggcggcaccggcaggcggcggccctcgggcattgtcccagcgggagcaggacatccagatgatgctcgccgccgatgtccacctcggcaccaagaactgcgacttccaggtggagcgctacgtgtacaagcgccgcactgatggtatctacattattaaccttggaaagacctgggacaagcttcagttggccgccatgggtcatcgttgccattgagaatccgcaggacattatcgtgcagtctgctaggccctatggccagagggctgtcctcaagtttgcgcagtac

SEQ ID NO: 45224 - DNA, 294 bp, Zea mays
cttctccaggaaagtgttcgtcctcatggcgccgccgcagccgaagtcgggcctcttcgtgggcatcaacaagggccatgtcgtcaccaagcgcgagcagcctctgcgcccgtcccaccgcaaggggaaagcaacgaagagggtgtccatggtcaggggcctgatcagagaggttgctggctttgctccttatgagaagcgtatcaccgagcttctgaaggttggcaaggacaagcgcgctctgaagcttgccaagagaaagcttggaactcacaagagggcaaagaagaagag

SEQ ID NO: 45225 - DNA, 290 bp, Zea mays
cctgttctggagactcctgatggccctgtttttgagagtaatgctatcgcacgctatgttgctcgcttgaaggatgacaaccctctttttgggtcttcccgtattgaacaagcccacgttgagcaatggatggattttgccgcaacagaagttgatcctggtgttgcatggtacttgtatccaaggcttgggtacctcccttatgttagcacaactgaggaaacagctatttcttcattgaagaggtcgcttggtgctctgaacacacaccttgcttcaaacacatacct

SEQ ID NO: 45226 - DNA, 300 bp, Zea mays
cgctctcgctgcagaggaaaggcgaagatggcgatgaccgtcgaagtgcttgctgcactcgcgttcatgttttccacgagtattctactgcagatactggcatgcgctttgtacaacaactggtggcccatgtcagcagctctcatgtacgtccttgtaccaatgccatgcctgttttttggtggtggatccacacacttcttgaccagcagagaaggtggagggtggattaatgctgcaaaattcttgactggtgcgtcggccatgggaagccttgctattccagcaattctgaggcac

SEQ ID NO: 45227 - DNA, 281 bp, Zea mays
aaaaaccatgaagatgaatggcgctactttgtccattatctcggttggaataagaactgggatgaatgggttgcaaatgaccgcatgttggaattgacggaggaaaacgtgcgcaaacaacaagagcttgataagaatcaggtagttgacaaaacaatgaagtctggacggtcaacacagcataaaccaaaagtctccaatgcggatgcaaaagctgataaagatgacactaagagtctcatttcagtgaaggggaagaaacgtaaaagtcagcttgggac

SEQ ID NO: 45228 - DNA, 278 bp, Zea mays
gctgcctcagcggcgatggactccatgttgcaactggttcttatagtaatttgtttcgtgtttttggttgttctcctgaaagcgtggaggcatcaacgttggaagccagcagaaatcccatgaggcgacaggttgctgatccagcaaggcctgcacggactctgaccggtgctgtgaggagaggtggagagaacacaagcgttgacgccagcggaaactcttgcgacctctcaacaaagctgctccatcttgcgtggcacccaactgagaactccatc

SEQ ID NO: 45229 - DNA, 282 bp, Zea mays; identical to SEQ ID NO: 44581

SEQ ID NO: 45230 - DNA, 289 bp, Zea mays
gcatttcgcaattgctaatgatgatgtctttgggttagctgagaatatcaaatccaagggtggtaagatcactcgctaacgtggtcctgtcaagggaggatccactgttattgccttcgcacaggatcctgatggctacatgtttgagcttatccagagggctgacacacctgagcctctttgccaggtcatgcttcgtgttggtgaccttgagcgttctatcaagttttatgagaaggccctagggatgaagctcctaaggaagaaggatgtacctgattacaagtat

SEQ ID NO: 45231 - DNA, 280 bp, Zea mays
gaccaccaaacaagtgccagcgccctctcgcagtcgccgcaatggagagcaccttcatcatgatcaagcctgacggcgtccagaggggcctcattggtgagatcatcagccgttttgagaagaagggcttctacctcaaggccttgaagcttgtcaacgtggagaggtcgtttgccgagaagcactacgccgatctcgcctccaagcccttcttccagggcctcgttgactacatcatctctggccctgtggtggccatggtctgggagggcaagagcgt

SEQ ID NO: 45232 - DNA, 279 bp, Zea mays
agacagacacagatcgcgcgcggagatgtcgtcggactcgtcgtcgtgggcgcgcgccctggtgcagatctcgccctacaccttctccgcaatcggtatcgccgtctccatcggcgtctccgtcctcggcgcggcatggggtatcttcatcacggggagcagcctcatcggggccgccatcaaggcgcccaggatcacttctaagaacctcatcagtgtcatcttctgtgaggctgtcgcaatttatggcgtaattgtggcaatcatcctccagacaaa

SEQ ID NO: 45233 - DNA, 277 bp, Zea mays
aggtcccgcgggtctgtctcttgcttcaacagtgtttggacggaacagatccggggactctcttccagcctccgaccgccctccgatttcctctccgcttgcaacctccgggaccatcttctcggccatctcctgcttctgggacctgccagcaccatttttgtggttagctccttcttgccaaccaaccatgagctcccagattcgtcagaattattccaccgacgtggaggcagccgtcaacagcctggtcaatttgtacctgcaggcctcctac

SEQ ID NO: 45234 - DNA, 280 bp, Zea mays
acttcgaaatgagggctacaacttgacactcttctggaccacaatgctcgatacattgtggcaaagccttgttcttttctatgtccctttttccacatacaatatcagtacaatggacatatggagtctgggaagtatgtggacaattgctgtggttataattgtcaatatccatttagccatggacattcaacgttgggtgcttataacccatcttgctgtatggggttctatagctgctacgtttttgtgcatggtgttaattgactctataccaatt

SEQ ID NO: 45235 - DNA, 276 bp, Zea mays
caccaacacaccgcgcgcgtcctcatcctcacttcaggtctgcagcccccaactacccccagcctcggaaggaaccttccagaagcgcaagactctaaaggccgtcgccttcccattcttcctcgccgcgggggtcgcctgagatcacataaacaatggtgaaggctgttgctgtgcttggtagcagcgatggtgtcaagggcaccatctttttcacccaagagggagatggccctaccgctgtcaccggaagtgtctctggcctcaagcctggcg

SEQ ID NO: 45236 - DNA, 274 bp, Zea mays
aggtctttccgttacccggcggctttaaaccctagttcccattccatcttcgtttccgctccgccgccgtcgatggagttctggggtctcgaggtcaaacctggatccactgtcaagtgtgagcctggacatggctttatcctgcacgtttcccaggctgcccttggggaatcaaagtaaagtgacagtgccttaatgtatgtcaaagttgatgacaagaagcttgccattggaacgctctctatcgacaaatacccacagatacaattcgatt

SEQ ID NO: 45237 - DNA, 273 bp, Zea mays
ccctgaggtgctcgacctttctgaggaggacctgattgagaagtttgccactggtgtctccatggttgcctccctgtcactggcgatctcgtacccgacccttgctgctgtgccccacatgttcatcaatgggtacaagaatgtgcttgctgttgctgtcgagacagactactcatacccacatgctgacaagatcaaggagtacctcaaggacccaagcaagtttgctgttgccgccccggttgctgctggggactctggcgctgcagctgc

SEQ ID NO: 45238 - DNA, 274 bp, Zea mays
atcatgataatgtgagatgggatacgtgggcaagatttgtagaaaggagcgtcgcgtaccagccttggatctggactgctggaaatcatgagatagatttcgctcctgaacttggtgaaacaaagccattcaagccattcagccataggtaccccacaccctacaaggcttctggtagcacggcaccttattggtattccatcaaaagggcctctgcctacattattgtcttggcatcgtactcagcatacggcaaatacactcctcagtacaa

SEQ ID NO: 45239 - DNA, 273 bp, Zea mays
agctctccgtgctgcagttctataaggtggacgacaccactagcaaggtgacccgcctccgcaaggagtgccccaactcagagtgcggcgcgggcgtcttcatggccaaccacttcgaccgccactactgcggcaagtgcggcctcacatatgtctacaaccagaaggcgtaattgcttgccccgatttgctttatccgcctaccctatcgagcatccagctgttggttactcgaattgtatctcatgtagatctgtctgaggttgaaactta

SEQ ID NO: 45240 - DNA, 277 bp, Zea mays
cagccgtctatttctgtactcggacccgacctcaatatggctttgatgtttggggccaaggaacatgggtcaccgtctcttcagcctccaccaagggctcatcggtcttccccctggcaccctcctccaagagcacctctgggggcacagcggccctgggctgcctggtcaaggactacttccccgaaccggtgacggtgtcgtggaactcaggcgccctgaccagcggcgtgcacaccttcccggctgtcctacagtcctcaggactctactccct

SEQ ID NO: 45241 - DNA, 267 bp, Zea mays
ccaccaaccttgactggtacaaaggcccaaccctgcttgaggctcttgatcagatcaccgagcccaagagaccctcagacaagcccctgcgtctccccctccaggatgtgtacaagattggtggtattggaactgtgccagttggtcgtgtggagactggtgtcatcaagcctggtatggttgtcacctttggtccaactggcctgactactgaggtgaagtctgttgagatgcaccatgaggctcttcaggaggcccttcctggtg

SEQ ID NO: 45242 - DNA, 266 bp, Zea mays
aaagcttccatgaaggaggctgggaaccgacgaggactctctcattgagatcatctgctccagaaccaaccaggagctgcaggaaattaacagagtctacaaggaaatgtacaagactgatctggagaaggacattatttcggacacatctggtgacttccgcaagctgatggttgccctggcaaagggtagaagagcagaggatggctctgtcattgattatgaactgattgaccaagatgctcgggatctctatgacgctggag

SEQ ID NO: 45243 - DNA, 267 bp, Zea mays
ccagaacagcaagtcaccccaaatcaaaactaagcagttgtgggactatgaacttgattttctagttgccatattgggattgcttgtgaaccttgtggagaaggatagccttaatagggtacgacttgcgaatgctcgtgtttctgttaatctatctcaaaatccagatagcaaagaggtacagagggatgttatacccctgctctgttcaatattcttagcgagtcaaggtaccggggaaactgctgaagctatatcaccggatga

SEQ ID NO: 45244 - DNA, 266 bp, Zea mays
attcaatctttcatagacagggtggccgaccgtcttccgagttggaaagctgatcttatgactagagccggtaggaagattatggttcagcatgtgctctccagtatgatcatatatttggctatggccattgattttcctcaatgggctttggaggcaattgataaaattagaaagggttttctttggaaaggccgcaaggaagtcaggggaggacattgtctggttgcttggggaagggtgtgcagacccctccatttgggagg

SEQ ID NO: 45245 - DNA, 267 bp, Zea mays
gggtttttgattttagccgccgccgctgctcatctcacatccctcgagaagacgcctgctcctcgccgatcgatacgatggccgtcttctccgacctccacaccgccgacggcctcaagtccctcgaggctcacctcgccggcaaaacctatgtgtctggtgactccattactaaggatgacattaaggtcttcgccgcggtgccgtcgaagcctggcgctgagtttcctaatgccgcccgctggtacgagaccgtctctgcggctg

SEQ ID NO: 45246 - DNA, 273 bp, Zea mays
agaaactagtggatatgccagaagatgaagccgccaaatattgtgctgaaaaccagataacaagcatgatcccaaaaattatcaagactggttttgcagcaattcatctgatatacttttgtcactgctggtcctgatgaggtaaaatgttggcagatcagacgccagactaaagctcctcaagctgctggtgcaattcacactgattttgaaaggggtttcatatgcgctgaggtaatgaagtttgaagatctgaaagaactgggcagtgaa

SEQ ID NO: 45247 - DNA, 274 bp, Zea mays
cgacatcttcgagaagctggccggcgaggcgccaagctcgcgcgctacaacaagaagcccaccatcacctcccgcgagatccagacctccgtgcgcctcgtgctccccggcgagctcgccaagcacgccgtctctgagggcaccaaggccgtcaccaagttcacctcctcctaggcttgcacgctcgccctttgtaggcttctcttgtgttgatgttcgccttgtgttgtagttagatgttgctggtttctctgtcggcgctgctctgcttctg

SEQ ID NO: 45248 - DNA, 272 bp, Zea mays
tgaagcggatcaaattgggatcaaaatgtatgcctgggacgatttcttgaaagtggggaaggataatcctcgtcaaccttgccctccgcaagcaagtgacatctgcactgtcatgtacacgagtgggacaagcggacagcccaaaggtgtgatgctgacccatgaaagccacgccatgtatgtgaaaggggtggacctcttcatggaccagtttgatgataagatgacaacagatgatgtcttcctgtcgtttctcccgcttgcacacatct

SEQ ID NO: 45249 - DNA, 273 bp, Zea mays
  unsure (1)..(273): unsure at all n locations
tgacagaaggtatgcttttttatctgtctagaactacacccacatagtatggattatatttatagagttaggaataattctcttgcagcattggctgatgatgggaagtttctacttgctgcacgcaagtgtcgtaagcccacctgcacagactacctaatttctcttgataaggttgatatgtcaaagggaagcagcacctatattggcaagctaaggtcagcntttgagatatgatgtcggaatactttaaagctactatttttgctagct

SEQ ID NO: 45250 - DNA, 287 bp, Zea mays
gtcaaagtaaaaattcgcttgaatctacatggtttggtttcagtcgaatctgccgttttgataaatgacgatcaaaggaatggaagttctactgatcatatggaggtggatagcagtggtgatgacatgggtcacaagtcaagaagtgaaaggtctatccagcggcaggagttgccaatcactgagtacatatatggtgcaatgagcaagcatgaattgctggaagctcaagagcaagaacagcaattggcttatcaggataaactggtggaatggacaaaggacag

SEQ ID NO: 45251 - DNA, 275 bp, Zea mays
agacttcctcgtgctgtgtctgtctgtctgtcgctctcgctctcagacgactgggccgccgccgcttggtgctgaggctttggttggtctcttcggcggcgacgagcacccaccagttctgtagaaatggctgatggtgaggacatccagcctcttgtctgcgacaatggcaccggaatggtcaaggctggttttgctggcgacgatgcaccaagggcggtttttcctagcattgttggccgtcctcgccacactggtgtcatggtagggatggg

SEQ ID NO: 45252 - DNA, 273 bp, Zea mays
cactgagctgctgatcaggaagctgcccttccagaggctcgtcagggaaattgcacaggacttcaaaactgatttgcgtttccagagccatgcggtgcttgccctccaggaggctgctgaggcataccttgttggcctgtttgaggacaccaacatgtgcgccatccatgctaagcgtgtgaccatcatgccaaaggacattcagctggcaaggaggatccgcggcgagagggcctaatcgccacctcaaacatcgtgacaaaaacatgaagt

SEQ ID NO: 45253 - DNA, 254 bp, Zea mays
gtcctgacctcgctgacttcatcactgccttcctagagagctacagacagaggatattcaagctgttgacttctgcatattccacaattagagttgctgatgtggctcatttcatggggatgagtgaggaggatgcgacaaactatgctgcgcaaaacggttggagtttggatgcagcggccaagatgcttactgtcaaaaagccaaagtctcagaccaaccagaagcttgatgctagcaaactgcagcgtttg

SEQ ID NO: 45254 - DNA, 283 bp, Zea mays
attatgattgataacattgataaggttcttgaaagaggtgatcgtttggaactgctggttgacaagactgcaaatatgcaaggaaatacagttcgattcaagagacaagctcggcggttcagaaacactgtttggtggagaaatgtcaaactcacggccgcattgatacttctcctcctggtaataatatatgtcgttctagtcttcgtgtgccatggtttcaccctaccaacttgcataaggtaaggcatgatgtgcacatagtgctttttgctgtgcatgt

SEQ ID NO: 45255 - DNA, 268 bp, Zea mays
acaccagccgccgtcatgtcgaagcgaggtaggggaggttcggctgggaacaagttccgcatgtcactgggtctaccggtggcggccacggtgaactgcgcggacaacacgggcgccaagaacctctacatcatctccgtcaagggcatcaagggccgcctcaaccgcctcccgtccgcctgtgtcggcgacatggtcatggccaccgtaaagaagggaaagcccgacctcaggaagaaagtgatgcccgccgtcatcgtccgccagc

SEQ ID NO: 45256 - DNA, 272 bp, Zea mays
ggcatttctagtgatggaaatgcatatttgcaagagagccagttttggaaactttacaaggaagatcctgcagcatgtgcaatcgtgatgaaaacttcagttggccttgtttacctgcttgcctgtctgctggagcctttcatgccctctttttctgatgaagtgttacgtcaactaaatttatctccagaagaaaatctgtcattaagtgaagaaaagggagaaattgcgaaggcaaaaactccttggaattttgtaccagcaggtcacag

SEQ ID NO: 45257 - DNA, 272 bp, Zea mays
actgcaagctcctgagggagttagatttgcaggaaaatgatgtggaggaccgtgggcccagatggctttccttccctgattcctgcacttcgctggtctccttgaatttcgcttgcatcaaaggggaggtgaattctggtgcgttggagagacttgttgctaggtctccaaatctacgcagtttgaggttgaatcgttctgtttcagtagacacactctcaaagatactattgcgagccccaaatttggaagacttggggacaggtaatctg

SEQ ID NO: 45258 - DNA, 268 bp, Zea mays
gcaagttcaatctcacctccaaccatgggtaaagagaagtcccacatcaacattgtggttattggccacgttgactctggcaagtcgaccaccacaggacacctgatctacaagcttggaggcattgacaagcgtgtgatcgagaggtttgagaaggaggctgctgaaatgaacaagcggtccttcaagtacgcatgggtgctcgacaagctcaaggctgagcgtgagataggtatcaccattgatatcgctctgtggaagtttgaga

SEQ ID NO: 45259 - DNA, 285 bp, Zea mays
ctgaaggaaaagattgatcgccgttctggtaaaaagctggaagatggccctaaattcttgaagtctggtgatgctgccattgttgatatggttcctggcaagcccatgtgtgttgagagcttctcagactatccacctttgggtcgctttgctgttcgtgatatgagacagacagttgcggtgggtgtcatcaaagcagtggacaagaaggctgctggagctggcaaggtcaccaagtctgcccagaaagctcagaaggctaaatgaatattatcctaatacctg

SEQ ID NO: 45260 - DNA, 305 bp, Zea mays
accattggctatcattgcagtagctagtttgttggttgaaagatcacgtgaggagtggccagaagtgtacgacaagattggacttgggaatgaagacaatacagcaaagataatgtcatacagctactatgatctgcctccttatctcaagccatgtctgatgcaactaagcatatatccagaagactacctcattaatgcgaaagttgcaatatggatgtggataggtgaaggtctagtccatcttgagaaacaagatgttagcctatttgaggttggagaaagatacttcaaggagcttgtga

SEQ ID NO: 45261 - DNA, 305 bp, Zea mays
aaaaattggttactgccaccacacgtcgaaattctccaaatagtatagattccaagattcatcacaacaatcttatcaacaatattctggcaaagatagaaggtaatcttgcccaggctgaggatgccattatgctagataaggatggctttgtatcagaaacaaacgcaacaaatatttttatggtcaaaaagggaattgtattgacacctcatgctgactattgccttccaggcattacgcgagcaactgtcatggatcttgtggtgaaagaaaactttgtgttacatgaacgacgcattagt

SEQ ID NO: 45262 - DNA, 309 bp, Zea mays
cagggcaggaagaccgaagaccgagccgtgcggcggctcgggacgggaacgggacaggaccccaaaatctcagatccttcctgcccgcccgcccgtgcccgtcgacgcaacgttcttgccggccgcgcctcacctccgccctctcctcctccagggggatcggatacgccacaggctgcgcgatggtgctgtgggtcttcggctacggctccctcatctggaaccccggcttcgacttcgacgacaaaatcctcggcttcatcaagggctacaagcgcacctttaatctcgcttgcattgaccacagag

SEQ ID NO: 45263 - DNA, 309 bp, Zea mays
gtctgcttccattctgttcaagttagcgccgctaatccgctccctattcaccatccaatccaatcggcttcccccaggcacccatggcgacggcggtggaggttcccgtggaggcgccggtgaggacagtgaaggtcaccaatgtctctcttagtgcaactgtgcaagacattaaggagttcttttccttttcaggagatattgatcatgtggagatgcagagtggtgatgagtggtcccaagttgcatatgtcactttcaaagatgcacaaggcgcagaaacagcacttcttctttcgggtgccacaa

SEQ ID NO: 45264 - DNA, 310 bp, Zea mays
ctctctttcgctcaggcccgtggcgccgacaggatgggcaagtgtcgtggacttcgtactgctaggaagctccgtagtcaccgacgagaccagaagtggcatgataaacagtataagaaagctcatttgggcacagccctaaaggccaacccttttggaggtgcttctcatgcaaaaggaatagtgctggaaaaagtaggagttgaagccaaacagccaaattctgccattaggaagtgtgtaagggtccagctgatcaagaatggcaagaagatcacagcctttgtacccaatgacggttgcttgaact

SEQ ID NO: 45265 - DNA, 311 bp, Zea mays
gccatccctcactctcctccgaagccatcgtccacgtcccagcctccccggactctaggggcagaagctgcagcgtcgagatggtgaaggggcgcacggggcagcgcgtgaggctctacgtccggggcaccgtccttggatacaagcggtccaagtcgaaccagtacgagactacgtcgctggtgcagatcgagggggtgaacaccaaggaggacgtcgcgtggtactgcgggaagcggatggcctacatctacaaggccaagaccaagagcagcggcacccactaccgctgcatctggggcaaggtcgcc

SEQ ID NO: 45266 - DNA, 304 bp, Zea mays
  unsure (1)..(304): unsure at all n locations
gttgtgctaaatactgaacataatttgggtgtgttaatattttatttattgtctgcacatggtttgcgttcttctgatgatggctcatggatcctgtaaaatatgtgttaggatttggatatccatgcgggcactaccacagtccacagggtgctcatctcttgtgttcttggctcttgcaagcattaggtcgtttctaaaaccacattggcaaaatgaactctatggtgtttgaggttgctgaattggatggagcaacaatgatttgtcgcactaacaatanaagaaaaggttacttgttggt

SEQ ID NO: 45267 - DNA, 299 bp, Zea mays
atttgatggggtgacctccatgatgtatactcaccatggattacaagtgacatttcctgggaactatggcgagtattttggatttgccactgatgttgatgcagtagtttacctaatgctggtatacgatcttattcgtgggctttatccagaagctgtatccattggcgaagatgtcagcggaatgcctacattttgtatccctgtccaagatggtggtgttggttttgattatcgtcttcatatggctgtcccagacaaatggattgaacttctgaagcaaagtgacgaatattggg

SEQ ID NO: 45268 - DNA, 296 bp, Zea mays
cacaagggaggactgttggatcattatcaaggacaaggtctatgatgtcactccttatgtagaggaacatccaggcggagatgccattctaaataatgctgggggtgattccacggagggcttttttgggccacagcatggcactagggtcttcgatatcatcgaggatttctgcatcggtcagttgaaggcttcatgatgatgacaggatagtttgtattgaatttgttacgggacataaatttgtgagaagctacattttatctatgtttgagcattgcgaccatgagcatatg

SEQ ID NO: 45269 - DNA, 300 bp, Zea mays
tgttgttaggaagagaatcaagctcagtgctgagaaggctatcttcatatttgtgaaaaacacccttccaccaacagctgctctgatgtcttcaatctatgaagagaacaaggacgaggatgggttcctctacatgacttacagtggtgagaacaccttcggactgctctagatggcccgcaatggggtcgccttgcccttgcccatgcctcctgtaaataagacctgccaagcaactgtgtatattctggtttcgtcgtcgcaagtggttgcgctctactgctaaagcctacctatcag

SEQ ID NO: 45270 - DNA, 289 bp, Zea mays
gtgatgggtcattggtatggttatgttgtccccgacgatgtgcctgttttgctgcataaacatattggacaaggagaagttgtggaccgtctatggaggggacagatgggtttatctgaggagcagcagaagcaagctctcgagcttcggagcatgacaaatggtggcaaagaatccttgaagaaaccgaaacagacggtgcttcttgtaaccctgcagcaactgctggatgctgccaaggcaatggtggcttcaatcgagcttctgagcagcagaagcaagctctcga

SEQ ID NO: 45271 - DNA, 296 bp, Zea mays
atttggcagcaagctgaggaaggatgcgaagctgataggaggaatgaggattatagttcacccagctctttgagacccccatctaatacaaataacactgaggacgactttgatgacttcgatcctcgtggatcaaatggcaaaacaactgctaagtcaaatgaggtggatctgtttggcccaaacttgatggacgatttaattgatgcatctgcagcaactccagctacagacaatgctgcagaaccacaggttgatctgtttgctgatgcagattttcaatcggcaaccgcaag

SEQ ID NO: 45272 - DNA, 135 bp, Zea mays
ggagaaggcgtccagtggcgggacaaggaggcaaagtcgccaagaaggccgctaagtcccccaagaaggctagactgactgtccggtgtgtctgatgttagcagacttgttacgatgttatcgagttagatggcg

SEQ ID NO: 45273 - DNA, 299 bp, Zea mays
  unsure (1)..(299): unsure at all n locations
gtcgtgaaaatcctccgcagcttgatgagcatttctcgaaaccaatgaaagagtttgtctcactatgtttaaagaagaatccagcagagaggcctagtgccaaggagcttcttaagcatcgtttcataaaaaatgcccgaaagactccaaagcttttggagcgaataagagagcggccanaatttgcagcaaaaagcatggatgccacacaaaatgggcaaacacatgatgaagaggaggattttggtacaggcactatcaaggtcaataggacaaaagatacagctccatctttgagt

SEQ ID NO: 45274 - DNA, 284 bp, Zea mays
actgattggagtgtcagagccatctctgccacaaacttgtatcttcgtgtaaatcacatttatgtcaattctgatgatataaaggagactggctacacttacattatgccaaagaacatattgaagaaattcatatgcatagcagatctgcggacacaaattgctggatttttgtatgggctgagtccacaggacaatcctcaagtcaaagagattaggtgtatagccatccctccacagcatggaacacaccagatggtgactcttccagcaaatcttcctga

SEQ ID NO: 45275 - DNA, 306 bp, Zea mays
tatgaaggcaatgttgacatagacgcagtatcagatcctaccatgaaggcttcaatactagcacaaatcaaccattttggtcagacccccaaacagttattccagaaaccacatccacagaggcggactgacaggaaagtccctcctcatcctctacggtactgtgcctatctaacacagcaggagattcgcaagacagcatcttcggtgtcccagattgtctcctacaatgataagatcctaattgctgcagttaactgcatgctcaagccgctaacttataatgaatacatttcctggggatcc

SEQ ID NO: 45276 - DNA, 195 bp, Zea mays
gtcctgttggtgaggacatgttccattggcaagcgaccatcatggggccttcggacagcccatttgcaggtggggtattcttggtgaacattcacttcccaccggattaccctttcaagccaccaaaggtgtctttccgcaccaaggttttccacccgaacatcaacagcaacggcagcatttgccttgacattc

SEQ ID NO: 45277 - DNA, 292 bp, Zea mays
ggaagaaggatcccctttctctacctggaggacatccaaatgaggttcatgaaaaactacggcagagtcgcccactctgcgctggcttacgccatgaacgatgagttctccagagtgctccatcagcaaatggagttcttctccagcaacccaagcgccgacacactcaaccgtctccgtggagaagtcagcgagatacacaccgtcatggtcgacaacatagagaaaattcttgacagaggcgatcgcatctcgctccttgtcgacaagacatccaccatgcaagacagcg

SEQ ID NO: 45278 - DNA, 157 bp, Zea mays
agcagtctcggaagagaactatccagaagcgcaagagtccaaagccgtcgccttcctatccatcccttcctcgccacgggggtcgcctgagatcacataaacaatggtgaaggctgttgctgtgcttggtagcagcgatggtgtcaagggcaccatc

SEQ ID NO: 45279 - DNA, 290 bp, Zea mays
gtgactgggcgtgtctggaagggaaccgctttcggtggcttcaagagccggacccaggtcccatggcttgttgacaagtacatgaaaaaggaaattaaggtggacgagtacattacgcacaacatgaacctggctgacatcaacgacgccttccacctgctgcacgaaggtggctgtctgcgttgtgtgctggcaatgcagatttgaaattcctaagctaagcagtttttgttttggaactagaactcctttttgcctcgttaggcctggacccgctgtataatgctatg

SEQ ID NO: 45280 - DNA, 290 bp, Zea mays
actcgagccgagtactagacattgaggggacaaccactccaatatcatttgtgactgatgtcatgttcccttatgctcgtgataatgtacgaaaacatctgacttctacatttgattttgaggaaactaaagaagacatcaaactattgcgcatccaaattgaagatgatctacgaaatggagttgctggggctgttccagttccacctgatgagggtggcaaagaagaggttatcaattcattggttgccaatgttgaatcaatgattaaagcagaccggaagatcaca

SEQ ID NO: 45281 - DNA, 296 bp, Zea mays
ccgttgctcgcctcgggtcaaaccctaagcagggagttgatttatccgctgcagccatgagtaagttgcagtctgagtctgtcaaggatgccatctcccagattgttggggatgccaaggagaagaataggaagttcactgagactgtggaacttcagattggtctgaagaattatgatccacagaaggacaagcgtttcagtggctctgttaagttgccccatatccctcgtcccaagatgaaggtgtgcatgcttggtgatgcccagcatgttgaggaggccgagaagatggga

SEQ ID NO: 45282 - DNA, 297 bp, Zea mays
ggacagccattgtcttgccgtcaccatggccggagaagtgcagagttgtggccgtaaccaaaacggacagctaggccttggaaccactgaagactcgctgctcccacaaaagattcaggcttttgagagtgtttgcgtgaaaatgattgctgacggtgccgaacatactgctgcagtaactgaagacggtgacctctacggatggggttggggtcgatatggaaacttaggtcttggtgaccgtaatgaccgtttgcttcctgaaaaagtatcttctgtggagggtgagaagatggt

SEQ ID NO: 45283 - DNA, 66 bp, Zea mays
ggcatacatggttatgagttttgtactacccttgttgcagtgtgttcctgtttaccttttgtgctg

SEQ ID NO: 45284 - DNA, 292 bp, Zea mays
cgagaactccatttcgatctcatttgaaatcaacccatcctcgtttcctccgtctagcagcctctcaccctcatggccaagatcaagatcgggatcaatgggtttggcaggatcggaaggctggtggccagggtggccctgcagagcgacgacgtcgagctcgtcgccgtgaacgaccccttcatcagcaccgattacatgacctacatgttcaagtatgacactgtgcacggacagtggaagcaccatgaggtcaaggtgaaggactccaagacccttctctttggtgaga

SEQ ID NO: 45285 - DNA, 290 bp, Zea mays
agatggtctcggtgtccggcgagccgctcgagaggctgggagcctacatggtggaaggtctcgtcgccaggctcgccgcctctggcagctccatctacaaggctctgaggtgtaaggagcccaggagctccgacctcctctcctacatgcacttcctgtatgaggcctgcccctacttcaagttcggctacatgtcggccaacggcgcgatcgcggaggccgtcaagggagaagacaggatccatatcatcgacttccacatcgctcagggggcgcagtgggtctctctc

SEQ ID NO: 45286 - DNA, 150 bp, Zea mays
gaacatcaaccccgatgaggctgtcgcctatggtgctgctgtccaggctgccatcctgagcggtgagggcaatgagaaggtgcaggacctgcttctgctggacgtcacccctctgtccctgggtctggagactgctggaggagttatgac

SEQ ID NO: 45287 - DNA, 295 bp, Zea mays
agctcccatatccgctcccctacctctccagcatctcccgtctccgtggtctcgtctctgctcctcacctcgccgccagccatgggcaagatcaagatcggaatcaacggtttcggaaggatcggcaggctcgtggccagggtcgccctgcagagcgaggatgtcgagctcgtcgccgtcaacgaccccttcatcaccacggattacatgacctacatgttcaagtacgacaccgtgcacggccaatggaagcacagcgacatcacctctcaggactccaagacgcttctcttcg

SEQ ID NO: 45288 - DNA, 140 bp, Zea mays
  unsure (1)..(140): unsure at all n locations
acccaatctcccctacaccagaaaaattcccagttctttggtccgcgtcagagagtcggcggcgatgtctgggcgcggcaagggcggcaagggtctgggcaagggcggcgcgaagcannccggaaggtgctccgcgacaa

SEQ ID NO: 45289 - DNA, 282 bp, Zea mays
gccggtggcacctgtgaaacctgcagctgaggcgaagaagcccaaggccacagtgaccgacggtgctggaagcagtggcgacaaggatgagaaagaggacgaaaaggaggagacagcaggcccacgtcggaggacccgaagggagacatagagacctatttttgatgtgtttggatgttctggcgcctgcttattttgaggactcttaatatttctgagtgtataataggaacttgtgtcacctctgcggcttccctgctgcttatttgtttttacatggtt

SEQ ID NO: 45290 - DNA, 285 bp, Zea mays
gtgaaaggggagagagagagagagaagagagagagaagagagagagagagagaggagtgggagacccgcgagaggctgccgtgtagggaccgtagactcagcgactgcgaaggagggataaggggatggccgggatcggaccgatcaggcaggactgggagccggtcgttgtgcggaagaaggcacccaccgccgccgccaagaaggatgagaaggccgtcaacgccgcgcgccgcgccggtgcggagatcgataccatgaagaagtacaacgctggtacgaaca

SEQ ID NO: 45291 - DNA, 276 bp, Zea mays
tgaatctctgaccttgcatgagatggctagtggcggtgatcctggtgcagttgttgaaaagatgtcaatgctcctcaaaaggattaaggattttgtgcagacagaagaccctgagatgggtgcccaagcaagtacagcaaccatttctattaacgacaattcagcatgtcctgttattcccgatgatttccgttgcccaatatcactggatttaatgaaagatccagttattgttgccactgggcagacttatgagcgggggtacatagagatgtg

SEQ ID NO: 45292 - DNA, 270 bp, Zea mays
gtgagaaggaagaacccaaggggaatacttatttctccaggacctggtgaaccacaagattcgggaatatcattgcagactgttcttgaattaggcccaaccatcccaatttttggagtttgcatgggtctgcaatgcattggagaggcatttggaggaaagattatccgtgctccttctggagtgatgcatgggaaaagctctccagtttattacgatgaggaattaggaaaggcattgttcaatggcttgccaaacccttttactgcc

SEQ ID NO: 45293 - DNA, 279 bp, Zea mays
agataaggaatatgagggcaatgttgaggccactggtgaggacttctctgttgagccagctgatgagaggaggcctttccgtgctctcttggatgttggccttattaggactacaactgggaaccgtgtctttggtgccctcaagggagctttggatggtggcctggatattcctcacagcgagaagaggtttgctggtttcaagaaggatgacaagcagctggatgctgatatccatcgcaagtacatctatggtggccatgttgctgactacatgag

SEQ ID NO: 45294 - DNA, 281 bp, Zea mays
gggttttcgcgccgccgccgccgccgcttcgtcgtctccgccgcagcgatgccgtcgcacaagaccttccggatcaagaagaagctggcgaagaagatgcgccagaaccgccccatcccctactggatccgcatgcgcacggacaacaccatcaggtacaacgccaagcgcaggcactggcgccgcaccaagctcggcttctgagcgcgcggatcggccggctcctgcgtcggaattctagggtctctacctttcctttggttttatcgatgtctcttgtg

SEQ ID NO: 45295 - DNA, 283 bp, Zea mays
gctcgcgggagttgtggccgtggaggtcaccggtgggcctgagattcccttccaccccggtagggaggacaagcctcaacccccacctgagggccgccttcctgacgccactaagggttctgaccacctgaggcaagtttttggcaagcagatgggattgagcgatcaggacattgttgccctctctggtggccacaccttgggaaggtgccacaaagagcggtctggtttcgagggggcctggattacaaaccctttggtctttgacactcttacttcaagg

SEQ ID NO: 45296 - DNA, 266 bp, Zea mays
cagatctcagtcacctgcgccgccgcttcgttcgtgtggaggggagaagagaggaaatggcggcgaccgagggcgtgctcctggggatgggcaaccccctcctcgacatctccgccgtcgtcgatgacgccttcctgacaaagtatgacatcaagctgaacaatgctattctcgctgacgagaagcacttgcctatgtatgacgagttggctagcaagagcaatgttgaatatattgccggaggagcaacccagaactctatcagg

SEQ ID NO: 45297 - DNA, 265 bp, Zea mays
caaggtgctcggtccttccgaggaagctaaggctgcgttggggtgaggccctcacttcatccggcgactagcaccgcgtccggcagcgccagccctacactcgcccgcgccatggcctctgtctccgagctcgcctgcatctactcggccctcattctgcacgacgatgaggtgacagtcacggaggataagatcaatgcctcattaaagcagccggtgtaaatgttgagcctttttggccctgctttgttgcaaaagccctggc

SEQ ID NO: 45298 - DNA, 266 bp, Zea mays
aacagatgtgtcttgcgcctcattctctaccatgtatgtgtgaacctgcctgtcatgattttctcgtatcctgccttcaaattcatgggtctcaggagctctcttcctttgccacattggtcggttgctgtatctcaagttcttttctactttgtccttgaggattctatattctactgggggcacagggcattgcatacgaaatggctatacaaacacgttcacagcgtccatcatgagtacgccacaccctttggtttaacatc

SEQ ID NO: 45299 - DNA, 273 bp, Zea mays
caagaaggaaattcagctgcagcttgagaagatgaagaaatatgcttctgttatccgtgtcattgctcatacccagattaggaagatgaagggtttgaagcagaagaaggctcacctgatggagattcaggtcaatggtggtaccattgctgacaaggtggactacggctataaattttttgagaaagaggtccctgttgatgctgtcttccagaaggatgagatgattgacatcattggtgtgaccaaaggtacaggttatgagggtgcggt

SEQ ID NO: 45300 - DNA, 263 bp, Zea mays
gtctacggacgtggcagccatctccttctcggcatcatggccgctctcagacaccttgtgaagcccaagatcgtcaaaaagagaaccaagaagttcatccggcaccagtcagaccgatatgtcaaaattaagcgtaactggaggaaacccagaggcattgacaacatggttcgtagaagattcaagggccagatcttgatgcccaacattggttatggaagcaacatggcacatcgcacatgctgcacagtggcttccggaag

SEQ ID NO: 45301 - DNA, 279 bp, Zea mays
tggcatccgttaccgcccatcaccctcggagcctccatcaacgagcaccatgaaagggaagggagctgcctcaggccctacgcagttcgtccacacgctcaacgctacagcagtggcggtgcctcgtctgatagtttgcattctagagaattttcagcagggcgatgggtcgattgtggttccagagccactaagaccctatatgggtggactagagttgctctccccaaaattcaagtgaccctctacggtcacccgctgttgtgcttgtgtggactt

SEQ ID NO: 45302 - DNA, 275 bp, Zea mays
cgatttactcgaaatgagtttaatctggaaagcaagagcaccattggagtagagtttgcaacaagaagcatccaggttgatggaaaaacaataaaggcacagatatgggacacagcagggcaagagcgatatcgagctatactatcagcatattatcgtggagctgtaggtgccttattggtttatgacattgctaaacatctcacatatgaacatgtagagcgatggctgaaagaactgagagatcatgctgatagtaacttgtaatcatgcct

SEQ ID NO: 45303 - DNA, 263 bp, Zea mays
ggggagaggggagcgcgctcagggtcagggaggcgaagatgatcgaggtggtgctgaacgaccgcctggggaagaaggtgcgggtgaagtgcaacgaggacgacaccatcggcgacctcaagaagctggtggcggcgcagacggggacgcgcccgagaagatccgcatccagaagtggacaactctacaaggacacatcacgctcaaggctacgagatccagacgggatggggctcgagctctactacaactaggcgccctga

SEQ ID NO: 45304 - DNA, 278 bp, Zea mays
cttggatatctcccaaggatcagtgctttatgatgttgatgaagctactgtccgtagtcttaatgggtgcagagtagcagaccaaatcattagacttgttccaaattttgagaattttcgcacggcattaagatgtttgaagtactgggcaaaaaggagaggtgtttactctaatgttactcgctttcttggtggtgtcaactgggctttactggttgcgcgtgtctgccagctctatcccaatgctgtgccaagtatgctggtctcacggtttttta

SEQ ID NO: 45305 - DNA, 270 bp, Zea mays
aagcaaacgggctgtgccacttcaaagggacaagctctcgcagacgaatatgggataaagttctttgaaacgagcgcaaagacaaacctgaacgtcgagcaggttttcttttctatagcaagggatatcaaacagagactttcagagactgattctaagcctgaggatcgaactatcaagatcaaggctgaaggggaagctgatgcagcagaggcgcagaaatcagcttgctgcgactcttgaacggttgtggctgcaggatagtttcat

SEQ ID NO: 45306 - DNA, 261 bp, Zea mays
gttgttttggagagcaagtatggatctcctaaaattgtaaacgatggagatacagatgccagagaggttgagctggaggaccctgtggagaacattggtgctaaattggtcaggcaagcagcagctaagaccaatgatctagctggagatgggacaaccacctctgtggatcttgctcaggggatgatcgctgagggtgttaaggttgtggcagctggtgctaatcctgttcagattactcgtggtatcgagaaaacagcg

SEQ ID NO: 45307 - DNA, 274 bp, Zea mays
ggatcttataaatcttggagcaaagaagttagttgttccagggaacttcccaatagggtgcgtcccattatatcttgcaatctttcagagccaaaaagaggattactatgaggaacaaacaggctgcattaagtggctcaatgattttgctgagtaccataataagatgcttcaggaggagttggagaaactcaggaatcttcaccctgatgtgaccatcatttatgctgattactatggtgctgcattgaacatattccgtgccccactccag

SEQ ID NO: 45308 - DNA, 291 bp, Zea mays
ccgtacccaatctaatcgacacccggccgagatgggccgcaagttcttcgttggtggcaactggaaatgcaatggaaccgcagatcaggttgagaagattgtcaaaaccctgaatgaaggaaatgttccctcttcagatgttgttgaggtcgttgtcagtcctccttatgtgttcctcccggtggtcaagagccagctgcgccaagagttccaagttgctgctcagaactgctgggtgaagaagggaggtgcattcactggtgaaattagtgctgaaatgctcgtcaacct

SEQ ID NO: 45309 - DNA, 213 bp, Zea mays
caataacggtctcagtggtagtatctcagcgtccatcgggaagattagctcacttaaggtgctaaatcttgctaacaataacatcactggtactgtgcctgaggaggttgacgcgttgccttcgctgtcagaggttgatttgtcaaacaacaatctatatgggaatcttcctacatttgcttccaatagtgcagtgctgaatactgctggtaa

SEQ ID NO: 45310 - DNA, 295 bp, Zea mays
atctcctcgcatttccttgcaaccgattgccttcccccctcccaacccaagaccgatggcgcccaaggccgagaagaagcccgcggcgaagaagccggcggaggaggagcccgcggcggagaagacgaccgccgggaagaagcccaaggcggagaagcggatccccgctggcaagtccgccggcaaggagggcggcgagggcaagcgtggcaagaagaagggcaagaagagcgtggagacgtacaagatctacatcttcaaggtgctgaagcaggtgcacccggacatcggcatc

SEQ ID NO: 45311 - DNA, 290 bp, Zea mays
cttgattgttccaggtattagcagtcgaccggttcctcggagcacgatgaagtttgttgctgcctacctgcttgctgtcctcgctgggaacgccagcccctccgctgacgatttgactgccattctggagtcagttggctgtgaagttgacaatgaaaagatggaactcctgctgtcccaactgagcggtaaggacatcaccgagctcattgccgcgggcagggagaagtttgcttcagtcccatgtggtggcggcggtgtcgctgttgcggcagctgcacctgctgctg

SEQ ID NO: 45312 - DNA, 250 bp, Zea mays
ggacagccattgtcttgccgtcaccatggccggagaagtgcagagttggggccgtaaccaaaacggacagctaggccttggaaccactgaagactcgctgctcccacaaaagattcaggcttttgagagtgtttgcgtgaaaatgattgctgccggtgccgaacatactgctgcagtaactgaagacggtgacctctacggatggggttggggtcgatatggaaacttaggtcttggtgaccgtaatgac

SEQ ID NO: 45313 - DNA, 213 bp, Zea mays
caccgctgctataaaaccctccgcctccaccggcggctcgccaaactccgtttcgaattctagggttttgctgctctccgaccccgagctccgaaggccgcagcatcaggcgcggcccccctcgcgtgtgaccgagatggcgctgccgaatcaggggaccgttgattaccccagcttcaagctcgtcatcgtcggagatggtggaactggaaa

SEQ ID NO: 45314 - DNA, 233 bp, Zea mays
ctcgaacccgagaggaaccctaacaccaaaacgcccccggaggcagctaggagagctcgaatcaccagccatgtcggagcacgacctcacggcgctgatggcggcgcagctggaccgccacctggtgttccccctgctggagttcctccaggagcggcactctactcggagtcggagatcctggaggcaaagatccgcctcctcagcggcacaaatatggtcgactacgccat

SEQ ID NO: 45315 - DNA, 278 bp, Zea mays
ggatgagacacaagaaactcttagaacatctgcttttccaagcaaccatgtgaaggagaaatgggccaagaacctttacattgcttcaatatgctatggccggacagtgtcatgaggcttgctcggctgcatccctagttgggaagagcatgttctgatgagtatatattgggaaaaaagcagcaatctttgttgctgctctctattactctctgtatgtgtaggtaacccgttcaagatgaagcaccttacagtggccagagtaggagctcaagaaa

SEQ ID NO: 45316 - DNA, 249 bp, Zea mays
gacgcggtcgtaagggctgaggatttttggtccgcacgctcctgctcctgactcaccgctgttcgctctcgccgaggaacaagtcggtcaggaagcccgcgcgcaacagccatggcttttaaggataccggaaaaacacccgtggagccggaggtggcaattcaccgaattcgaatcaccctaacaagccgcaacgtaaaatccttggaaaaggtgtgtgctgacttgataagaggcgcaaaagaaaag

SEQ ID NO: 45317 - DNA, 290 bp, Zea mays
ggcgttcccaagaagtcaaccctgatcaaggctatggaggaagctgatgtgaagacgaagtgggaaaacagctcatggggcaagaagctgattgtccagaagaggagggctgcgctcagtgactttgacaggttcaaggtcatgctggcaaggatcaagaggggtggtgctatcaggcaagagctcgccaagctgaagaaggcgtccatggcttaagtcccttttggtggatggcatgttagtttttggtttcatgttgcatcagcattttgttttgagtgttgtcaaac

SEQ ID NO: 45318 - DNA, 281 bp, Zea mays
ggatggacggaacatacgggttaatcatgctgaggagggtcttgccatcactgccatggatggaaagactctggatggacggaacatacgggttaatcatgctaacgagaggacaggtggcttccgcagcagcggtggttatggtggtggcggctatagtggtggtggtggtggctatggtggcggtggctatggtggcggctatggtggtggtagcggtggctatggcggcggcggcagtggtgactatggtggcggcacggtggatatggtggcactac

SEQ ID NO: 45319 - DNA, 281 bp, Zea mays
aagttccttttgtatagccagtccatcccctcgctcgctccccaactccagcaggcagatcagatacatccatccattcgcggaccggaagcaggaaaggaagggttgaactatgagcgccgtggcggtttcgtcgtcgctgaacccggacgcgccgctcttcatcccggcggcgctgctgcaggtggaggacttctcgccgcagtggtgggacctcatcaccaccactgcctggttccgcgaccactggtcccgcgagcgcgcccacctggacgagatgg

SEQ ID NO: 45320 - DNA, 288 bp, Zea mays
gagccagcaaaaatttgcctcaaatgtcatcgagaagtgctagtctttggaaatcctgtagaacgtcaggttctgattggtgagatgcttggatccactagcgaaagcgaacctcttgaggtaatgatgaaagaccagtttggaaactatgtggtgcagaaggtgttagaaacttgtgacgatcagcagagagagatgatcctaacaaggataaagacacacctgaacacactcaagaagtacacatatgggaagcacatagtagcacgcgtagagaagcttgttgct

SEQ ID NO: 45321 - DNA, 275 bp, Zea mays
gtcaagggctgggagaggctttacccttgaggagctgaaggctgctggcatcccaaagaagcttgctccaaccattggtatttctgttgatcaccgccgcaagaacaaatcccttgagggactgcaggccaatgtccagaggcttaagacatacaaggccaagctggttatcttcccaaggcgtgcacacaaggttaaggctggtgactctactccagaggagcttgccaccgctacccaggtccagggtgactacatgccatttactcgtggtg

SEQ ID NO: 45322 - DNA, 240 bp, Zea mays
aggagataaagcaggagttcagccaagcctgtgactggataaagaatcgcttgggtgacaaggttgcacgtgttgacatatctaatcgtctcaggtcatcgccatgtgttcttgttgcagcgaagtttggttggtcagccaatatggaaaggctgatgagagcacagtctatgggtgatacagcctctttggatttcatgcgttcgaggaaagtttttgaaataaacccagagcatgaga

SEQ ID NO: 45323 - DNA, 283 bp, Zea mays
aagcgcacgagcgagctcgtggacgggctgttcgtgcccccgagggaccctaggcagctgaataagctggctaggaagaacgtcaaggacaccgccggcaagggctggttcgacatgcccgcgccgaccatcactcccgagttgaagaaggatctcgagattttgcagctgaggcatgtaattgacccaaaaaggcacttcaagcgggcaggaaagtccaaggcccttcccaagtacttccaagttggtacggttgttgagcctgcatctgagttctactcaa

SEQ ID NO: 45324 - DNA, 281 bp, Zea mays
gtgcggagagaccgaagaagcgggagagatggctcgtaccaagcagactgctcgcaagtccacgggagggaaggctcccaggaagcagcttgccaccaaggctgcccgtaagtctgcccccaccactggtggagtgaagaagcctcaccgctaccgccctggaactgttgccctccgtgagatccgaaattctcagaagctcactgagctgatgatcaggaagctgcccttccagaggctcgtcagggaaattgcacaggacttcaaaactgatttgcgtt

SEQ ID NO: 45325 - DNA, 273 bp, Zea mays
ggaaaagattgatcgccgttctggtaaaaagctggaagatggccctaaattcttgaagtctggtgatgctgccattgttgatatggttcctggcaagcccatgtgtgttgagagcttctcagactatccacctttgggtcgctttgctgttcgtgatatgagacagacagttgcggtgggtgtcatcaaagcagtggacaagaaggctgctggagctggcaaggtcaccaagtctgcccagaaagctcagaaggctaaatgaatattatccct

SEQ ID NO: 45326 - DNA, 273 bp, Zea mays
cgctcctctcacaacccagtcgctcaaaaccctagagctctcgcctgctcgcctccgccgccggagcgagctccccatcttcatccgtcaaccatggcgacccagatcagcaagaagaagaagttcgtcagcgacggtgttttctacgccgagctcaatgagatgctgacgcgggagctggcggaggatggctactctggcgtggaggtgcgcgtcacgccgatgcgcacggagatcatcatccgcgccacggcacgcagaacgtgctcggcg

SEQ ID NO: 45327 - DNA, 133 bp, Zea mays
ctcgagttctcctcaaccaaattcaaagtcacagcggcgaaactctcggcgatgtctggccgcggcaagggcgggaagggtctgggcaagggcggcgccaagcgccaccgcaaggtgctgcgtgacaacatcc

SEQ ID NO: 45328 - DNA, 279 bp, Zea mays
gtcacacacacacacacacacagacaagtggtttccaaagccaagtgtgtgtactagcaaccagctagctcgggcggcagcaggcagccatcatgtcggaggagaagcaccaccacttcttcaaccaccacaagaaggacgaggagcagcccgccggcgagtacgggtactccgagaccgaggtggtcaacgccaccggacgagggcgagtacgagaggtacaagaaggaggagaaggagcccaagctacagcaagcactcgggcgagccggcgccatc

SEQ ID NO: 45329 - DNA, 240 bp, Zea mays
ctgatgctgttatctgtaatcgatgacgaagatgagagatatcgtggttgtgaaccactgcgtttgtgcatgcccaagctgttctggtaccttcgactgcccccctgtatctagtctgattactagtgctagtgctacaagtgtatcagatccaattgaaggaaaggatgctactgctaatttctggcgccatatgcggtgcccaagatgcctagataatactgttgagtccaaattttc

SEQ ID NO: 45330 - DNA, 247 bp, Zea mays
ggcataacatgggaggcctgtcggtgcagaacgcactgaggaacaagaggctcttcatcctagaccaccatgaccatttacatcccgtacctcgacgagatcaacgagctggaggggaacttcatctacgccagcaggaccctactgttccttaaggacgatggcacgctgaagcccctggccatcgagctgagcctgccccaccctgacggccagcagcgcgacgcggtcagcaaggtgtacaccc

SEQ ID NO: 45331 - DNA, 262 bp, Zea mays
gtcgccgccgctgcagtgtccatagccaccgcaggagactgagatggggggttttgtcaagacccacaagaccaatgcgtacttcaagcgtttccaggtgaagttcaagagaaggcgcgctggcaagacagactacagggccaggataaggctgattaaccaagacaaaaacaagtacaatacacgcaaatacagatttgttgtgcgatttaccaacaaggacatcacagcacaaatcatctctgctagtatagcaggtgat

SEQ ID NO: 45332 - DNA, 243 bp, Zea mays
  unsure (1)..(243): unsure at all n locations
ttatagccaacatggctgacaggctaggtcttgtggctactattaaggaccgagcaaatgatatcttcaagaaaattgaagatctcaagtctattaggggaagaaatcaagatgccatattagccgcatgtctatatattgcttgtagacaagaagatcgccctagaactgtgaaagaaatatgcacggttgctaatgggagcacgaagaaagaaattggcagagccanagaatttatagtga

SEQ ID NO: 45333 - DNA, 272 bp, Zea mays
gggagggaagcacgcccccaaacgttccgaggtttcgcctctcggagcgcaccaacgccacccggagcgactcgccaccggcgcggagaaggagggcggaggctaggcgatggcggacgagtatgaggctgggaagaaagaggaagaggaatttagcacaggccctctgtcagtactaatgatgagtgttaagaacaacacccaggttctcatcaattgccgcaacaacaagaagctgcttggccgggttcgtgcttctgatcgccactgta

SEQ ID NO: 45334 - DNA, 271 bp, Zea mays
  unsure (1)..(271): unsure at all n locations
ctgtctgctgtggagccacattcataatgccgtattattacnanacccntacggggaagaccatcaacctcgaggttgacccctcggctacgatagcaactgtaaaggccaagatccaggataaggaaggaattcctcctgatcagcagagactgatctttgctggcaagcagctggaagatggacgtactttgtctgactacaatattcaaaaggagtctactcttcatcttgtgttgagactcgtggtggtgctaagaaaaggaagaag

SEQ ID NO: 45335 - DNA, 257 bp, Zea mays
gacaatggcccgcagttgtatcaggttgatccctcaggatcatacttctcctggaaggcatcagccatgggaaaaaatgtgtccaatgcaaagacgtttcttgaaaagagatacacagaagatatggagcttgatgatgccatccacactgcaattttgactttgaaagaaggatatgaggggcaaatttcctccaacaacattgaaatcggaattattcgagctgatcgtgagttcaaagttttaagcccagcaga

SEQ ID NO: 45336 - DNA, 229 bp, Zea mays
gacgctcgcagctctcggcgcacggcccagcttccttcaaaatgtctactgttcacgaaatcctgtgcaagctcagcttggagggtgatcagtctacacccccaagtgcatatgggtctgtcaaagcctatactaactttgatgctgagcgggatgctttgagcattgaaacagccatcaagaccagaggtgtggatgaggtcaccattgtcaacattttgaccaaccg

SEQ ID NO: 45337 - DNA, 245 bp, Zea mays
gcctcaatgaggtgccctggttgccaggggtcaggcatgaaagtcactattcgtcagctgggcccttccatgatacagcagatgcagcagccaggtaatgagtgcaaggggactggagagagcatcaatgagaaggaccgctgcccagggtgcaagggtgagaaggtcgttcaagagaagaaggttcttgaggttcatgttgagaaggggatgcaacacaaccagaagatcaccttccctggtga

SEQ ID NO: 45338 - DNA, 235 bp, Zea mays
gtcgtctggcgctgttcctttcaccacaatgtttgctttggtcctcctctggtttggtatctcggttcctcttgtatttgtcgggagctatctgggcttcaagcaacctgccattgaggctccggtgaagacgaacaagatcccaagacaggtccctgagcaggcttggtacatgaaccctgccttcaccattctgattggtggcatacttccgttcggagcagtcttcatcgag

SEQ ID NO: 45339 - DNA, 224 bp, Zea mays
ctcgagcgaattcggctcgagtaacaatacaactattttacttggtggtcttgaagccaatgtcactgaagatatattgaaacaagtacttaccccttatggggacgtagtcatagttaagattcctgttggcaaaagatgtggttttgttcaatatgctaacagatcttcggcagaggaggcattggtaattcctgcaggcaccttggttggaaggcagaatg

SEQ ID NO: 45340 - DNA, 270 bp, Zea mays
ggtgaagtcagtgctgagatgctcgtcaaccttggtgttccctgggtcattcttggacactctgaaaggagagctctgctgggagaatcaaatgaatttgttggagacaaggttgcgtatgccctgtctcagggactaaaggtcattgcatgtgttggtgagacccttgagcagagggaggctgggtctaccatggatgttgttgctgcacaaacaaaagcaattgctgagaagatcaggactggagcacgtattgttgcctatgaacca

SEQ ID NO: 45341 - DNA, 209 bp, Zea mays
ccagaccaccagacaagtgccagcgccctctcgcagtcgccgcaatggagagcaccttcatcatgatcaaacctgaaggcgtccagatgggcctcattggtgagatcatcagctgttttgagaagaagggcctctacctcaaggacttgaagcttctcaacgtggagaggtcgtttgccgcgaagcactacgccgatctcgactccaag

SEQ ID NO: 45342 - DNA, 269 bp, Zea mays
gacgaccgccgccgcatcggaccgtgcccgaaccccccttctcctcgctgactcggctcccctcctccgccgtcgccggacgtgaagcaagtggggaccacagaagcattagctgggtgaacccactcaaagggggcagggaattgtgtgctagtttgaatggctgctacaaagcttcaggacctttggaaccacccggctggccccaaaaccattcatttctgggcgcccacattcaaatggggcatcagcattgccaacatagccga

SEQ ID NO: 45343 - DNA, 272 bp, Zea mays
ggcggcaactcgagcatccctgaccccaggtccctctgcctggaggggacactccagccccacgaggtcgctgggaagattgtgatctgcgaccgcggcattagtcctcgggtgcagaagggtcaggttgtcaagaacgctggtgccgcgggcatgatactcgccaacacaccggcaaacggcgaggagcttgtcgccgacagccacctcctgcctgcactggccgttgggcagtctgaaggcattgccgccaagaagtacagcaaaaccgc

SEQ ID NO: 45344 - DNA, 259 bp, Zea mays
gcgggtggcctagtggaggagaaggtgggatcccatccagaacttctacccagcatagccccgtcgcagaatttagtctcaaaggaaacttcaaccacagcactgcaggcctctgttgccagaccagagctggaggtaaatgctgccatagtctctggacaaagcagtgagcccaaagagatagttgaaaagtccaaaatcccaggccgaagaaactcccgaactgaagagccaactgtggcctctgaaagtgtggaaa

SEQ ID NO: 45345 - DNA, 262 bp, Zea mays
ttcggccgattcggtcactgcgattttgactttgaaacttgtggctactccacgtatgcgctccatggctcagcattctccacaatccatgtgacgcccgaggacggtttcagctatgccagttatgaggttatgggcttggatgccactgctctgtcttatggtgaccttgtcaagagggtccttcggtgctttggcccctcggagttttccgttgccgtgaccatcttcggcgggcgtgggcatgcccgggacatgggga

SEQ ID NO: 45346 - DNA, 259 bp, Zea mays
gggcaaggtggtccttgacgtgggcaccgggagcggcatccttgctatctggagcgcgcaggccggggccaggaaggtgtacgccgtcgaggcgactaacatggcggacacgcgcgcgagcttgctcgcgccaacggcgtcacggatatcgttgaggtgatacagggcacgtggaagacgttgaccttccggagaaagttgatgtcattatatcagagtggatgggctactttcttttgagagagtccatgtttgattc

SEQ ID NO: 45347 - DNA, 267 bp, Zea mays
tctcgagcgaattcggctcgagtaacaatacaaccatttttgagtggtggtcttgaccaggatgtcactgaagatatgttgaaacaagttttcaccccttatggggacgtagtccatgttaagattcctgttggcaaaagatgtggttttgttcaatatgctaacagatcttcggcagaggaggcattggtaattctgcaaggcaccttggttggagggcagaatgtgaggctttcatggggtcgcagcccttcaaacaaacagttc

SEQ ID NO: 45348 - DNA, 270 bp, Zea mays
gaatcgaggatggagtacgagcttgctgggccagaaatgtctctctttgaaccattgggcagagcggaagggaagcgatgaaggatggatccattacgaaccctgctgatcgtcatgccattggatgacacaaccaaacatcgtttgccagaaggtcgggcaaaaacatgccagtccgtggcgaggtggggcggggcatcgaccatccactcggggagcataacctggcgcgcgaaccaccgacgcgcttcggagccgcggagcctggag

SEQ ID NO: 45349 - DNA, 271 bp, Zea mays
gcgccggcgtgctcgtgatctcaacccaaggcgtgcctccgctccggtcacccgtcgctccacgcaaccatgtcgaggaggaagaccagggagcccaaggaggagaacgtcacccttggacccactgtccgtgaaggagagtatgtctttggtgtcgctcacatctttgcatccttcaatgacaccttcattcatatcactgatttgtctgggagggaaactctggttcggatcaccggtggcatgaaggtgaaggctgaccgtgacgagt

SEQ ID NO: 45350 - DNA, 270 bp, Zea mays
gtcccaactgatgagactcttgtggcccagatcaaggaagggtatgaaagtggcaaggatcttgttgtgactgtccagtctgctatgggggaggagcagatctgcgcgctgaaggatgttggccccaagtaacttccctgccttggaatactgtatctcaaaacctaaatcgaaaaaagaagtgtatcaaggattgctacagagacatccatctggcttgagctggcttttgctatgtcaaacacagtgcagggatcgctgggtgttgca

SEQ ID NO: 45351 - DNA, 153 bp, Zea mays
ctgctttggagttcactagggtgctcaaatcgaagcggcaggttgtgaccgggaccctgcatgacctgatactggaggcagctgatgctggaaaaaagagtctgtacagagcaaaagtctgggtgaagccgtgggaggatttcaagtccgttg

SEQ ID NO: 45352 - DNA, 278 bp, Zea mays
cctcgagcacactgatgttgctgtcctgctcgacaatgaggccatctatgacatctgccgccgctcccttgacattgagcgcccaacctacaccaaactcaacaggcttgtctcccaggtcatctcatccctgacggcttccctgaggttcgatggtgctctgaacgttgatgtgaacgagttccagaccaacctggtgccctacccgaggatccacttcatgctttcgtactacgctccagtcatttctgctgagaaggcctaccacgagcagctgt

SEQ ID NO: 45353 - DNA, 307 bp, Zea mays
cgcctctcgagtctcgtccacccgtcatcctcctagctcctctactcgccagtcgccatgggcaagattaagatcggaatcaacggcttcggaaggatcggcaggctcgtggccagggtcgccctccagagcgaggatgtcgagctcgtcgccgtcaacgaccccttcatcaccacggactacatgacctacatgttcaagtacgacaccgtccacggccactggaagcacagcgacatcacactcaaggactccaagacccttctcttcggtgacaagccggtcaccgtctttggcatcaggaacc

SEQ ID NO: 45354 - DNA, 285 bp, Zea mays
ccttgatgagaagctccagaacgctacaacacttggagcaacccacactgtaaatgcagcaaaagctgatgcagttgaaaggataaaggaaattactgatggtaggggtgtagatgtggctatagaggcacttggtaaggcgttaacattttcccagtgcgccaagagtgtgcgtgatggaggcaaagctgttatgatcgggcttgctgcaacgaacgtaatgggagaggttgatataacccgtcttgtccgacgacaggtgaaaatcattggctcatatggcgc

SEQ ID NO: 45355 - DNA, 298 bp, Zea mays
tgactcgtgagtttgtgacagtggttttctctgtgccgccttttgcagggaaagggggtctgggttgcgtacaggcgaaaggcacgcgccgccgctgccgcgcgagcctctccgtccccatcgccgcgcagatggatccgtcgtcggagcccctgtacgcgcaggtcgagccgtacgactccgggttcctcaaggtctccgatgtccacaccatctactacgagcagtccgggaacccgcagggccatgcggccgtgtttctccacggcggtcccggagccggcacgtcgcccggcaa

SEQ ID NO: 45356 - DNA, 297 bp, Zea mays
ccaaaccccactcaccgcaacgagccgccggatccatggccggcaaagacggctccgtcccttccccgcctcctccccggctcccatcctaccctgagatgatcgtggaggcaatccgggcgctgggactcgagaacggctgcaacaagactgcgatctcggactacatcaagggcagctacggctccaacctccctgcccagcacaacgccgtcctcacgggccacctcgcccgcatgaaggctaccggtgagctcgccttcctcaggaacaactatctcctccccaacgaggacg

SEQ ID NO: 45357 - DNA, 293 bp, Zea mays
tgctggtcttgtagctaagaaagcttgcgagttgggtcttgaggttaaaccatgggtgaagacaagccttgcccctggatcaggagttgtcacaaagtacttgcttcagagtggtcttcaagaatacctcaaccagcaaggattccatatcgttggctatggctgtaccacttgcattggaaactctggtgatctcgatgaatccgtatcaactgccattacagaaaatgatgttgttgctgctgctgttttgtcgggtaacgtaacttcgagggtcgtgtgcacctttaact

SEQ ID NO: 45358 - DNA, 273 bp, Zea mays
aagtttccccttacttgggatataactcacttaaggattatttccctgctatggaaatgaggccaaatccacaatgctcgaatccagcatgtgttcacagacagaaagaatatatggaatccaaacctgctagagatgcagcagcgaagactaagatggaagctgaagcatccacagaaaatgaatgtcctgtccacctagacaatgagtggaatattagtgttgttgatgatgaagaaactgagacatcaagcattcgaaacactccagata

SEQ ID NO: 45359 - DNA, 288 bp, Zea mays
tcaagatcgggatcaatgggttcggcaggatcggaaggctggtggccagggtggccctgcagagtgacgatgtcgagctcgtcgccgtgaacgaccccttcatcagcaccgactacatgacctacatgttcaagtacgacactgtgcacggacagtggaagcaccatgaagtcaaggtgaaggactccaaaacccttctctttggtgagaaggaggttgctgtgtttggctgcaggaaccctgaggagatcccgtggggttcggttggtgctgaatatgttgttgagt

SEQ ID NO: 45360 - DNA, 293 bp, Zea mays
cccaccgatccatttcagccgccgccgcgcgtagcaagcaggagcagcaaggatgccggctggccacgggctgcgctcgcggacgcgcgacctgttcgcgcgccccttccgcaagaagggctacatcccgctcaccacctacctccgcacctacaagatcggcgactacgtcgacgtcaaggtgaacggcgccgtccacaaggggatgccgcacaagttctaccacggccgcaccggtcgcgtctggaacgtcaccaagcgcgccatcggcgtcgagataaacaagcaggtga

SEQ ID NO: 45361 - DNA, 289 bp, Zea mays
ggaaaaccatcagagtacaacacctacaatgacatagaggctgtttatgattgcttgagaacggagtatgggatagaagaagaggatctaatcctgtatgggcaatccgttggaagtggaccaacgttgcatctagcctcacgtctcgagaagttaagaggggttgtcctccacagcggcatactctctggcatacgggttctgtatccagtgaaagtgacgctttggttcgacatcttcaagaacatcgacaaaataaagcaggtggactgccctgtgttagtcatac

SEQ ID NO: 45362 - DNA, 292 bp, Zea mays
tcagcttttccatcacaggattatccggtgcggtggtcctgttgaggatgatatggccaacatcattgtagcacagctgctctacctggacgctattgatcccactaaggatatcattatgtatgtgaattcaccaggagggtcagtgacagctggaatggctatatttgatacaatgaagcacatcaggcctgatgtatccactgtttgtatcggactagctgctagtatgggagcttttctacttagtgctgggaccaaaggaaagcgatacagcttaccaaactcgagg

SEQ ID NO: 45363 - DNA, 294 bp, Zea mays
ctcagccgcgtcgcaccgcatcgcattctacgattcgaagctctctctgctcgcagccatggcgaagaattacccaaccgtgagcgccgagtacagcgaggccgtcgagaaggccaggcgcaagcaccgcgccctcatcgccgagaagagctgcgcgcccctcatgctccgcctcgcgtggcactccgcggggacgttcgacgtgtcgtcgaggaccggcggtcccttcggtactatgaagtgcccggcggaactggctcacggcgccaacgcggggctggacatcgcggtgcg

SEQ ID NO: 45364 - DNA, 291 bp, Zea mays
gagacatccagttgatgccatttgtggattactatagcctgattctttggaagaccatagcgatctgcatctatgggacaaatgtcctgtcagccaactatgtgatgaaaactgatgacgatgcttttgttcgagtagatgaagtactttcttcccttgaccgaactaatgtcaaccatggactgctgtatggtcgtgtcaattctgattcccagccacatcgagatccatatagcaagtggtacataacccctgaggaatggcctgaggagagttatcctccctgggcgc

SEQ ID NO: 45365 - DNA, 272 bp, Zea mays
ggaaacaccatcaaggccccttgtggcctgaagactcgtccattcgactcaattctggctgaagtgcgcgcattcttcgacgtgcatgatcaagaaggaagtcacccaggaggcatccaccttgaaatgactgggcagaacgtgaccgagtgcattggtggatcacggactgtgaccttcgatgaccttagtgaccgctaccacacccactgtgacccaaggctgaacgcctcccagtccctggagctcgccttcatcattgcagagaggct

SEQ ID NO: 45366 - DNA, 285 bp, Zea mays
caagaaggaaattcagctgcagcttgagaagatgaagaaatatgcttctgttatccgtgtcattgctcatacccagattaggaagatgaagggtttgaagcagaagaaggctcacctgatggagattcaggtcaatggtggtaccattgctgacaaggtggactacggctataaattttttgagaaagaggtccctgttgatgctgtcttccagaaggatgagatgattgacatcattggtgtgaccaaaggtaaaggttatgagggtgtggtcactcgttgggg

SEQ ID NO: 45367 - DNA, 285 bp, Zea mays
gcatccacagctgttctatgaggcgaagatgtacaataccctccaaggaggaagtggcattgctaacgtcaagtggtgcggtgtggatggagaagagaatgttctcgtcattgatttgctgggtccgagtttggaggacctgttttgttattgtggccggaaattcacgctgaagactgtcctgatgttggctgaccagatgattacaagaatagagttcatgcattccaaagggtacttacacagagacatcaaacctgacaactttctgatgggtcttggtcg

SEQ ID NO: 45368 - DNA, 281 bp, Zea mays
gagacgagacgagtcccctccccccacctcgcctcacccaaccggaacgaacaagttacaatctcatcccaaccccgcctcgaccggatctcgtcggactcggatccgcccgaccaccccgcgccgccgcagatcaaagaagatggcagctgtcgacacattcctcttcacctcggagtctgtgaacgagggacaccctgacaagctctgtgaccaggtctcagatgccgttcttgacgcttgccatgctgaggaccctgacagcaaggttgcttgtgaga

SEQ ID NO: 45369 - DNA, 259 bp, Zea mays
ctctgcagctgttccgtaggattccggctctctgtggatggcaggtcatgtgaagacatcaatgagtgcagcaccagcccctgtagccaggagtgtgccaacgtctacggctcctaccagtgttactgccggcgaggctaccagctcagcgatgtggatggagtcacctgtgcagacatcgatcgatcgcgcctgcccaacggaggccacatctgctctcaccgtgcatcaacatccctggaagcttacagtgcagctg

SEQ ID NO: 45370 - DNA, 284 bp, Zea mays
gcagttccccgaccacaccgttcctccgagcccaggagcagccccgcgccaggaggaagtttgttcttttaacaatatgtcgagggaggagaatgtttacatggccaagttggctgagcaggctgaaaggtatgaggagatggttgagtatatggagaaggtggctaagactgtagatgtggaagagctcactgttgaggagcgtaaccttctgtctgttgcatacaagaatgtgattggggctcgccgcgcttcatggcgcattgtttcttccattgaacaaa

SEQ ID NO: 45371 - DNA, 305 bp, Zea mays
gtacaaggcacaatttagtgatagataggttctagctgtgaagcaattaaacagtacaacactgccaaggcaatcatcagatgatttctatgagctggtgtcgaacatttcgaaattgcaccatcccaatctcagtgagcttgtgggctactgcatggagcacggacagcacttgcttgtttatgatttccacaggaatggttcactgcatgatatgctccatctctcagatgattataacaaaccacgtagttggaattctcgtgttaagattgcgttgggctctgcacgtgcactagagcatc

SEQ ID NO: 45372 - DNA, 270 bp, Zea mays
ggaaagaatgccattttgaaactaatggatgcagttgatgagtacattcctgatcctgtaaggcagcttgataaggctttcttgatgccgatagaagatgtgttttctatccagggtcgtggaactgttgttactgggcgtgttgagcagggaacaattaaaactggcgaagatgttgagatcttgggtttgacacagagtggtcccttgaagactacagttactggtgttgagatgttcaaaaagatatggacctggagaggtggtgac

SEQ ID NO: 45373 - DNA, 297 bp, Zea mays
cagttcggtagtccctctcctctcgaggtattagcagtcgaccggttcctcggagcacgatgaagtttgttgctgcctacctgcttgctgtcctcgctgggaacgccagcccctccgctgacgatttgactgccattctggagtcagttggctgtgaagttgacaatgaaaagatggaactcctgctgtcccaactgagcggtaaggacatcaccgagctcattgccgcgggcagggagaagtttgcttcagtcccatgtggtggcggcggtgtcgctgttgcggcactgcacctgc

SEQ ID NO: 45374 - DNA, 284 bp, Zea mays
ggaagccaattctggcccggctgaagtttctgagttgactggcccggatgtcatggaagagaagtgcgcttctgctgccatttgttttgtatcattccttccagacataccttgattcaaaggcagaaggaagaaacaagtaccttgagctcctgctctctgtagctgagaagtttaaaaagagtccatacagttttgtctggacagctgctggcaagcaagctaatctcgagaaccagttggtgtgggcggctacgctatcccgcctggtagctctcaagtga

SEQ ID NO: 45375 - DNA, 294 bp, Zea mays
gatttcatgtggaaagccttgagaagacagctcaagatgatttccaaaagcttgcatctgctgtttacctgcaagttagcaccatcagccaggccctcatcttcgtgacaaggtcccggagctggtcatttgtcgagcgcccagggtttctattggtactttgctttcttggttgcgcagctgattgccacactgattgctgtgtacgccgactgggcgttcacttcgatcaaaggcattgggtggggctgggctggcattgtgtggctgtacaacatctcttctacttccctc

SEQ ID NO: 45376 - DNA, 300 bp, Zea mays
gtcttcacatggtagtagtagatggagtacagatacacgtacagagcggttgacgctgcagaagaaaacgatgtcaggcttcttccagacaagtttctatttcggctacacgctgatgttctgccttggcctaggcatactttgtggagctattggctatctagggtcaaccctttttgtaaggagaatctacaggaatatcaaatgtgattaaatccctgctgcttaagctagcaacagaaagatcatatgtattgtcagtggaggcatggcctaaaaaaatggattttaatggtagac

SEQ ID NO: 45377 - DNA, 286 bp, Zea mays
ggaaaccctagccgccatatctcacgatccactcgagcaccaagccgagggaaggtgaggagcgatggcgcgcggcgtggtgtcggcgaagggcggcgcggtcgcgggcaagaagaaggggtcggtttccttcacgatcgactgcaccaagccagtggaggacaagatcatggaggtcgcctcgctcgagaagttcctgcaggagcgcatcaaggtcgccggcggcaaggctggcaacctcggcgactccgtcaccatctctcgcgagaagaccaaggtcacgtca

SEQ ID NO: 45378 - DNA, 291 bp, Zea mays
acagccacagcatcacgtccactcattagcaaggtagcccgtgctgcacctgcctgccagccgcagctgtcctgcctttgccttcccatagcatagccatggacatttggaagtccaaggtgttgcccaagatcaagctcgtcttcgtcaagagcgccggcaagaaggccgccgccgccgccgagctcgtcaagtccttcgacgagtccaaggaggggatcgatggcgagttccaggagaagaaggctgatctccagcccaaggtcgtcgagatctacgagtctgcccctg

SEQ ID NO: 45379 - DNA, 258 bp, Zea mays
cacaaccgtgcgaccgtccgtgctgccggcgaccccgatccgccgacccgtcccgtcccaccacaccctaccgccgctcgcagctatgtcgccgtcggagccgacgcgggaggagagcgtgtacatggccaagctggcagagcaggcggagcggtacgaggagatggtcgagttcatggagcgcgtcgcgcgctccgccggcggcgccgcgaggggaggagctatccgtggaggagcgcaacctgctgtccgtcgcct

SEQ ID NO: 45380 - DNA, 285 bp, Zea mays
gcacggacatcccggatcaacgagaaatcggatgtgtacagctacggcattgtcttgctggagctgcttaccggcaaagagcctgtcgacgacgagtgcaaccttcaccacttgatcctatccaaagccgcagagaacacggtcatggagacggtcgaccaggacatcaccgacacgtgcaaggtgctcggcgaggtcaagaaggtgttccagctggcgctcctttgcagcaagaggcagccgtcggatcgaccgaccatgcacgaggtcgcgcgcgtcctggac

SEQ ID NO: 45381 - DNA, 285 bp, Zea mays
cgcttatcatccgcgcctctacatttcttctctctctgctcctccgcctccgcctccgcctgatccatccaagacagggatcgccatgtcggactcggaggagcaccacttcgaatcgaaggccgacgctggggcgtccaagacctacccgcagcaggctggcaccgtccgtaagaacggcttcatcgtcatcaagaaccgtccctgcaggttgtggaggtttctacctccaagactggtaagcatggccacgccaaatgccactttgtcgccatagacatattc

SEQ ID NO: 45382 - DNA, 273 bp, Zea mays
cccatctcccaagacctcctcagacccgagaagagcagtgatcgccatggacgccaccggcactggagctggagggaaggcgaagaagggagcggccggtcgcaaggccggcgggccgaggaagaagtcggtgacgaggtccgtgaaggccgggctccagttacccgtcggccgcatcgggcgctaactcaagaaaggccgctacgcgcaggccatcggcagcggtgcccccgtctaactcgaggccgtcctggagtacctcgccgctgaggt

SEQ ID NO: 45383 - DNA, 281 bp, Zea mays
gattaccagattgtgccaggattcagggttcgcattataccagtattgggaaccatccctgcaatatttggtcaagttatggcctcctatgtggtcactcagcttgctggattagattttcaaactgaaccggttgttaacctggatttggatcattaccgtatacttcatcagcgtcttattgagcatgaggaactgatgtatggcacagccgagcaagttctggtagatgctgaagaggtaatgtacattgtcaaagaattgtggcgtggtcgaagtgc

SEQ ID NO: 45384 - DNA, 275 bp, Zea mays
tgagagcaagaaggctgtggagaactccccgttccttgagaagctgaagaagaggggctatgaggtgctgttcatggtggatgccattgacgagtattctattggacagctgaaggagtttgagggcaagaagctcgtctctgccaccaaggagggcctgaagctggacgagagtgaggatgagaagaagcgcaaggaggagctcaaggagaagtttgagggcctctgcaagtcatcaaggagtgctgggcgacaagtggagaaggtggtggtct

SEQ ID NO: 45385 - DNA, 280 bp, Zea mays
gaagaaggctttcacaaagtatgctctcaaatatgaaaatgatgctggcaagaaggaaattcagctgcagcttgagaagatgaagaaatatgcttctgttatccgtgtcattgctacatacccagattaggaagatgaagggtttgaaacagaagaaggctcacctgatggagattcaggtcaatggtggtaccattgctgacaaggtggactacggctacaaattttttgagaaagaggtccctgttgatgctgtcttccagaaggatgagatgattga

SEQ ID NO: 45386 - DNA, 288 bp, Zea mays
gtgttcaagcgcttcgtggaggttggccgggtggcctatgtctccgttggcactcatgccggaaaattggtcgcgattgtagatgttattgctcagaacagggctttggtcgatggaccttgcactcaagtgaggagacaggccatgcctttcaagtgcatgcagctcactgatttcatcctcacagtttccgcacagtgcacaccaggagtatgtccgacaagcctggcagaaggcagacatcaatacaacatgggcagccacacgatgggccaagaagattgaagc

SEQ ID NO: 45387 - DNA, 293 bp, Zea mays
caccagccgccgccatgtcgaagcgaggcaggggaggttcggcggggaacaagttccgcatgtcgctgggtctgccggttgccgcgacggtgaactgcgcggacaacacgggcgccaagaacctctacatcatctccgtcaagggcatcaagggccgcctcaaccgcctcccgtccgcctgcgttggcaacacggtcatggccaccgtcaagcatgggaagcccgatctcaagaacatggtgatgctcgccgtcatcgtccgccagcgctaccgtggcgccgcaagtcggtgt

SEQ ID NO: 45388 - DNA, 297 bp, Zea mays
gtactccatctatctcttccccacgaacgcttgcggcggcggcggaattaggaggcgatggggcactccaacgtctggaactcgcaccccaagaactacgggcccggatcccgcgtctgccgtgtctgtgcgaaccctcatggactgatcaggaagtacgggctgatgtgctgcaggcagtgcttccgcagcaatgccaaggacattggcttcatcaagtaccgctgaaatcaggtgggaatggaccatgtggtagaggcgaggctgtagttttatttccagtaatttagatgtttt

SEQ ID NO: 45389 - DNA, 240 bp, Zea mays
ctcccatatccgctcccctacctctccagcatctcccgtctccgtcgtctcgtctctgctcctcacctcgccgccagccatgggcaagatcaagatcggaatcaacggtttcggaaggatcggcaggctcgtggccagggtcgccctgcagagcgaggatgtcgagctcgtcgccgtcaacgaccccttcatcaccacggattacatgacctacatgttcaagtacgacaccgtgcacgg

SEQ ID NO: 45390 - DNA, 300 bp, Zea mays
ggctttcaagcattgatccagtatccagacattcaaactgcgtatgcagcaaaagaagcactagaagggcacagcatctatgaaggtggctactgcaaactgcacctcacattttcacgccatactgagcttaatgttaaggttaacaatgagcgaggtagagattataccaaggggaatgccactccaagcagtgatcaaccttccattcttggtcctcagccaataccaagcgttggtgctgctattccaccagcacagggtagtgttccttctgcagccaccaattcagtaatgcca

SEQ ID NO: 45391 - DNA, 292 bp, Zea mays
ggcggcaaccgattctggaagagcattggccttggcttcaagactcccagggaagcaatcgaagggacctacattgacaagaaatgcccattcactggaactgtttctatcagaggcagaattattgctgggacatgccacagtgctaagatgaacagaactatcattgttcgcaggaactacctccactttgtaaagaaataccagaggtatgagaagaggcactccaacattcctgctcacatctctccatgcttccgtgtgaaggaaggtgaccatgtcatcattggcc

SEQ ID NO: 45392 - DNA, 258 bp, Zea mays
agaagatccgcacgtccgtgacatttcaccgccccaagaccctgaagaaggctagggaccccaagtacccaagaatcagcactaccggaaggaacaagcttgatcagtaccaaattctcaagtatcccctcaccacagaatcggcgatgaagaagattgaagataacaacactcttgtcttcattgtcgacctcaaggcagacaagaagaagatcaaggctgctgtcaagaagatgtatgacattcaggccaagaggt

SEQ ID NO: 45393 - DNA, 267 bp, Zea mays
gttgacatctccaagccccgcattgaggcatggaacagcgacaccctcccgatctacgagcccggcctcgatgatgttgtgaagcagtgcaggggcaggaacctcttcttcagcactgatgttgagaagcacgtcgctgaggctgacatcatcttcgtctcggtgaacacccccaccaagacccgtgggcttggagctggcaaggctgccgacctcacctactgggagagcgctgctcgtatgatcgccgatgtctccaagtctgac

SEQ ID NO: 45394 - DNA, 288 bp, Zea mays
gtgcaacttcacagcgtatcatcgttttccatcgctcctactcctatcatccagaaaatctgagcggtattgatggcgcccaaggcggagaagaagccggcggcgaagaaggtggcggaggaggagccctcggagaaggcggctccggcggagaaggcccccgcggggaagaagcccaaggcggagaagcggctacctgcgggcaagttcgccggcaaggagggcggcgacaagaagggtaggaagaaggcgaagaagagcgtggagacctacaagatctacatcttc

SEQ ID NO: 45395 - DNA, 247 bp, Zea mays
cagttttcggtatgcctatctaaagggttaggcgcacccatcggatcagttgttgttggttcagaggccttcatcgacaaggctagaattcttaggaagaccctaggcggtgggatgaggcaggttggagttctttgtgccgctgcttatgttgctgttcgtgacaccgtgggaaagcttgcggatgatcacaggaaggctaaagccttggcagagggcctgaagaaaattaaacagcttacggtgg

SEQ ID NO: 45396 - DNA, 272 bp, Zea mays
ggtacggatgagaagacctttatccgcgttttcactgaacgcagctgaggcacacttggcatctgtttcgtctgcttaccatcatatgtatgaccggaaattagagaaggttatcaagagcgaaacatctggaaactttgaattcgcacttttagctatcctcagatgcgcggaaaacccagcaaagtattttgcaaactctttacgaaaggccatgaaaggtctaggcactgatgacaagacacttataagggttgtggtgacgaggactg

SEQ ID NO: 45397 - DNA, 289 bp, Zea mays
ctggacttgcttgccgttcacttctcttcagcggcacgtggcaaggcaacgagagcaacgaagagtattcaaaccgaaaacaatggatccggtgcggaagagcgtgtgcgtgaccggcgctggcggcttcgtcgcgtcggagctggtgaagctcctcctctcccggggccaatacgcggtccgcggcaccgtgcgcgaccctggtgctagcaagaatgcccatctcaaggtgctggaaggagctgaggaaaggttgcagcttctcaaggctgatctgatggactacgac

SEQ ID NO: 45398 - DNA, 293 bp, Zea mays
gaggggaagaaatattcttcccgtcgaaagacggagagaggaaaagggacaagggcaaggcaagagagaggcgtcgtcgtttgatctgctgccggagtgcgaagaggaagaggaagaggagcgccggagttgtaaagatgttcctggtggactggttctatggggtgctggcatcgcttgggctgtggcagaaggaggctaagatcctcttccttggcctcgacaacgccggcaagaccaccctcctccacatgctgaaggacgagcggctcgtacagcaccagccgacgcat

SEQ ID NO: 45399 - DNA, 293 bp, Zea mays
gtttctgcacagctgactaaaacaatgtctaggaggaagacatttgttggaactcccttttggatggcacctgaggttattcaaaattctgaagggtacaatgagaaggcagatatctggtctttaggtatcactgccattgaaatggctaaaggtgaaccccctctggcagatattcatcccatgagagttcttttcatcatacctcgtgaaaatcctccgcagcttgatgagcatttctcgaaaccaatgaaagagtttgtctcactatgtttaaagaagaatccagcaga

SEQ ID NO: 45400 - DNA, 280 bp, Zea mays
ggagaggaagcggaaagggcggcggcggcgcttgtggtcagtcaaagatccaacctccggactcgcgatggggcggcggatcctcaacgatgctctgcgcacgatggtcaacgcagaccggcgggggaacgcgtcggcgcttctccgacccatctccggcgtcatggtctccttcctcaacatcatgaagtaccgagggtatatcaaaaaatttgaggtcattgatgagaatagagttgggaaaattagagtggagcttgatggacgtcttaaagattgc

SEQ ID NO: 45401 - DNA, 258 bp, Zea mays
gttcctgaagatgtcaaatcgaacaaaagatatgcaggggcatcaaactggacagtaaaggaagttgttgaatcagtgaggaatgattttggcagcattgacatactagtgcattctcttgctaatggcccagaggtaacgaagcctttgttggaaacctcaagaagaggctatcttgcggcaatttctgcatccagttactcctatgtttcattgcttcagcacttccttcctataatgaatcccggtggtgctagc

SEQ ID NO: 45402 - DNA, 286 bp, Zea mays
aatcgtcagcagttccttcagccccaactccagatgttgctgaagcacaggccccagttgctgaggaggacgacgacgatgatgttgacctttttggtgaggagaccgaagatgagaagaaggctgctgaagagcgtgctgcagctgccaaggcttctggcaagaagaaagaatctgggaagtcatcagttttacttgatgtgaagccatgggacgatgagactgacatggccaagctcgaggaagctgttaggagtgtccagatggaagggttgctctggggcgc

SEQ ID NO: 45403 - DNA, 292 bp, Zea mays
ctatctagaagctcccctctccctccctccctctctctctctctcttcgccgtccgaagctccgcacccaatctaatcgacacctcaccgagatgggccgcaagttcttcgtcggtggcaactggaaatgcaatggaaccacagatcaggtcgagaagattgtcaaaaccctgaatgaaggacaggttcccccttcagatgttgtcgaggtcgttgtcagccctccttatgtcttccttcctgtggtcaagagccagctgcgccaagagttccatgttgctgctcagaactg

SEQ ID NO: 45404 - DNA, 274 bp, Zea mays
ggacctgacgctggaccgcacgtccggctccgggttccagtccaagagcgagttcctgttcggcaagatcgacatgcagatcaagctggtgccaggcaactccgctggcacggtcaccaccttctacctgtcgtcccagggcgacgcgcacgacgagatcgacttcgagttcctgggcaacgtgagcggggagccctacacgctgcacaccaacgtgttcacgcgcggacagggccagcgggagcagcagttccgcctctggttcgaccctacc

SEQ ID NO: 45405 - DNA, 277 bp, Zea mays
ggcaatgtacaatatctgatgcaatgcaaatgtgctgttaacacagccgaagattggcttaaccctgttgccatacaagaggcgtttgaagcccgggctctcaggatggcagtaaactgtgcccagaacataggccaagcagcaaaccaagaagaaggtttctatgagcggtcccctgatttgctagaggctgcagtagctcacatccagttggtcattgtaaccaagttcattgcgaaggtacagcaggacattcctggacctggagtgaaggaac

SEQ ID NO: 45406 - DNA, 244 bp, Zea mays
ctggaggggaacttcatctacgccagctcgttgatctcgtcgaggtacggcatgaaatggtcatggtggtctaggatgaagagccagtcgttcctcgacgagatcaacgagctggaggggaacttcatctacgccagcaggatcctactgttcctgaaggacgatggcacgctgaagcccctggtcatcgatctgagcctgcttcaccctgacggccagcagcgcggcgctgtcagcaaggtgt

SEQ ID NO: 45407 - DNA, 277 bp, Zea mays
gatccttggtcgaggagggtttggcactgtttacaagggtgaacttcatgatggcacgaaaattgctgtaaagcggatggaggctggtgtgatgggtaacaaggggctaaatgagtttaaatcagagattgctgttttgaccaaggttcgtcaccggaaccttgtttcgctgctgggctactgccttgatggcaatgagaggattcttgtgtatgagtacatgccacaggggacactgagccaacacctgtttgagtggtcagagaacaatttgcga

SEQ ID NO: 45408 - DNA, 271 bp, Zea mays
gcagaaacctctggaaaaagatgctggagaaaagaccatagcctggttggacaagctgaggaatgcgaatgggtcattgccaacttccaagatccgtctcaacatgcagcgtgttatgcaaaataatgctgctgtattccgtacacaagaaacacttgaagaaggttgtgagctgattagcaaaacatgggaaagtttccatgatactgagctcagtgaccacagtctctttggaactcgaccgatagagaccctgagctggaaaatcttt

SEQ ID NO: 45409 - DNA, 267 bp, Zea mays
gtctagtctcgccgccgtcgcaactcccacccgatccccaaattctccggcggtgatggccagcctgtgttgcgccgtgatggatagcgtcacgtctcctccccctcggcgctggacgcggccccaggtagcggcgtcgagttctggcacggcgcagagcgcgctgggtggctaaataagcagggcgagtacatcaagacgtggaggcggcggtggttcgtgctgaagcaggggaggcttttctggttcaaggaccctgcggtgaca

SEQ ID NO: 45410 - DNA, 277 bp, Zea mays
atacgaagggattggaggggattgagagcctccaatccctccgtgacccccttgtcacgtaatgaaccctcatagcctctaacatccaccacctcgtggtccatactagggctttttcggttattcctgtccatgtggattagatgagattgtgaaaaaatatgaaggattttaacttgtttgagatttaaacccacccaatcccattcaatccacatggattgagagaaaagcgaacaaaccctaaatagaagaaaaacaaattactattggatta

SEQ ID NO: 45411 - DNA, 274 bp, Zea mays
acaacgtcaagagtgagctcaagaggatatctgcgcccaatgccaggcaggctacccgggaggagctcctggagtctggaatggctgatactctcgcggtgtctactgatcagaggggaagattgatgatgacaactgaaagactgaatcagtccactgacagaattaaagagagccgaagaactatgttggagacagaagaacttggtgtctcgattcttcaggaccttcaccaacagaggcagtcactactacatgctcatactactttgca

SEQ ID NO: 45412 - DNA, 274 bp, Zea mays
tcctcttcttccgtcgctctcgctctcggtctcggactacggttgagcgaagtcgtcactgtaatctactgatctgcaaatggcggaggcggaggcgacggtggggcgactgatgctgtactcgtactggcgcagtcgtgctcccaccgtgcccgcatcgctctcaatctcaaaggtgtggattacgagtacaaggcggtgaaccttctcaagggcgagcagtctgatccagaattcgtcaagcttaatcctatgaagttcgtccctgcgttgg

SEQ ID NO: 45413 - DNA, 275 bp, Zea mays
ggtgatgcccagcatgttgaggaggccgagaagatgggacttgactacatggatgttgaggctctcaagaaaatgaacaagaacaagaagcttgttaagaggcttgccaagaagtaccatgctttcttggcatcagaggccatcatcaagcagattccccgtctccttggtcctggtctcaacaaggcaggcaagttcccgaccctggttactcaccaggaatccctcgagtccaaggtgaacgagactaaggcaaccgtcaagttccagctcaa

SEQ ID NO: 45414 - DNA, 302 bp, Zea mays
cctcgtaccatttcgatccaatggcgccgacgtcgaagctgtcgacgggcatcaagcgcgcttcgcggtcgcacgcgtaccatcgccgtgggctgtgggccatcaaggccaagaacggcggcgccttccccaaggccgacaaggccgccgccgccgtggaacccaagttctaccctgccgacgacgtcaagccccgcgttcccagcacccgcaagcctaagcctaccaagctcaggtcgagcatcacgcctgggacggtgctgatcctcctcgcagggcgcttcatggggaagagagtggtg

SEQ ID NO: 45415 - DNA, 301 bp, Zea mays
gggttttgctgctctccgaccccgagctccgaaggccgcagcatcaggcgcggcccccctcgcgtgtgaccgagatggcgctgccgaatcaggggaccgttgattaccccagcttcaagctcgtcatcgtcggcgatggacgaactggtaaaactacatttgtgaagaggcatctcactggagagtttgagaagaaatatgaaccaaccattggtgtggaagttcatccgttggatttcaccactaactgtggtaagatcaggttctactgctgggataccgcagggcaagagaatttggt

SEQ ID NO: 45416 - DNA, 277 bp, Zea mays
gtcgaacagaagctctcgatctcaccgacaccgaggaagaagagatcaatggcgtccgagcagggagtcgtgatcgcgtgccacagcaaggctgagttcgacgcccacatgaccaaggcccaggaagccggcaagctggtggtcatcgacttcactgccgcctggtgcggtccatgccgcgccatcgccccactgttcgtcgaacacgccaagaagttcactcaggtcgtcttcctgaaggtggacgtggacgaatgaaggaagtcacgcggcctac

SEQ ID NO: 45417 - DNA, 290 bp, Zea mays
gtctccagccaaccacatccagtccaccccatccccctcgaccccgacaaccccgagtcccgacccgatggcgcccaaggccgagaagaagccagcggagaagaagccggcggccgaggagaaggcggagaagacgaccgcaggcaagaagcccaagtccgagaagcgcctgcccgcctcgaagtcctccggcaaggagggcggcgagaagaaggggaagaagaaggccaagaagagcgtggagacctacaaaatctacatcttcaaggtcctaaagcaggtgcaccccg

SEQ ID NO: 45418 - DNA, 287 bp, Zea mays
attcctcccatctcacaagaactcctcagacccgagaagcgcaatgcggacatggacgacaccggcactggagctggagggaaggcgaagaagggagcggccggtcgcaaggtcggcgggccgaggaagaagtcggtgacgaggtccgtgaaggccgagctaccgttccccgtcggccgcatcgggcgctacctcaagaagggccgctacgcgcaggcgtacggcagcggtgcacacgtctaactcgcggacgtcctggagatactcgccgctgaagtcctggagct

SEQ ID NO: 45419 - DNA, 299 bp, Zea mays
gtagttccgtttccatacttccggcgcggcggagatcgaatcgagcgcccgccacggcgatggcgactagagtcctgccaccggctctgctctctttcatactcctgctgctgctctcgctctcagcccgcgacaccgtcgccgcgggcgaggatttcccacgcgacgggcgggtgatcgacctcgacgacagcaatttcgaggcggcgctgggcgccatcgactttctcttcgtcgacttctacgccccttggtgcggccactgcaagagacttgcgcccgagttagatgaagctgca

SEQ ID NO: 45420 - DNA, 250 bp, Zea mays
gcgcttgtcgcggcgctcctcgcgttcgctctcgcgcagtcctccaagttcttcaccacctggtacaaagaaggtcggtgggatgccagacaacttatagcttctggcgggatgccatcatcccactcagctacagtgacagcactttcagtggctgtgggaatccaagaaggctttcgtagtgcaacatttgcaactgcactagtctttgcatgtgtggttatgcatgatgcttttggagttcggttac
